United States Patent Application Publication US 2016/0281171 A1 - sequence listing, part 7

SEQ ID NO: 143949 - DNA, 71 bp, Homo sapiens
tccgcaatttacatttttaaacactggttctattattggacgagatgatatgtaaatgtgatccccccccc

SEQ ID NO: 143950 - DNA, 69 bp, Homo sapiens
atttttaaacactggttctattattggacgagatgatatgtaaatgtgatcccccccccccgcttacaa

SEQ ID NO: 143951 - DNA, 75 bp, Homo sapiens
actggttctattattggacgagatgatatgtaaatgtgatcccccccccccgcttacaactctacacatctgtga

SEQ ID NO: 143952 - DNA, 74 bp, Homo sapiens
tattattggacgagatgatatgtaaatgtgatcccccccccccgcttacaactctacacatctgtgaccacttt

SEQ ID NO: 143953 - DNA, 73 bp, Homo sapiens
tgatatgtaaatgtgatcccccccccccgcttacaactctacacatctgtgaccacttttaataatatcaagt

SEQ ID NO: 143954 - DNA, 73 bp, Homo sapiens
taaatgtgatcccccccccccgcttacaactctacacatctgtgaccacttttaataatatcaagtttgcata

SEQ ID NO: 143955 - DNA, 74 bp, Homo sapiens
ccccccccgcttacaactctacacatctgtgaccacttttaataatatcaagtttgcatagtcatggaacacaa

SEQ ID NO: 143956 - DNA, 78 bp, Homo sapiens
ctctacacatctgtgaccacttttaataatatcaagtttgcatagtcatggaacacaaatcaaacaagtactgtagta

SEQ ID NO: 143957 - DNA, 76 bp, Homo sapiens
gaccacttttaataatatcaagtttgcatagtcatggaacacaaatcaaacaagtactgtagtattacagtgacag

SEQ ID NO: 143958 - DNA, 77 bp, Homo sapiens
taataatatcaagtttgcatagtcatggaacacaaatcaaacaagtactgtagtattacagtgacaggaatcttaaa

SEQ ID NO: 143959 - DNA, 80 bp, Homo sapiens
cacaaatcaaacaagtactgtagtattacagtgacaggaatcttaaaataccatctggtgctgaatatatgatgtactga

SEQ ID NO: 143960 - DNA, 78 bp, Homo sapiens
caaacaagtactgtagtattacagtgacaggaatcttaaaataccatctggtgctgaatatatgatgtactgaaatac

SEQ ID NO: 143961 - DNA, 78 bp, Homo sapiens
agtattacagtgacaggaatcttaaaataccatctggtgctgaatatatgatgtactgaaatactggaattatggctt

SEQ ID NO: 143962 - DNA, 78 bp, Homo sapiens
acagtgacaggaatcttaaaataccatctggtgctgaatatatgatgtactgaaatactggaattatggctttttgaa

SEQ ID NO: 143963 - DNA, 77 bp, Homo sapiens
ggaatcttaaaataccatctggtgctgaatatatgatgtactgaaatactggaattatggctttttgaaatgcagtt

SEQ ID NO: 143964 - DNA, 78 bp, Homo sapiens
ataccatctggtgctgaatatatgatgtactgaaatactggaattatggctttttgaaatgcagtttttactgtaatc

SEQ ID NO: 143965 - DNA, 75 bp, Homo sapiens
ggtgctgaatatatgatgtactgaaatactggaattatggctttttgaaatgcagtttttactgtaatcttaact

SEQ ID NO: 143966 - DNA, 71 bp, Homo sapiens
atatgatgtactgaaatactggaattatggctttttgaaatgcagtttttactgtaatcttaacttttatt

SEQ ID NO: 143967 - DNA, 69 bp, Homo sapiens
ctgaaatactggaattatggctttttgaaatgcagtttttactgtaatcttaacttttatttatcaaaa

SEQ ID NO: 143968 - DNA, 72 bp, Homo sapiens
tatggctttttgaaatgcagtttttactgtaatcttaacttttatttatcaaaatagctacaggaaacatga

SEQ ID NO: 143969 - DNA, 73 bp, Homo sapiens
tgaaatgcagtttttactgtaatcttaacttttatttatcaaaatagctacaggaaacatgaatagcaggaaa

SEQ ID NO: 143970 - DNA, 73 bp, Homo sapiens
tttatttatcaaaatagctacaggaaacatgaatagcaggaaaacactgaatttgtttggatgttctaagaaa

SEQ ID NO: 143971 - DNA, 76 bp, Homo sapiens
tcaaaatagctacaggaaacatgaatagcaggaaaacactgaatttgtttggatgttctaagaaatggtgctaaga

SEQ ID NO: 143972 - DNA, 74 bp, Homo sapiens
agctacaggaaacatgaatagcaggaaaacactgaatttgtttggatgttctaagaaatggtgctaagaaaatg

SEQ ID NO: 143973 - DNA, 73 bp, Homo sapiens
gaatagcaggaaaacactgaatttgtttggatgttctaagaaatggtgctaagaaaatggtgtctttaatagc

SEQ ID NO: 143974 - DNA, 72 bp, Homo sapiens
gcaggaaaacactgaatttgtttggatgttctaagaaatggtgctaagaaaatggtgtctttaatagctaaa

SEQ ID NO: 143975 - DNA, 71 bp, Homo sapiens
ctgaatttgtttggatgttctaagaaatggtgctaagaaaatggtgtctttaatagctaaaaatttaatgc

SEQ ID NO: 143976 - DNA, 77 bp, Homo sapiens
gaaatggtgctaagaaaatggtgtctttaatagctaaaaatttaatgcctttatatcatcaagatgctatcagtgta

SEQ ID NO: 143977 - DNA, 78 bp, Homo sapiens
tggtgtctttaatagctaaaaatttaatgcctttatatcatcaagatgctatcagtgtactccagtgcccttgaataa

SEQ ID NO: 143978 - DNA, 76 bp, Homo sapiens
aatagctaaaaatttaatgcctttatatcatcaagatgctatcagtgtactccagtgcccttgaataataggggta

SEQ ID NO: 143979 - DNA, 77 bp, Homo sapiens
tttaatgcctttatatcatcaagatgctatcagtgtactccagtgcccttgaataataggggtaccttttcattcaa

SEQ ID NO: 143980 - DNA, 75 bp, Homo sapiens
tttatatcatcaagatgctatcagtgtactccagtgcccttgaataataggggtaccttttcattcaagttttta

SEQ ID NO: 143981 - DNA, 74 bp, Homo sapiens
atcaagatgctatcagtgtactccagtgcccttgaataataggggtaccttttcattcaagtttttatcataat

SEQ ID NO: 143982 - DNA, 71 bp, Homo sapiens
ctatcagtgtactccagtgcccttgaataataggggtaccttttcattcaagtttttatcataattaccta

SEQ ID NO: 143983 - DNA, 70 bp, Homo sapiens
cagtgcccttgaataataggggtaccttttcattcaagtttttatcataattacctattcttacacaagc

SEQ ID NO: 143984 - DNA, 68 bp, Homo sapiens
ccttgaataataggggtaccttttcattcaagtttttatcataattacctattcttacacaagcttag

SEQ ID NO: 143985 - DNA, 66 bp, Homo sapiens
gggtaccttttcattcaagtttttatcataattacctattcttacacaagcttagtttttaaaatg

SEQ ID NO: 143986 - DNA, 69 bp, Homo sapiens
tttatcataattacctattcttacacaagcttagtttttaaaatgtggacattttaaaggcctctggat

SEQ ID NO: 143987 - DNA, 71 bp, Homo sapiens
tacctattcttacacaagcttagtttttaaaatgtggacattttaaaggcctctggattttgctcatccag

SEQ ID NO: 143988 - DNA, 71 bp, Homo sapiens
attcttacacaagcttagtttttaaaatgtggacattttaaaggcctctggattttgctcatccagtgaag

SEQ ID NO: 143989 - DNA, 75 bp, Homo sapiens
ggacattttaaaggcctctggattttgctcatccagtgaagtccttgtaggacaataaacgtatatatgtacata

SEQ ID NO: 143990 - DNA, 74 bp, Homo sapiens
cacacatgtatatgtataaatattttaaatggtgttttagaagcactttgtctacctaagctttgacaacttga

SEQ ID NO: 143991 - DNA, 72 bp, Homo sapiens
atgtataaatattttaaatggtgttttagaagcactttgtctacctaagctttgacaacttgaacaatgcta

SEQ ID NO: 143992 - DNA, 71 bp, Homo sapiens
attttaaatggtgttttagaagcactttgtctacctaagctttgacaacttgaacaatgctaaggtactga

SEQ ID NO: 143993 - DNA, 73 bp, Homo sapiens
taaatggtgttttagaagcactttgtctacctaagctttgacaacttgaacaatgctaaggtactgagatgtt

SEQ ID NO: 143994 - DNA, 73 bp, Homo sapiens
atggtgttttagaagcactttgtctacctaagctttgacaacttgaacaatgctaaggtactgagatgtttaa

SEQ ID NO: 143995 - DNA, 72 bp, Homo sapiens
gtgttttagaagcactttgtctacctaagctttgacaacttgaacaatgctaaggtactgagatgtttaaaa

SEQ ID NO: 143996 - DNA, 71 bp, Homo sapiens
agaagcactttgtctacctaagctttgacaacttgaacaatgctaaggtactgagatgtttaaaaaacaag

SEQ ID NO: 143997 - DNA, 70 bp, Homo sapiens
agcactttgtctacctaagctttgacaacttgaacaatgctaaggtactgagatgtttaaaaaacaagtt

SEQ ID NO: 143998 - DNA, 70 bp, Homo sapiens
gtctacctaagctttgacaacttgaacaatgctaaggtactgagatgtttaaaaaacaagtttactttca

SEQ ID NO: 143999 - DNA, 69 bp, Homo sapiens
ctacctaagctttgacaacttgaacaatgctaaggtactgagatgtttaaaaaacaagtttactttcat

SEQ ID NO: 144000 - DNA, 72 bp, Homo sapiens
gctttgacaacttgaacaatgctaaggtactgagatgtttaaaaaacaagtttactttcattttagaatgca

SEQ ID NO: 144001 - DNA, 69 bp, Homo sapiens
caacttgaacaatgctaaggtactgagatgtttaaaaaacaagtttactttcattttagaatgcaaagt

SEQ ID NO: 144002 - DNA, 70 bp, Homo sapiens
tgaacaatgctaaggtactgagatgtttaaaaaacaagtttactttcattttagaatgcaaagttgattt

SEQ ID NO: 144003 - DNA, 66 bp, Homo sapiens
ggtactgagatgtttaaaaaacaagtttactttcattttagaatgcaaagttgatttttttaagga

SEQ ID NO: 144004 - DNA, 64 bp, Homo sapiens
tgtttaaaaaacaagtttactttcattttagaatgcaaagttgatttttttaaggaaacaaaga

SEQ ID NO: 144005 - DNA, 64 bp, Homo sapiens
aacaagtttactttcattttagaatgcaaagttgatttttttaaggaaacaaagaaagctttta

SEQ ID NO: 144006 - DNA, 64 bp, Homo sapiens
tactttcattttagaatgcaaagttgatttttttaaggaaacaaagaaagcttttaaaatattt

SEQ ID NO: 144007 - DNA, 77 bp, Homo sapiens
gcttttaaaatatttttgcttttagccatgcatctgctgatgagcaattgtgtccatttttaacacagccagttaaa

SEQ ID NO: 144008 - DNA, 78 bp, Homo sapiens
aaaatatttttgcttttagccatgcatctgctgatgagcaattgtgtccatttttaacacagccagttaaatccacca

SEQ ID NO: 144009 - DNA, 80 bp, Homo sapiens
ttttagccatgcatctgctgatgagcaattgtgtccatttttaacacagccagttaaatccaccatggggcttactggat

SEQ ID NO: 144010 - DNA, 77 bp, Homo sapiens
atctgctgatgagcaattgtgtccatttttaacacagccagttaaatccaccatggggcttactggattcaagggaa

SEQ ID NO: 144011 - DNA, 73 bp, Homo sapiens
tgagcaattgtgtccatttttaacacagccagttaaatccaccatggggcttactggattcaagggaatacgt

SEQ ID NO: 144012 - DNA, 71 bp, Homo sapiens
gtccatttttaacacagccagttaaatccaccatggggcttactggattcaagggaatacgttagtccaca

SEQ ID NO: 144013 - DNA, 69 bp, Homo sapiens
tttttaacacagccagttaaatccaccatggggcttactggattcaagggaatacgttagtccacaaaa

SEQ ID NO: 144014 - DNA, 70 bp, Homo sapiens
aacacagccagttaaatccaccatggggcttactggattcaagggaatacgttagtccacaaaacatgtt

SEQ ID NO: 144015 - DNA, 70 bp, Homo sapiens
agccagttaaatccaccatggggcttactggattcaagggaatacgttagtccacaaaacatgttttctg

SEQ ID NO: 144016 - DNA, 73 bp, Homo sapiens
ttaaatccaccatggggcttactggattcaagggaatacgttagtccacaaaacatgttttctggtgctcatc

SEQ ID NO: 144017 - DNA, 77 bp, Homo sapiens
accatggggcttactggattcaagggaatacgttagtccacaaaacatgttttctggtgctcatctcacatgctata

SEQ ID NO: 144018 - DNA, 77 bp, Homo sapiens
ttactggattcaagggaatacgttagtccacaaaacatgttttctggtgctcatctcacatgctatactgtaaaaca

SEQ ID NO: 144019 - DNA, 75 bp, Homo sapiens
gattcaagggaatacgttagtccacaaaacatgttttctggtgctcatctcacatgctatactgtaaaacagttt

SEQ ID NO: 144020 - DNA, 74 bp, Homo sapiens
attcaagggaatacgttagtccacaaaacatgttttctggtgctcatctcacatgctatactgtaaaacagttt

SEQ ID NO: 144021 - DNA, 79 bp, Homo sapiens
ggtgctcatctcacatgctatactgtaaaacagttttatacaaaattgtatgacaagttcattgctcaaaaatgtacag

SEQ ID NO: 144022 - DNA, 72 bp, Homo sapiens
gctatactgtaaaacagttttatacaaaattgtatgacaagttcattgctcaaaaatgtacagttttaagaa

SEQ ID NO: 144023 - DNA, 70 bp, Homo sapiens
cagttttatacaaaattgtatgacaagttcattgctcaaaaatgtacagttttaagaattttctattaac

SEQ ID NO: 144024 - DNA, 79 bp, Homo sapiens
gacaagttcattgctcaaaaatgtacagttttaagaattttctattaactgcaggtaataattagctgcatgctgcaga

SEQ ID NO: 144025 - DNA, 79 bp, Homo sapiens
cattgctcaaaaatgtacagttttaagaattttctattaactgcaggtaataattagctgcatgctgcagactcaacaa

SEQ ID NO: 144026 - DNA, 78 bp, Homo sapiens
aatgtacagttttaagaattttctattaactgcaggtaataattagctgcatgctgcagactcaacaaagctagttca

SEQ ID NO: 144027 - DNA, 78 bp, Homo sapiens
agttttaagaattttctattaactgcaggtaataattagctgcatgctgcagactcaacaaagctagttcactgaagc

SEQ ID NO: 144028 - DNA, 81 bp, Homo sapiens
attttctattaactgcaggtaataattagctgcatgctgcagactcaacaaagctagttcactgaagcctatgctatttta

SEQ ID NO: 144029 - DNA, 86 bp, Homo sapiens
taactgcaggtaataattagctgcatgctgcagactcaacaaagctagttcactgaagcctatgctattttatggatcataggctc

SEQ ID NO: 144030 - DNA, 87 bp, Homo sapiens
atgctgcagactcaacaaagctagttcactgaagcctatgctattttatggatcataggctcttcagagaactgaatggcagtctgc

SEQ ID NO: 144031 - DNA, 81 bp, Homo sapiens
actcaacaaagctagttcactgaagcctatgctattttatggatcataggctcttcagagaactgaatggcagtctgcctt

SEQ ID NO: 144032 - DNA, 83 bp, Homo sapiens
tagttcactgaagcctatgctattttatggatcataggctcttcagagaactgaatggcagtctgcctttgtgttgataatta

SEQ ID NO: 144033 - DNA, 82 bp, Homo sapiens
aagcctatgctattttatggatcataggctcttcagagaactgaatggcagtctgcctttgtgttgataattatgtacattg

SEQ ID NO: 144034 - DNA, 83 bp, Homo sapiens
tattttatggatcataggctcttcagagaactgaatggcagtctgcctttgtgttgataattatgtacattgtgacgttgtca

SEQ ID NO: 144035 - DNA, 83 bp, Homo sapiens
tatggatcataggctcttcagagaactgaatggcagtctgcctttgtgttgataattatgtacattgtgacgttgtcatttct

SEQ ID NO: 144036 - DNA, 78 bp, Homo sapiens
ctgaatggcagtctgcctttgtgttgataattatgtacattgtgacgttgtcatttcttagcttaagtgtcctcttta

SEQ ID NO: 144037 - DNA, 77 bp, Homo sapiens
tttgtgttgataattatgtacattgtgacgttgtcatttcttagcttaagtgtcctctttaacaagaggattgagca

SEQ ID NO: 144038 - DNA, 81 bp, Homo sapiens
attgtgacgttgtcatttcttagcttaagtgtcctctttaacaagaggattgagcagactgatgcctgcataagatgaata

SEQ ID NO: 144039 - DNA, 79 bp, Homo sapiens
tcatttcttagcttaagtgtcctctttaacaagaggattgagcagactgatgcctgcataagatgaataaacagggtta

SEQ ID NO: 144040 - DNA, 78 bp, Homo sapiens
ttagcttaagtgtcctctttaacaagaggattgagcagactgatgcctgcataagatgaataaacagggttagttcca

SEQ ID NO: 144041 - DNA, 80 bp, Homo sapiens
agtgtcctctttaacaagaggattgagcagactgatgcctgcataagatgaataaacagggttagttccatgtgaatctg

SEQ ID NO: 144042 - DNA, 80 bp, Homo sapiens
ttaacaagaggattgagcagactgatgcctgcataagatgaataaacagggttagttccatgtgaatctgtcagttaaaa

SEQ ID NO: 144043 - DNA, 78 bp, Homo sapiens
attgagcagactgatgcctgcataagatgaataaacagggttagttccatgtgaatctgtcagttaaaaagaaacaaa

SEQ ID NO: 144044 - DNA, 73 bp, Homo sapiens
gcataagatgaataaacagggttagttccatgtgaatctgtcagttaaaaagaaacaaaaacaggcagctggt

SEQ ID NO: 144045 - DNA, 72 bp, Homo sapiens
taaacagggttagttccatgtgaatctgtcagttaaaaagaaacaaaaacaggcagctggtttgctgtggtg

SEQ ID NO: 144046 - DNA, 70 bp, Homo sapiens
agaaacaaaaacaggcagctggtttgctgtggtggttttaaatcattaatttgtataaagaagtgaaaga

SEQ ID NO: 144047 - DNA, 71 bp, Homo sapiens
aaacaggcagctggtttgctgtggtggttttaaatcattaatttgtataaagaagtgaaagagttgtatag

SEQ ID NO: 144048 - DNA, 71 bp, Homo sapiens
cagctggtttgctgtggtggttttaaatcattaatttgtataaagaagtgaaagagttgtatagtaaatta

SEQ ID NO: 144049 - DNA, 69 bp, Homo sapiens
gctgtggtggttttaaatcattaatttgtataaagaagtgaaagagttgtatagtaaattaaattgtaa

SEQ ID NO: 144050 - DNA, 65 bp, Homo sapiens
aatcattaatttgtataaagaagtgaaagagttgtatagtaaattaaattgtaaacaaaactttt

SEQ ID NO: 144051 - DNA, 68 bp, Homo sapiens
ttgtataaagaagtgaaagagttgtatagtaaattaaattgtaaacaaaacttttttaatgcaatgct

SEQ ID NO: 144052 - DNA, 67 bp, Homo sapiens
gaagtgaaagagttgtatagtaaattaaattgtaaacaaaacttttttaatgcaatgctttagtatt

SEQ ID NO: 144053 - DNA, 67 bp, Homo sapiens
gagttgtatagtaaattaaattgtaaacaaaacttttttaatgcaatgctttagtattttagtactg

SEQ ID NO: 144054 - DNA, 65 bp, Homo sapiens
tagtaaattaaattgtaaacaaaacttttttaatgcaatgctttagtattttagtactgtaaaaa

SEQ ID NO: 144055 - DNA, 63 bp, Homo sapiens
aaattgtaaacaaaacttttttaatgcaatgctttagtattttagtactgtaaaaaaattaaa

SEQ ID NO: 144056 - DNA, 90 bp, Homo sapiens
atatatatatatgagtttgaagcagaattcacatcatgatggtgctactcagcctgctacaaatatatcataatgtgagctaagaattca

SEQ ID NO: 144057 - DNA, 89 bp, Homo sapiens
tatatatgagtttgaagcagaattcacatcatgatggtgctactcagcctgctacaaatatatcataatgtgagctaagaattcattaa

SEQ ID NO: 144058 - DNA, 87 bp, Homo sapiens
tttgaagcagaattcacatcatgatggtgctactcagcctgctacaaatatatcataatgtgagctaagaattcattaaatgtttga

SEQ ID NO: 144059 - DNA, 86 bp, Homo sapiens
aattcacatcatgatggtgctactcagcctgctacaaatatatcataatgtgagctaagaattcattaaatgtttgagtgatgttc

SEQ ID NO: 144060 - DNA, 84 bp, Homo sapiens
tggtgctactcagcctgctacaaatatatcataatgtgagctaagaattcattaaatgtttgagtgatgttcctacttgtcata

SEQ ID NO: 144061 - DNA, 83 bp, Homo sapiens
tcagcctgctacaaatatatcataatgtgagctaagaattcattaaatgtttgagtgatgttcctacttgtcatatacctcaa

SEQ ID NO: 144062 - DNA, 81 bp, Homo sapiens
gctacaaatatatcataatgtgagctaagaattcattaaatgtttgagtgatgttcctacttgtcatatacctcaacacta

SEQ ID NO: 144063 - DNA, 78 bp, Homo sapiens
taatgtgagctaagaattcattaaatgtttgagtgatgttcctacttgtcatatacctcaacactagtttggcaatag

SEQ ID NO: 144064 - DNA, 78 bp, Homo sapiens
gctaagaattcattaaatgtttgagtgatgttcctacttgtcatatacctcaacactagtttggcaataggatattga

SEQ ID NO: 144065 - DNA, 78 bp, Homo sapiens
ttaaatgtttgagtgatgttcctacttgtcatatacctcaacactagtttggcaataggatattgaactgagagtgaa

SEQ ID NO: 144066 - DNA, 80 bp, Homo sapiens
tgtttgagtgatgttcctacttgtcatatacctcaacactagtttggcaataggatattgaactgagagtgaaagcattg

SEQ ID NO: 144067 - DNA, 79 bp, Homo sapiens
ttcctacttgtcatatacctcaacactagtttggcaataggatattgaactgagagtgaaagcattgtgtaccatcatt

SEQ ID NO: 144068 - DNA, 73 bp, Homo sapiens
aacactagtttggcaataggatattgaactgagagtgaaagcattgtgtaccatcatttttttccaagtcctt

SEQ ID NO: 144069 - DNA, 71 bp, Homo sapiens
agtttggcaataggatattgaactgagagtgaaagcattgtgtaccatcatttttttccaagtcctttttt

SEQ ID NO: 144070 - DNA, 66 bp, Homo sapiens
aactgagagtgaaagcattgtgtaccatcatttttttccaagtccttttttttattgttaaaaaaa

SEQ ID NO: 144071 - DNA, 67 bp, Homo sapiens
tgttaaaaaaaaaagcataccttttttcaatacttgatttcttagcaagtataacttgaacttcaac

SEQ ID NO: 144072 - DNA, 67 bp, Homo sapiens
aaaagcataccttttttcaatacttgatttcttagcaagtataacttgaacttcaacctttttgttc

SEQ ID NO: 144073 - DNA, 67 bp, Homo sapiens
cataccttttttcaatacttgatttcttagcaagtataacttgaacttcaacctttttgttctaaaa

SEQ ID NO: 144074 - DNA, 70 bp, Homo sapiens
tacttgatttcttagcaagtataacttgaacttcaacctttttgttctaaaaattcagggatatttcagc

SEQ ID NO: 144075 - DNA, 73 bp, Homo sapiens
ttcttagcaagtataacttgaacttcaacctttttgttctaaaaattcagggatatttcagctcatgctctcc

SEQ ID NO: 144076 - DNA, 73 bp, Homo sapiens
aagtataacttgaacttcaacctttttgttctaaaaattcagggatatttcagctcatgctctccctatgcca

SEQ ID NO: 144077 - DNA, 76 bp, Homo sapiens
ttgaacttcaacctttttgttctaaaaattcagggatatttcagctcatgctctccctatgccaacatgtcacctg

SEQ ID NO: 144078 - DNA, 76 bp, Homo sapiens
tttttgttctaaaaattcagggatatttcagctcatgctctccctatgccaacatgtcacctgtgtttatgtaaaa

SEQ ID NO: 144079 - DNA, 77 bp, Homo sapiens
aaattcagggatatttcagctcatgctctccctatgccaacatgtcacctgtgtttatgtaaaattgttgtaggtta

SEQ ID NO: 144080 - DNA, 78 bp, Homo sapiens
gatatttcagctcatgctctccctatgccaacatgtcacctgtgtttatgtaaaattgttgtaggttaataaatatat

SEQ ID NO: 144081 - DNA, 76 bp, Homo sapiens
agctcatgctctccctatgccaacatgtcacctgtgtttatgtaaaattgttgtaggttaataaatatattctttg

SEQ ID NO: 144082 - DNA, 73 bp, Homo sapiens
ctccctatgccaacatgtcacctgtgtttatgtaaaattgttgtaggttaataaatatattctttgtcaggga

SEQ ID NO: 144083 - DNA, 71 bp, Homo sapiens
gccaacatgtcacctgtgtttatgtaaaattgttgtaggttaataaatatattctttgtcagggatttaac

SEQ ID NO: 144084 - DNA, 66 bp, Homo sapiens
cacctgtgtttatgtaaaattgttgtaggttaataaatatattctttgtcagggatttaacccttt

SEQ ID NO: 144085 - DNA, 66 bp, Homo sapiens
tgttgtaggttaataaatatattctttgtcagggatttaacccttttattttgaatcccttctatt

SEQ ID NO: 144086 - DNA, 70 bp, Homo sapiens
ctttgtcagggatttaacccttttattttgaatcccttctattttacttgtacatgtgctgatgtaacta

SEQ ID NO: 144087 - DNA, 67 bp, Homo sapiens
agggatttaacccttttattttgaatcccttctattttacttgtacatgtgctgatgtaactaaaac

SEQ ID NO: 144088 - DNA, 68 bp, Homo sapiens
cccttttattttgaatcccttctattttacttgtacatgtgctgatgtaactaaaactaattttgtaa

SEQ ID NO: 144089 - DNA, 71 bp, Homo sapiens
gaatcccttctattttacttgtacatgtgctgatgtaactaaaactaattttgtaaatctgttggctcttt

SEQ ID NO: 144090 - DNA, 71 bp, Homo sapiens
ctattttacttgtacatgtgctgatgtaactaaaactaattttgtaaatctgttggctctttttattgtaa

SEQ ID NO: 144091 - DNA, 72 bp, Homo sapiens
ttgtacatgtgctgatgtaactaaaactaattttgtaaatctgttggctctttttattgtaaagaaaagcat

SEQ ID NO: 144092 - DNA, 68 bp, Homo sapiens
gctgatgtaactaaaactaattttgtaaatctgttggctctttttattgtaaagaaaagcattttaaa

SEQ ID NO: 144093 - DNA, 66 bp, Homo sapiens
actaattttgtaaatctgttggctctttttattgtaaagaaaagcattttaaaagtttgaggaatc

SEQ ID NO: 144094 - DNA, 67 bp, Homo sapiens
gtaaatctgttggctctttttattgtaaagaaaagcattttaaaagtttgaggaatcttttgactgt

SEQ ID NO: 144095 - DNA, 69 bp, Homo sapiens
tggctctttttattgtaaagaaaagcattttaaaagtttgaggaatcttttgactgtttcaagcaggaa

SEQ ID NO: 144096 - DNA, 66 bp, Homo sapiens
tttttattgtaaagaaaagcattttaaaagtttgaggaatcttttgactgtttcaagcaggaaaaa

SEQ ID NO: 144097 - DNA, 69 bp, Homo sapiens
gaaaaaaaaattacatgaaaatagaatgcactgagttgataaagggaaaaattgtaaggcaggagtttg

SEQ ID NO: 144098 - DNA, 72 bp, Homo sapiens
ctgagttgataaagggaaaaattgtaaggcaggagtttggcaagtggctgttggccagagacttacttgtaa

SEQ ID NO: 144099 - DNA, 71 bp, Homo sapiens
taaagggaaaaattgtaaggcaggagtttggcaagtggctgttggccagagacttacttgtaactctctaa

SEQ ID NO: 144100 - DNA, 71 bp, Homo sapiens
aaaattgtaaggcaggagtttggcaagtggctgttggccagagacttacttgtaactctctaaatgaagtt

SEQ ID NO: 144101 - DNA, 75 bp, Homo sapiens
ttggcaagtggctgttggccagagacttacttgtaactctctaaatgaagtttttttgatcctgtaatcactgaa

SEQ ID NO: 144102 - DNA, 74 bp, Homo sapiens
ggctgttggccagagacttacttgtaactctctaaatgaagtttttttgatcctgtaatcactgaaggtacata

SEQ ID NO: 144103 - DNA, 74 bp, Homo sapiens
ttggccagagacttacttgtaactctctaaatgaagtttttttgatcctgtaatcactgaaggtacatactcca

SEQ ID NO: 144104 - DNA, 75 bp, Homo sapiens
cagagacttacttgtaactctctaaatgaagtttttttgatcctgtaatcactgaaggtacatactccatgtgga

SEQ ID NO: 144105 - DNA, 72 bp, Homo sapiens
acttacttgtaactctctaaatgaagtttttttgatcctgtaatcactgaaggtacatactccatgtggact

SEQ ID NO: 144106 - DNA, 71 bp, Homo sapiens
aactctctaaatgaagtttttttgatcctgtaatcactgaaggtacatactccatgtggacttcccttaaa

SEQ ID NO: 144107 - DNA, 72 bp, Homo sapiens
aatgaagtttttttgatcctgtaatcactgaaggtacatactccatgtggacttcccttaaacaggcaaaca

SEQ ID NO: 144108 - DNA, 73 bp, Homo sapiens
tttttgatcctgtaatcactgaaggtacatactccatgtggacttcccttaaacaggcaaacacctacaggta

SEQ ID NO: 144109 - DNA, 74 bp, Homo sapiens
tttgatcctgtaatcactgaaggtacatactccatgtggacttcccttaaacaggcaaacacctacaggtatgg

SEQ ID NO: 144110 - DNA, 75 bp, Homo sapiens
actgaaggtacatactccatgtggacttcccttaaacaggcaaacacctacaggtatggtgtgcaacagattgta

SEQ ID NO: 144111 - DNA, 76 bp, Homo sapiens
tacatactccatgtggacttcccttaaacaggcaaacacctacaggtatggtgtgcaacagattgtacaattacat

SEQ ID NO: 144112 - DNA, 73 bp, Homo sapiens
atgtggacttcccttaaacaggcaaacacctacaggtatggtgtgcaacagattgtacaattacattttggcc

SEQ ID NO: 144113 - DNA, 72 bp, Homo sapiens
cttaaacaggcaaacacctacaggtatggtgtgcaacagattgtacaattacattttggcctaaatacattt

SEQ ID NO: 144114 - DNA, 73 bp, Homo sapiens
caaacacctacaggtatggtgtgcaacagattgtacaattacattttggcctaaatacatttttgcttactag

SEQ ID NO: 144115 - DNA, 73 bp, Homo sapiens
cctacaggtatggtgtgcaacagattgtacaattacattttggcctaaatacatttttgcttactagtattta

SEQ ID NO: 144116 - DNA, 71 bp, Homo sapiens
atggtgtgcaacagattgtacaattacattttggcctaaatacatttttgcttactagtatttaaaataaa

SEQ ID NO: 144117 - DNA, 70 bp, Homo sapiens
cagattgtacaattacattttggcctaaatacatttttgcttactagtatttaaaataaattcttaatca

SEQ ID NO: 144118 - DNA, 67 bp, Homo sapiens
acattttggcctaaatacatttttgcttactagtatttaaaataaattcttaatcagaggaggcctt

SEQ ID NO: 144119 - DNA, 66 bp, Homo sapiens
ggcctaaatacatttttgcttactagtatttaaaataaattcttaatcagaggaggcctttgggtt

SEQ ID NO: 144120 - DNA, 68 bp, Homo sapiens
aataaattcttaatcagaggaggcctttgggttttattggtcaaatctttgtaagctggcttttgtct

SEQ ID NO: 144121 - DNA, 68 bp, Homo sapiens
attcttaatcagaggaggcctttgggttttattggtcaaatctttgtaagctggcttttgtcttttta

SEQ ID NO: 144122 - DNA, 64 bp, Homo sapiens
agaggaggcctttgggttttattggtcaaatctttgtaagctggcttttgtctttttaaaaaat

SEQ ID NO: 144123 - DNA, 69 bp, Homo sapiens
ttaaaaaatttcttgaatttgtggttgtgtccaatttgcaaacatttccaaaaatgtttgctttgctta

SEQ ID NO: 144124 - DNA, 73 bp, Homo sapiens
tcttgaatttgtggttgtgtccaatttgcaaacatttccaaaaatgtttgctttgcttacaaaccacatgatt

SEQ ID NO: 144125 - DNA, 72 bp, Homo sapiens
tttgtggttgtgtccaatttgcaaacatttccaaaaatgtttgctttgcttacaaaccacatgattttaatg

SEQ ID NO: 144126 - DNA, 71 bp, Homo sapiens
tgtgtccaatttgcaaacatttccaaaaatgtttgctttgcttacaaaccacatgattttaatgttttttg

SEQ ID NO: 144127 - DNA, 72 bp, Homo sapiens
tgcaaacatttccaaaaatgtttgctttgcttacaaaccacatgattttaatgttttttgtataccataata

SEQ ID NO: 144128 - DNA, 71 bp, Homo sapiens
ttccaaaaatgtttgctttgcttacaaaccacatgattttaatgttttttgtataccataatatctagccc

SEQ ID NO: 144129 - DNA, 72 bp, Homo sapiens
gctttgcttacaaaccacatgattttaatgttttttgtataccataatatctagccccaaacatttgattac

SEQ ID NO: 144130 - DNA, 75 bp, Homo sapiens
caaaccacatgattttaatgttttttgtataccataatatctagccccaaacatttgattactacatgtgcattg

SEQ ID NO: 144131 - DNA, 75 bp, Homo sapiens
gattttaatgttttttgtataccataatatctagccccaaacatttgattactacatgtgcattggtgattttga

SEQ ID NO: 144132 - DNA, 78 bp, Homo sapiens
tttttgtataccataatatctagccccaaacatttgattactacatgtgcattggtgattttgatcatccattcttaa

SEQ ID NO: 144133 - DNA, 80 bp, Homo sapiens
gtataccataatatctagccccaaacatttgattactacatgtgcattggtgattttgatcatccattcttaatatttga

SEQ ID NO: 144134 - DNA, 81 bp, Homo sapiens
tatctagccccaaacatttgattactacatgtgcattggtgattttgatcatccattcttaatatttgatttctgtgtcac

SEQ ID NO: 144135 - DNA, 81 bp, Homo sapiens
ccaaacatttgattactacatgtgcattggtgattttgatcatccattcttaatatttgatttctgtgtcacctactgtca

SEQ ID NO: 144136 - DNA, 81 bp, Homo sapiens
tactacatgtgcattggtgattttgatcatccattcttaatatttgatttctgtgtcacctactgtcatttgttaaactgc

SEQ ID NO: 144137 - DNA, 78 bp, Homo sapiens
attggtgattttgatcatccattcttaatatttgatttctgtgtcacctactgtcatttgttaaactgctggccaaca

SEQ ID NO: 144138 - DNA, 77 bp, Homo sapiens
attttgatcatccattcttaatatttgatttctgtgtcacctactgtcatttgttaaactgctggccaacaagaaca

SEQ ID NO: 144139 - DNA, 74 bp, Homo sapiens
attcttaatatttgatttctgtgtcacctactgtcatttgttaaactgctggccaacaagaacaggaagtatag

SEQ ID NO: 144140 - DNA, 73 bp, Homo sapiens
aatatttgatttctgtgtcacctactgtcatttgttaaactgctggccaacaagaacaggaagtatagtttgg

SEQ ID NO: 144141 - DNA, 71 bp, Homo sapiens
tttctgtgtcacctactgtcatttgttaaactgctggccaacaagaacaggaagtatagtttggggggttg

SEQ ID NO: 144142 - DNA, 69 bp, Homo sapiens
tactgtcatttgttaaactgctggccaacaagaacaggaagtatagtttggggggttggggagagttta

SEQ ID NO: 144143 - DNA, 67 bp, Homo sapiens
atttgttaaactgctggccaacaagaacaggaagtatagtttggggggttggggagagtttacataa

SEQ ID NO: 144144 - DNA, 67 bp, Homo sapiens
tggccaacaagaacaggaagtatagtttggggggttggggagagtttacataaggaagagaagaaat

SEQ ID NO: 144145 - DNA, 69 bp, Homo sapiens
agtatagtttggggggttggggagagtttacataaggaagagaagaaattgagtggcatattgtaaata

SEQ ID NO: 144146 - DNA, 76 bp, Homo sapiens
cataaggaagagaagaaattgagtggcatattgtaaatatcagatctataattgtaaatataaaacctgcctcagt

SEQ ID NO: 144147 - DNA, 79 bp, Homo sapiens
tcagatctataattgtaaatataaaacctgcctcagttagaatgaatggaaagcagatctacaatttgctaatatagga

SEQ ID NO: 144148 - DNA, 77 bp, Homo sapiens
gtaaatataaaacctgcctcagttagaatgaatggaaagcagatctacaatttgctaatataggaatatcaggttga

SEQ ID NO: 144149 - DNA, 79 bp, Homo sapiens
taaaacctgcctcagttagaatgaatggaaagcagatctacaatttgctaatataggaatatcaggttgactatatagc

SEQ ID NO: 144150 - DNA, 80 bp, Homo sapiens
cctcagttagaatgaatggaaagcagatctacaatttgctaatataggaatatcaggttgactatatagccatacttgaa

SEQ ID NO: 144151 - DNA, 81 bp, Homo sapiens
atgaatggaaagcagatctacaatttgctaatataggaatatcaggttgactatatagccatacttgaaaatgcttctgag

SEQ ID NO: 144152 - DNA, 79 bp, Homo sapiens
agatctacaatttgctaatataggaatatcaggttgactatatagccatacttgaaaatgcttctgagtggtgtcaact

SEQ ID NO: 144153 - DNA, 78 bp, Homo sapiens
tttgctaatataggaatatcaggttgactatatagccatacttgaaaatgcttctgagtggtgtcaactttacttgaa

SEQ ID NO: 144154 - DNA, 77 bp, Homo sapiens
aatataggaatatcaggttgactatatagccatacttgaaaatgcttctgagtggtgtcaactttacttgaatgaat

SEQ ID NO: 144155 - DNA, 78 bp, Homo sapiens
atcaggttgactatatagccatacttgaaaatgcttctgagtggtgtcaactttacttgaatgaatttttcatcttga

SEQ ID NO: 144156 - DNA, 79 bp, Homo sapiens
actatatagccatacttgaaaatgcttctgagtggtgtcaactttacttgaatgaatttttcatcttgattgacgcaca

SEQ ID NO: 144157 - DNA, 79 bp, Homo sapiens
aaatgcttctgagtggtgtcaactttacttgaatgaatttttcatcttgattgacgcacagtgatgtacagttcacttc

SEQ ID NO: 144158 - DNA, 79 bp, Homo sapiens
gtgtcaactttacttgaatgaatttttcatcttgattgacgcacagtgatgtacagttcacttctgaagctagtggtta

SEQ ID NO: 144159 - DNA, 79 bp, Homo sapiens
ttacttgaatgaatttttcatcttgattgacgcacagtgatgtacagttcacttctgaagctagtggttaacttgtgta

SEQ ID NO: 144160 - DNA, 77 bp, Homo sapiens
gcacagtgatgtacagttcacttctgaagctagtggttaacttgtgtaggaaacttttgcagtttgacactaagata

SEQ ID NO: 144161 - DNA, 72 bp, Homo sapiens
atgtacagttcacttctgaagctagtggttaacttgtgtaggaaacttttgcagtttgacactaagataact

SEQ ID NO: 144162 - DNA, 73 bp, Homo sapiens
acttctgaagctagtggttaacttgtgtaggaaacttttgcagtttgacactaagataacttctgtgtgcatt

SEQ ID NO: 144163 - DNA, 72 bp, Homo sapiens
aagctagtggttaacttgtgtaggaaacttttgcagtttgacactaagataacttctgtgtgcatttttcta

SEQ ID NO: 144164 - DNA, 71 bp, Homo sapiens
gttaacttgtgtaggaaacttttgcagtttgacactaagataacttctgtgtgcatttttctatgcttttt

SEQ ID NO: 144165 - DNA, 74 bp, Homo sapiens
gacactaagataacttctgtgtgcatttttctatgcttttttaaaaactagtttcatttcattttcatgagatg

SEQ ID NO: 144166 - DNA, 70 bp, Homo sapiens
aacttctgtgtgcatttttctatgcttttttaaaaactagtttcatttcattttcatgagatgtttggtt

SEQ ID NO: 144167 - DNA, 72 bp, Homo sapiens
gcatttttctatgcttttttaaaaactagtttcatttcattttcatgagatgtttggtttataagatctgag

SEQ ID NO: 144168 - DNA, 71 bp, Homo sapiens
gcttttttaaaaactagtttcatttcattttcatgagatgtttggtttataagatctgaggatggttataa

SEQ ID NO: 144169 - DNA, 72 bp, Homo sapiens
aaaactagtttcatttcattttcatgagatgtttggtttataagatctgaggatggttataaatactgtaag

SEQ ID NO: 144170 - DNA, 77 bp, Homo sapiens
catttcattttcatgagatgtttggtttataagatctgaggatggttataaatactgtaagtattgtaatgttatga

SEQ ID NO: 144171 - DNA, 77 bp, Homo sapiens
catgagatgtttggtttataagatctgaggatggttataaatactgtaagtattgtaatgttatgaatgcaggttat

SEQ ID NO: 144172 - DNA, 75 bp, Homo sapiens
ttggtttataagatctgaggatggttataaatactgtaagtattgtaatgttatgaatgcaggttatttgaaagc

SEQ ID NO: 144173 - DNA, 75 bp, Homo sapiens
ataagatctgaggatggttataaatactgtaagtattgtaatgttatgaatgcaggttatttgaaagctgtttat

SEQ ID NO: 144174 - DNA, 77 bp, Homo sapiens
tgaggatggttataaatactgtaagtattgtaatgttatgaatgcaggttatttgaaagctgtttattattatatca

SEQ ID NO: 144175 - DNA, 79 bp, Homo sapiens
atactgtaagtattgtaatgttatgaatgcaggttatttgaaagctgtttattattatatcattcctgataatgctatg

SEQ ID NO: 144176 - DNA, 80 bp, Homo sapiens
gtaagtattgtaatgttatgaatgcaggttatttgaaagctgtttattattatatcattcctgataatgctatgtgagtg

SEQ ID NO: 144177 - DNA, 79 bp, Homo sapiens
taatgttatgaatgcaggttatttgaaagctgtttattattatatcattcctgataatgctatgtgagtgtttttaata

SEQ ID NO: 144178 - DNA, 74 bp, Homo sapiens
aatgcaggttatttgaaagctgtttattattatatcattcctgataatgctatgtgagtgtttttaataaaatt

SEQ ID NO: 144179 - DNA, 73 bp, Homo sapiens
atttgaaagctgtttattattatatcattcctgataatgctatgtgagtgtttttaataaaatttatatttat

SEQ ID NO: 144180 - DNA, 75 bp, Homo sapiens
ttcctgataatgctatgtgagtgtttttaataaaatttatatttatttaatgcactctaagtgttgtcttcctga

SEQ ID NO: 144181 - DNA, 73 bp, Homo sapiens
gatttttcttgttagaaggcatatcagaatctctcaggaatgcaagtgtagtgttcttttttctttatttaag

SEQ ID NO: 144182 - DNA, 75 bp, Homo sapiens
gaaggcatatcagaatctctcaggaatgcaagtgtagtgttcttttttctttatttaagtttacgaaatacatgc

SEQ ID NO: 144183 - DNA, 74 bp, Homo sapiens
tcagaatctctcaggaatgcaagtgtagtgttcttttttctttatttaagtttacgaaatacatgcttatagaa

SEQ ID NO: 144184 - DNA, 71 bp, Homo sapiens
tctctcaggaatgcaagtgtagtgttcttttttctttatttaagtttacgaaatacatgcttatagaaaat

SEQ ID NO: 144185 - DNA, 68 bp, Homo sapiens
tcttttttctttatttaagtttacgaaatacatgcttatagaaaattaaaacattatagaaatatgta

SEQ ID NO: 144186 - DNA, 71 bp, Homo sapiens
ttatttaagtttacgaaatacatgcttatagaaaattaaaacattatagaaatatgtaaagccacccatga

SEQ ID NO: 144187 - DNA, 72 bp, Homo sapiens
ttacgaaatacatgcttatagaaaattaaaacattatagaaatatgtaaagccacccatgaaagttcttcca

SEQ ID NO: 144188 - DNA, 74 bp, Homo sapiens
catgcttatagaaaattaaaacattatagaaatatgtaaagccacccatgaaagttcttccataattctgcttc

SEQ ID NO: 144189 - DNA, 71 bp, Homo sapiens
gaaaattaaaacattatagaaatatgtaaagccacccatgaaagttcttccataattctgcttcctaacaa

SEQ ID NO: 144190 - DNA, 73 bp, Homo sapiens
acattatagaaatatgtaaagccacccatgaaagttcttccataattctgcttcctaacaaagccactgttag

SEQ ID NO: 144191 - DNA, 73 bp, Homo sapiens
agaaatatgtaaagccacccatgaaagttcttccataattctgcttcctaacaaagccactgttagtaatgtg

SEQ ID NO: 144192 - DNA, 73 bp, Homo sapiens
agccacccatgaaagttcttccataattctgcttcctaacaaagccactgttagtaatgtggtgttacttata

SEQ ID NO: 144193 - DNA, 73 bp, Homo sapiens
gaaagttcttccataattctgcttcctaacaaagccactgttagtaatgtggtgttacttatattttagagca

SEQ ID NO: 144194 - DNA, 75 bp, Homo sapiens
ttccataattctgcttcctaacaaagccactgttagtaatgtggtgttacttatattttagagcatcaagttgtc

SEQ ID NO: 144195 - DNA, 74 bp, Homo sapiens
tctgcttcctaacaaagccactgttagtaatgtggtgttacttatattttagagcatcaagttgtccacaaaaa

SEQ ID NO: 144196 - DNA, 76 bp, Homo sapiens
taacaaagccactgttagtaatgtggtgttacttatattttagagcatcaagttgtccacaaaaatgcttgcacaa

SEQ ID NO: 144197 - DNA, 72 bp, Homo sapiens
actgttagtaatgtggtgttacttatattttagagcatcaagttgtccacaaaaatgcttgcacaacttttt

SEQ ID NO: 144198 - DNA, 70 bp, Homo sapiens
gtggtgttacttatattttagagcatcaagttgtccacaaaaatgcttgcacaacttttttttttaccca

SEQ ID NO: 144199 - DNA, 69 bp, Homo sapiens
tattttagagcatcaagttgtccacaaaaatgcttgcacaacttttttttttacccaagtttagaaatc

SEQ ID NO: 144200 - DNA, 70 bp, Homo sapiens
tagagcatcaagttgtccacaaaaatgcttgcacaacttttttttttacccaagtttagaaatcttgccc

SEQ ID NO: 144201 - DNA, 69 bp, Homo sapiens
tccacaaaaatgcttgcacaacttttttttttacccaagtttagaaatcttgccctaataatccagaca

SEQ ID NO: 144202 - DNA, 70 bp, Homo sapiens
atgcttgcacaacttttttttttacccaagtttagaaatcttgccctaataatccagacattcctcactc

SEQ ID NO: 144203 - DNA, 66 bp, Homo sapiens
acttttttttttacccaagtttagaaatcttgccctaataatccagacattcctcactctcttaac

SEQ ID NO: 144204 - DNA, 71 bp, Homo sapiens
ttacccaagtttagaaatcttgccctaataatccagacattcctcactctcttaacgaatacttagaaaca

SEQ ID NO: 144205 - DNA, 73 bp, Homo sapiens
caagtttagaaatcttgccctaataatccagacattcctcactctcttaacgaatacttagaaacaaattgca

SEQ ID NO: 144206 - DNA, 74 bp, Homo sapiens
ttgccctaataatccagacattcctcactctcttaacgaatacttagaaacaaattgcataaaggtaccatcta

SEQ ID NO: 144207 - DNA, 72 bp, Homo sapiens
atccagacattcctcactctcttaacgaatacttagaaacaaattgcataaaggtaccatctattaaaccag

SEQ ID NO: 144208 - DNA, 70 bp, Homo sapiens
tcctcactctcttaacgaatacttagaaacaaattgcataaaggtaccatctattaaaccagtcccttac

SEQ ID NO: 144209 - DNA, 70 bp, Homo sapiens
ctctcttaacgaatacttagaaacaaattgcataaaggtaccatctattaaaccagtcccttactgacag

SEQ ID NO: 144210 - DNA, 71 bp, Homo sapiens
atacttagaaacaaattgcataaaggtaccatctattaaaccagtcccttactgacagggcatttgggcta

SEQ ID NO: 144211 - DNA, 69 bp, Homo sapiens
aaattgcataaaggtaccatctattaaaccagtcccttactgacagggcatttgggctagttttaagta

SEQ ID NO: 144212 - DNA, 68 bp, Homo sapiens
cataaaggtaccatctattaaaccagtcccttactgacagggcatttgggctagttttaagtattaaa

SEQ ID NO: 144213 - DNA, 67 bp, Homo sapiens
accatctattaaaccagtcccttactgacagggcatttgggctagttttaagtattaaagaacaaag

SEQ ID NO: 144214 - DNA, 68 bp, Homo sapiens
aaaccagtcccttactgacagggcatttgggctagttttaagtattaaagaacaaaggtgcaatgact

SEQ ID NO: 144215 - DNA, 72 bp, Homo sapiens
ttactgacagggcatttgggctagttttaagtattaaagaacaaaggtgcaatgactttgcttgtgtacact

SEQ ID NO: 144216 - DNA, 73 bp, Homo sapiens
atttgggctagttttaagtattaaagaacaaaggtgcaatgactttgcttgtgtacacttgtcagatcattcc

SEQ ID NO: 144217 - DNA, 74 bp, Homo sapiens
ttttaagtattaaagaacaaaggtgcaatgactttgcttgtgtacacttgtcagatcattcccattaggcagtt

SEQ ID NO: 144218 - DNA, 76 bp, Homo sapiens
aacaaaggtgcaatgactttgcttgtgtacacttgtcagatcattcccattaggcagtttcctaggaatgaactta

SEQ ID NO: 144219 - DNA, 75 bp, Homo sapiens
atgactttgcttgtgtacacttgtcagatcattcccattaggcagtttcctaggaatgaacttagtaggccaaaa

SEQ ID NO: 144220 - DNA, 73 bp, Homo sapiens
ttgtgtacacttgtcagatcattcccattaggcagtttcctaggaatgaacttagtaggccaaaaggttcaaa

SEQ ID NO: 144221 - DNA, 71 bp, Homo sapiens
tcagatcattcccattaggcagtttcctaggaatgaacttagtaggccaaaaggttcaaagtttcaataaa

SEQ ID NO: 144222 - DNA, 67 bp, Homo sapiens
attcccattaggcagtttcctaggaatgaacttagtaggccaaaaggttcaaagtttcaataaatcc

SEQ ID NO: 144223 - DNA, 67 bp, Homo sapiens
taggcagtttcctaggaatgaacttagtaggccaaaaggttcaaagtttcaataaatcccagaaaac

SEQ ID NO: 144224 - DNA, 67 bp, Homo sapiens
gaatgaacttagtaggccaaaaggttcaaagtttcaataaatcccagaaaactacattcctaaaggc

SEQ ID NO: 144225 - DNA, 68 bp, Homo sapiens
acttagtaggccaaaaggttcaaagtttcaataaatcccagaaaactacattcctaaaggctgtgaca

SEQ ID NO: 144226 - DNA, 68 bp, Homo sapiens
aaggttcaaagtttcaataaatcccagaaaactacattcctaaaggctgtgacaattatactcccacc

SEQ ID NO: 144227 - DNA, 72 bp, Homo sapiens
aagtttcaataaatcccagaaaactacattcctaaaggctgtgacaattatactcccacctatggcatacaa

SEQ ID NO: 144228 - DNA, 73 bp, Homo sapiens
ataaatcccagaaaactacattcctaaaggctgtgacaattatactcccacctatggcatacaagatgggtaa

SEQ ID NO: 144229 - DNA, 73 bp, Homo sapiens
aaaactacattcctaaaggctgtgacaattatactcccacctatggcatacaagatgggtaatgtaattggaa

SEQ ID NO: 144230 - DNA, 77 bp, Homo sapiens
taaaggctgtgacaattatactcccacctatggcatacaagatgggtaatgtaattggaagtgcttgttcaaaatca

SEQ ID NO: 144231 - DNA, 78 bp, Homo sapiens
tgacaattatactcccacctatggcatacaagatgggtaatgtaattggaagtgcttgttcaaaatcatggtgcaatt

SEQ ID NO: 144232 - DNA, 75 bp, Homo sapiens
ttatactcccacctatggcatacaagatgggtaatgtaattggaagtgcttgttcaaaatcatggtgcaattttt

SEQ ID NO: 144233 - DNA, 74 bp, Homo sapiens
acctatggcatacaagatgggtaatgtaattggaagtgcttgttcaaaatcatggtgcaattttttaatttgga

SEQ ID NO: 144234 - DNA, 67 bp, Homo sapiens
gtaatgtaattggaagtgcttgttcaaaatcatggtgcaattttttaatttggaaaatttaaaaaat

SEQ ID NO: 144235 - DNA, 70 bp, Homo sapiens
aatttaaaaaattgactgttcttataactgtgttttctaattatagaaggtgaagtctgacaaatcttga

SEQ ID NO: 144236 - DNA, 71 bp, Homo sapiens
aaaattgactgttcttataactgtgttttctaattatagaaggtgaagtctgacaaatcttgattaatggg

SEQ ID NO: 144237 - DNA, 74 bp, Homo sapiens
tcttataactgtgttttctaattatagaaggtgaagtctgacaaatcttgattaatggggaatcaggatcccag

SEQ ID NO: 144238 - DNA, 74 bp, Homo sapiens
tgttttctaattatagaaggtgaagtctgacaaatcttgattaatggggaatcaggatcccagggcaggattta

SEQ ID NO: 144239 - DNA, 74 bp, Homo sapiens
tctaattatagaaggtgaagtctgacaaatcttgattaatggggaatcaggatcccagggcaggatttataaaa

SEQ ID NO: 144240 - DNA, 71 bp, Homo sapiens
aaggtgaagtctgacaaatcttgattaatggggaatcaggatcccagggcaggatttataaaacttgtatt

SEQ ID NO: 144241 - DNA, 71 bp, Homo sapiens
ttaatggggaatcaggatcccagggcaggatttataaaacttgtatttaccaaaaagaggcatcagtatta

SEQ ID NO: 144242 - DNA, 70 bp, Homo sapiens
gaatcaggatcccagggcaggatttataaaacttgtatttaccaaaaagaggcatcagtattagaaactt

SEQ ID NO: 144243 - DNA, 66 bp, Homo sapiens
cccagggcaggatttataaaacttgtatttaccaaaaagaggcatcagtattagaaactttaaaac

SEQ ID NO: 144244 - DNA, 66 bp, Homo sapiens
caggatttataaaacttgtatttaccaaaaagaggcatcagtattagaaactttaaaacttctctt

SEQ ID NO: 144245 - DNA, 70 bp, Homo sapiens
ttaccaaaaagaggcatcagtattagaaactttaaaacttctctttaaaatctccgcaagattgcagccc

SEQ ID NO: 144246 - DNA, 72 bp, Homo sapiens
catcagtattagaaactttaaaacttctctttaaaatctccgcaagattgcagcccttgctacagctttaaa

SEQ ID NO: 144247 - DNA, 71 bp, Homo sapiens
gtattagaaactttaaaacttctctttaaaatctccgcaagattgcagcccttgctacagctttaaatagc

SEQ ID NO: 144248 - DNA, 76 bp, Homo sapiens
aaacttctctttaaaatctccgcaagattgcagcccttgctacagctttaaatagctgcactggtatctccagtta

SEQ ID NO: 144249 - DNA, 76 bp, Homo sapiens
tctttaaaatctccgcaagattgcagcccttgctacagctttaaatagctgcactggtatctccagttattttccc

SEQ ID NO: 144250 - DNA, 77 bp, Homo sapiens
tccgcaagattgcagcccttgctacagctttaaatagctgcactggtatctccagttattttccccaagtttcaata

SEQ ID NO: 144251 - DNA, 75 bp, Homo sapiens
ttgcagcccttgctacagctttaaatagctgcactggtatctccagttattttccccaagtttcaataccagtat

SEQ ID NO: 144252 - DNA, 73 bp, Homo sapiens
tacagctttaaatagctgcactggtatctccagttattttccccaagtttcaataccagtattggtatcctac

SEQ ID NO: 144253 - DNA, 71 bp, Homo sapiens
tttaaatagctgcactggtatctccagttattttccccaagtttcaataccagtattggtatcctactagt

SEQ ID NO: 144254 - DNA, 69 bp, Homo sapiens
actggtatctccagttattttccccaagtttcaataccagtattggtatcctactagttgaggaataaa

SEQ ID NO: 144255 - DNA, 70 bp, Homo sapiens
tctccagttattttccccaagtttcaataccagtattggtatcctactagttgaggaataaaatccatac

SEQ ID NO: 144256 - DNA, 72 bp, Homo sapiens
ttccccaagtttcaataccagtattggtatcctactagttgaggaataaaatccatacttatatgagctttc

SEQ ID NO: 144257 - DNA, 73 bp, Homo sapiens
agtattggtatcctactagttgaggaataaaatccatacttatatgagctttccccagaacaagccagcttta

SEQ ID NO: 144258 - DNA, 74 bp, Homo sapiens
tatcctactagttgaggaataaaatccatacttatatgagctttccccagaacaagccagctttagtcccatta

SEQ ID NO: 144259 - DNA, 75 bp, Homo sapiens
ggaataaaatccatacttatatgagctttccccagaacaagccagctttagtcccattattcgacagtagcagaa

SEQ ID NO: 144260 - DNA, 75 bp, Homo sapiens
aatccatacttatatgagctttccccagaacaagccagctttagtcccattattcgacagtagcagaacattctt

SEQ ID NO: 144261 - DNA, 76 bp, Homo sapiens
ttatatgagctttccccagaacaagccagctttagtcccattattcgacagtagcagaacattctttgtcccagaa

SEQ ID NO: 144262 - DNA, 75 bp, Homo sapiens
cccagaacaagccagctttagtcccattattcgacagtagcagaacattctttgtcccagaacacaccgcacact

SEQ ID NO: 144263 - DNA, 78 bp, Homo sapiens
tagcagaacattctttgtcccagaacacaccgcacactttcttgtgcctggtttcatcactttatgcctcatctcttt

SEQ ID NO: 144264 - DNA, 75 bp, Homo sapiens
attctttgtcccagaacacaccgcacactttcttgtgcctggtttcatcactttatgcctcatctcttttccttc

SEQ ID NO: 144265 - DNA, 74 bp, Homo sapiens
agaacacaccgcacactttcttgtgcctggtttcatcactttatgcctcatctcttttccttctttgtcttcct

SEQ ID NO: 144266 - DNA, 73 bp, Homo sapiens
acactttcttgtgcctggtttcatcactttatgcctcatctcttttccttctttgtcttccttcacttcaagg

SEQ ID NO: 144267 - DNA, 75 bp, Homo sapiens
ttgtgcctggtttcatcactttatgcctcatctcttttccttctttgtcttccttcacttcaaggtaatctccaa

SEQ ID NO: 144268 - DNA, 75 bp, Homo sapiens
tttcatcactttatgcctcatctcttttccttctttgtcttccttcacttcaaggtaatctccaatgccacttac

SEQ ID NO: 144269 - DNA, 75 bp, Homo sapiens
tttatgcctcatctcttttccttctttgtcttccttcacttcaaggtaatctccaatgccacttactctatgaag

SEQ ID NO: 144270 - DNA, 74 bp, Homo sapiens
tcttttccttctttgtcttccttcacttcaaggtaatctccaatgccacttactctatgaagtcttccacaatc

SEQ ID NO: 144271 - DNA, 75 bp, Homo sapiens
ctttgtcttccttcacttcaaggtaatctccaatgccacttactctatgaagtcttccacaatccttcctgagaa

SEQ ID NO: 144272 - DNA, 74 bp, Homo sapiens
ttccttcacttcaaggtaatctccaatgccacttactctatgaagtcttccacaatccttcctgagaaaaataa

SEQ ID NO: 144273 - DNA, 70 bp, Homo sapiens
ccacttactctatgaagtcttccacaatccttcctgagaaaaataaatggtcttatcccttctgttcccc

SEQ ID NO: 144274 - DNA, 72 bp, Homo sapiens
tatgaagtcttccacaatccttcctgagaaaaataaatggtcttatcccttctgttcccccagcatttcacc

SEQ ID NO: 144275 - DNA, 72 bp, Homo sapiens
aatccttcctgagaaaaataaatggtcttatcccttctgttcccccagcatttcacctgcacctctgttaca

SEQ ID NO: 144276 - DNA, 73 bp, Homo sapiens
gagaaaaataaatggtcttatcccttctgttcccccagcatttcacctgcacctctgttacagaatttctata

SEQ ID NO: 144277 - DNA, 72 bp, Homo sapiens
aaataaatggtcttatcccttctgttcccccagcatttcacctgcacctctgttacagaatttctatactaa

SEQ ID NO: 144278 - DNA, 74 bp, Homo sapiens
tatcccttctgttcccccagcatttcacctgcacctctgttacagaatttctatactaagctaccaaactggaa

SEQ ID NO: 144279 - DNA, 75 bp, Homo sapiens
tctgttcccccagcatttcacctgcacctctgttacagaatttctatactaagctaccaaactggaagtcttaga

SEQ ID NO: 144280 - DNA, 74 bp, Homo sapiens
acctctgttacagaatttctatactaagctaccaaactggaagtcttagaggatagacacatcttacttgtcta

SEQ ID NO: 144281 - DNA, 74 bp, Homo sapiens
tgttacagaatttctatactaagctaccaaactggaagtcttagaggatagacacatcttacttgtctatttcc

SEQ ID NO: 144282 - DNA, 76 bp, Homo sapiens
ttctatactaagctaccaaactggaagtcttagaggatagacacatcttacttgtctatttcctgaacagtatcta

SEQ ID NO: 144283 - DNA, 76 bp, Homo sapiens
taccaaactggaagtcttagaggatagacacatcttacttgtctatttcctgaacagtatctagtgcagaactttg

SEQ ID NO: 144284 - DNA, 77 bp, Homo sapiens
aagtcttagaggatagacacatcttacttgtctatttcctgaacagtatctagtgcagaactttgtagaacatacac

SEQ ID NO: 144285 - DNA, 78 bp, Homo sapiens
ttagaggatagacacatcttacttgtctatttcctgaacagtatctagtgcagaactttgtagaacatacactcaaaa

SEQ ID NO: 144286 - DNA, 75 bp, Homo sapiens
gacacatcttacttgtctatttcctgaacagtatctagtgcagaactttgtagaacatacactcaaaaactgttt

SEQ ID NO: 144287 - DNA, 73 bp, Homo sapiens
cttgtctatttcctgaacagtatctagtgcagaactttgtagaacatacactcaaaaactgtttttggaataa

SEQ ID NO: 144288 - DNA, 74 bp, Homo sapiens
ttcctgaacagtatctagtgcagaactttgtagaacatacactcaaaaactgtttttggaataaacatacataa

SEQ ID NO: 144289 - DNA, 72 bp, Homo sapiens
gtatctagtgcagaactttgtagaacatacactcaaaaactgtttttggaataaacatacataaattaagac

SEQ ID NO: 144290 - DNA, 70 bp, Homo sapiens
cagaactttgtagaacatacactcaaaaactgtttttggaataaacatacataaattaagacttcaaatc

SEQ ID NO: 144291 - DNA, 71 bp, Homo sapiens
tagaacatacactcaaaaactgtttttggaataaacatacataaattaagacttcaaatcttttaatctca

SEQ ID NO: 144292 - DNA, 71 bp, Homo sapiens
gtttttggaataaacatacataaattaagacttcaaatcttttaatctcaaattattagtcacagatgtta

SEQ ID NO: 144293 - DNA, 70 bp, Homo sapiens
catacataaattaagacttcaaatcttttaatctcaaattattagtcacagatgttattttttaaaggac

SEQ ID NO: 144294 - DNA, 68 bp, Homo sapiens
atctcaaattattagtcacagatgttattttttaaaggactaaaaaaaaactactgctccttcaaatg

SEQ ID NO: 144295 - DNA, 67 bp, Homo sapiens
tcacagatgttattttttaaaggactaaaaaaaaactactgctccttcaaatgtcctaattatcggt

SEQ ID NO: 144296 - DNA, 65 bp, Homo sapiens
aggactaaaaaaaaactactgctccttcaaatgtcctaattatcggtttcatacattttttttaa

SEQ ID NO: 144297 - DNA, 67 bp, Homo sapiens
tttaaaaaagggggttttctaataagactgtcaaaatattacatctagaatagttatgttcaataaa

SEQ ID NO: 144298 - DNA, 72 bp, Homo sapiens
ggggttttctaataagactgtcaaaatattacatctagaatagttatgttcaataaacctgcatttacttga

SEQ ID NO: 144299 - DNA, 78 bp, Homo sapiens
ctaataagactgtcaaaatattacatctagaatagttatgttcaataaacctgcatttacttgatatctgcatcttcc

SEQ ID NO: 144300 - DNA, 81 bp, Homo sapiens
gactgtcaaaatattacatctagaatagttatgttcaataaacctgcatttacttgatatctgcatcttcctagtatcaca

SEQ ID NO: 144301 - DNA, 78 bp, Homo sapiens
acatctagaatagttatgttcaataaacctgcatttacttgatatctgcatcttcctagtatcacaaattgttttaga

SEQ ID NO: 144302 - DNA, 73 bp, Homo sapiens
caataaacctgcatttacttgatatctgcatcttcctagtatcacaaattgttttagaaataaaaacacaggg

SEQ ID NO: 144303 - DNA, 72 bp, Homo sapiens
acctgcatttacttgatatctgcatcttcctagtatcacaaattgttttagaaataaaaacacaggggtagg

SEQ ID NO: 144304 - DNA, 71 bp, Homo sapiens
tacttgatatctgcatcttcctagtatcacaaattgttttagaaataaaaacacaggggtaggggacaggg

SEQ ID NO: 144305 - DNA, 66 bp, Homo sapiens
atcttcctagtatcacaaattgttttagaaataaaaacacaggggtaggggacaggggacagttta

SEQ ID NO: 144306 - DNA, 66 bp, Homo sapiens
ctagtatcacaaattgttttagaaataaaaacacaggggtaggggacaggggacagtttattgtaa

SEQ ID NO: 144307 - DNA, 68 bp, Homo sapiens
ttgttttagaaataaaaacacaggggtaggggacaggggacagtttattgtaaaatatgaagcagcaa

SEQ ID NO: 144308 - DNA, 71 bp, Homo sapiens
aaataaaaacacaggggtaggggacaggggacagtttattgtaaaatatgaagcagcaatgattgaagcaa

SEQ ID NO: 144309 - DNA, 72 bp, Homo sapiens
ggggtaggggacaggggacagtttattgtaaaatatgaagcagcaatgattgaagcaagtgaatttctcctt

SEQ ID NO: 144310 - DNA, 81 bp, Homo sapiens
ttgtaaaatatgaagcagcaatgattgaagcaagtgaatttctcctttatattcccagccagagcacaaaatgactggata

SEQ ID NO: 144311 - DNA, 82 bp, Homo sapiens
cagcaatgattgaagcaagtgaatttctcctttatattcccagccagagcacaaaatgactggatatcctcatgaacgccaa

SEQ ID NO: 144312 - DNA, 78 bp, Homo sapiens
tgaagcaagtgaatttctcctttatattcccagccagagcacaaaatgactggatatcctcatgaacgccaagctttt

SEQ ID NO: 144313 - DNA, 74 bp, Homo sapiens
aagtgaatttctcctttatattcccagccagagcacaaaatgactggatatcctcatgaacgccaagctttttt

SEQ ID NO: 144314 - DNA, 75 bp, Homo sapiens
gagagagaaaaaattccacattcattaaaatctctttctcttgataatttctggtttccagctgactggatgagt

SEQ ID NO: 144315 - DNA, 75 bp, Homo sapiens
aaattccacattcattaaaatctctttctcttgataatttctggtttccagctgactggatgagtttcttctgtc

SEQ ID NO: 144316 - DNA, 75 bp, Homo sapiens
ccacattcattaaaatctctttctcttgataatttctggtttccagctgactggatgagtttcttctgtctaaaa

SEQ ID NO: 144317 - DNA, 74 bp, Homo sapiens
tctctttctcttgataatttctggtttccagctgactggatgagtttcttctgtctaaaaatagaaaagtgagt

SEQ ID NO: 144318 - DNA, 73 bp, Homo sapiens
ttctcttgataatttctggtttccagctgactggatgagtttcttctgtctaaaaatagaaaagtgagttaaa

SEQ ID NO: 144319 - DNA, 69 bp, Homo sapiens
aatttctggtttccagctgactggatgagtttcttctgtctaaaaatagaaaagtgagttaaaataaag

SEQ ID NO: 144320 - DNA, 74 bp, Homo sapiens
attggtatagctgttttacttaacgaatgtgaaacacagaacttacggctgtgtcatcctctctgtatacttta

SEQ ID NO: 144321 - DNA, 71 bp, Homo sapiens
ctgttttacttaacgaatgtgaaacacagaacttacggctgtgtcatcctctctgtatactttaatggttt

SEQ ID NO: 144322 - DNA, 74 bp, Homo sapiens
ttacttaacgaatgtgaaacacagaacttacggctgtgtcatcctctctgtatactttaatggttttatcagct

SEQ ID NO: 144323 - DNA, 77 bp, Homo sapiens
atgtgaaacacagaacttacggctgtgtcatcctctctgtatactttaatggttttatcagcttcagctgttagtaa

SEQ ID NO: 144324 - DNA, 76 bp, Homo sapiens
agaacttacggctgtgtcatcctctctgtatactttaatggttttatcagcttcagctgttagtaatcgactttca

SEQ ID NO: 144325 - DNA, 81 bp, Homo sapiens
tgtgtcatcctctctgtatactttaatggttttatcagcttcagctgttagtaatcgactttcagactgatcaaaagcaca

SEQ ID NO: 144326 - DNA, 79 bp, Homo sapiens
atcctctctgtatactttaatggttttatcagcttcagctgttagtaatcgactttcagactgatcaaaagcacaagca

SEQ ID NO: 144327 - DNA, 76 bp, Homo sapiens
atactttaatggttttatcagcttcagctgttagtaatcgactttcagactgatcaaaagcacaagcaaatattcc

SEQ ID NO: 144328 - DNA, 80 bp, Homo sapiens
ttttatcagcttcagctgttagtaatcgactttcagactgatcaaaagcacaagcaaatattcctgattcactgtccaaa

SEQ ID NO: 144329 - DNA, 79 bp, Homo sapiens
agcttcagctgttagtaatcgactttcagactgatcaaaagcacaagcaaatattcctgattcactgtccaaagaccca

SEQ ID NO: 144330 - DNA, 78 bp, Homo sapiens
gttagtaatcgactttcagactgatcaaaagcacaagcaaatattcctgattcactgtccaaagacccaggttgcaca

SEQ ID NO: 144331 - DNA, 83 bp, Homo sapiens
ttcagactgatcaaaagcacaagcaaatattcctgattcactgtccaaagacccaggttgcacagctgcgtgaactctctgaa

SEQ ID NO: 144332 - DNA, 79 bp, Homo sapiens
caaaagcacaagcaaatattcctgattcactgtccaaagacccaggttgcacagctgcgtgaactctctgaaaattgta

SEQ ID NO: 144333 - DNA, 78 bp, Homo sapiens
aagcaaatattcctgattcactgtccaaagacccaggttgcacagctgcgtgaactctctgaaaattgtagccagttc

SEQ ID NO: 144334 - DNA, 79 bp, Homo sapiens
atattcctgattcactgtccaaagacccaggttgcacagctgcgtgaactctctgaaaattgtagccagttctccagtc

SEQ ID NO: 144335 - DNA, 80 bp, Homo sapiens
ttcactgtccaaagacccaggttgcacagctgcgtgaactctctgaaaattgtagccagttctccagtcccaaagatgca

SEQ ID NO: 144336 - DNA, 79 bp, Homo sapiens
aaagacccaggttgcacagctgcgtgaactctctgaaaattgtagccagttctccagtcccaaagatgcatggtgccat

SEQ ID NO: 144337 - DNA, 80 bp, Homo sapiens
acagctgcgtgaactctctgaaaattgtagccagttctccagtcccaaagatgcatggtgccattgtcagcttaaaggga

SEQ ID NO: 144338 - DNA, 76 bp, Homo sapiens
gtgaactctctgaaaattgtagccagttctccagtcccaaagatgcatggtgccattgtcagcttaaagggaaaaa

SEQ ID NO: 144339 - DNA, 74 bp, Homo sapiens
aaaattgtagccagttctccagtcccaaagatgcatggtgccattgtcagcttaaagggaaaaatctagttaca

SEQ ID NO: 144340 - DNA, 76 bp, Homo sapiens
tagccagttctccagtcccaaagatgcatggtgccattgtcagcttaaagggaaaaatctagttacacctggtatc

SEQ ID NO: 144341 - DNA, 72 bp, Homo sapiens
gaaaaaataacagactaaacatatttattataaaaatcttattttacctccagatacaagcactccatcaga

SEQ ID NO: 144342 - DNA, 73 bp, Homo sapiens
cagactaaacatatttattataaaaatcttattttacctccagatacaagcactccatcagaatttaccgtca

SEQ ID NO: 144343 - DNA, 73 bp, Homo sapiens
tatttattataaaaatcttattttacctccagatacaagcactccatcagaatttaccgtcaatgtgttaata

SEQ ID NO: 144344 - DNA, 75 bp, Homo sapiens
aaaaatcttattttacctccagatacaagcactccatcagaatttaccgtcaatgtgttaataatagcattatga

SEQ ID NO: 144345 - DNA, 75 bp, Homo sapiens
ttattttacctccagatacaagcactccatcagaatttaccgtcaatgtgttaataatagcattatgaccggaaa

SEQ ID NO: 144346 - DNA, 77 bp, Homo sapiens
cagatacaagcactccatcagaatttaccgtcaatgtgttaataatagcattatgaccggaaagattttgaatgaaa

SEQ ID NO: 144347 - DNA, 75 bp, Homo sapiens
caagcactccatcagaatttaccgtcaatgtgttaataatagcattatgaccggaaagattttgaatgaaacttc

SEQ ID NO: 144348 - DNA, 73 bp, Homo sapiens
cagaatttaccgtcaatgtgttaataatagcattatgaccggaaagattttgaatgaaacttccatcagggaa

SEQ ID NO: 144349 - DNA, 74 bp, Homo sapiens
gtcaatgtgttaataatagcattatgaccggaaagattttgaatgaaacttccatcagggaatttccactgctt

SEQ ID NO: 144350 - DNA, 75 bp, Homo sapiens
ataatagcattatgaccggaaagattttgaatgaaacttccatcagggaatttccactgctttatgttatctgga

SEQ ID NO: 144351 - DNA, 73 bp, Homo sapiens
attatgaccggaaagattttgaatgaaacttccatcagggaatttccactgctttatgttatctggagaacca

SEQ ID NO: 144352 - DNA, 76 bp, Homo sapiens
aagattttgaatgaaacttccatcagggaatttccactgctttatgttatctggagaaccagatgcaaatgtgtaa

SEQ ID NO: 144353 - DNA, 76 bp, Homo sapiens
aatgaaacttccatcagggaatttccactgctttatgttatctggagaaccagatgcaaatgtgtaactgaaataa

SEQ ID NO: 144354 - DNA, 76 bp, Homo sapiens
acttccatcagggaatttccactgctttatgttatctggagaaccagatgcaaatgtgtaactgaaataatattaa

SEQ ID NO: 144355 - DNA, 73 bp, Homo sapiens
gggaatttccactgctttatgttatctggagaaccagatgcaaatgtgtaactgaaataatattaaaaagaat

SEQ ID NO: 144356 - DNA, 73 bp, Homo sapiens
ctgctttatgttatctggagaaccagatgcaaatgtgtaactgaaataatattaaaaagaattaacgacaaag

SEQ ID NO: 144357 - DNA, 70 bp, Homo sapiens
taagaactgaagaaaaacaagaagctaattaggaaaatacacttactgtcttggatgtaaaaccacagcc

SEQ ID NO: 144358 - DNA, 69 bp, Homo sapiens
agaaaaacaagaagctaattaggaaaatacacttactgtcttggatgtaaaaccacagccctaactgat

SEQ ID NO: 144359 - DNA, 68 bp, Homo sapiens
aacaagaagctaattaggaaaatacacttactgtcttggatgtaaaaccacagccctaactgattttt

SEQ ID NO: 144360 - DNA, 71 bp, Homo sapiens
aggaaaatacacttactgtcttggatgtaaaaccacagccctaactgattttttgtgatttgttaatgtca

SEQ ID NO: 144361 - DNA, 71 bp, Homo sapiens
acacttactgtcttggatgtaaaaccacagccctaactgattttttgtgatttgttaatgtcactcttgtt

SEQ ID NO: 144362 - DNA, 73 bp, Homo sapiens
tgtcttggatgtaaaaccacagccctaactgattttttgtgatttgttaatgtcactcttgtttttccagcca

SEQ ID NO: 144363 - DNA, 72 bp, Homo sapiens
aaccacagccctaactgattttttgtgatttgttaatgtcactcttgtttttccagccaccagatcccataa

SEQ ID NO: 144364 - DNA, 73 bp, Homo sapiens
ctaactgattttttgtgatttgttaatgtcactcttgtttttccagccaccagatcccataatcgaattgtag

SEQ ID NO: 144365 - DNA, 76 bp, Homo sapiens
tttttgtgatttgttaatgtcactcttgtttttccagccaccagatcccataatcgaattgtagtatcatggcttc

SEQ ID NO: 144366 - DNA, 76 bp, Homo sapiens
atttgttaatgtcactcttgtttttccagccaccagatcccataatcgaattgtagtatcatggcttcctgtaatg

SEQ ID NO: 144367 - DNA, 77 bp, Homo sapiens
actcttgtttttccagccaccagatcccataatcgaattgtagtatcatggcttcctgtaatggaaacacatatatc

SEQ ID NO: 144368 - DNA, 79 bp, Homo sapiens
ttccagccaccagatcccataatcgaattgtagtatcatggcttcctgtaatggaaacacatatatccctcaaaacata

SEQ ID NO: 144369 - DNA, 80 bp, Homo sapiens
atggattctgacatgaatattctgtaaacttgaaaagtatcgatcatacctgtaataatttgtggttctgcagcctgaca

SEQ ID NO: 144370 - DNA, 80 bp, Homo sapiens
acatgaatattctgtaaacttgaaaagtatcgatcatacctgtaataatttgtggttctgcagcctgacatctcactgta

SEQ ID NO: 144371 - DNA, 81 bp, Homo sapiens
tgtaaacttgaaaagtatcgatcatacctgtaataatttgtggttctgcagcctgacatctcactgtagcaactgcatttg

SEQ ID NO: 144372 - DNA, 83 bp, Homo sapiens
aaagtatcgatcatacctgtaataatttgtggttctgcagcctgacatctcactgtagcaactgcatttgtatgtccagataa

SEQ ID NO: 144373 - DNA, 86 bp, Homo sapiens
atcgatcatacctgtaataatttgtggttctgcagcctgacatctcactgtagcaactgcatttgtatgtccagataatgtgtgta

SEQ ID NO: 144374 - DNA, 85 bp, Homo sapiens
tgtaataatttgtggttctgcagcctgacatctcactgtagcaactgcatttgtatgtccagataatgtgtgtacactggcttta

SEQ ID NO: 144375 - DNA, 86 bp, Homo sapiens
tttgtggttctgcagcctgacatctcactgtagcaactgcatttgtatgtccagataatgtgtgtacactggctttagttctcaca

SEQ ID NO: 144376 - DNA, 84 bp, Homo sapiens
cctgacatctcactgtagcaactgcatttgtatgtccagataatgtgtgtacactggctttagttctcacatcccaaatctata

SEQ ID NO: 144377 - DNA, 81 bp, Homo sapiens
atctcactgtagcaactgcatttgtatgtccagataatgtgtgtacactggctttagttctcacatcccaaatctataaaa

SEQ ID NO: 144378 - DNA, 78 bp, Homo sapiens
aactgcatttgtatgtccagataatgtgtgtacactggctttagttctcacatcccaaatctataaaaacacaataga

SEQ ID NO: 144379 - DNA, 78 bp, Homo sapiens
ttgtatgtccagataatgtgtgtacactggctttagttctcacatcccaaatctataaaaacacaatagacatattag

SEQ ID NO: 144380 - DNA, 76 bp, Homo sapiens
ccagataatgtgtgtacactggctttagttctcacatcccaaatctataaaaacacaatagacatattaggaaaga

SEQ ID NO: 144381 - DNA, 76 bp, Homo sapiens
aagatgcaatatatttacagataaatacacaactctatcccatttacccgtgcagttgaatctcgactacaggtta

SEQ ID NO: 144382 - DNA, 75 bp, Homo sapiens
tatttacagataaatacacaactctatcccatttacccgtgcagttgaatctcgactacaggttaccaacacatc

SEQ ID NO: 144383 - DNA, 74 bp, Homo sapiens
ataaatacacaactctatcccatttacccgtgcagttgaatctcgactacaggttaccaacacatcgattgtcg

SEQ ID NO: 144384 - DNA, 75 bp, Homo sapiens
actctatcccatttacccgtgcagttgaatctcgactacaggttaccaacacatcgattgtcgggtgcaaatcca

SEQ ID NO: 144385 - DNA, 73 bp, Homo sapiens
atcccatttacccgtgcagttgaatctcgactacaggttaccaacacatcgattgtcgggtgcaaatccaaac

SEQ ID NO: 144386 - DNA, 78 bp, Homo sapiens
tgcagttgaatctcgactacaggttaccaacacatcgattgtcgggtgcaaatccaaaccatacactgcacttaaatg

SEQ ID NO: 144387 - DNA, 78 bp, Homo sapiens
atctcgactacaggttaccaacacatcgattgtcgggtgcaaatccaaaccatacactgcacttaaatgtccatgata

SEQ ID NO: 144388 - DNA, 77 bp, Homo sapiens
ggttaccaacacatcgattgtcgggtgcaaatccaaaccatacactgcacttaaatgtccatgataatgccgtataa

SEQ ID NO: 144389 - DNA, 76 bp, Homo sapiens
aacacatcgattgtcgggtgcaaatccaaaccatacactgcacttaaatgtccatgataatgccgtataacctaaa

SEQ ID NO: 144390 - DNA, 76 bp, Homo sapiens
attgtcgggtgcaaatccaaaccatacactgcacttaaatgtccatgataatgccgtataacctaaagacaaagca

SEQ ID NO: 144391 - DNA, 73 bp, Homo sapiens
aatccaaaccatacactgcacttaaatgtccatgataatgccgtataacctaaagacaaagcaggaaagttaa

SEQ ID NO: 144392 - DNA, 71 bp, Homo sapiens
aaccatacactgcacttaaatgtccatgataatgccgtataacctaaagacaaagcaggaaagttaaaact

SEQ ID NO: 144393 - DNA, 71 bp, Homo sapiens
gataaatagtagttcacaatgttttaaatccttaactccaaacttaccttattgtattcgagatcccagca

SEQ ID NO: 144394 - DNA, 70 bp, Homo sapiens
agtagttcacaatgttttaaatccttaactccaaacttaccttattgtattcgagatcccagcatttcac

SEQ ID NO: 144395 - DNA, 69 bp, Homo sapiens
gttttaaatccttaactccaaacttaccttattgtattcgagatcccagcatttcacttgtttgtcttc

SEQ ID NO: 144396 - DNA, 72 bp, Homo sapiens
aatccttaactccaaacttaccttattgtattcgagatcccagcatttcacttgtttgtcttctccacaaga

SEQ ID NO: 144397 - DNA, 75 bp, Homo sapiens
aaacttaccttattgtattcgagatcccagcatttcacttgtttgtcttctccacaagagaacagatatgggctc

SEQ ID NO: 144398 - DNA, 79 bp, Homo sapiens
ttattgtattcgagatcccagcatttcacttgtttgtcttctccacaagagaacagatatgggctccttgtgcttacta

SEQ ID NO: 144399 - DNA, 79 bp, Homo sapiens
ttcgagatcccagcatttcacttgtttgtcttctccacaagagaacagatatgggctccttgtgcttactatcacgccc

SEQ ID NO: 144400 - DNA, 77 bp, Homo sapiens
tttcacttgtttgtcttctccacaagagaacagatatgggctccttgtgcttactatcacgccccgcacagtactaa

SEQ ID NO: 144401 - DNA, 80 bp, Homo sapiens
ttgtcttctccacaagagaacagatatgggctccttgtgcttactatcacgccccgcacagtactaatatgcccagtcaa

SEQ ID NO: 144402 - DNA, 79 bp, Homo sapiens
cacaagagaacagatatgggctccttgtgcttactatcacgccccgcacagtactaatatgcccagtcaatgacagttt

SEQ ID NO: 144403 - DNA, 76 bp, Homo sapiens
aacagatatgggctccttgtgcttactatcacgccccgcacagtactaatatgcccagtcaatgacagttttaatt

SEQ ID NO: 144404 - DNA, 77 bp, Homo sapiens
atgggctccttgtgcttactatcacgccccgcacagtactaatatgcccagtcaatgacagttttaatttgccacta

SEQ ID NO: 144405 - DNA, 77 bp, Homo sapiens
ttactatcacgccccgcacagtactaatatgcccagtcaatgacagttttaatttgccactagccaagtcccagatc

SEQ ID NO: 144406 - DNA, 79 bp, Homo sapiens
gccccgcacagtactaatatgcccagtcaatgacagttttaatttgccactagccaagtcccagatctgcaatcaaaga

SEQ ID NO: 144407 - DNA, 77 bp, Homo sapiens
agtactaatatgcccagtcaatgacagttttaatttgccactagccaagtcccagatctgcaatcaaagaatattta

SEQ ID NO: 144408 - DNA, 75 bp, Homo sapiens
aatatgcccagtcaatgacagttttaatttgccactagccaagtcccagatctgcaatcaaagaatatttatttt

SEQ ID NO: 144409 - DNA, 75 bp, Homo sapiens
ttacatgacaaacacaaagtcatgtttattttttcttccttcattattacctttatagttctgtcagcagatcca

SEQ ID NO: 144410 - DNA, 73 bp, Homo sapiens
caaacacaaagtcatgtttattttttcttccttcattattacctttatagttctgtcagcagatccagtaaca

SEQ ID NO: 144411 - DNA, 73 bp, Homo sapiens
gtcatgtttattttttcttccttcattattacctttatagttctgtcagcagatccagtaacaaaccactgat

SEQ ID NO: 144412 - DNA, 72 bp, Homo sapiens
tttttcttccttcattattacctttatagttctgtcagcagatccagtaacaaaccactgatttccaggttc

SEQ ID NO: 144413 - DNA, 76 bp, Homo sapiens
ttccttcattattacctttatagttctgtcagcagatccagtaacaaaccactgatttccaggttccacagcaata

SEQ ID NO: 144414 - DNA, 75 bp, Homo sapiens
attacctttatagttctgtcagcagatccagtaacaaaccactgatttccaggttccacagcaatacatcgaacc

SEQ ID NO: 144415 - DNA, 80 bp, Homo sapiens
tagttctgtcagcagatccagtaacaaaccactgatttccaggttccacagcaatacatcgaacccagccaagatgccca

SEQ ID NO: 144416 - DNA, 76 bp, Homo sapiens
atccagtaacaaaccactgatttccaggttccacagcaatacatcgaacccagccaagatgcccactgataacctg

SEQ ID NO: 144417 - DNA, 75 bp, Homo sapiens
aaaccactgatttccaggttccacagcaatacatcgaacccagccaagatgcccactgataacctgtataaaaca

SEQ ID NO: 144418 - DNA, 75 bp, Homo sapiens
actgatttccaggttccacagcaatacatcgaacccagccaagatgcccactgataacctgtataaaacaaagta

SEQ ID NO: 144419 - DNA, 75 bp, Homo sapiens
aggttccacagcaatacatcgaacccagccaagatgcccactgataacctgtataaaacaaagtagaatgggcag

SEQ ID NO: 144420 - DNA, 74 bp, Homo sapiens
aatacatcgaacccagccaagatgcccactgataacctgtataaaacaaagtagaatgggcaggccaacgtaga

SEQ ID NO: 144421 - DNA, 76 bp, Homo sapiens
actacaaagcaatcatggttcacataataaaataaatgcagagtcactcaccctgtagagtttccacggtgggtgc

SEQ ID NO: 144422 - DNA, 72 bp, Homo sapiens
atggttcacataataaaataaatgcagagtcactcaccctgtagagtttccacggtgggtgccactggggtt

SEQ ID NO: 144423 - DNA, 72 bp, Homo sapiens
aataaaataaatgcagagtcactcaccctgtagagtttccacggtgggtgccactggggttttggcattgta

SEQ ID NO: 144424 - DNA, 71 bp, Homo sapiens
atgcagagtcactcaccctgtagagtttccacggtgggtgccactggggttttggcattgtaggggctttt

SEQ ID NO: 144425 - DNA, 68 bp, Homo sapiens
agtcactcaccctgtagagtttccacggtgggtgccactggggttttggcattgtaggggctttttta

SEQ ID NO: 144426 - DNA, 72 bp, Homo sapiens
tgtagagtttccacggtgggtgccactggggttttggcattgtaggggcttttttagccatcagtgcagagt

SEQ ID NO: 144427 - DNA, 72 bp, Homo sapiens
ttccacggtgggtgccactggggttttggcattgtaggggcttttttagccatcagtgcagagttcttggta

SEQ ID NO: 144428 - DNA, 76 bp, Homo sapiens
ccactggggttttggcattgtaggggcttttttagccatcagtgcagagttcttggtattgccagtctccatgaca

SEQ ID NO: 144429 - DNA, 80 bp, Homo sapiens
ttttggcattgtaggggcttttttagccatcagtgcagagttcttggtattgccagtctccatgacaatctagacataga

SEQ ID NO: 144430 - DNA, 80 bp, Homo sapiens
taggggcttttttagccatcagtgcagagttcttggtattgccagtctccatgacaatctagacatagaagagacattat

SEQ ID NO: 144431 - DNA, 81 bp, Homo sapiens
tttttagccatcagtgcagagttcttggtattgccagtctccatgacaatctagacatagaagagacattattattattaa

SEQ ID NO: 144432 - DNA, 76 bp, Homo sapiens
aatatggcaacatgttccaaaagttagaaacctgctatttgatgcagaaaaacttactgaattcatcgctgtaggc

SEQ ID NO: 144433 - DNA, 76 bp, Homo sapiens
tccaaaagttagaaacctgctatttgatgcagaaaaacttactgaattcatcgctgtaggctgtggacggtcagaa

SEQ ID NO: 144434 - DNA, 75 bp, Homo sapiens
aagttagaaacctgctatttgatgcagaaaaacttactgaattcatcgctgtaggctgtggacggtcagaagccc

SEQ ID NO: 144435 - DNA, 78 bp, Homo sapiens
tatttgatgcagaaaaacttactgaattcatcgctgtaggctgtggacggtcagaagccccaggatgtcggtattcac

SEQ ID NO: 144436 - DNA, 74 bp, Homo sapiens
agaaaaacttactgaattcatcgctgtaggctgtggacggtcagaagccccaggatgtcggtattcacttccac

SEQ ID NO: 144437 - DNA, 74 bp, Homo sapiens
aacttactgaattcatcgctgtaggctgtggacggtcagaagccccaggatgtcggtattcacttccactaggg

SEQ ID NO: 144438 - DNA, 75 bp, Homo sapiens
attcatcgctgtaggctgtggacggtcagaagccccaggatgtcggtattcacttccactaggggcagtacgatt

SEQ ID NO: 144439 - DNA, 77 bp, Homo sapiens
taggctgtggacggtcagaagccccaggatgtcggtattcacttccactaggggcagtacgatttgcatcagccctg

SEQ ID NO: 144440 - DNA, 75 bp, Homo sapiens
tcagaagccccaggatgtcggtattcacttccactaggggcagtacgatttgcatcagccctggggcaaaagaaa

SEQ ID NO: 144441 - DNA, 73 bp, Homo sapiens
cccaggatgtcggtattcacttccactaggggcagtacgatttgcatcagccctggggcaaaagaaataatat

SEQ ID NO: 144442 - DNA, 72 bp, Homo sapiens
gtattcacttccactaggggcagtacgatttgcatcagccctggggcaaaagaaataatattttcaaagtaa

SEQ ID NO: 144443 - DNA, 70 bp, Homo sapiens
acttccactaggggcagtacgatttgcatcagccctggggcaaaagaaataatattttcaaagtaattaa

SEQ ID NO: 144444 - DNA, 75 bp, Homo sapiens
gtgaacagtgaaatatgcttttaagatctttgtaattataatatttcatacttggtctgcaaaggtaatgccacc

SEQ ID NO: 144445 - DNA, 74 bp, Homo sapiens
gaaatatgcttttaagatctttgtaattataatatttcatacttggtctgcaaaggtaatgccaccgctaagga

SEQ ID NO: 144446 - DNA, 77 bp, Homo sapiens
tttaagatctttgtaattataatatttcatacttggtctgcaaaggtaatgccaccgctaaggactgtgcagctgat

SEQ ID NO: 144447 - DNA, 79 bp, Homo sapiens
tttgtaattataatatttcatacttggtctgcaaaggtaatgccaccgctaaggactgtgcagctgattcacttggcat

SEQ ID NO: 144448 - DNA, 81 bp, Homo sapiens
aatatttcatacttggtctgcaaaggtaatgccaccgctaaggactgtgcagctgattcacttggcattctctggatctta

SEQ ID NO: 144449 - DNA, 83 bp, Homo sapiens
atacttggtctgcaaaggtaatgccaccgctaaggactgtgcagctgattcacttggcattctctggatcttagtatctgctg

SEQ ID NO: 144450 - DNA, 81 bp, Homo sapiens
aaaggtaatgccaccgctaaggactgtgcagctgattcacttggcattctctggatcttagtatctgctgtcaaagcaacc

SEQ ID NO: 144451 - DNA, 83 bp, Homo sapiens
taatgccaccgctaaggactgtgcagctgattcacttggcattctctggatcttagtatctgctgtcaaagcaacccctatta

SEQ ID NO: 144452 - DNA, 80 bp, Homo sapiens
ctaaggactgtgcagctgattcacttggcattctctggatcttagtatctgctgtcaaagcaacccctattaaaatgaaa

SEQ ID NO: 144453 - DNA, 77 bp, Homo sapiens
agctgattcacttggcattctctggatcttagtatctgctgtcaaagcaacccctattaaaatgaaaaatcaacttc

SEQ ID NO: 144454 - DNA, 75 bp, Homo sapiens
tcacttggcattctctggatcttagtatctgctgtcaaagcaacccctattaaaatgaaaaatcaacttctttta

SEQ ID NO: 144455 - DNA, 75 bp, Homo sapiens
tctctggatcttagtatctgctgtcaaagcaacccctattaaaatgaaaaatcaacttcttttagtagctgtgta

SEQ ID NO: 144456 - DNA, 77 bp, Homo sapiens
tctcattattggctcgttagtgaaaatatatgtgacatttttaagacattttcaatatataacagctcactaaccag

SEQ ID NO: 144457 - DNA, 75 bp, Homo sapiens
gctcgttagtgaaaatatatgtgacatttttaagacattttcaatatataacagctcactaaccaggtcctggtg

SEQ ID NO: 144458 - DNA, 76 bp, Homo sapiens
aatatatgtgacatttttaagacattttcaatatataacagctcactaaccaggtcctggtgggtatggatgtgta

SEQ ID NO: 144459 - DNA, 75 bp, Homo sapiens
catttttaagacattttcaatatataacagctcactaaccaggtcctggtgggtatggatgtgtacctgccacaa

SEQ ID NO: 144460 - DNA, 75 bp, Homo sapiens
acattttcaatatataacagctcactaaccaggtcctggtgggtatggatgtgtacctgccacaaagtattcaac

SEQ ID NO: 144461 - DNA, 76 bp, Homo sapiens
ttcaatatataacagctcactaaccaggtcctggtgggtatggatgtgtacctgccacaaagtattcaacttcttg

SEQ ID NO: 144462 - DNA, 72 bp, Homo sapiens
agctcactaaccaggtcctggtgggtatggatgtgtacctgccacaaagtattcaacttcttgtcctaaaaa

SEQ ID NO: 144463 - DNA, 71 bp, Homo sapiens
taaccaggtcctggtgggtatggatgtgtacctgccacaaagtattcaacttcttgtcctaaaaaaacaca

SEQ ID NO: 144464 - DNA, 80 bp, Homo sapiens
taaaattcacatataagtctgacatttctgataataccatactcaccttgattggcagggtactgtttatgaacatatga

SEQ ID NO: 144465 - DNA, 78 bp, Homo sapiens
acatataagtctgacatttctgataataccatactcaccttgattggcagggtactgtttatgaacatatgaatccgt

SEQ ID NO: 144466 - DNA, 81 bp, Homo sapiens
agtctgacatttctgataataccatactcaccttgattggcagggtactgtttatgaacatatgaatccgttgcattctga

SEQ ID NO: 144467 - DNA, 78 bp, Homo sapiens
ttctgataataccatactcaccttgattggcagggtactgtttatgaacatatgaatccgttgcattctgaggaccct

SEQ ID NO: 144468 - DNA, 76 bp, Homo sapiens
atactcaccttgattggcagggtactgtttatgaacatatgaatccgttgcattctgaggacccttctctttaaga

SEQ ID NO: 144469 - DNA, 74 bp, Homo sapiens
ttgattggcagggtactgtttatgaacatatgaatccgttgcattctgaggacccttctctttaagattttctt

SEQ ID NO: 144470 - DNA, 75 bp, Homo sapiens
tactgtttatgaacatatgaatccgttgcattctgaggacccttctctttaagattttcttttgaagtaggcata

SEQ ID NO: 144471 - DNA, 77 bp, Homo sapiens
tttatgaacatatgaatccgttgcattctgaggacccttctctttaagattttcttttgaagtaggcatatgcaaca

SEQ ID NO: 144472 - DNA, 77 bp, Homo sapiens
tatgaatccgttgcattctgaggacccttctctttaagattttcttttgaagtaggcatatgcaacacaggaccata

SEQ ID NO: 144473 - DNA, 74 bp, Homo sapiens
attctgaggacccttctctttaagattttcttttgaagtaggcatatgcaacacaggaccatactcattacgaa

SEQ ID NO: 144474 - DNA, 76 bp, Homo sapiens
ccttctctttaagattttcttttgaagtaggcatatgcaacacaggaccatactcattacgaagcttgattgccat

SEQ ID NO: 144475 - DNA, 74 bp, Homo sapiens
aagattttcttttgaagtaggcatatgcaacacaggaccatactcattacgaagcttgattgccatttttcgtt

SEQ ID NO: 144476 - DNA, 77 bp, Homo sapiens
ttttgaagtaggcatatgcaacacaggaccatactcattacgaagcttgattgccatttttcgtttgtgactattta

SEQ ID NO: 144477 - DNA, 76 bp, Homo sapiens
agtaggcatatgcaacacaggaccatactcattacgaagcttgattgccatttttcgtttgtgactatttagaaat

SEQ ID NO: 144478 - DNA, 75 bp, Homo sapiens
gcaacacaggaccatactcattacgaagcttgattgccatttttcgtttgtgactatttagaaattataaacata

SEQ ID NO: 144479 - DNA, 72 bp, Homo sapiens
gaccatactcattacgaagcttgattgccatttttcgtttgtgactatttagaaattataaacataagaacg

SEQ ID NO: 144480 - DNA, 70 bp, Homo sapiens
gaaaaaaaaaaactacaccaacctctcttcatctaaaggcacaggttttccattatcagctacaaacatg

SEQ ID NO: 144481 - DNA, 73 bp, Homo sapiens
aaaaactacaccaacctctcttcatctaaaggcacaggttttccattatcagctacaaacatgtcatgggtcc

SEQ ID NO: 144482 - DNA, 76 bp, Homo sapiens
acctctcttcatctaaaggcacaggttttccattatcagctacaaacatgtcatgggtcctcttcaacgacctgaa

SEQ ID NO: 144483 - DNA, 76 bp, Homo sapiens
ttcatctaaaggcacaggttttccattatcagctacaaacatgtcatgggtcctcttcaacgacctgaacacaagg

SEQ ID NO: 144484 - DNA, 75 bp, Homo sapiens
acaggttttccattatcagctacaaacatgtcatgggtcctcttcaacgacctgaacacaagggtgtgtacagaa

SEQ ID NO: 144485 - DNA, 77 bp, Homo sapiens
tttccattatcagctacaaacatgtcatgggtcctcttcaacgacctgaacacaagggtgtgtacagaatgtttctg

SEQ ID NO: 144486 - DNA, 74 bp, Homo sapiens
tacaaacatgtcatgggtcctcttcaacgacctgaacacaagggtgtgtacagaatgtttctgtacctcctaaa

SEQ ID NO: 144487 - DNA, 71 bp, Homo sapiens
atgtcatgggtcctcttcaacgacctgaacacaagggtgtgtacagaatgtttctgtacctcctaaaaaaa

SEQ ID NO: 144488 - DNA, 69 bp, Homo sapiens
gtcctcttcaacgacctgaacacaagggtgtgtacagaatgtttctgtacctcctaaaaaaaaagaatg

SEQ ID NO: 144489 - DNA, 70 bp, Homo sapiens
ctgaacacaagggtgtgtacagaatgtttctgtacctcctaaaaaaaaagaatgtaattacacacctatc

SEQ ID NO: 144490 - DNA, 75 bp, Homo sapiens
aaaaacagtccagagacaaacgactcttgagagccccagtgtcactttacctcgaccatgatgctaccgtgtatc

SEQ ID NO: 144491 - DNA, 76 bp, Homo sapiens
agagacaaacgactcttgagagccccagtgtcactttacctcgaccatgatgctaccgtgtatcccacctccggca

SEQ ID NO: 144492 - DNA, 74 bp, Homo sapiens
actcttgagagccccagtgtcactttacctcgaccatgatgctaccgtgtatcccacctccggcagggaagaaa

SEQ ID NO: 144493 - DNA, 74 bp, Homo sapiens
cccagtgtcactttacctcgaccatgatgctaccgtgtatcccacctccggcagggaagaaactctaatcacta

SEQ ID NO: 144494 - DNA, 73 bp, Homo sapiens
actttacctcgaccatgatgctaccgtgtatcccacctccggcagggaagaaactctaatcactaacgcagta

SEQ ID NO: 144495 - DNA, 74 bp, Homo sapiens
accatgatgctaccgtgtatcccacctccggcagggaagaaactctaatcactaacgcagtacccgccgccaca

SEQ ID NO: 144496 - DNA, 76 bp, Homo sapiens
atgctaccgtgtatcccacctccggcagggaagaaactctaatcactaacgcagtacccgccgccacagctgtgca

SEQ ID NO: 144497 - DNA, 76 bp, Homo sapiens
tgtatcccacctccggcagggaagaaactctaatcactaacgcagtacccgccgccacagctgtgcagcaccttcc

SEQ ID NO: 144498 - DNA, 74 bp, Homo sapiens
ctccggcagggaagaaactctaatcactaacgcagtacccgccgccacagctgtgcagcaccttccggaattgg

SEQ ID NO: 144499 - DNA, 74 bp, Homo sapiens
aagaaactctaatcactaacgcagtacccgccgccacagctgtgcagcaccttccggaattgggcgcccaggcg

SEQ ID NO: 144500 - DNA, 80 bp, Homo sapiens
taatcactaacgcagtacccgccgccacagctgtgcagcaccttccggaattgggcgcccaggcggcggatgtgatgcaa

SEQ ID NO: 144501 - DNA, 82 bp, Homo sapiens
agtacccgccgccacagctgtgcagcaccttccggaattgggcgcccaggcggcggatgtgatgcaagctctgcgcacgcgc

SEQ ID NO: 144502 - DNA, 84 bp, Homo sapiens
cacagctgtgcagcaccttccggaattgggcgcccaggcggcggatgtgatgcaagctctgcgcacgcgcgctagtctccctcg

SEQ ID NO: 144503 - DNA, 84 bp, Homo sapiens
tgcagcaccttccggaattgggcgcccaggcggcggatgtgatgcaagctctgcgcacgcgcgctagtctccctcggccatcta

SEQ ID NO: 144504 - DNA, 82 bp, Homo sapiens
cttccggaattgggcgcccaggcggcggatgtgatgcaagctctgcgcacgcgcgctagtctccctcggccatctaggatca

SEQ ID NO: 144505 - DNA, 79 bp, Homo sapiens
agagggagggcgctgggaggaggggctgctgctcgccgctcgcggctctgggggctcggctttgccgcgctcgctgcac

SEQ ID NO: 144506 - DNA, 81 bp, Homo sapiens
cgctgggaggaggggctgctgctcgccgctcgcggctctgggggctcggctttgccgcgctcgctgcacttgggcgagagc

SEQ ID NO: 144507 - DNA, 80 bp, Homo sapiens
aggggctgctgctcgccgctcgcggctctgggggctcggctttgccgcgctcgctgcacttgggcgagagctggaacgtg

SEQ ID NO: 144508 - DNA, 82 bp, Homo sapiens
tgctcgccgctcgcggctctgggggctcggctttgccgcgctcgctgcacttgggcgagagctggaacgtggaccagagctc

SEQ ID NO: 144509 - DNA, 80 bp, Homo sapiens
tcgcggctctgggggctcggctttgccgcgctcgctgcacttgggcgagagctggaacgtggaccagagctcggatccca

SEQ ID NO: 144510 - DNA, 80 bp, Homo sapiens
ggggctcggctttgccgcgctcgctgcacttgggcgagagctggaacgtggaccagagctcggatcccatcgcagctacc

SEQ ID NO: 144511 - DNA, 84 bp, Homo sapiens
tcggctttgccgcgctcgctgcacttgggcgagagctggaacgtggaccagagctcggatcccatcgcagctaccgcgatgaga

SEQ ID NO: 144512 - DNA, 84 bp, Homo sapiens
ctcgctgcacttgggcgagagctggaacgtggaccagagctcggatcccatcgcagctaccgcgatgagaggcgctcgcggcgc

SEQ ID NO: 144513 - DNA, 81 bp, Homo sapiens
tgggcgagagctggaacgtggaccagagctcggatcccatcgcagctaccgcgatgagaggcgctcgcggcgcctgggatt

SEQ ID NO: 144514 - DNA, 80 bp, Homo sapiens
agagctggaacgtggaccagagctcggatcccatcgcagctaccgcgatgagaggcgctcgcggcgcctgggattttctc

SEQ ID NO: 144515 - DNA, 83 bp, Homo sapiens
tggaccagagctcggatcccatcgcagctaccgcgatgagaggcgctcgcggcgcctgggattttctctgcgttctgctccta

SEQ ID NO: 144516 - DNA, 82 bp, Homo sapiens
agctcggatcccatcgcagctaccgcgatgagaggcgctcgcggcgcctgggattttctctgcgttctgctcctactgcttc

SEQ ID NO: 144517 - DNA, 82 bp, Homo sapiens
atcgcagctaccgcgatgagaggcgctcgcggcgcctgggattttctctgcgttctgctcctactgcttcgcgtccagacag

SEQ ID NO: 144518 - DNA, 80 bp, Homo sapiens
taccgcgatgagaggcgctcgcggcgcctgggattttctctgcgttctgctcctactgcttcgcgtccagacaggtggga

SEQ ID NO: 144519 - DNA, 77 bp, Homo sapiens
agaggcgctcgcggcgcctgggattttctctgcgttctgctcctactgcttcgcgtccagacaggtgggacaccgcg

SEQ ID NO: 144520 - DNA, 76 bp, Homo sapiens
cggcgcctgggattttctctgcgttctgctcctactgcttcgcgtccagacaggtgggacaccgcggctggcaccc

SEQ ID NO: 144521 - DNA, 76 bp, Homo sapiens
attttctctgcgttctgctcctactgcttcgcgtccagacaggtgggacaccgcggctggcaccccgaccgtgcga

SEQ ID NO: 144522 - DNA, 78 bp, Homo sapiens
tttcgccaaggaagaagatcatactcaacacgattctgtttttcttggcaggctcttctcaaccatctgtgagtccag

SEQ ID NO: 144523 - DNA, 75 bp, Homo sapiens
aagaagatcatactcaacacgattctgtttttcttggcaggctcttctcaaccatctgtgagtccaggggaaccg

SEQ ID NO: 144524 - DNA, 75 bp, Homo sapiens
atactcaacacgattctgtttttcttggcaggctcttctcaaccatctgtgagtccaggggaaccgtctccacca

SEQ ID NO: 144525 - DNA, 77 bp, Homo sapiens
tccatccatccaggaaaatcagacttaatagtccgcgtgggcgacgagattaggctgttatgcactgatccgggctt

SEQ ID NO: 144526 - DNA, 76 bp, Homo sapiens
caggaaaatcagacttaatagtccgcgtgggcgacgagattaggctgttatgcactgatccgggctttgtcaaatg

SEQ ID NO: 144527 - DNA, 75 bp, Homo sapiens
aatcagacttaatagtccgcgtgggcgacgagattaggctgttatgcactgatccgggctttgtcaaatggactt

SEQ ID NO: 144528 - DNA, 77 bp, Homo sapiens
taatagtccgcgtgggcgacgagattaggctgttatgcactgatccgggctttgtcaaatggacttttgagatcctg

SEQ ID NO: 144529 - DNA, 79 bp, Homo sapiens
gcgacgagattaggctgttatgcactgatccgggctttgtcaaatggacttttgagatcctggatgaaacgaatgagaa

SEQ ID NO: 144530 - DNA, 79 bp, Homo sapiens
agattaggctgttatgcactgatccgggctttgtcaaatggacttttgagatcctggatgaaacgaatgagaataagca

SEQ ID NO: 144531 - DNA, 81 bp, Homo sapiens
tgttatgcactgatccgggctttgtcaaatggacttttgagatcctggatgaaacgaatgagaataagcagaatgaatgga

SEQ ID NO: 144532 - DNA, 76 bp, Homo sapiens
cgggctttgtcaaatggacttttgagatcctggatgaaacgaatgagaataagcagaatgaatggatcacggaaaa

SEQ ID NO: 144533 - DNA, 78 bp, Homo sapiens
tttgtcaaatggacttttgagatcctggatgaaacgaatgagaataagcagaatgaatggatcacggaaaaggcagaa

SEQ ID NO: 144534 - DNA, 77 bp, Homo sapiens
acttttgagatcctggatgaaacgaatgagaataagcagaatgaatggatcacggaaaaggcagaagccaccaacac

SEQ ID NO: 144535 - DNA, 77 bp, Homo sapiens
atcctggatgaaacgaatgagaataagcagaatgaatggatcacggaaaaggcagaagccaccaacaccggcaaata

SEQ ID NO: 144536 - DNA, 76 bp, Homo sapiens
aaacgaatgagaataagcagaatgaatggatcacggaaaaggcagaagccaccaacaccggcaaatacacgtgcac

SEQ ID NO: 144537 - DNA, 76 bp, Homo sapiens
agaataagcagaatgaatggatcacggaaaaggcagaagccaccaacaccggcaaatacacgtgcaccaacaaaca

SEQ ID NO: 144538 - DNA, 73 bp, Homo sapiens
aatgaatggatcacggaaaaggcagaagccaccaacaccggcaaatacacgtgcaccaacaaacacggcttaa

SEQ ID NO: 144539 - DNA, 72 bp, Homo sapiens
agaagccaccaacaccggcaaatacacgtgcaccaacaaacacggcttaagcaattccatttatgtgtttgt

SEQ ID NO: 144540 - DNA, 71 bp, Homo sapiens
aacaccggcaaatacacgtgcaccaacaaacacggcttaagcaattccatttatgtgtttgttagaggtaa

SEQ ID NO: 144541 - DNA, 72 bp, Homo sapiens
aaatacacgtgcaccaacaaacacggcttaagcaattccatttatgtgtttgttagaggtaaatgcttggct

SEQ ID NO: 144542 - DNA, 76 bp, Homo sapiens
accaacaaacacggcttaagcaattccatttatgtgtttgttagaggtaaatgcttggctttctgcagtgctgtgc

SEQ ID NO: 144543 - DNA, 76 bp, Homo sapiens
aaacacggcttaagcaattccatttatgtgtttgttagaggtaaatgcttggctttctgcagtgctgtgctttcaa

SEQ ID NO: 144544 - DNA, 78 bp, Homo sapiens
agtgtctgtgaccagccattccaactactgattttggatatgcttctatagatcctgccaagcttttccttgttgacc

SEQ ID NO: 144545 - DNA, 77 bp, Homo sapiens
agccattccaactactgattttggatatgcttctatagatcctgccaagcttttccttgttgaccgctccttgtatg

SEQ ID NO: 144546 - DNA, 75 bp, Homo sapiens
aactactgattttggatatgcttctatagatcctgccaagcttttccttgttgaccgctccttgtatgggaaaga

SEQ ID NO: 144547 - DNA, 74 bp, Homo sapiens
attttggatatgcttctatagatcctgccaagcttttccttgttgaccgctccttgtatgggaaagaagacaac

SEQ ID NO: 144548 - DNA, 74 bp, Homo sapiens
ttctatagatcctgccaagcttttccttgttgaccgctccttgtatgggaaagaagacaacgacacgctggtcc

SEQ ID NO: 144549 - DNA, 76 bp, Homo sapiens
tgccaagcttttccttgttgaccgctccttgtatgggaaagaagacaacgacacgctggtccgctgtcctctcaca

SEQ ID NO: 144550 - DNA, 74 bp, Homo sapiens
ttttccttgttgaccgctccttgtatgggaaagaagacaacgacacgctggtccgctgtcctctcacagaccca

SEQ ID NO: 144551 - DNA, 76 bp, Homo sapiens
ttgaccgctccttgtatgggaaagaagacaacgacacgctggtccgctgtcctctcacagacccagaagtgaccaa

SEQ ID NO: 144552 - DNA, 76 bp, Homo sapiens
ttgtatgggaaagaagacaacgacacgctggtccgctgtcctctcacagacccagaagtgaccaattattccctca

SEQ ID NO: 144553 - DNA, 73 bp, Homo sapiens
ggaaagaagacaacgacacgctggtccgctgtcctctcacagacccagaagtgaccaattattccctcaaggg

SEQ ID NO: 144554 - DNA, 73 bp, Homo sapiens
aacgacacgctggtccgctgtcctctcacagacccagaagtgaccaattattccctcaaggggtgccagggga

SEQ ID NO: 144555 - DNA, 73 bp, Homo sapiens
tccgctgtcctctcacagacccagaagtgaccaattattccctcaaggggtgccaggggaagcctcttcccaa

SEQ ID NO: 144556 - DNA, 72 bp, Homo sapiens
ctctcacagacccagaagtgaccaattattccctcaaggggtgccaggggaagcctcttcccaaggacttga

SEQ ID NO: 144557 - DNA, 69 bp, Homo sapiens
cagaagtgaccaattattccctcaaggggtgccaggggaagcctcttcccaaggacttgaggtttattc

SEQ ID NO: 144558 - DNA, 67 bp, Homo sapiens
accaattattccctcaaggggtgccaggggaagcctcttcccaaggacttgaggtttattcctgacc

SEQ ID NO: 144559 - DNA, 67 bp, Homo sapiens
attccctcaaggggtgccaggggaagcctcttcccaaggacttgaggtttattcctgaccccaaggc

SEQ ID NO: 144560 - DNA, 73 bp, Homo sapiens
tgccaggggaagcctcttcccaaggacttgaggtttattcctgaccccaaggcgggcatcatgatcaaaagtg

SEQ ID NO: 144561 - DNA, 72 bp, Homo sapiens
aagcctcttcccaaggacttgaggtttattcctgaccccaaggcgggcatcatgatcaaaagtgtgaaacgc

SEQ ID NO: 144562 - DNA, 73 bp, Homo sapiens
ttcccaaggacttgaggtttattcctgaccccaaggcgggcatcatgatcaaaagtgtgaaacgcgcctacca

SEQ ID NO: 144563 - DNA, 78 bp, Homo sapiens
ttgaggtttattcctgaccccaaggcgggcatcatgatcaaaagtgtgaaacgcgcctaccatcggctctgtctgcat

SEQ ID NO: 144564 - DNA, 80 bp, Homo sapiens
aaggcgggcatcatgatcaaaagtgtgaaacgcgcctaccatcggctctgtctgcattgttctgtggaccaggagggcaa

SEQ ID NO: 144565 - DNA, 83 bp, Homo sapiens
atcatgatcaaaagtgtgaaacgcgcctaccatcggctctgtctgcattgttctgtggaccaggagggcaagtcagtgctgtc

SEQ ID NO: 144566 - DNA, 80 bp, Homo sapiens
tgtgaaacgcgcctaccatcggctctgtctgcattgttctgtggaccaggagggcaagtcagtgctgtcggaaaaattca

SEQ ID NO: 144567 - DNA, 78 bp, Homo sapiens
aacgcgcctaccatcggctctgtctgcattgttctgtggaccaggagggcaagtcagtgctgtcggaaaaattcatcc

SEQ ID NO: 144568 - DNA, 80 bp, Homo sapiens
atcggctctgtctgcattgttctgtggaccaggagggcaagtcagtgctgtcggaaaaattcatcctgaaagtgaggcca

SEQ ID NO: 144569 - DNA, 79 bp, Homo sapiens
tgtctgcattgttctgtggaccaggagggcaagtcagtgctgtcggaaaaattcatcctgaaagtgaggccaggtactg

SEQ ID NO: 144570 - DNA, 76 bp, Homo sapiens
tgtggaccaggagggcaagtcagtgctgtcggaaaaattcatcctgaaagtgaggccaggtactggctctttctta

SEQ ID NO: 144571 - DNA, 76 bp, Homo sapiens
aggagggcaagtcagtgctgtcggaaaaattcatcctgaaagtgaggccaggtactggctctttcttatctgcctc

SEQ ID NO: 144572 - DNA, 75 bp, Homo sapiens
aagtcagtgctgtcggaaaaattcatcctgaaagtgaggccaggtactggctctttcttatctgcctctgggagt

SEQ ID NO: 144573 - DNA, 78 bp, Homo sapiens
ttcatgctataatacaaattatttgaggggccacatttcttttcattctagccttcaaagctgtgcctgttgtgtctg

SEQ ID NO: 144574 - DNA, 75 bp, Homo sapiens
aatacaaattatttgaggggccacatttcttttcattctagccttcaaagctgtgcctgttgtgtctgtgtccaa

SEQ ID NO: 144575 - DNA, 77 bp, Homo sapiens
aggggccacatttcttttcattctagccttcaaagctgtgcctgttgtgtctgtgtccaaagcaagctatcttctta

SEQ ID NO: 144576 - DNA, 75 bp, Homo sapiens
tttcttttcattctagccttcaaagctgtgcctgttgtgtctgtgtccaaagcaagctatcttcttagggaaggg

SEQ ID NO: 144577 - DNA, 76 bp, Homo sapiens
tttcattctagccttcaaagctgtgcctgttgtgtctgtgtccaaagcaagctatcttcttagggaaggggaagaa

SEQ ID NO: 144578 - DNA, 79 bp, Homo sapiens
ttcaaagctgtgcctgttgtgtctgtgtccaaagcaagctatcttcttagggaaggggaagaattcacagtgacgtgca

SEQ ID NO: 144579 - DNA, 75 bp, Homo sapiens
cctgttgtgtctgtgtccaaagcaagctatcttcttagggaaggggaagaattcacagtgacgtgcacaataaaa

SEQ ID NO: 144580 - DNA, 78 bp, Homo sapiens
tgtctgtgtccaaagcaagctatcttcttagggaaggggaagaattcacagtgacgtgcacaataaaagatgtgtcta

SEQ ID NO: 144581 - DNA, 76 bp, Homo sapiens
aagcaagctatcttcttagggaaggggaagaattcacagtgacgtgcacaataaaagatgtgtctagttctgtgta

SEQ ID NO: 144582 - DNA, 75 bp, Homo sapiens
ctatcttcttagggaaggggaagaattcacagtgacgtgcacaataaaagatgtgtctagttctgtgtactcaac

SEQ ID NO: 144583 - DNA, 74 bp, Homo sapiens
aaggggaagaattcacagtgacgtgcacaataaaagatgtgtctagttctgtgtactcaacgtggaaaagagaa

SEQ ID NO: 144584 - DNA, 76 bp, Homo sapiens
aagaattcacagtgacgtgcacaataaaagatgtgtctagttctgtgtactcaacgtggaaaagagaaaacagtca

SEQ ID NO: 144585 - DNA, 76 bp, Homo sapiens
agtgacgtgcacaataaaagatgtgtctagttctgtgtactcaacgtggaaaagagaaaacagtcaggtgagtgaa

SEQ ID NO: 144586 - DNA, 75 bp, Homo sapiens
ataaaagatgtgtctagttctgtgtactcaacgtggaaaagagaaaacagtcaggtgagtgaatcgcttcattct

SEQ ID NO: 144587 - DNA, 78 bp, Homo sapiens
atgtgtctagttctgtgtactcaacgtggaaaagagaaaacagtcaggtgagtgaatcgcttcattcttctcatgttc

SEQ ID NO: 144588 - DNA, 72 bp, Homo sapiens
atttttttttctccttttctgaaaccagcagactaaactacaggagaaatataatagctggcatcacggtga

SEQ ID NO: 144589 - DNA, 77 bp, Homo sapiens
ttctccttttctgaaaccagcagactaaactacaggagaaatataatagctggcatcacggtgacttcaattatgaa

SEQ ID NO: 144590 - DNA, 79 bp, Homo sapiens
ttctgaaaccagcagactaaactacaggagaaatataatagctggcatcacggtgacttcaattatgaacgtcaggcaa

SEQ ID NO: 144591 - DNA, 78 bp, Homo sapiens
agactaaactacaggagaaatataatagctggcatcacggtgacttcaattatgaacgtcaggcaacgttgactatca

SEQ ID NO: 144592 - DNA, 79 bp, Homo sapiens
aactacaggagaaatataatagctggcatcacggtgacttcaattatgaacgtcaggcaacgttgactatcagttcagc

SEQ ID NO: 144593 - DNA, 80 bp, Homo sapiens
aatataatagctggcatcacggtgacttcaattatgaacgtcaggcaacgttgactatcagttcagcgagagttaatgat

SEQ ID NO: 144594 - DNA, 82 bp, Homo sapiens
tggcatcacggtgacttcaattatgaacgtcaggcaacgttgactatcagttcagcgagagttaatgattctggagtgttca

SEQ ID NO: 144595 - DNA, 80 bp, Homo sapiens
ggtgacttcaattatgaacgtcaggcaacgttgactatcagttcagcgagagttaatgattctggagtgttcatgtgtta

SEQ ID NO: 144596 - DNA, 81 bp, Homo sapiens
attatgaacgtcaggcaacgttgactatcagttcagcgagagttaatgattctggagtgttcatgtgttatgccaataata

SEQ ID NO: 144597 - DNA, 80 bp, Homo sapiens
aggcaacgttgactatcagttcagcgagagttaatgattctggagtgttcatgtgttatgccaataatacttttggatca

SEQ ID NO: 144598 - DNA, 82 bp, Homo sapiens
actatcagttcagcgagagttaatgattctggagtgttcatgtgttatgccaataatacttttggatcagcaaatgtcacaa

SEQ ID NO: 144599 - DNA, 80 bp, Homo sapiens
agttcagcgagagttaatgattctggagtgttcatgtgttatgccaataatacttttggatcagcaaatgtcacaacaac

SEQ ID NO: 144600 - DNA, 79 bp, Homo sapiens
taatgattctggagtgttcatgtgttatgccaataatacttttggatcagcaaatgtcacaacaaccttggaagtagta

SEQ ID NO: 144601 - DNA, 76 bp, Homo sapiens
tggagtgttcatgtgttatgccaataatacttttggatcagcaaatgtcacaacaaccttggaagtagtaggtaaa

SEQ ID NO: 144602 - DNA, 74 bp, Homo sapiens
atgtgttatgccaataatacttttggatcagcaaatgtcacaacaaccttggaagtagtaggtaaatacctcta

SEQ ID NO: 144603 - DNA, 72 bp, Homo sapiens
caataatacttttggatcagcaaatgtcacaacaaccttggaagtagtaggtaaatacctctatgggaatgt

SEQ ID NO: 144604 - DNA, 71 bp, Homo sapiens
atacttttggatcagcaaatgtcacaacaaccttggaagtagtaggtaaatacctctatgggaatgtttaa

SEQ ID NO: 144605 - DNA, 74 bp, Homo sapiens
tccagtagttgtagataatggtttctttctgtcttatttcattctaattagataaaggattcattaatatcttc

SEQ ID NO: 144606 - DNA, 73 bp, Homo sapiens
taatggtttctttctgtcttatttcattctaattagataaaggattcattaatatcttccccatgataaacac

SEQ ID NO: 144607 - DNA, 74 bp, Homo sapiens
tttctgtcttatttcattctaattagataaaggattcattaatatcttccccatgataaacactacagtatttg

SEQ ID NO: 144608 - DNA, 73 bp, Homo sapiens
atttcattctaattagataaaggattcattaatatcttccccatgataaacactacagtatttgtaaacgatg

SEQ ID NO: 144609 - DNA, 72 bp, Homo sapiens
aattagataaaggattcattaatatcttccccatgataaacactacagtatttgtaaacgatggagaaaatg

SEQ ID NO: 144610 - DNA, 73 bp, Homo sapiens
gataaaggattcattaatatcttccccatgataaacactacagtatttgtaaacgatggagaaaatgtagatt

SEQ ID NO: 144611 - DNA, 76 bp, Homo sapiens
tcattaatatcttccccatgataaacactacagtatttgtaaacgatggagaaaatgtagatttgattgttgaata

SEQ ID NO: 144612 - DNA, 76 bp, Homo sapiens
cccatgataaacactacagtatttgtaaacgatggagaaaatgtagatttgattgttgaatatgaagcattcccca

SEQ ID NO: 144613 - DNA, 75 bp, Homo sapiens
cactacagtatttgtaaacgatggagaaaatgtagatttgattgttgaatatgaagcattccccaaacctgaaca

SEQ ID NO: 144614 - DNA, 75 bp, Homo sapiens
agtatttgtaaacgatggagaaaatgtagatttgattgttgaatatgaagcattccccaaacctgaacaccagca

SEQ ID NO: 144615 - DNA, 80 bp, Homo sapiens
atggagaaaatgtagatttgattgttgaatatgaagcattccccaaacctgaacaccagcagtggatctatatgaacaga

SEQ ID NO: 144616 - DNA, 77 bp, Homo sapiens
aaatgtagatttgattgttgaatatgaagcattccccaaacctgaacaccagcagtggatctatatgaacagaacct

SEQ ID NO: 144617 - DNA, 79 bp, Homo sapiens
tttgattgttgaatatgaagcattccccaaacctgaacaccagcagtggatctatatgaacagaaccttcactgataaa

SEQ ID NO: 144618 - DNA, 78 bp, Homo sapiens
atatgaagcattccccaaacctgaacaccagcagtggatctatatgaacagaaccttcactgataaatgggaagatta

SEQ ID NO: 144619 - DNA, 75 bp, Homo sapiens
attccccaaacctgaacaccagcagtggatctatatgaacagaaccttcactgataaatgggaagattatcccaa

SEQ ID NO: 144620 - DNA, 80 bp, Homo sapiens
tgaacaccagcagtggatctatatgaacagaaccttcactgataaatgggaagattatcccaagtctgagaatgaaagta

SEQ ID NO: 144621 - DNA, 77 bp, Homo sapiens
agtggatctatatgaacagaaccttcactgataaatgggaagattatcccaagtctgagaatgaaagtaatatcagg

SEQ ID NO: 144622 - DNA, 76 bp, Homo sapiens
ctatatgaacagaaccttcactgataaatgggaagattatcccaagtctgagaatgaaagtaatatcaggtaagaa

SEQ ID NO: 144623 - DNA, 72 bp, Homo sapiens
aaccttcactgataaatgggaagattatcccaagtctgagaatgaaagtaatatcaggtaagaaatggacct

SEQ ID NO: 144624 - DNA, 73 bp, Homo sapiens
actgataaatgggaagattatcccaagtctgagaatgaaagtaatatcaggtaagaaatggaccttgccctgg

SEQ ID NO: 144625 - DNA, 77 bp, Homo sapiens
aggcatgctatccacaggtgattgactagttgtcttttctttgtagatacgtaagtgaacttcatctaacgagatta

SEQ ID NO: 144626 - DNA, 75 bp, Homo sapiens
tgctatccacaggtgattgactagttgtcttttctttgtagatacgtaagtgaacttcatctaacgagattaaaa

SEQ ID NO: 144627 - DNA, 70 bp, Homo sapiens
attgactagttgtcttttctttgtagatacgtaagtgaacttcatctaacgagattaaaaggcaccgaag

SEQ ID NO: 144628 - DNA, 72 bp, Homo sapiens
tgtcttttctttgtagatacgtaagtgaacttcatctaacgagattaaaaggcaccgaaggaggcacttaca

SEQ ID NO: 144629 - DNA, 72 bp, Homo sapiens
tttctttgtagatacgtaagtgaacttcatctaacgagattaaaaggcaccgaaggaggcacttacacattc

SEQ ID NO: 144630 - DNA, 72 bp, Homo sapiens
atacgtaagtgaacttcatctaacgagattaaaaggcaccgaaggaggcacttacacattcctagtgtccaa

SEQ ID NO: 144631 - DNA, 73 bp, Homo sapiens
aacttcatctaacgagattaaaaggcaccgaaggaggcacttacacattcctagtgtccaattctgacgtcaa

SEQ ID NO: 144632 - DNA, 78 bp, Homo sapiens
gagattaaaaggcaccgaaggaggcacttacacattcctagtgtccaattctgacgtcaatgctgccatagcatttaa

SEQ ID NO: 144633 - DNA, 77 bp, Homo sapiens
taaaaggcaccgaaggaggcacttacacattcctagtgtccaattctgacgtcaatgctgccatagcatttaatgtt

SEQ ID NO: 144634 - DNA, 80 bp, Homo sapiens
gaggcacttacacattcctagtgtccaattctgacgtcaatgctgccatagcatttaatgtttatgtgaatagtaagtaa

SEQ ID NO: 144635 - DNA, 80 bp, Homo sapiens
acttacacattcctagtgtccaattctgacgtcaatgctgccatagcatttaatgtttatgtgaatagtaagtaacatga

SEQ ID NO: 144636 - DNA, 78 bp, Homo sapiens
tagtgtccaattctgacgtcaatgctgccatagcatttaatgtttatgtgaatagtaagtaacatgaagggctccttt

SEQ ID NO: 144637 - DNA, 76 bp, Homo sapiens
caattctgacgtcaatgctgccatagcatttaatgtttatgtgaatagtaagtaacatgaagggctccttttaatt

SEQ ID NO: 144638 - DNA, 74 bp, Homo sapiens
gtcaatgctgccatagcatttaatgtttatgtgaatagtaagtaacatgaagggctccttttaattttttattc

SEQ ID NO: 144639 - DNA, 74 bp, Homo sapiens
aggttttccagcactctgacatatggccatttctgttttcctgtagcaaaaccagaaatcctgacttacgacag

SEQ ID NO: 144640 - DNA, 78 bp, Homo sapiens
ttccagcactctgacatatggccatttctgttttcctgtagcaaaaccagaaatcctgacttacgacaggctcgtgaa

SEQ ID NO: 144641 - DNA, 78 bp, Homo sapiens
atatggccatttctgttttcctgtagcaaaaccagaaatcctgacttacgacaggctcgtgaatggcatgctccaatg

SEQ ID NO: 144642 - DNA, 81 bp, Homo sapiens
ttctgttttcctgtagcaaaaccagaaatcctgacttacgacaggctcgtgaatggcatgctccaatgtgtggcagcagga

SEQ ID NO: 144643 - DNA, 80 bp, Homo sapiens
ttttcctgtagcaaaaccagaaatcctgacttacgacaggctcgtgaatggcatgctccaatgtgtggcagcaggattcc

SEQ ID NO: 144644 - DNA, 81 bp, Homo sapiens
aaaccagaaatcctgacttacgacaggctcgtgaatggcatgctccaatgtgtggcagcaggattcccagagcccacaata

SEQ ID NO: 144645 - DNA, 81 bp, Homo sapiens
ctgacttacgacaggctcgtgaatggcatgctccaatgtgtggcagcaggattcccagagcccacaatagattggtatttt

SEQ ID NO: 144646 - DNA, 82 bp, Homo sapiens
ttacgacaggctcgtgaatggcatgctccaatgtgtggcagcaggattcccagagcccacaatagattggtatttttgtcca

SEQ ID NO: 144647 - DNA, 83 bp, Homo sapiens
ctcgtgaatggcatgctccaatgtgtggcagcaggattcccagagcccacaatagattggtatttttgtccaggaactgagca

SEQ ID NO: 144648 - DNA, 81 bp, Homo sapiens
ctccaatgtgtggcagcaggattcccagagcccacaatagattggtatttttgtccaggaactgagcagaggtgagatgat

SEQ ID NO: 144649 - DNA, 79 bp, Homo sapiens
tgtggcagcaggattcccagagcccacaatagattggtatttttgtccaggaactgagcagaggtgagatgattatttt

SEQ ID NO: 144650 - DNA, 77 bp, Homo sapiens
attcccagagcccacaatagattggtatttttgtccaggaactgagcagaggtgagatgattatttttggcactgct

SEQ ID NO: 144651 - DNA, 80 bp, Homo sapiens
agagcccacaatagattggtatttttgtccaggaactgagcagaggtgagatgattatttttggcactgcttataatgca

SEQ ID NO: 144652 - DNA, 72 bp, Homo sapiens
ttatttattttcctagagtaagccagggcttttgttttcttccctttagatgctctgcttctgtactgccag

SEQ ID NO: 144653 - DNA, 78 bp, Homo sapiens
tagagtaagccagggcttttgttttcttccctttagatgctctgcttctgtactgccagtggatgtgcagacactaaa

SEQ ID NO: 144654 - DNA, 79 bp, Homo sapiens
taagccagggcttttgttttcttccctttagatgctctgcttctgtactgccagtggatgtgcagacactaaactcatc

SEQ ID NO: 144655 - DNA, 78 bp, Homo sapiens
gttttcttccctttagatgctctgcttctgtactgccagtggatgtgcagacactaaactcatctgggccaccgtttg

SEQ ID NO: 144656 - DNA, 80 bp, Homo sapiens
ttccctttagatgctctgcttctgtactgccagtggatgtgcagacactaaactcatctgggccaccgtttggaaagcta

SEQ ID NO: 144657 - DNA, 80 bp, Homo sapiens
tctgcttctgtactgccagtggatgtgcagacactaaactcatctgggccaccgtttggaaagctagtggttcagagttc

SEQ ID NO: 144658 - DNA, 79 bp, Homo sapiens
ttctgtactgccagtggatgtgcagacactaaactcatctgggccaccgtttggaaagctagtggttcagagttctata

SEQ ID NO: 144659 - DNA, 81 bp, Homo sapiens
tggatgtgcagacactaaactcatctgggccaccgtttggaaagctagtggttcagagttctatagattctagtgcattca

SEQ ID NO: 144660 - DNA, 77 bp, Homo sapiens
acactaaactcatctgggccaccgtttggaaagctagtggttcagagttctatagattctagtgcattcaagcacaa

SEQ ID NO: 144661 - DNA, 78 bp, Homo sapiens
aaactcatctgggccaccgtttggaaagctagtggttcagagttctatagattctagtgcattcaagcacaatggcac

SEQ ID NO: 144662 - DNA, 76 bp, Homo sapiens
accgtttggaaagctagtggttcagagttctatagattctagtgcattcaagcacaatggcacggttgaatgtaag

SEQ ID NO: 144663 - DNA, 79 bp, Homo sapiens
ttggaaagctagtggttcagagttctatagattctagtgcattcaagcacaatggcacggttgaatgtaaggcttacaa

SEQ ID NO: 144664 - DNA, 80 bp, Homo sapiens
ttcagagttctatagattctagtgcattcaagcacaatggcacggttgaatgtaaggcttacaacgatgtgggcaagact

SEQ ID NO: 144665 - DNA, 80 bp, Homo sapiens
tatagattctagtgcattcaagcacaatggcacggttgaatgtaaggcttacaacgatgtgggcaagacttctgcctatt

SEQ ID NO: 144666 - DNA, 78 bp, Homo sapiens
attctagtgcattcaagcacaatggcacggttgaatgtaaggcttacaacgatgtgggcaagacttctgcctatttta

SEQ ID NO: 144667 - DNA, 76 bp, Homo sapiens
attcaagcacaatggcacggttgaatgtaaggcttacaacgatgtgggcaagacttctgcctattttaactttgca

SEQ ID NO: 144668 - DNA, 72 bp, Homo sapiens
aatggcacggttgaatgtaaggcttacaacgatgtgggcaagacttctgcctattttaactttgcatttaaa

SEQ ID NO: 144669 - DNA, 70 bp, Homo sapiens
aatgtaaggcttacaacgatgtgggcaagacttctgcctattttaactttgcatttaaaggtaacaacaa

SEQ ID NO: 144670 - DNA, 70 bp, Homo sapiens
gcttacaacgatgtgggcaagacttctgcctattttaactttgcatttaaaggtaacaacaaaggtatat

SEQ ID NO: 144671 - DNA, 68 bp, Homo sapiens
gatgtgggcaagacttctgcctattttaactttgcatttaaaggtaacaacaaaggtatatttctttt

SEQ ID NO: 144672 - DNA, 66 bp, Homo sapiens
agacttctgcctattttaactttgcatttaaaggtaacaacaaaggtatatttctttttaatccaa

SEQ ID NO: 144673 - DNA, 63 bp, Homo sapiens
tattttaactttgcatttaaaggtaacaacaaaggtatatttctttttaatccaatttaaggg

SEQ ID NO: 144674 - DNA, 77 bp, Homo sapiens
agatcccatcctgccaaagtttgtgattccacatttctcttccattgtagagcaaatccatccccacaccctgttca

SEQ ID NO: 144675 - DNA, 76 bp, Homo sapiens
caaagtttgtgattccacatttctcttccattgtagagcaaatccatccccacaccctgttcactcctttgctgat

SEQ ID NO: 144676 - DNA, 76 bp, Homo sapiens
tttgtgattccacatttctcttccattgtagagcaaatccatccccacaccctgttcactcctttgctgattggtt

SEQ ID NO: 144677 - DNA, 74 bp, Homo sapiens
atttctcttccattgtagagcaaatccatccccacaccctgttcactcctttgctgattggtttcgtaatcgta

SEQ ID NO: 144678 - DNA, 81 bp, Homo sapiens
ttgtagagcaaatccatccccacaccctgttcactcctttgctgattggtttcgtaatcgtagctggcatgatgtgcatta

SEQ ID NO: 144679 - DNA, 81 bp, Homo sapiens
aaatccatccccacaccctgttcactcctttgctgattggtttcgtaatcgtagctggcatgatgtgcattattgtgatga

SEQ ID NO: 144680 - DNA, 83 bp, Homo sapiens
cacaccctgttcactcctttgctgattggtttcgtaatcgtagctggcatgatgtgcattattgtgatgattctgacctacaa

SEQ ID NO: 144681 - DNA, 83 bp, Homo sapiens
tgttcactcctttgctgattggtttcgtaatcgtagctggcatgatgtgcattattgtgatgattctgacctacaaatattta

SEQ ID NO: 144682 - DNA, 78 bp, Homo sapiens
gtttcgtaatcgtagctggcatgatgtgcattattgtgatgattctgacctacaaatatttacaggtaaccatttatt

SEQ ID NO: 144683 - DNA, 80 bp, Homo sapiens
aatcgtagctggcatgatgtgcattattgtgatgattctgacctacaaatatttacaggtaaccatttatttgttctctc

SEQ ID NO: 144684 - DNA, 81 bp, Homo sapiens
tgatgtgcattattgtgatgattctgacctacaaatatttacaggtaaccatttatttgttctctctccagagtgctctaa

SEQ ID NO: 144685 - DNA, 70 bp, Homo sapiens
gacaataattattaaaaggtgatctatttttccctttctccccacagaaacccatgtatgaagtacagtg

SEQ ID NO: 144686 - DNA, 68 bp, Homo sapiens
aattattaaaaggtgatctatttttccctttctccccacagaaacccatgtatgaagtacagtggaag

SEQ ID NO: 144687 - DNA, 70 bp, Homo sapiens
atctatttttccctttctccccacagaaacccatgtatgaagtacagtggaaggttgttgaggagataaa

SEQ ID NO: 144688 - DNA, 70 bp, Homo sapiens
ttttccctttctccccacagaaacccatgtatgaagtacagtggaaggttgttgaggagataaatggaaa

SEQ ID NO: 144689 - DNA, 74 bp, Homo sapiens
ccacagaaacccatgtatgaagtacagtggaaggttgttgaggagataaatggaaacaattatgtttacataga

SEQ ID NO: 144690 - DNA, 72 bp, Homo sapiens
aaacccatgtatgaagtacagtggaaggttgttgaggagataaatggaaacaattatgtttacatagaccca

SEQ ID NO: 144691 - DNA, 73 bp, Homo sapiens
tatgaagtacagtggaaggttgttgaggagataaatggaaacaattatgtttacatagacccaacacaacttc

SEQ ID NO: 144692 - DNA, 74 bp, Homo sapiens
tggaaggttgttgaggagataaatggaaacaattatgtttacatagacccaacacaacttccttatgatcacaa

SEQ ID NO: 144693 - DNA, 72 bp, Homo sapiens
aggagataaatggaaacaattatgtttacatagacccaacacaacttccttatgatcacaaatgggagtttc

SEQ ID NO: 144694 - DNA, 71 bp, Homo sapiens
aatggaaacaattatgtttacatagacccaacacaacttccttatgatcacaaatgggagtttcccagaaa

SEQ ID NO: 144695 - DNA, 72 bp, Homo sapiens
attatgtttacatagacccaacacaacttccttatgatcacaaatgggagtttcccagaaacaggctgagtt

SEQ ID NO: 144696 - DNA, 74 bp, Homo sapiens
tacatagacccaacacaacttccttatgatcacaaatgggagtttcccagaaacaggctgagttttggtcagta

SEQ ID NO: 144697 - DNA, 72 bp, Homo sapiens
aacacaacttccttatgatcacaaatgggagtttcccagaaacaggctgagttttggtcagtatgaaacagg

SEQ ID NO: 144698 - DNA, 73 bp, Homo sapiens
ttccttatgatcacaaatgggagtttcccagaaacaggctgagttttggtcagtatgaaacaggggctttcca

SEQ ID NO: 144699 - DNA, 70 bp, Homo sapiens
accaccagcaccatcaccacttaccttgttgtcttccttcctacagggaaaaccctgggtgctggagctt

SEQ ID NO: 144700 - DNA, 68 bp, Homo sapiens
accatcaccacttaccttgttgtcttccttcctacagggaaaaccctgggtgctggagctttcgggaa

SEQ ID NO: 144701 - DNA, 65 bp, Homo sapiens
acttaccttgttgtcttccttcctacagggaaaaccctgggtgctggagctttcgggaaggttgt

SEQ ID NO: 144702 - DNA, 70 bp, Homo sapiens
ttgtcttccttcctacagggaaaaccctgggtgctggagctttcgggaaggttgttgaggcaactgctta

SEQ ID NO: 144703 - DNA, 70 bp, Homo sapiens
ctacagggaaaaccctgggtgctggagctttcgggaaggttgttgaggcaactgcttatggcttaattaa

SEQ ID NO: 144704 - DNA, 72 bp, Homo sapiens
aaaaccctgggtgctggagctttcgggaaggttgttgaggcaactgcttatggcttaattaagtcagatgcg

SEQ ID NO: 144705 - DNA, 80 bp, Homo sapiens
tgctggagctttcgggaaggttgttgaggcaactgcttatggcttaattaagtcagatgcggccatgactgtcgctgtaa

SEQ ID NO: 144706 - DNA, 77 bp, Homo sapiens
agctttcgggaaggttgttgaggcaactgcttatggcttaattaagtcagatgcggccatgactgtcgctgtaaaga

SEQ ID NO: 144707 - DNA, 80 bp, Homo sapiens
aaggttgttgaggcaactgcttatggcttaattaagtcagatgcggccatgactgtcgctgtaaagatgctcaagcgtaa

SEQ ID NO: 144708 - DNA, 80 bp, Homo sapiens
aactgcttatggcttaattaagtcagatgcggccatgactgtcgctgtaaagatgctcaagcgtaagttcctgtatggta

SEQ ID NO: 144709 - DNA, 85 bp, Homo sapiens
gcttaattaagtcagatgcggccatgactgtcgctgtaaagatgctcaagcgtaagttcctgtatggtactgcatgcgcttgaca

SEQ ID NO: 144710 - DNA, 85 bp, Homo sapiens
ttaagtcagatgcggccatgactgtcgctgtaaagatgctcaagcgtaagttcctgtatggtactgcatgcgcttgacatcagtt

SEQ ID NO: 144711 - DNA, 79 bp, Homo sapiens
cgtaagttcctgtatggtactgcatgcgcttgacatcagtttgccagttgtgctttttgctaaaatgcatgtttccaat

SEQ ID NO: 144712 - DNA, 73 bp, Homo sapiens
agtttgccagttgtgctttttgctaaaatgcatgtttccaattttagcgagtgcccatttgacagaacgggaa

SEQ ID NO: 144713 - DNA, 74 bp, Homo sapiens
agttgtgctttttgctaaaatgcatgtttccaattttagcgagtgcccatttgacagaacgggaagccctcatg

SEQ ID NO: 144714 - DNA, 76 bp, Homo sapiens
tttgctaaaatgcatgtttccaattttagcgagtgcccatttgacagaacgggaagccctcatgtctgaactcaaa

SEQ ID NO: 144715 - DNA, 74 bp, Homo sapiens
atgtttccaattttagcgagtgcccatttgacagaacgggaagccctcatgtctgaactcaaagtcctgagtta

SEQ ID NO: 144716 - DNA, 73 bp, Homo sapiens
attttagcgagtgcccatttgacagaacgggaagccctcatgtctgaactcaaagtcctgagttaccttggta

SEQ ID NO: 144717 - DNA, 76 bp, Homo sapiens
agtgcccatttgacagaacgggaagccctcatgtctgaactcaaagtcctgagttaccttggtaatcacatgaata

SEQ ID NO: 144718 - DNA, 76 bp, Homo sapiens
atttgacagaacgggaagccctcatgtctgaactcaaagtcctgagttaccttggtaatcacatgaatattgtgaa

SEQ ID NO: 144719 - DNA, 76 bp, Homo sapiens
acgggaagccctcatgtctgaactcaaagtcctgagttaccttggtaatcacatgaatattgtgaatctacttgga

SEQ ID NO: 144720 - DNA, 79 bp, Homo sapiens
atgtctgaactcaaagtcctgagttaccttggtaatcacatgaatattgtgaatctacttggagcctgcaccattggag

SEQ ID NO: 144721 - DNA, 76 bp, Homo sapiens
actcaaagtcctgagttaccttggtaatcacatgaatattgtgaatctacttggagcctgcaccattggaggtaaa

SEQ ID NO: 144722 - DNA, 77 bp, Homo sapiens
ctgagttaccttggtaatcacatgaatattgtgaatctacttggagcctgcaccattggaggtaaagccgtgtccaa

SEQ ID NO: 144723 - DNA, 78 bp, Homo sapiens
ttggtaatcacatgaatattgtgaatctacttggagcctgcaccattggaggtaaagccgtgtccaagctgcctttta

SEQ ID NO: 144724 - DNA, 79 bp, Homo sapiens
acatgaatattgtgaatctacttggagcctgcaccattggaggtaaagccgtgtccaagctgccttttattgtctgtca

SEQ ID NO: 144725 - DNA, 71 bp, Homo sapiens
attaatctatatatctcaccttctttctaaccttttcttatgtgcttttagggcccaccctggtcattaca

SEQ ID NO: 144726 - DNA, 70 bp, Homo sapiens
atatctcaccttctttctaaccttttcttatgtgcttttagggcccaccctggtcattacagaatattgt

SEQ ID NO: 144727 - DNA, 72 bp, Homo sapiens
ttctaaccttttcttatgtgcttttagggcccaccctggtcattacagaatattgttgctatggtgatcttt

SEQ ID NO: 144728 - DNA, 72 bp, Homo sapiens
ttttcttatgtgcttttagggcccaccctggtcattacagaatattgttgctatggtgatcttttgaatttt

SEQ ID NO: 144729 - DNA, 71 bp, Homo sapiens
ttttagggcccaccctggtcattacagaatattgttgctatggtgatcttttgaattttttgagaagaaaa

SEQ ID NO: 144730 - DNA, 73 bp, Homo sapiens
cccaccctggtcattacagaatattgttgctatggtgatcttttgaattttttgagaagaaaacgtgattcat

SEQ ID NO: 144731 - DNA, 73 bp, Homo sapiens
ggtcattacagaatattgttgctatggtgatcttttgaattttttgagaagaaaacgtgattcatttatttgt

SEQ ID NO: 144732 - DNA, 74 bp, Homo sapiens
gaatattgttgctatggtgatcttttgaattttttgagaagaaaacgtgattcatttatttgttcaaagcagga

SEQ ID NO: 144733 - DNA, 79 bp, Homo sapiens
tggtgatcttttgaattttttgagaagaaaacgtgattcatttatttgttcaaagcaggaagatcatgcagaagctgca

SEQ ID NO: 144734 - DNA, 75 bp, Homo sapiens
cttttgaattttttgagaagaaaacgtgattcatttatttgttcaaagcaggaagatcatgcagaagctgcactt

SEQ ID NO: 144735 - DNA, 78 bp, Homo sapiens
ttttgagaagaaaacgtgattcatttatttgttcaaagcaggaagatcatgcagaagctgcactttataagaatcttc

SEQ ID NO: 144736 - DNA, 80 bp, Homo sapiens
agaaaacgtgattcatttatttgttcaaagcaggaagatcatgcagaagctgcactttataagaatcttctgcattcaaa

SEQ ID NO: 144737 - DNA, 80 bp, Homo sapiens
tttatttgttcaaagcaggaagatcatgcagaagctgcactttataagaatcttctgcattcaaaggagtcttcctggta

SEQ ID NO: 144738 - DNA, 82 bp, Homo sapiens
tcaaagcaggaagatcatgcagaagctgcactttataagaatcttctgcattcaaaggagtcttcctggtaagactgattta

SEQ ID NO: 144739 - DNA, 80 bp, Homo sapiens
aagatcatgcagaagctgcactttataagaatcttctgcattcaaaggagtcttcctggtaagactgatttacataaata

SEQ ID NO: 144740 - DNA, 78 bp, Homo sapiens
atgcagaagctgcactttataagaatcttctgcattcaaaggagtcttcctggtaagactgatttacataaatagtta

SEQ ID NO: 144741 - DNA, 76 bp, Homo sapiens
cactttataagaatcttctgcattcaaaggagtcttcctggtaagactgatttacataaatagttagctgttgaca

SEQ ID NO: 144742 - DNA, 84 bp, Homo sapiens
cttctacatgtcccacttgattcagtcatgacttgtttcatctctcccagcagcgatagtactaatgagtacatggacatgaaa

SEQ ID NO: 144743 - DNA, 83 bp, Homo sapiens
acatgtcccacttgattcagtcatgacttgtttcatctctcccagcagcgatagtactaatgagtacatggacatgaaacctg

SEQ ID NO: 144744 - DNA, 82 bp, Homo sapiens
ttgattcagtcatgacttgtttcatctctcccagcagcgatagtactaatgagtacatggacatgaaacctggagtttctta

SEQ ID NO: 144745 - DNA, 79 bp, Homo sapiens
atgacttgtttcatctctcccagcagcgatagtactaatgagtacatggacatgaaacctggagtttcttatgttgtcc

SEQ ID NO: 144746 - DNA, 78 bp, Homo sapiens
tttcatctctcccagcagcgatagtactaatgagtacatggacatgaaacctggagtttcttatgttgtcccaaccaa

SEQ ID NO: 144747 - DNA, 74 bp, Homo sapiens
cagcgatagtactaatgagtacatggacatgaaacctggagtttcttatgttgtcccaaccaaggccgacaaaa

SEQ ID NO: 144748 - DNA, 72 bp, Homo sapiens
atagtactaatgagtacatggacatgaaacctggagtttcttatgttgtcccaaccaaggccgacaaaagga

SEQ ID NO: 144749 - DNA, 74 bp, Homo sapiens
agtacatggacatgaaacctggagtttcttatgttgtcccaaccaaggccgacaaaaggagatctgtgagaata

SEQ ID NO: 144750 - DNA, 73 bp, Homo sapiens
acatgaaacctggagtttcttatgttgtcccaaccaaggccgacaaaaggagatctgtgagaataggtgagta

SEQ ID NO: 144751 - DNA, 72 bp, Homo sapiens
agtttcttatgttgtcccaaccaaggccgacaaaaggagatctgtgagaataggtgagtacctacctatcaa

SEQ ID NO: 144752 - DNA, 74 bp, Homo sapiens
ttatgttgtcccaaccaaggccgacaaaaggagatctgtgagaataggtgagtacctacctatcaagcaaccaa

SEQ ID NO: 144753 - DNA, 72 bp, Homo sapiens
accaaggccgacaaaaggagatctgtgagaataggtgagtacctacctatcaagcaaccaagagtaacttta

SEQ ID NO: 144754 - DNA, 75 bp, Homo sapiens
acctttatggttgtaattgctaagaaaaatcctctcttcctcacaggctcatacatagaaagagatgtgactccc

SEQ ID NO: 144755 - DNA, 81 bp, Homo sapiens
tatggttgtaattgctaagaaaaatcctctcttcctcacaggctcatacatagaaagagatgtgactcccgccatcatgga

SEQ ID NO: 144756 - DNA, 81 bp, Homo sapiens
ttgctaagaaaaatcctctcttcctcacaggctcatacatagaaagagatgtgactcccgccatcatggaggatgacgagt

SEQ ID NO: 144757 - DNA, 81 bp, Homo sapiens
cctctcttcctcacaggctcatacatagaaagagatgtgactcccgccatcatggaggatgacgagttggccctagactta

SEQ ID NO: 144758 - DNA, 81 bp, Homo sapiens
tcctcacaggctcatacatagaaagagatgtgactcccgccatcatggaggatgacgagttggccctagacttagaagact

SEQ ID NO: 144759 - DNA, 79 bp, Homo sapiens
atacatagaaagagatgtgactcccgccatcatggaggatgacgagttggccctagacttagaagacttgctgagcttt

SEQ ID NO: 144760 - DNA, 79 bp, Homo sapiens
tagaaagagatgtgactcccgccatcatggaggatgacgagttggccctagacttagaagacttgctgagcttttctta

SEQ ID NO: 144761 - DNA, 76 bp, Homo sapiens
actcccgccatcatggaggatgacgagttggccctagacttagaagacttgctgagcttttcttaccaggtggcaa

SEQ ID NO: 144762 - DNA, 77 bp, Homo sapiens
ccatcatggaggatgacgagttggccctagacttagaagacttgctgagcttttcttaccaggtggcaaagggcatg

SEQ ID NO: 144763 - DNA, 74 bp, Homo sapiens
aggatgacgagttggccctagacttagaagacttgctgagcttttcttaccaggtggcaaagggcatggctttc

SEQ ID NO: 144764 - DNA, 73 bp, Homo sapiens
ccctagacttagaagacttgctgagcttttcttaccaggtggcaaagggcatggctttcctcgcctccaagaa

SEQ ID NO: 144765 - DNA, 73 bp, Homo sapiens
acttagaagacttgctgagcttttcttaccaggtggcaaagggcatggctttcctcgcctccaagaatgtaag

SEQ ID NO: 144766 - DNA, 75 bp, Homo sapiens
ctgagcttttcttaccaggtggcaaagggcatggctttcctcgcctccaagaatgtaagtgggagtgattctcta

SEQ ID NO: 144767 - DNA, 73 bp, Homo sapiens
ttttcttaccaggtggcaaagggcatggctttcctcgcctccaagaatgtaagtgggagtgattctctaaaga

SEQ ID NO: 144768 - DNA, 72 bp, Homo sapiens
gtggcaaagggcatggctttcctcgcctccaagaatgtaagtgggagtgattctctaaagagttttgtgttt

SEQ ID NO: 144769 - DNA, 71 bp, Homo sapiens
gttaaaatgaatttaaatggttttcttttctcctccaacctaatagtgtattcacagagacttggcagcca

SEQ ID NO: 144770 - DNA, 72 bp, Homo sapiens
aatgaatttaaatggttttcttttctcctccaacctaatagtgtattcacagagacttggcagccagaaata

SEQ ID NO: 144771 - DNA, 75 bp, Homo sapiens
ttttcttttctcctccaacctaatagtgtattcacagagacttggcagccagaaatatcctccttactcatggtc

SEQ ID NO: 144772 - DNA, 78 bp, Homo sapiens
tcctccaacctaatagtgtattcacagagacttggcagccagaaatatcctccttactcatggtcggatcacaaagat

SEQ ID NO: 144773 - DNA, 78 bp, Homo sapiens
ctaatagtgtattcacagagacttggcagccagaaatatcctccttactcatggtcggatcacaaagatttgtgattt

SEQ ID NO: 144774 - DNA, 79 bp, Homo sapiens
gtgtattcacagagacttggcagccagaaatatcctccttactcatggtcggatcacaaagatttgtgattttggtcta

SEQ ID NO: 144775 - DNA, 79 bp, Homo sapiens
acttggcagccagaaatatcctccttactcatggtcggatcacaaagatttgtgattttggtctagccagagacatcaa

SEQ ID NO: 144776 - DNA, 79 bp, Homo sapiens
agaaatatcctccttactcatggtcggatcacaaagatttgtgattttggtctagccagagacatcaagaatgattcta

SEQ ID NO: 144777 - DNA, 80 bp, Homo sapiens
tatcctccttactcatggtcggatcacaaagatttgtgattttggtctagccagagacatcaagaatgattctaattatg

SEQ ID NO: 144778 - DNA, 78 bp, Homo sapiens
actcatggtcggatcacaaagatttgtgattttggtctagccagagacatcaagaatgattctaattatgtggttaaa

SEQ ID NO: 144779 - DNA, 76 bp, Homo sapiens
atcacaaagatttgtgattttggtctagccagagacatcaagaatgattctaattatgtggttaaaggaaacgtga

SEQ ID NO: 144780 - DNA, 74 bp, Homo sapiens
tttgtgattttggtctagccagagacatcaagaatgattctaattatgtggttaaaggaaacgtgagtacccat

SEQ ID NO: 144781 - DNA, 77 bp, Homo sapiens
tttggtctagccagagacatcaagaatgattctaattatgtggttaaaggaaacgtgagtacccattctctgcttga

SEQ ID NO: 144782 - DNA, 77 bp, Homo sapiens
agagacatcaagaatgattctaattatgtggttaaaggaaacgtgagtacccattctctgcttgacagtcctgcaaa

SEQ ID NO: 144783 - DNA, 81 bp, Homo sapiens
tgagcttctgaattaacattattgactctgttgtgcttctattacaggctcgactacctgtgaagtggatggcacctgaaa

SEQ ID NO: 144784 - DNA, 77 bp, Homo sapiens
aattaacattattgactctgttgtgcttctattacaggctcgactacctgtgaagtggatggcacctgaaagcattt

SEQ ID NO: 144785 - DNA, 79 bp, Homo sapiens
attattgactctgttgtgcttctattacaggctcgactacctgtgaagtggatggcacctgaaagcattttcaactgtg

SEQ ID NO: 144786 - DNA, 79 bp, Homo sapiens
tgtgcttctattacaggctcgactacctgtgaagtggatggcacctgaaagcattttcaactgtgtatacacgtttgaa

SEQ ID NO: 144787 - DNA, 76 bp, Homo sapiens
ttctattacaggctcgactacctgtgaagtggatggcacctgaaagcattttcaactgtgtatacacgtttgaaag

SEQ ID NO: 144788 - DNA, 76 bp, Homo sapiens
gactacctgtgaagtggatggcacctgaaagcattttcaactgtgtatacacgtttgaaagtgacgtctggtccta

SEQ ID NO: 144789 - DNA, 75 bp, Homo sapiens
tgaagtggatggcacctgaaagcattttcaactgtgtatacacgtttgaaagtgacgtctggtcctatgggattt

SEQ ID NO: 144790 - DNA, 72 bp, Homo sapiens
atggcacctgaaagcattttcaactgtgtatacacgtttgaaagtgacgtctggtcctatgggatttttctt

SEQ ID NO: 144791 - DNA, 71 bp, Homo sapiens
aagcattttcaactgtgtatacacgtttgaaagtgacgtctggtcctatgggatttttctttgggagctgt

SEQ ID NO: 144792 - DNA, 72 bp, Homo sapiens
ttcaactgtgtatacacgtttgaaagtgacgtctggtcctatgggatttttctttgggagctgttctcttta

SEQ ID NO: 144793 - DNA, 69 bp, Homo sapiens
tatacacgtttgaaagtgacgtctggtcctatgggatttttctttgggagctgttctctttaggtaaaa

SEQ ID NO: 144794 - DNA, 70 bp, Homo sapiens
aaagtgacgtctggtcctatgggatttttctttgggagctgttctctttaggtaaaatgatccttgccaa

SEQ ID NO: 144795 - DNA, 71 bp, Homo sapiens
gtcctatgggatttttctttgggagctgttctctttaggtaaaatgatccttgccaaagacaacttcatta

SEQ ID NO: 144796 - DNA, 79 bp, Homo sapiens
tgtcctgcttccttgtgattaacactgctttgcaaactgtgtctcaggaagcagcccctatcctggaatgccggtcgat

SEQ ID NO: 144797 - DNA, 77 bp, Homo sapiens
cttgtgattaacactgctttgcaaactgtgtctcaggaagcagcccctatcctggaatgccggtcgattctaagttc

SEQ ID NO: 144798 - DNA, 76 bp, Homo sapiens
attaacactgctttgcaaactgtgtctcaggaagcagcccctatcctggaatgccggtcgattctaagttctacaa

SEQ ID NO: 144799 - DNA, 78 bp, Homo sapiens
tttgcaaactgtgtctcaggaagcagcccctatcctggaatgccggtcgattctaagttctacaagatgatcaaggaa

SEQ ID NO: 144800 - DNA, 77 bp, Homo sapiens
tgtctcaggaagcagcccctatcctggaatgccggtcgattctaagttctacaagatgatcaaggaaggcttccgga

SEQ ID NO: 144801 - DNA, 77 bp, Homo sapiens
aagcagcccctatcctggaatgccggtcgattctaagttctacaagatgatcaaggaaggcttccggatgctcagcc

SEQ ID NO: 144802 - DNA, 77 bp, Homo sapiens
cctatcctggaatgccggtcgattctaagttctacaagatgatcaaggaaggcttccggatgctcagccctgaacac

SEQ ID NO: 144803 - DNA, 79 bp, Homo sapiens
cggtcgattctaagttctacaagatgatcaaggaaggcttccggatgctcagccctgaacacgcacctgctgaaatgta

SEQ ID NO: 144804 - DNA, 80 bp, Homo sapiens
attctaagttctacaagatgatcaaggaaggcttccggatgctcagccctgaacacgcacctgctgaaatgtaagagcca

SEQ ID NO: 144805 - DNA, 75 bp, Homo sapiens
aagatgatcaaggaaggcttccggatgctcagccctgaacacgcacctgctgaaatgtaagagccaaaaaatttt

SEQ ID NO: 144806 - DNA, 71 bp, Homo sapiens
aaggaaggcttccggatgctcagccctgaacacgcacctgctgaaatgtaagagccaaaaaatttttcctt

SEQ ID NO: 144807 - DNA, 72 bp, Homo sapiens
ttccggatgctcagccctgaacacgcacctgctgaaatgtaagagccaaaaaatttttcctttaggtcacgt

SEQ ID NO: 144808 - DNA, 78 bp, Homo sapiens
aaacaagctgagggcattgaggagggatagtaaatggcccttgtcttgcaggtatgacataatgaagacttgctggga

SEQ ID NO: 144809 - DNA, 78 bp, Homo sapiens
attgaggagggatagtaaatggcccttgtcttgcaggtatgacataatgaagacttgctgggatgcagatcccctaaa

SEQ ID NO: 144810 - DNA, 77 bp, Homo sapiens
ggatagtaaatggcccttgtcttgcaggtatgacataatgaagacttgctgggatgcagatcccctaaaaagaccaa

SEQ ID NO: 144811 - DNA, 78 bp, Homo sapiens
taaatggcccttgtcttgcaggtatgacataatgaagacttgctgggatgcagatcccctaaaaagaccaacattcaa

SEQ ID NO: 144812 - DNA, 80 bp, Homo sapiens
ttgtcttgcaggtatgacataatgaagacttgctgggatgcagatcccctaaaaagaccaacattcaagcaaattgttca

SEQ ID NO: 144813 - DNA, 80 bp, Homo sapiens
tatgacataatgaagacttgctgggatgcagatcccctaaaaagaccaacattcaagcaaattgttcagctaattgagaa

SEQ ID NO: 144814 - DNA, 78 bp, Homo sapiens
aatgaagacttgctgggatgcagatcccctaaaaagaccaacattcaagcaaattgttcagctaattgagaagcagat

SEQ ID NO: 144815 - DNA, 81 bp, Homo sapiens
ggatgcagatcccctaaaaagaccaacattcaagcaaattgttcagctaattgagaagcagatttcagagagcaccaatca

SEQ ID NO: 144816 - DNA, 80 bp, Homo sapiens
tcccctaaaaagaccaacattcaagcaaattgttcagctaattgagaagcagatttcagagagcaccaatcatgtgagta

SEQ ID NO: 144817 - DNA, 79 bp, Homo sapiens
aaaaagaccaacattcaagcaaattgttcagctaattgagaagcagatttcagagagcaccaatcatgtgagtataccc

SEQ ID NO: 144818 - DNA, 84 bp, Homo sapiens
attcaagcaaattgttcagctaattgagaagcagatttcagagagcaccaatcatgtgagtataccctggccaggcatagaatc

SEQ ID NO: 144819 - DNA, 80 bp, Homo sapiens
aattgttcagctaattgagaagcagatttcagagagcaccaatcatgtgagtataccctggccaggcatagaatccccct

SEQ ID NO: 144820 - DNA, 76 bp, Homo sapiens
ctatgttcgttgtagggactgctgtattgactatgggcttgttttctccagatttactccaacttagcaaactgca

SEQ ID NO: 144821 - DNA, 75 bp, Homo sapiens
tagggactgctgtattgactatgggcttgttttctccagatttactccaacttagcaaactgcagccccaaccga

SEQ ID NO: 144822 - DNA, 74 bp, Homo sapiens
tgtattgactatgggcttgttttctccagatttactccaacttagcaaactgcagccccaaccgacagaagccc

SEQ ID NO: 144823 - DNA, 74 bp, Homo sapiens
ttttctccagatttactccaacttagcaaactgcagccccaaccgacagaagcccgtggtagaccattctgtgc

SEQ ID NO: 144824 - DNA, 74 bp, Homo sapiens
atttactccaacttagcaaactgcagccccaaccgacagaagcccgtggtagaccattctgtgcggatcaattc

SEQ ID NO: 144825 - DNA, 77 bp, Homo sapiens
aacttagcaaactgcagccccaaccgacagaagcccgtggtagaccattctgtgcggatcaattctgtcggcagcac

SEQ ID NO: 144826 - DNA, 75 bp, Homo sapiens
agccccaaccgacagaagcccgtggtagaccattctgtgcggatcaattctgtcggcagcaccgcttcctcctcc

SEQ ID NO: 144827 - DNA, 76 bp, Homo sapiens
aaccgacagaagcccgtggtagaccattctgtgcggatcaattctgtcggcagcaccgcttcctcctcccagcctc

SEQ ID NO: 144828 - DNA, 82 bp, Homo sapiens
cgtggtagaccattctgtgcggatcaattctgtcggcagcaccgcttcctcctcccagcctctgcttgtgcacgacgatgtc

SEQ ID NO: 144829 - DNA, 86 bp, Homo sapiens
tagaccattctgtgcggatcaattctgtcggcagcaccgcttcctcctcccagcctctgcttgtgcacgacgatgtctgagcagaa

SEQ ID NO: 144830 - DNA, 86 bp, Homo sapiens
tgtgcggatcaattctgtcggcagcaccgcttcctcctcccagcctctgcttgtgcacgacgatgtctgagcagaatcagtgtttg

SEQ ID NO: 144831 - DNA, 82 bp, Homo sapiens
aattctgtcggcagcaccgcttcctcctcccagcctctgcttgtgcacgacgatgtctgagcagaatcagtgtttgggtcac

SEQ ID NO: 144832 - DNA, 78 bp, Homo sapiens
accgcttcctcctcccagcctctgcttgtgcacgacgatgtctgagcagaatcagtgtttgggtcacccctccaggaa

SEQ ID NO: 144833 - DNA, 80 bp, Homo sapiens
cctcccagcctctgcttgtgcacgacgatgtctgagcagaatcagtgtttgggtcacccctccaggaatgatctcttctt

SEQ ID NO: 144834 - DNA, 80 bp, Homo sapiens
agcctctgcttgtgcacgacgatgtctgagcagaatcagtgtttgggtcacccctccaggaatgatctcttcttttggct

SEQ ID NO: 144835 - DNA, 79 bp, Homo sapiens
cacgacgatgtctgagcagaatcagtgtttgggtcacccctccaggaatgatctcttcttttggcttccatgatggtta

SEQ ID NO: 144836 - DNA, 76 bp, Homo sapiens
tctgagcagaatcagtgtttgggtcacccctccaggaatgatctcttcttttggcttccatgatggttattttctt

SEQ ID NO: 144837 - DNA, 72 bp, Homo sapiens
agaatcagtgtttgggtcacccctccaggaatgatctcttcttttggcttccatgatggttattttcttttc

SEQ ID NO: 144838 - DNA, 76 bp, Homo sapiens
gttattttcttttctttcaacttgcatccaactccaggatagtgggcaccccactgcaatcctgtctttctgagca

SEQ ID NO: 144839 - DNA, 77 bp, Homo sapiens
ttttctttcaacttgcatccaactccaggatagtgggcaccccactgcaatcctgtctttctgagcacactttagtg

SEQ ID NO: 144840 - DNA, 78 bp, Homo sapiens
cttgcatccaactccaggatagtgggcaccccactgcaatcctgtctttctgagcacactttagtggccgatgatttt

SEQ ID NO: 144841 - DNA, 78 bp, Homo sapiens
atccaactccaggatagtgggcaccccactgcaatcctgtctttctgagcacactttagtggccgatgatttttgtca

SEQ ID NO: 144842 - DNA, 80 bp, Homo sapiens
atagtgggcaccccactgcaatcctgtctttctgagcacactttagtggccgatgatttttgtcatcagccaccatccta

SEQ ID NO: 144843 - DNA, 77 bp, Homo sapiens
aatcctgtctttctgagcacactttagtggccgatgatttttgtcatcagccaccatcctattgcaaaggttccaac

SEQ ID NO: 144844 - DNA, 79 bp, Homo sapiens
tttctgagcacactttagtggccgatgatttttgtcatcagccaccatcctattgcaaaggttccaactgtatatattc

SEQ ID NO: 144845 - DNA, 76 bp, Homo sapiens
acactttagtggccgatgatttttgtcatcagccaccatcctattgcaaaggttccaactgtatatattcccaata

SEQ ID NO: 144846 - DNA, 77 bp, Homo sapiens
atgatttttgtcatcagccaccatcctattgcaaaggttccaactgtatatattcccaatagcaacgtagcttctac

SEQ ID NO: 144847 - DNA, 78 bp, Homo sapiens
ttttgtcatcagccaccatcctattgcaaaggttccaactgtatatattcccaatagcaacgtagcttctaccatgaa

SEQ ID NO: 144848 - DNA, 74 bp, Homo sapiens
accatcctattgcaaaggttccaactgtatatattcccaatagcaacgtagcttctaccatgaacagaaaacat

SEQ ID NO: 144849 - DNA, 73 bp, Homo sapiens
ggttccaactgtatatattcccaatagcaacgtagcttctaccatgaacagaaaacattctgatttggaaaaa

SEQ ID NO: 144850 - DNA, 74 bp, Homo sapiens
tatatattcccaatagcaacgtagcttctaccatgaacagaaaacattctgatttggaaaaagagagggaggta

SEQ ID NO: 144851 - DNA, 72 bp, Homo sapiens
aatagcaacgtagcttctaccatgaacagaaaacattctgatttggaaaaagagagggaggtatggactggg

SEQ ID NO: 144852 - DNA, 71 bp, Homo sapiens
ttctaccatgaacagaaaacattctgatttggaaaaagagagggaggtatggactgggggccagagtcctt

SEQ ID NO: 144853 - DNA, 70 bp, Homo sapiens
atgaacagaaaacattctgatttggaaaaagagagggaggtatggactgggggccagagtcctttccaag

SEQ ID NO: 144854 - DNA, 69 bp, Homo sapiens
agaaaacattctgatttggaaaaagagagggaggtatggactgggggccagagtcctttccaaggcttc

SEQ ID NO: 144855 - DNA, 69 bp, Homo sapiens
aaaacattctgatttggaaaaagagagggaggtatggactgggggccagagtcctttccaaggcttctc

SEQ ID NO: 144856 - DNA, 70 bp, Homo sapiens
attctgatttggaaaaagagagggaggtatggactgggggccagagtcctttccaaggcttctccaattc

SEQ ID NO: 144857 - DNA, 70 bp, Homo sapiens
tggaaaaagagagggaggtatggactgggggccagagtcctttccaaggcttctccaattctgcccaaaa

SEQ ID NO: 144858 - DNA, 69 bp, Homo sapiens
aaaagagagggaggtatggactgggggccagagtcctttccaaggcttctccaattctgcccaaaaata

SEQ ID NO: 144859 - DNA, 70 bp, Homo sapiens
aaagagagggaggtatggactgggggccagagtcctttccaaggcttctccaattctgcccaaaaatatg

SEQ ID NO: 144860 - DNA, 71 bp, Homo sapiens
tgggggccagagtcctttccaaggcttctccaattctgcccaaaaatatggttgatagtttacctgaataa

SEQ ID NO: 144861 - DNA, 70 bp, Homo sapiens
agtcctttccaaggcttctccaattctgcccaaaaatatggttgatagtttacctgaataaatggtagta

SEQ ID NO: 144862 - DNA, 72 bp, Homo sapiens
ttccaaggcttctccaattctgcccaaaaatatggttgatagtttacctgaataaatggtagtaatcacagt

SEQ ID NO: 144863 - DNA, 73 bp, Homo sapiens
caaaaatatggttgatagtttacctgaataaatggtagtaatcacagttggccttcagaaccatccatagtag

SEQ ID NO: 144864 - DNA, 78 bp, Homo sapiens
atatggttgatagtttacctgaataaatggtagtaatcacagttggccttcagaaccatccatagtagtatgatgata

SEQ ID NO: 144865 - DNA, 77 bp, Homo sapiens
taatcacagttggccttcagaaccatccatagtagtatgatgatacaagattagaagctgaaaacctaagtccttta

SEQ ID NO: 144866 - DNA, 76 bp, Homo sapiens
ttggccttcagaaccatccatagtagtatgatgatacaagattagaagctgaaaacctaagtcctttatgtggaaa

SEQ ID NO: 144867 - DNA, 75 bp, Homo sapiens
agaaccatccatagtagtatgatgatacaagattagaagctgaaaacctaagtcctttatgtggaaaacagaaca

SEQ ID NO: 144868 - DNA, 76 bp, Homo sapiens
tgatgatacaagattagaagctgaaaacctaagtcctttatgtggaaaacagaacatcattagaacaaaggacaga

SEQ ID NO: 144869 - DNA, 74 bp, Homo sapiens
gattagaagctgaaaacctaagtcctttatgtggaaaacagaacatcattagaacaaaggacagagtatgaaca

SEQ ID NO: 144870 - DNA, 70 bp, Homo sapiens
aaaacctaagtcctttatgtggaaaacagaacatcattagaacaaaggacagagtatgaacacctgggct

SEQ ID NO: 144871 - DNA, 73 bp, Homo sapiens
ctttatgtggaaaacagaacatcattagaacaaaggacagagtatgaacacctgggcttaagaaatctagtat

SEQ ID NO: 144872 - DNA, 75 bp, Homo sapiens
aaaacagaacatcattagaacaaaggacagagtatgaacacctgggcttaagaaatctagtatttcatgctggga

SEQ ID NO: 144873 - DNA, 78 bp, Homo sapiens
aacatcattagaacaaaggacagagtatgaacacctgggcttaagaaatctagtatttcatgctgggaatgagacata

SEQ ID NO: 144874 - DNA, 77 bp, Homo sapiens
caaaggacagagtatgaacacctgggcttaagaaatctagtatttcatgctgggaatgagacataggccatgaaaaa

SEQ ID NO: 144875 - DNA, 78 bp, Homo sapiens
acagagtatgaacacctgggcttaagaaatctagtatttcatgctgggaatgagacataggccatgaaaaaaatgatc

SEQ ID NO: 144876 - DNA, 76 bp, Homo sapiens
cctgggcttaagaaatctagtatttcatgctgggaatgagacataggccatgaaaaaaatgatccccaagtgtgaa

SEQ ID NO: 144877 - DNA, 80 bp, Homo sapiens
tctagtatttcatgctgggaatgagacataggccatgaaaaaaatgatccccaagtgtgaacaaaagatgctcttctgtg

SEQ ID NO: 144878 - DNA, 74 bp, Homo sapiens
aagtgtgaacaaaagatgctcttctgtggaccactgcatgagcttttatactaccgacctggtttttaaataga

SEQ ID NO: 144879 - DNA, 75 bp, Homo sapiens
ttctgtggaccactgcatgagcttttatactaccgacctggtttttaaatagagtttgctattagagcattgaat

SEQ ID NO: 144880 - DNA, 74 bp, Homo sapiens
actgcatgagcttttatactaccgacctggtttttaaatagagtttgctattagagcattgaattggagagaag

SEQ ID NO: 144881 - DNA, 71 bp, Homo sapiens
agcttttatactaccgacctggtttttaaatagagtttgctattagagcattgaattggagagaaggcctc

SEQ ID NO: 144882 - DNA, 74 bp, Homo sapiens
tactaccgacctggtttttaaatagagtttgctattagagcattgaattggagagaaggcctccctagccagca

SEQ ID NO: 144883 - DNA, 79 bp, Homo sapiens
ttttaaatagagtttgctattagagcattgaattggagagaaggcctccctagccagcacttgtatatacgcatctata

SEQ ID NO: 144884 - DNA, 79 bp, Homo sapiens
aatagagtttgctattagagcattgaattggagagaaggcctccctagccagcacttgtatatacgcatctataaattg

SEQ ID NO: 144885 - DNA, 81 bp, Homo sapiens
tattagagcattgaattggagagaaggcctccctagccagcacttgtatatacgcatctataaattgtccgtgttcataca

SEQ ID NO: 144886 - DNA, 78 bp, Homo sapiens
attgaattggagagaaggcctccctagccagcacttgtatatacgcatctataaattgtccgtgttcatacatttgag

SEQ ID NO: 144887 - DNA, 75 bp, Homo sapiens
agagaaggcctccctagccagcacttgtatatacgcatctataaattgtccgtgttcatacatttgaggggaaaa

SEQ ID NO: 144888 - DNA, 75 bp, Homo sapiens
tagccagcacttgtatatacgcatctataaattgtccgtgttcatacatttgaggggaaaacaccataaggtttc

SEQ ID NO: 144889 - DNA, 70 bp, Homo sapiens
acttgtatatacgcatctataaattgtccgtgttcatacatttgaggggaaaacaccataaggtttcgtt

SEQ ID NO: 144890 - DNA, 73 bp, Homo sapiens
tatacgcatctataaattgtccgtgttcatacatttgaggggaaaacaccataaggtttcgtttctgtataca

SEQ ID NO: 144891 - DNA, 73 bp, Homo sapiens
ttcatacatttgaggggaaaacaccataaggtttcgtttctgtatacaaccctggcattatgtccactgtgta

SEQ ID NO: 144892 - DNA, 71 bp, Homo sapiens
atttgaggggaaaacaccataaggtttcgtttctgtatacaaccctggcattatgtccactgtgtatagaa

SEQ ID NO: 144893 - DNA, 72 bp, Homo sapiens
aaaacaccataaggtttcgtttctgtatacaaccctggcattatgtccactgtgtatagaagtagattaaga

SEQ ID NO: 144894 - DNA, 74 bp, Homo sapiens
ataaggtttcgtttctgtatacaaccctggcattatgtccactgtgtatagaagtagattaagagccatataag

SEQ ID NO: 144895 - DNA, 75 bp, Homo sapiens
gtttctgtatacaaccctggcattatgtccactgtgtatagaagtagattaagagccatataagtttgaaggaaa

SEQ ID NO: 144896 - DNA, 74 bp, Homo sapiens
cctggcattatgtccactgtgtatagaagtagattaagagccatataagtttgaaggaaacagttaataccatt

SEQ ID NO: 144897 - DNA, 72 bp, Homo sapiens
cattatgtccactgtgtatagaagtagattaagagccatataagtttgaaggaaacagttaataccattttt

SEQ ID NO: 144898 - DNA, 68 bp, Homo sapiens
gtagattaagagccatataagtttgaaggaaacagttaataccattttttaaggaaacaatataacca

SEQ ID NO: 144899 - DNA, 67 bp, Homo sapiens
ggaaacagttaataccattttttaaggaaacaatataaccacaaagcacagtttgaacaaaatctcc

SEQ ID NO: 144900 - DNA, 70 bp, Homo sapiens
ccattttttaaggaaacaatataaccacaaagcacagtttgaacaaaatctcctcttttagctgatgaac

SEQ ID NO: 144901 - DNA, 74 bp, Homo sapiens
ggaaacaatataaccacaaagcacagtttgaacaaaatctcctcttttagctgatgaacttattctgtagattc

SEQ ID NO: 144902 - DNA, 76 bp, Homo sapiens
atataaccacaaagcacagtttgaacaaaatctcctcttttagctgatgaacttattctgtagattctgtggaaca

SEQ ID NO: 144903 - DNA, 77 bp, Homo sapiens
acaaagcacagtttgaacaaaatctcctcttttagctgatgaacttattctgtagattctgtggaacaagcctatca

SEQ ID NO: 144904 - DNA, 78 bp, Homo sapiens
gtttgaacaaaatctcctcttttagctgatgaacttattctgtagattctgtggaacaagcctatcagcttcagaatg

SEQ ID NO: 144905 - DNA, 81 bp, Homo sapiens
aatctcctcttttagctgatgaacttattctgtagattctgtggaacaagcctatcagcttcagaatggcattgtactcaa

SEQ ID NO: 144906 - DNA, 83 bp, Homo sapiens
tattctgtagattctgtggaacaagcctatcagcttcagaatggcattgtactcaatggatttgatgctgtttgacaaagtta

SEQ ID NO: 144907 - DNA, 84 bp, Homo sapiens
tagattctgtggaacaagcctatcagcttcagaatggcattgtactcaatggatttgatgctgtttgacaaagttactgattca

SEQ ID NO: 144908 - DNA, 86 bp, Homo sapiens
tatcagcttcagaatggcattgtactcaatggatttgatgctgtttgacaaagttactgattcactgcatggctcccacaggagtg

SEQ ID NO: 144909 - DNA, 77 bp, Homo sapiens
tttgacaaagttactgattcactgcatggctcccacaggagtgggaaaacactgccatcttagtttggattcttatg

SEQ ID NO: 144910 - DNA, 79 bp, Homo sapiens
ttactgattcactgcatggctcccacaggagtgggaaaacactgccatcttagtttggattcttatgtagcaggaaata

SEQ ID NO: 144911 - DNA, 76 bp, Homo sapiens
actgcatggctcccacaggagtgggaaaacactgccatcttagtttggattcttatgtagcaggaaataaagtata

SEQ ID NO: 144912 - DNA, 70 bp, Homo sapiens
agtgggaaaacactgccatcttagtttggattcttatgtagcaggaaataaagtataggtttagcctcct

SEQ ID NO: 144913 - DNA, 73 bp, Homo sapiens
aaaacactgccatcttagtttggattcttatgtagcaggaaataaagtataggtttagcctccttcgcaggca

SEQ ID NO: 144914 - DNA, 74 bp, Homo sapiens
atcttagtttggattcttatgtagcaggaaataaagtataggtttagcctccttcgcaggcatgtcctggacac

SEQ ID NO: 144915 - DNA, 76 bp, Homo sapiens
tcttatgtagcaggaaataaagtataggtttagcctccttcgcaggcatgtcctggacaccgggccagtatctata

SEQ ID NO: 144916 - DNA, 77 bp, Homo sapiens
tgtagcaggaaataaagtataggtttagcctccttcgcaggcatgtcctggacaccgggccagtatctatatatgtg

SEQ ID NO: 144917 - DNA, 75 bp, Homo sapiens
aataaagtataggtttagcctccttcgcaggcatgtcctggacaccgggccagtatctatatatgtgtatgtacg

SEQ ID NO: 144918 - DNA, 80 bp, Homo sapiens
tttagcctccttcgcaggcatgtcctggacaccgggccagtatctatatatgtgtatgtacgtttgtatgtgtgtagaca

SEQ ID NO: 144919 - DNA, 80 bp, Homo sapiens
ttcgcaggcatgtcctggacaccgggccagtatctatatatgtgtatgtacgtttgtatgtgtgtagacaaatatttgga

SEQ ID NO: 144920 - DNA, 75 bp, Homo sapiens
tcctggacaccgggccagtatctatatatgtgtatgtacgtttgtatgtgtgtagacaaatatttggaggggtat

SEQ ID NO: 144921 - DNA, 76 bp, Homo sapiens
tatctatatatgtgtatgtacgtttgtatgtgtgtagacaaatatttggaggggtatttttgccctgagtccaaga

SEQ ID NO: 144922 - DNA, 69 bp, Homo sapiens
tttgtatgtgtgtagacaaatatttggaggggtatttttgccctgagtccaagagggtcctttagtacc

SEQ ID NO: 144923 - DNA, 64 bp, Homo sapiens
aaatatttggaggggtatttttgccctgagtccaagagggtcctttagtacctgaaaagtaact

SEQ ID NO: 144924 - DNA, 67 bp, Homo sapiens
gggtatttttgccctgagtccaagagggtcctttagtacctgaaaagtaacttggctttcattatta

SEQ ID NO: 144925 - DNA, 70 bp, Homo sapiens
tttgccctgagtccaagagggtcctttagtacctgaaaagtaacttggctttcattattagtactgctct

SEQ ID NO: 144926 - DNA, 68 bp, Homo sapiens
tccaagagggtcctttagtacctgaaaagtaacttggctttcattattagtactgctcttgtttcttt

SEQ ID NO: 144927 - DNA, 72 bp, Homo sapiens
cctttagtacctgaaaagtaacttggctttcattattagtactgctcttgtttcttttcacatagctgtcta

SEQ ID NO: 144928 - DNA, 75 bp, Homo sapiens
tacctgaaaagtaacttggctttcattattagtactgctcttgtttcttttcacatagctgtctagagtagctta

SEQ ID NO: 144929 - DNA, 77 bp, Homo sapiens
acttggctttcattattagtactgctcttgtttcttttcacatagctgtctagagtagcttaccagaagcttccata

SEQ ID NO: 144930 - DNA, 80 bp, Homo sapiens
tttcattattagtactgctcttgtttcttttcacatagctgtctagagtagcttaccagaagcttccatagtggtgcaga

SEQ ID NO: 144931 - DNA, 79 bp, Homo sapiens
agtactgctcttgtttcttttcacatagctgtctagagtagcttaccagaagcttccatagtggtgcagaggaagtgga

SEQ ID NO: 144932 - DNA, 80 bp, Homo sapiens
ttcttttcacatagctgtctagagtagcttaccagaagcttccatagtggtgcagaggaagtggaaggcatcagtcccta

SEQ ID NO: 144933 - DNA, 82 bp, Homo sapiens
acatagctgtctagagtagcttaccagaagcttccatagtggtgcagaggaagtggaaggcatcagtccctatgtatttgca

SEQ ID NO: 144934 - DNA, 80 bp, Homo sapiens
gtctagagtagcttaccagaagcttccatagtggtgcagaggaagtggaaggcatcagtccctatgtatttgcagttcac

SEQ ID NO: 144935 - DNA, 80 bp, Homo sapiens
ttccatagtggtgcagaggaagtggaaggcatcagtccctatgtatttgcagttcacctgcacttaaggcactctgttat

SEQ ID NO: 144936 - DNA, 81 bp, Homo sapiens
tgcagaggaagtggaaggcatcagtccctatgtatttgcagttcacctgcacttaaggcactctgttatttagactcatct

SEQ ID NO: 144937 - DNA, 77 bp, Homo sapiens
atcagtccctatgtatttgcagttcacctgcacttaaggcactctgttatttagactcatcttactgtacctgttcc

SEQ ID NO: 144938 - DNA, 75 bp, Homo sapiens
atgtatttgcagttcacctgcacttaaggcactctgttatttagactcatcttactgtacctgttccttagacct

SEQ ID NO: 144939 - DNA, 75 bp, Homo sapiens
acttaaggcactctgttatttagactcatcttactgtacctgttccttagaccttccataatgctactgtctcac

SEQ ID NO: 144940 - DNA, 76 bp, Homo sapiens
tctgttatttagactcatcttactgtacctgttccttagaccttccataatgctactgtctcactgaaacatttaa

SEQ ID NO: 144941 - DNA, 73 bp, Homo sapiens
atttagactcatcttactgtacctgttccttagaccttccataatgctactgtctcactgaaacatttaaatt

SEQ ID NO: 144942 - DNA, 70 bp, Homo sapiens
acctgttccttagaccttccataatgctactgtctcactgaaacatttaaattttaccctttagactgta

SEQ ID NO: 144943 - DNA, 72 bp, Homo sapiens
agaccttccataatgctactgtctcactgaaacatttaaattttaccctttagactgtagcctggatattat

SEQ ID NO: 144944 - DNA, 73 bp, Homo sapiens
cataatgctactgtctcactgaaacatttaaattttaccctttagactgtagcctggatattattcttgtagt

SEQ ID NO: 144945 - DNA, 70 bp, Homo sapiens
ctgtctcactgaaacatttaaattttaccctttagactgtagcctggatattattcttgtagtttacctc

SEQ ID NO: 144946 - DNA, 66 bp, Homo sapiens
catttaaattttaccctttagactgtagcctggatattattcttgtagtttacctctttaaaaaca

SEQ ID NO: 144947 - DNA, 65 bp, Homo sapiens
aattttaccctttagactgtagcctggatattattcttgtagtttacctctttaaaaacaaaaca

SEQ ID NO: 144948 - DNA, 71 bp, Homo sapiens
aaacaaaaaactccccttcctcactgcccaatataaaaggcaaatgtgtacatggcagagtttgtgtgttg

SEQ ID NO: 144949 - DNA, 73 bp, Homo sapiens
aaaaactccccttcctcactgcccaatataaaaggcaaatgtgtacatggcagagtttgtgtgttgtcttgaa

SEQ ID NO: 144950 - DNA, 75 bp, Homo sapiens
atataaaaggcaaatgtgtacatggcagagtttgtgtgttgtcttgaaagattcaggtatgttgcctttatggtt

SEQ ID NO: 144951 - DNA, 74 bp, Homo sapiens
tacatggcagagtttgtgtgttgtcttgaaagattcaggtatgttgcctttatggtttcccccttctacatttc

SEQ ID NO: 144952 - DNA, 72 bp, Homo sapiens
tttgtgtgttgtcttgaaagattcaggtatgttgcctttatggtttcccccttctacatttcttagactaca

SEQ ID NO: 144953 - DNA, 72 bp, Homo sapiens
tgttgtcttgaaagattcaggtatgttgcctttatggtttcccccttctacatttcttagactacatttaga

SEQ ID NO: 144954 - DNA, 70 bp, Homo sapiens
aaagattcaggtatgttgcctttatggtttcccccttctacatttcttagactacatttagagaactgtg

SEQ ID NO: 144955 - DNA, 72 bp, Homo sapiens
tatgttgcctttatggtttcccccttctacatttcttagactacatttagagaactgtggccgttatctgga

SEQ ID NO: 144956 - DNA, 69 bp, Homo sapiens
ctttatggtttcccccttctacatttcttagactacatttagagaactgtggccgttatctggaagtaa

SEQ ID NO: 144957 - DNA, 74 bp, Homo sapiens
cttctacatttcttagactacatttagagaactgtggccgttatctggaagtaaccatttgcactggagttcta

SEQ ID NO: 144958 - DNA, 76 bp, Homo sapiens
acatttcttagactacatttagagaactgtggccgttatctggaagtaaccatttgcactggagttctatgctctc

SEQ ID NO: 144959 - DNA, 75 bp, Homo sapiens
acatttagagaactgtggccgttatctggaagtaaccatttgcactggagttctatgctctcgcacctttccaaa

SEQ ID NO: 144960 - DNA, 74 bp, Homo sapiens
tgtggccgttatctggaagtaaccatttgcactggagttctatgctctcgcacctttccaaagttaacagattt

SEQ ID NO: 144961 - DNA, 72 bp, Homo sapiens
ccgttatctggaagtaaccatttgcactggagttctatgctctcgcacctttccaaagttaacagattttgg

SEQ ID NO: 144962 - DNA, 72 bp, Homo sapiens
ttatctggaagtaaccatttgcactggagttctatgctctcgcacctttccaaagttaacagattttggggt

SEQ ID NO: 144963 - DNA, 71 bp, Homo sapiens
aagtaaccatttgcactggagttctatgctctcgcacctttccaaagttaacagattttggggttgtgttg

SEQ ID NO: 144964 - DNA, 73 bp, Homo sapiens
atttgcactggagttctatgctctcgcacctttccaaagttaacagattttggggttgtgttgtcacccaaga

SEQ ID NO: 144965 - DNA, 73 bp, Homo sapiens
tggagttctatgctctcgcacctttccaaagttaacagattttggggttgtgttgtcacccaagagattgttg

SEQ ID NO: 144966 - DNA, 74 bp, Homo sapiens
tatgctctcgcacctttccaaagttaacagattttggggttgtgttgtcacccaagagattgttgtttgccata

SEQ ID NO: 144967 - DNA, 68 bp, Homo sapiens
acctttccaaagttaacagattttggggttgtgttgtcacccaagagattgttgtttgccatactttg

SEQ ID NO: 144968 - DNA, 69 bp, Homo sapiens
aaagttaacagattttggggttgtgttgtcacccaagagattgttgtttgccatactttgtctgaaaaa

SEQ ID NO: 144969 - DNA, 69 bp, Homo sapiens
attttggggttgtgttgtcacccaagagattgttgtttgccatactttgtctgaaaaattcctttgtgt

SEQ ID NO: 144970 - DNA, 75 bp, Homo sapiens
tgttgtcacccaagagattgttgtttgccatactttgtctgaaaaattcctttgtgtttctattgacttcaatga

SEQ ID NO: 144971 - DNA, 72 bp, Homo sapiens
tgttgtttgccatactttgtctgaaaaattcctttgtgtttctattgacttcaatgatagtaagaaaagtgg

SEQ ID NO: 144972 - DNA, 71 bp, Homo sapiens
gccatactttgtctgaaaaattcctttgtgtttctattgacttcaatgatagtaagaaaagtggttgttag

SEQ ID NO: 144973 - DNA, 72 bp, Homo sapiens
gtctgaaaaattcctttgtgtttctattgacttcaatgatagtaagaaaagtggttgttagttatagatgtc

SEQ ID NO: 144974 - DNA, 72 bp, Homo sapiens
tttgtgtttctattgacttcaatgatagtaagaaaagtggttgttagttatagatgtctaggtacttcaggg

SEQ ID NO: 144975 - DNA, 74 bp, Homo sapiens
ttctattgacttcaatgatagtaagaaaagtggttgttagttatagatgtctaggtacttcaggggcacttcat

SEQ ID NO: 144976 - DNA, 73 bp, Homo sapiens
ttcaatgatagtaagaaaagtggttgttagttatagatgtctaggtacttcaggggcacttcattgagagttt

SEQ ID NO: 144977 - DNA, 73 bp, Homo sapiens
taagaaaagtggttgttagttatagatgtctaggtacttcaggggcacttcattgagagttttgtcttggata

SEQ ID NO: 144978 - DNA, 73 bp, Homo sapiens
ttgttagttatagatgtctaggtacttcaggggcacttcattgagagttttgtcttggatattcttgaaagtt

SEQ ID NO: 144979 - DNA, 73 bp, Homo sapiens
gttatagatgtctaggtacttcaggggcacttcattgagagttttgtcttggatattcttgaaagtttatatt

SEQ ID NO: 144980 - DNA, 71 bp, Homo sapiens
tctaggtacttcaggggcacttcattgagagttttgtcttggatattcttgaaagtttatatttttataat

SEQ ID NO: 144981 - DNA, 71 bp, Homo sapiens
tatttttataattttttcttacatcagatgtttctttgcagtggcttaatgtttgaaattattttgtggct

SEQ ID NO: 144982 - DNA, 70 bp, Homo sapiens
atttttataattttttcttacatcagatgtttctttgcagtggcttaatgtttgaaattattttgtggct

SEQ ID NO: 144983 - DNA, 69 bp, Homo sapiens
ataattttttcttacatcagatgtttctttgcagtggcttaatgtttgaaattattttgtggctttttt

SEQ ID NO: 144984 - DNA, 72 bp, Homo sapiens
cttacatcagatgtttctttgcagtggcttaatgtttgaaattattttgtggctttttttgtaaatattgaa

SEQ ID NO: 144985 - DNA, 72 bp, Homo sapiens
gatgtttctttgcagtggcttaatgtttgaaattattttgtggctttttttgtaaatattgaaatgtagcaa

SEQ ID NO: 144986 - DNA, 72 bp, Homo sapiens
tgcagtggcttaatgtttgaaattattttgtggctttttttgtaaatattgaaatgtagcaataatgtcttt

SEQ ID NO: 144987 - DNA, 70 bp, Homo sapiens
gtttgaaattattttgtggctttttttgtaaatattgaaatgtagcaataatgtcttttgaatattccca

SEQ ID NO: 144988 - DNA, 72 bp, Homo sapiens
ttttgtggctttttttgtaaatattgaaatgtagcaataatgtcttttgaatattcccaagcccatgagtcc

SEQ ID NO: 144989 - DNA, 72 bp, Homo sapiens
ttttttgtaaatattgaaatgtagcaataatgtcttttgaatattcccaagcccatgagtccttgaaaatat

SEQ ID NO: 144990 - DNA, 72 bp, Homo sapiens
gtaaatattgaaatgtagcaataatgtcttttgaatattcccaagcccatgagtccttgaaaatatttttta

SEQ ID NO: 144991 - DNA, 72 bp, Homo sapiens
tgtcttttgaatattcccaagcccatgagtccttgaaaatattttttatatatacagtaactttatgtgtaa

SEQ ID NO: 144992 - DNA, 72 bp, Homo sapiens
atattcccaagcccatgagtccttgaaaatattttttatatatacagtaactttatgtgtaaatacataagc

SEQ ID NO: 144993 - DNA, 71 bp, Homo sapiens
cccaagcccatgagtccttgaaaatattttttatatatacagtaactttatgtgtaaatacataagcggcg

SEQ ID NO: 144994 - DNA, 70 bp, Homo sapiens
tgagtccttgaaaatattttttatatatacagtaactttatgtgtaaatacataagcggcgtaagtttaa

SEQ ID NO: 144995 - DNA, 68 bp, Homo sapiens
attttttatatatacagtaactttatgtgtaaatacataagcggcgtaagtttaaaggatgttggtgt

SEQ ID NO: 144996 - DNA, 68 bp, Homo sapiens
actttatgtgtaaatacataagcggcgtaagtttaaaggatgttggtgttccacgtgttttattcctg

SEQ ID NO: 144997 - DNA, 70 bp, Homo sapiens
taaatacataagcggcgtaagtttaaaggatgttggtgttccacgtgttttattcctgtatgttgtccaa

SEQ ID NO: 144998 - DNA, 70 bp, Homo sapiens
ataagcggcgtaagtttaaaggatgttggtgttccacgtgttttattcctgtatgttgtccaattgttga

SEQ ID NO: 144999 - DNA, 71 bp, Homo sapiens
gtaagtttaaaggatgttggtgttccacgtgttttattcctgtatgttgtccaattgttgacagttctgaa

SEQ ID NO: 145000 - DNA, 73 bp, Homo sapiens
aggatgttggtgttccacgtgttttattcctgtatgttgtccaattgttgacagttctgaagaattctaataa

SEQ ID NO: 145001 - DNA, 75 bp, Homo sapiens
tgttccacgtgttttattcctgtatgttgtccaattgttgacagttctgaagaattctaataaaatgtacatata

SEQ ID NO: 145002 - DNA, 78 bp, Homo sapiens
tgtatgttgtccaattgttgacagttctgaagaattctaataaaatgtacatatataaatcaagtggagtcatttgat

SEQ ID NO: 145003 - DNA, 79 bp, Homo sapiens
tgttgacagttctgaagaattctaataaaatgtacatatataaatcaagtggagtcatttgattgttgagattcgttga

SEQ ID NO: 145004 - DNA, 78 bp, Homo sapiens
cagttctgaagaattctaataaaatgtacatatataaatcaagtggagtcatttgattgttgagattcgttgagatta

SEQ ID NO: 145005 - DNA, 77 bp, Homo sapiens
cctcgcgcggagggcgtggcctcggggcgtcccgggcagccggcgtgctgagcttgccagccagctagcgagcgacg

SEQ ID NO: 145006 - DNA, 77 bp, Homo sapiens
agggcgtggcctcggggcgtcccgggcagccggcgtgctgagcttgccagccagctagcgagcgacgggcgcgcgcg

SEQ ID NO: 145007 - DNA, 80 bp, Homo sapiens
tcggggcgtcccgggcagccggcgtgctgagcttgccagccagctagcgagcgacgggcgcgcgcggcccctgcgcactc

SEQ ID NO: 145008 - DNA, 80 bp, Homo sapiens
gtcccgggcagccggcgtgctgagcttgccagccagctagcgagcgacgggcgcgcgcggcccctgcgcactcggccgcc

SEQ ID NO: 145009 - DNA, 83 bp, Homo sapiens
cgtgctgagcttgccagccagctagcgagcgacgggcgcgcgcggcccctgcgcactcggccgccgcctgcgcgcgttgcggc

SEQ ID NO: 145010 - DNA, 84 bp, Homo sapiens
ttgccagccagctagcgagcgacgggcgcgcgcggcccctgcgcactcggccgccgcctgcgcgcgttgcggccgcagctgcac

SEQ ID NO: 145011 - DNA, 81 bp, Homo sapiens
agctagcgagcgacgggcgcgcgcggcccctgcgcactcggccgccgcctgcgcgcgttgcggccgcagctgcacctttgc

SEQ ID NO: 145012 - DNA, 79 bp, Homo sapiens
cgagcgacgggcgcgcgcggcccctgcgcactcggccgccgcctgcgcgcgttgcggccgcagctgcacctttgcctcc

SEQ ID NO: 145013 - DNA, 78 bp, Homo sapiens
cgcggcccctgcgcactcggccgccgcctgcgcgcgttgcggccgcagctgcacctttgcctccgcggttccgcagcc

SEQ ID NO: 145014 - DNA, 78 bp, Homo sapiens
ccctgcgcactcggccgccgcctgcgcgcgttgcggccgcagctgcacctttgcctccgcggttccgcagccgagccc

SEQ ID NO: 145015 - DNA, 76 bp, Homo sapiens
tcggccgccgcctgcgcgcgttgcggccgcagctgcacctttgcctccgcggttccgcagccgagccccgggagga

SEQ ID NO: 145016 - DNA, 75 bp, Homo sapiens
cctgcgcgcgttgcggccgcagctgcacctttgcctccgcggttccgcagccgagccccgggaggaggcgctccc

SEQ ID NO: 145017 - DNA, 75 bp, Homo sapiens
ttgcggccgcagctgcacctttgcctccgcggttccgcagccgagccccgggaggaggcgctcccctgcgtcgtc

SEQ ID NO: 145018 - DNA, 74 bp, Homo sapiens
agctgcacctttgcctccgcggttccgcagccgagccccgggaggaggcgctcccctgcgtcgtccgcacttgc

SEQ ID NO: 145019 - DNA, 71 bp, Homo sapiens
tttgcctccgcggttccgcagccgagccccgggaggaggcgctcccctgcgtcgtccgcacttgcgccctt

SEQ ID NO: 145020 - DNA, 72 bp, Homo sapiens
gttccgcagccgagccccgggaggaggcgctcccctgcgtcgtccgcacttgcgccctttcccaccgcaaca

SEQ ID NO: 145021 - DNA, 70 bp, Homo sapiens
ccgagccccgggaggaggcgctcccctgcgtcgtccgcacttgcgccctttcccaccgcaacaggtcagg

SEQ ID NO: 145022 - DNA, 70 bp, Homo sapiens
aggaggcgctcccctgcgtcgtccgcacttgcgccctttcccaccgcaacaggtcaggggagggcggagg

SEQ ID NO: 145023 - DNA, 71 bp, Homo sapiens
ccctgcgtcgtccgcacttgcgccctttcccaccgcaacaggtcaggggagggcggaggtgacgagggcgc

SEQ ID NO: 145024 - DNA, 70 bp, Homo sapiens
gtcgtccgcacttgcgccctttcccaccgcaacaggtcaggggagggcggaggtgacgagggcgcccgac

SEQ ID NO: 145025 - DNA, 68 bp, Homo sapiens
ttgcgccctttcccaccgcaacaggtcaggggagggcggaggtgacgagggcgcccgacccgggacta

SEQ ID NO: 145026 - DNA, 68 bp, Homo sapiens
tcccaccgcaacaggtcaggggagggcggaggtgacgagggcgcccgacccgggactagaggacggaa

SEQ ID NO: 145027 - DNA, 66 bp, Homo sapiens
aggtcaggggagggcggaggtgacgagggcgcccgacccgggactagaggacggaagggtctggaa

SEQ ID NO: 145028 - DNA, 69 bp, Homo sapiens
agggcggaggtgacgagggcgcccgacccgggactagaggacggaagggtctggaaggtgagcgcagcc

SEQ ID NO: 145029 - DNA, 71 bp, Homo sapiens
aggtgacgagggcgcccgacccgggactagaggacggaagggtctggaaggtgagcgcagccctgcgccac

SEQ ID NO: 145030 - DNA, 71 bp, Homo sapiens
ggcgcccgacccgggactagaggacggaagggtctggaaggtgagcgcagccctgcgccacccagggctgg

SEQ ID NO: 145031 - DNA, 77 bp, Homo sapiens
tgttccctgggacagttgcaaagtgagaagagctcagaaactgaagcacagaaacgttaggtaggagtctgagaggc

SEQ ID NO: 145032 - DNA, 75 bp, Homo sapiens
agttgcaaagtgagaagagctcagaaactgaagcacagaaacgttaggtaggagtctgagaggcgtggagaattt

SEQ ID NO: 145033 - DNA, 77 bp, Homo sapiens
agaagagctcagaaactgaagcacagaaacgttaggtaggagtctgagaggcgtggagaattttgcttgtgcaagat

SEQ ID NO: 145034 - DNA, 76 bp, Homo sapiens
agaaactgaagcacagaaacgttaggtaggagtctgagaggcgtggagaattttgcttgtgcaagattatttcaga

SEQ ID NO: 145035 - DNA, 76 bp, Homo sapiens
aagcacagaaacgttaggtaggagtctgagaggcgtggagaattttgcttgtgcaagattatttcagagcaaggtc

SEQ ID NO: 145036 - DNA, 74 bp, Homo sapiens
aaacgttaggtaggagtctgagaggcgtggagaattttgcttgtgcaagattatttcagagcaaggtcgtgcgg

SEQ ID NO: 145037 - DNA, 79 bp, Homo sapiens
taggagtctgagaggcgtggagaattttgcttgtgcaagattatttcagagcaaggtcgtgcggtgtgtgtagaaggta

SEQ ID NO: 145038 - DNA, 76 bp, Homo sapiens
agaggcgtggagaattttgcttgtgcaagattatttcagagcaaggtcgtgcggtgtgtgtagaaggtaggtggcc

SEQ ID NO: 145039 - DNA, 74 bp, Homo sapiens
agaattttgcttgtgcaagattatttcagagcaaggtcgtgcggtgtgtgtagaaggtaggtggccgtgggtta

SEQ ID NO: 145040 - DNA, 76 bp, Homo sapiens
cttgtgcaagattatttcagagcaaggtcgtgcggtgtgtgtagaaggtaggtggccgtgggttacctctctcaga

SEQ ID NO: 145041 - DNA, 74 bp, Homo sapiens
tttcagagcaaggtcgtgcggtgtgtgtagaaggtaggtggccgtgggttacctctctcagacctgcgtggtgt

SEQ ID NO: 145042 - DNA, 72 bp, Homo sapiens
aaggtcgtgcggtgtgtgtagaaggtaggtggccgtgggttacctctctcagacctgcgtggtgttggcctc

SEQ ID NO: 145043 - DNA, 77 bp, Homo sapiens
gtatccctgaatttactcacaggctaatgttcacaggctactctttgtttctctttcagatgaacagactagccact

SEQ ID NO: 145044 - DNA, 78 bp, Homo sapiens
aatttactcacaggctaatgttcacaggctactctttgtttctctttcagatgaacagactagccactttgcattgac

SEQ ID NO: 145045 - DNA, 78 bp, Homo sapiens
acaggctaatgttcacaggctactctttgtttctctttcagatgaacagactagccactttgcattgactggaaacaa

SEQ ID NO: 145046 - DNA, 79 bp, Homo sapiens
atgttcacaggctactctttgtttctctttcagatgaacagactagccactttgcattgactggaaacaatggcattta

SEQ ID NO: 145047 - DNA, 79 bp, Homo sapiens
tactctttgtttctctttcagatgaacagactagccactttgcattgactggaaacaatggcatttacagaaagagtca

SEQ ID NO: 145048 - DNA, 80 bp, Homo sapiens
gtttctctttcagatgaacagactagccactttgcattgactggaaacaatggcatttacagaaagagtcaacagcagtg

SEQ ID NO: 145049 - DNA, 80 bp, Homo sapiens
agatgaacagactagccactttgcattgactggaaacaatggcatttacagaaagagtcaacagcagtggcaacaggtaa

SEQ ID NO: 145050 - DNA, 83 bp, Homo sapiens
tagccactttgcattgactggaaacaatggcatttacagaaagagtcaacagcagtggcaacaggtaagcatagaatctatga

SEQ ID NO: 145051 - DNA, 82 bp, Homo sapiens
tttgcattgactggaaacaatggcatttacagaaagagtcaacagcagtggcaacaggtaagcatagaatctatgattcaaa

SEQ ID NO: 145052 - DNA, 82 bp, Homo sapiens
aaacaatggcatttacagaaagagtcaacagcagtggcaacaggtaagcatagaatctatgattcaaagacatgctgatatt

SEQ ID NO: 145053 - DNA, 81 bp, Homo sapiens
catttacagaaagagtcaacagcagtggcaacaggtaagcatagaatctatgattcaaagacatgctgatatttaatttta

SEQ ID NO: 145054 - DNA, 82 bp, Homo sapiens
cagaaagagtcaacagcagtggcaacaggtaagcatagaatctatgattcaaagacatgctgatatttaattttataatcta

SEQ ID NO: 145055 - DNA, 71 bp, Homo sapiens
tatcccggcggactcggacaacttcaagtgagcccagaggcaatttcttttcctttctaactgtggcccgc

SEQ ID NO: 145056 - DNA, 73 bp, Homo sapiens
actcggacaacttcaagtgagcccagaggcaatttcttttcctttctaactgtggcccgcgttgtgctgttgc

SEQ ID NO: 145057 - DNA, 75 bp, Homo sapiens
ttcaagtgagcccagaggcaatttcttttcctttctaactgtggcccgcgttgtgctgttgctgggcaggcgttg

SEQ ID NO: 145058 - DNA, 73 bp, Homo sapiens
agcccagaggcaatttcttttcctttctaactgtggcccgcgttgtgctgttgctgggcaggcgttgggcgcc

SEQ ID NO: 145059 - DNA, 73 bp, Homo sapiens
tcttttcctttctaactgtggcccgcgttgtgctgttgctgggcaggcgttgggcgccggcggtcttcgagcg

SEQ ID NO: 145060 - DNA, 73 bp, Homo sapiens
tcctttctaactgtggcccgcgttgtgctgttgctgggcaggcgttgggcgccggcggtcttcgagcgtgggg

SEQ ID NO: 145061 - DNA, 74 bp, Homo sapiens
tgtggcccgcgttgtgctgttgctgggcaggcgttgggcgccggcggtcttcgagcgtgggggcccgctggctt

SEQ ID NO: 145062 - DNA, 72 bp, Homo sapiens
cgttgtgctgttgctgggcaggcgttgggcgccggcggtcttcgagcgtgggggcccgctggctttcccttc

SEQ ID NO: 145063 - DNA, 73 bp, Homo sapiens
ttgctgggcaggcgttgggcgccggcggtcttcgagcgtgggggcccgctggctttcccttctcagaaactgc

SEQ ID NO: 145064 - DNA, 69 bp, Homo sapiens
ggcgttgggcgccggcggtcttcgagcgtgggggcccgctggctttcccttctcagaaactgcgccggg

SEQ ID NO: 145065 - DNA, 71 bp, Homo sapiens
ccggcggtcttcgagcgtgggggcccgctggctttcccttctcagaaactgcgccgggggcgctcgcttgc

SEQ ID NO: 145066 - DNA, 71 bp, Homo sapiens
ttcgagcgtgggggcccgctggctttcccttctcagaaactgcgccgggggcgctcgcttgccccggattc

SEQ ID NO: 145067 - DNA, 71 bp, Homo sapiens
ccgctggctttcccttctcagaaactgcgccgggggcgctcgcttgccccggattcggacgcggcgctccc

SEQ ID NO: 145068 - DNA, 71 bp, Homo sapiens
tcccttctcagaaactgcgccgggggcgctcgcttgccccggattcggacgcggcgctccccgggctcgtc

SEQ ID NO: 145069 - DNA, 75 bp, Homo sapiens
tctcagaaactgcgccgggggcgctcgcttgccccggattcggacgcggcgctccccgggctcgtctgaagtgca

SEQ ID NO: 145070 - DNA, 74 bp, Homo sapiens
ccgggggcgctcgcttgccccggattcggacgcggcgctccccgggctcgtctgaagtgcagatcgccgcagag

SEQ ID NO: 145071 - DNA, 77 bp, Homo sapiens
cgctcgcttgccccggattcggacgcggcgctccccgggctcgtctgaagtgcagatcgccgcagaggccccagtgc

SEQ ID NO: 145072 - DNA, 78 bp, Homo sapiens
cggattcggacgcggcgctccccgggctcgtctgaagtgcagatcgccgcagaggccccagtgcccggatgtccatca

SEQ ID NO: 145073 - DNA, 78 bp, Homo sapiens
cggacgcggcgctccccgggctcgtctgaagtgcagatcgccgcagaggccccagtgcccggatgtccatcaggatta

SEQ ID NO: 145074 - DNA, 79 bp, Homo sapiens
cccgggctcgtctgaagtgcagatcgccgcagaggccccagtgcccggatgtccatcaggattagcgcgagccaatacg

SEQ ID NO: 145075 - DNA, 81 bp, Homo sapiens
ctcgtctgaagtgcagatcgccgcagaggccccagtgcccggatgtccatcaggattagcgcgagccaatacgggccgagc

SEQ ID NO: 145076 - DNA, 77 bp, Homo sapiens
agatcgccgcagaggccccagtgcccggatgtccatcaggattagcgcgagccaatacgggccgagcccggggctgc

SEQ ID NO: 145077 - DNA, 75 bp, Homo sapiens
agaggccccagtgcccggatgtccatcaggattagcgcgagccaatacgggccgagcccggggctgcgccgagga

SEQ ID NO: 145078 - DNA, 73 bp, Homo sapiens
agtgcccggatgtccatcaggattagcgcgagccaatacgggccgagcccggggctgcgccgaggacgcccgg

SEQ ID NO: 145079 - DNA, 76 bp, Homo sapiens
atgtccatcaggattagcgcgagccaatacgggccgagcccggggctgcgccgaggacgcccggggctcgagagca

SEQ ID NO: 145080 - DNA, 72 bp, Homo sapiens
aggattagcgcgagccaatacgggccgagcccggggctgcgccgaggacgcccggggctcgagagcaggtag

SEQ ID NO: 145081 - DNA, 70 bp, Homo sapiens
agccaatacgggccgagcccggggctgcgccgaggacgcccggggctcgagagcaggtagtcccgtaaca

SEQ ID NO: 145082 - DNA, 68 bp, Homo sapiens
acgggccgagcccggggctgcgccgaggacgcccggggctcgagagcaggtagtcccgtaacatcggg

SEQ ID NO: 145083 - DNA, 71 bp, Homo sapiens
gggctgcgccgaggacgcccggggctcgagagcaggtagtcccgtaacatcggggcgccgcgccgggacgc

SEQ ID NO: 145084 - DNA, 68 bp, Homo sapiens
ccgaggacgcccggggctcgagagcaggtagtcccgtaacatcggggcgccgcgccgggacgcgtccc

SEQ ID NO: 145085 - DNA, 70 bp, Homo sapiens
gggctcgagagcaggtagtcccgtaacatcggggcgccgcgccgggacgcgtccccgcccggctccgcca

SEQ ID NO: 145086 - DNA, 69 bp, Homo sapiens
agcaggtagtcccgtaacatcggggcgccgcgccgggacgcgtccccgcccggctccgccaaatggtga

SEQ ID NO: 145087 - DNA, 70 bp, Homo sapiens
tagtcccgtaacatcggggcgccgcgccgggacgcgtccccgcccggctccgccaaatggtgagcgcggc

SEQ ID NO: 145088 - DNA, 74 bp, Homo sapiens
acatcggggcgccgcgccgggacgcgtccccgcccggctccgccaaatggtgagcgcggcgctggcagcagggc

SEQ ID NO: 145089 - DNA, 72 bp, Homo sapiens
cgccgggacgcgtccccgcccggctccgccaaatggtgagcgcggcgctggcagcagggcccgcggggtgaa

SEQ ID NO: 145090 - DNA, 75 bp, Homo sapiens
gtccccgcccggctccgccaaatggtgagcgcggcgctggcagcagggcccgcggggtgaaggcgctcatggacg

SEQ ID NO: 145091 - DNA, 75 bp, Homo sapiens
ccggctccgccaaatggtgagcgcggcgctggcagcagggcccgcggggtgaaggcgctcatggacggaagaccc

SEQ ID NO: 145092 - DNA, 76 bp, Homo sapiens
aaatggtgagcgcggcgctggcagcagggcccgcggggtgaaggcgctcatggacggaagacccctggctctataa

SEQ ID NO: 145093 - DNA, 77 bp, Homo sapiens
agcgcggcgctggcagcagggcccgcggggtgaaggcgctcatggacggaagacccctggctctataagctgaatta

SEQ ID NO: 145094 - DNA, 78 bp, Homo sapiens
cagcagggcccgcggggtgaaggcgctcatggacggaagacccctggctctataagctgaattatggcagcccagtca

SEQ ID NO: 145095 - DNA, 75 bp, Homo sapiens
ccgcggggtgaaggcgctcatggacggaagacccctggctctataagctgaattatggcagcccagtcaaggtaa

SEQ ID NO: 145096 - DNA, 76 bp, Homo sapiens
aaggcgctcatggacggaagacccctggctctataagctgaattatggcagcccagtcaaggtaagccgtgcaccg

SEQ ID NO: 145097 - DNA, 73 bp, Homo sapiens
aagacccctggctctataagctgaattatggcagcccagtcaaggtaagccgtgcaccggagaaacttttcaa

SEQ ID NO: 145098 - DNA, 75 bp, Homo sapiens
gagactgataaattttattgttttcattcttttgtggcatctgaaacagtttgtacaatgacgacagaaacctgc

SEQ ID NO: 145099 - DNA, 75 bp, Homo sapiens
tttattgttttcattcttttgtggcatctgaaacagtttgtacaatgacgacagaaacctgcttcgaattagaga

SEQ ID NO: 145100 - DNA, 75 bp, Homo sapiens
tttcattcttttgtggcatctgaaacagtttgtacaatgacgacagaaacctgcttcgaattagagagaaggaaa

SEQ ID NO: 145101 - DNA, 75 bp, Homo sapiens
ttttgtggcatctgaaacagtttgtacaatgacgacagaaacctgcttcgaattagagagaaggaaagacgcaac

SEQ ID NO: 145102 - DNA, 74 bp, Homo sapiens
atctgaaacagtttgtacaatgacgacagaaacctgcttcgaattagagagaaggaaagacgcaaccaggaagc

SEQ ID NO: 145103 - DNA, 74 bp, Homo sapiens
tttgtacaatgacgacagaaacctgcttcgaattagagagaaggaaagacgcaaccaggaagcccaccaagaga

SEQ ID NO: 145104 - DNA, 72 bp, Homo sapiens
acagaaacctgcttcgaattagagagaaggaaagacgcaaccaggaagcccaccaagagaaagaggcatttc

SEQ ID NO: 145105 - DNA, 73 bp, Homo sapiens
tgcttcgaattagagagaaggaaagacgcaaccaggaagcccaccaagagaaagaggcatttcctgaaaagat

SEQ ID NO: 145106 - DNA, 70 bp, Homo sapiens
aattagagagaaggaaagacgcaaccaggaagcccaccaagagaaagaggcatttcctgaaaagattccc

SEQ ID NO: 145107 - DNA, 67 bp, Homo sapiens
aaggaaagacgcaaccaggaagcccaccaagagaaagaggcatttcctgaaaagattcccctttttg

SEQ ID NO: 145108 - DNA, 68 bp, Homo sapiens
aaccaggaagcccaccaagagaaagaggcatttcctgaaaagattcccctttttggagagccctacaa

SEQ ID NO: 145109 - DNA, 69 bp, Homo sapiens
caccaagagaaagaggcatttcctgaaaagattcccctttttggagagccctacaaggtatttactgaa

SEQ ID NO: 145110 - DNA, 69 bp, Homo sapiens
aagaggcatttcctgaaaagattcccctttttggagagccctacaaggtatttactgaacactagacat

SEQ ID NO: 145111 - DNA, 69 bp, Homo sapiens
atttcctgaaaagattcccctttttggagagccctacaaggtatttactgaacactagacattgaagtc

SEQ ID NO: 145112 - DNA, 69 bp, Homo sapiens
gttttccttagttttttttcattctcaaattctccttttttttcagacagcaaaaggtgatgagctgtc

SEQ ID NO: 145113 - DNA, 73 bp, Homo sapiens
gttttttttcattctcaaattctccttttttttcagacagcaaaaggtgatgagctgtctagtcgaatacaga

SEQ ID NO: 145114 - DNA, 76 bp, Homo sapiens
tttcattctcaaattctccttttttttcagacagcaaaaggtgatgagctgtctagtcgaatacagaacatgttgg

SEQ ID NO: 145115 - DNA, 73 bp, Homo sapiens
aaattctccttttttttcagacagcaaaaggtgatgagctgtctagtcgaatacagaacatgttgggaaacta

SEQ ID NO: 145116 - DNA, 76 bp, Homo sapiens
tttttcagacagcaaaaggtgatgagctgtctagtcgaatacagaacatgttgggaaactacgaagaagtgaagga

SEQ ID NO: 145117 - DNA, 72 bp, Homo sapiens
aaaaggtgatgagctgtctagtcgaatacagaacatgttgggaaactacgaagaagtgaaggagttccttag

SEQ ID NO: 145118 - DNA, 73 bp, Homo sapiens
atgagctgtctagtcgaatacagaacatgttgggaaactacgaagaagtgaaggagttccttagtactaagtc

SEQ ID NO: 145119 - DNA, 74 bp, Homo sapiens
tctagtcgaatacagaacatgttgggaaactacgaagaagtgaaggagttccttagtactaagtctcacactca

SEQ ID NO: 145120 - DNA, 74 bp, Homo sapiens
atacagaacatgttgggaaactacgaagaagtgaaggagttccttagtactaagtctcacactcatcgcctgga

SEQ ID NO: 145121 - DNA, 74 bp, Homo sapiens
ttgggaaactacgaagaagtgaaggagttccttagtactaagtctcacactcatcgcctggatgcttctgaaaa

SEQ ID NO: 145122 - DNA, 73 bp, Homo sapiens
aagaagtgaaggagttccttagtactaagtctcacactcatcgcctggatgcttctgaaaataggttgggaaa

SEQ ID NO: 145123 - DNA, 73 bp, Homo sapiens
aggagttccttagtactaagtctcacactcatcgcctggatgcttctgaaaataggttgggaaagccgaaata

SEQ ID NO: 145124 - DNA, 73 bp, Homo sapiens
ttagtactaagtctcacactcatcgcctggatgcttctgaaaataggttgggaaagccgaaatatcctttaat

SEQ ID NO: 145125 - DNA, 75 bp, Homo sapiens
taagtctcacactcatcgcctggatgcttctgaaaataggttgggaaagccgaaatatcctttaattcctgacaa

SEQ ID NO: 145126 - DNA, 73 bp, Homo sapiens
actcatcgcctggatgcttctgaaaataggttgggaaagccgaaatatcctttaattcctgacaaagggagca

SEQ ID NO: 145127 - DNA, 75 bp, Homo sapiens
tggatgcttctgaaaataggttgggaaagccgaaatatcctttaattcctgacaaagggagcagcattccatcca

SEQ ID NO: 145128 - DNA, 71 bp, Homo sapiens
aaaataggttgggaaagccgaaatatcctttaattcctgacaaagggagcagcattccatccagctccttc

SEQ ID NO: 145129 - DNA, 75 bp, Homo sapiens
ttgggaaagccgaaatatcctttaattcctgacaaagggagcagcattccatccagctccttccacactagtgtc

SEQ ID NO: 145130 - DNA, 76 bp, Homo sapiens
aatatcctttaattcctgacaaagggagcagcattccatccagctccttccacactagtgtccaccaccagtccat

SEQ ID NO: 145131 - DNA, 78 bp, Homo sapiens
tttaattcctgacaaagggagcagcattccatccagctccttccacactagtgtccaccaccagtccattcacactcc

SEQ ID NO: 145132 - DNA, 80 bp, Homo sapiens
acaaagggagcagcattccatccagctccttccacactagtgtccaccaccagtccattcacactcctgcgtctggacca

SEQ ID NO: 145133 - DNA, 79 bp, Homo sapiens
attccatccagctccttccacactagtgtccaccaccagtccattcacactcctgcgtctggaccactttctgttggca

SEQ ID NO: 145134 - DNA, 78 bp, Homo sapiens
agctccttccacactagtgtccaccaccagtccattcacactcctgcgtctggaccactttctgttggcaacattagc

SEQ ID NO: 145135 - DNA, 78 bp, Homo sapiens
acactagtgtccaccaccagtccattcacactcctgcgtctggaccactttctgttggcaacattagccacaatccaa

SEQ ID NO: 145136 - DNA, 81 bp, Homo sapiens
tgtccaccaccagtccattcacactcctgcgtctggaccactttctgttggcaacattagccacaatccaaagatggcgca

SEQ ID NO: 145137 - DNA, 78 bp, Homo sapiens
acactcctgcgtctggaccactttctgttggcaacattagccacaatccaaagatggcgcagccaagaactgaaccaa

SEQ ID NO: 145138 - DNA, 80 bp, Homo sapiens
tctggaccactttctgttggcaacattagccacaatccaaagatggcgcagccaagaactgaaccaatgccaagtctcca

SEQ ID NO: 145139 - DNA, 79 bp, Homo sapiens
ctttctgttggcaacattagccacaatccaaagatggcgcagccaagaactgaaccaatgccaagtctccatgccaaaa

SEQ ID NO: 145140 - DNA, 79 bp, Homo sapiens
aacattagccacaatccaaagatggcgcagccaagaactgaaccaatgccaagtctccatgccaaaagctgcggcccac

SEQ ID NO: 145141 - DNA, 79 bp, Homo sapiens
acaatccaaagatggcgcagccaagaactgaaccaatgccaagtctccatgccaaaagctgcggcccaccggacagcca

SEQ ID NO: 145142 - DNA, 80 bp, Homo sapiens
aaagatggcgcagccaagaactgaaccaatgccaagtctccatgccaaaagctgcggcccaccggacagccagcacctga

SEQ ID NO: 145143 - DNA, 77 bp, Homo sapiens
aagaactgaaccaatgccaagtctccatgccaaaagctgcggcccaccggacagccagcacctgacccaggatcgcc

SEQ ID NO: 145144 - DNA, 77 bp, Homo sapiens
aaccaatgccaagtctccatgccaaaagctgcggcccaccggacagccagcacctgacccaggatcgccttggtcag

SEQ ID NO: 145145 - DNA, 75 bp, Homo sapiens
ggcccaccggacagccagcacctgacccaggatcgccttggtcaggaggggttcggctctagtcatcacaagaaa

SEQ ID NO: 145146 - DNA, 75 bp, Homo sapiens
acagccagcacctgacccaggatcgccttggtcaggaggggttcggctctagtcatcacaagaaaggtgaccgaa

SEQ ID NO: 145147 - DNA, 74 bp, Homo sapiens
aggatcgccttggtcaggaggggttcggctctagtcatcacaagaaaggtgaccgaagagctgacggagaccac

SEQ ID NO: 145148 - DNA, 77 bp, Homo sapiens
gtcaggaggggttcggctctagtcatcacaagaaaggtgaccgaagagctgacggagaccactgtgcttcggtgaca

SEQ ID NO: 145149 - DNA, 79 bp, Homo sapiens
gttcggctctagtcatcacaagaaaggtgaccgaagagctgacggagaccactgtgcttcggtgacagattcggctcca

SEQ ID NO: 145150 - DNA, 79 bp, Homo sapiens
ctctagtcatcacaagaaaggtgaccgaagagctgacggagaccactgtgcttcggtgacagattcggctccagagagg

SEQ ID NO: 145151 - DNA, 76 bp, Homo sapiens
acaagaaaggtgaccgaagagctgacggagaccactgtgcttcggtgacagattcggctccagagagggagctttc

SEQ ID NO: 145152 - DNA, 77 bp, Homo sapiens
gtgaccgaagagctgacggagaccactgtgcttcggtgacagattcggctccagagagggagctttctcccttaatc

SEQ ID NO: 145153 - DNA, 76 bp, Homo sapiens
agctgacggagaccactgtgcttcggtgacagattcggctccagagagggagctttctcccttaatctctttgcct

SEQ ID NO: 145154 - DNA, 73 bp, Homo sapiens
accactgtgcttcggtgacagattcggctccagagagggagctttctcccttaatctctttgccttccccagt

SEQ ID NO: 145155 - DNA, 70 bp, Homo sapiens
ttcggtgacagattcggctccagagagggagctttctcccttaatctctttgccttccccagttccccct

SEQ ID NO: 145156 - DNA, 70 bp, Homo sapiens
ttcggctccagagagggagctttctcccttaatctctttgccttccccagttccccctttgtcacctata

SEQ ID NO: 145157 - DNA, 69 bp, Homo sapiens
ttctcccttaatctctttgccttccccagttccccctttgtcacctatacattccaaccagcaaactct

SEQ ID NO: 145158 - DNA, 68 bp, Homo sapiens
ccttaatctctttgccttccccagttccccctttgtcacctatacattccaaccagcaaactcttccc

SEQ ID NO: 145159 - DNA, 69 bp, Homo sapiens
cttccccagttccccctttgtcacctatacattccaaccagcaaactcttccccggacgcaaggaagca

SEQ ID NO: 145160 - DNA, 69 bp, Homo sapiens
agttccccctttgtcacctatacattccaaccagcaaactcttccccggacgcaaggaagcagcaaggt

SEQ ID NO: 145161 - DNA, 78 bp, Homo sapiens
tttgtcacctatacattccaaccagcaaactcttccccggacgcaaggaagcagcaaggttcatggcagcagcaataa

SEQ ID NO: 145162 - DNA, 76 bp, Homo sapiens
attccaaccagcaaactcttccccggacgcaaggaagcagcaaggttcatggcagcagcaataacagtaaaggcta

SEQ ID NO: 145163 - DNA, 76 bp, Homo sapiens
aaccagcaaactcttccccggacgcaaggaagcagcaaggttcatggcagcagcaataacagtaaaggctattgcc

SEQ ID NO: 145164 - DNA, 78 bp, Homo sapiens
ctcttccccggacgcaaggaagcagcaaggttcatggcagcagcaataacagtaaaggctattgcccagccaaatctc

SEQ ID NO: 145165 - DNA, 78 bp, Homo sapiens
aaggaagcagcaaggttcatggcagcagcaataacagtaaaggctattgcccagccaaatctcccaaggacctagcag

SEQ ID NO: 145166 - DNA, 78 bp, Homo sapiens
agcaaggttcatggcagcagcaataacagtaaaggctattgcccagccaaatctcccaaggacctagcagtgaaagtc

SEQ ID NO: 145167 - DNA, 80 bp, Homo sapiens
ttcatggcagcagcaataacagtaaaggctattgcccagccaaatctcccaaggacctagcagtgaaagtccatgataaa

SEQ ID NO: 145168 - DNA, 73 bp, Homo sapiens
aataacagtaaaggctattgcccagccaaatctcccaaggacctagcagtgaaagtccatgataaagagaccc

SEQ ID NO: 145169 - DNA, 74 bp, Homo sapiens
agtaaaggctattgcccagccaaatctcccaaggacctagcagtgaaagtccatgataaagagacccctcaaga

SEQ ID NO: 145170 - DNA, 72 bp, Homo sapiens
aaatctcccaaggacctagcagtgaaagtccatgataaagagacccctcaagacagtttggtggcccctgcc

SEQ ID NO: 145171 - DNA, 75 bp, Homo sapiens
acctagcagtgaaagtccatgataaagagacccctcaagacagtttggtggcccctgcccagccgccttctcaga

SEQ ID NO: 145172 - DNA, 73 bp, Homo sapiens
atgataaagagacccctcaagacagtttggtggcccctgcccagccgccttctcagacatttccacctccctc

SEQ ID NO: 145173 - DNA, 76 bp, Homo sapiens
tggcccctgcccagccgccttctcagacatttccacctccctccctcccctcaaaaagtgttgcaatgcagcagaa

SEQ ID NO: 145174 - DNA, 75 bp, Homo sapiens
gccgccttctcagacatttccacctccctccctcccctcaaaaagtgttgcaatgcagcagaagcccacggctta

SEQ ID NO: 145175 - DNA, 75 bp, Homo sapiens
ttctcagacatttccacctccctccctcccctcaaaaagtgttgcaatgcagcagaagcccacggcttatgtccg

SEQ ID NO: 145176 - DNA, 73 bp, Homo sapiens
atttccacctccctccctcccctcaaaaagtgttgcaatgcagcagaagcccacggcttatgtccggcccatg

SEQ ID NO: 145177 - DNA, 77 bp, Homo sapiens
cctcccctcaaaaagtgttgcaatgcagcagaagcccacggcttatgtccggcccatggatggtcaagatcaggccc

SEQ ID NO: 145178 - DNA, 78 bp, Homo sapiens
aaaaagtgttgcaatgcagcagaagcccacggcttatgtccggcccatggatggtcaagatcaggcccctagtgaatc

SEQ ID NO: 145179 - DNA, 74 bp, Homo sapiens
agaagcccacggcttatgtccggcccatggatggtcaagatcaggcccctagtgaatcccctgaactgaaacca

SEQ ID NO: 145180 - DNA, 74 bp, Homo sapiens
acggcttatgtccggcccatggatggtcaagatcaggcccctagtgaatcccctgaactgaaaccactgccgga

SEQ ID NO: 145181 - DNA, 78 bp, Homo sapiens
ggcccatggatggtcaagatcaggcccctagtgaatcccctgaactgaaaccactgccggaggactatcgacagcaga

SEQ ID NO: 145182 - DNA, 76 bp, Homo sapiens
tggtcaagatcaggcccctagtgaatcccctgaactgaaaccactgccggaggactatcgacagcagacctttgaa

SEQ ID NO: 145183 - DNA, 73 bp, Homo sapiens
aagatcaggcccctagtgaatcccctgaactgaaaccactgccggaggactatcgacagcagacctttgaaaa

SEQ ID NO: 145184 - DNA, 71 bp, Homo sapiens
ccctagtgaatcccctgaactgaaaccactgccggaggactatcgacagcagacctttgaaaaaacagact

SEQ ID NO: 145185 - DNA, 74 bp, Homo sapiens
ctgaactgaaaccactgccggaggactatcgacagcagacctttgaaaaaacagacttgaaagtgcctgccaaa

SEQ ID NO: 145186 - DNA, 73 bp, Homo sapiens
aaaccactgccggaggactatcgacagcagacctttgaaaaaacagacttgaaagtgcctgccaaagccaagc

SEQ ID NO: 145187 - DNA, 75 bp, Homo sapiens
aggactatcgacagcagacctttgaaaaaacagacttgaaagtgcctgccaaagccaagctcaccaaactgaaga

SEQ ID NO: 145188 - DNA, 77 bp, Homo sapiens
tatcgacagcagacctttgaaaaaacagacttgaaagtgcctgccaaagccaagctcaccaaactgaagatgccttc

SEQ ID NO: 145189 - DNA, 76 bp, Homo sapiens
tttgaaaaaacagacttgaaagtgcctgccaaagccaagctcaccaaactgaagatgccttctcagtcagttgagg

SEQ ID NO: 145190 - DNA, 77 bp, Homo sapiens
aaagtgcctgccaaagccaagctcaccaaactgaagatgccttctcagtcagttgaggtgtgtggaatttcttatct

SEQ ID NO: 145191 - DNA, 75 bp, Homo sapiens
aaagccaagctcaccaaactgaagatgccttctcagtcagttgaggtgtgtggaatttcttatcttggggaattc

SEQ ID NO: 145192 - DNA, 74 bp, Homo sapiens
ttctcagtcagttgaggtgtgtggaatttcttatcttggggaattccaattcgaagacggatttgagatgaaaa

SEQ ID NO: 145193 - DNA, 71 bp, Homo sapiens
agttgaggtgtgtggaatttcttatcttggggaattccaattcgaagacggatttgagatgaaaatgtccg

SEQ ID NO: 145194 - DNA, 72 bp, Homo sapiens
tgtggaatttcttatcttggggaattccaattcgaagacggatttgagatgaaaatgtccggaggatgtggg

SEQ ID NO: 145195 - DNA, 71 bp, Homo sapiens
aattcgaagacggatttgagatgaaaatgtccggaggatgtggggcaaggtggggaggttagtccatggct

SEQ ID NO: 145196 - DNA, 70 bp, Homo sapiens
acggatttgagatgaaaatgtccggaggatgtggggcaaggtggggaggttagtccatggcttttgggta

SEQ ID NO: 145197 - DNA, 67 bp, Homo sapiens
atgaaaatgtccggaggatgtggggcaaggtggggaggttagtccatggcttttgggtagggggaat

SEQ ID NO: 145198 - DNA, 65 bp, Homo sapiens
aggatgtggggcaaggtggggaggttagtccatggcttttgggtagggggaattctttttggctt

SEQ ID NO: 145199 - DNA, 66 bp, Homo sapiens
gcaaggtggggaggttagtccatggcttttgggtagggggaattctttttggctttaggatcttgt

SEQ ID NO: 145200 - DNA, 65 bp, Homo sapiens
gggaggttagtccatggcttttgggtagggggaattctttttggctttaggatcttgttaataac

SEQ ID NO: 145201 - DNA, 65 bp, Homo sapiens
tccatggcttttgggtagggggaattctttttggctttaggatcttgttaataacccgcgaaaaa

SEQ ID NO: 145202 - DNA, 65 bp, Homo sapiens
ttttgggtagggggaattctttttggctttaggatcttgttaataacccgcgaaaaactcagatc

SEQ ID NO: 145203 - DNA, 72 bp, Homo sapiens
aattctttttggctttaggatcttgttaataacccgcgaaaaactcagatctgagatggacgactgattata

SEQ ID NO: 145204 - DNA, 75 bp, Homo sapiens
ttttggctttaggatcttgttaataacccgcgaaaaactcagatctgagatggacgactgattatagatattgaa

SEQ ID NO: 145205 - DNA, 78 bp, Homo sapiens
atcttgttaataacccgcgaaaaactcagatctgagatggacgactgattatagatattgaaatgcagtttgcagaaa

SEQ ID NO: 145206 - DNA, 76 bp, Homo sapiens
ttaataacccgcgaaaaactcagatctgagatggacgactgattatagatattgaaatgcagtttgcagaaaggtt

SEQ ID NO: 145207 - DNA, 76 bp, Homo sapiens
aaactcagatctgagatggacgactgattatagatattgaaatgcagtttgcagaaaggtttagagaaccttttta

SEQ ID NO: 145208 - DNA, 72 bp, Homo sapiens
ggacgactgattatagatattgaaatgcagtttgcagaaaggtttagagaacctttttatggagccaaaatt

SEQ ID NO: 145209 - DNA, 72 bp, Homo sapiens
gcagaaaggtttagagaacctttttatggagccaaaatttatatacagtaaaacatagagatcataagagta

SEQ ID NO: 145210 - DNA, 72 bp, Homo sapiens
gaacctttttatggagccaaaatttatatacagtaaaacatagagatcataagagtacagtttgtgtttcaa

SEQ ID NO: 145211 - DNA, 73 bp, Homo sapiens
ggagccaaaatttatatacagtaaaacatagagatcataagagtacagtttgtgtttcaaaaaatagatacac

SEQ ID NO: 145212 - DNA, 74 bp, Homo sapiens
atatacagtaaaacatagagatcataagagtacagtttgtgtttcaaaaaatagatacacctataggatccaaa

SEQ ID NO: 145213 - DNA, 72 bp, Homo sapiens
gtaaaacatagagatcataagagtacagtttgtgtttcaaaaaatagatacacctataggatccaaaaccca

SEQ ID NO: 145214 - DNA, 75 bp, Homo sapiens
gagatcataagagtacagtttgtgtttcaaaaaatagatacacctataggatccaaaacccaatcaagagagaga

SEQ ID NO: 145215 - DNA, 70 bp, Homo sapiens
gtttcaaaaaatagatacacctataggatccaaaacccaatcaagagagagaagatttcggttaccagaa

SEQ ID NO: 145216 - DNA, 70 bp, Homo sapiens
aaaatagatacacctataggatccaaaacccaatcaagagagagaagatttcggttaccagaaagtttca

SEQ ID NO: 145217 - DNA, 68 bp, Homo sapiens
caaaacccaatcaagagagagaagatttcggttaccagaaagtttcaggaaggttttcaggtgtctta

SEQ ID NO: 145218 - DNA, 69 bp, Homo sapiens
caatcaagagagagaagatttcggttaccagaaagtttcaggaaggttttcaggtgtcttatttattgt

SEQ ID NO: 145219 - DNA, 66 bp, Homo sapiens
tttcggttaccagaaagtttcaggaaggttttcaggtgtcttatttattgttttgggagacactgg

SEQ ID NO: 145220 - DNA, 67 bp, Homo sapiens
aaagtttcaggaaggttttcaggtgtcttatttattgttttgggagacactggggtaacaatgtgaa

SEQ ID NO: 145221 - DNA, 67 bp, Homo sapiens
ggaaggttttcaggtgtcttatttattgttttgggagacactggggtaacaatgtgaacacgaaaaa

SEQ ID NO: 145222 - DNA, 66 bp, Homo sapiens
ttcaggtgtcttatttattgttttgggagacactggggtaacaatgtgaacacgaaaaaatttttt

SEQ ID NO: 145223 - DNA, 66 bp, Homo sapiens
tattgttttgggagacactggggtaacaatgtgaacacgaaaaaattttttttgattaatacctcc

SEQ ID NO: 145224 - DNA, 67 bp, Homo sapiens
tttgggagacactggggtaacaatgtgaacacgaaaaaattttttttgattaatacctcctcagacc

SEQ ID NO: 145225 - DNA, 64 bp, Homo sapiens
gggtaacaatgtgaacacgaaaaaattttttttgattaatacctcctcagacccagttaatttt

SEQ ID NO: 145226 - DNA, 63 bp, Homo sapiens
aaaaattttttttgattaatacctcctcagacccagttaatttttcctgggctctaaaccgta

SEQ ID NO: 145227 - DNA, 64 bp, Homo sapiens
tttgattaatacctcctcagacccagttaatttttcctgggctctaaaccgtaaaaaagtaaaa

SEQ ID NO: 145228 - DNA, 65 bp, Homo sapiens
atacctcctcagacccagttaatttttcctgggctctaaaccgtaaaaaagtaaaaacaagatga

SEQ ID NO: 145229 - DNA, 67 bp, Homo sapiens
tcagacccagttaatttttcctgggctctaaaccgtaaaaaagtaaaaacaagatgacagagtctct

SEQ ID NO: 145230 - DNA, 64 bp, Homo sapiens
gttaatttttcctgggctctaaaccgtaaaaaagtaaaaacaagatgacagagtctcttaattt

SEQ ID NO: 145231 - DNA, 63 bp, Homo sapiens
atttttattattttagaaggacttgttccctgtaaattgtaaggaactttataactaaagttc

SEQ ID NO: 145232 - DNA, 65 bp, Homo sapiens
attttagaaggacttgttccctgtaaattgtaaggaactttataactaaagttctgttctaatat

SEQ ID NO: 145233 - DNA, 67 bp, Homo sapiens
tccctgtaaattgtaaggaactttataactaaagttctgttctaatattttattatttatcacctaa

SEQ ID NO: 145234 - DNA, 66 bp, Homo sapiens
tgtaaggaactttataactaaagttctgttctaatattttattatttatcacctaaaaaagaagag

SEQ ID NO: 145235 - DNA, 71 bp, Homo sapiens
ttctgttctaatattttattatttatcacctaaaaaagaagagtgggtatacggtgacatttcacttgaga

SEQ ID NO: 145236 - DNA, 75 bp, Homo sapiens
tcacctaaaaaagaagagtgggtatacggtgacatttcacttgagagtgagtcacaaatataatacagaatgtta

SEQ ID NO: 145237 - DNA, 76 bp, Homo sapiens
aagaagagtgggtatacggtgacatttcacttgagagtgagtcacaaatataatacagaatgttattcaattatgg

SEQ ID NO: 145238 - DNA, 74 bp, Homo sapiens
ggtatacggtgacatttcacttgagagtgagtcacaaatataatacagaatgttattcaattatgggttttaaa

SEQ ID NO: 145239 - DNA, 73 bp, Homo sapiens
gacatttcacttgagagtgagtcacaaatataatacagaatgttattcaattatgggttttaaaagtaaccca

SEQ ID NO: 145240 - DNA, 72 bp, Homo sapiens
gagagtgagtcacaaatataatacagaatgttattcaattatgggttttaaaagtaacccaaatgctgtact

SEQ ID NO: 145241 - DNA, 70 bp, Homo sapiens
gtgagtcacaaatataatacagaatgttattcaattatgggttttaaaagtaacccaaatgctgtacttt

SEQ ID NO: 145242 - DNA, 69 bp, Homo sapiens
gtcacaaatataatacagaatgttattcaattatgggttttaaaagtaacccaaatgctgtacttttta

SEQ ID NO: 145243 - DNA, 66 bp, Homo sapiens
ataatacagaatgttattcaattatgggttttaaaagtaacccaaatgctgtactttttaaaacca

SEQ ID NO: 145244 - DNA, 66 bp, Homo sapiens
atacagaatgttattcaattatgggttttaaaagtaacccaaatgctgtactttttaaaaccaaga

SEQ ID NO: 145245 - DNA, 65 bp, Homo sapiens
cagaatgttattcaattatgggttttaaaagtaacccaaatgctgtactttttaaaaccaagaaa

SEQ ID NO: 145246 - DNA, 63 bp, Homo sapiens
tgttattcaattatgggttttaaaagtaacccaaatgctgtactttttaaaaccaagaaaaaa

SEQ ID NO: 145247 - DNA, 62 bp, Homo sapiens
ttcaattatgggttttaaaagtaacccaaatgctgtactttttaaaaccaagaaaaaaaata

SEQ ID NO: 145248 - DNA, 59 bp, Homo sapiens
ggttttaaaagtaacccaaatgctgtactttttaaaaccaagaaaaaaaatatttcttt

SEQ ID NO: 145249 - DNA, 73 bp, Homo sapiens
aaccaagaaaaaaaatatttctttttctactgcatggataaacagcagcattgtgtttgaatgaggagaatta

SEQ ID NO: 145250 - DNA, 80 bp, Homo sapiens
aaaaatatttctttttctactgcatggataaacagcagcattgtgtttgaatgaggagaattagagcatacattctgtca

SEQ ID NO: 145251 - DNA, 76 bp, Homo sapiens
aaacagcagcattgtgtttgaatgaggagaattagagcatacattctgtcactgaaattttaaagtggtaccaatt

SEQ ID NO: 145252 - DNA, 76 bp, Homo sapiens
agcattgtgtttgaatgaggagaattagagcatacattctgtcactgaaattttaaagtggtaccaatttctccaa

SEQ ID NO: 145253 - DNA, 73 bp, Homo sapiens
gaatgaggagaattagagcatacattctgtcactgaaattttaaagtggtaccaatttctccaaaattaagat

SEQ ID NO: 145254 - DNA, 72 bp, Homo sapiens
gagaattagagcatacattctgtcactgaaattttaaagtggtaccaatttctccaaaattaagattagtag

SEQ ID NO: 145255 - DNA, 67 bp, Homo sapiens
ttttaaagtggtaccaatttctccaaaattaagattagtagtgtgaagtgaaatgtttgaagggaat

SEQ ID NO: 145256 - DNA, 66 bp, Homo sapiens
ggtaccaatttctccaaaattaagattagtagtgtgaagtgaaatgtttgaagggaattttaaaac

SEQ ID NO: 145257 - DNA, 66 bp, Homo sapiens
ctccaaaattaagattagtagtgtgaagtgaaatgtttgaagggaattttaaaacttatcttttaa

SEQ ID NO: 145258 - DNA, 68 bp, Homo sapiens
gattagtagtgtgaagtgaaatgtttgaagggaattttaaaacttatcttttaatgtaaagtctatgg

SEQ ID NO: 145259 - DNA, 66 bp, Homo sapiens
gtgtgaagtgaaatgtttgaagggaattttaaaacttatcttttaatgtaaagtctatggtttagt

SEQ ID NO: 145260 - DNA, 67 bp, Homo sapiens
atgtttgaagggaattttaaaacttatcttttaatgtaaagtctatggtttagttacatctattgta

SEQ ID NO: 145261 - DNA, 67 bp, Homo sapiens
gggaattttaaaacttatcttttaatgtaaagtctatggtttagttacatctattgtataaacattc

SEQ ID NO: 145262 - DNA, 76 bp, Homo sapiens
cttatcttttaatgtaaagtctatggtttagttacatctattgtataaacattctaatttgcatctccattgctca

SEQ ID NO: 145263 - DNA, 76 bp, Homo sapiens
ttaatgtaaagtctatggtttagttacatctattgtataaacattctaatttgcatctccattgctcaaagacatt

SEQ ID NO: 145264 - DNA, 79 bp, Homo sapiens
gtttagttacatctattgtataaacattctaatttgcatctccattgctcaaagacatttatgccatccagatatgttt

SEQ ID NO: 145265 - DNA, 81 bp, Homo sapiens
ttgtataaacattctaatttgcatctccattgctcaaagacatttatgccatccagatatgttttacataatgccagaagg

SEQ ID NO: 145266 - DNA, 80 bp, Homo sapiens
aacattctaatttgcatctccattgctcaaagacatttatgccatccagatatgttttacataatgccagaaggtgaaat

SEQ ID NO: 145267 - DNA, 78 bp, Homo sapiens
ttgctcaaagacatttatgccatccagatatgttttacataatgccagaaggtgaaattcctcaggtgggggcgtgat

SEQ ID NO: 145268 - DNA, 76 bp, Homo sapiens
aagacatttatgccatccagatatgttttacataatgccagaaggtgaaattcctcaggtgggggcgtgattccta

SEQ ID NO: 145269 - DNA, 74 bp, Homo sapiens
atccagatatgttttacataatgccagaaggtgaaattcctcaggtgggggcgtgattcctacctggaaagata

SEQ ID NO: 145270 - DNA, 70 bp, Homo sapiens
tgttttacataatgccagaaggtgaaattcctcaggtgggggcgtgattcctacctggaaagataacctt

SEQ ID NO: 145271 - DNA, 69 bp, Homo sapiens
gtgaaattcctcaggtgggggcgtgattcctacctggaaagataacctttatcttccaggaggacaact

SEQ ID NO: 145272 - DNA, 69 bp, Homo sapiens
tcaggtgggggcgtgattcctacctggaaagataacctttatcttccaggaggacaacttgtaactttc

SEQ ID NO: 145273 - DNA, 71 bp, Homo sapiens
tacctggaaagataacctttatcttccaggaggacaacttgtaactttctggtgtcagcttctggtttaga

SEQ ID NO: 145274 - DNA, 69 bp, Homo sapiens
aaagataacctttatcttccaggaggacaacttgtaactttctggtgtcagcttctggtttagaagagg

SEQ ID NO: 145275 - DNA, 69 bp, Homo sapiens
ctttatcttccaggaggacaacttgtaactttctggtgtcagcttctggtttagaagagggaggttggg

SEQ ID NO: 145276 - DNA, 71 bp, Homo sapiens
aggacaacttgtaactttctggtgtcagcttctggtttagaagagggaggttggggtgccgtcctcactga

SEQ ID NO: 145277 - DNA, 71 bp, Homo sapiens
aacttgtaactttctggtgtcagcttctggtttagaagagggaggttggggtgccgtcctcactgagctct

SEQ ID NO: 145278 - DNA, 78 bp, Homo sapiens
tctggtttagaagagggaggttggggtgccgtcctcactgagctcttgagctgagtacttccagatgtcttctgaata

SEQ ID NO: 145279 - DNA, 76 bp, Homo sapiens
ggaggttggggtgccgtcctcactgagctcttgagctgagtacttccagatgtcttctgaataccacttgtttggg

SEQ ID NO: 145280 - DNA, 76 bp, Homo sapiens
gtcctcactgagctcttgagctgagtacttccagatgtcttctgaataccacttgtttggggaccaaggaaaaata

SEQ ID NO: 145281 - DNA, 70 bp, Homo sapiens
ctgagtacttccagatgtcttctgaataccacttgtttggggaccaaggaaaaataagaaagaaggagta

SEQ ID NO: 145282 - DNA, 67 bp, Homo sapiens
ttctgaataccacttgtttggggaccaaggaaaaataagaaagaaggagtaaaaccaatggcagaaa

SEQ ID NO: 145283 - DNA, 67 bp, Homo sapiens
ataccacttgtttggggaccaaggaaaaataagaaagaaggagtaaaaccaatggcagaaatgacca

SEQ ID NO: 145284 - DNA, 75 bp, Homo sapiens
ggaccaaggaaaaataagaaagaaggagtaaaaccaatggcagaaatgaccaagatggcagaactgcatctctga

SEQ ID NO: 145285 - DNA, 75 bp, Homo sapiens
aaaataagaaagaaggagtaaaaccaatggcagaaatgaccaagatggcagaactgcatctctgatcctaactta

SEQ ID NO: 145286 - DNA, 76 bp, Homo sapiens
aagaaggagtaaaaccaatggcagaaatgaccaagatggcagaactgcatctctgatcctaacttaagaagattta

SEQ ID NO: 145287 - DNA, 81 bp, Homo sapiens
taaaaccaatggcagaaatgaccaagatggcagaactgcatctctgatcctaacttaagaagatttaatgcactgagccat

SEQ ID NO: 145288 - DNA, 82 bp, Homo sapiens
aatggcagaaatgaccaagatggcagaactgcatctctgatcctaacttaagaagatttaatgcactgagccatttattgaa

SEQ ID NO: 145289 - DNA, 82 bp, Homo sapiens
atgaccaagatggcagaactgcatctctgatcctaacttaagaagatttaatgcactgagccatttattgaacattttgtgc

SEQ ID NO: 145290 - DNA, 81 bp, Homo sapiens
agaactgcatctctgatcctaacttaagaagatttaatgcactgagccatttattgaacattttgtgctgtgatggaggta

SEQ ID NO: 145291 - DNA, 78 bp, Homo sapiens
tctctgatcctaacttaagaagatttaatgcactgagccatttattgaacattttgtgctgtgatggaggtaggggta

SEQ ID NO: 145292 - DNA, 78 bp, Homo sapiens
taacttaagaagatttaatgcactgagccatttattgaacattttgtgctgtgatggaggtaggggtaggcagctgaa

SEQ ID NO: 145293 - DNA, 79 bp, Homo sapiens
aagatttaatgcactgagccatttattgaacattttgtgctgtgatggaggtaggggtaggcagctgaatgaaggcaaa

SEQ ID NO: 145294 - DNA, 78 bp, Homo sapiens
actgagccatttattgaacattttgtgctgtgatggaggtaggggtaggcagctgaatgaaggcaaaataaagtgaga

SEQ ID NO: 145295 - DNA, 76 bp, Homo sapiens
atttattgaacattttgtgctgtgatggaggtaggggtaggcagctgaatgaaggcaaaataaagtgagatcctcc

SEQ ID NO: 145296 - DNA, 75 bp, Homo sapiens
attttgtgctgtgatggaggtaggggtaggcagctgaatgaaggcaaaataaagtgagatcctccctcctcaaaa

SEQ ID NO: 145297 - DNA, 76 bp, Homo sapiens
tgtgatggaggtaggggtaggcagctgaatgaaggcaaaataaagtgagatcctccctcctcaaaacagtcactcc

SEQ ID NO: 145298 - DNA, 71 bp, Homo sapiens
aggtaggggtaggcagctgaatgaaggcaaaataaagtgagatcctccctcctcaaaacagtcactccccc

SEQ ID NO: 145299 - DNA, 75 bp, Homo sapiens
gctgaatgaaggcaaaataaagtgagatcctccctcctcaaaacagtcactccccctgccttctaattcaggcaa

SEQ ID NO: 145300 - DNA, 71 bp, Homo sapiens
aaggcaaaataaagtgagatcctccctcctcaaaacagtcactccccctgccttctaattcaggcaataaa

SEQ ID NO: 145301 - DNA, 72 bp, Homo sapiens
tccctcctcaaaacagtcactccccctgccttctaattcaggcaataaagaactcaatgagagtttctttct

SEQ ID NO: 145302 - DNA, 71 bp, Homo sapiens
cctcaaaacagtcactccccctgccttctaattcaggcaataaagaactcaatgagagtttctttctttct

SEQ ID NO: 145303 - DNA, 57 bp, Homo sapiens
aaaaaaggggggggggggacaacttaacattctttctaaaaataacaaacctaaaaa

SEQ ID NO: 145304 - DNA, 61 bp, Homo sapiens
ggggggggacaacttaacattctttctaaaaataacaaacctaaaaaattgctttaaaaca

SEQ ID NO: 145305 - DNA, 61 bp, Homo sapiens
gggacaacttaacattctttctaaaaataacaaacctaaaaaattgctttaaaacaatttt

SEQ ID NO: 145306 - DNA, 64 bp, Homo sapiens
cattctttctaaaaataacaaacctaaaaaattgctttaaaacaatttttagacaaattagcaa

SEQ ID NO: 145307 - DNA, 67 bp, Homo sapiens
aataacaaacctaaaaaattgctttaaaacaatttttagacaaattagcaaatatttgcattgtcta

SEQ ID NO: 145308 - DNA, 69 bp, Homo sapiens
cctaaaaaattgctttaaaacaatttttagacaaattagcaaatatttgcattgtctaccaaatgccca

SEQ ID NO: 145309 - DNA, 72 bp, Homo sapiens
gctttaaaacaatttttagacaaattagcaaatatttgcattgtctaccaaatgcccaaccatatgcttaag

SEQ ID NO: 145310 - DNA, 77 bp, Homo sapiens
aatttttagacaaattagcaaatatttgcattgtctaccaaatgcccaaccatatgcttaagtgcaagattctgtgc

SEQ ID NO: 145311 - DNA, 80 bp, Homo sapiens
ttagacaaattagcaaatatttgcattgtctaccaaatgcccaaccatatgcttaagtgcaagattctgtgccagagaaa

SEQ ID NO: 145312 - DNA, 81 bp, Homo sapiens
aaatatttgcattgtctaccaaatgcccaaccatatgcttaagtgcaagattctgtgccagagaaatcggtccttgctgca

SEQ ID NO: 145313 - DNA, 81 bp, Homo sapiens
attgtctaccaaatgcccaaccatatgcttaagtgcaagattctgtgccagagaaatcggtccttgctgcaggacagatta

SEQ ID NO: 145314 - DNA, 84 bp, Homo sapiens
accatatgcttaagtgcaagattctgtgccagagaaatcggtccttgctgcaggacagattagtctagtatagagatcagccta

SEQ ID NO: 145315 - DNA, 84 bp, Homo sapiens
taagtgcaagattctgtgccagagaaatcggtccttgctgcaggacagattagtctagtatagagatcagcctacacttatgaa

SEQ ID NO: 145316 - DNA, 81 bp, Homo sapiens
attctgtgccagagaaatcggtccttgctgcaggacagattagtctagtatagagatcagcctacacttatgaaacaatta

SEQ ID NO: 145317 - DNA, 78 bp, Homo sapiens
agaaatcggtccttgctgcaggacagattagtctagtatagagatcagcctacacttatgaaacaattagagaacaat

SEQ ID NO: 145318 - DNA, 80 bp, Homo sapiens
tccttgctgcaggacagattagtctagtatagagatcagcctacacttatgaaacaattagagaacaattgagttttctc

SEQ ID NO: 145319 - DNA, 78 bp, Homo sapiens
aggacagattagtctagtatagagatcagcctacacttatgaaacaattagagaacaattgagttttctctctctgga

SEQ ID NO: 145320 - DNA, 76 bp, Homo sapiens
attagtctagtatagagatcagcctacacttatgaaacaattagagaacaattgagttttctctctctggaacgag

SEQ ID NO: 145321 - DNA, 77 bp, Homo sapiens
tatagagatcagcctacacttatgaaacaattagagaacaattgagttttctctctctggaacgaggtgcttataaa

SEQ ID NO: 145322 - DNA, 73 bp, Homo sapiens
ctacacttatgaaacaattagagaacaattgagttttctctctctggaacgaggtgcttataaacctgtgtaa

SEQ ID NO: 145323 - DNA, 72 bp, Homo sapiens
aaacaattagagaacaattgagttttctctctctggaacgaggtgcttataaacctgtgtaattcagcccta

SEQ ID NO: 145324 - DNA, 71 bp, Homo sapiens
attagagaacaattgagttttctctctctggaacgaggtgcttataaacctgtgtaattcagccctaggtt

SEQ ID NO: 145325 - DNA, 74 bp, Homo sapiens
tctctctctggaacgaggtgcttataaacctgtgtaattcagccctaggtttcctagtagatgtttctgggaga

SEQ ID NO: 145326 - DNA, 70 bp, Homo sapiens
ttataaacctgtgtaattcagccctaggtttcctagtagatgtttctgggagaggattcctgttaactta

SEQ ID NO: 145327 - DNA, 70 bp, Homo sapiens
tgtgtaattcagccctaggtttcctagtagatgtttctgggagaggattcctgttaacttactgttttct

SEQ ID NO: 145328 - DNA, 68 bp, Homo sapiens
taggtttcctagtagatgtttctgggagaggattcctgttaacttactgttttcttgggtggaaataa

SEQ ID NO: 145329 - DNA, 70 bp, Homo sapiens
tagtagatgtttctgggagaggattcctgttaacttactgttttcttgggtggaaataagtaggctgagt

SEQ ID NO: 145330 - DNA, 70 bp, Homo sapiens
tttctgggagaggattcctgttaacttactgttttcttgggtggaaataagtaggctgagttgagattct

SEQ ID NO: 145331 - DNA, 71 bp, Homo sapiens
gattcctgttaacttactgttttcttgggtggaaataagtaggctgagttgagattcttcagtgtcttaaa

SEQ ID NO: 145332 - DNA, 69 bp, Homo sapiens
ctgttaacttactgttttcttgggtggaaataagtaggctgagttgagattcttcagtgtcttaaaacc

SEQ ID NO: 145333 - DNA, 69 bp, Homo sapiens
ctgttttcttgggtggaaataagtaggctgagttgagattcttcagtgtcttaaaaccccttatattta

SEQ ID NO: 145334 - DNA, 69 bp, Homo sapiens
gggtggaaataagtaggctgagttgagattcttcagtgtcttaaaaccccttatatttaatatgtattt

SEQ ID NO: 145335 - DNA, 73 bp, Homo sapiens
gtaggctgagttgagattcttcagtgtcttaaaaccccttatatttaatatgtattttgaacataggactatg

SEQ ID NO: 145336 - DNA, 72 bp, Homo sapiens
gagattcttcagtgtcttaaaaccccttatatttaatatgtattttgaacataggactatgttaattggctc

SEQ ID NO: 145337 - DNA, 73 bp, Homo sapiens
cttcagtgtcttaaaaccccttatatttaatatgtattttgaacataggactatgttaattggctcttgcatg

SEQ ID NO: 145338 - DNA, 73 bp, Homo sapiens
aaccccttatatttaatatgtattttgaacataggactatgttaattggctcttgcatgttttctgaggaaca

SEQ ID NO: 145339 - DNA, 75 bp, Homo sapiens
atttaatatgtattttgaacataggactatgttaattggctcttgcatgttttctgaggaacaaaatcctccata

SEQ ID NO: 145340 - DNA, 76 bp, Homo sapiens
aacataggactatgttaattggctcttgcatgttttctgaggaacaaaatcctccatacatttggtcattgaagaa

SEQ ID NO: 145341 - DNA, 71 bp, Homo sapiens
ttggctcttgcatgttttctgaggaacaaaatcctccatacatttggtcattgaagaatggggtttttttt

SEQ ID NO: 145342 - DNA, 76 bp, Homo sapiens
atcctccatacatttggtcattgaagaatggggttttttttttggcaccagtgcatctgctgtcaacaatggagta

SEQ ID NO: 145343 - DNA, 73 bp, Homo sapiens
atttggtcattgaagaatggggttttttttttggcaccagtgcatctgctgtcaacaatggagtagaagtaaa

SEQ ID NO: 145344 - DNA, 73 bp, Homo sapiens
ttgaagaatggggttttttttttggcaccagtgcatctgctgtcaacaatggagtagaagtaaacctttcatc

SEQ ID NO: 145345 - DNA, 82 bp, Homo sapiens
ttttttttggcaccagtgcatctgctgtcaacaatggagtagaagtaaacctttcatctgcagcctctgttcacagtcagca

SEQ ID NO: 145346 - DNA, 82 bp, Homo sapiens
caccagtgcatctgctgtcaacaatggagtagaagtaaacctttcatctgcagcctctgttcacagtcagcatttcctttaa

SEQ ID NO: 145347 - DNA, 80 bp, Homo sapiens
atctgctgtcaacaatggagtagaagtaaacctttcatctgcagcctctgttcacagtcagcatttcctttaatgcggtg

SEQ ID NO: 145348 - DNA, 75 bp, Homo sapiens
agtagaagtaaacctttcatctgcagcctctgttcacagtcagcatttcctttaatgcggtggttccctctggtc

SEQ ID NO: 145349 - DNA, 76 bp, Homo sapiens
taaacctttcatctgcagcctctgttcacagtcagcatttcctttaatgcggtggttccctctggtctcggcccga

SEQ ID NO: 145350 - DNA, 79 bp, Homo sapiens
atctgcagcctctgttcacagtcagcatttcctttaatgcggtggttccctctggtctcggcccgagttctcatgccag

SEQ ID NO: 145351 - DNA, 80 bp, Homo sapiens
tctgttcacagtcagcatttcctttaatgcggtggttccctctggtctcggcccgagttctcatgccaggcagcggcagc

SEQ ID NO: 145352 - DNA, 76 bp, Homo sapiens
catttcctttaatgcggtggttccctctggtctcggcccgagttctcatgccaggcagcggcagctgtggtaccaa

SEQ ID NO: 145353 - DNA, 77 bp, Homo sapiens
ctttaatgcggtggttccctctggtctcggcccgagttctcatgccaggcagcggcagctgtggtaccaactgcctg

SEQ ID NO: 145354 - DNA, 77 bp, Homo sapiens
tggttccctctggtctcggcccgagttctcatgccaggcagcggcagctgtggtaccaactgcctgggagccccgtg

SEQ ID NO: 145355 - DNA, 80 bp, Homo sapiens
tggtctcggcccgagttctcatgccaggcagcggcagctgtggtaccaactgcctgggagccccgtggcgctgttggtga

SEQ ID NO: 145356 - DNA, 80 bp, Homo sapiens
agttctcatgccaggcagcggcagctgtggtaccaactgcctgggagccccgtggcgctgttggtgagtgggaggatgga

SEQ ID NO: 145357 - DNA, 81 bp, Homo sapiens
tcatgccaggcagcggcagctgtggtaccaactgcctgggagccccgtggcgctgttggtgagtgggaggatggaactgag

SEQ ID NO: 145358 - DNA, 77 bp, Homo sapiens
gcagctgtggtaccaactgcctgggagccccgtggcgctgttggtgagtgggaggatggaactgagggggtcagaca

SEQ ID NO: 145359 - DNA, 76 bp, Homo sapiens
tgtggtaccaactgcctgggagccccgtggcgctgttggtgagtgggaggatggaactgagggggtcagacagatg

SEQ ID NO: 145360 - DNA, 76 bp, Homo sapiens
ctgggagccccgtggcgctgttggtgagtgggaggatggaactgagggggtcagacagatggagggctctcggtga

SEQ ID NO: 145361 - DNA, 75 bp, Homo sapiens
cgtggcgctgttggtgagtgggaggatggaactgagggggtcagacagatggagggctctcggtgacccctttga

SEQ ID NO: 145362 - DNA, 73 bp, Homo sapiens
ttggtgagtgggaggatggaactgagggggtcagacagatggagggctctcggtgacccctttgagggcaaat

SEQ ID NO: 145363 - DNA, 73 bp, Homo sapiens
ggaggatggaactgagggggtcagacagatggagggctctcggtgacccctttgagggcaaattaggagccaa

SEQ ID NO: 145364 - DNA, 74 bp, Homo sapiens
aactgagggggtcagacagatggagggctctcggtgacccctttgagggcaaattaggagccaagagcatggaa

SEQ ID NO: 145365 - DNA, 78 bp, Homo sapiens
tcagacagatggagggctctcggtgacccctttgagggcaaattaggagccaagagcatggaatgaaggagtcgtcaa

SEQ ID NO: 145366 - DNA, 75 bp, Homo sapiens
agatggagggctctcggtgacccctttgagggcaaattaggagccaagagcatggaatgaaggagtcgtcaatcc

SEQ ID NO: 145367 - DNA, 73 bp, Homo sapiens
ctctcggtgacccctttgagggcaaattaggagccaagagcatggaatgaaggagtcgtcaatccgggaagtg

SEQ ID NO: 145368 - DNA, 75 bp, Homo sapiens
tttgagggcaaattaggagccaagagcatggaatgaaggagtcgtcaatccgggaagtggggatcttggtgctcc

SEQ ID NO: 145369 - DNA, 74 bp, Homo sapiens
aaattaggagccaagagcatggaatgaaggagtcgtcaatccgggaagtggggatcttggtgctccctggtcag

SEQ ID NO: 145370 - DNA, 73 bp, Homo sapiens
caagagcatggaatgaaggagtcgtcaatccgggaagtggggatcttggtgctccctggtcaggttttggatt

SEQ ID NO: 145371 - DNA, 71 bp, Homo sapiens
atggaatgaaggagtcgtcaatccgggaagtggggatcttggtgctccctggtcaggttttggatttgatt

SEQ ID NO: 145372 - DNA, 70 bp, Homo sapiens
agtcgtcaatccgggaagtggggatcttggtgctccctggtcaggttttggatttgattttgctctttta

SEQ ID NO: 145373 - DNA, 70 bp, Homo sapiens
aatccgggaagtggggatcttggtgctccctggtcaggttttggatttgattttgctcttttaatgaaga

SEQ ID NO: 145374 - DNA, 77 bp, Homo sapiens
gggatcttggtgctccctggtcaggttttggatttgattttgctcttttaatgaagatctcatgttgcacagactta

SEQ ID NO: 145375 - DNA, 77 bp, Homo sapiens
tgctccctggtcaggttttggatttgattttgctcttttaatgaagatctcatgttgcacagacttagcattaattt

SEQ ID NO: 145376 - DNA, 76 bp, Homo sapiens
ctggtcaggttttggatttgattttgctcttttaatgaagatctcatgttgcacagacttagcattaattttctgt

SEQ ID NO: 145377 - DNA, 79 bp, Homo sapiens
tggatttgattttgctcttttaatgaagatctcatgttgcacagacttagcattaattttctgtttatacacttagcaa

SEQ ID NO: 145378 - DNA, 77 bp, Homo sapiens
tgctcttttaatgaagatctcatgttgcacagacttagcattaattttctgtttatacacttagcaaaatgggtatt

SEQ ID NO: 145379 - DNA, 75 bp, Homo sapiens
atgaagatctcatgttgcacagacttagcattaattttctgtttatacacttagcaaaatgggtatttttgaaag

SEQ ID NO: 145380 - DNA, 72 bp, Homo sapiens
atctcatgttgcacagacttagcattaattttctgtttatacacttagcaaaatgggtatttttgaaagttt

SEQ ID NO: 145381 - DNA, 66 bp, Homo sapiens
ttctgtttatacacttagcaaaatgggtatttttgaaagttttaaaaatatacttgaattttatat

SEQ ID NO: 145382 - DNA, 68 bp, Homo sapiens
tttaaaaatatacttgaattttatatttcaaattttaatatttcttgtgaatccaaggattattattc

SEQ ID NO: 145383 - DNA, 70 bp, Homo sapiens
tacttgaattttatatttcaaattttaatatttcttgtgaatccaaggattattattctggtgaacccaa

SEQ ID NO: 145384 - DNA, 70 bp, Homo sapiens
ttatatttcaaattttaatatttcttgtgaatccaaggattattattctggtgaacccaaggaaagtgta

SEQ ID NO: 145385 - DNA, 71 bp, Homo sapiens
aattttaatatttcttgtgaatccaaggattattattctggtgaacccaaggaaagtgtagagatgtagga

SEQ ID NO: 145386 - DNA, 72 bp, Homo sapiens
tttcttgtgaatccaaggattattattctggtgaacccaaggaaagtgtagagatgtaggaccaaaaatgtg

SEQ ID NO: 145387 - DNA, 71 bp, Homo sapiens
atccaaggattattattctggtgaacccaaggaaagtgtagagatgtaggaccaaaaatgtggaaattagc

SEQ ID NO: 145388 - DNA, 72 bp, Homo sapiens
tattattctggtgaacccaaggaaagtgtagagatgtaggaccaaaaatgtggaaattagccccagagcagg

SEQ ID NO: 145389 - DNA, 69 bp, Homo sapiens
gtgaacccaaggaaagtgtagagatgtaggaccaaaaatgtggaaattagccccagagcaggtaaactt

SEQ ID NO: 145390 - DNA, 70 bp, Homo sapiens
cccaaggaaagtgtagagatgtaggaccaaaaatgtggaaattagccccagagcaggtaaactttgaata

SEQ ID NO: 145391 - DNA, 70 bp, Homo sapiens
aaggaaagtgtagagatgtaggaccaaaaatgtggaaattagccccagagcaggtaaactttgaatatag

SEQ ID NO: 145392 - DNA, 73 bp, Homo sapiens
agtgtagagatgtaggaccaaaaatgtggaaattagccccagagcaggtaaactttgaatataggtgagaata

SEQ ID NO: 145393 - DNA, 72 bp, Homo sapiens
tgtaggaccaaaaatgtggaaattagccccagagcaggtaaactttgaatataggtgagaatattaccaata

SEQ ID NO: 145394 - DNA, 71 bp, Homo sapiens
aaatgtggaaattagccccagagcaggtaaactttgaatataggtgagaatattaccaatagcctgggtta

SEQ ID NO: 145395 - DNA, 68 bp, Homo sapiens
cccagagcaggtaaactttgaatataggtgagaatattaccaatagcctgggttatttttgggtttgg

SEQ ID NO: 145396 - DNA, 67 bp, Homo sapiens
ggtaaactttgaatataggtgagaatattaccaatagcctgggttatttttgggtttggggcagaag

SEQ ID NO: 145397 - DNA, 68 bp, Homo sapiens
aatagcctgggttatttttgggtttggggcagaaggggaagctgtctcttggtagagctgggagaagg

SEQ ID NO: 145398 - DNA, 69 bp, Homo sapiens
tatttttgggtttggggcagaaggggaagctgtctcttggtagagctgggagaagggggtgtgggagta

SEQ ID NO: 145399 - DNA, 73 bp, Homo sapiens
tttggggcagaaggggaagctgtctcttggtagagctgggagaagggggtgtgggagtagctgagtgattttc

SEQ ID NO: 145400 - DNA, 70 bp, Homo sapiens
aaggggaagctgtctcttggtagagctgggagaagggggtgtgggagtagctgagtgattttcctttatt

SEQ ID NO: 145401 - DNA, 71 bp, Homo sapiens
ttggtagagctgggagaagggggtgtgggagtagctgagtgattttcctttatttgcttaattggtcctaa

SEQ ID NO: 145402 - DNA, 71 bp, Homo sapiens
gaagggggtgtgggagtagctgagtgattttcctttatttgcttaattggtcctaaggcaagtcagaggaa

SEQ ID NO: 145403 - DNA, 71 bp, Homo sapiens
tgggagtagctgagtgattttcctttatttgcttaattggtcctaaggcaagtcagaggaaattttctctt

SEQ ID NO: 145404 - DNA, 71 bp, Homo sapiens
gtagctgagtgattttcctttatttgcttaattggtcctaaggcaagtcagaggaaattttctctttccta

SEQ ID NO: 145405 - DNA, 70 bp, Homo sapiens
attttcctttatttgcttaattggtcctaaggcaagtcagaggaaattttctctttcctagtgctctgag

SEQ ID NO: 145406 - DNA, 74 bp, Homo sapiens
tatttgcttaattggtcctaaggcaagtcagaggaaattttctctttcctagtgctctgagtgtgaggggatag

SEQ ID NO: 145407 - DNA, 71 bp, Homo sapiens
attggtcctaaggcaagtcagaggaaattttctctttcctagtgctctgagtgtgaggggatagttgggtt

SEQ ID NO: 145408 - DNA, 69 bp, Homo sapiens
aagtcagaggaaattttctctttcctagtgctctgagtgtgaggggatagttgggttttgtggtttgtt

SEQ ID NO: 145409 - DNA, 70 bp, Homo sapiens
tctctttcctagtgctctgagtgtgaggggatagttgggttttgtggtttgtttcatttctcccctaccc

SEQ ID NO: 145410 - DNA, 69 bp, Homo sapiens
tctgagtgtgaggggatagttgggttttgtggtttgtttcatttctcccctacccctttccactgcttc

SEQ ID NO: 145411 - DNA, 66 bp, Homo sapiens
aggggatagttgggttttgtggtttgtttcatttctcccctacccctttccactgcttctgtgaaa

SEQ ID NO: 145412 - DNA, 70 bp, Homo sapiens
tttgtggtttgtttcatttctcccctacccctttccactgcttctgtgaaatagtgattttacaaatgaa

SEQ ID NO: 145413 - DNA, 68 bp, Homo sapiens
atttctcccctacccctttccactgcttctgtgaaatagtgattttacaaatgaacccaaattggaaa

SEQ ID NO: 145414 - DNA, 69 bp, Homo sapiens
tacccctttccactgcttctgtgaaatagtgattttacaaatgaacccaaattggaaagtcactctttt

SEQ ID NO: 145415 - DNA, 66 bp, Homo sapiens
cttctgtgaaatagtgattttacaaatgaacccaaattggaaagtcactctttttattttttggtt

SEQ ID NO: 145416 - DNA, 68 bp, Homo sapiens
attggaaagtcactctttttattttttggtttttatgttccttcattctctagccacctaagtgtgga

SEQ ID NO: 145417 - DNA, 69 bp, Homo sapiens
tcactctttttattttttggtttttatgttccttcattctctagccacctaagtgtggattctttactc

SEQ ID NO: 145418 - DNA, 67 bp, Homo sapiens
attttttggtttttatgttccttcattctctagccacctaagtgtggattctttactccctgtcctt

SEQ ID NO: 145419 - DNA, 70 bp, Homo sapiens
ttggtttttatgttccttcattctctagccacctaagtgtggattctttactccctgtcctttcctttca

SEQ ID NO: 145420 - DNA, 71 bp, Homo sapiens
cttcattctctagccacctaagtgtggattctttactccctgtcctttcctttcacctcatgggaaatact

SEQ ID NO: 145421 - DNA, 69 bp, Homo sapiens
tagccacctaagtgtggattctttactccctgtcctttcctttcacctcatgggaaatacttggtttta

SEQ ID NO: 145422 - DNA, 69 bp, Homo sapiens
ctaagtgtggattctttactccctgtcctttcctttcacctcatgggaaatacttggttttatgttcta

SEQ ID NO: 145423 - DNA, 69 bp, Homo sapiens
tctttactccctgtcctttcctttcacctcatgggaaatacttggttttatgttctagttggtactata

SEQ ID NO: 145424 - DNA, 70 bp, Homo sapiens
ctttcacctcatgggaaatacttggttttatgttctagttggtactataaaaactcatagtcttctctgg

SEQ ID NO: 145425 - DNA, 70 bp, Homo sapiens
cctcatgggaaatacttggttttatgttctagttggtactataaaaactcatagtcttctctgggataag

SEQ ID NO: 145426 - DNA, 70 bp, Homo sapiens
acttggttttatgttctagttggtactataaaaactcatagtcttctctgggataagtctttctcagaat

SEQ ID NO: 145427 - DNA, 70 bp, Homo sapiens
aactcatagtcttctctgggataagtctttctcagaattaaagtttaattcttccaaagatcctaaggga

SEQ ID NO: 145428 - DNA, 68 bp, Homo sapiens
atagtcttctctgggataagtctttctcagaattaaagtttaattcttccaaagatcctaagggaaaa

SEQ ID NO: 145429 - DNA, 67 bp, Homo sapiens
ctgggataagtctttctcagaattaaagtttaattcttccaaagatcctaagggaaaaaattatcaa

SEQ ID NO: 145430 - DNA, 65 bp, Homo sapiens
tctcagaattaaagtttaattcttccaaagatcctaagggaaaaaattatcaaaaggtcggtttc

SEQ ID NO: 145431 - DNA, 66 bp, Homo sapiens
taattcttccaaagatcctaagggaaaaaattatcaaaaggtcggtttccgactagaggcctggac

SEQ ID NO: 145432 - DNA, 64 bp, Homo sapiens
aaagatcctaagggaaaaaattatcaaaaggtcggtttccgactagaggcctggaccacaaaaa

SEQ ID NO: 145433 - DNA, 68 bp, Homo sapiens
tttccgactagaggcctggaccacaaaaatctgcacttggtttttctccgggagtgtctgttttagtt

SEQ ID NO: 145434 - DNA, 69 bp, Homo sapiens
tagaggcctggaccacaaaaatctgcacttggtttttctccgggagtgtctgttttagttttacgtcaa

SEQ ID NO: 145435 - DNA, 68 bp, Homo sapiens
accacaaaaatctgcacttggtttttctccgggagtgtctgttttagttttacgtcaactggaagatg

SEQ ID NO: 145436 - DNA, 70 bp, Homo sapiens
aaaatctgcacttggtttttctccgggagtgtctgttttagttttacgtcaactggaagatgtctagcag

SEQ ID NO: 145437 - DNA, 74 bp, Homo sapiens
tttttctccgggagtgtctgttttagttttacgtcaactggaagatgtctagcagtgtgaagtgaccaatctga

SEQ ID NO: 145438 - DNA, 75 bp, Homo sapiens
ctccgggagtgtctgttttagttttacgtcaactggaagatgtctagcagtgtgaagtgaccaatctgaggccag

SEQ ID NO: 145439 - DNA, 76 bp, Homo sapiens
tctgttttagttttacgtcaactggaagatgtctagcagtgtgaagtgaccaatctgaggccaggcccagaactcc

SEQ ID NO: 145440 - DNA, 79 bp, Homo sapiens
ttttacgtcaactggaagatgtctagcagtgtgaagtgaccaatctgaggccaggcccagaactccgcgatctcacgtg

SEQ ID NO: 145441 - DNA, 84 bp, Homo sapiens
tgtctagcagtgtgaagtgaccaatctgaggccaggcccagaactccgcgatctcacgtggatcccgtccagctgcagagttgc

SEQ ID NO: 145442 - DNA, 82 bp, Homo sapiens
aatctgaggccaggcccagaactccgcgatctcacgtggatcccgtccagctgcagagttgccacatcagaggtggacctgc

SEQ ID NO: 145443 - DNA, 81 bp, Homo sapiens
aactccgcgatctcacgtggatcccgtccagctgcagagttgccacatcagaggtggacctgcccaattggaagattgaga

SEQ ID NO: 145444 - DNA, 80 bp, Homo sapiens
atctcacgtggatcccgtccagctgcagagttgccacatcagaggtggacctgcccaattggaagattgagatttcttta

SEQ ID NO: 145445 - DNA, 78 bp, Homo sapiens
cgtccagctgcagagttgccacatcagaggtggacctgcccaattggaagattgagatttctttatatcgttcttttc

SEQ ID NO: 145446 - DNA, 78 bp, Homo sapiens
cagagttgccacatcagaggtggacctgcccaattggaagattgagatttctttatatcgttcttttctgtctagaga

SEQ ID NO: 145447 - DNA, 75 bp, Homo sapiens
acatcagaggtggacctgcccaattggaagattgagatttctttatatcgttcttttctgtctagagataacaag

SEQ ID NO: 145448 - DNA, 73 bp, Homo sapiens
aggtggacctgcccaattggaagattgagatttctttatatcgttcttttctgtctagagataacaagtgaaa

SEQ ID NO: 145449 - DNA, 75 bp, Homo sapiens
caattggaagattgagatttctttatatcgttcttttctgtctagagataacaagtgaaagagagagaagccgtg

SEQ ID NO: 145450 - DNA, 77 bp, Homo sapiens
aagattgagatttctttatatcgttcttttctgtctagagataacaagtgaaagagagagaagccgtggcatctctg

SEQ ID NO: 145451 - DNA, 82 bp, Homo sapiens
atttctttatatcgttcttttctgtctagagataacaagtgaaagagagagaagccgtggcatctctgtgagtgctcatgca

SEQ ID NO: 145452 - DNA, 83 bp, Homo sapiens
tatcgttcttttctgtctagagataacaagtgaaagagagagaagccgtggcatctctgtgagtgctcatgcacatggacccc

SEQ ID NO: 145453 - DNA, 83 bp, Homo sapiens
ttctgtctagagataacaagtgaaagagagagaagccgtggcatctctgtgagtgctcatgcacatggaccccgaggctgggg

SEQ ID NO: 145454 - DNA, 84 bp, Homo sapiens
taacaagtgaaagagagagaagccgtggcatctctgtgagtgctcatgcacatggaccccgaggctgggggcattgagatggaa

SEQ ID NO: 145455 - DNA, 82 bp, Homo sapiens
aaagagagagaagccgtggcatctctgtgagtgctcatgcacatggaccccgaggctgggggcattgagatggaacgtggag

SEQ ID NO: 145456 - DNA, 76 bp, Homo sapiens
ctcatgcacatggaccccgaggctgggggcattgagatggaacgtggaggtggggaggtgtgcctagacacaggtt

SEQ ID NO: 145457 - DNA, 74 bp, Homo sapiens
atggaccccgaggctgggggcattgagatggaacgtggaggtggggaggtgtgcctagacacaggtttcagata

SEQ ID NO: 145458 - DNA, 73 bp, Homo sapiens
aggctgggggcattgagatggaacgtggaggtggggaggtgtgcctagacacaggtttcagataaaggattta

SEQ ID NO: 145459 - DNA, 76 bp, Homo sapiens
attgagatggaacgtggaggtggggaggtgtgcctagacacaggtttcagataaaggatttatgtgctagataggc

SEQ ID NO: 145460 - DNA, 72 bp, Homo sapiens
aacgtggaggtggggaggtgtgcctagacacaggtttcagataaaggatttatgtgctagataggcttttta

SEQ ID NO: 145461 - DNA, 72 bp, Homo sapiens
aggtggggaggtgtgcctagacacaggtttcagataaaggatttatgtgctagataggctttttattgaaaa

SEQ ID NO: 145462 - DNA, 74 bp, Homo sapiens
tgcctagacacaggtttcagataaaggatttatgtgctagataggctttttattgaaaaggagaagtggaataa

SEQ ID NO: 145463 - DNA, 74 bp, Homo sapiens
acaggtttcagataaaggatttatgtgctagataggctttttattgaaaaggagaagtggaataagcagagatg

SEQ ID NO: 145464 - DNA, 74 bp, Homo sapiens
gataaaggatttatgtgctagataggctttttattgaaaaggagaagtggaataagcagagatgggtataccaa

SEQ ID NO: 145465 - DNA, 76 bp, Homo sapiens
ggatttatgtgctagataggctttttattgaaaaggagaagtggaataagcagagatgggtataccaaatcatata

SEQ ID NO: 145466 - DNA, 75 bp, Homo sapiens
gctagataggctttttattgaaaaggagaagtggaataagcagagatgggtataccaaatcatatactgaattta

SEQ ID NO: 145467 - DNA, 74 bp, Homo sapiens
ttattgaaaaggagaagtggaataagcagagatgggtataccaaatcatatactgaatttagaatgtttgaatt

SEQ ID NO: 145468 - DNA, 73 bp, Homo sapiens
aaggagaagtggaataagcagagatgggtataccaaatcatatactgaatttagaatgtttgaattttaaagc

SEQ ID NO: 145469 - DNA, 75 bp, Homo sapiens
ggaataagcagagatgggtataccaaatcatatactgaatttagaatgtttgaattttaaagctaaagacagctc

SEQ ID NO: 145470 - DNA, 74 bp, Homo sapiens
cagagatgggtataccaaatcatatactgaatttagaatgtttgaattttaaagctaaagacagctctttcatt

SEQ ID NO: 145471 - DNA, 70 bp, Homo sapiens
tactgaatttagaatgtttgaattttaaagctaaagacagctctttcattttgcaaataaggtcttaaag

SEQ ID NO: 145472 - DNA, 67 bp, Homo sapiens
acagctctttcattttgcaaataaggtcttaaagggtaaagtccttcattttgcaaaaagttgtagt

SEQ ID NO: 145473 - DNA, 71 bp, Homo sapiens
ttgcaaataaggtcttaaagggtaaagtccttcattttgcaaaaagttgtagttaatatcagagccagagc

SEQ ID NO: 145474 - DNA, 70 bp, Homo sapiens
aaggtcttaaagggtaaagtccttcattttgcaaaaagttgtagttaatatcagagccagagctagaaca

SEQ ID NO: 145475 - DNA, 72 bp, Homo sapiens
ggtaaagtccttcattttgcaaaaagttgtagttaatatcagagccagagctagaacacccagttcttttga

SEQ ID NO: 145476 - DNA, 74 bp, Homo sapiens
ttcattttgcaaaaagttgtagttaatatcagagccagagctagaacacccagttcttttgacttgctgtttgg

SEQ ID NO: 145477 - DNA, 75 bp, Homo sapiens
aaaaagttgtagttaatatcagagccagagctagaacacccagttcttttgacttgctgtttggtggcagcattg

SEQ ID NO: 145478 - DNA, 79 bp, Homo sapiens
ttgtagttaatatcagagccagagctagaacacccagttcttttgacttgctgtttggtggcagcattggtggcagtgg

SEQ ID NO: 145479 - DNA, 79 bp, Homo sapiens
gagccagagctagaacacccagttcttttgacttgctgtttggtggcagcattggtggcagtggtgagatgtttgtgtt

SEQ ID NO: 145480 - DNA, 76 bp, Homo sapiens
agagctagaacacccagttcttttgacttgctgtttggtggcagcattggtggcagtggtgagatgtttgtgtttt

SEQ ID NO: 145481 - DNA, 76 bp, Homo sapiens
agttcttttgacttgctgtttggtggcagcattggtggcagtggtgagatgtttgtgtttttgaccagaagagttg

SEQ ID NO: 145482 - DNA, 76 bp, Homo sapiens
ttttgacttgctgtttggtggcagcattggtggcagtggtgagatgtttgtgtttttgaccagaagagttgtaatt

SEQ ID NO: 145483 - DNA, 77 bp, Homo sapiens
ctgtttggtggcagcattggtggcagtggtgagatgtttgtgtttttgaccagaagagttgtaatttgtcacccaga

SEQ ID NO: 145484 - DNA, 73 bp, Homo sapiens
attggtggcagtggtgagatgtttgtgtttttgaccagaagagttgtaatttgtcacccagaccgaacctaca

SEQ ID NO: 145485 - DNA, 75 bp, Homo sapiens
agtggtgagatgtttgtgtttttgaccagaagagttgtaatttgtcacccagaccgaacctacagcagagccatg

SEQ ID NO: 145486 - DNA, 74 bp, Homo sapiens
gtttgtgtttttgaccagaagagttgtaatttgtcacccagaccgaacctacagcagagccatggaggatacag

SEQ ID NO: 145487 - DNA, 76 bp, Homo sapiens
tttgaccagaagagttgtaatttgtcacccagaccgaacctacagcagagccatggaggatacagtgagtttcatt

SEQ ID NO: 145488 - DNA, 76 bp, Homo sapiens
agaagagttgtaatttgtcacccagaccgaacctacagcagagccatggaggatacagtgagtttcatttcctgtg

SEQ ID NO: 145489 - DNA, 76 bp, Homo sapiens
gtaatttgtcacccagaccgaacctacagcagagccatggaggatacagtgagtttcatttcctgtgtgtttcttg

SEQ ID NO: 145490 - DNA, 76 bp, Homo sapiens
agaccgaacctacagcagagccatggaggatacagtgagtttcatttcctgtgtgtttcttggcctcacttttatc

SEQ ID NO: 145491 - DNA, 78 bp, Homo sapiens
aacctacagcagagccatggaggatacagtgagtttcatttcctgtgtgtttcttggcctcacttttatctttcatca

SEQ ID NO: 145492 - DNA, 74 bp, Homo sapiens
ccatggaggatacagtgagtttcatttcctgtgtgtttcttggcctcacttttatctttcatcattcctctttt

SEQ ID NO: 145493 - DNA, 72 bp, Homo sapiens
aggatacagtgagtttcatttcctgtgtgtttcttggcctcacttttatctttcatcattcctctttttctt

SEQ ID NO: 145494 - DNA, 80 bp, Homo sapiens
actgtgcccagcccaacaaactgatattaaccctccactgtgttccatgcactgtagtaggttcttgatgatacagctga

SEQ ID NO: 145495 - DNA, 80 bp, Homo sapiens
gcccaacaaactgatattaaccctccactgtgttccatgcactgtagtaggttcttgatgatacagctgagatcaaggta

SEQ ID NO: 145496 - DNA, 81 bp, Homo sapiens
acaaactgatattaaccctccactgtgttccatgcactgtagtaggttcttgatgatacagctgagatcaaggtagacaga

SEQ ID NO: 145497 - DNA, 83 bp, Homo sapiens
taaccctccactgtgttccatgcactgtagtaggttcttgatgatacagctgagatcaaggtagacagatccctggtctcata

SEQ ID NO: 145498 - DNA, 85 bp, Homo sapiens
tgttccatgcactgtagtaggttcttgatgatacagctgagatcaaggtagacagatccctggtctcatagaccatctattctaa

SEQ ID NO: 145499 - DNA, 83 bp, Homo sapiens
atgcactgtagtaggttcttgatgatacagctgagatcaaggtagacagatccctggtctcatagaccatctattctaatggg

SEQ ID NO: 145500 - DNA, 83 bp, Homo sapiens
gttcttgatgatacagctgagatcaaggtagacagatccctggtctcatagaccatctattctaatggggggcattgataata

SEQ ID NO: 145501 - DNA, 81 bp, Homo sapiens
atacagctgagatcaaggtagacagatccctggtctcatagaccatctattctaatggggggcattgataatatagttata

SEQ ID NO: 145502 - DNA, 78 bp, Homo sapiens
agatcaaggtagacagatccctggtctcatagaccatctattctaatggggggcattgataatatagttataatgaaa

SEQ ID NO: 145503 - DNA, 78 bp, Homo sapiens
aggtagacagatccctggtctcatagaccatctattctaatggggggcattgataatatagttataatgaaatcatag

SEQ ID NO: 145504 - DNA, 78 bp, Homo sapiens
atccctggtctcatagaccatctattctaatggggggcattgataatatagttataatgaaatcataggcgttgataa

SEQ ID NO: 145505 - DNA, 81 bp, Homo sapiens
tcatagaccatctattctaatggggggcattgataatatagttataatgaaatcataggcgttgataagagtgccgcaaga

SEQ ID NO: 145506 - DNA, 79 bp, Homo sapiens
tagaccatctattctaatggggggcattgataatatagttataatgaaatcataggcgttgataagagtgccgcaagaa

SEQ ID NO: 145507 - DNA, 77 bp, Homo sapiens
tctattctaatggggggcattgataatatagttataatgaaatcataggcgttgataagagtgccgcaagaagtaaa

SEQ ID NO: 145508 - DNA, 77 bp, Homo sapiens
tattctaatggggggcattgataatatagttataatgaaatcataggcgttgataagagtgccgcaagaagtaaaga

SEQ ID NO: 145509 - DNA, 76 bp, Homo sapiens
tctaatggggggcattgataatatagttataatgaaatcataggcgttgataagagtgccgcaagaagtaaagagg

SEQ ID NO: 145510 - DNA, 80 bp, Homo sapiens
gggcattgataatatagttataatgaaatcataggcgttgataagagtgccgcaagaagtaaagagggtgatgaggatga

SEQ ID NO: 145511 - DNA, 81 bp, Homo sapiens
ataatatagttataatgaaatcataggcgttgataagagtgccgcaagaagtaaagagggtgatgaggatgagatgaatca

SEQ ID NO: 145512 - DNA, 81 bp, Homo sapiens
atatagttataatgaaatcataggcgttgataagagtgccgcaagaagtaaagagggtgatgaggatgagatgaatcagag

SEQ ID NO: 145513 - DNA, 80 bp, Homo sapiens
aaatcataggcgttgataagagtgccgcaagaagtaaagagggtgatgaggatgagatgaatcagaggaggctgacttaa

SEQ ID NO: 145514 - DNA, 79 bp, Homo sapiens
taggcgttgataagagtgccgcaagaagtaaagagggtgatgaggatgagatgaatcagaggaggctgacttaaaaatg

SEQ ID NO: 145515 - DNA, 81 bp, Homo sapiens
taagagtgccgcaagaagtaaagagggtgatgaggatgagatgaatcagaggaggctgacttaaaaatggtggtcagcaca

SEQ ID NO: 145516 - DNA, 77 bp, Homo sapiens
aagaagtaaagagggtgatgaggatgagatgaatcagaggaggctgacttaaaaatggtggtcagcacaggaccctc

SEQ ID NO: 145517 - DNA, 80 bp, Homo sapiens
aggatgagatgaatcagaggaggctgacttaaaaatggtggtcagcacaggaccctctgaggaggcacctttcacagaga

SEQ ID NO: 145518 - DNA, 79 bp, Homo sapiens
atgaatcagaggaggctgacttaaaaatggtggtcagcacaggaccctctgaggaggcacctttcacagagacacctca

SEQ ID NO: 145519 - DNA, 79 bp, Homo sapiens
ctgacttaaaaatggtggtcagcacaggaccctctgaggaggcacctttcacagagacacctcacatggaggatgaaca

SEQ ID NO: 145520 - DNA, 81 bp, Homo sapiens
ttaaaaatggtggtcagcacaggaccctctgaggaggcacctttcacagagacacctcacatggaggatgaacatgcgtca

SEQ ID NO: 145521 - DNA, 86 bp, Homo sapiens
cctctgaggaggcacctttcacagagacacctcacatggaggatgaacatgcgtcagtcatgcagagctcagagacgtatttcatt

SEQ ID NO: 145522 - DNA, 87 bp, Homo sapiens
aggaggcacctttcacagagacacctcacatggaggatgaacatgcgtcagtcatgcagagctcagagacgtatttcatttcaggca

SEQ ID NO: 145523 - DNA, 87 bp, Homo sapiens
tttcacagagacacctcacatggaggatgaacatgcgtcagtcatgcagagctcagagacgtatttcatttcaggcagaggaaacaa

SEQ ID NO: 145524 - DNA, 84 bp, Homo sapiens
acacctcacatggaggatgaacatgcgtcagtcatgcagagctcagagacgtatttcatttcaggcagaggaaacaagtgtaaa

SEQ ID NO: 145525 - DNA, 82 bp, Homo sapiens
ggatgaacatgcgtcagtcatgcagagctcagagacgtatttcatttcaggcagaggaaacaagtgtaaaggcctgaattta

SEQ ID NO: 145526 - DNA, 79 bp, Homo sapiens
atgcgtcagtcatgcagagctcagagacgtatttcatttcaggcagaggaaacaagtgtaaaggcctgaatttaggaaa

SEQ ID NO: 145527 - DNA, 77 bp, Homo sapiens
agtcatgcagagctcagagacgtatttcatttcaggcagaggaaacaagtgtaaaggcctgaatttaggaaaaggca

SEQ ID NO: 145528 - DNA, 71 bp, Homo sapiens
agagacgtatttcatttcaggcagaggaaacaagtgtaaaggcctgaatttaggaaaaggcatggccttgt

SEQ ID NO: 145529 - DNA, 72 bp, Homo sapiens
tatttcatttcaggcagaggaaacaagtgtaaaggcctgaatttaggaaaaggcatggccttgttaatccca

SEQ ID NO: 145530 - DNA, 68 bp, Homo sapiens
gaccctgtctcaaccgctccctcctccccccacaccaccacccaaaataaacagaaatgaggggagta

SEQ ID NO: 145531 - DNA, 70 bp, Homo sapiens
tctcaaccgctccctcctccccccacaccaccacccaaaataaacagaaatgaggggagtatggctagaa

SEQ ID NO: 145532 - DNA, 71 bp, Homo sapiens
ctcctccccccacaccaccacccaaaataaacagaaatgaggggagtatggctagaacactgagagtgagg

SEQ ID NO: 145533 - DNA, 76 bp, Homo sapiens
cacaccaccacccaaaataaacagaaatgaggggagtatggctagaacactgagagtgaggggaggatgtgagatg

SEQ ID NO: 145534 - DNA, 74 bp, Homo sapiens
accacccaaaataaacagaaatgaggggagtatggctagaacactgagagtgaggggaggatgtgagatggaac

SEQ ID NO: 145535 - DNA, 79 bp, Homo sapiens
aataaacagaaatgaggggagtatggctagaacactgagagtgaggggaggatgtgagatggaactggcgacataggca

SEQ ID NO: 145536 - DNA, 79 bp, Homo sapiens
aatgaggggagtatggctagaacactgagagtgaggggaggatgtgagatggaactggcgacataggcaggagtaagac

SEQ ID NO: 145537 - DNA, 81 bp, Homo sapiens
tatggctagaacactgagagtgaggggaggatgtgagatggaactggcgacataggcaggagtaagaccatggaggctttg

SEQ ID NO: 145538 - DNA, 79 bp, Homo sapiens
tgagagtgaggggaggatgtgagatggaactggcgacataggcaggagtaagaccatggaggctttgttggccgtgaaa

SEQ ID NO: 145539 - DNA, 77 bp, Homo sapiens
gggaggatgtgagatggaactggcgacataggcaggagtaagaccatggaggctttgttggccgtgaaaggcatttg

SEQ ID NO: 145540 - DNA, 76 bp, Homo sapiens
tgagatggaactggcgacataggcaggagtaagaccatggaggctttgttggccgtgaaaggcatttgggtattat

SEQ ID NO: 145541 - DNA, 73 bp, Homo sapiens
acataggcaggagtaagaccatggaggctttgttggccgtgaaaggcatttgggtattatttgtgattgaaac

SEQ ID NO: 145542 - DNA, 72 bp, Homo sapiens
taagaccatggaggctttgttggccgtgaaaggcatttgggtattatttgtgattgaaaccattggataatt

SEQ ID NO: 145543 - DNA, 74 bp, Homo sapiens
gccgtgaaaggcatttgggtattatttgtgattgaaaccattggataattttgagcaggggagggacatatcta

SEQ ID NO: 145544 - DNA, 71 bp, Homo sapiens
aggcatttgggtattatttgtgattgaaaccattggataattttgagcaggggagggacatatctactttt

SEQ ID NO: 145545 - DNA, 69 bp, Homo sapiens
tgggtattatttgtgattgaaaccattggataattttgagcaggggagggacatatctacttttttttt

SEQ ID NO: 145546 - DNA, 69 bp, Homo sapiens
ttctttttaaaaaactgtaactctggcttctgggtgggaaatggatgagaggggcaaaggtggaagcag

SEQ ID NO: 145547 - DNA, 70 bp, Homo sapiens
aaaaactgtaactctggcttctgggtgggaaatggatgagaggggcaaaggtggaagcagggagaccagt

SEQ ID NO: 145548 - DNA, 71 bp, Homo sapiens
aaactgtaactctggcttctgggtgggaaatggatgagaggggcaaaggtggaagcagggagaccagttgg

SEQ ID NO: 145549 - DNA, 75 bp, Homo sapiens
tctggcttctgggtgggaaatggatgagaggggcaaaggtggaagcagggagaccagttgggagataggaaatga

SEQ ID NO: 145550 - DNA, 73 bp, Homo sapiens
cttctgggtgggaaatggatgagaggggcaaaggtggaagcagggagaccagttgggagataggaaatgatag

SEQ ID NO: 145551 - DNA, 74 bp, Homo sapiens
ttctgggtgggaaatggatgagaggggcaaaggtggaagcagggagaccagttgggagataggaaatgatagtg

SEQ ID NO: 145552 - DNA, 74 bp, Homo sapiens
ggtgggaaatggatgagaggggcaaaggtggaagcagggagaccagttgggagataggaaatgatagtggcttg

SEQ ID NO: 145553 - DNA, 75 bp, Homo sapiens
gggcaaaggtggaagcagggagaccagttgggagataggaaatgatagtggcttggggtagtagccatgtatgtg

SEQ ID NO: 145554 - DNA, 75 bp, Homo sapiens
aaaggtggaagcagggagaccagttgggagataggaaatgatagtggcttggggtagtagccatgtatgtggata

SEQ ID NO: 145555 - DNA, 79 bp, Homo sapiens
tggaagcagggagaccagttgggagataggaaatgatagtggcttggggtagtagccatgtatgtggatagtagccatg

SEQ ID NO: 145556 - DNA, 77 bp, Homo sapiens
cagggagaccagttgggagataggaaatgatagtggcttggggtagtagccatgtatgtggatagtagccatgtacg

SEQ ID NO: 145557 - DNA, 77 bp, Homo sapiens
ataggaaatgatagtggcttggggtagtagccatgtatgtggatagtagccatgtacgtggtatgaagtggacaagt

SEQ ID NO: 145558 - DNA, 78 bp, Homo sapiens
atagtggcttggggtagtagccatgtatgtggatagtagccatgtacgtggtatgaagtggacaagttctggatctgt

SEQ ID NO: 145559 - DNA, 79 bp, Homo sapiens
atgtacgtggtatgaagtggacaagttctggatctgtttggcagggaactgatagggctctgtgattgacaggagatag

SEQ ID NO: 145560 - DNA, 80 bp, Homo sapiens
agtggacaagttctggatctgtttggcagggaactgatagggctctgtgattgacaggagataggagtggcctgaggtga

SEQ ID NO: 145561 - DNA, 80 bp, Homo sapiens
ttctggatctgtttggcagggaactgatagggctctgtgattgacaggagataggagtggcctgaggtgaggggaggcga

SEQ ID NO: 145562 - DNA, 80 bp, Homo sapiens
ttggcagggaactgatagggctctgtgattgacaggagataggagtggcctgaggtgaggggaggcgaggcatcaaacaa

SEQ ID NO: 145563 - DNA, 76 bp, Homo sapiens
tgtgattgacaggagataggagtggcctgaggtgaggggaggcgaggcatcaaacaaggctggtagactttttatt

SEQ ID NO: 145564 - DNA, 75 bp, Homo sapiens
ttgacaggagataggagtggcctgaggtgaggggaggcgaggcatcaaacaaggctggtagactttttatttgaa

SEQ ID NO: 145565 - DNA, 72 bp, Homo sapiens
ataggagtggcctgaggtgaggggaggcgaggcatcaaacaaggctggtagactttttatttgaaaggcaag

SEQ ID NO: 145566 - DNA, 73 bp, Homo sapiens
aggtgaggggaggcgaggcatcaaacaaggctggtagactttttatttgaaaggcaaggatggtgggatgata

SEQ ID NO: 145567 - DNA, 74 bp, Homo sapiens
aggcgaggcatcaaacaaggctggtagactttttatttgaaaggcaaggatggtgggatgatactagctaccga

SEQ ID NO: 145568 - DNA, 72 bp, Homo sapiens
tcaaacaaggctggtagactttttatttgaaaggcaaggatggtgggatgatactagctaccgagagggaaa

SEQ ID NO: 145569 - DNA, 72 bp, Homo sapiens
tggtagactttttatttgaaaggcaaggatggtgggatgatactagctaccgagagggaaatgacctggaaa

SEQ ID NO: 145570 - DNA, 71 bp, Homo sapiens
aaaggcaaggatggtgggatgatactagctaccgagagggaaatgacctggaaaactaagaactctagttg

SEQ ID NO: 145571 - DNA, 73 bp, Homo sapiens
atggtgggatgatactagctaccgagagggaaatgacctggaaaactaagaactctagttgggtcatgtatta

SEQ ID NO: 145572 - DNA, 71 bp, Homo sapiens
taccgagagggaaatgacctggaaaactaagaactctagttgggtcatgtattaagatcatgtgttcggtt

SEQ ID NO: 145573 - DNA, 76 bp, Homo sapiens
aatgacctggaaaactaagaactctagttgggtcatgtattaagatcatgtgttcggtttgagatgctgtaatgta

SEQ ID NO: 145574 - DNA, 76 bp, Homo sapiens
aaaactaagaactctagttgggtcatgtattaagatcatgtgttcggtttgagatgctgtaatgtatccaggtaga

SEQ ID NO: 145575 - DNA, 79 bp, Homo sapiens
aagaactctagttgggtcatgtattaagatcatgtgttcggtttgagatgctgtaatgtatccaggtagagatgacaag

SEQ ID NO: 145576 - DNA, 81 bp, Homo sapiens
tttgagatgctgtaatgtatccaggtagagatgacaagtggcagtcataaacaggagtctaactctgggaaaatgtcagaa

SEQ ID NO: 145577 - DNA, 78 bp, Homo sapiens
taatgtatccaggtagagatgacaagtggcagtcataaacaggagtctaactctgggaaaatgtcagaactgaaaata

SEQ ID NO: 145578 - DNA, 74 bp, Homo sapiens
aggtagagatgacaagtggcagtcataaacaggagtctaactctgggaaaatgtcagaactgaaaataatttgg

SEQ ID NO: 145579 - DNA, 72 bp, Homo sapiens
acaagtggcagtcataaacaggagtctaactctgggaaaatgtcagaactgaaaataatttgggatttgtgt

SEQ ID NO: 145580 - DNA, 71 bp, Homo sapiens
ggcagtcataaacaggagtctaactctgggaaaatgtcagaactgaaaataatttgggatttgtgtttatt

SEQ ID NO: 145581 - DNA, 69 bp, Homo sapiens
acaggagtctaactctgggaaaatgtcagaactgaaaataatttgggatttgtgtttatttagtaggta

SEQ ID NO: 145582 - DNA, 66 bp, Homo sapiens
ctctgggaaaatgtcagaactgaaaataatttgggatttgtgtttatttagtaggtatttaaaacc

SEQ ID NO: 145583 - DNA, 67 bp, Homo sapiens
gtcagaactgaaaataatttgggatttgtgtttatttagtaggtatttaaaaccttgggaccgagca

SEQ ID NO: 145584 - DNA, 66 bp, Homo sapiens
gaaaataatttgggatttgtgtttatttagtaggtatttaaaaccttgggaccgagcatgtgtacc

SEQ ID NO: 145585 - DNA, 68 bp, Homo sapiens
gtgtttatttagtaggtatttaaaaccttgggaccgagcatgtgtacctaagaatccttatatggtct

SEQ ID NO: 145586 - DNA, 69 bp, Homo sapiens
ttagtaggtatttaaaaccttgggaccgagcatgtgtacctaagaatccttatatggtcttaattcctc

SEQ ID NO: 145587 - DNA, 72 bp, Homo sapiens
tttaaaaccttgggaccgagcatgtgtacctaagaatccttatatggtcttaattcctcctccagatcagtc

SEQ ID NO: 145588 - DNA, 77 bp, Homo sapiens
accgagcatgtgtacctaagaatccttatatggtcttaattcctcctccagatcagtctggctttgagtcctgattg

SEQ ID NO: 145589 - DNA, 78 bp, Homo sapiens
tgtgtacctaagaatccttatatggtcttaattcctcctccagatcagtctggctttgagtcctgattgtgactgatt

SEQ ID NO: 145590 - DNA, 81 bp, Homo sapiens
taagaatccttatatggtcttaattcctcctccagatcagtctggctttgagtcctgattgtgactgatttctgcaaagca

SEQ ID NO: 145591 - DNA, 81 bp, Homo sapiens
tatatggtcttaattcctcctccagatcagtctggctttgagtcctgattgtgactgatttctgcaaagcaattgctcttt

SEQ ID NO: 145592 - DNA, 81 bp, Homo sapiens
taattcctcctccagatcagtctggctttgagtcctgattgtgactgatttctgcaaagcaattgctcttttccttgtggc

SEQ ID NO: 145593 - DNA, 80 bp, Homo sapiens
ctttgagtcctgattgtgactgatttctgcaaagcaattgctcttttccttgtggcctcttgtcacatcatgttaggaac

SEQ ID NO: 145594 - DNA, 78 bp, Homo sapiens
ctgattgtgactgatttctgcaaagcaattgctcttttccttgtggcctcttgtcacatcatgttaggaacgttttgt

SEQ ID NO: 145595 - DNA, 79 bp, Homo sapiens
ctgatttctgcaaagcaattgctcttttccttgtggcctcttgtcacatcatgttaggaacgttttgttgccagatgct

SEQ ID NO: 145596 - DNA, 77 bp, Homo sapiens
aaagcaattgctcttttccttgtggcctcttgtcacatcatgttaggaacgttttgttgccagatgcttgcatttaa

SEQ ID NO: 145597 - DNA, 76 bp, Homo sapiens
aattgctcttttccttgtggcctcttgtcacatcatgttaggaacgttttgttgccagatgcttgcatttaatttc

SEQ ID NO: 145598 - DNA, 77 bp, Homo sapiens
ttgtggcctcttgtcacatcatgttaggaacgttttgttgccagatgcttgcatttaatttccaagacccaagtgta

SEQ ID NO: 145599 - DNA, 75 bp, Homo sapiens
atcatgttaggaacgttttgttgccagatgcttgcatttaatttccaagacccaagtgtacattcattgttggac

SEQ ID NO: 145600 - DNA, 73 bp, Homo sapiens
aacgttttgttgccagatgcttgcatttaatttccaagacccaagtgtacattcattgttggaccactttgat

SEQ ID NO: 145601 - DNA, 78 bp, Homo sapiens
cagatgcttgcatttaatttccaagacccaagtgtacattcattgttggaccactttgattcattgcagctcttaaat

SEQ ID NO: 145602 - DNA, 75 bp, Homo sapiens
atttccaagacccaagtgtacattcattgttggaccactttgattcattgcagctcttaaattgagcctcctatt

SEQ ID NO: 145603 - DNA, 75 bp, Homo sapiens
aagtgtacattcattgttggaccactttgattcattgcagctcttaaattgagcctcctattttcaataaactac

SEQ ID NO: 145604 - DNA, 77 bp, Homo sapiens
ccactttgattcattgcagctcttaaattgagcctcctattttcaataaactaccagcctaacaactgcatgaatta

SEQ ID NO: 145605 - DNA, 77 bp, Homo sapiens
ttgattcattgcagctcttaaattgagcctcctattttcaataaactaccagcctaacaactgcatgaattaaccca

SEQ ID NO: 145606 - DNA, 72 bp, Homo sapiens
tcttaaattgagcctcctattttcaataaactaccagcctaacaactgcatgaattaacccacagtggaaaa

SEQ ID NO: 145607 - DNA, 72 bp, Homo sapiens
aattgagcctcctattttcaataaactaccagcctaacaactgcatgaattaacccacagtggaaaactgtg

SEQ ID NO: 145608 - DNA, 79 bp, Homo sapiens
taaactaccagcctaacaactgcatgaattaacccacagtggaaaactgtgtgatagtgattcactttgcattcacata

SEQ ID NO: 145609 - DNA, 76 bp, Homo sapiens
atgaattaacccacagtggaaaactgtgtgatagtgattcactttgcattcacatatacaaacattctttcctact

SEQ ID NO: 145610 - DNA, 77 bp, Homo sapiens
ccacagtggaaaactgtgtgatagtgattcactttgcattcacatatacaaacattctttcctacttccatatttaa

SEQ ID NO: 145611 - DNA, 75 bp, Homo sapiens
ggaaaactgtgtgatagtgattcactttgcattcacatatacaaacattctttcctacttccatatttaatttaa

SEQ ID NO: 145612 - DNA, 76 bp, Homo sapiens
tgtgatagtgattcactttgcattcacatatacaaacattctttcctacttccatatttaatttaaacctcaagaa

SEQ ID NO: 145613 - DNA, 72 bp, Homo sapiens
tcactttgcattcacatatacaaacattctttcctacttccatatttaatttaaacctcaagaagagggact

SEQ ID NO: 145614 - DNA, 70 bp, Homo sapiens
cattcacatatacaaacattctttcctacttccatatttaatttaaacctcaagaagagggacttcccta

SEQ ID NO: 145615 - DNA, 71 bp, Homo sapiens
caaacattctttcctacttccatatttaatttaaacctcaagaagagggacttccctattatgagatgatc

SEQ ID NO: 145616 - DNA, 68 bp, Homo sapiens
atttaatttaaacctcaagaagagggacttccctattatgagatgatctaaaccttcaggcggtttac

SEQ ID NO: 145617 - DNA, 71 bp, Homo sapiens
tttaaacctcaagaagagggacttccctattatgagatgatctaaaccttcaggcggtttacttctggata

SEQ ID NO: 145618 - DNA, 76 bp, Homo sapiens
aagaagagggacttccctattatgagatgatctaaaccttcaggcggtttacttctggatatgccgatggtgcaca

SEQ ID NO: 145619 - DNA, 80 bp, Homo sapiens
acttccctattatgagatgatctaaaccttcaggcggtttacttctggatatgccgatggtgcacatcctgctcctgcac

SEQ ID NO: 145620 - DNA, 82 bp, Homo sapiens
ttatgagatgatctaaaccttcaggcggtttacttctggatatgccgatggtgcacatcctgctcctgcaccactcaaaaca

SEQ ID NO: 145621 - DNA, 78 bp, Homo sapiens
atctaaaccttcaggcggtttacttctggatatgccgatggtgcacatcctgctcctgcaccactcaaaacacattta

SEQ ID NO: 145622 - DNA, 81 bp, Homo sapiens
cggtttacttctggatatgccgatggtgcacatcctgctcctgcaccactcaaaacacatttaagcagcttactctcacaa

SEQ ID NO: 145623 - DNA, 86 bp, Homo sapiens
ttctggatatgccgatggtgcacatcctgctcctgcaccactcaaaacacatttaagcagcttactctcacaaacacatcatgtat

SEQ ID NO: 145624 - DNA, 75 bp, Homo sapiens
caaaacacatttaagcagcttactctcacaaacacatcatgtattcagcaattttaaccaaaatatcttgaaccc

SEQ ID NO: 145625 - DNA, 75 bp, Homo sapiens
atttaagcagcttactctcacaaacacatcatgtattcagcaattttaaccaaaatatcttgaacccctgttgtg

SEQ ID NO: 145626 - DNA, 76 bp, Homo sapiens
agcttactctcacaaacacatcatgtattcagcaattttaaccaaaatatcttgaacccctgttgtgtgccaggcc

SEQ ID NO: 145627 - DNA, 75 bp, Homo sapiens
acaaacacatcatgtattcagcaattttaaccaaaatatcttgaacccctgttgtgtgccaggcctggtgctggg

SEQ ID NO: 145628 - DNA, 75 bp, Homo sapiens
tgtattcagcaattttaaccaaaatatcttgaacccctgttgtgtgccaggcctggtgctggggatgagaggtta

SEQ ID NO: 145629 - DNA, 70 bp, Homo sapiens
aattttaaccaaaatatcttgaacccctgttgtgtgccaggcctggtgctggggatgagaggttaaaatg

SEQ ID NO: 145630 - DNA, 71 bp, Homo sapiens
aaaatatcttgaacccctgttgtgtgccaggcctggtgctggggatgagaggttaaaatggtgggcaaaac

SEQ ID NO: 145631 - DNA, 73 bp, Homo sapiens
tcttgaacccctgttgtgtgccaggcctggtgctggggatgagaggttaaaatggtgggcaaaaccagatggt

SEQ ID NO: 145632 - DNA, 75 bp, Homo sapiens
ttgtgtgccaggcctggtgctggggatgagaggttaaaatggtgggcaaaaccagatggttccagtcctcttgga

SEQ ID NO: 145633 - DNA, 72 bp, Homo sapiens
cctggtgctggggatgagaggttaaaatggtgggcaaaaccagatggttccagtcctcttggatcttaactg

SEQ ID NO: 145634 - DNA, 72 bp, Homo sapiens
gggatgagaggttaaaatggtgggcaaaaccagatggttccagtcctcttggatcttaactgtcctattaga

SEQ ID NO: 145635 - DNA, 70 bp, Homo sapiens
aggttaaaatggtgggcaaaaccagatggttccagtcctcttggatcttaactgtcctattagaaactga

SEQ ID NO: 145636 - DNA, 75 bp, Homo sapiens
tgggcaaaaccagatggttccagtcctcttggatcttaactgtcctattagaaactgacattagtcaagtaatca

SEQ ID NO: 145637 - DNA, 78 bp, Homo sapiens
ttccagtcctcttggatcttaactgtcctattagaaactgacattagtcaagtaatcactcagatccatgtataagaa

SEQ ID NO: 145638 - DNA, 79 bp, Homo sapiens
tcttggatcttaactgtcctattagaaactgacattagtcaagtaatcactcagatccatgtataagaagctttgacaa

SEQ ID NO: 145639 - DNA, 77 bp, Homo sapiens
attagtcaagtaatcactcagatccatgtataagaagctttgacaagtgctataagggaaactacaagctattctaa

SEQ ID NO: 145640 - DNA, 78 bp, Homo sapiens
agtaatcactcagatccatgtataagaagctttgacaagtgctataagggaaactacaagctattctaagagctataa

SEQ ID NO: 145641 - DNA, 75 bp, Homo sapiens
atccatgtataagaagctttgacaagtgctataagggaaactacaagctattctaagagctataagaggggattg

SEQ ID NO: 145642 - DNA, 73 bp, Homo sapiens
tttgacaagtgctataagggaaactacaagctattctaagagctataagaggggattgtgacttagaactaag

SEQ ID NO: 145643 - DNA, 73 bp, Homo sapiens
ctataagggaaactacaagctattctaagagctataagaggggattgtgacttagaactaaggagctgaggaa

SEQ ID NO: 145644 - DNA, 74 bp, Homo sapiens
ggaaactacaagctattctaagagctataagaggggattgtgacttagaactaaggagctgaggaaggcttctc

SEQ ID NO: 145645 - DNA, 75 bp, Homo sapiens
tattctaagagctataagaggggattgtgacttagaactaaggagctgaggaaggcttctctgaggaagtactat

SEQ ID NO: 145646 - DNA, 76 bp, Homo sapiens
agagctataagaggggattgtgacttagaactaaggagctgaggaaggcttctctgaggaagtactatttgaatga

SEQ ID NO: 145647 - DNA, 78 bp, Homo sapiens
ggattgtgacttagaactaaggagctgaggaaggcttctctgaggaagtactatttgaatgagagctgaaggtgagta

SEQ ID NO: 145648 - DNA, 76 bp, Homo sapiens
acttagaactaaggagctgaggaaggcttctctgaggaagtactatttgaatgagagctgaaggtgagtaggagtg

SEQ ID NO: 145649 - DNA, 78 bp, Homo sapiens
taaggagctgaggaaggcttctctgaggaagtactatttgaatgagagctgaaggtgagtaggagtggcccaagtgag

SEQ ID NO: 145650 - DNA, 75 bp, Homo sapiens
tctctgaggaagtactatttgaatgagagctgaaggtgagtaggagtggcccaagtgaggggtgttggggcttaa

SEQ ID NO: 145651 - DNA, 76 bp, Homo sapiens
tactatttgaatgagagctgaaggtgagtaggagtggcccaagtgaggggtgttggggcttaagcagtgtcagtat

SEQ ID NO: 145652 - DNA, 75 bp, Homo sapiens
aatgagagctgaaggtgagtaggagtggcccaagtgaggggtgttggggcttaagcagtgtcagtattccaggaa

SEQ ID NO: 145653 - DNA, 71 bp, Homo sapiens
aaggtgagtaggagtggcccaagtgaggggtgttggggcttaagcagtgtcagtattccaggaagaaggaa

SEQ ID NO: 145654 - DNA, 84 bp, Homo sapiens
tggggcttaagcagtgtcagtattccaggaagaaggaatagcatgtgccactggcttatgccacaccatgtgcagagaccatta

SEQ ID NO: 145655 - DNA, 84 bp, Homo sapiens
ttaagcagtgtcagtattccaggaagaaggaatagcatgtgccactggcttatgccacaccatgtgcagagaccattagagaat

SEQ ID NO: 145656 - DNA, 82 bp, Homo sapiens
aagaaggaatagcatgtgccactggcttatgccacaccatgtgcagagaccattagagaattcttcccaggatataagccca

SEQ ID NO: 145657 - DNA, 83 bp, Homo sapiens
aatagcatgtgccactggcttatgccacaccatgtgcagagaccattagagaattcttcccaggatataagcccagtaccata

SEQ ID NO: 145658 - DNA, 78 bp, Homo sapiens
ttatgccacaccatgtgcagagaccattagagaattcttcccaggatataagcccagtaccatagatcaaagggaatt

SEQ ID NO: 145659 - DNA, 75 bp, Homo sapiens
atgtgcagagaccattagagaattcttcccaggatataagcccagtaccatagatcaaagggaatttttcattta

SEQ ID NO: 145660 - DNA, 73 bp, Homo sapiens
agaccattagagaattcttcccaggatataagcccagtaccatagatcaaagggaatttttcatttattctga

SEQ ID NO: 145661 - DNA, 72 bp, Homo sapiens
agaattcttcccaggatataagcccagtaccatagatcaaagggaatttttcatttattctgaaacttggca

SEQ ID NO: 145662 - DNA, 76 bp, Homo sapiens
aggatataagcccagtaccatagatcaaagggaatttttcatttattctgaaacttggcagcacatcagaatcacc

SEQ ID NO: 145663 - DNA, 77 bp, Homo sapiens
agtaccatagatcaaagggaatttttcatttattctgaaacttggcagcacatcagaatcacctgggaagcctgata

SEQ ID NO: 145664 - DNA, 62 bp, Homo sapiens
taaaaatacaaattgttaaaaataaaaattcccaggccctcccctaggggggctgagtttgt

SEQ ID NO: 145665 - DNA, 65 bp, Homo sapiens
atacaaattgttaaaaataaaaattcccaggccctcccctaggggggctgagtttgttctgtagc

SEQ ID NO: 145666 - DNA, 68 bp, Homo sapiens
ccctcccctaggggggctgagtttgttctgtagcctggaaatgacaactgttccggaaaagcttatgg

SEQ ID NO: 145667 - DNA, 73 bp, Homo sapiens
gggctgagtttgttctgtagcctggaaatgacaactgttccggaaaagcttatgggccacagggagctacagg

SEQ ID NO: 145668 - DNA, 71 bp, Homo sapiens
agtttgttctgtagcctggaaatgacaactgttccggaaaagcttatgggccacagggagctacaggggcc

SEQ ID NO: 145669 - DNA, 72 bp, Homo sapiens
ctggaaatgacaactgttccggaaaagcttatgggccacagggagctacaggggcccctcccagtggctcaa

SEQ ID NO: 145670 - DNA, 72 bp, Homo sapiens
aatgacaactgttccggaaaagcttatgggccacagggagctacaggggcccctcccagtggctcaagaagc

SEQ ID NO: 145671 - DNA, 70 bp, Homo sapiens
ttccggaaaagcttatgggccacagggagctacaggggcccctcccagtggctcaagaagccccccgaca

SEQ ID NO: 145672 - DNA, 70 bp, Homo sapiens
aaaagcttatgggccacagggagctacaggggcccctcccagtggctcaagaagccccccgacatgtggg

SEQ ID NO: 145673 - DNA, 73 bp, Homo sapiens
agggagctacaggggcccctcccagtggctcaagaagccccccgacatgtgggtctcgggcacaaggatcaca

SEQ ID NO: 145674 - DNA, 74 bp, Homo sapiens
agctacaggggcccctcccagtggctcaagaagccccccgacatgtgggtctcgggcacaaggatcacactgaa

SEQ ID NO: 145675 - DNA, 75 bp, Homo sapiens
tacaggggcccctcccagtggctcaagaagccccccgacatgtgggtctcgggcacaaggatcacactgaactga

SEQ ID NO: 145676 - DNA, 77 bp, Homo sapiens
ccagtggctcaagaagccccccgacatgtgggtctcgggcacaaggatcacactgaactgatggatggggctttcat

SEQ ID NO: 145677 - DNA, 78 bp, Homo sapiens
tcaagaagccccccgacatgtgggtctcgggcacaaggatcacactgaactgatggatggggctttcattcctgagta

SEQ ID NO: 145678 - DNA, 76 bp, Homo sapiens
aagaagccccccgacatgtgggtctcgggcacaaggatcacactgaactgatggatggggctttcattcctgagta

SEQ ID NO: 145679 - DNA, 78 bp, Homo sapiens
atgtgggtctcgggcacaaggatcacactgaactgatggatggggctttcattcctgagtaggacgtcagagtagcct

SEQ ID NO: 145680 - DNA, 79 bp, Homo sapiens
tctcgggcacaaggatcacactgaactgatggatggggctttcattcctgagtaggacgtcagagtagccttgggagaa

SEQ ID NO: 145681 - DNA, 77 bp, Homo sapiens
actgaactgatggatggggctttcattcctgagtaggacgtcagagtagccttgggagaagcacaggagtgggatcc

SEQ ID NO: 145682 - DNA, 75 bp, Homo sapiens
atggatggggctttcattcctgagtaggacgtcagagtagccttgggagaagcacaggagtgggatccccaagac

SEQ ID NO: 145683 - DNA, 73 bp, Homo sapiens
attcctgagtaggacgtcagagtagccttgggagaagcacaggagtgggatccccaagactctcctcctcttt

SEQ ID NO: 145684 - DNA, 73 bp, Homo sapiens
taggacgtcagagtagccttgggagaagcacaggagtgggatccccaagactctcctcctcttttcctccgta

SEQ ID NO: 145685 - DNA, 72 bp, Homo sapiens
agtagccttgggagaagcacaggagtgggatccccaagactctcctcctcttttcctccgtagctcatgttt

SEQ ID NO: 145686 - DNA, 71 bp, Homo sapiens
atccccaagactctcctcctcttttcctccgtagctcatgtttttcattgttctgcccccaacataaggta

SEQ ID NO: 145687 - DNA, 75 bp, Homo sapiens
tctcctcctcttttcctccgtagctcatgtttttcattgttctgcccccaacataaggtagaagattatgacaca

SEQ ID NO: 145688 - DNA, 75 bp, Homo sapiens
ttttcctccgtagctcatgtttttcattgttctgcccccaacataaggtagaagattatgacacaatcttatcta

SEQ ID NO: 145689 - DNA, 76 bp, Homo sapiens
tagctcatgtttttcattgttctgcccccaacataaggtagaagattatgacacaatcttatctagcttttcaggt

SEQ ID NO: 145690 - DNA, 72 bp, Homo sapiens
ttttcattgttctgcccccaacataaggtagaagattatgacacaatcttatctagcttttcaggttccgtt

SEQ ID NO: 145691 - DNA, 71 bp, Homo sapiens
tctgcccccaacataaggtagaagattatgacacaatcttatctagcttttcaggttccgttttctaaaaa

SEQ ID NO: 145692 - DNA, 69 bp, Homo sapiens
cccaacataaggtagaagattatgacacaatcttatctagcttttcaggttccgttttctaaaaatgtt

SEQ ID NO: 145693 - DNA, 69 bp, Homo sapiens
aggtagaagattatgacacaatcttatctagcttttcaggttccgttttctaaaaatgttttattatgg

SEQ ID NO: 145694 - DNA, 69 bp, Homo sapiens
gacacaatcttatctagcttttcaggttccgttttctaaaaatgttttattatggtaactctagattcc

SEQ ID NO: 145695 - DNA, 72 bp, Homo sapiens
ttttctaaaaatgttttattatggtaactctagattccgtaagctcgacctcagtgagcctgggcagaccta

SEQ ID NO: 145696 - DNA, 76 bp, Homo sapiens
ttattatggtaactctagattccgtaagctcgacctcagtgagcctgggcagacctacatgacctaaatgtgttag

SEQ ID NO: 145697 - DNA, 76 bp, Homo sapiens
aactctagattccgtaagctcgacctcagtgagcctgggcagacctacatgacctaaatgtgttaggaaattgata

SEQ ID NO: 145698 - DNA, 78 bp, Homo sapiens
taagctcgacctcagtgagcctgggcagacctacatgacctaaatgtgttaggaaattgatagcagagtaaagttatc

SEQ ID NO: 145699 - DNA, 81 bp, Homo sapiens
tcagtgagcctgggcagacctacatgacctaaatgtgttaggaaattgatagcagagtaaagttatctgtgtgcagaattc

SEQ ID NO: 145700 - DNA, 77 bp, Homo sapiens
agcctgggcagacctacatgacctaaatgtgttaggaaattgatagcagagtaaagttatctgtgtgcagaattccc

SEQ ID NO: 145701 - DNA, 79 bp, Homo sapiens
agacctacatgacctaaatgtgttaggaaattgatagcagagtaaagttatctgtgtgcagaattccctgctgccatgg

SEQ ID NO: 145702 - DNA, 78 bp, Homo sapiens
acctaaatgtgttaggaaattgatagcagagtaaagttatctgtgtgcagaattccctgctgccatgggtggtgcctg

SEQ ID NO: 145703 - DNA, 81 bp, Homo sapiens
ttaggaaattgatagcagagtaaagttatctgtgtgcagaattccctgctgccatgggtggtgcctggagcagacgacttc

SEQ ID NO: 145704 - DNA, 79 bp, Homo sapiens
atagcagagtaaagttatctgtgtgcagaattccctgctgccatgggtggtgcctggagcagacgacttccaaaccgct

SEQ ID NO: 145705 - DNA, 78 bp, Homo sapiens
taaagttatctgtgtgcagaattccctgctgccatgggtggtgcctggagcagacgacttccaaaccgcttgtaagaa

SEQ ID NO: 145706 - DNA, 77 bp, Homo sapiens
aattccctgctgccatgggtggtgcctggagcagacgacttccaaaccgcttgtaagaaagcatgaagaataagtca

SEQ ID NO: 145707 - DNA, 77 bp, Homo sapiens
atgggtggtgcctggagcagacgacttccaaaccgcttgtaagaaagcatgaagaataagtcacctgcacttcagag

SEQ ID NO: 145708 - DNA, 75 bp, Homo sapiens
cctggagcagacgacttccaaaccgcttgtaagaaagcatgaagaataagtcacctgcacttcagaggccaaatt

SEQ ID NO: 145709 - DNA, 72 bp, Homo sapiens
agacgacttccaaaccgcttgtaagaaagcatgaagaataagtcacctgcacttcagaggccaaattttaaa

SEQ ID NO: 145710 - DNA, 71 bp, Homo sapiens
aaaccgcttgtaagaaagcatgaagaataagtcacctgcacttcagaggccaaattttaaacctgaaaaga

SEQ ID NO: 145711 - DNA, 72 bp, Homo sapiens
agcatgaagaataagtcacctgcacttcagaggccaaattttaaacctgaaaagatctaaatatagaagttt

SEQ ID NO: 145712 - DNA, 70 bp, Homo sapiens
gcacttcagaggccaaattttaaacctgaaaagatctaaatatagaagttttaaaatagtgacaggcagg

SEQ ID NO: 145713 - DNA, 65 bp, Homo sapiens
ggccaaattttaaacctgaaaagatctaaatatagaagttttaaaatagtgacaggcaggttttt

SEQ ID NO: 145714 - DNA, 70 bp, Homo sapiens
cctgaaaagatctaaatatagaagttttaaaatagtgacaggcaggttttttagagcagaagctgtaaac

SEQ ID NO: 145715 - DNA, 72 bp, Homo sapiens
aaagatctaaatatagaagttttaaaatagtgacaggcaggttttttagagcagaagctgtaaaccagcagc

SEQ ID NO: 145716 - DNA, 73 bp, Homo sapiens
atatagaagttttaaaatagtgacaggcaggttttttagagcagaagctgtaaaccagcagcctgagggctag

SEQ ID NO: 145717 - DNA, 75 bp, Homo sapiens
tttaaaatagtgacaggcaggttttttagagcagaagctgtaaaccagcagcctgagggctaggttgggcctgca

SEQ ID NO: 145718 - DNA, 73 bp, Homo sapiens
aggcaggttttttagagcagaagctgtaaaccagcagcctgagggctaggttgggcctgcagacaaattattt

SEQ ID NO: 145719 - DNA, 73 bp, Homo sapiens
agctgtaaaccagcagcctgagggctaggttgggcctgcagacaaattattttgtttggcctgtagggcttgt

SEQ ID NO: 145720 - DNA, 72 bp, Homo sapiens
taaaccagcagcctgagggctaggttgggcctgcagacaaattattttgtttggcctgtagggcttgttttc

SEQ ID NO: 145721 - DNA, 69 bp, Homo sapiens
cctgagggctaggttgggcctgcagacaaattattttgtttggcctgtagggcttgttttctttctttc

SEQ ID NO: 145722 - DNA, 66 bp, Homo sapiens
tctttctttctccctaccgccccccacacttttagccagtatttacaaactggagaatttaggaaa

SEQ ID NO: 145723 - DNA, 64 bp, Homo sapiens
ctttctccctaccgccccccacacttttagccagtatttacaaactggagaatttaggaaaaaa

SEQ ID NO: 145724 - DNA, 69 bp, Homo sapiens
cccccacacttttagccagtatttacaaactggagaatttaggaaaaaaatcattattggctgagtaga

SEQ ID NO: 145725 - DNA, 72 bp, Homo sapiens
tttagccagtatttacaaactggagaatttaggaaaaaaatcattattggctgagtagaggcaatttctgga

SEQ ID NO: 145726 - DNA, 70 bp, Homo sapiens
ccagtatttacaaactggagaatttaggaaaaaaatcattattggctgagtagaggcaatttctggaacc

SEQ ID NO: 145727 - DNA, 71 bp, Homo sapiens
aaactggagaatttaggaaaaaaatcattattggctgagtagaggcaatttctggaacctggcaatcttta

SEQ ID NO: 145728 - DNA, 71 bp, Homo sapiens
aatttaggaaaaaaatcattattggctgagtagaggcaatttctggaacctggcaatctttagagtttctc

SEQ ID NO: 145729 - DNA, 73 bp, Homo sapiens
aaaaatcattattggctgagtagaggcaatttctggaacctggcaatctttagagtttctctctctcacccgg

SEQ ID NO: 145730 - DNA, 77 bp, Homo sapiens
attggctgagtagaggcaatttctggaacctggcaatctttagagtttctctctctcacccgggctggaatgcagta

SEQ ID NO: 145731 - DNA, 70 bp, Homo sapiens
gcccaggctgaacctggcaatcttatgaagaaacactttaaactctgaaggaaactttttaagtaatata

SEQ ID NO: 145732 - DNA, 70 bp, Homo sapiens
ctgaacctggcaatcttatgaagaaacactttaaactctgaaggaaactttttaagtaatatagacacaa

SEQ ID NO: 145733 - DNA, 69 bp, Homo sapiens
caatcttatgaagaaacactttaaactctgaaggaaactttttaagtaatatagacacaatatttttga

SEQ ID NO: 145734 - DNA, 66 bp, Homo sapiens
agaaacactttaaactctgaaggaaactttttaagtaatatagacacaatatttttgaaaagctct

SEQ ID NO: 145735 - DNA, 68 bp, Homo sapiens
ttaaactctgaaggaaactttttaagtaatatagacacaatatttttgaaaagctcttaaattgctaa

SEQ ID NO: 145736 - DNA, 68 bp, Homo sapiens
aggaaactttttaagtaatatagacacaatatttttgaaaagctcttaaattgctaaaaattaatgca

SEQ ID NO: 145737 - DNA, 72 bp, Homo sapiens
ttaagtaatatagacacaatatttttgaaaagctcttaaattgctaaaaattaatgcaaagaatagaattgc

SEQ ID NO: 145738 - DNA, 74 bp, Homo sapiens
tatagacacaatatttttgaaaagctcttaaattgctaaaaattaatgcaaagaatagaattgcttatagtagc

SEQ ID NO: 145739 - DNA, 73 bp, Homo sapiens
gacacaatatttttgaaaagctcttaaattgctaaaaattaatgcaaagaatagaattgcttatagtagccca

SEQ ID NO: 145740 - DNA, 72 bp, Homo sapiens
tatttttgaaaagctcttaaattgctaaaaattaatgcaaagaatagaattgcttatagtagcccaagagga

SEQ ID NO: 145741 - DNA, 74 bp, Homo sapiens
ttgaaaagctcttaaattgctaaaaattaatgcaaagaatagaattgcttatagtagcccaagaggaaagcata

SEQ ID NO: 145742 - DNA, 74 bp, Homo sapiens
gctcttaaattgctaaaaattaatgcaaagaatagaattgcttatagtagcccaagaggaaagcataaaattga

SEQ ID NO: 145743 - DNA, 72 bp, Homo sapiens
aattgctaaaaattaatgcaaagaatagaattgcttatagtagcccaagaggaaagcataaaattgaaactg

SEQ ID NO: 145744 - DNA, 73 bp, Homo sapiens
gctaaaaattaatgcaaagaatagaattgcttatagtagcccaagaggaaagcataaaattgaaactggaaga

SEQ ID NO: 145745 - DNA, 70 bp, Homo sapiens
gcaaagaatagaattgcttatagtagcccaagaggaaagcataaaattgaaactggaagaactttttggg

SEQ ID NO: 145746 - DNA, 70 bp, Homo sapiens
tgcttatagtagcccaagaggaaagcataaaattgaaactggaagaactttttgggtggtattaattgga

SEQ ID NO: 145747 - DNA, 68 bp, Homo sapiens
tagtagcccaagaggaaagcataaaattgaaactggaagaactttttgggtggtattaattggagttg

SEQ ID NO: 145748 - DNA, 65 bp, Homo sapiens
gaggaaagcataaaattgaaactggaagaactttttgggtggtattaattggagttgtttttact

SEQ ID NO: 145749 - DNA, 66 bp, Homo sapiens
aaattgaaactggaagaactttttgggtggtattaattggagttgtttttactttgtgcatttcac

SEQ ID NO: 145750 - DNA, 70 bp, Homo sapiens
tttgggtggtattaattggagttgtttttactttgtgcatttcactttctattccttctcggaaatgcca

SEQ ID NO: 145751 - DNA, 71 bp, Homo sapiens
gtggtattaattggagttgtttttactttgtgcatttcactttctattccttctcggaaatgccagaagta

SEQ ID NO: 145752 - DNA, 73 bp, Homo sapiens
tttactttgtgcatttcactttctattccttctcggaaatgccagaagtacatttggtaccaggatgagaaat

SEQ ID NO: 145753 - DNA, 72 bp, Homo sapiens
atttcactttctattccttctcggaaatgccagaagtacatttggtaccaggatgagaaattcctgttcctc

SEQ ID NO: 145754 - DNA, 71 bp, Homo sapiens
ttctattccttctcggaaatgccagaagtacatttggtaccaggatgagaaattcctgttcctccttgttt

SEQ ID NO: 145755 - DNA, 73 bp, Homo sapiens
ggaaatgccagaagtacatttggtaccaggatgagaaattcctgttcctccttgttttcacacttgagatgtt

SEQ ID NO: 145756 - DNA, 73 bp, Homo sapiens
gaagtacatttggtaccaggatgagaaattcctgttcctccttgttttcacacttgagatgtttgtggatggt

SEQ ID NO: 145757 - DNA, 73 bp, Homo sapiens
atttggtaccaggatgagaaattcctgttcctccttgttttcacacttgagatgtttgtggatggttattgga

SEQ ID NO: 145758 - DNA, 74 bp, Homo sapiens
atgagaaattcctgttcctccttgttttcacacttgagatgtttgtggatggttattggatccccctgagtctc

SEQ ID NO: 145759 - DNA, 73 bp, Homo sapiens
aaattcctgttcctccttgttttcacacttgagatgtttgtggatggttattggatccccctgagtctctcca

SEQ ID NO: 145760 - DNA, 76 bp, Homo sapiens
cttgttttcacacttgagatgtttgtggatggttattggatccccctgagtctctccagttgtgcctttgccaaga

SEQ ID NO: 145761 - DNA, 79 bp, Homo sapiens
tttcacacttgagatgtttgtggatggttattggatccccctgagtctctccagttgtgcctttgccaagatatagaca

SEQ ID NO: 145762 - DNA, 76 bp, Homo sapiens
atgtttgtggatggttattggatccccctgagtctctccagttgtgcctttgccaagatatagacattcaactctt

SEQ ID NO: 145763 - DNA, 76 bp, Homo sapiens
atggttattggatccccctgagtctctccagttgtgcctttgccaagatatagacattcaactcttttgaatcttc

SEQ ID NO: 145764 - DNA, 79 bp, Homo sapiens
ttggatccccctgagtctctccagttgtgcctttgccaagatatagacattcaactcttttgaatcttcccagactgca

SEQ ID NO: 145765 - DNA, 82 bp, Homo sapiens
ctgagtctctccagttgtgcctttgccaagatatagacattcaactcttttgaatcttcccagactgcatgtgctctcccag

SEQ ID NO: 145766 - DNA, 83 bp, Homo sapiens
agttgtgcctttgccaagatatagacattcaactcttttgaatcttcccagactgcatgtgctctcccaggctctcacatagc

SEQ ID NO: 145767 - DNA, 80 bp, Homo sapiens
tatagacattcaactcttttgaatcttcccagactgcatgtgctctcccaggctctcacatagccacccgggtcatttta

SEQ ID NO: 145768 - DNA, 80 bp, Homo sapiens
tcttttgaatcttcccagactgcatgtgctctcccaggctctcacatagccacccgggtcattttagctcttctctagat

SEQ ID NO: 145769 - DNA, 79 bp, Homo sapiens
aatcttcccagactgcatgtgctctcccaggctctcacatagccacccgggtcattttagctcttctctagattaactg

SEQ ID NO: 145770 - DNA, 77 bp, Homo sapiens
actgcatgtgctctcccaggctctcacatagccacccgggtcattttagctcttctctagattaactgtgttttatt

SEQ ID NO: 145771 - DNA, 75 bp, Homo sapiens
tctcccaggctctcacatagccacccgggtcattttagctcttctctagattaactgtgttttattttgagccaa

SEQ ID NO: 145772 - DNA, 75 bp, Homo sapiens
tctcacatagccacccgggtcattttagctcttctctagattaactgtgttttattttgagccaactgataatct

SEQ ID NO: 145773 - DNA, 73 bp, Homo sapiens
atagccacccgggtcattttagctcttctctagattaactgtgttttattttgagccaactgataatcttcag

SEQ ID NO: 145774 - DNA, 73 bp, Homo sapiens
attttagctcttctctagattaactgtgttttattttgagccaactgataatcttcagggacagaaacccaga

SEQ ID NO: 145775 - DNA, 74 bp, Homo sapiens
tcttctctagattaactgtgttttattttgagccaactgataatcttcagggacagaaacccagatattccaag

SEQ ID NO: 145776 - DNA, 72 bp, Homo sapiens
tagattaactgtgttttattttgagccaactgataatcttcagggacagaaacccagatattccaaggggaa

SEQ ID NO: 145777 - DNA, 75 bp, Homo sapiens
ttattttgagccaactgataatcttcagggacagaaacccagatattccaaggggaatcttgttgatgactgagt

SEQ ID NO: 145778 - DNA, 73 bp, Homo sapiens
ccaactgataatcttcagggacagaaacccagatattccaaggggaatcttgttgatgactgagttagtggtt

SEQ ID NO: 145779 - DNA, 72 bp, Homo sapiens
ataatcttcagggacagaaacccagatattccaaggggaatcttgttgatgactgagttagtggtttgattt

SEQ ID NO: 145780 - DNA, 71 bp, Homo sapiens
acagaaacccagatattccaaggggaatcttgttgatgactgagttagtggtttgattttggctgttttgg

SEQ ID NO: 145781 - DNA, 70 bp, Homo sapiens
aacccagatattccaaggggaatcttgttgatgactgagttagtggtttgattttggctgttttggtggg

SEQ ID NO: 145782 - DNA, 74 bp, Homo sapiens
ttgttgatgactgagttagtggtttgattttggctgttttggtgggggtgaccaacactcatgagatatttaaa

SEQ ID NO: 145783 - DNA, 72 bp, Homo sapiens
atgactgagttagtggtttgattttggctgttttggtgggggtgaccaacactcatgagatatttaaacagt

SEQ ID NO: 145784 - DNA, 71 bp, Homo sapiens
tagtggtttgattttggctgttttggtgggggtgaccaacactcatgagatatttaaacagttcctcctaa

SEQ ID NO: 145785 - DNA, 71 bp, Homo sapiens
attttggctgttttggtgggggtgaccaacactcatgagatatttaaacagttcctcctaagagaggatcc

SEQ ID NO: 145786 - DNA, 75 bp, Homo sapiens
gtgaccaacactcatgagatatttaaacagttcctcctaagagaggatcctggttcatgttaacataataattta

SEQ ID NO: 145787 - DNA, 69 bp, Homo sapiens
tttaaacagttcctcctaagagaggatcctggttcatgttaacataataatttattttttggtcttgta

SEQ ID NO: 145788 - DNA, 74 bp, Homo sapiens
gaggatcctggttcatgttaacataataatttattttttggtcttgtatttcttctctccagttgccaacagca

SEQ ID NO: 145789 - DNA, 72 bp, Homo sapiens
cataataatttattttttggtcttgtatttcttctctccagttgccaacagcaatttgacattattttccaa

SEQ ID NO: 145790 - DNA, 69 bp, Homo sapiens
attttttggtcttgtatttcttctctccagttgccaacagcaatttgacattattttccaaggttaact

SEQ ID NO: 145791 - DNA, 74 bp, Homo sapiens
cttgtatttcttctctccagttgccaacagcaatttgacattattttccaaggttaactttgcatgttcacatt

SEQ ID NO: 145792 - DNA, 74 bp, Homo sapiens
cagttgccaacagcaatttgacattattttccaaggttaactttgcatgttcacatttcccaagaactctataa

SEQ ID NO: 145793 - DNA, 74 bp, Homo sapiens
cagcaatttgacattattttccaaggttaactttgcatgttcacatttcccaagaactctataagcagctattt

SEQ ID NO: 145794 - DNA, 74 bp, Homo sapiens
gacattattttccaaggttaactttgcatgttcacatttcccaagaactctataagcagctatttttacattga

SEQ ID NO: 145795 - DNA, 72 bp, Homo sapiens
ccaaggttaactttgcatgttcacatttcccaagaactctataagcagctatttttacattgattttgttcc

SEQ ID NO: 145796 - DNA, 75 bp, Homo sapiens
tgcatgttcacatttcccaagaactctataagcagctatttttacattgattttgttcctttctttaattgttga

SEQ ID NO: 145797 - DNA, 71 bp, Homo sapiens
gttcacatttcccaagaactctataagcagctatttttacattgattttgttcctttctttaattgttgaa

SEQ ID NO: 145798 - DNA, 72 bp, Homo sapiens
gaactctataagcagctatttttacattgattttgttcctttctttaattgttgaaataactctattgatgg

SEQ ID NO: 145799 - DNA, 69 bp, Homo sapiens
agcagctatttttacattgattttgttcctttctttaattgttgaaataactctattgatggtttttcc

SEQ ID NO: 145800 - DNA, 69 bp, Homo sapiens
tttacattgattttgttcctttctttaattgttgaaataactctattgatggtttttcccacagaggtc

SEQ ID NO: 145801 - DNA, 69 bp, Homo sapiens
ctttctttaattgttgaaataactctattgatggtttttcccacagaggtctagggtccacacaaacta

SEQ ID NO: 145802 - DNA, 69 bp, Homo sapiens
attgttgaaataactctattgatggtttttcccacagaggtctagggtccacacaaactattagttttc

SEQ ID NO: 145803 - DNA, 69 bp, Homo sapiens
aataactctattgatggtttttcccacagaggtctagggtccacacaaactattagttttctcttgaac

SEQ ID NO: 145804 - DNA, 71 bp, Homo sapiens
ttgatggtttttcccacagaggtctagggtccacacaaactattagttttctcttgaacttcatttcattc

SEQ ID NO: 145805 - DNA, 69 bp, Homo sapiens
ccacagaggtctagggtccacacaaactattagttttctcttgaacttcatttcattccctatttaaat

SEQ ID NO: 145806 - DNA, 68 bp, Homo sapiens
ggtctagggtccacacaaactattagttttctcttgaacttcatttcattccctatttaaatttggcc

SEQ ID NO: 145807 - DNA, 72 bp, Homo sapiens
cacacaaactattagttttctcttgaacttcatttcattccctatttaaatttggcctactttctctctgca

SEQ ID NO: 145808 - DNA, 68 bp, Homo sapiens
attagttttctcttgaacttcatttcattccctatttaaatttggcctactttctctctgcatttttt

SEQ ID NO: 145809 - DNA, 65 bp, Homo sapiens
gcattttttttttcctaaccccgtggtaatttgtcaagcccattctaatcttcttaatccctttg

SEQ ID NO: 145810 - DNA, 66 bp, Homo sapiens
tttttcctaaccccgtggtaatttgtcaagcccattctaatcttcttaatccctttggctgaaggg

SEQ ID NO: 145811 - DNA, 67 bp, Homo sapiens
ccgtggtaatttgtcaagcccattctaatcttcttaatccctttggctgaagggttttgaggtttaa

SEQ ID NO: 145812 - DNA, 67 bp, Homo sapiens
gtaatttgtcaagcccattctaatcttcttaatccctttggctgaagggttttgaggtttaatgttt

SEQ ID NO: 145813 - DNA, 67 bp, Homo sapiens
ttcttaatccctttggctgaagggttttgaggtttaatgttttaatctagaggcctcagtatttaag

SEQ ID NO: 145814 - DNA, 67 bp, Homo sapiens
ccctttggctgaagggttttgaggtttaatgttttaatctagaggcctcagtatttaagtaattaga

SEQ ID NO: 145815 - DNA, 68 bp, Homo sapiens
gctgaagggttttgaggtttaatgttttaatctagaggcctcagtatttaagtaattagaggtcctat

SEQ ID NO: 145816 - DNA, 70 bp, Homo sapiens
gaggtttaatgttttaatctagaggcctcagtatttaagtaattagaggtcctatttctagctctgtcct

SEQ ID NO: 145817 - DNA, 72 bp, Homo sapiens
tttaatctagaggcctcagtatttaagtaattagaggtcctatttctagctctgtcctttagataaatcacc

SEQ ID NO: 145818 - DNA, 69 bp, Homo sapiens
tcagtatttaagtaattagaggtcctatttctagctctgtcctttagataaatcaccttaggtttttta

SEQ ID NO: 145819 - DNA, 67 bp, Homo sapiens
agtaattagaggtcctatttctagctctgtcctttagataaatcaccttaggttttttattccaatt

SEQ ID NO: 145820 - DNA, 68 bp, Homo sapiens
ggtcctatttctagctctgtcctttagataaatcaccttaggttttttattccaatttacaaataata

SEQ ID NO: 145821 - DNA, 69 bp, Homo sapiens
ctagctctgtcctttagataaatcaccttaggttttttattccaatttacaaataatagaactctgaaa

SEQ ID NO: 145822 - DNA, 70 bp, Homo sapiens
tagataaatcaccttaggttttttattccaatttacaaataatagaactctgaaaactcatattggacag

SEQ ID NO: 145823 - DNA, 70 bp, Homo sapiens
ccttaggttttttattccaatttacaaataatagaactctgaaaactcatattggacaggaatgtggagc

SEQ ID NO: 145824 - DNA, 76 bp, Homo sapiens
tttattccaatttacaaataatagaactctgaaaactcatattggacaggaatgtggagctttgaattgaagtgca

SEQ ID NO: 145825 - DNA, 76 bp, Homo sapiens
ataatagaactctgaaaactcatattggacaggaatgtggagctttgaattgaagtgcatgaattaagaaaggaag

SEQ ID NO: 145826 - DNA, 79 bp, Homo sapiens
tgaaaactcatattggacaggaatgtggagctttgaattgaagtgcatgaattaagaaaggaaggcattctatgttatg

SEQ ID NO: 145827 - DNA, 77 bp, Homo sapiens
aaaactcatattggacaggaatgtggagctttgaattgaagtgcatgaattaagaaaggaaggcattctatgttatg

SEQ ID NO: 145828 - DNA, 79 bp, Homo sapiens
ctcatattggacaggaatgtggagctttgaattgaagtgcatgaattaagaaaggaaggcattctatgttatgtatatt

SEQ ID NO: 145829 - DNA, 76 bp, Homo sapiens
gtggagctttgaattgaagtgcatgaattaagaaaggaaggcattctatgttatgtatatttcttcgaggtattct

SEQ ID NO: 145830 - DNA, 73 bp, Homo sapiens
attgaagtgcatgaattaagaaaggaaggcattctatgttatgtatatttcttcgaggtattcttaacaaccc

SEQ ID NO: 145831 - DNA, 74 bp, Homo sapiens
gtgcatgaattaagaaaggaaggcattctatgttatgtatatttcttcgaggtattcttaacaaccccacacta

SEQ ID NO: 145832 - DNA, 73 bp, Homo sapiens
gaaaggaaggcattctatgttatgtatatttcttcgaggtattcttaacaaccccacactatattatagattc

SEQ ID NO: 145833 - DNA, 72 bp, Homo sapiens
gcattctatgttatgtatatttcttcgaggtattcttaacaaccccacactatattatagattccctttttc

SEQ ID NO: 145834 - DNA, 71 bp, Homo sapiens
atgtatatttcttcgaggtattcttaacaaccccacactatattatagattccctttttccttagagctca

SEQ ID NO: 145835 - DNA, 69 bp, Homo sapiens
tatttcttcgaggtattcttaacaaccccacactatattatagattccctttttccttagagctcaatt

SEQ ID NO: 145836 - DNA, 66 bp, Homo sapiens
aggtattcttaacaaccccacactatattatagattccctttttccttagagctcaatttttaaaa

SEQ ID NO: 145837 - DNA, 69 bp, Homo sapiens
cactatattatagattccctttttccttagagctcaatttttaaaataccccgaagcaagtatttgctg

SEQ ID NO: 145838 - DNA, 69 bp, Homo sapiens
gattccctttttccttagagctcaatttttaaaataccccgaagcaagtatttgctgttgcattttaga

SEQ ID NO: 145839 - DNA, 67 bp, Homo sapiens
ttttccttagagctcaatttttaaaataccccgaagcaagtatttgctgttgcattttagaaaaatt

SEQ ID NO: 145840 - DNA, 67 bp, Homo sapiens
agctcaatttttaaaataccccgaagcaagtatttgctgttgcattttagaaaaatttaaaatagaa

SEQ ID NO: 145841 - DNA, 70 bp, Homo sapiens
ataccccgaagcaagtatttgctgttgcattttagaaaaatttaaaatagaattctatggtataattaga

SEQ ID NO: 145842 - DNA, 72 bp, Homo sapiens
ccgaagcaagtatttgctgttgcattttagaaaaatttaaaatagaattctatggtataattagaatgtatg

SEQ ID NO: 145843 - DNA, 71 bp, Homo sapiens
gctgttgcattttagaaaaatttaaaatagaattctatggtataattagaatgtatgttacttccaacatt

SEQ ID NO: 145844 - DNA, 68 bp, Homo sapiens
gcattttagaaaaatttaaaatagaattctatggtataattagaatgtatgttacttccaacattttt

SEQ ID NO: 145845 - DNA, 74 bp, Homo sapiens
tttaaaatagaattctatggtataattagaatgtatgttacttccaacattttttcatgctcgagaacatggga

SEQ ID NO: 145846 - DNA, 75 bp, Homo sapiens
agaattctatggtataattagaatgtatgttacttccaacattttttcatgctcgagaacatgggaacttgtgaa

SEQ ID NO: 145847 - DNA, 71 bp, Homo sapiens
ggtataattagaatgtatgttacttccaacattttttcatgctcgagaacatgggaacttgtgaaaaaatt

SEQ ID NO: 145848 - DNA, 71 bp, Homo sapiens
catgctcgagaacatgggaacttgtgaaaaaattttttcctattaaataatctgaacattcttacaaaatg

SEQ ID NO: 145849 - DNA, 68 bp, Homo sapiens
gttttttaaaaataactttgtttctttgtcatagaaggattcatatttttacattctgtcaacaaata

SEQ ID NO: 145850 - DNA, 71 bp, Homo sapiens
aataactttgtttctttgtcatagaaggattcatatttttacattctgtcaacaaatatttgaacacccat

SEQ ID NO: 145851 - DNA, 73 bp, Homo sapiens
tttctttgtcatagaaggattcatatttttacattctgtcaacaaatatttgaacacccattagatataaagg

SEQ ID NO: 145852 - DNA, 74 bp, Homo sapiens
catagaaggattcatatttttacattctgtcaacaaatatttgaacacccattagatataaagggagctaatag

SEQ ID NO: 145853 - DNA, 72 bp, Homo sapiens
tttttacattctgtcaacaaatatttgaacacccattagatataaagggagctaataggaaagaaagacaca

SEQ ID NO: 145854 - DNA, 74 bp, Homo sapiens
tttacattctgtcaacaaatatttgaacacccattagatataaagggagctaataggaaagaaagacacaggca

SEQ ID NO: 145855 - DNA, 74 bp, Homo sapiens
tctgtcaacaaatatttgaacacccattagatataaagggagctaataggaaagaaagacacaggcacagtaaa

SEQ ID NO: 145856 - DNA, 71 bp, Homo sapiens
caacaaatatttgaacacccattagatataaagggagctaataggaaagaaagacacaggcacagtaaatt

SEQ ID NO: 145857 - DNA, 76 bp, Homo sapiens
ttgaacacccattagatataaagggagctaataggaaagaaagacacaggcacagtaaatttattatgacatagca

SEQ ID NO: 145858 - DNA, 74 bp, Homo sapiens
acccattagatataaagggagctaataggaaagaaagacacaggcacagtaaatttattatgacatagcataaa

SEQ ID NO: 145859 - DNA, 75 bp, Homo sapiens
gggagctaataggaaagaaagacacaggcacagtaaatttattatgacatagcataaaaatccaaagtgtaatca

SEQ ID NO: 145860 - DNA, 76 bp, Homo sapiens
ggaaagaaagacacaggcacagtaaatttattatgacatagcataaaaatccaaagtgtaatcagtatgagcaagg

SEQ ID NO: 145861 - DNA, 76 bp, Homo sapiens
caggcacagtaaatttattatgacatagcataaaaatccaaagtgtaatcagtatgagcaaggtaatacggaactc

SEQ ID NO: 145862 - DNA, 76 bp, Homo sapiens
cagtaaatttattatgacatagcataaaaatccaaagtgtaatcagtatgagcaaggtaatacggaactcttcata

SEQ ID NO: 145863 - DNA, 77 bp, Homo sapiens
agcataaaaatccaaagtgtaatcagtatgagcaaggtaatacggaactcttcataatacattgctggcatagtccc

SEQ ID NO: 145864 - DNA, 76 bp, Homo sapiens
aagtgtaatcagtatgagcaaggtaatacggaactcttcataatacattgctggcatagtccccttgttcacttta

SEQ ID NO: 145865 - DNA, 74 bp, Homo sapiens
aaggtaatacggaactcttcataatacattgctggcatagtccccttgttcactttatgatgaaaactattcta

SEQ ID NO: 145866 - DNA, 75 bp, Homo sapiens
atacggaactcttcataatacattgctggcatagtccccttgttcactttatgatgaaaactattctaaatgctt

SEQ ID NO: 145867 - DNA, 77 bp, Homo sapiens
taatacattgctggcatagtccccttgttcactttatgatgaaaactattctaaatgctttataggtgctaactcat

SEQ ID NO: 145868 - DNA, 76 bp, Homo sapiens
ccccttgttcactttatgatgaaaactattctaaatgctttataggtgctaactcatttcatattcacgatgatcc

SEQ ID NO: 145869 - DNA, 77 bp, Homo sapiens
actttatgatgaaaactattctaaatgctttataggtgctaactcatttcatattcacgatgatcccatgtggtagg

SEQ ID NO: 145870 - DNA, 77 bp, Homo sapiens
tgaaaactattctaaatgctttataggtgctaactcatttcatattcacgatgatcccatgtggtagggtactgtta

SEQ ID NO: 145871 - DNA, 76 bp, Homo sapiens
ctaaatgctttataggtgctaactcatttcatattcacgatgatcccatgtggtagggtactgttaccatcctgtt

SEQ ID NO: 145872 - DNA, 76 bp, Homo sapiens
ctttataggtgctaactcatttcatattcacgatgatcccatgtggtagggtactgttaccatcctgttttactga

SEQ ID NO: 145873 - DNA, 76 bp, Homo sapiens
taactcatttcatattcacgatgatcccatgtggtagggtactgttaccatcctgttttactgagagatttagagg

SEQ ID NO: 145874 - DNA, 76 bp, Homo sapiens
atttcatattcacgatgatcccatgtggtagggtactgttaccatcctgttttactgagagatttagaggtacaga

SEQ ID NO: 145875 - DNA, 75 bp, Homo sapiens
atgatcccatgtggtagggtactgttaccatcctgttttactgagagatttagaggtacagagagattggttgtc

SEQ ID NO: 145876 - DNA, 73 bp, Homo sapiens
atgtggtagggtactgttaccatcctgttttactgagagatttagaggtacagagagattggttgtccaagct

SEQ ID NO: 145877 - DNA, 74 bp, Homo sapiens
tactgttaccatcctgttttactgagagatttagaggtacagagagattggttgtccaagcttctggaggcttt

SEQ ID NO: 145878 - DNA, 76 bp, Homo sapiens
atcctgttttactgagagatttagaggtacagagagattggttgtccaagcttctggaggcttttgccagtggatc

SEQ ID NO: 145879 - DNA, 78 bp, Homo sapiens
tttactgagagatttagaggtacagagagattggttgtccaagcttctggaggcttttgccagtggatctgaaatcca

SEQ ID NO: 145880 - DNA, 77 bp, Homo sapiens
atttagaggtacagagagattggttgtccaagcttctggaggcttttgccagtggatctgaaatccagactcaagta

SEQ ID NO: 145881 - DNA, 78 bp, Homo sapiens
ttggttgtccaagcttctggaggcttttgccagtggatctgaaatccagactcaagtagtctggttccagagtccaca

SEQ ID NO: 145882 - DNA, 77 bp, Homo sapiens
ttctggaggcttttgccagtggatctgaaatccagactcaagtagtctggttccagagtccacagtcttaaccacaa

SEQ ID NO: 145883 - DNA, 77 bp, Homo sapiens
tttgccagtggatctgaaatccagactcaagtagtctggttccagagtccacagtcttaaccacaacacctacatta

SEQ ID NO: 145884 - DNA, 76 bp, Homo sapiens
gatctgaaatccagactcaagtagtctggttccagagtccacagtcttaaccacaacacctacattatattgcctt

SEQ ID NO: 145885 - DNA, 74 bp, Homo sapiens
aaatccagactcaagtagtctggttccagagtccacagtcttaaccacaacacctacattatattgcctttcaa

SEQ ID NO: 145886 - DNA, 73 bp, Homo sapiens
ctcaagtagtctggttccagagtccacagtcttaaccacaacacctacattatattgcctttcaaaattagaa

SEQ ID NO: 145887 - DNA, 72 bp, Homo sapiens
ttccagagtccacagtcttaaccacaacacctacattatattgcctttcaaaattagaagctgtacattttt

SEQ ID NO: 145888 - DNA, 69 bp, Homo sapiens
agtccacagtcttaaccacaacacctacattatattgcctttcaaaattagaagctgtacatttttttt

SEQ ID NO: 145889 - DNA, 71 bp, Homo sapiens
ttttttaagagttgacttttgaagcactttgcactctggtgaaaggtacatccaggctaaaggcttaggaa

SEQ ID NO: 145890 - DNA, 73 bp, Homo sapiens
taagagttgacttttgaagcactttgcactctggtgaaaggtacatccaggctaaaggcttaggaagagaaaa

SEQ ID NO: 145891 - DNA, 75 bp, Homo sapiens
ttttgaagcactttgcactctggtgaaaggtacatccaggctaaaggcttaggaagagaaaagacatagaagcaa

SEQ ID NO: 145892 - DNA, 74 bp, Homo sapiens
actttgcactctggtgaaaggtacatccaggctaaaggcttaggaagagaaaagacatagaagcaagacacgga

SEQ ID NO: 145893 - DNA, 73 bp, Homo sapiens
tgaaaggtacatccaggctaaaggcttaggaagagaaaagacatagaagcaagacacggagggaaatctagtg

SEQ ID NO: 145894 - DNA, 73 bp, Homo sapiens
gtacatccaggctaaaggcttaggaagagaaaagacatagaagcaagacacggagggaaatctagtgggagtg

SEQ ID NO: 145895 - DNA, 73 bp, Homo sapiens
taaaggcttaggaagagaaaagacatagaagcaagacacggagggaaatctagtgggagtggcagggcctgtg

SEQ ID NO: 145896 - DNA, 73 bp, Homo sapiens
aagagaaaagacatagaagcaagacacggagggaaatctagtgggagtggcagggcctgtggctccaggaggt

SEQ ID NO: 145897 - DNA, 75 bp, Homo sapiens
aaagacatagaagcaagacacggagggaaatctagtgggagtggcagggcctgtggctccaggaggttgggcatg

SEQ ID NO: 145898 - DNA, 77 bp, Homo sapiens
agggaaatctagtgggagtggcagggcctgtggctccaggaggttgggcatgggcagaggagagcagtggggagatg

SEQ ID NO: 145899 - DNA, 79 bp, Homo sapiens
tctagtgggagtggcagggcctgtggctccaggaggttgggcatgggcagaggagagcagtggggagatgggcctggtg

SEQ ID NO: 145900 - DNA, 78 bp, Homo sapiens
agggcctgtggctccaggaggttgggcatgggcagaggagagcagtggggagatgggcctggtggcaagatagggcca

SEQ ID NO: 145901 - DNA, 78 bp, Homo sapiens
gctccaggaggttgggcatgggcagaggagagcagtggggagatgggcctggtggcaagatagggccagcttttgaaa

SEQ ID NO: 145902 - DNA, 74 bp, Homo sapiens
ggcagaggagagcagtggggagatgggcctggtggcaagatagggccagcttttgaaattctttagttatttat

SEQ ID NO: 145903 - DNA, 72 bp, Homo sapiens
agcagtggggagatgggcctggtggcaagatagggccagcttttgaaattctttagttatttattgagtaat

SEQ ID NO: 145904 - DNA, 70 bp, Homo sapiens
ggcctggtggcaagatagggccagcttttgaaattctttagttatttattgagtaatttagataaaaaca

SEQ ID NO: 145905 - DNA, 70 bp, Homo sapiens
caagatagggccagcttttgaaattctttagttatttattgagtaatttagataaaaacaagaatcatta

SEQ ID NO: 145906 - DNA, 67 bp, Homo sapiens
gcttttgaaattctttagttatttattgagtaatttagataaaaacaagaatcattaataaaaggcg

SEQ ID NO: 145907 - DNA, 66 bp, Homo sapiens
ctttagttatttattgagtaatttagataaaaacaagaatcattaataaaaggcggagaattattt

SEQ ID NO: 145908 - DNA, 71 bp, Homo sapiens
atttagataaaaacaagaatcattaataaaaggcggagaattattttggcttcatggcaggtggtacagct

SEQ ID NO: 145909 - DNA, 72 bp, Homo sapiens
aaacaagaatcattaataaaaggcggagaattattttggcttcatggcaggtggtacagcttgggcttataa

SEQ ID NO: 145910 - DNA, 73 bp, Homo sapiens
aatcattaataaaaggcggagaattattttggcttcatggcaggtggtacagcttgggcttataattctgtaa

SEQ ID NO: 145911 - DNA, 72 bp, Homo sapiens
ataaaaggcggagaattattttggcttcatggcaggtggtacagcttgggcttataattctgtaagactttg

SEQ ID NO: 145912 - DNA, 69 bp, Homo sapiens
gtggtacagcttgggcttataattctgtaagactttgggcaaggaacctaaccttcctgtgttaccagt

SEQ ID NO: 145913 - DNA, 68 bp, Homo sapiens
acagcttgggcttataattctgtaagactttgggcaaggaacctaaccttcctgtgttaccagtttat

SEQ ID NO: 145914 - DNA, 65 bp, Homo sapiens
aagactttgggcaaggaacctaaccttcctgtgttaccagtttattcgtctgtaagtaaagtggg

SEQ ID NO: 145915 - DNA, 70 bp, Homo sapiens
taaccttcctgtgttaccagtttattcgtctgtaagtaaagtgggtctaatatactgaggtaatctttga

SEQ ID NO: 145916 - DNA, 69 bp, Homo sapiens
cctgtgttaccagtttattcgtctgtaagtaaagtgggtctaatatactgaggtaatctttgaattact

SEQ ID NO: 145917 - DNA, 71 bp, Homo sapiens
cagtttattcgtctgtaagtaaagtgggtctaatatactgaggtaatctttgaattacttaagacagtgcc

SEQ ID NO: 145918 - DNA, 75 bp, Homo sapiens
taagtaaagtgggtctaatatactgaggtaatctttgaattacttaagacagtgccttgtgcatagtatgagttc

SEQ ID NO: 145919 - DNA, 75 bp, Homo sapiens
aaagtgggtctaatatactgaggtaatctttgaattacttaagacagtgccttgtgcatagtatgagttccatac

SEQ ID NO: 145920 - DNA, 78 bp, Homo sapiens
taatatactgaggtaatctttgaattacttaagacagtgccttgtgcatagtatgagttccatactcctactatggaa

SEQ ID NO: 145921 - DNA, 77 bp, Homo sapiens
taatctttgaattacttaagacagtgccttgtgcatagtatgagttccatactcctactatggaactcttggtagtg

SEQ ID NO: 145922 - DNA, 75 bp, Homo sapiens
aattacttaagacagtgccttgtgcatagtatgagttccatactcctactatggaactcttggtagtggtagaag

SEQ ID NO: 145923 - DNA, 77 bp, Homo sapiens
aagacagtgccttgtgcatagtatgagttccatactcctactatggaactcttggtagtggtagaagtgaaatttga

SEQ ID NO: 145924 - DNA, 75 bp, Homo sapiens
tgcatagtatgagttccatactcctactatggaactcttggtagtggtagaagtgaaatttgaactgggccttaa

SEQ ID NO: 145925 - DNA, 69 bp, Homo sapiens
agttccatactcctactatggaactcttggtagtggtagaagtgaaatttgaactgggccttaagaaaa

SEQ ID NO: 145926 - DNA, 66 bp, Homo sapiens
agtgaaatttgaactgggccttaagaaaaagaatttggacagagggttatcaaaatggggaattag

SEQ ID NO: 145927 - DNA, 68 bp, Homo sapiens
atttgaactgggccttaagaaaaagaatttggacagagggttatcaaaatggggaattagtgatgttg

SEQ ID NO: 145928 - DNA, 68 bp, Homo sapiens
ttaagaaaaagaatttggacagagggttatcaaaatggggaattagtgatgttggggagttaggaaga

SEQ ID NO: 145929 - DNA, 69 bp, Homo sapiens
aaaaagaatttggacagagggttatcaaaatggggaattagtgatgttggggagttaggaagactgatc

SEQ ID NO: 145930 - DNA, 70 bp, Homo sapiens
agagggttatcaaaatggggaattagtgatgttggggagttaggaagactgatcgtattgtttattgaaa

SEQ ID NO: 145931 - DNA, 71 bp, Homo sapiens
gttatcaaaatggggaattagtgatgttggggagttaggaagactgatcgtattgtttattgaaatgtact

SEQ ID NO: 145932 - DNA, 71 bp, Homo sapiens
gggaattagtgatgttggggagttaggaagactgatcgtattgtttattgaaatgtactttagaaatgaag

SEQ ID NO: 145933 - DNA, 72 bp, Homo sapiens
gtgatgttggggagttaggaagactgatcgtattgtttattgaaatgtactttagaaatgaagttggaatta

SEQ ID NO: 145934 - DNA, 73 bp, Homo sapiens
ggagttaggaagactgatcgtattgtttattgaaatgtactttagaaatgaagttggaattagatcaagtgga

SEQ ID NO: 145935 - DNA, 72 bp, Homo sapiens
gatcgtattgtttattgaaatgtactttagaaatgaagttggaattagatcaagtggaccattaattcccag

SEQ ID NO: 145936 - DNA, 70 bp, Homo sapiens
gtttattgaaatgtactttagaaatgaagttggaattagatcaagtggaccattaattcccagttaagag

SEQ ID NO: 145937 - DNA, 72 bp, Homo sapiens
tgtactttagaaatgaagttggaattagatcaagtggaccattaattcccagttaagagttctaagtgaata

SEQ ID NO: 145938 - DNA, 70 bp, Homo sapiens
agaaatgaagttggaattagatcaagtggaccattaattcccagttaagagttctaagtgaataaagccc

SEQ ID NO: 145939 - DNA, 67 bp, Homo sapiens
ggaccattaattcccagttaagagttctaagtgaataaagcccctaagacttgattttaaagtatta

SEQ ID NO: 145940 - DNA, 65 bp, Homo sapiens
ttcccagttaagagttctaagtgaataaagcccctaagacttgattttaaagtattaaaaataag

SEQ ID NO: 145941 - DNA, 66 bp, Homo sapiens
agagttctaagtgaataaagcccctaagacttgattttaaagtattaaaaataagtaaacaaatga

SEQ ID NO: 145942 - DNA, 65 bp, Homo sapiens
agtattaaaaataagtaaacaaatgaaaagcctagtgaaagaaagtatttccttaggggttatca

SEQ ID NO: 145943 - DNA, 66 bp, Homo sapiens
ataagtaaacaaatgaaaagcctagtgaaagaaagtatttccttaggggttatcaagcttttaaga

SEQ ID NO: 145944 - DNA, 67 bp, Homo sapiens
caaatgaaaagcctagtgaaagaaagtatttccttaggggttatcaagcttttaagaatgggtttgc

SEQ ID NO: 145945 - DNA, 67 bp, Homo sapiens
cctagtgaaagaaagtatttccttaggggttatcaagcttttaagaatgggtttgccatggtgttaa

SEQ ID NO: 145946 - DNA, 67 bp, Homo sapiens
tatttccttaggggttatcaagcttttaagaatgggtttgccatggtgttaaacccccaccgctgtc

SEQ ID NO: 145947 - DNA, 68 bp, Homo sapiens
ggggttatcaagcttttaagaatgggtttgccatggtgttaaacccccaccgctgtcttcaacatccc

SEQ ID NO: 145948 - DNA, 67 bp, Homo sapiens
agcttttaagaatgggtttgccatggtgttaaacccccaccgctgtcttcaacatccccccgcccac

SEQ ID NO: 145949 - DNA, 68 bp, Homo sapiens
ttaagaatgggtttgccatggtgttaaacccccaccgctgtcttcaacatccccccgcccaccatccc

SEQ ID NO: 145950 - DNA, 67 bp, Homo sapiens
aatgggtttgccatggtgttaaacccccaccgctgtcttcaacatccccccgcccaccatccccacc

SEQ ID NO: 145951 - DNA, 68 bp, Homo sapiens
gtttgccatggtgttaaacccccaccgctgtcttcaacatccccccgcccaccatccccacccctgcc

SEQ ID NO: 145952 - DNA, 70 bp, Homo sapiens
tggtgttaaacccccaccgctgtcttcaacatccccccgcccaccatccccacccctgcctgatggctta

SEQ ID NO: 145953 - DNA, 69 bp, Homo sapiens
tgttaaacccccaccgctgtcttcaacatccccccgcccaccatccccacccctgcctgatggcttagt

SEQ ID NO: 145954 - DNA, 76 bp, Homo sapiens
cccaccgctgtcttcaacatccccccgcccaccatccccacccctgcctgatggcttagttgctctgtgagctcac

SEQ ID NO: 145955 - DNA, 78 bp, Homo sapiens
cgctgtcttcaacatccccccgcccaccatccccacccctgcctgatggcttagttgctctgtgagctcactcctgaa

SEQ ID NO: 145956 - DNA, 80 bp, Homo sapiens
tgtcttcaacatccccccgcccaccatccccacccctgcctgatggcttagttgctctgtgagctcactcctgaacagca

SEQ ID NO: 145957 - DNA, 80 bp, Homo sapiens
ttcaacatccccccgcccaccatccccacccctgcctgatggcttagttgctctgtgagctcactcctgaacagcagcat

SEQ ID NO: 145958 - DNA, 85 bp, Homo sapiens
ctgcctgatggcttagttgctctgtgagctcactcctgaacagcagcattcccgtggcttggcaatctctggtgtaaacagttca

SEQ ID NO: 145959 - DNA, 77 bp, Homo sapiens
ctcctgaacagcagcattcccgtggcttggcaatctctggtgtaaacagttcactttataaaaatgtacgcactcta

SEQ ID NO: 145960 - DNA, 74 bp, Homo sapiens
agcagcattcccgtggcttggcaatctctggtgtaaacagttcactttataaaaatgtacgcactctaaaatct

SEQ ID NO: 145961 - DNA, 72 bp, Homo sapiens
attcccgtggcttggcaatctctggtgtaaacagttcactttataaaaatgtacgcactctaaaatcttgta

SEQ ID NO: 145962 - DNA, 72 bp, Homo sapiens
ttggcaatctctggtgtaaacagttcactttataaaaatgtacgcactctaaaatcttgtagtgccctttcc

SEQ ID NO: 145963 - DNA, 68 bp, Homo sapiens
tcactttataaaaatgtacgcactctaaaatcttgtagtgccctttcccctttaatttccaaagcact

SEQ ID NO: 145964 - DNA, 67 bp, Homo sapiens
ataaaaatgtacgcactctaaaatcttgtagtgccctttcccctttaatttccaaagcacttatttg

SEQ ID NO: 145965 - DNA, 70 bp, Homo sapiens
gcactctaaaatcttgtagtgccctttcccctttaatttccaaagcacttatttgtttctctcttgatta

SEQ ID NO: 145966 - DNA, 70 bp, Homo sapiens
atcttgtagtgccctttcccctttaatttccaaagcacttatttgtttctctcttgattatcacagtaac

SEQ ID NO: 145967 - DNA, 68 bp, Homo sapiens
ccctttcccctttaatttccaaagcacttatttgtttctctcttgattatcacagtaaccttgtgagt

SEQ ID NO: 145968 - DNA, 72 bp, Homo sapiens
cctttaatttccaaagcacttatttgtttctctcttgattatcacagtaaccttgtgagttaagtatggcag

SEQ ID NO: 145969 - DNA, 75 bp, Homo sapiens
tttccaaagcacttatttgtttctctcttgattatcacagtaaccttgtgagttaagtatggcagttggcaggag

SEQ ID NO: 145970 - DNA, 77 bp, Homo sapiens
atttgtttctctcttgattatcacagtaaccttgtgagttaagtatggcagttggcaggagtcaccattttacatgc

SEQ ID NO: 145971 - DNA, 79 bp, Homo sapiens
tctcttgattatcacagtaaccttgtgagttaagtatggcagttggcaggagtcaccattttacatgccgtggaactga

SEQ ID NO: 145972 - DNA, 78 bp, Homo sapiens
ttatcacagtaaccttgtgagttaagtatggcagttggcaggagtcaccattttacatgccgtggaactgagtctcta

SEQ ID NO: 145973 - DNA, 75 bp, Homo sapiens
ttgtgagttaagtatggcagttggcaggagtcaccattttacatgccgtggaactgagtctctaaatttaattta

SEQ ID NO: 145974 - DNA, 77 bp, Homo sapiens
tcaccattttacatgccgtggaactgagtctctaaatttaatttaagctagtaaatggcagagatggagacatgaaa

SEQ ID NO: 145975 - DNA, 74 bp, Homo sapiens
attttacatgccgtggaactgagtctctaaatttaatttaagctagtaaatggcagagatggagacatgaaacc

SEQ ID NO: 145976 - DNA, 75 bp, Homo sapiens
gaactgagtctctaaatttaatttaagctagtaaatggcagagatggagacatgaaacctggaccctggctccta

SEQ ID NO: 145977 - DNA, 73 bp, Homo sapiens
agtctctaaatttaatttaagctagtaaatggcagagatggagacatgaaacctggaccctggctcctagttc

SEQ ID NO: 145978 - DNA, 76 bp, Homo sapiens
atttaatttaagctagtaaatggcagagatggagacatgaaacctggaccctggctcctagttccagcgctccatc

SEQ ID NO: 145979 - DNA, 78 bp, Homo sapiens
gtaaatggcagagatggagacatgaaacctggaccctggctcctagttccagcgctccatctgccacaaaacatggtt

SEQ ID NO: 145980 - DNA, 79 bp, Homo sapiens
tggaccctggctcctagttccagcgctccatctgccacaaaacatggtttctgtggagtaatgatggcttatgtacact

SEQ ID NO: 145981 - DNA, 77 bp, Homo sapiens
tcctagttccagcgctccatctgccacaaaacatggtttctgtggagtaatgatggcttatgtacacttttatttaa

SEQ ID NO: 145982 - DNA, 76 bp, Homo sapiens
gttccagcgctccatctgccacaaaacatggtttctgtggagtaatgatggcttatgtacacttttatttaaagtg

SEQ ID NO: 145983 - DNA, 73 bp, Homo sapiens
acaaaacatggtttctgtggagtaatgatggcttatgtacacttttatttaaagtgtgctgtttttccacatg

SEQ ID NO: 145984 - DNA, 76 bp, Homo sapiens
ttctgtggagtaatgatggcttatgtacacttttatttaaagtgtgctgtttttccacatggccttgctttcatgt

SEQ ID NO: 145985 - DNA, 78 bp, Homo sapiens
agtaatgatggcttatgtacacttttatttaaagtgtgctgtttttccacatggccttgctttcatgttggcatctga

SEQ ID NO: 145986 - DNA, 82 bp, Homo sapiens
tatgtacacttttatttaaagtgtgctgtttttccacatggccttgctttcatgttggcatctgatgagtcatgcaaatata

SEQ ID NO: 145987 - DNA, 78 bp, Homo sapiens
acttttatttaaagtgtgctgtttttccacatggccttgctttcatgttggcatctgatgagtcatgcaaatataggg

SEQ ID NO: 145988 - DNA, 85 bp, Homo sapiens
tgtgctgtttttccacatggccttgctttcatgttggcatctgatgagtcatgcaaatatagggtggcacgggtgattcaaatga

SEQ ID NO: 145989 - DNA, 83 bp, Homo sapiens
cttgctttcatgttggcatctgatgagtcatgcaaatatagggtggcacgggtgattcaaatgacaggatgagtaaaactcag

SEQ ID NO: 145990 - DNA, 76 bp, Homo sapiens
atgcaaatatagggtggcacgggtgattcaaatgacaggatgagtaaaactcagttttggtcttcgtggccatgtg

SEQ ID NO: 145991 - DNA, 77 bp, Homo sapiens
atatagggtggcacgggtgattcaaatgacaggatgagtaaaactcagttttggtcttcgtggccatgtggcttgca

SEQ ID NO: 145992 - DNA, 76 bp, Homo sapiens
gggtgattcaaatgacaggatgagtaaaactcagttttggtcttcgtggccatgtggcttgcactgagacctttaa

SEQ ID NO: 145993 - DNA, 72 bp, Homo sapiens
atgagtaaaactcagttttggtcttcgtggccatgtggcttgcactgagacctttaactttgcttcctacct

SEQ ID NO: 145994 - DNA, 76 bp, Homo sapiens
atgtggcttgcactgagacctttaactttgcttcctacctttcagagaaggaagcaccaggtatgaattctctcag

SEQ ID NO: 145995 - DNA, 74 bp, Homo sapiens
ttgcactgagacctttaactttgcttcctacctttcagagaaggaagcaccaggtatgaattctctcagttctt

SEQ ID NO: 145996 - DNA, 74 bp, Homo sapiens
tttgcttcctacctttcagagaaggaagcaccaggtatgaattctctcagttctttctacctacagtgccaccc

SEQ ID NO: 145997 - DNA, 72 bp, Homo sapiens
tacctttcagagaaggaagcaccaggtatgaattctctcagttctttctacctacagtgccacccccgcccc

SEQ ID NO: 145998 - DNA, 74 bp, Homo sapiens
agaaggaagcaccaggtatgaattctctcagttctttctacctacagtgccacccccgcccccaaatcatagca

SEQ ID NO: 145999 - DNA, 75 bp, Homo sapiens
gtatgaattctctcagttctttctacctacagtgccacccccgcccccaaatcatagcagccaccatttgtctct

SEQ ID NO: 146000 - DNA, 73 bp, Homo sapiens
aattctctcagttctttctacctacagtgccacccccgcccccaaatcatagcagccaccatttgtctctttc

SEQ ID NO: 146001 - DNA, 74 bp, Homo sapiens
ttctttctacctacagtgccacccccgcccccaaatcatagcagccaccatttgtctctttctgtttaatctca

SEQ ID NO: 146002 - DNA, 74 bp, Homo sapiens
ccgcccccaaatcatagcagccaccatttgtctctttctgtttaatctcacagaaggaggtgttctcaactccc

SEQ ID NO: 146003 - DNA, 76 bp, Homo sapiens
aaatcatagcagccaccatttgtctctttctgtttaatctcacagaaggaggtgttctcaactcccccactctcaa

SEQ ID NO: 146004 - DNA, 72 bp, Homo sapiens
agccaccatttgtctctttctgtttaatctcacagaaggaggtgttctcaactcccccactctcaacctttg

SEQ ID NO: 146005 - DNA, 71 bp, Homo sapiens
tctctttctgtttaatctcacagaaggaggtgttctcaactcccccactctcaacctttggttagcttaaa

SEQ ID NO: 146006 - DNA, 69 bp, Homo sapiens
tgtttaatctcacagaaggaggtgttctcaactcccccactctcaacctttggttagcttaaacctttc

SEQ ID NO: 146007 - DNA, 66 bp, Homo sapiens
acagaaggaggtgttctcaactcccccactctcaacctttggttagcttaaacctttcccttatta

SEQ ID NO: 146008 - DNA, 71 bp, Homo sapiens
tgttctcaactcccccactctcaacctttggttagcttaaacctttcccttattactcagctctttcatga

SEQ ID NO: 146009 - DNA, 71 bp, Homo sapiens
actctcaacctttggttagcttaaacctttcccttattactcagctctttcatgatagtctatagttacat

SEQ ID NO: 146010 - DNA, 70 bp, Homo sapiens
ctttggttagcttaaacctttcccttattactcagctctttcatgatagtctatagttacatttaggcct

SEQ ID NO: 146011 - DNA, 71 bp, Homo sapiens
ttaaacctttcccttattactcagctctttcatgatagtctatagttacatttaggcctttcccaactgaa

SEQ ID NO: 146012 - DNA, 72 bp, Homo sapiens
agctctttcatgatagtctatagttacatttaggcctttcccaactgaaagagcaaaacaaacccttcttca

SEQ ID NO: 146013 - DNA, 71 bp, Homo sapiens
atgatagtctatagttacatttaggcctttcccaactgaaagagcaaaacaaacccttcttcactcttgtg

SEQ ID NO: 146014 - DNA, 71 bp, Homo sapiens
tatagttacatttaggcctttcccaactgaaagagcaaaacaaacccttcttcactcttgtgtcttctcta

SEQ ID NO: 146015 - DNA, 69 bp, Homo sapiens
atttaggcctttcccaactgaaagagcaaaacaaacccttcttcactcttgtgtcttctctaattacta

SEQ ID NO: 146016 - DNA, 70 bp, Homo sapiens
ttcccaactgaaagagcaaaacaaacccttcttcactcttgtgtcttctctaattactactttcttgttc

SEQ ID NO: 146017 - DNA, 70 bp, Homo sapiens
agcaaaacaaacccttcttcactcttgtgtcttctctaattactactttcttgttccctccacagcaaaa

SEQ ID NO: 146018 - DNA, 72 bp, Homo sapiens
acaaacccttcttcactcttgtgtcttctctaattactactttcttgttccctccacagcaaaagctctgga

SEQ ID NO: 146019 - DNA, 73 bp, Homo sapiens
actcttgtgtcttctctaattactactttcttgttccctccacagcaaaagctctggagacagaagtaggtaa

SEQ ID NO: 146020 - DNA, 73 bp, Homo sapiens
tcttctctaattactactttcttgttccctccacagcaaaagctctggagacagaagtaggtaaacactgttc

SEQ ID NO: 146021 - DNA, 73 bp, Homo sapiens
taattactactttcttgttccctccacagcaaaagctctggagacagaagtaggtaaacactgttcctgcttc

SEQ ID NO: 146022 - DNA, 73 bp, Homo sapiens
tttcttgttccctccacagcaaaagctctggagacagaagtaggtaaacactgttcctgcttcctctcctccc

SEQ ID NO: 146023 - DNA, 80 bp, Homo sapiens
ctcctcccctcccctctacttgcaacccattgcagcctgctctgtgccttcacgccactgcctctgccggcaggagccac

SEQ ID NO: 146024 - DNA, 83 bp, Homo sapiens
tcccctctacttgcaacccattgcagcctgctctgtgccttcacgccactgcctctgccggcaggagccactagtggactgta

SEQ ID NO: 146025 - DNA, 85 bp, Homo sapiens
ttgcaacccattgcagcctgctctgtgccttcacgccactgcctctgccggcaggagccactagtggactgtattggatgaattc

SEQ ID NO: 146026 - DNA, 81 bp, Homo sapiens
ctctgtgccttcacgccactgcctctgccggcaggagccactagtggactgtattggatgaattcgaggaatgctctttaa

SEQ ID NO: 146027 - DNA, 79 bp, Homo sapiens
ttcacgccactgcctctgccggcaggagccactagtggactgtattggatgaattcgaggaatgctctttaaggcctta

SEQ ID NO: 146028 - DNA, 80 bp, Homo sapiens
caggagccactagtggactgtattggatgaattcgaggaatgctctttaaggccttatcctacttgacatctctgtagca

SEQ ID NO: 146029 - DNA, 79 bp, Homo sapiens
actagtggactgtattggatgaattcgaggaatgctctttaaggccttatcctacttgacatctctgtagcatttgaca

SEQ ID NO: 146030 - DNA, 79 bp, Homo sapiens
actgtattggatgaattcgaggaatgctctttaaggccttatcctacttgacatctctgtagcatttgacacttgacca

SEQ ID NO: 146031 - DNA, 77 bp, Homo sapiens
aatgctctttaaggccttatcctacttgacatctctgtagcatttgacacttgaccaccatcaccttaaacactctc

SEQ ID NO: 146032 - DNA, 75 bp, Homo sapiens
tttaaggccttatcctacttgacatctctgtagcatttgacacttgaccaccatcaccttaaacactctcctccc

SEQ ID NO: 146033 - DNA, 75 bp, Homo sapiens
tacttgacatctctgtagcatttgacacttgaccaccatcaccttaaacactctcctcccctgttgtctgggttt

SEQ ID NO: 146034 - DNA, 67 bp, Homo sapiens
acttgaccaccatcaccttaaacactctcctcccctgttgtctgggttttcttctacctttttgtac

SEQ ID NO: 146035 - DNA, 67 bp, Homo sapiens
atcaccttaaacactctcctcccctgttgtctgggttttcttctacctttttgtacgtgccttaatc

SEQ ID NO: 146036 - DNA, 66 bp, Homo sapiens
aaacactctcctcccctgttgtctgggttttcttctacctttttgtacgtgccttaatctcctttg

SEQ ID NO: 146037 - DNA, 70 bp, Homo sapiens
ctgttgtctgggttttcttctacctttttgtacgtgccttaatctcctttggaggctgctgttcccactc

SEQ ID NO: 146038 - DNA, 70 bp, Homo sapiens
tgggttttcttctacctttttgtacgtgccttaatctcctttggaggctgctgttcccactcctcctcca

SEQ ID NO: 146039 - DNA, 73 bp, Homo sapiens
tcttctacctttttgtacgtgccttaatctcctttggaggctgctgttcccactcctcctccagggctctgtc

SEQ ID NO: 146040 - DNA, 74 bp, Homo sapiens
ttttgtacgtgccttaatctcctttggaggctgctgttcccactcctcctccagggctctgtcctcaaccatct

SEQ ID NO: 146041 - DNA, 77 bp, Homo sapiens
ccttaatctcctttggaggctgctgttcccactcctcctccagggctctgtcctcaaccatcttttctcattctgca

SEQ ID NO: 146042 - DNA, 77 bp, Homo sapiens
tttggaggctgctgttcccactcctcctccagggctctgtcctcaaccatcttttctcattctgcagcctttccctg

SEQ ID NO: 146043 - DNA, 76 bp, Homo sapiens
tgttcccactcctcctccagggctctgtcctcaaccatcttttctcattctgcagcctttccctggtgacctcatt

SEQ ID NO: 146044 - DNA, 77 bp, Homo sapiens
ctcctccagggctctgtcctcaaccatcttttctcattctgcagcctttccctggtgacctcatttgcacttaagat

SEQ ID NO: 146045 - DNA, 78 bp, Homo sapiens
gctctgtcctcaaccatcttttctcattctgcagcctttccctggtgacctcatttgcacttaagattcaactgccgt

SEQ ID NO: 146046 - DNA, 79 bp, Homo sapiens
tcaaccatcttttctcattctgcagcctttccctggtgacctcatttgcacttaagattcaactgccgttgctcacgaa

SEQ ID NO: 146047 - DNA, 80 bp, Homo sapiens
ttctcattctgcagcctttccctggtgacctcatttgcacttaagattcaactgccgttgctcacgaacaccagagtgat

SEQ ID NO: 146048 - DNA, 77 bp, Homo sapiens
attctgcagcctttccctggtgacctcatttgcacttaagattcaactgccgttgctcacgaacaccagagtgattt

SEQ ID NO: 146049 - DNA, 70 bp, Homo sapiens
ttaagattcaactgccgttgctcacgaacaccagagtgattttctagcctaaaactcttaaaacgtattt

SEQ ID NO: 146050 - DNA, 73 bp, Homo sapiens
ttcaactgccgttgctcacgaacaccagagtgattttctagcctaaaactcttaaaacgtattttgagatcta

SEQ ID NO: 146051 - DNA, 72 bp, Homo sapiens
ttgctcacgaacaccagagtgattttctagcctaaaactcttaaaacgtattttgagatctaggttctgtta

SEQ ID NO: 146052 - DNA, 69 bp, Homo sapiens
aacaccagagtgattttctagcctaaaactcttaaaacgtattttgagatctaggttctgttatccacc

SEQ ID NO: 146053 - DNA, 72 bp, Homo sapiens
ttaaaacgtattttgagatctaggttctgttatccacctgcccactggacttttctagtaggtgttgcacag

SEQ ID NO: 146054 - DNA, 77 bp, Homo sapiens
tattttgagatctaggttctgttatccacctgcccactggacttttctagtaggtgttgcacaggcatcttaattga

SEQ ID NO: 146055 - DNA, 74 bp, Homo sapiens
ttatccacctgcccactggacttttctagtaggtgttgcacaggcatcttaattgaacctgtctaaaatggatt

SEQ ID NO: 146056 - DNA, 71 bp, Homo sapiens
actggacttttctagtaggtgttgcacaggcatcttaattgaacctgtctaaaatggatttttttgtgccc

SEQ ID NO: 146057 - DNA, 69 bp, Homo sapiens
acttttctagtaggtgttgcacaggcatcttaattgaacctgtctaaaatggatttttttgtgcccccc

SEQ ID NO: 146058 - DNA, 75 bp, Homo sapiens
tgttgcacaggcatcttaattgaacctgtctaaaatggatttttttgtgcccccctctccctgtatcacttcaca

SEQ ID NO: 146059 - DNA, 73 bp, Homo sapiens
catcttaattgaacctgtctaaaatggatttttttgtgcccccctctccctgtatcacttcacacacagaatg

SEQ ID NO: 146060 - DNA, 73 bp, Homo sapiens
taattgaacctgtctaaaatggatttttttgtgcccccctctccctgtatcacttcacacacagaatgttctc

SEQ ID NO: 146061 - DNA, 73 bp, Homo sapiens
tgtctaaaatggatttttttgtgcccccctctccctgtatcacttcacacacagaatgttctccttcctcctg

SEQ ID NO: 146062 - DNA, 76 bp, Homo sapiens
tttttgtgcccccctctccctgtatcacttcacacacagaatgttctccttcctcctggtcatcagttctcaattc

SEQ ID NO: 146063 - DNA, 80 bp, Homo sapiens
tgtatcacttcacacacagaatgttctccttcctcctggtcatcagttctcaattcctttctgtcatatactccattgtt

SEQ ID NO: 146064 - DNA, 78 bp, Homo sapiens
ttcacacacagaatgttctccttcctcctggtcatcagttctcaattcctttctgtcatatactccattgttttgaaa

SEQ ID NO: 146065 - DNA, 80 bp, Homo sapiens
ttcctcctggtcatcagttctcaattcctttctgtcatatactccattgttttgaaagcagcttgatcctatggagatta

SEQ ID NO: 146066 - DNA, 78 bp, Homo sapiens
caattcctttctgtcatatactccattgttttgaaagcagcttgatcctatggagattactttataaacattcatagc

SEQ ID NO: 146067 - DNA, 76 bp, Homo sapiens
ttttgaaagcagcttgatcctatggagattactttataaacattcatagcttctccttttctctgtccctcattta

SEQ ID NO: 146068 - DNA, 75 bp, Homo sapiens
agcttgatcctatggagattactttataaacattcatagcttctccttttctctgtccctcatttagtatggatt

SEQ ID NO: 146069 - DNA, 72 bp, Homo sapiens
tggagattactttataaacattcatagcttctccttttctctgtccctcatttagtatggatttttaccgtc

SEQ ID NO: 146070 - DNA, 71 bp, Homo sapiens
ctttataaacattcatagcttctccttttctctgtccctcatttagtatggatttttaccgtctttcttga

SEQ ID NO: 146071 - DNA, 70 bp, Homo sapiens
aaacattcatagcttctccttttctctgtccctcatttagtatggatttttaccgtctttcttgaactgt

SEQ ID NO: 146072 - DNA, 68 bp, Homo sapiens
ctccttttctctgtccctcatttagtatggatttttaccgtctttcttgaactgttacaacttctttc

SEQ ID NO: 146073 - DNA, 69 bp, Homo sapiens
ttctctgtccctcatttagtatggatttttaccgtctttcttgaactgttacaacttctttctaacctc

SEQ ID NO: 146074 - DNA, 71 bp, Homo sapiens
ctcatttagtatggatttttaccgtctttcttgaactgttacaacttctttctaacctctcatcttgctgt

SEQ ID NO: 146075 - DNA, 71 bp, Homo sapiens
tatggatttttaccgtctttcttgaactgttacaacttctttctaacctctcatcttgctgttttcctgct

SEQ ID NO: 146076 - DNA, 82 bp, Homo sapiens
ttctaacctctcatcttgctgttttcctgcttctcagtatgccacattatttcacatgagtgatttgattaagtgaaaatca

SEQ ID NO: 146077 - DNA, 80 bp, Homo sapiens
ttcctgcttctcagtatgccacattatttcacatgagtgatttgattaagtgaaaatcagatcaagtcgtactttttcaa

SEQ ID NO: 146078 - DNA, 79 bp, Homo sapiens
ttctcagtatgccacattatttcacatgagtgatttgattaagtgaaaatcagatcaagtcgtactttttcaagatcct

SEQ ID NO: 146079 - DNA, 75 bp, Homo sapiens
aagtgaaaatcagatcaagtcgtactttttcaagatccttcagtacctctccatcaccttcaggacagaaagcca

SEQ ID NO: 146080 - DNA, 76 bp, Homo sapiens
agatcaagtcgtactttttcaagatccttcagtacctctccatcaccttcaggacagaaagccagatgtgtccatt

SEQ ID NO: 146081 - DNA, 75 bp, Homo sapiens
cgtactttttcaagatccttcagtacctctccatcaccttcaggacagaaagccagatgtgtccatttgtcttct

SEQ ID NO: 146082 - DNA, 77 bp, Homo sapiens
aagatccttcagtacctctccatcaccttcaggacagaaagccagatgtgtccatttgtcttcttgcctcttacctg

SEQ ID NO: 146083 - DNA, 79 bp, Homo sapiens
agtacctctccatcaccttcaggacagaaagccagatgtgtccatttgtcttcttgcctcttacctgtctctgcagcct

SEQ ID NO: 146084 - DNA, 80 bp, Homo sapiens
atcaccttcaggacagaaagccagatgtgtccatttgtcttcttgcctcttacctgtctctgcagccttgagttctggcc

SEQ ID NO: 146085 - DNA, 81 bp, Homo sapiens
agatgtgtccatttgtcttcttgcctcttacctgtctctgcagccttgagttctggccctgctgctggtactgccttgttc

SEQ ID NO: 146086 - DNA, 82 bp, Homo sapiens
gtccatttgtcttcttgcctcttacctgtctctgcagccttgagttctggccctgctgctggtactgccttgttccactgca

SEQ ID NO: 146087 - DNA, 81 bp, Homo sapiens
cttcttgcctcttacctgtctctgcagccttgagttctggccctgctgctggtactgccttgttccactgcagcccccaga

SEQ ID NO: 146088 - DNA, 82 bp, Homo sapiens
tacctgtctctgcagccttgagttctggccctgctgctggtactgccttgttccactgcagcccccagacccttatagatga

SEQ ID NO: 146089 - DNA, 79 bp, Homo sapiens
agccttgagttctggccctgctgctggtactgccttgttccactgcagcccccagacccttatagatgactttctgctg

SEQ ID NO: 146090 - DNA, 80 bp, Homo sapiens
ccctgctgctggtactgccttgttccactgcagcccccagacccttatagatgactttctgctgtgcaccccgctgccca

SEQ ID NO: 146091 - DNA, 78 bp, Homo sapiens
tgccttgttccactgcagcccccagacccttatagatgactttctgctgtgcaccccgctgcccaggcccgagtttca

SEQ ID NO: 146092 - DNA, 78 bp, Homo sapiens
ttccactgcagcccccagacccttatagatgactttctgctgtgcaccccgctgcccaggcccgagtttcagcacttc

SEQ ID NO: 146093 - DNA, 80 bp, Homo sapiens
ttatagatgactttctgctgtgcaccccgctgcccaggcccgagtttcagcacttctcccttggtatcatcctgctgctt

SEQ ID NO: 146094 - DNA, 76 bp, Homo sapiens
tgcaccccgctgcccaggcccgagtttcagcacttctcccttggtatcatcctgctgctttttctccaggtggtaa

SEQ ID NO: 146095 - DNA, 75 bp, Homo sapiens
tgcccaggcccgagtttcagcacttctcccttggtatcatcctgctgctttttctccaggtggtaaacattttga

SEQ ID NO: 146096 - DNA, 76 bp, Homo sapiens
gagtttcagcacttctcccttggtatcatcctgctgctttttctccaggtggtaaacattttgagggcagaagtca

SEQ ID NO: 146097 - DNA, 78 bp, Homo sapiens
ttggtatcatcctgctgctttttctccaggtggtaaacattttgagggcagaagtcaattgtgtctcatatgcttgtt

SEQ ID NO: 146098 - DNA, 77 bp, Homo sapiens
gtggtaaacattttgagggcagaagtcaattgtgtctcatatgcttgtttgtcctttgtgtttagcacaggtgagaa

SEQ ID NO: 146099 - DNA, 78 bp, Homo sapiens
ttttgagggcagaagtcaattgtgtctcatatgcttgtttgtcctttgtgtttagcacaggtgagaactggagccaaa

SEQ ID NO: 146100 - DNA, 75 bp, Homo sapiens
aagtcaattgtgtctcatatgcttgtttgtcctttgtgtttagcacaggtgagaactggagccaaatgggaactt

SEQ ID NO: 146101 - DNA, 76 bp, Homo sapiens
aattgtgtctcatatgcttgtttgtcctttgtgtttagcacaggtgagaactggagccaaatgggaactttgctac

SEQ ID NO: 146102 - DNA, 78 bp, Homo sapiens
atatgcttgtttgtcctttgtgtttagcacaggtgagaactggagccaaatgggaactttgctacgctgtgctcagct

SEQ ID NO: 146103 - DNA, 78 bp, Homo sapiens
tcctttgtgtttagcacaggtgagaactggagccaaatgggaactttgctacgctgtgctcagcttgaggatttctta

SEQ ID NO: 146104 - DNA, 78 bp, Homo sapiens
aggtgagaactggagccaaatgggaactttgctacgctgtgctcagcttgaggatttcttacccagctcactctggtc

SEQ ID NO: 146105 - DNA, 80 bp, Homo sapiens
gccaaatgggaactttgctacgctgtgctcagcttgaggatttcttacccagctcactctggtctggagtctgaaagata

SEQ ID NO: 146106 - DNA, 79 bp, Homo sapiens
aactttgctacgctgtgctcagcttgaggatttcttacccagctcactctggtctggagtctgaaagataatctcttaa

SEQ ID NO: 146107 - DNA, 77 bp, Homo sapiens
agcttgaggatttcttacccagctcactctggtctggagtctgaaagataatctcttaaatgcttggcttaacagag

SEQ ID NO: 146108 - DNA, 75 bp, Homo sapiens
atttcttacccagctcactctggtctggagtctgaaagataatctcttaaatgcttggcttaacagaggggtgaa

SEQ ID NO: 146109 - DNA, 75 bp, Homo sapiens
tggtctggagtctgaaagataatctcttaaatgcttggcttaacagaggggtgaagtactggactgaatttccta

SEQ ID NO: 146110 - DNA, 74 bp, Homo sapiens
agtctgaaagataatctcttaaatgcttggcttaacagaggggtgaagtactggactgaatttcctattcagga

SEQ ID NO: 146111 - DNA, 74 bp, Homo sapiens
ataatctcttaaatgcttggcttaacagaggggtgaagtactggactgaatttcctattcaggacacttgactg

SEQ ID NO: 146112 - DNA, 75 bp, Homo sapiens
taacagaggggtgaagtactggactgaatttcctattcaggacacttgactgggaaatgggtgcagtgttcaata

SEQ ID NO: 146113 - DNA, 73 bp, Homo sapiens
ggtgaagtactggactgaatttcctattcaggacacttgactgggaaatgggtgcagtgttcaataatgtttt

SEQ ID NO: 146114 - DNA, 75 bp, Homo sapiens
tggactgaatttcctattcaggacacttgactgggaaatgggtgcagtgttcaataatgtttttgagaaatcatt

SEQ ID NO: 146115 - DNA, 74 bp, Homo sapiens
aatttcctattcaggacacttgactgggaaatgggtgcagtgttcaataatgtttttgagaaatcatttcacca

SEQ ID NO: 146116 - DNA, 72 bp, Homo sapiens
acacttgactgggaaatgggtgcagtgttcaataatgtttttgagaaatcatttcaccattttctacctaag

SEQ ID NO: 146117 - DNA, 71 bp, Homo sapiens
ctgggaaatgggtgcagtgttcaataatgtttttgagaaatcatttcaccattttctacctaagtattaag

SEQ ID NO: 146118 - DNA, 72 bp, Homo sapiens
gtgcagtgttcaataatgtttttgagaaatcatttcaccattttctacctaagtattaagtaatttttggca

SEQ ID NO: 146119 - DNA, 70 bp, Homo sapiens
caataatgtttttgagaaatcatttcaccattttctacctaagtattaagtaatttttggcattcctaca

SEQ ID NO: 146120 - DNA, 69 bp, Homo sapiens
cattttctacctaagtattaagtaatttttggcattcctacattaaaaataaacagcctaatccattca

SEQ ID NO: 146121 - DNA, 68 bp, Homo sapiens
agtaatttttggcattcctacattaaaaataaacagcctaatccattcattaggaatttttagttgag

SEQ ID NO: 146122 - DNA, 70 bp, Homo sapiens
taaaaataaacagcctaatccattcattaggaatttttagttgagttccagcctcataattactgtactt

SEQ ID NO: 146123 - DNA, 74 bp, Homo sapiens
acagcctaatccattcattaggaatttttagttgagttccagcctcataattactgtacttttcagaattgagc

SEQ ID NO: 146124 - DNA, 75 bp, Homo sapiens
tccattcattaggaatttttagttgagttccagcctcataattactgtacttttcagaattgagcctggagatta

SEQ ID NO: 146125 - DNA, 74 bp, Homo sapiens
ggaatttttagttgagttccagcctcataattactgtacttttcagaattgagcctggagattaatcagattgt

SEQ ID NO: 146126 - DNA, 76 bp, Homo sapiens
ccagcctcataattactgtacttttcagaattgagcctggagattaatcagattgttttatgtgctataaaagttg

SEQ ID NO: 146127 - DNA, 76 bp, Homo sapiens
tactgtacttttcagaattgagcctggagattaatcagattgttttatgtgctataaaagttggaagttttatgca

SEQ ID NO: 146128 - DNA, 78 bp, Homo sapiens
cttttcagaattgagcctggagattaatcagattgttttatgtgctataaaagttggaagttttatgcatctgtctca

SEQ ID NO: 146129 - DNA, 78 bp, Homo sapiens
agcctggagattaatcagattgttttatgtgctataaaagttggaagttttatgcatctgtctcatatataggtgctt

SEQ ID NO: 146130 - DNA, 77 bp, Homo sapiens
ggagattaatcagattgttttatgtgctataaaagttggaagttttatgcatctgtctcatatataggtgctttctt

SEQ ID NO: 146131 - DNA, 76 bp, Homo sapiens
cagattgttttatgtgctataaaagttggaagttttatgcatctgtctcatatataggtgctttcttttgtattaa

SEQ ID NO: 146132 - DNA, 77 bp, Homo sapiens
tgtgctataaaagttggaagttttatgcatctgtctcatatataggtgctttcttttgtattaaataagacactgga

SEQ ID NO: 146133 - DNA, 76 bp, Homo sapiens
ttggaagttttatgcatctgtctcatatataggtgctttcttttgtattaaataagacactggatttcctttagca

SEQ ID NO: 146134 - DNA, 78 bp, Homo sapiens
gttttatgcatctgtctcatatataggtgctttcttttgtattaaataagacactggatttcctttagcatgtgtgtg

SEQ ID NO: 146135 - DNA, 72 bp, Homo sapiens
gtatatatacttcttaaaagtaatgcatataataaaactgctgttaatctagaaaaggatttgcaattttaa

SEQ ID NO: 146136 - DNA, 74 bp, Homo sapiens
tgcatataataaaactgctgttaatctagaaaaggatttgcaattttaaatattttgctattgaaggaatcact

SEQ ID NO: 146137 - DNA, 69 bp, Homo sapiens
taaaactgctgttaatctagaaaaggatttgcaattttaaatattttgctattgaaggaatcacttttt

SEQ ID NO: 146138 - DNA, 72 bp, Homo sapiens
taatctagaaaaggatttgcaattttaaatattttgctattgaaggaatcacttttttgggaatgagtcatc

SEQ ID NO: 146139 - DNA, 71 bp, Homo sapiens
aggatttgcaattttaaatattttgctattgaaggaatcacttttttgggaatgagtcatccaaatgggta

SEQ ID NO: 146140 - DNA, 71 bp, Homo sapiens
attttaaatattttgctattgaaggaatcacttttttgggaatgagtcatccaaatgggtagggcatacac

SEQ ID NO: 146141 - DNA, 74 bp, Homo sapiens
aatattttgctattgaaggaatcacttttttgggaatgagtcatccaaatgggtagggcatacactcttctaga

SEQ ID NO: 146142 - DNA, 73 bp, Homo sapiens
ttgaaggaatcacttttttgggaatgagtcatccaaatgggtagggcatacactcttctagaccacaacggta

SEQ ID NO: 146143 - DNA, 73 bp, Homo sapiens
aatcacttttttgggaatgagtcatccaaatgggtagggcatacactcttctagaccacaacggtatcattaa

SEQ ID NO: 146144 - DNA, 74 bp, Homo sapiens
aatgagtcatccaaatgggtagggcatacactcttctagaccacaacggtatcattaactggtatcctagtaac

SEQ ID NO: 146145 - DNA, 72 bp, Homo sapiens
atccaaatgggtagggcatacactcttctagaccacaacggtatcattaactggtatcctagtaacttaaga

SEQ ID NO: 146146 - DNA, 72 bp, Homo sapiens
tgggtagggcatacactcttctagaccacaacggtatcattaactggtatcctagtaacttaagaattattg

SEQ ID NO: 146147 - DNA, 72 bp, Homo sapiens
atacactcttctagaccacaacggtatcattaactggtatcctagtaacttaagaattattgggccaggcac

SEQ ID NO: 146148 - DNA, 68 bp, Homo sapiens
acaacaaaaaaacggaattattgaccctgaaattgcctgactggcaacctgggcttaattttctagta

SEQ ID NO: 146149 - DNA, 69 bp, Homo sapiens
aaaaacggaattattgaccctgaaattgcctgactggcaacctgggcttaattttctagtagattaatg

SEQ ID NO: 146150 - DNA, 73 bp, Homo sapiens
attattgaccctgaaattgcctgactggcaacctgggcttaattttctagtagattaatggtcttgcactaaa

SEQ ID NO: 146151 - DNA, 70 bp, Homo sapiens
aaattgcctgactggcaacctgggcttaattttctagtagattaatggtcttgcactaaaggataaaacc

SEQ ID NO: 146152 - DNA, 68 bp, Homo sapiens
actggcaacctgggcttaattttctagtagattaatggtcttgcactaaaggataaaaccggtaccga

SEQ ID NO: 146153 - DNA, 66 bp, Homo sapiens
gggcttaattttctagtagattaatggtcttgcactaaaggataaaaccggtaccgaggtctttta

SEQ ID NO: 146154 - DNA, 66 bp, Homo sapiens
aattttctagtagattaatggtcttgcactaaaggataaaaccggtaccgaggtcttttatctccc

SEQ ID NO: 146155 - DNA, 71 bp, Homo sapiens
tgcactaaaggataaaaccggtaccgaggtcttttatctcccttatattcgctcaggattctagtgaacta

SEQ ID NO: 146156 - DNA, 68 bp, Homo sapiens
taaaggataaaaccggtaccgaggtcttttatctcccttatattcgctcaggattctagtgaactagt

SEQ ID NO: 146157 - DNA, 71 bp, Homo sapiens
gtaccgaggtcttttatctcccttatattcgctcaggattctagtgaactagttgctaagacaagggaaaa

SEQ ID NO: 146158 - DNA, 72 bp, Homo sapiens
cttttatctcccttatattcgctcaggattctagtgaactagttgctaagacaagggaaaacactggtctgt

SEQ ID NO: 146159 - DNA, 75 bp, Homo sapiens
atctcccttatattcgctcaggattctagtgaactagttgctaagacaagggaaaacactggtctgttgttctga

SEQ ID NO: 146160 - DNA, 75 bp, Homo sapiens
tattcgctcaggattctagtgaactagttgctaagacaagggaaaacactggtctgttgttctgaacctaattga

SEQ ID NO: 146161 - DNA, 71 bp, Homo sapiens
attctagtgaactagttgctaagacaagggaaaacactggtctgttgttctgaacctaattgagtctttta

SEQ ID NO: 146162 - DNA, 71 bp, Homo sapiens
gaactagttgctaagacaagggaaaacactggtctgttgttctgaacctaattgagtcttttattatgtta

SEQ ID NO: 146163 - DNA, 73 bp, Homo sapiens
taagacaagggaaaacactggtctgttgttctgaacctaattgagtcttttattatgttatgactcacctgta

SEQ ID NO: 146164 - DNA, 73 bp, Homo sapiens
ggaaaacactggtctgttgttctgaacctaattgagtcttttattatgttatgactcacctgtagttcagatt

SEQ ID NO: 146165 - DNA, 75 bp, Homo sapiens
ggtctgttgttctgaacctaattgagtcttttattatgttatgactcacctgtagttcagatttatttcattcaa

SEQ ID NO: 146166 - DNA, 76 bp, Homo sapiens
tctgaacctaattgagtcttttattatgttatgactcacctgtagttcagatttatttcattcaagtcatgtaaaa

SEQ ID NO: 146167 - DNA, 75 bp, Homo sapiens
gtcttttattatgttatgactcacctgtagttcagatttatttcattcaagtcatgtaaaataactacactgtgg

SEQ ID NO: 146168 - DNA, 75 bp, Homo sapiens
atgttatgactcacctgtagttcagatttatttcattcaagtcatgtaaaataactacactgtggtttgttttgc

SEQ ID NO: 146169 - DNA, 74 bp, Homo sapiens
atgactcacctgtagttcagatttatttcattcaagtcatgtaaaataactacactgtggtttgttttgcttac

SEQ ID NO: 146170 - DNA, 71 bp, Homo sapiens
gttcagatttatttcattcaagtcatgtaaaataactacactgtggtttgttttgcttacttggttcgtgt

SEQ ID NO: 146171 - DNA, 74 bp, Homo sapiens
aagtcatgtaaaataactacactgtggtttgttttgcttacttggttcgtgtttctagtgatctgtcaggctga

SEQ ID NO: 146172 - DNA, 74 bp, Homo sapiens
aaaataactacactgtggtttgttttgcttacttggttcgtgtttctagtgatctgtcaggctgagtatgccca

SEQ ID NO: 146173 - DNA, 75 bp, Homo sapiens
actgtggtttgttttgcttacttggttcgtgtttctagtgatctgtcaggctgagtatgcccatccgctaaagta

SEQ ID NO: 146174 - DNA, 78 bp, Homo sapiens
ttttgcttacttggttcgtgtttctagtgatctgtcaggctgagtatgcccatccgctaaagtatgcccatggctttg

SEQ ID NO: 146175 - DNA, 87 bp, Homo sapiens
atctgtcaggctgagtatgcccatccgctaaagtatgcccatggctttggcaggagcttgtgcagcagagaggagaccacagcagta

SEQ ID NO: 146176 - DNA, 83 bp, Homo sapiens
tgagtatgcccatccgctaaagtatgcccatggctttggcaggagcttgtgcagcagagaggagaccacagcagtaaagggaa

SEQ ID NO: 146177 - DNA, 83 bp, Homo sapiens
taaagtatgcccatggctttggcaggagcttgtgcagcagagaggagaccacagcagtaaagggaagaggctgcctcattcca

SEQ ID NO: 146178 - DNA, 82 bp, Homo sapiens
atggctttggcaggagcttgtgcagcagagaggagaccacagcagtaaagggaagaggctgcctcattccatggcccctcca

SEQ ID NO: 146179 - DNA, 81 bp, Homo sapiens
aggagcttgtgcagcagagaggagaccacagcagtaaagggaagaggctgcctcattccatggcccctccaggctgaggac

SEQ ID NO: 146180 - DNA, 80 bp, Homo sapiens
cagcagagaggagaccacagcagtaaagggaagaggctgcctcattccatggcccctccaggctgaggacctattcagaa

SEQ ID NO: 146181 - DNA, 80 bp, Homo sapiens
gagaccacagcagtaaagggaagaggctgcctcattccatggcccctccaggctgaggacctattcagaatctctgtatg

SEQ ID NO: 146182 - DNA, 78 bp, Homo sapiens
cagtaaagggaagaggctgcctcattccatggcccctccaggctgaggacctattcagaatctctgtatggaaactga

SEQ ID NO: 146183 - DNA, 80 bp, Homo sapiens
aagaggctgcctcattccatggcccctccaggctgaggacctattcagaatctctgtatggaaactgaagatatccatag

SEQ ID NO: 146184 - DNA, 78 bp, Homo sapiens
ctcattccatggcccctccaggctgaggacctattcagaatctctgtatggaaactgaagatatccatagtaccttaa

SEQ ID NO: 146185 - DNA, 75 bp, Homo sapiens
atggcccctccaggctgaggacctattcagaatctctgtatggaaactgaagatatccatagtaccttaaactgg

SEQ ID NO: 146186 - DNA, 77 bp, Homo sapiens
aggctgaggacctattcagaatctctgtatggaaactgaagatatccatagtaccttaaactgggccatgtttagca

SEQ ID NO: 146187 - DNA, 77 bp, Homo sapiens
ctattcagaatctctgtatggaaactgaagatatccatagtaccttaaactgggccatgtttagcacaacaggagat

SEQ ID NO: 146188 - DNA, 76 bp, Homo sapiens
agaatctctgtatggaaactgaagatatccatagtaccttaaactgggccatgtttagcacaacaggagattcttc

SEQ ID NO: 146189 - DNA, 74 bp, Homo sapiens
tatggaaactgaagatatccatagtaccttaaactgggccatgtttagcacaacaggagattcttctcttaaaa

SEQ ID NO: 146190 - DNA, 77 bp, Homo sapiens
atatccatagtaccttaaactgggccatgtttagcacaacaggagattcttctcttaaaaatgaatgcatctctcaa

SEQ ID NO: 146191 - DNA, 77 bp, Homo sapiens
taaactgggccatgtttagcacaacaggagattcttctcttaaaaatgaatgcatctctcaatctcttactcccttg

SEQ ID NO: 146192 - DNA, 76 bp, Homo sapiens
atgtttagcacaacaggagattcttctcttaaaaatgaatgcatctctcaatctcttactcccttgttctcccact

SEQ ID NO: 146193 - DNA, 77 bp, Homo sapiens
acaacaggagattcttctcttaaaaatgaatgcatctctcaatctcttactcccttgttctcccacttgtgagagaa

SEQ ID NO: 146194 - DNA, 76 bp, Homo sapiens
ttctcttaaaaatgaatgcatctctcaatctcttactcccttgttctcccacttgtgagagaaggaagcattaaaa

SEQ ID NO: 146195 - DNA, 73 bp, Homo sapiens
atctctcaatctcttactcccttgttctcccacttgtgagagaaggaagcattaaaaccaacactggggcgtg

SEQ ID NO: 146196 - DNA, 72 bp, Homo sapiens
aatctcttactcccttgttctcccacttgtgagagaaggaagcattaaaaccaacactggggcgtggctgcc

SEQ ID NO: 146197 - DNA, 77 bp, Homo sapiens
tgttctcccacttgtgagagaaggaagcattaaaaccaacactggggcgtggctgcccacagagcgtcagagactgt

SEQ ID NO: 146198 - DNA, 76 bp, Homo sapiens
cttgtgagagaaggaagcattaaaaccaacactggggcgtggctgcccacagagcgtcagagactgttatattaat

SEQ ID NO: 146199 - DNA, 74 bp, Homo sapiens
aaggaagcattaaaaccaacactggggcgtggctgcccacagagcgtcagagactgttatattaatttagttgc

SEQ ID NO: 146200 - DNA, 75 bp, Homo sapiens
attaaaaccaacactggggcgtggctgcccacagagcgtcagagactgttatattaatttagttgccaacatcta

SEQ ID NO: 146201 - DNA, 74 bp, Homo sapiens
aacactggggcgtggctgcccacagagcgtcagagactgttatattaatttagttgccaacatctaaaaattag

SEQ ID NO: 146202 - DNA, 77 bp, Homo sapiens
tggctgcccacagagcgtcagagactgttatattaatttagttgccaacatctaaaaattagtaccttcacattgaa

SEQ ID NO: 146203 - DNA, 73 bp, Homo sapiens
gtcagagactgttatattaatttagttgccaacatctaaaaattagtaccttcacattgaaatctggatttta

SEQ ID NO: 146204 - DNA, 68 bp, Homo sapiens
gttatattaatttagttgccaacatctaaaaattagtaccttcacattgaaatctggattttattttt

SEQ ID NO: 146205 - DNA, 69 bp, Homo sapiens
ttgccaacatctaaaaattagtaccttcacattgaaatctggattttattttttgtgttaaaaatggga

SEQ ID NO: 146206 - DNA, 67 bp, Homo sapiens
aacatctaaaaattagtaccttcacattgaaatctggattttattttttgtgttaaaaatgggaaga

SEQ ID NO: 146207 - DNA, 72 bp, Homo sapiens
ggattttattttttgtgttaaaaatgggaagaattggcaacatacagtcttacagcgcaatcctgttaggca

SEQ ID NO: 146208 - DNA, 79 bp, Homo sapiens
aaaatgggaagaattggcaacatacagtcttacagcgcaatcctgttaggcagggtgcatgtgctgtcttgtcccagac

SEQ ID NO: 146209 - DNA, 79 bp, Homo sapiens
aagaattggcaacatacagtcttacagcgcaatcctgttaggcagggtgcatgtgctgtcttgtcccagacctaactag

SEQ ID NO: 146210 - DNA, 79 bp, Homo sapiens
aacatacagtcttacagcgcaatcctgttaggcagggtgcatgtgctgtcttgtcccagacctaactaggcccttgata

SEQ ID NO: 146211 - DNA, 79 bp, Homo sapiens
atcctgttaggcagggtgcatgtgctgtcttgtcccagacctaactaggcccttgatatcacctgcttgatccctgtaa

SEQ ID NO: 146212 - DNA, 78 bp, Homo sapiens
cagggtgcatgtgctgtcttgtcccagacctaactaggcccttgatatcacctgcttgatccctgtaactgttaatgt

SEQ ID NO: 146213 - DNA, 77 bp, Homo sapiens
atgtgctgtcttgtcccagacctaactaggcccttgatatcacctgcttgatccctgtaactgttaatgttctctcc

SEQ ID NO: 146214 - DNA, 76 bp, Homo sapiens
tgtcccagacctaactaggcccttgatatcacctgcttgatccctgtaactgttaatgttctctccgtcaattcaa

SEQ ID NO: 146215 - DNA, 75 bp, Homo sapiens
agacctaactaggcccttgatatcacctgcttgatccctgtaactgttaatgttctctccgtcaattcaagcatt

SEQ ID NO: 146216 - DNA, 79 bp, Homo sapiens
cttgatatcacctgcttgatccctgtaactgttaatgttctctccgtcaattcaagcatttctttatctgtatgattat

SEQ ID NO: 146217 - DNA, 80 bp, Homo sapiens
tatcacctgcttgatccctgtaactgttaatgttctctccgtcaattcaagcatttctttatctgtatgattattcctca

SEQ ID NO: 146218 - DNA, 81 bp, Homo sapiens
aattcaagcatttctttatctgtatgattattcctcactttgagcagacccaagacatgagaatccagacatgcaaaagac

SEQ ID NO: 146219 - DNA, 81 bp, Homo sapiens
ttctttatctgtatgattattcctcactttgagcagacccaagacatgagaatccagacatgcaaaagacctatcttttca

SEQ ID NO: 146220 - DNA, 79 bp, Homo sapiens
tatgattattcctcactttgagcagacccaagacatgagaatccagacatgcaaaagacctatcttttcagtaaggtaa

SEQ ID NO: 146221 - DNA, 79 bp, Homo sapiens
ttattcctcactttgagcagacccaagacatgagaatccagacatgcaaaagacctatcttttcagtaaggtaatgtca

SEQ ID NO: 146222 - DNA, 80 bp, Homo sapiens
agcagacccaagacatgagaatccagacatgcaaaagacctatcttttcagtaaggtaatgtcatcatgaaatgtcctta

SEQ ID NO: 146223 - DNA, 77 bp, Homo sapiens
ccaagacatgagaatccagacatgcaaaagacctatcttttcagtaaggtaatgtcatcatgaaatgtccttaaaaa

SEQ ID NO: 146224 - DNA, 76 bp, Homo sapiens
gagaatccagacatgcaaaagacctatcttttcagtaaggtaatgtcatcatgaaatgtccttaaaaaaatgtgat

SEQ ID NO: 146225 - DNA, 77 bp, Homo sapiens
gacatgcaaaagacctatcttttcagtaaggtaatgtcatcatgaaatgtccttaaaaaaatgtgattgatttctca

SEQ ID NO: 146226 - DNA, 72 bp, Homo sapiens
agacctatcttttcagtaaggtaatgtcatcatgaaatgtccttaaaaaaatgtgattgatttctcaaactt

SEQ ID NO: 146227 - DNA, 72 bp, Homo sapiens
tttcagtaaggtaatgtcatcatgaaatgtccttaaaaaaatgtgattgatttctcaaacttttgaaaggaa

SEQ ID NO: 146228 - DNA, 72 bp, Homo sapiens
tgtcatcatgaaatgtccttaaaaaaatgtgattgatttctcaaacttttgaaaggaattaggtaaagtaga

SEQ ID NO: 146229 - DNA, 69 bp, Homo sapiens
catgaaatgtccttaaaaaaatgtgattgatttctcaaacttttgaaaggaattaggtaaagtagaata

SEQ ID NO: 146230 - DNA, 65 bp, Homo sapiens
aaaaaatgtgattgatttctcaaacttttgaaaggaattaggtaaagtagaataaactttgcttt

SEQ ID NO: 146231 - DNA, 65 bp, Homo sapiens
gattgatttctcaaacttttgaaaggaattaggtaaagtagaataaactttgctttttttgaccc

SEQ ID NO: 146232 - DNA, 65 bp, Homo sapiens
ctcaaacttttgaaaggaattaggtaaagtagaataaactttgctttttttgaccctctatccaa

SEQ ID NO: 146233 - DNA, 67 bp, Homo sapiens
gaaaggaattaggtaaagtagaataaactttgctttttttgaccctctatccaaacatagagatgtt

SEQ ID NO: 146234 - DNA, 68 bp, Homo sapiens
ggtaaagtagaataaactttgctttttttgaccctctatccaaacatagagatgttttcctacaagtc

SEQ ID NO: 146235 - DNA, 75 bp, Homo sapiens
tgctttttttgaccctctatccaaacatagagatgttttcctacaagtctttaaatgtatgattcaggcattcat

SEQ ID NO: 146236 - DNA, 66 bp, Homo sapiens
tcattcattcatacggaaaacaaaatactaacaaggttagtctaattaacttttttctttttagac

SEQ ID NO: 146237 - DNA, 63 bp, Homo sapiens
caaaatactaacaaggttagtctaattaacttttttctttttagacggctgttcccaaaactg

SEQ ID NO: 146238 - DNA, 66 bp, Homo sapiens
caaggttagtctaattaacttttttctttttagacggctgttcccaaaactgtggaacatggattc

SEQ ID NO: 146239 - DNA, 67 bp, Homo sapiens
gtctaattaacttttttctttttagacggctgttcccaaaactgtggaacatggattcttatcctcc

SEQ ID NO: 146240 - DNA, 66 bp, Homo sapiens
tttttctttttagacggctgttcccaaaactgtggaacatggattcttatcctccttgttttagtt

SEQ ID NO: 146241 - DNA, 68 bp, Homo sapiens
tttttagacggctgttcccaaaactgtggaacatggattcttatcctccttgttttagttttcctgta

SEQ ID NO: 146242 - DNA, 73 bp, Homo sapiens
ggctgttcccaaaactgtggaacatggattcttatcctccttgttttagttttcctgtatgagtgatgagaaa

SEQ ID NO: 146243 - DNA, 72 bp, Homo sapiens
ctgttcccaaaactgtggaacatggattcttatcctccttgttttagttttcctgtatgagtgatgagaaaa

SEQ ID NO: 146244 - DNA, 73 bp, Homo sapiens
ccaaaactgtggaacatggattcttatcctccttgttttagttttcctgtatgagtgatgagaaaatggataa

SEQ ID NO: 146245 - DNA, 74 bp, Homo sapiens
aactgtggaacatggattcttatcctccttgttttagttttcctgtatgagtgatgagaaaatggataattatc

SEQ ID NO: 146246 - DNA, 75 bp, Homo sapiens
tgtggaacatggattcttatcctccttgttttagttttcctgtatgagtgatgagaaaatggataattatcttag

SEQ ID NO: 146247 - DNA, 76 bp, Homo sapiens
ggattcttatcctccttgttttagttttcctgtatgagtgatgagaaaatggataattatcttagtctagtgatgc

SEQ ID NO: 146248 - DNA, 78 bp, Homo sapiens
ttatcctccttgttttagttttcctgtatgagtgatgagaaaatggataattatcttagtctagtgatgctgccataa

SEQ ID NO: 146249 - DNA, 77 bp, Homo sapiens
cctccttgttttagttttcctgtatgagtgatgagaaaatggataattatcttagtctagtgatgctgccataacaa

SEQ ID NO: 146250 - DNA, 78 bp, Homo sapiens
tgtatgagtgatgagaaaatggataattatcttagtctagtgatgctgccataacaaaagaccttagactgggtaatt

SEQ ID NO: 146251 - DNA, 80 bp, Homo sapiens
ccaagatcaaggtgctaacagattgagtgtctgataaggacttgctttctgcctccaagatggtgtatcttgctacgtcc

SEQ ID NO: 146252 - DNA, 82 bp, Homo sapiens
atcaaggtgctaacagattgagtgtctgataaggacttgctttctgcctccaagatggtgtatcttgctacgtcctcatgtg

SEQ ID NO: 146253 - DNA, 84 bp, Homo sapiens
taacagattgagtgtctgataaggacttgctttctgcctccaagatggtgtatcttgctacgtcctcatgtggcagaagagatg

SEQ ID NO: 146254 - DNA, 82 bp, Homo sapiens
agtgtctgataaggacttgctttctgcctccaagatggtgtatcttgctacgtcctcatgtggcagaagagatggaagagac

SEQ ID NO: 146255 - DNA, 81 bp, Homo sapiens
acttgctttctgcctccaagatggtgtatcttgctacgtcctcatgtggcagaagagatggaagagacttgctccctcaaa

SEQ ID NO: 146256 - DNA, 79 bp, Homo sapiens
tgcctccaagatggtgtatcttgctacgtcctcatgtggcagaagagatggaagagacttgctccctcaaaccccttta

SEQ ID NO: 146257 - DNA, 77 bp, Homo sapiens
aagatggtgtatcttgctacgtcctcatgtggcagaagagatggaagagacttgctccctcaaacccctttatacag

SEQ ID NO: 146258 - DNA, 79 bp, Homo sapiens
cgtcctcatgtggcagaagagatggaagagacttgctccctcaaacccctttatacaggcactgatcccatccatgagg

SEQ ID NO: 146259 - DNA, 79 bp, Homo sapiens
atggaagagacttgctccctcaaacccctttatacaggcactgatcccatccatgagggcagcgagccctcatgaccta

SEQ ID NO: 146260 - DNA, 77 bp, Homo sapiens
tcaaacccctttatacaggcactgatcccatccatgagggcagcgagccctcatgacctaagcacctcccggtagcc

SEQ ID NO: 146261 - DNA, 80 bp, Homo sapiens
ttatacaggcactgatcccatccatgagggcagcgagccctcatgacctaagcacctcccggtagccctgcctcttaata

SEQ ID NO: 146262 - DNA, 77 bp, Homo sapiens
atcccatccatgagggcagcgagccctcatgacctaagcacctcccggtagccctgcctcttaatattatcaccttg

SEQ ID NO: 146263 - DNA, 75 bp, Homo sapiens
atgagggcagcgagccctcatgacctaagcacctcccggtagccctgcctcttaatattatcaccttgggattta

SEQ ID NO: 146264 - DNA, 72 bp, Homo sapiens
agccctcatgacctaagcacctcccggtagccctgcctcttaatattatcaccttgggatttaagtccaaca

SEQ ID NO: 146265 - DNA, 69 bp, Homo sapiens
acctcccggtagccctgcctcttaatattatcaccttgggatttaagtccaacataggaactttggaga

SEQ ID NO: 146266 - DNA, 74 bp, Homo sapiens
ggtagccctgcctcttaatattatcaccttgggatttaagtccaacataggaactttggagagacacattcaga

SEQ ID NO: 146267 - DNA, 75 bp, Homo sapiens
ttaatattatcaccttgggatttaagtccaacataggaactttggagagacacattcagaccacagcaggagtta

SEQ ID NO: 146268 - DNA, 74 bp, Homo sapiens
accttgggatttaagtccaacataggaactttggagagacacattcagaccacagcaggagttatcgatgcttt

SEQ ID NO: 146269 - DNA, 77 bp, Homo sapiens
atttaagtccaacataggaactttggagagacacattcagaccacagcaggagttatcgatgcttttttcagctgta

SEQ ID NO: 146270 - DNA, 72 bp, Homo sapiens
cagaccacagcaggagttatcgatgcttttttcagctgtaaaatatatgttttttttccaaaagagtttgaa

SEQ ID NO: 146271 - DNA, 72 bp, Homo sapiens
gcaggagttatcgatgcttttttcagctgtaaaatatatgttttttttccaaaagagtttgaattatagcac

SEQ ID NO: 146272 - DNA, 70 bp, Homo sapiens
tcgatgcttttttcagctgtaaaatatatgttttttttccaaaagagtttgaattatagcacttaaatgg

SEQ ID NO: 146273 - DNA, 71 bp, Homo sapiens
ttcagctgtaaaatatatgttttttttccaaaagagtttgaattatagcacttaaatggtggtgctgttta

SEQ ID NO: 146274 - DNA, 69 bp, Homo sapiens
aaatatatgttttttttccaaaagagtttgaattatagcacttaaatggtggtgctgtttacaatacca

SEQ ID NO: 146275 - DNA, 71 bp, Homo sapiens
tttttttccaaaagagtttgaattatagcacttaaatggtggtgctgtttacaataccaagtccaatagca

SEQ ID NO: 146276 - DNA, 73 bp, Homo sapiens
ccaaaagagtttgaattatagcacttaaatggtggtgctgtttacaataccaagtccaatagcatatccttta

SEQ ID NO: 146277 - DNA, 72 bp, Homo sapiens
gtttgaattatagcacttaaatggtggtgctgtttacaataccaagtccaatagcatatcctttaatacctt

SEQ ID NO: 146278 - DNA, 71 bp, Homo sapiens
tagcacttaaatggtggtgctgtttacaataccaagtccaatagcatatcctttaataccttttattttaa

SEQ ID NO: 146279 - DNA, 68 bp, Homo sapiens
tacaataccaagtccaatagcatatcctttaataccttttattttaaattacttatttttatagccag

SEQ ID NO: 146280 - DNA, 68 bp, Homo sapiens
gtccaatagcatatcctttaataccttttattttaaattacttatttttatagccagtaataggaagc

SEQ ID NO: 146281 - DNA, 66 bp, Homo sapiens
gcatatcctttaataccttttattttaaattacttatttttatagccagtaataggaagcctgttt

SEQ ID NO: 146282 - DNA, 67 bp, Homo sapiens
ataccttttattttaaattacttatttttatagccagtaataggaagcctgttttaaacattcatca

SEQ ID NO: 146283 - DNA, 69 bp, Homo sapiens
ttttaaattacttatttttatagccagtaataggaagcctgttttaaacattcatcagcatacaaaagt

SEQ ID NO: 146284 - DNA, 70 bp, Homo sapiens
cttatttttatagccagtaataggaagcctgttttaaacattcatcagcatacaaaagtttgtttctttc

SEQ ID NO: 146285 - DNA, 72 bp, Homo sapiens
gccagtaataggaagcctgttttaaacattcatcagcatacaaaagtttgtttctttcttttgattttagca

SEQ ID NO: 146286 - DNA, 71 bp, Homo sapiens
gtaataggaagcctgttttaaacattcatcagcatacaaaagtttgtttctttcttttgattttagcaata

SEQ ID NO: 146287 - DNA, 71 bp, Homo sapiens
taggaagcctgttttaaacattcatcagcatacaaaagtttgtttctttcttttgattttagcaatattaa

SEQ ID NO: 146288 - DNA, 74 bp, Homo sapiens
taaacattcatcagcatacaaaagtttgtttctttcttttgattttagcaatattaatcacttagttagataga

SEQ ID NO: 146289 - DNA, 72 bp, Homo sapiens
cagcatacaaaagtttgtttctttcttttgattttagcaatattaatcacttagttagatagaaaactcatg

SEQ ID NO: 146290 - DNA, 71 bp, Homo sapiens
aagtttgtttctttcttttgattttagcaatattaatcacttagttagatagaaaactcatgtgttctgta

SEQ ID NO: 146291 - DNA, 72 bp, Homo sapiens
ctttcttttgattttagcaatattaatcacttagttagatagaaaactcatgtgttctgtagggtacaggtg

SEQ ID NO: 146292 - DNA, 72 bp, Homo sapiens
gcaatattaatcacttagttagatagaaaactcatgtgttctgtagggtacaggtgggtacttatttataac

SEQ ID NO: 146293 - DNA, 70 bp, Homo sapiens
acttagttagatagaaaactcatgtgttctgtagggtacaggtgggtacttatttataactagtggtgaa

SEQ ID NO: 146294 - DNA, 72 bp, Homo sapiens
agatagaaaactcatgtgttctgtagggtacaggtgggtacttatttataactagtggtgaataagtatata

SEQ ID NO: 146295 - DNA, 75 bp, Homo sapiens
ctcatgtgttctgtagggtacaggtgggtacttatttataactagtggtgaataagtatataatacagcatgtta

SEQ ID NO: 146296 - DNA, 73 bp, Homo sapiens
agggtacaggtgggtacttatttataactagtggtgaataagtatataatacagcatgttattcattggatgg

SEQ ID NO: 146297 - DNA, 74 bp, Homo sapiens
caggtgggtacttatttataactagtggtgaataagtatataatacagcatgttattcattggatggtaaagac

SEQ ID NO: 146298 - DNA, 75 bp, Homo sapiens
aactagtggtgaataagtatataatacagcatgttattcattggatggtaaagactggatgttgttggaaggaag

SEQ ID NO: 146299 - DNA, 72 bp, Homo sapiens
acagcatgttattcattggatggtaaagactggatgttgttggaaggaaggaagatatattttaaggttttg

SEQ ID NO: 146300 - DNA, 69 bp, Homo sapiens
atgttattcattggatggtaaagactggatgttgttggaaggaaggaagatatattttaaggttttgtt

SEQ ID NO: 146301 - DNA, 67 bp, Homo sapiens
ttggatggtaaagactggatgttgttggaaggaaggaagatatattttaaggttttgtttttggaaa

SEQ ID NO: 146302 - DNA, 69 bp, Homo sapiens
gactggatgttgttggaaggaaggaagatatattttaaggttttgtttttggaaataattagatgaggc

SEQ ID NO: 146303 - DNA, 67 bp, Homo sapiens
gttggaaggaaggaagatatattttaaggttttgtttttggaaataattagatgaggcttttaggca

SEQ ID NO: 146304 - DNA, 69 bp, Homo sapiens
gaagatatattttaaggttttgtttttggaaataattagatgaggcttttaggcattatatataggtag

SEQ ID NO: 146305 - DNA, 67 bp, Homo sapiens
tttaaggttttgtttttggaaataattagatgaggcttttaggcattatatataggtagtggttaaa

SEQ ID NO: 146306 - DNA, 72 bp, Homo sapiens
tgtttttggaaataattagatgaggcttttaggcattatatataggtagtggttaaaagcatggatttggga

SEQ ID NO: 146307 - DNA, 72 bp, Homo sapiens
ggaaataattagatgaggcttttaggcattatatataggtagtggttaaaagcatggatttgggattaagga

SEQ ID NO: 146308 - DNA, 69 bp, Homo sapiens
cttttaggcattatatataggtagtggttaaaagcatggatttgggattaaggaagacttgggtttgaa

SEQ ID NO: 146309 - DNA, 67 bp, Homo sapiens
tataggtagtggttaaaagcatggatttgggattaaggaagacttgggtttgaatcttgtttttacc

SEQ ID NO: 146310 - DNA, 68 bp, Homo sapiens
tagtggttaaaagcatggatttgggattaaggaagacttgggtttgaatcttgtttttaccttctcga

SEQ ID NO: 146311 - DNA, 67 bp, Homo sapiens
atggatttgggattaaggaagacttgggtttgaatcttgtttttaccttctcgaggccgttataaga

SEQ ID NO: 146312 - DNA, 66 bp, Homo sapiens
ggattaaggaagacttgggtttgaatcttgtttttaccttctcgaggccgttataagacaagaaaa

SEQ ID NO: 146313 - DNA, 69 bp, Homo sapiens
tgaatcttgtttttaccttctcgaggccgttataagacaagaaaactacttaacctgttcaagtctcaa

SEQ ID NO: 146314 - DNA, 66 bp, Homo sapiens
cttgtttttaccttctcgaggccgttataagacaagaaaactacttaacctgttcaagtctcaatt

SEQ ID NO: 146315 - DNA, 68 bp, Homo sapiens
ccttctcgaggccgttataagacaagaaaactacttaacctgttcaagtctcaatttcttttctgtaa

SEQ ID NO: 146316 - DNA, 69 bp, Homo sapiens
gccgttataagacaagaaaactacttaacctgttcaagtctcaatttcttttctgtaaaatagcaatgg

SEQ ID NO: 146317 - DNA, 70 bp, Homo sapiens
gacaagaaaactacttaacctgttcaagtctcaatttcttttctgtaaaatagcaatggtagacagttct

SEQ ID NO: 146318 - DNA, 71 bp, Homo sapiens
ctacttaacctgttcaagtctcaatttcttttctgtaaaatagcaatggtagacagttctttgtaaggaga

SEQ ID NO: 146319 - DNA, 70 bp, Homo sapiens
gttcaagtctcaatttcttttctgtaaaatagcaatggtagacagttctttgtaaggagataggtttaag

SEQ ID NO: 146320 - DNA, 70 bp, Homo sapiens
ttcttttctgtaaaatagcaatggtagacagttctttgtaaggagataggtttaagtaagaaaatgtatg

SEQ ID NO: 146321 - DNA, 68 bp, Homo sapiens
gtaaaatagcaatggtagacagttctttgtaaggagataggtttaagtaagaaaatgtatgttaaacc

SEQ ID NO: 146322 - DNA, 70 bp, Homo sapiens
gcaatggtagacagttctttgtaaggagataggtttaagtaagaaaatgtatgttaaacctttatatcga

SEQ ID NO: 146323 - DNA, 72 bp, Homo sapiens
gacagttctttgtaaggagataggtttaagtaagaaaatgtatgttaaacctttatatcgatgtctggcata

SEQ ID NO: 146324 - DNA, 72 bp, Homo sapiens
gtaaggagataggtttaagtaagaaaatgtatgttaaacctttatatcgatgtctggcatatagtaagtatg

SEQ ID NO: 146325 - DNA, 75 bp, Homo sapiens
ggtttaagtaagaaaatgtatgttaaacctttatatcgatgtctggcatatagtaagtatgtaatagctgctgta

SEQ ID NO: 146326 - DNA, 80 bp, Homo sapiens
gtaagaaaatgtatgttaaacctttatatcgatgtctggcatatagtaagtatgtaatagctgctgtatctacatcataa

SEQ ID NO: 146327 - DNA, 82 bp, Homo sapiens
gtatgttaaacctttatatcgatgtctggcatatagtaagtatgtaatagctgctgtatctacatcataattatagcagtta

SEQ ID NO: 146328 - DNA, 80 bp, Homo sapiens
cctttatatcgatgtctggcatatagtaagtatgtaatagctgctgtatctacatcataattatagcagttattttaacg

SEQ ID NO: 146329 - DNA, 80 bp, Homo sapiens
ctggcatatagtaagtatgtaatagctgctgtatctacatcataattatagcagttattttaacgttgtctaaatgtata

SEQ ID NO: 146330 - DNA, 79 bp, Homo sapiens
gtaagtatgtaatagctgctgtatctacatcataattatagcagttattttaacgttgtctaaatgtataagcatagta

SEQ ID NO: 146331 - DNA, 79 bp, Homo sapiens
aatagctgctgtatctacatcataattatagcagttattttaacgttgtctaaatgtataagcatagtagattcacctc

SEQ ID NO: 146332 - DNA, 77 bp, Homo sapiens
ctgctgtatctacatcataattatagcagttattttaacgttgtctaaatgtataagcatagtagattcacctcttt

SEQ ID NO: 146333 - DNA, 71 bp, Homo sapiens
acatcataattatagcagttattttaacgttgtctaaatgtataagcatagtagattcacctctttttttt

SEQ ID NO: 146334 - DNA, 69 bp, Homo sapiens
cgcccggccagatccacctctttaccttggcttagaatctgaaattgtggaagttttaatagttttgaa

SEQ ID NO: 146335 - DNA, 71 bp, Homo sapiens
ggccagatccacctctttaccttggcttagaatctgaaattgtggaagttttaatagttttgaatattatg

SEQ ID NO: 146336 - DNA, 69 bp, Homo sapiens
cctctttaccttggcttagaatctgaaattgtggaagttttaatagttttgaatattatggctttaaga

SEQ ID NO: 146337 - DNA, 71 bp, Homo sapiens
ggcttagaatctgaaattgtggaagttttaatagttttgaatattatggctttaagaaaatatgagtggga

SEQ ID NO: 146338 - DNA, 70 bp, Homo sapiens
atctgaaattgtggaagttttaatagttttgaatattatggctttaagaaaatatgagtgggaaataatg

SEQ ID NO: 146339 - DNA, 70 bp, Homo sapiens
gaagttttaatagttttgaatattatggctttaagaaaatatgagtgggaaataatgtttctaatggaca

SEQ ID NO: 146340 - DNA, 73 bp, Homo sapiens
agttttgaatattatggctttaagaaaatatgagtgggaaataatgtttctaatggacagagctatggagtta

SEQ ID NO: 146341 - DNA, 76 bp, Homo sapiens
tattatggctttaagaaaatatgagtgggaaataatgtttctaatggacagagctatggagttagaatgcatgggt

SEQ ID NO: 146342 - DNA, 76 bp, Homo sapiens
ttaagaaaatatgagtgggaaataatgtttctaatggacagagctatggagttagaatgcatgggttcattctact

SEQ ID NO: 146343 - DNA, 78 bp, Homo sapiens
atatgagtgggaaataatgtttctaatggacagagctatggagttagaatgcatgggttcattctacttcacatttaa

SEQ ID NO: 146344 - DNA, 77 bp, Homo sapiens
ataatgtttctaatggacagagctatggagttagaatgcatgggttcattctacttcacatttaaatgggacagtat

SEQ ID NO: 146345 - DNA, 78 bp, Homo sapiens
tttctaatggacagagctatggagttagaatgcatgggttcattctacttcacatttaaatgggacagtatttcctga

SEQ ID NO: 146346 - DNA, 77 bp, Homo sapiens
agctatggagttagaatgcatgggttcattctacttcacatttaaatgggacagtatttcctgagctagagggctgt

SEQ ID NO: 146347 - DNA, 77 bp, Homo sapiens
agttagaatgcatgggttcattctacttcacatttaaatgggacagtatttcctgagctagagggctgttgtgagaa

SEQ ID NO: 146348 - DNA, 77 bp, Homo sapiens
atgcatgggttcattctacttcacatttaaatgggacagtatttcctgagctagagggctgttgtgagaattaaatg

SEQ ID NO: 146349 - DNA, 74 bp, Homo sapiens
attctacttcacatttaaatgggacagtatttcctgagctagagggctgttgtgagaattaaatgggatatgtt

SEQ ID NO: 146350 - DNA, 75 bp, Homo sapiens
atttaaatgggacagtatttcctgagctagagggctgttgtgagaattaaatgggatatgtttgcctgacattta

SEQ ID NO: 146351 - DNA, 79 bp, Homo sapiens
acagtatttcctgagctagagggctgttgtgagaattaaatgggatatgtttgcctgacatttagtatattgtgagata

SEQ ID NO: 146352 - DNA, 79 bp, Homo sapiens
atttcctgagctagagggctgttgtgagaattaaatgggatatgtttgcctgacatttagtatattgtgagatatacca

SEQ ID NO: 146353 - DNA, 76 bp, Homo sapiens
agggctgttgtgagaattaaatgggatatgtttgcctgacatttagtatattgtgagatataccacctttccttga

SEQ ID NO: 146354 - DNA, 77 bp, Homo sapiens
gagaattaaatgggatatgtttgcctgacatttagtatattgtgagatataccacctttccttgacatattgtgtta

SEQ ID NO: 146355 - DNA, 76 bp, Homo sapiens
tgggatatgtttgcctgacatttagtatattgtgagatataccacctttccttgacatattgtgttagtaaaagaa

SEQ ID NO: 146356 - DNA, 74 bp, Homo sapiens
catttagtatattgtgagatataccacctttccttgacatattgtgttagtaaaagaaaatttatgctgtagga

SEQ ID NO: 146357 - DNA, 71 bp, Homo sapiens
accacctttccttgacatattgtgttagtaaaagaaaatttatgctgtaggaaaattgtatattatccatc

SEQ ID NO: 146358 - DNA, 73 bp, Homo sapiens
ccttgacatattgtgttagtaaaagaaaatttatgctgtaggaaaattgtatattatccatcttcaagtagtc

SEQ ID NO: 146359 - DNA, 79 bp, Homo sapiens
aaatttatgctgtaggaaaattgtatattatccatcttcaagtagtctgtatagatgttacagctgtgcctagaagtca

SEQ ID NO: 146360 - DNA, 80 bp, Homo sapiens
gaaaattgtatattatccatcttcaagtagtctgtatagatgttacagctgtgcctagaagtcagcagaatcccaagaaa

SEQ ID NO: 146361 - DNA, 81 bp, Homo sapiens
ttgtatattatccatcttcaagtagtctgtatagatgttacagctgtgcctagaagtcagcagaatcccaagaaatatctt

SEQ ID NO: 146362 - DNA, 78 bp, Homo sapiens
atcttcaagtagtctgtatagatgttacagctgtgcctagaagtcagcagaatcccaagaaatatctttgtgttttag

SEQ ID NO: 146363 - DNA, 76 bp, Homo sapiens
tagtctgtatagatgttacagctgtgcctagaagtcagcagaatcccaagaaatatctttgtgttttaggttggtt

SEQ ID NO: 146364 - DNA, 74 bp, Homo sapiens
tgtgcctagaagtcagcagaatcccaagaaatatctttgtgttttaggttggtttgctggtgtttcacagttgt

SEQ ID NO: 146365 - DNA, 74 bp, Homo sapiens
aagtcagcagaatcccaagaaatatctttgtgttttaggttggtttgctggtgtttcacagttgttgtgatgaa

SEQ ID NO: 146366 - DNA, 72 bp, Homo sapiens
aatcccaagaaatatctttgtgttttaggttggtttgctggtgtttcacagttgttgtgatgaagtaatgaa

SEQ ID NO: 146367 - DNA, 73 bp, Homo sapiens
agaaatatctttgtgttttaggttggtttgctggtgtttcacagttgttgtgatgaagtaatgaaactctgtg

SEQ ID NO: 146368 - DNA, 74 bp, Homo sapiens
tgttttaggttggtttgctggtgtttcacagttgttgtgatgaagtaatgaaactctgtgtcatggatttaatt

SEQ ID NO: 146369 - DNA, 73 bp, Homo sapiens
ctggtgtttcacagttgttgtgatgaagtaatgaaactctgtgtcatggatttaattttagtcaagtttttaa

SEQ ID NO: 146370 - DNA, 72 bp, Homo sapiens
tgatgaagtaatgaaactctgtgtcatggatttaattttagtcaagtttttaaatgttacactttttcaata

SEQ ID NO: 146371 - DNA, 70 bp, Homo sapiens
gaaactctgtgtcatggatttaattttagtcaagtttttaaatgttacactttttcaataagagacttga

SEQ ID NO: 146372 - DNA, 70 bp, Homo sapiens
gtgtcatggatttaattttagtcaagtttttaaatgttacactttttcaataagagacttgaatagatat

SEQ ID NO: 146373 - DNA, 69 bp, Homo sapiens
ttttagtcaagtttttaaatgttacactttttcaataagagacttgaatagatattttatgccctaata

SEQ ID NO: 146374 - DNA, 69 bp, Homo sapiens
gtttttaaatgttacactttttcaataagagacttgaatagatattttatgccctaataaagtactgaa

SEQ ID NO: 146375 - DNA, 73 bp, Homo sapiens
tgttacactttttcaataagagacttgaatagatattttatgccctaataaagtactgaatacttgctgtagt

SEQ ID NO: 146376 - DNA, 76 bp, Homo sapiens
ttcaataagagacttgaatagatattttatgccctaataaagtactgaatacttgctgtagtttcaggattccaga

SEQ ID NO: 146377 - DNA, 76 bp, Homo sapiens
gacttgaatagatattttatgccctaataaagtactgaatacttgctgtagtttcaggattccagaattgcattag

SEQ ID NO: 146378 - DNA, 77 bp, Homo sapiens
tttatgccctaataaagtactgaatacttgctgtagtttcaggattccagaattgcattagttgtgagaagtatatg

SEQ ID NO: 146379 - DNA, 75 bp, Homo sapiens
aataaagtactgaatacttgctgtagtttcaggattccagaattgcattagttgtgagaagtatatggggcaagg

SEQ ID NO: 146380 - DNA, 76 bp, Homo sapiens
aatacttgctgtagtttcaggattccagaattgcattagttgtgagaagtatatggggcaagggctagtgtgtaaa

SEQ ID NO: 146381 - DNA, 73 bp, Homo sapiens
tagtttcaggattccagaattgcattagttgtgagaagtatatggggcaagggctagtgtgtaaagggctttt

SEQ ID NO: 146382 - DNA, 73 bp, Homo sapiens
aggattccagaattgcattagttgtgagaagtatatggggcaagggctagtgtgtaaagggctttttgagccc

SEQ ID NO: 146383 - DNA, 72 bp, Homo sapiens
aattgcattagttgtgagaagtatatggggcaagggctagtgtgtaaagggctttttgagccccgtcacatt

SEQ ID NO: 146384 - DNA, 76 bp, Homo sapiens
tgagaagtatatggggcaagggctagtgtgtaaagggctttttgagccccgtcacatttgagcattgtgacaaata

SEQ ID NO: 146385 - DNA, 74 bp, Homo sapiens
tatatggggcaagggctagtgtgtaaagggctttttgagccccgtcacatttgagcattgtgacaaatagaaaa

SEQ ID NO: 146386 - DNA, 71 bp, Homo sapiens
aagggctagtgtgtaaagggctttttgagccccgtcacatttgagcattgtgacaaatagaaaaaattata

SEQ ID NO: 146387 - DNA, 73 bp, Homo sapiens
taaagggctttttgagccccgtcacatttgagcattgtgacaaatagaaaaaattatagtactgaactgaaca

SEQ ID NO: 146388 - DNA, 76 bp, Homo sapiens
ctttttgagccccgtcacatttgagcattgtgacaaatagaaaaaattatagtactgaactgaacactgatgtata

SEQ ID NO: 146389 - DNA, 75 bp, Homo sapiens
cccgtcacatttgagcattgtgacaaatagaaaaaattatagtactgaactgaacactgatgtataaagtgttaa

SEQ ID NO: 146390 - DNA, 75 bp, Homo sapiens
gcattgtgacaaatagaaaaaattatagtactgaactgaacactgatgtataaagtgttaattctgtgacctggg

SEQ ID NO: 146391 - DNA, 75 bp, Homo sapiens
gtgacaaatagaaaaaattatagtactgaactgaacactgatgtataaagtgttaattctgtgacctgggtcaca

SEQ ID NO: 146392 - DNA, 72 bp, Homo sapiens
ctgaactgaacactgatgtataaagtgttaattctgtgacctgggtcacaaatttagtaaggaaaggtgtaa

SEQ ID NO: 146393 - DNA, 72 bp, Homo sapiens
ctgaacactgatgtataaagtgttaattctgtgacctgggtcacaaatttagtaaggaaaggtgtaagatta

SEQ ID NO: 146394 - DNA, 69 bp, Homo sapiens
atgtataaagtgttaattctgtgacctgggtcacaaatttagtaaggaaaggtgtaagattaaacatat

SEQ ID NO: 146395 - DNA, 73 bp, Homo sapiens
taattctgtgacctgggtcacaaatttagtaaggaaaggtgtaagattaaacatattttcatggaatctctga

SEQ ID NO: 146396 - DNA, 70 bp, Homo sapiens
gacctgggtcacaaatttagtaaggaaaggtgtaagattaaacatattttcatggaatctctgaaggttc

SEQ ID NO: 146397 - DNA, 71 bp, Homo sapiens
cacaaatttagtaaggaaaggtgtaagattaaacatattttcatggaatctctgaaggttcctgaatccaa

SEQ ID NO: 146398 - DNA, 75 bp, Homo sapiens
ggaaaggtgtaagattaaacatattttcatggaatctctgaaggttcctgaatccaatatagaagataggcaaca

SEQ ID NO: 146399 - DNA, 76 bp, Homo sapiens
ggtgtaagattaaacatattttcatggaatctctgaaggttcctgaatccaatatagaagataggcaacatttgta

SEQ ID NO: 146400 - DNA, 79 bp, Homo sapiens
atattttcatggaatctctgaaggttcctgaatccaatatagaagataggcaacatttgtattgactgatagagtaaga

SEQ ID NO: 146401 - DNA, 78 bp, Homo sapiens
tggaatctctgaaggttcctgaatccaatatagaagataggcaacatttgtattgactgatagagtaagatggtttta

SEQ ID NO: 146402 - DNA, 74 bp, Homo sapiens
aaggttcctgaatccaatatagaagataggcaacatttgtattgactgatagagtaagatggttttacagggta

SEQ ID NO: 146403 - DNA, 75 bp, Homo sapiens
aatccaatatagaagataggcaacatttgtattgactgatagagtaagatggttttacagggtaggaagctggaa

SEQ ID NO: 146404 - DNA, 76 bp, Homo sapiens
ataggcaacatttgtattgactgatagagtaagatggttttacagggtaggaagctggaatgtcccaagatattca

SEQ ID NO: 146405 - DNA, 74 bp, Homo sapiens
tttgtattgactgatagagtaagatggttttacagggtaggaagctggaatgtcccaagatattcattcagttt

SEQ ID NO: 146406 - DNA, 75 bp, Homo sapiens
ggtaggaagctggaatgtcccaagatattcattcagtttttggttcacatagtattgatgagtatataaacttct

SEQ ID NO: 146407 - DNA, 75 bp, Homo sapiens
gaagctggaatgtcccaagatattcattcagtttttggttcacatagtattgatgagtatataaacttctttaaa

SEQ ID NO: 146408 - DNA, 74 bp, Homo sapiens
ccaagatattcattcagtttttggttcacatagtattgatgagtatataaacttctttaaaatagtatggaggc

SEQ ID NO: 146409 - DNA, 74 bp, Homo sapiens
gcctggctgacagactctgtcacaagaaaaaataatatagtgtggggacaccaacctttattttatgtgtctta

SEQ ID NO: 146410 - DNA, 71 bp, Homo sapiens
acagactctgtcacaagaaaaaataatatagtgtggggacaccaacctttattttatgtgtcttaatgtgg

SEQ ID NO: 146411 - DNA, 74 bp, Homo sapiens
tcacaagaaaaaataatatagtgtggggacaccaacctttattttatgtgtcttaatgtggtgcattagtctgc

SEQ ID NO: 146412 - DNA, 73 bp, Homo sapiens
aaaaataatatagtgtggggacaccaacctttattttatgtgtcttaatgtggtgcattagtctgctttcaca

SEQ ID NO: 146413 - DNA, 76 bp, Homo sapiens
ggacacagccaaatcatgtcatgtgaattaggaagaaatataaaccagcatatcaaacaaacctagggtttcacaa

SEQ ID NO: 146414 - DNA, 76 bp, Homo sapiens
gccaaatcatgtcatgtgaattaggaagaaatataaaccagcatatcaaacaaacctagggtttcacaaatattgc

SEQ ID NO: 146415 - DNA, 75 bp, Homo sapiens
gtcatgtgaattaggaagaaatataaaccagcatatcaaacaaacctagggtttcacaaatattgcttaggatga

SEQ ID NO: 146416 - DNA, 72 bp, Homo sapiens
ggaagaaatataaaccagcatatcaaacaaacctagggtttcacaaatattgcttaggatgaggtgaggtta

SEQ ID NO: 146417 - DNA, 70 bp, Homo sapiens
aaatataaaccagcatatcaaacaaacctagggtttcacaaatattgcttaggatgaggtgaggttaaaa

SEQ ID NO: 146418 - DNA, 78 bp, Homo sapiens
gtgagttgatcataaactgatctaaaaaaatagtacaagtagtattatgacgcagtgccgctatcaaagtagtataga

SEQ ID NO: 146419 - DNA, 75 bp, Homo sapiens
cataaactgatctaaaaaaatagtacaagtagtattatgacgcagtgccgctatcaaagtagtatagaaatgacc

SEQ ID NO: 146420 - DNA, 72 bp, Homo sapiens
ctaaaaaaatagtacaagtagtattatgacgcagtgccgctatcaaagtagtatagaaatgaccgaagtttg

SEQ ID NO: 146421 - DNA, 72 bp, Homo sapiens
aaatagtacaagtagtattatgacgcagtgccgctatcaaagtagtatagaaatgaccgaagtttgggaaaa

SEQ ID NO: 146422 - DNA, 70 bp, Homo sapiens
aagtagtattatgacgcagtgccgctatcaaagtagtatagaaatgaccgaagtttgggaaaaactgttt

SEQ ID NO: 146423 - DNA, 72 bp, Homo sapiens
acgcagtgccgctatcaaagtagtatagaaatgaccgaagtttgggaaaaactgttttggactgtcctcata

SEQ ID NO: 146424 - DNA, 72 bp, Homo sapiens
tatcaaagtagtatagaaatgaccgaagtttgggaaaaactgttttggactgtcctcatatcatggaggaaa

SEQ ID NO: 146425 - DNA, 69 bp, Homo sapiens
aaatgaccgaagtttgggaaaaactgttttggactgtcctcatatcatggaggaaagactggttaaaga

SEQ ID NO: 146426 - DNA, 70 bp, Homo sapiens
aagtttgggaaaaactgttttggactgtcctcatatcatggaggaaagactggttaaagatggggcagtg

SEQ ID NO: 146427 - DNA, 72 bp, Homo sapiens
aaaactgttttggactgtcctcatatcatggaggaaagactggttaaagatggggcagtgtcagaagaaaaa

SEQ ID NO: 146428 - DNA, 70 bp, Homo sapiens
tatcatggaggaaagactggttaaagatggggcagtgtcagaagaaaaataagttttaggccggaggtaa

SEQ ID NO: 146429 - DNA, 66 bp, Homo sapiens
gaggaaagactggttaaagatggggcagtgtcagaagaaaaataagttttaggccggaggtaattt

SEQ ID NO: 146430 - DNA, 65 bp, Homo sapiens
aaagactggttaaagatggggcagtgtcagaagaaaaataagttttaggccggaggtaattttaa

SEQ ID NO: 146431 - DNA, 65 bp, Homo sapiens
aagactggttaaagatggggcagtgtcagaagaaaaataagttttaggccggaggtaattttaaa

SEQ ID NO: 146432 - DNA, 64 bp, Homo sapiens
ggttaaagatggggcagtgtcagaagaaaaataagttttaggccggaggtaattttaaacattt

SEQ ID NO: 146433 - DNA, 66 bp, Homo sapiens
aaagatggggcagtgtcagaagaaaaataagttttaggccggaggtaattttaaacattttcttgc

SEQ ID NO: 146434 - DNA, 66 bp, Homo sapiens
cagtgtcagaagaaaaataagttttaggccggaggtaattttaaacattttcttgccttaccagcg

SEQ ID NO: 146435 - DNA, 67 bp, Homo sapiens
tgtcagaagaaaaataagttttaggccggaggtaattttaaacattttcttgccttaccagcggatg

SEQ ID NO: 146436 - DNA, 65 bp, Homo sapiens
agaaaaataagttttaggccggaggtaattttaaacattttcttgccttaccagcggatggcttc

SEQ ID NO: 146437 - DNA, 64 bp, Homo sapiens
aaaataagttttaggccggaggtaattttaaacattttcttgccttaccagcggatggcttcct

SEQ ID NO: 146438 - DNA, 68 bp, Homo sapiens
taagttttaggccggaggtaattttaaacattttcttgccttaccagcggatggcttccttgtgctta

SEQ ID NO: 146439 - DNA, 68 bp, Homo sapiens
ttttaggccggaggtaattttaaacattttcttgccttaccagcggatggcttccttgtgcttaaaga

SEQ ID NO: 146440 - DNA, 70 bp, Homo sapiens
taattttaaacattttcttgccttaccagcggatggcttccttgtgcttaaagaacttaaacagttgaga

SEQ ID NO: 146441 - DNA, 69 bp, Homo sapiens
ccttaccagcggatggcttccttgtgcttaaagaacttaaacagttgagaattaaattttgcccattat

SEQ ID NO: 146442 - DNA, 65 bp, Homo sapiens
gcttccttgtgcttaaagaacttaaacagttgagaattaaattttgcccattatttttccccccc

SEQ ID NO: 146443 - DNA, 65 bp, Homo sapiens
aattaaattttgcccattatttttcccccccctttctctgtgcaacctctctgccccttaataaa

SEQ ID NO: 146444 - DNA, 65 bp, Homo sapiens
attttgcccattatttttcccccccctttctctgtgcaacctctctgccccttaataaatgtttt

SEQ ID NO: 146445 - DNA, 76 bp, Homo sapiens
ctttctctgtgcaacctctctgccccttaataaatgtttttggtactgactactgctgctcctgctaataccatcc

SEQ ID NO: 146446 - DNA, 75 bp, Homo sapiens
gcaacctctctgccccttaataaatgtttttggtactgactactgctgctcctgctaataccatcctgtagaaat

SEQ ID NO: 146447 - DNA, 73 bp, Homo sapiens
tctgccccttaataaatgtttttggtactgactactgctgctcctgctaataccatcctgtagaaatttttct

SEQ ID NO: 146448 - DNA, 75 bp, Homo sapiens
ataaatgtttttggtactgactactgctgctcctgctaataccatcctgtagaaatttttcttgagtgaggaata

SEQ ID NO: 146449 - DNA, 74 bp, Homo sapiens
ttttggtactgactactgctgctcctgctaataccatcctgtagaaatttttcttgagtgaggaatagttttta

SEQ ID NO: 146450 - DNA, 75 bp, Homo sapiens
tactgctgctcctgctaataccatcctgtagaaatttttcttgagtgaggaatagtttttagaaggcttttatga

SEQ ID NO: 146451 - DNA, 75 bp, Homo sapiens
ctgctcctgctaataccatcctgtagaaatttttcttgagtgaggaatagtttttagaaggcttttatgatgata

SEQ ID NO: 146452 - DNA, 69 bp, Homo sapiens
aataccatcctgtagaaatttttcttgagtgaggaatagtttttagaaggcttttatgatgataacttt

SEQ ID NO: 146453 - DNA, 68 bp, Homo sapiens
ctgtagaaatttttcttgagtgaggaatagtttttagaaggcttttatgatgataacttttaaattta

SEQ ID NO: 146454 - DNA, 75 bp, Homo sapiens
taaatttatttttaactatgccagcaggttattagatatataggttcaaaggagattgaggctggagtctgttca

SEQ ID NO: 146455 - DNA, 75 bp, Homo sapiens
tatttttaactatgccagcaggttattagatatataggttcaaaggagattgaggctggagtctgttcaaacatt

SEQ ID NO: 146456 - DNA, 79 bp, Homo sapiens
tatgccagcaggttattagatatataggttcaaaggagattgaggctggagtctgttcaaacattttcagaggtgaaga

SEQ ID NO: 146457 - DNA, 78 bp, Homo sapiens
atatataggttcaaaggagattgaggctggagtctgttcaaacattttcagaggtgaagatgacacagggttcatgga

SEQ ID NO: 146458 - DNA, 79 bp, Homo sapiens
ggagattgaggctggagtctgttcaaacattttcagaggtgaagatgacacagggttcatggagatttccttcatggta

SEQ ID NO: 146459 - DNA, 77 bp, Homo sapiens
aggctggagtctgttcaaacattttcagaggtgaagatgacacagggttcatggagatttccttcatggtaccagaa

SEQ ID NO: 146460 - DNA, 77 bp, Homo sapiens
agtctgttcaaacattttcagaggtgaagatgacacagggttcatggagatttccttcatggtaccagaacagggca

SEQ ID NO: 146461 - DNA, 75 bp, Homo sapiens
aacattttcagaggtgaagatgacacagggttcatggagatttccttcatggtaccagaacagggcagggtttca

SEQ ID NO: 146462 - DNA, 78 bp, Homo sapiens
aggtgaagatgacacagggttcatggagatttccttcatggtaccagaacagggcagggtttcactgcatgataatac

SEQ ID NO: 146463 - DNA, 76 bp, Homo sapiens
acagggttcatggagatttccttcatggtaccagaacagggcagggtttcactgcatgataatacccatgtttcca

SEQ ID NO: 146464 - DNA, 79 bp, Homo sapiens
ttcatggagatttccttcatggtaccagaacagggcagggtttcactgcatgataatacccatgtttccattgcttgta

SEQ ID NO: 146465 - DNA, 76 bp, Homo sapiens
tttccttcatggtaccagaacagggcagggtttcactgcatgataatacccatgtttccattgcttgtagacctaa

SEQ ID NO: 146466 - DNA, 76 bp, Homo sapiens
tggtaccagaacagggcagggtttcactgcatgataatacccatgtttccattgcttgtagacctaatcattttta

SEQ ID NO: 146467 - DNA, 74 bp, Homo sapiens
agaacagggcagggtttcactgcatgataatacccatgtttccattgcttgtagacctaatcatttttacttat

SEQ ID NO: 146468 - DNA, 77 bp, Homo sapiens
cagggtttcactgcatgataatacccatgtttccattgcttgtagacctaatcatttttacttattgattggcactg

SEQ ID NO: 146469 - DNA, 76 bp, Homo sapiens
agggtttcactgcatgataatacccatgtttccattgcttgtagacctaatcatttttacttattgattggcactg

SEQ ID NO: 146470 - DNA, 79 bp, Homo sapiens
ttcactgcatgataatacccatgtttccattgcttgtagacctaatcatttttacttattgattggcactgtgggccaa

SEQ ID NO: 146471 - DNA, 76 bp, Homo sapiens
atgataatacccatgtttccattgcttgtagacctaatcatttttacttattgattggcactgtgggccaagatcg

SEQ ID NO: 146472 - DNA, 77 bp, Homo sapiens
atacccatgtttccattgcttgtagacctaatcatttttacttattgattggcactgtgggccaagatcgtgacatc

SEQ ID NO: 146473 - DNA, 78 bp, Homo sapiens
ttccattgcttgtagacctaatcatttttacttattgattggcactgtgggccaagatcgtgacatccatcctaataa

SEQ ID NO: 146474 - DNA, 77 bp, Homo sapiens
atttttacttattgattggcactgtgggccaagatcgtgacatccatcctaataagcaggtctcatcaaaagcctta

SEQ ID NO: 146475 - DNA, 80 bp, Homo sapiens
ttattgattggcactgtgggccaagatcgtgacatccatcctaataagcaggtctcatcaaaagccttagaatggagaaa

SEQ ID NO: 146476 - DNA, 76 bp, Homo sapiens
tgtgggccaagatcgtgacatccatcctaataagcaggtctcatcaaaagccttagaatggagaaaattttaataa

SEQ ID NO: 146477 - DNA, 76 bp, Homo sapiens
caagatcgtgacatccatcctaataagcaggtctcatcaaaagccttagaatggagaaaattttaataatgcttta

SEQ ID NO: 146478 - DNA, 73 bp, Homo sapiens
catccatcctaataagcaggtctcatcaaaagccttagaatggagaaaattttaataatgctttattagttgg

SEQ ID NO: 146479 - DNA, 71 bp, Homo sapiens
taagcaggtctcatcaaaagccttagaatggagaaaattttaataatgctttattagttggttaagtaagc

SEQ ID NO: 146480 - DNA, 69 bp, Homo sapiens
gccttagaatggagaaaattttaataatgctttattagttggttaagtaagccctgatgtttggctttc

SEQ ID NO: 146481 - DNA, 68 bp, Homo sapiens
gagaaaattttaataatgctttattagttggttaagtaagccctgatgtttggctttctagtgaccgg

SEQ ID NO: 146482 - DNA, 70 bp, Homo sapiens
aattttaataatgctttattagttggttaagtaagccctgatgtttggctttctagtgaccggtcattgc

SEQ ID NO: 146483 - DNA, 74 bp, Homo sapiens
tttattagttggttaagtaagccctgatgtttggctttctagtgaccggtcattgccctgcagactctgtaatg

SEQ ID NO: 146484 - DNA, 74 bp, Homo sapiens
ttggttaagtaagccctgatgtttggctttctagtgaccggtcattgccctgcagactctgtaatgggacagtt

SEQ ID NO: 146485 - DNA, 77 bp, Homo sapiens
taagccctgatgtttggctttctagtgaccggtcattgccctgcagactctgtaatgggacagtttggctgggtgta

SEQ ID NO: 146486 - DNA, 73 bp, Homo sapiens
atgtttggctttctagtgaccggtcattgccctgcagactctgtaatgggacagtttggctgggtgtaggggg

SEQ ID NO: 146487 - DNA, 78 bp, Homo sapiens
ttctagtgaccggtcattgccctgcagactctgtaatgggacagtttggctgggtgtagggggtcatgccaggctgag

SEQ ID NO: 146488 - DNA, 77 bp, Homo sapiens
gcctaggcaacatagaccgccccccatccctataaatatttaacaattagctgagcataatggtgtgtgtgcttgta

SEQ ID NO: 146489 - DNA, 75 bp, Homo sapiens
aacatagaccgccccccatccctataaatatttaacaattagctgagcataatggtgtgtgtgcttgtagtctta

SEQ ID NO: 146490 - DNA, 80 bp, Homo sapiens
cccccatccctataaatatttaacaattagctgagcataatggtgtgtgtgcttgtagtcttagctgctgaggaggctga

SEQ ID NO: 146491 - DNA, 67 bp, Homo sapiens
aaaaacaaaaacaggtagggagagacaaggagaagggtagtactgacatggcctgtctttactttcc

SEQ ID NO: 146492 - DNA, 70 bp, Homo sapiens
aaaaacaggtagggagagacaaggagaagggtagtactgacatggcctgtctttactttcccctctcagc

SEQ ID NO: 146493 - DNA, 73 bp, Homo sapiens
agagacaaggagaagggtagtactgacatggcctgtctttactttcccctctcagccctggaactctccacag

SEQ ID NO: 146494 - DNA, 71 bp, Homo sapiens
aggagaagggtagtactgacatggcctgtctttactttcccctctcagccctggaactctccacagggaaa

SEQ ID NO: 146495 - DNA, 69 bp, Homo sapiens
gtagtactgacatggcctgtctttactttcccctctcagccctggaactctccacagggaaaggttttt

SEQ ID NO: 146496 - DNA, 67 bp, Homo sapiens
acatggcctgtctttactttcccctctcagccctggaactctccacagggaaaggttttttgttcct

SEQ ID NO: 146497 - DNA, 68 bp, Homo sapiens
tactttcccctctcagccctggaactctccacagggaaaggttttttgttccttcttcttgtctaata

SEQ ID NO: 146498 - DNA, 70 bp, Homo sapiens
tctcagccctggaactctccacagggaaaggttttttgttccttcttcttgtctaataaatggcttgact

SEQ ID NO: 146499 - DNA, 67 bp, Homo sapiens
acagggaaaggttttttgttccttcttcttgtctaataaatggcttgacttgaggggtatcttggag

SEQ ID NO: 146500 - DNA, 71 bp, Homo sapiens
cttcttcttgtctaataaatggcttgacttgaggggtatcttggaggcattctcaacccaaccctgaaggt

SEQ ID NO: 146501 - DNA, 73 bp, Homo sapiens
tctaataaatggcttgacttgaggggtatcttggaggcattctcaacccaaccctgaaggtttatcagcactt

SEQ ID NO: 146502 - DNA, 73 bp, Homo sapiens
taaatggcttgacttgaggggtatcttggaggcattctcaacccaaccctgaaggtttatcagcactttcctg

SEQ ID NO: 146503 - DNA, 76 bp, Homo sapiens
acccaaccctgaaggtttatcagcactttcctggtggacagcacctcagcctctgccctggctcctttcatcctca

SEQ ID NO: 146504 - DNA, 78 bp, Homo sapiens
aaggtttatcagcactttcctggtggacagcacctcagcctctgccctggctcctttcatcctcatcccctagagcca

SEQ ID NO: 146505 - DNA, 79 bp, Homo sapiens
ctttcctggtggacagcacctcagcctctgccctggctcctttcatcctcatcccctagagccaggatcccagcattta

SEQ ID NO: 146506 - DNA, 80 bp, Homo sapiens
tggacagcacctcagcctctgccctggctcctttcatcctcatcccctagagccaggatcccagcatttacaaattaaga

SEQ ID NO: 146507 - DNA, 78 bp, Homo sapiens
tcagcctctgccctggctcctttcatcctcatcccctagagccaggatcccagcatttacaaattaagatgtttctcc

SEQ ID NO: 146508 - DNA, 75 bp, Homo sapiens
ccctggctcctttcatcctcatcccctagagccaggatcccagcatttacaaattaagatgtttctcccacatta

SEQ ID NO: 146509 - DNA, 76 bp, Homo sapiens
tttcatcctcatcccctagagccaggatcccagcatttacaaattaagatgtttctcccacattaattaattcaga

SEQ ID NO: 146510 - DNA, 74 bp, Homo sapiens
tcatcccctagagccaggatcccagcatttacaaattaagatgtttctcccacattaattaattcagaatttat

SEQ ID NO: 146511 - DNA, 73 bp, Homo sapiens
ctagagccaggatcccagcatttacaaattaagatgtttctcccacattaattaattcagaatttattagaaa

SEQ ID NO: 146512 - DNA, 75 bp, Homo sapiens
cccagcatttacaaattaagatgtttctcccacattaattaattcagaatttattagaaacatactgcagacaca

SEQ ID NO: 146513 - DNA, 73 bp, Homo sapiens
caaattaagatgtttctcccacattaattaattcagaatttattagaaacatactgcagacacaaaggtcaag

SEQ ID NO: 146514 - DNA, 74 bp, Homo sapiens
gatgtttctcccacattaattaattcagaatttattagaaacatactgcagacacaaaggtcaagtacacgacg

SEQ ID NO: 146515 - DNA, 75 bp, Homo sapiens
acattaattaattcagaatttattagaaacatactgcagacacaaaggtcaagtacacgacggcttcttcagagc

SEQ ID NO: 146516 - DNA, 79 bp, Homo sapiens
atttattagaaacatactgcagacacaaaggtcaagtacacgacggcttcttcagagctgaagagtctgcagctgttta

SEQ ID NO: 146517 - DNA, 81 bp, Homo sapiens
aaacatactgcagacacaaaggtcaagtacacgacggcttcttcagagctgaagagtctgcagctgtttacgattatatca

SEQ ID NO: 146518 - DNA, 80 bp, Homo sapiens
agacacaaaggtcaagtacacgacggcttcttcagagctgaagagtctgcagctgtttacgattatatcagaggaggaga

SEQ ID NO: 146519 - DNA, 80 bp, Homo sapiens
aagtacacgacggcttcttcagagctgaagagtctgcagctgtttacgattatatcagaggaggagatgtaatcaaagat

SEQ ID NO: 146520 - DNA, 82 bp, Homo sapiens
ggcttcttcagagctgaagagtctgcagctgtttacgattatatcagaggaggagatgtaatcaaagattgtactatacaat

SEQ ID NO: 146521 - DNA, 80 bp, Homo sapiens
agagctgaagagtctgcagctgtttacgattatatcagaggaggagatgtaatcaaagattgtactatacaattattaaa

SEQ ID NO: 146522 - DNA, 77 bp, Homo sapiens
gaagagtctgcagctgtttacgattatatcagaggaggagatgtaatcaaagattgtactatacaattattaaaagt

SEQ ID NO: 146523 - DNA, 75 bp, Homo sapiens
cagctgtttacgattatatcagaggaggagatgtaatcaaagattgtactatacaattattaaaagttacagaat

SEQ ID NO: 146524 - DNA, 74 bp, Homo sapiens
cgattatatcagaggaggagatgtaatcaaagattgtactatacaattattaaaagttacagaatttgttactg

SEQ ID NO: 146525 - DNA, 69 bp, Homo sapiens
tgtactatacaattattaaaagttacagaatttgttactgtttatcattccctttcccctttcagagga

SEQ ID NO: 146526 - DNA, 68 bp, Homo sapiens
attattaaaagttacagaatttgttactgtttatcattccctttcccctttcagaggacattttcaca

SEQ ID NO: 146527 - DNA, 72 bp, Homo sapiens
agttacagaatttgttactgtttatcattccctttcccctttcagaggacattttcacagagattcatgaaa

SEQ ID NO: 146528 - DNA, 71 bp, Homo sapiens
gaatttgttactgtttatcattccctttcccctttcagaggacattttcacagagattcatgaaataaaag

SEQ ID NO: 146529 - DNA, 73 bp, Homo sapiens
ttatcattccctttcccctttcagaggacattttcacagagattcatgaaataaaagtttggttaatgacaga

SEQ ID NO: 146530 - DNA, 71 bp, Homo sapiens
ctttcccctttcagaggacattttcacagagattcatgaaataaaagtttggttaatgacagaagtgggaa

SEQ ID NO: 146531 - DNA, 73 bp, Homo sapiens
tcagaggacattttcacagagattcatgaaataaaagtttggttaatgacagaagtgggaaaccttagtagga

SEQ ID NO: 146532 - DNA, 72 bp, Homo sapiens
cattttcacagagattcatgaaataaaagtttggttaatgacagaagtgggaaaccttagtaggatggaaga

SEQ ID NO: 146533 - DNA, 70 bp, Homo sapiens
acagagattcatgaaataaaagtttggttaatgacagaagtgggaaaccttagtaggatggaagaaaaga

SEQ ID NO: 146534 - DNA, 71 bp, Homo sapiens
aaagaaagaaagactgaggcttttgtgccatggtaagatggtaaaacaataaaaataacatctgcatttta

SEQ ID NO: 146535 - DNA, 75 bp, Homo sapiens
agactgaggcttttgtgccatggtaagatggtaaaacaataaaaataacatctgcattttattgagaacatactc

SEQ ID NO: 146536 - DNA, 76 bp, Homo sapiens
gaggcttttgtgccatggtaagatggtaaaacaataaaaataacatctgcattttattgagaacatactctgtgtg

SEQ ID NO: 146537 - DNA, 77 bp, Homo sapiens
catggtaagatggtaaaacaataaaaataacatctgcattttattgagaacatactctgtgtgtacaggcactgtgt

SEQ ID NO: 146538 - DNA, 76 bp, Homo sapiens
gatggtaaaacaataaaaataacatctgcattttattgagaacatactctgtgtgtacaggcactgtgtttaagcc

SEQ ID NO: 146539 - DNA, 78 bp, Homo sapiens
taaaaataacatctgcattttattgagaacatactctgtgtgtacaggcactgtgtttaagccgtttccatgcaacaa

SEQ ID NO: 146540 - DNA, 76 bp, Homo sapiens
attttattgagaacatactctgtgtgtacaggcactgtgtttaagccgtttccatgcaacaagcttaatagttgga

SEQ ID NO: 146541 - DNA, 79 bp, Homo sapiens
acatactctgtgtgtacaggcactgtgtttaagccgtttccatgcaacaagcttaatagttggagaatcttgctcataa

SEQ ID NO: 146542 - DNA, 79 bp, Homo sapiens
tgtgtgtacaggcactgtgtttaagccgtttccatgcaacaagcttaatagttggagaatcttgctcataagcacctac

SEQ ID NO: 146543 - DNA, 78 bp, Homo sapiens
actgtgtttaagccgtttccatgcaacaagcttaatagttggagaatcttgctcataagcacctaccctgcacagcca

SEQ ID NO: 146544 - DNA, 79 bp, Homo sapiens
taagccgtttccatgcaacaagcttaatagttggagaatcttgctcataagcacctaccctgcacagccagaaccacta

SEQ ID NO: 146545 - DNA, 80 bp, Homo sapiens
atgcaacaagcttaatagttggagaatcttgctcataagcacctaccctgcacagccagaaccactatggataacttcta

SEQ ID NO: 146546 - DNA, 77 bp, Homo sapiens
aagcttaatagttggagaatcttgctcataagcacctaccctgcacagccagaaccactatggataacttctacaaa

SEQ ID NO: 146547 - DNA, 79 bp, Homo sapiens
ttgctcataagcacctaccctgcacagccagaaccactatggataacttctacaaacatctcctgagatttttgagaat

SEQ ID NO: 146548 - DNA, 78 bp, Homo sapiens
acagccagaaccactatggataacttctacaaacatctcctgagatttttgagaattcctgtttgcaaagtctgctga

SEQ ID NO: 146549 - DNA, 75 bp, Homo sapiens
agaaccactatggataacttctacaaacatctcctgagatttttgagaattcctgtttgcaaagtctgctgaagt

SEQ ID NO: 146550 - DNA, 74 bp, Homo sapiens
ataacttctacaaacatctcctgagatttttgagaattcctgtttgcaaagtctgctgaagttgttcccataaa

SEQ ID NO: 146551 - DNA, 76 bp, Homo sapiens
tacaaacatctcctgagatttttgagaattcctgtttgcaaagtctgctgaagttgttcccataaactgcaataaa

SEQ ID NO: 146552 - DNA, 74 bp, Homo sapiens
gagatttttgagaattcctgtttgcaaagtctgctgaagttgttcccataaactgcaataaagtgtaacttcac

SEQ ID NO: 146553 - DNA, 73 bp, Homo sapiens
agaattcctgtttgcaaagtctgctgaagttgttcccataaactgcaataaagtgtaacttcacgagaattac

SEQ ID NO: 146554 - DNA, 75 bp, Homo sapiens
tttgcaaagtctgctgaagttgttcccataaactgcaataaagtgtaacttcacgagaattactgtatgtatccc

SEQ ID NO: 146555 - DNA, 74 bp, Homo sapiens
aagttgttcccataaactgcaataaagtgtaacttcacgagaattactgtatgtatcccttgagtggtgagtga

SEQ ID NO: 146556 - DNA, 78 bp, Homo sapiens
taaactgcaataaagtgtaacttcacgagaattactgtatgtatcccttgagtggtgagtgatggactacagtgagaa

SEQ ID NO: 146557 - DNA, 77 bp, Homo sapiens
taacttcacgagaattactgtatgtatcccttgagtggtgagtgatggactacagtgagaagtggattctagggtgt

SEQ ID NO: 146558 - DNA, 77 bp, Homo sapiens
aattactgtatgtatcccttgagtggtgagtgatggactacagtgagaagtggattctagggtgttggattcacatt

SEQ ID NO: 146559 - DNA, 79 bp, Homo sapiens
tatgtatcccttgagtggtgagtgatggactacagtgagaagtggattctagggtgttggattcacatttgtggctaac

SEQ ID NO: 146560 - DNA, 77 bp, Homo sapiens
tggtgagtgatggactacagtgagaagtggattctagggtgttggattcacatttgtggctaaccaagattacaaat

SEQ ID NO: 146561 - DNA, 78 bp, Homo sapiens
atggactacagtgagaagtggattctagggtgttggattcacatttgtggctaaccaagattacaaattcatgcatgt

SEQ ID NO: 146562 - DNA, 77 bp, Homo sapiens
agggtgttggattcacatttgtggctaaccaagattacaaattcatgcatgttctggaatttcaggggcattgctaa

SEQ ID NO: 146563 - DNA, 81 bp, Homo sapiens
attcacatttgtggctaaccaagattacaaattcatgcatgttctggaatttcaggggcattgctaaatgcacagagtcag

SEQ ID NO: 146564 - DNA, 80 bp, Homo sapiens
attacaaattcatgcatgttctggaatttcaggggcattgctaaatgcacagagtcaggggcctgctggatgtgttttta

SEQ ID NO: 146565 - DNA, 78 bp, Homo sapiens
ttctggaatttcaggggcattgctaaatgcacagagtcaggggcctgctggatgtgtttttagtggcaataagtatta

SEQ ID NO: 146566 - DNA, 78 bp, Homo sapiens
taaatgcacagagtcaggggcctgctggatgtgtttttagtggcaataagtattacccagtcttttctgctgctgtaa

SEQ ID NO: 146567 - DNA, 79 bp, Homo sapiens
ctgctggatgtgtttttagtggcaataagtattacccagtcttttctgctgctgtaagctttcagatagagacttgaga

SEQ ID NO: 146568 - DNA, 76 bp, Homo sapiens
tgtttttagtggcaataagtattacccagtcttttctgctgctgtaagctttcagatagagacttgagagcaaaaa

SEQ ID NO: 146569 - DNA, 78 bp, Homo sapiens
tagtggcaataagtattacccagtcttttctgctgctgtaagctttcagatagagacttgagagcaaaaaggtcagct

SEQ ID NO: 146570 - DNA, 76 bp, Homo sapiens
tattacccagtcttttctgctgctgtaagctttcagatagagacttgagagcaaaaaggtcagcttaccctttgta

SEQ ID NO: 146571 - DNA, 75 bp, Homo sapiens
agtcttttctgctgctgtaagctttcagatagagacttgagagcaaaaaggtcagcttaccctttgtagttggaa

SEQ ID NO: 146572 - DNA, 76 bp, Homo sapiens
tgctgtaagctttcagatagagacttgagagcaaaaaggtcagcttaccctttgtagttggaactcagttcctgta

SEQ ID NO: 146573 - DNA, 72 bp, Homo sapiens
ctttcagatagagacttgagagcaaaaaggtcagcttaccctttgtagttggaactcagttcctgtagaatt

SEQ ID NO: 146574 - DNA, 71 bp, Homo sapiens
atagagacttgagagcaaaaaggtcagcttaccctttgtagttggaactcagttcctgtagaatttctttg

SEQ ID NO: 146575 - DNA, 68 bp, Homo sapiens
caaaaaggtcagcttaccctttgtagttggaactcagttcctgtagaatttctttggaaacatgtgtt

SEQ ID NO: 146576 - DNA, 70 bp, Homo sapiens
aggtcagcttaccctttgtagttggaactcagttcctgtagaatttctttggaaacatgtgtttctaata

SEQ ID NO: 146577 - DNA, 71 bp, Homo sapiens
accctttgtagttggaactcagttcctgtagaatttctttggaaacatgtgtttctaatatgtcagaattg

SEQ ID NO: 146578 - DNA, 73 bp, Homo sapiens
ggaactcagttcctgtagaatttctttggaaacatgtgtttctaatatgtcagaattggtttagcttaagcta

SEQ ID NO: 146579 - DNA, 71 bp, Homo sapiens
gttcctgtagaatttctttggaaacatgtgtttctaatatgtcagaattggtttagcttaagctaaaaaga

SEQ ID NO: 146580 - DNA, 72 bp, Homo sapiens
tctttggaaacatgtgtttctaatatgtcagaattggtttagcttaagctaaaaagaaaattatagcctgat

SEQ ID NO: 146581 - DNA, 71 bp, Homo sapiens
ggaaacatgtgtttctaatatgtcagaattggtttagcttaagctaaaaagaaaattatagcctgatttgt

SEQ ID NO: 146582 - DNA, 69 bp, Homo sapiens
gtttctaatatgtcagaattggtttagcttaagctaaaaagaaaattatagcctgatttgtttaaagga

SEQ ID NO: 146583 - DNA, 67 bp, Homo sapiens
gtcagaattggtttagcttaagctaaaaagaaaattatagcctgatttgtttaaaggaacaaaaatg

SEQ ID NO: 146584 - DNA, 74 bp, Homo sapiens
aaaaagaaaattatagcctgatttgtttaaaggaacaaaaatgtctacatgccacagtttggatgcacagagca

SEQ ID NO: 146585 - DNA, 76 bp, Homo sapiens
aaaattatagcctgatttgtttaaaggaacaaaaatgtctacatgccacagtttggatgcacagagcatggttcaa

SEQ ID NO: 146586 - DNA, 77 bp, Homo sapiens
atttgtttaaaggaacaaaaatgtctacatgccacagtttggatgcacagagcatggttcaatgctcagtagacttt

SEQ ID NO: 146587 - DNA, 79 bp, Homo sapiens
aaggaacaaaaatgtctacatgccacagtttggatgcacagagcatggttcaatgctcagtagacttttatgcttttta

SEQ ID NO: 146588 - DNA, 79 bp, Homo sapiens
aaaaatgtctacatgccacagtttggatgcacagagcatggttcaatgctcagtagacttttatgctttttattactcg

SEQ ID NO: 146589 - DNA, 77 bp, Homo sapiens
atgccacagtttggatgcacagagcatggttcaatgctcagtagacttttatgctttttattactcggatttttatt

SEQ ID NO: 146590 - DNA, 76 bp, Homo sapiens
agtttggatgcacagagcatggttcaatgctcagtagacttttatgctttttattactcggatttttatttctcta

SEQ ID NO: 146591 - DNA, 78 bp, Homo sapiens
agagcatggttcaatgctcagtagacttttatgctttttattactcggatttttatttctctatcagtgtgctagata

SEQ ID NO: 146592 - DNA, 74 bp, Homo sapiens
ggttcaatgctcagtagacttttatgctttttattactcggatttttatttctctatcagtgtgctagataaaa

SEQ ID NO: 146593 - DNA, 71 bp, Homo sapiens
tcagtagacttttatgctttttattactcggatttttatttctctatcagtgtgctagataaaaagtaaag

SEQ ID NO: 146594 - DNA, 69 bp, Homo sapiens
tgctttttattactcggatttttatttctctatcagtgtgctagataaaaagtaaagttttatgggtag

SEQ ID NO: 146595 - DNA, 69 bp, Homo sapiens
actcggatttttatttctctatcagtgtgctagataaaaagtaaagttttatgggtagtattctagttc

SEQ ID NO: 146596 - DNA, 71 bp, Homo sapiens
ttatttctctatcagtgtgctagataaaaagtaaagttttatgggtagtattctagttctacatagaagtt

SEQ ID NO: 146597 - DNA, 71 bp, Homo sapiens
tctctatcagtgtgctagataaaaagtaaagttttatgggtagtattctagttctacatagaagttttatt

SEQ ID NO: 146598 - DNA, 70 bp, Homo sapiens
gtgctagataaaaagtaaagttttatgggtagtattctagttctacatagaagttttatttctcatatag

SEQ ID NO: 146599 - DNA, 69 bp, Homo sapiens
gttttatgggtagtattctagttctacatagaagttttatttctcatatagttttttcttatatgtaaa

SEQ ID NO: 146600 - DNA, 72 bp, Homo sapiens
gttctacatagaagttttatttctcatatagttttttcttatatgtaaaattacatgttatgagctacttta

SEQ ID NO: 146601 - DNA, 70 bp, Homo sapiens
gttttatttctcatatagttttttcttatatgtaaaattacatgttatgagctactttaatattaacaag

SEQ ID NO: 146602 - DNA, 73 bp, Homo sapiens
tctcatatagttttttcttatatgtaaaattacatgttatgagctactttaatattaacaagtaacctcagta

SEQ ID NO: 146603 - DNA, 70 bp, Homo sapiens
gtaaaattacatgttatgagctactttaatattaacaagtaacctcagtaaaatactaaagtgactgtta

SEQ ID NO: 146604 - DNA, 72 bp, Homo sapiens
ttacatgttatgagctactttaatattaacaagtaacctcagtaaaatactaaagtgactgttatgggataa

SEQ ID NO: 146605 - DNA, 69 bp, Homo sapiens
gagctactttaatattaacaagtaacctcagtaaaatactaaagtgactgttatgggataaataacgaa

SEQ ID NO: 146606 - DNA, 66 bp, Homo sapiens
gtaaaatactaaagtgactgttatgggataaataacgaaacttaggaaacttaggatcatttgttt

SEQ ID NO: 146607 - DNA, 70 bp, Homo sapiens
gtgactgttatgggataaataacgaaacttaggaaacttaggatcatttgttttgaaatacataatactg

SEQ ID NO: 146608 - DNA, 69 bp, Homo sapiens
gggataaataacgaaacttaggaaacttaggatcatttgttttgaaatacataatactggaattactga

SEQ ID NO: 146609 - DNA, 67 bp, Homo sapiens
acgaaacttaggaaacttaggatcatttgttttgaaatacataatactggaattactgaatttttcc

SEQ ID NO: 146610 - DNA, 69 bp, Homo sapiens
cttaggaaacttaggatcatttgttttgaaatacataatactggaattactgaatttttccctctagag

SEQ ID NO: 146611 - DNA, 68 bp, Homo sapiens
ggatcatttgttttgaaatacataatactggaattactgaatttttccctctagagttttaaaattcc

SEQ ID NO: 146612 - DNA, 70 bp, Homo sapiens
tttgaaatacataatactggaattactgaatttttccctctagagttttaaaattcccattgccagtgga

SEQ ID NO: 146613 - DNA, 66 bp, Homo sapiens
actggaattactgaatttttccctctagagttttaaaattcccattgccagtggagtgggggtggg

SEQ ID NO: 146614 - DNA, 70 bp, Homo sapiens
ctgaatttttccctctagagttttaaaattcccattgccagtggagtgggggtggggatgtgtgcacgtg

SEQ ID NO: 146615 - DNA, 76 bp, Homo sapiens
tgccagtggagtgggggtggggatgtgtgcacgtgtgtattgttatttttgttcctgagattgggctataatgtaa

SEQ ID NO: 146616 - DNA, 75 bp, Homo sapiens
gtgggggtggggatgtgtgcacgtgtgtattgttatttttgttcctgagattgggctataatgtaagcatgaaaa

SEQ ID NO: 146617 - DNA, 76 bp, Homo sapiens
ggtggggatgtgtgcacgtgtgtattgttatttttgttcctgagattgggctataatgtaagcatgaaaattgccc

SEQ ID NO: 146618 - DNA, 72 bp, Homo sapiens
tgttatttttgttcctgagattgggctataatgtaagcatgaaaattgccccccccccactccatgaataaa

SEQ ID NO: 146619 - DNA, 73 bp, Homo sapiens
ttgttcctgagattgggctataatgtaagcatgaaaattgccccccccccactccatgaataaattgccttta

SEQ ID NO: 146620 - DNA, 72 bp, Homo sapiens
attgggctataatgtaagcatgaaaattgccccccccccactccatgaataaattgcctttatatcttatct

SEQ ID NO: 146621 - DNA, 74 bp, Homo sapiens
tataatgtaagcatgaaaattgccccccccccactccatgaataaattgcctttatatcttatcttactaatga

SEQ ID NO: 146622 - DNA, 74 bp, Homo sapiens
atgaaaattgccccccccccactccatgaataaattgcctttatatcttatcttactaatgatatgcatttaca

SEQ ID NO: 146623 - DNA, 77 bp, Homo sapiens
ccccccccactccatgaataaattgcctttatatcttatcttactaatgatatgcatttacacataatgccttgtga

SEQ ID NO: 146624 - DNA, 77 bp, Homo sapiens
aaattgcctttatatcttatcttactaatgatatgcatttacacataatgccttgtgatagaattaattctaaagga

SEQ ID NO: 146625 - DNA, 76 bp, Homo sapiens
cctttatatcttatcttactaatgatatgcatttacacataatgccttgtgatagaattaattctaaaggaaattg

SEQ ID NO: 146626 - DNA, 77 bp, Homo sapiens
cttactaatgatatgcatttacacataatgccttgtgatagaattaattctaaaggaaattgttaactagatgagat

SEQ ID NO: 146627 - DNA, 75 bp, Homo sapiens
tttacacataatgccttgtgatagaattaattctaaaggaaattgttaactagatgagatttttcagacactgcc

SEQ ID NO: 146628 - DNA, 70 bp, Homo sapiens
aaaggaaattgttaactagatgagatttttcagacactgcctattaggcaggttttaataggaactccca

SEQ ID NO: 146629 - DNA, 71 bp, Homo sapiens
tttttcagacactgcctattaggcaggttttaataggaactcccactggtggcttaactattttgcttgtg

SEQ ID NO: 146630 - DNA, 73 bp, Homo sapiens
ctattaggcaggttttaataggaactcccactggtggcttaactattttgcttgtgtgctatcatctacttta

SEQ ID NO: 146631 - DNA, 72 bp, Homo sapiens
ggttttaataggaactcccactggtggcttaactattttgcttgtgtgctatcatctactttaaatcccata

SEQ ID NO: 146632 - DNA, 73 bp, Homo sapiens
taataggaactcccactggtggcttaactattttgcttgtgtgctatcatctactttaaatcccatagatttt

SEQ ID NO: 146633 - DNA, 75 bp, Homo sapiens
actggtggcttaactattttgcttgtgtgctatcatctactttaaatcccatagatttttccatcagccttgaaa

SEQ ID NO: 146634 - DNA, 74 bp, Homo sapiens
ggcttaactattttgcttgtgtgctatcatctactttaaatcccatagatttttccatcagccttgaaaacaaa

SEQ ID NO: 146635 - DNA, 73 bp, Homo sapiens
ttgcttgtgtgctatcatctactttaaatcccatagatttttccatcagccttgaaaacaaaggttaaactat

SEQ ID NO: 146636 - DNA, 69 bp, Homo sapiens
gctatcatctactttaaatcccatagatttttccatcagccttgaaaacaaaggttaaactatttttgg

SEQ ID NO: 146637 - DNA, 68 bp, Homo sapiens
ttaaatcccatagatttttccatcagccttgaaaacaaaggttaaactatttttgggtcttcacatcc

SEQ ID NO: 146638 - DNA, 70 bp, Homo sapiens
catagatttttccatcagccttgaaaacaaaggttaaactatttttgggtcttcacatcctggttttgca

SEQ ID NO: 146639 - DNA, 67 bp, Homo sapiens
ttgaaaacaaaggttaaactatttttgggtcttcacatcctggttttgcagggagacgggaggtatg

SEQ ID NO: 146640 - DNA, 70 bp, Homo sapiens
gttaaactatttttgggtcttcacatcctggttttgcagggagacgggaggtatggaggcattgcccatt

SEQ ID NO: 146641 - DNA, 72 bp, Homo sapiens
actatttttgggtcttcacatcctggttttgcagggagacgggaggtatggaggcattgcccatttcataaa

SEQ ID NO: 146642 - DNA, 76 bp, Homo sapiens
tcttcacatcctggttttgcagggagacgggaggtatggaggcattgcccatttcataaagctgtatgtttttgaa

SEQ ID NO: 146643 - DNA, 75 bp, Homo sapiens
gttttgcagggagacgggaggtatggaggcattgcccatttcataaagctgtatgtttttgaactacgcacatgg

SEQ ID NO: 146644 - DNA, 77 bp, Homo sapiens
aggtatggaggcattgcccatttcataaagctgtatgtttttgaactacgcacatggtgctttgcacgaatcaaaac

SEQ ID NO: 146645 - DNA, 76 bp, Homo sapiens
attgcccatttcataaagctgtatgtttttgaactacgcacatggtgctttgcacgaatcaaaactgccaaaggga

SEQ ID NO: 146646 - DNA, 76 bp, Homo sapiens
atttcataaagctgtatgtttttgaactacgcacatggtgctttgcacgaatcaaaactgccaaagggacagatgt

SEQ ID NO: 146647 - DNA, 77 bp, Homo sapiens
tgtatgtttttgaactacgcacatggtgctttgcacgaatcaaaactgccaaagggacagatgttgccaatttcaaa

SEQ ID NO: 146648 - DNA, 77 bp, Homo sapiens
tttttgaactacgcacatggtgctttgcacgaatcaaaactgccaaagggacagatgttgccaatttcaaatgtaca

SEQ ID NO: 146649 - DNA, 75 bp, Homo sapiens
catggtgctttgcacgaatcaaaactgccaaagggacagatgttgccaatttcaaatgtacagggggaaggcaaa

SEQ ID NO: 146650 - DNA, 75 bp, Homo sapiens
tttgcacgaatcaaaactgccaaagggacagatgttgccaatttcaaatgtacagggggaaggcaaatattgcta

SEQ ID NO: 146651 - DNA, 73 bp, Homo sapiens
aatcaaaactgccaaagggacagatgttgccaatttcaaatgtacagggggaaggcaaatattgctaagcaac

SEQ ID NO: 146652 - DNA, 74 bp, Homo sapiens
atgttgccaatttcaaatgtacagggggaaggcaaatattgctaagcaacggtgtacttgagagagcattttta

SEQ ID NO: 146653 - DNA, 74 bp, Homo sapiens
aatttcaaatgtacagggggaaggcaaatattgctaagcaacggtgtacttgagagagcatttttaggagcaga

SEQ ID NO: 146654 - DNA, 75 bp, Homo sapiens
atgtacagggggaaggcaaatattgctaagcaacggtgtacttgagagagcatttttaggagcagagccagggga

SEQ ID NO: 146655 - DNA, 76 bp, Homo sapiens
aaggcaaatattgctaagcaacggtgtacttgagagagcatttttaggagcagagccaggggagttatgcctggga

SEQ ID NO: 146656 - DNA, 80 bp, Homo sapiens
tattgctaagcaacggtgtacttgagagagcatttttaggagcagagccaggggagttatgcctgggagcactcactgct

SEQ ID NO: 146657 - DNA, 78 bp, Homo sapiens
aacggtgtacttgagagagcatttttaggagcagagccaggggagttatgcctgggagcactcactgcttcttatggc

SEQ ID NO: 146658 - DNA, 79 bp, Homo sapiens
agagagcatttttaggagcagagccaggggagttatgcctgggagcactcactgcttcttatggctcagtacaagggaa

SEQ ID NO: 146659 - DNA, 77 bp, Homo sapiens
atttttaggagcagagccaggggagttatgcctgggagcactcactgcttcttatggctcagtacaagggaagagat

SEQ ID NO: 146660 - DNA, 76 bp, Homo sapiens
agagccaggggagttatgcctgggagcactcactgcttcttatggctcagtacaagggaagagattcaaagttctt

SEQ ID NO: 146661 - DNA, 75 bp, Homo sapiens
agttatgcctgggagcactcactgcttcttatggctcagtacaagggaagagattcaaagttctttcctgtaagg

SEQ ID NO: 146662 - DNA, 76 bp, Homo sapiens
gtacaagggaagagattcaaagttctttcctgtaagggccgccattgcagccgccagcacacgagacagtgaccta

SEQ ID NO: 146663 - DNA, 80 bp, Homo sapiens
taagggccgccattgcagccgccagcacacgagacagtgacctagtggcaccgattagggctggcaaggggatgtgtgaa

SEQ ID NO: 146664 - DNA, 78 bp, Homo sapiens
attgcagccgccagcacacgagacagtgacctagtggcaccgattagggctggcaaggggatgtgtgaaaacaggaaa

SEQ ID NO: 146665 - DNA, 74 bp, Homo sapiens
ccagcacacgagacagtgacctagtggcaccgattagggctggcaaggggatgtgtgaaaacaggaaagctttt

SEQ ID NO: 146666 - DNA, 73 bp, Homo sapiens
acacgagacagtgacctagtggcaccgattagggctggcaaggggatgtgtgaaaacaggaaagcttttttgc

SEQ ID NO: 146667 - DNA, 73 bp, Homo sapiens
cgattagggctggcaaggggatgtgtgaaaacaggaaagcttttttgccatgtgggaaggcagtaagacatgt

SEQ ID NO: 146668 - DNA, 76 bp, Homo sapiens
ctggcaaggggatgtgtgaaaacaggaaagcttttttgccatgtgggaaggcagtaagacatgttcacagaggtga

SEQ ID NO: 146669 - DNA, 75 bp, Homo sapiens
aaaacaggaaagcttttttgccatgtgggaaggcagtaagacatgttcacagaggtgagtgccccacagtgtaca

SEQ ID NO: 146670 - DNA, 78 bp, Homo sapiens
ttttttgccatgtgggaaggcagtaagacatgttcacagaggtgagtgccccacagtgtacagctgccccacagtaag

SEQ ID NO: 146671 - DNA, 84 bp, Homo sapiens
atgtgggaaggcagtaagacatgttcacagaggtgagtgccccacagtgtacagctgccccacagtaagtatgcagcagctgga

SEQ ID NO: 146672 - DNA, 83 bp, Homo sapiens
aaggcagtaagacatgttcacagaggtgagtgccccacagtgtacagctgccccacagtaagtatgcagcagctggaggttca

SEQ ID NO: 146673 - DNA, 82 bp, Homo sapiens
agacatgttcacagaggtgagtgccccacagtgtacagctgccccacagtaagtatgcagcagctggaggttcaggtgggga

SEQ ID NO: 146674 - DNA, 80 bp, Homo sapiens
acagaggtgagtgccccacagtgtacagctgccccacagtaagtatgcagcagctggaggttcaggtggggaggatggag

SEQ ID NO: 146675 - DNA, 77 bp, Homo sapiens
ccacagtgtacagctgccccacagtaagtatgcagcagctggaggttcaggtggggaggatggagggtagggaaata

SEQ ID NO: 146676 - DNA, 78 bp, Homo sapiens
tgtacagctgccccacagtaagtatgcagcagctggaggttcaggtggggaggatggagggtagggaaataagtgaga

SEQ ID NO: 146677 - DNA, 76 bp, Homo sapiens
acagtaagtatgcagcagctggaggttcaggtggggaggatggagggtagggaaataagtgagaggtgaggccaca

SEQ ID NO: 146678 - DNA, 72 bp, Homo sapiens
aggatggagggtagggaaataagtgagaggtgaggccacaagagaaagttgatgtgtcttgtttctcttccc

SEQ ID NO: 146679 - DNA, 71 bp, Homo sapiens
ggaaataagtgagaggtgaggccacaagagaaagttgatgtgtcttgtttctcttcccccttctcttcttt

SEQ ID NO: 146680 - DNA, 71 bp, Homo sapiens
taagtgagaggtgaggccacaagagaaagttgatgtgtcttgtttctcttcccccttctcttcttttcttt

SEQ ID NO: 146681 - DNA, 67 bp, Homo sapiens
aagagaaagttgatgtgtcttgtttctcttcccccttctcttcttttcttttgcccccctgtgttag

SEQ ID NO: 146682 - DNA, 68 bp, Homo sapiens
tgtcttgtttctcttcccccttctcttcttttcttttgcccccctgtgttaggggctaacatggaaga

SEQ ID NO: 146683 - DNA, 67 bp, Homo sapiens
tttctcttcccccttctcttcttttcttttgcccccctgtgttaggggctaacatggaagaagagaa

SEQ ID NO: 146684 - DNA, 70 bp, Homo sapiens
ttctcttcttttcttttgcccccctgtgttaggggctaacatggaagaagagaaggatcaaaatgacctc

SEQ ID NO: 146685 - DNA, 70 bp, Homo sapiens
tttcttttgcccccctgtgttaggggctaacatggaagaagagaaggatcaaaatgacctctgtggttta

SEQ ID NO: 146686 - DNA, 74 bp, Homo sapiens
cccctgtgttaggggctaacatggaagaagagaaggatcaaaatgacctctgtggtttagtgcatgaccttata

SEQ ID NO: 146687 - DNA, 74 bp, Homo sapiens
gtgttaggggctaacatggaagaagagaaggatcaaaatgacctctgtggtttagtgcatgaccttataaacaa

SEQ ID NO: 146688 - DNA, 73 bp, Homo sapiens
ctaacatggaagaagagaaggatcaaaatgacctctgtggtttagtgcatgaccttataaacaaggtaaataa

SEQ ID NO: 146689 - DNA, 75 bp, Homo sapiens
aagagaaggatcaaaatgacctctgtggtttagtgcatgaccttataaacaaggtaaataagcttgccagccata

SEQ ID NO: 146690 - DNA, 73 bp, Homo sapiens
aaaatgacctctgtggtttagtgcatgaccttataaacaaggtaaataagcttgccagccataggtattcgtc

SEQ ID NO: 146691 - DNA, 72 bp, Homo sapiens
acctctgtggtttagtgcatgaccttataaacaaggtaaataagcttgccagccataggtattcgtcccttc

SEQ ID NO: 146692 - DNA, 72 bp, Homo sapiens
tttagtgcatgaccttataaacaaggtaaataagcttgccagccataggtattcgtcccttcccatgtcccc

SEQ ID NO: 146693 - DNA, 71 bp, Homo sapiens
tataaacaaggtaaataagcttgccagccataggtattcgtcccttcccatgtcccctccctctgtataaa

SEQ ID NO: 146694 - DNA, 71 bp, Homo sapiens
aaggtaaataagcttgccagccataggtattcgtcccttcccatgtcccctccctctgtataaacttgata

SEQ ID NO: 146695 - DNA, 74 bp, Homo sapiens
taagcttgccagccataggtattcgtcccttcccatgtcccctccctctgtataaacttgataggtaatagaca

SEQ ID NO: 146696 - DNA, 70 bp, Homo sapiens
ataggtattcgtcccttcccatgtcccctccctctgtataaacttgataggtaatagacaggtggcgtgg

SEQ ID NO: 146697 - DNA, 72 bp, Homo sapiens
tttttttttggctaccactagaggcttggaatacctcttgagatttgcatggttgttagtttagattatgga

SEQ ID NO: 146698 - DNA, 76 bp, Homo sapiens
ttttggctaccactagaggcttggaatacctcttgagatttgcatggttgttagtttagattatggattcattctc

SEQ ID NO: 146699 - DNA, 75 bp, Homo sapiens
actagaggcttggaatacctcttgagatttgcatggttgttagtttagattatggattcattctctccctccctc

SEQ ID NO: 146700 - DNA, 76 bp, Homo sapiens
ttggaatacctcttgagatttgcatggttgttagtttagattatggattcattctctccctccctctccttctgtc

SEQ ID NO: 146701 - DNA, 77 bp, Homo sapiens
tcttgagatttgcatggttgttagtttagattatggattcattctctccctccctctccttctgtccccatctcctc

SEQ ID NO: 146702 - DNA, 70 bp, Homo sapiens
ttccttttttctcttctccttcccctcctttctttcattttactgaaataatggtgagagtgacagtaga

SEQ ID NO: 146703 - DNA, 70 bp, Homo sapiens
cttctccttcccctcctttctttcattttactgaaataatggtgagagtgacagtagagaaaatataact

SEQ ID NO: 146704 - DNA, 71 bp, Homo sapiens
tccttcccctcctttctttcattttactgaaataatggtgagagtgacagtagagaaaatataacttggag

SEQ ID NO: 146705 - DNA, 70 bp, Homo sapiens
ccctcctttctttcattttactgaaataatggtgagagtgacagtagagaaaatataacttggagttttg

SEQ ID NO: 146706 - DNA, 73 bp, Homo sapiens
ctttctttcattttactgaaataatggtgagagtgacagtagagaaaatataacttggagttttgtatctgga

SEQ ID NO: 146707 - DNA, 73 bp, Homo sapiens
ctttcattttactgaaataatggtgagagtgacagtagagaaaatataacttggagttttgtatctggagaaa

SEQ ID NO: 146708 - DNA, 76 bp, Homo sapiens
ttttactgaaataatggtgagagtgacagtagagaaaatataacttggagttttgtatctggagaaaatcacagca

SEQ ID NO: 146709 - DNA, 78 bp, Homo sapiens
tactgaaataatggtgagagtgacagtagagaaaatataacttggagttttgtatctggagaaaatcacagcatattc

SEQ ID NO: 146710 - DNA, 78 bp, Homo sapiens
tgaaataatggtgagagtgacagtagagaaaatataacttggagttttgtatctggagaaaatcacagcatattcttg

SEQ ID NO: 146711 - DNA, 79 bp, Homo sapiens
taatggtgagagtgacagtagagaaaatataacttggagttttgtatctggagaaaatcacagcatattcttggcaata

SEQ ID NO: 146712 - DNA, 78 bp, Homo sapiens
gtgagagtgacagtagagaaaatataacttggagttttgtatctggagaaaatcacagcatattcttggcaatatatt

SEQ ID NO: 146713 - DNA, 78 bp, Homo sapiens
gagtgacagtagagaaaatataacttggagttttgtatctggagaaaatcacagcatattcttggcaatatatttgaa

SEQ ID NO: 146714 - DNA, 76 bp, Homo sapiens
acagtagagaaaatataacttggagttttgtatctggagaaaatcacagcatattcttggcaatatatttgaaaga

SEQ ID NO: 146715 - DNA, 75 bp, Homo sapiens
atataacttggagttttgtatctggagaaaatcacagcatattcttggcaatatatttgaaagaaattcaaaaca

SEQ ID NO: 146716 - DNA, 75 bp, Homo sapiens
ggagttttgtatctggagaaaatcacagcatattcttggcaatatatttgaaagaaattcaaaacataagtatta

SEQ ID NO: 146717 - DNA, 75 bp, Homo sapiens
tatctggagaaaatcacagcatattcttggcaatatatttgaaagaaattcaaaacataagtattaaataaggta

SEQ ID NO: 146718 - DNA, 76 bp, Homo sapiens
tcacagcatattcttggcaatatatttgaaagaaattcaaaacataagtattaaataaggtattccttatcactca

SEQ ID NO: 146719 - DNA, 70 bp, Homo sapiens
cttggcaatatatttgaaagaaattcaaaacataagtattaaataaggtattccttatcactcaggattt

SEQ ID NO: 146720 - DNA, 68 bp, Homo sapiens
caatatatttgaaagaaattcaaaacataagtattaaataaggtattccttatcactcaggatttttt

SEQ ID NO: 146721 - DNA, 76 bp, Homo sapiens
ccatgctcagccttttcttcatctttcaaactctggacttgaatttctggatcacttagcaaatgtttatggcttt

SEQ ID NO: 146722 - DNA, 74 bp, Homo sapiens
ctcagccttttcttcatctttcaaactctggacttgaatttctggatcacttagcaaatgtttatggcttttaa

SEQ ID NO: 146723 - DNA, 72 bp, Homo sapiens
cttcatctttcaaactctggacttgaatttctggatcacttagcaaatgtttatggcttttaaaaatcttcc

SEQ ID NO: 146724 - DNA, 71 bp, Homo sapiens
ctttcaaactctggacttgaatttctggatcacttagcaaatgtttatggcttttaaaaatcttcctgaag

SEQ ID NO: 146725 - DNA, 71 bp, Homo sapiens
aactctggacttgaatttctggatcacttagcaaatgtttatggcttttaaaaatcttcctgaagtaaagc

SEQ ID NO: 146726 - DNA, 72 bp, Homo sapiens
ctctggacttgaatttctggatcacttagcaaatgtttatggcttttaaaaatcttcctgaagtaaagctaa

SEQ ID NO: 146727 - DNA, 69 bp, Homo sapiens
cttgaatttctggatcacttagcaaatgtttatggcttttaaaaatcttcctgaagtaaagctaaaaac

SEQ ID NO: 146728 - DNA, 70 bp, Homo sapiens
gaatttctggatcacttagcaaatgtttatggcttttaaaaatcttcctgaagtaaagctaaaaactgaa

SEQ ID NO: 146729 - DNA, 71 bp, Homo sapiens
gatcacttagcaaatgtttatggcttttaaaaatcttcctgaagtaaagctaaaaactgaaaatattggca

SEQ ID NO: 146730 - DNA, 71 bp, Homo sapiens
tcacttagcaaatgtttatggcttttaaaaatcttcctgaagtaaagctaaaaactgaaaatattggcagc

SEQ ID NO: 146731 - DNA, 76 bp, Homo sapiens
ttaaaaatcttcctgaagtaaagctaaaaactgaaaatattggcagcttctcagcctaaatatgatgtatgtgtgc

SEQ ID NO: 146732 - DNA, 80 bp, Homo sapiens
tcttcctgaagtaaagctaaaaactgaaaatattggcagcttctcagcctaaatatgatgtatgtgtgcgtatgcattta

SEQ ID NO: 146733 - DNA, 86 bp, Homo sapiens
aagtaaagctaaaaactgaaaatattggcagcttctcagcctaaatatgatgtatgtgtgcgtatgcatttatgcatgtgcatgca

SEQ ID NO: 146734 - DNA, 91 bp, Homo sapiens
ctgaaaatattggcagcttctcagcctaaatatgatgtatgtgtgcgtatgcatttatgcatgtgcatgcacactccatccaagatgttat

SEQ ID NO: 146735 - DNA, 90 bp, Homo sapiens
aatattggcagcttctcagcctaaatatgatgtatgtgtgcgtatgcatttatgcatgtgcatgcacactccatccaagatgttatttgt

SEQ ID NO: 146736 - DNA, 87 bp, Homo sapiens
aatatgatgtatgtgtgcgtatgcatttatgcatgtgcatgcacactccatccaagatgttatttgttgtttctcataagaaactta

SEQ ID NO: 146737 - DNA, 85 bp, Homo sapiens
tatgtgtgcgtatgcatttatgcatgtgcatgcacactccatccaagatgttatttgttgtttctcataagaaacttacaattta

SEQ ID NO: 146738 - DNA, 82 bp, Homo sapiens
gtatgcatttatgcatgtgcatgcacactccatccaagatgttatttgttgtttctcataagaaacttacaatttaagtcaa

SEQ ID NO: 146739 - DNA, 77 bp, Homo sapiens
gcatgtgcatgcacactccatccaagatgttatttgttgtttctcataagaaacttacaatttaagtcaaatttaaa

SEQ ID NO: 146740 - DNA, 68 bp, Homo sapiens
tttgttgtttctcataagaaacttacaatttaagtcaaatttaaaagatggtgggtgcttctacccaa

SEQ ID NO: 146741 - DNA, 66 bp, Homo sapiens
acttacaatttaagtcaaatttaaaagatggtgggtgcttctacccaagttttaacatataaacag

SEQ ID NO: 146742 - DNA, 67 bp, Homo sapiens
caatttaagtcaaatttaaaagatggtgggtgcttctacccaagttttaacatataaacagtattaa

SEQ ID NO: 146743 - DNA, 69 bp, Homo sapiens
ttaaaagatggtgggtgcttctacccaagttttaacatataaacagtattaattttcaccagtctagga

SEQ ID NO: 146744 - DNA, 68 bp, Homo sapiens
gatggtgggtgcttctacccaagttttaacatataaacagtattaattttcaccagtctaggaaaatt

SEQ ID NO: 146745 - DNA, 67 bp, Homo sapiens
gcttctacccaagttttaacatataaacagtattaattttcaccagtctaggaaaatttcaaaataa

SEQ ID NO: 146746 - DNA, 65 bp, Homo sapiens
caagttttaacatataaacagtattaattttcaccagtctaggaaaatttcaaaataattttcct

SEQ ID NO: 146747 - DNA, 69 bp, Homo sapiens
taaacagtattaattttcaccagtctaggaaaatttcaaaataattttccttcaatacagacaggtgta

SEQ ID NO: 146748 - DNA, 70 bp, Homo sapiens
gtattaattttcaccagtctaggaaaatttcaaaataattttccttcaatacagacaggtgtactagaga

SEQ ID NO: 146749 - DNA, 72 bp, Homo sapiens
tcaccagtctaggaaaatttcaaaataattttccttcaatacagacaggtgtactagagaaatttcagtgta

SEQ ID NO: 146750 - DNA, 71 bp, Homo sapiens
aatttcaaaataattttccttcaatacagacaggtgtactagagaaatttcagtgtacttctagctttatg

SEQ ID NO: 146751 - DNA, 76 bp, Homo sapiens
ccttcaatacagacaggtgtactagagaaatttcagtgtacttctagctttatggttctcattaatttattcagca

SEQ ID NO: 146752 - DNA, 78 bp, Homo sapiens
gtactagagaaatttcagtgtacttctagctttatggttctcattaatttattcagcatagtttgtgatctgtctata

SEQ ID NO: 146753 - DNA, 76 bp, Homo sapiens
atttcagtgtacttctagctttatggttctcattaatttattcagcatagtttgtgatctgtctatatttgtaggg

SEQ ID NO: 146754 - DNA, 74 bp, Homo sapiens
cttctagctttatggttctcattaatttattcagcatagtttgtgatctgtctatatttgtagggggtgtaaat

SEQ ID NO: 146755 - DNA, 75 bp, Homo sapiens
aatttattcagcatagtttgtgatctgtctatatttgtagggggtgtaaatttatgtgatgaaaagctaataggc

SEQ ID NO: 146756 - DNA, 76 bp, Homo sapiens
gcatagtttgtgatctgtctatatttgtagggggtgtaaatttatgtgatgaaaagctaataggcgaggacgatag

SEQ ID NO: 146757 - DNA, 74 bp, Homo sapiens
tttgtgatctgtctatatttgtagggggtgtaaatttatgtgatgaaaagctaataggcgaggacgatagtgtt

SEQ ID NO: 146758 - DNA, 70 bp, Homo sapiens
tatatttgtagggggtgtaaatttatgtgatgaaaagctaataggcgaggacgatagtgtttccactttt

SEQ ID NO: 146759 - DNA, 70 bp, Homo sapiens
tgtagggggtgtaaatttatgtgatgaaaagctaataggcgaggacgatagtgtttccactttttactcc

SEQ ID NO: 146760 - DNA, 71 bp, Homo sapiens
gtaaatttatgtgatgaaaagctaataggcgaggacgatagtgtttccactttttactccccaggagacag

SEQ ID NO: 146761 - DNA, 69 bp, Homo sapiens
atgaaaagctaataggcgaggacgatagtgtttccactttttactccccaggagacaggaattgtttaa

SEQ ID NO: 146762 - DNA, 69 bp, Homo sapiens
aggacgatagtgtttccactttttactccccaggagacaggaattgtttaaggttagctatagtgagtc

SEQ ID NO: 146763 - DNA, 69 bp, Homo sapiens
tttccactttttactccccaggagacaggaattgtttaaggttagctatagtgagtccgcttaagtcaa

SEQ ID NO: 146764 - DNA, 70 bp, Homo sapiens
tttttactccccaggagacaggaattgtttaaggttagctatagtgagtccgcttaagtcaacgccaaga

SEQ ID NO: 146765 - DNA, 72 bp, Homo sapiens
aggagacaggaattgtttaaggttagctatagtgagtccgcttaagtcaacgccaagacaactgagaaactg

SEQ ID NO: 146766 - DNA, 70 bp, Homo sapiens
aattgtttaaggttagctatagtgagtccgcttaagtcaacgccaagacaactgagaaactggcgaaaaa

SEQ ID NO: 146767 - DNA, 73 bp, Homo sapiens
atagtgagtccgcttaagtcaacgccaagacaactgagaaactggcgaaaaagcagtgagaaaggaagaagaa

SEQ ID NO: 146768 - DNA, 69 bp, Homo sapiens
ttaagtcaacgccaagacaactgagaaactggcgaaaaagcagtgagaaaggaagaagaacccccaatt

SEQ ID NO: 146769 - DNA, 68 bp, Homo sapiens
caagacaactgagaaactggcgaaaaagcagtgagaaaggaagaagaacccccaattttttctttgat

SEQ ID NO: 146770 - DNA, 67 bp, Homo sapiens
aactgagaaactggcgaaaaagcagtgagaaaggaagaagaacccccaattttttctttgattgatt

SEQ ID NO: 146771 - DNA, 69 bp, Homo sapiens
gcagtgagaaaggaagaagaacccccaattttttctttgattgatttgaatgtaggctagttatacctt

SEQ ID NO: 146772 - DNA, 70 bp, Homo sapiens
tctttgattgatttgaatgtaggctagttatacctttttggctgtttttagtaagaactatgttataaaa

SEQ ID NO: 146773 - DNA, 69 bp, Homo sapiens
tgtaggctagttatacctttttggctgtttttagtaagaactatgttataaaatgaattggaggacctg

SEQ ID NO: 146774 - DNA, 68 bp, Homo sapiens
tacctttttggctgtttttagtaagaactatgttataaaatgaattggaggacctgttaccaccagac

SEQ ID NO: 146775 - DNA, 69 bp, Homo sapiens
tttggctgtttttagtaagaactatgttataaaatgaattggaggacctgttaccaccagacttaggag

SEQ ID NO: 146776 - DNA, 69 bp, Homo sapiens
tagtaagaactatgttataaaatgaattggaggacctgttaccaccagacttaggaggtagtagttttc

SEQ ID NO: 146777 - DNA, 66 bp, Homo sapiens
aaaatgaattggaggacctgttaccaccagacttaggaggtagtagttttccagtgacttttaatt

SEQ ID NO: 146778 - DNA, 66 bp, Homo sapiens
gacctgttaccaccagacttaggaggtagtagttttccagtgacttttaatttccctaccagtctt

SEQ ID NO: 146779 - DNA, 64 bp, Homo sapiens
gttaccaccagacttaggaggtagtagttttccagtgacttttaatttccctaccagtcttttt

SEQ ID NO: 146780 - DNA, 65 bp, Homo sapiens
atacagggttctaggttagtgtaggaaaaaaaactggtgtattttattccacaagaagcttttgg

SEQ ID NO: 146781 - DNA, 65 bp, Homo sapiens
gttctaggttagtgtaggaaaaaaaactggtgtattttattccacaagaagcttttggtaaatta

SEQ ID NO: 146782 - DNA, 65 bp, Homo sapiens
gtgtaggaaaaaaaactggtgtattttattccacaagaagcttttggtaaattatttattaagga

SEQ ID NO: 146783 - DNA, 67 bp, Homo sapiens
actggtgtattttattccacaagaagcttttggtaaattatttattaaggaaacaactgttggacat

SEQ ID NO: 146784 - DNA, 71 bp, Homo sapiens
tgtattttattccacaagaagcttttggtaaattatttattaaggaaacaactgttggacattgagatggc

SEQ ID NO: 146785 - DNA, 69 bp, Homo sapiens
ccacaagaagcttttggtaaattatttattaaggaaacaactgttggacattgagatggcttttaaaga

SEQ ID NO: 146786 - DNA, 70 bp, Homo sapiens
tggtaaattatttattaaggaaacaactgttggacattgagatggcttttaaagatttacctagaagaga

SEQ ID NO: 146787 - DNA, 69 bp, Homo sapiens
ggtaaattatttattaaggaaacaactgttggacattgagatggcttttaaagatttacctagaagaga

SEQ ID NO: 146788 - DNA, 70 bp, Homo sapiens
tttattaaggaaacaactgttggacattgagatggcttttaaagatttacctagaagagataataaaaca

SEQ ID NO: 146789 - DNA, 70 bp, Homo sapiens
ggaaacaactgttggacattgagatggcttttaaagatttacctagaagagataataaaacagataaaac

SEQ ID NO: 146790 - DNA, 75 bp, Homo sapiens
tgttggacattgagatggcttttaaagatttacctagaagagataataaaacagataaaactgatctgctcaggg

SEQ ID NO: 146791 - DNA, 74 bp, Homo sapiens
acattgagatggcttttaaagatttacctagaagagataataaaacagataaaactgatctgctcaggggcctg

SEQ ID NO: 146792 - DNA, 74 bp, Homo sapiens
agatggcttttaaagatttacctagaagagataataaaacagataaaactgatctgctcaggggcctgtcttca

SEQ ID NO: 146793 - DNA, 72 bp, Homo sapiens
cttttaaagatttacctagaagagataataaaacagataaaactgatctgctcaggggcctgtcttcagtct

SEQ ID NO: 146794 - DNA, 73 bp, Homo sapiens
aaagatttacctagaagagataataaaacagataaaactgatctgctcaggggcctgtcttcagtcttttcag

SEQ ID NO: 146795 - DNA, 76 bp, Homo sapiens
tagaagagataataaaacagataaaactgatctgctcaggggcctgtcttcagtcttttcaggctcgtttactgtg

SEQ ID NO: 146796 - DNA, 77 bp, Homo sapiens
ataaaacagataaaactgatctgctcaggggcctgtcttcagtcttttcaggctcgtttactgtggtgttcatgcca

SEQ ID NO: 146797 - DNA, 80 bp, Homo sapiens
taaaactgatctgctcaggggcctgtcttcagtcttttcaggctcgtttactgtggtgttcatgccagcgcagcctggta

SEQ ID NO: 146798 - DNA, 80 bp, Homo sapiens
atctgctcaggggcctgtcttcagtcttttcaggctcgtttactgtggtgttcatgccagcgcagcctggtagacagtgt

SEQ ID NO: 146799 - DNA, 82 bp, Homo sapiens
tgtcttcagtcttttcaggctcgtttactgtggtgttcatgccagcgcagcctggtagacagtgttgctgtggctgtagaaa

SEQ ID NO: 146800 - DNA, 80 bp, Homo sapiens
agtcttttcaggctcgtttactgtggtgttcatgccagcgcagcctggtagacagtgttgctgtggctgtagaaataaca

SEQ ID NO: 146801 - DNA, 81 bp, Homo sapiens
ctcgtttactgtggtgttcatgccagcgcagcctggtagacagtgttgctgtggctgtagaaataacactgctcattttta

SEQ ID NO: 146802 - DNA, 84 bp, Homo sapiens
tactgtggtgttcatgccagcgcagcctggtagacagtgttgctgtggctgtagaaataacactgctcatttttatggaggata

SEQ ID NO: 146803 - DNA, 87 bp, Homo sapiens
ttcatgccagcgcagcctggtagacagtgttgctgtggctgtagaaataacactgctcatttttatggaggatattgctgtatgcca

SEQ ID NO: 146804 - DNA, 80 bp, Homo sapiens
cctggtagacagtgttgctgtggctgtagaaataacactgctcatttttatggaggatattgctgtatgccagttaaaga

SEQ ID NO: 146805 - DNA, 79 bp, Homo sapiens
acagtgttgctgtggctgtagaaataacactgctcatttttatggaggatattgctgtatgccagttaaagaaattcaa

SEQ ID NO: 146806 - DNA, 78 bp, Homo sapiens
tgtggctgtagaaataacactgctcatttttatggaggatattgctgtatgccagttaaagaaattcaagttgaaaga

SEQ ID NO: 146807 - DNA, 74 bp, Homo sapiens
gtagaaataacactgctcatttttatggaggatattgctgtatgccagttaaagaaattcaagttgaaagacct

SEQ ID NO: 146808 - DNA, 72 bp, Homo sapiens
cactgctcatttttatggaggatattgctgtatgccagttaaagaaattcaagttgaaagacctttaaattt

SEQ ID NO: 146809 - DNA, 68 bp, Homo sapiens
ttttatggaggatattgctgtatgccagttaaagaaattcaagttgaaagacctttaaatttttttta

SEQ ID NO: 146810 - DNA, 70 bp, Homo sapiens
ttaaattttttttaataatacacttccttccccacccccaagctgtcaccatgattatgatgccaggaaa

SEQ ID NO: 146811 - DNA, 75 bp, Homo sapiens
tttttaataatacacttccttccccacccccaagctgtcaccatgattatgatgccaggaaagcagtgcggtggc

SEQ ID NO: 146812 - DNA, 77 bp, Homo sapiens
atacacttccttccccacccccaagctgtcaccatgattatgatgccaggaaagcagtgcggtggctccaggattgt

SEQ ID NO: 146813 - DNA, 80 bp, Homo sapiens
cccacccccaagctgtcaccatgattatgatgccaggaaagcagtgcggtggctccaggattgttctcccatgggctgtg

SEQ ID NO: 146814 - DNA, 85 bp, Homo sapiens
agctgtcaccatgattatgatgccaggaaagcagtgcggtggctccaggattgttctcccatgggctgtgtgccaggtggatgaa

SEQ ID NO: 146815 - DNA, 83 bp, Homo sapiens
atgattatgatgccaggaaagcagtgcggtggctccaggattgttctcccatgggctgtgtgccaggtggatgaagtagtcag

SEQ ID NO: 146816 - DNA, 81 bp, Homo sapiens
atgatgccaggaaagcagtgcggtggctccaggattgttctcccatgggctgtgtgccaggtggatgaagtagtcaggagg

SEQ ID NO: 146817 - DNA, 78 bp, Homo sapiens
aaagcagtgcggtggctccaggattgttctcccatgggctgtgtgccaggtggatgaagtagtcaggagggccacagt

SEQ ID NO: 146818 - DNA, 78 bp, Homo sapiens
tggctccaggattgttctcccatgggctgtgtgccaggtggatgaagtagtcaggagggccacagttgggtttatgta

SEQ ID NO: 146819 - DNA, 79 bp, Homo sapiens
tgccaggtggatgaagtagtcaggagggccacagttgggtttatgtacaacctagatatcatctacttgtgctggttga

SEQ ID NO: 146820 - DNA, 76 bp, Homo sapiens
tgaagtagtcaggagggccacagttgggtttatgtacaacctagatatcatctacttgtgctggttgaccctccat

SEQ ID NO: 146821 - DNA, 73 bp, Homo sapiens
aggagggccacagttgggtttatgtacaacctagatatcatctacttgtgctggttgaccctccattttctaa

SEQ ID NO: 146822 - DNA, 72 bp, Homo sapiens
acagttgggtttatgtacaacctagatatcatctacttgtgctggttgaccctccattttctaaaggcaatt

SEQ ID NO: 146823 - DNA, 72 bp, Homo sapiens
gggtttatgtacaacctagatatcatctacttgtgctggttgaccctccattttctaaaggcaatttccaaa

SEQ ID NO: 146824 - DNA, 72 bp, Homo sapiens
ctagatatcatctacttgtgctggttgaccctccattttctaaaggcaatttccaaagggagttgcttttgt

SEQ ID NO: 146825 - DNA, 72 bp, Homo sapiens
tatcatctacttgtgctggttgaccctccattttctaaaggcaatttccaaagggagttgcttttgttgtta

SEQ ID NO: 146826 - DNA, 67 bp, Homo sapiens
ctggttgaccctccattttctaaaggcaatttccaaagggagttgcttttgttgttactattagaac

SEQ ID NO: 146827 - DNA, 66 bp, Homo sapiens
ctccattttctaaaggcaatttccaaagggagttgcttttgttgttactattagaacggttgcctt

SEQ ID NO: 146828 - DNA, 64 bp, Homo sapiens
ttttctaaaggcaatttccaaagggagttgcttttgttgttactattagaacggttgccttttt

SEQ ID NO: 146829 - DNA, 69 bp, Homo sapiens
atttccaaagggagttgcttttgttgttactattagaacggttgccttttttccatatgatctcttctc

SEQ ID NO: 146830 - DNA, 71 bp, Homo sapiens
aagggagttgcttttgttgttactattagaacggttgccttttttccatatgatctcttctctgtcactta

SEQ ID NO: 146831 - DNA, 75 bp, Homo sapiens
tgttgttactattagaacggttgccttttttccatatgatctcttctctgtcacttaggttctgtattctatata

SEQ ID NO: 146832 - DNA, 73 bp, Homo sapiens
ctattagaacggttgccttttttccatatgatctcttctctgtcacttaggttctgtattctatatagaaaag

SEQ ID NO: 146833 - DNA, 74 bp, Homo sapiens
tttttccatatgatctcttctctgtcacttaggttctgtattctatatagaaaagtatggagggaaagggaaga

SEQ ID NO: 146834 - DNA, 74 bp, Homo sapiens
tctcttctctgtcacttaggttctgtattctatatagaaaagtatggagggaaagggaagaatcaggaaagata

SEQ ID NO: 146835 - DNA, 75 bp, Homo sapiens
tgtcacttaggttctgtattctatatagaaaagtatggagggaaagggaagaatcaggaaagatagtgaatgcaa

SEQ ID NO: 146836 - DNA, 74 bp, Homo sapiens
ttctgtattctatatagaaaagtatggagggaaagggaagaatcaggaaagatagtgaatgcaagaatattggg

SEQ ID NO: 146837 - DNA, 73 bp, Homo sapiens
tatggagggaaagggaagaatcaggaaagatagtgaatgcaagaatattgggggttatgatgtggttaagtta

SEQ ID NO: 146838 - DNA, 73 bp, Homo sapiens
aaagggaagaatcaggaaagatagtgaatgcaagaatattgggggttatgatgtggttaagttagattgtgcc

SEQ ID NO: 146839 - DNA, 75 bp, Homo sapiens
aagaatcaggaaagatagtgaatgcaagaatattgggggttatgatgtggttaagttagattgtgcctcaaaaca

SEQ ID NO: 146840 - DNA, 74 bp, Homo sapiens
aaagatagtgaatgcaagaatattgggggttatgatgtggttaagttagattgtgcctcaaaacactgaaaaga

SEQ ID NO: 146841 - DNA, 72 bp, Homo sapiens
aatgcaagaatattgggggttatgatgtggttaagttagattgtgcctcaaaacactgaaaagattggagtt

SEQ ID NO: 146842 - DNA, 72 bp, Homo sapiens
ggggttatgatgtggttaagttagattgtgcctcaaaacactgaaaagattggagtttcgggtcaggagctc

SEQ ID NO: 146843 - DNA, 72 bp, Homo sapiens
atgtggttaagttagattgtgcctcaaaacactgaaaagattggagtttcgggtcaggagctctggattaaa

SEQ ID NO: 146844 - DNA, 72 bp, Homo sapiens
ttaagttagattgtgcctcaaaacactgaaaagattggagtttcgggtcaggagctctggattaaaggccaa

SEQ ID NO: 146845 - DNA, 68 bp, Homo sapiens
cctcaaaacactgaaaagattggagtttcgggtcaggagctctggattaaaggccaacgggaatcttt

SEQ ID NO: 146846 - DNA, 67 bp, Homo sapiens
acactgaaaagattggagtttcgggtcaggagctctggattaaaggccaacgggaatcttttaaact

SEQ ID NO: 146847 - DNA, 66 bp, Homo sapiens
aagattggagtttcgggtcaggagctctggattaaaggccaacgggaatcttttaaacttcttggt

SEQ ID NO: 146848 - DNA, 83 bp, Homo sapiens
ttgtgtgtgtgtgtcggtgtgtgaagtcagaggcagacgatgagagaaataaattgagatggagagaaaataatatgaatgct

SEQ ID NO: 146849 - DNA, 82 bp, Homo sapiens
tgtgtcggtgtgtgaagtcagaggcagacgatgagagaaataaattgagatggagagaaaataatatgaatgcttagaagat

SEQ ID NO: 146850 - DNA, 80 bp, Homo sapiens
gtgtgtgaagtcagaggcagacgatgagagaaataaattgagatggagagaaaataatatgaatgcttagaagattttaa

SEQ ID NO: 146851 - DNA, 78 bp, Homo sapiens
gtcagaggcagacgatgagagaaataaattgagatggagagaaaataatatgaatgcttagaagattttaaattcagg

SEQ ID NO: 146852 - DNA, 75 bp, Homo sapiens
acgatgagagaaataaattgagatggagagaaaataatatgaatgcttagaagattttaaattcagggctgggcg

SEQ ID NO: 146853 - DNA, 63 bp, Homo sapiens
aaaaaaaatttaaattcagaaggcattaagaggacatttattttttaaacgattttctccttg

SEQ ID NO: 146854 - DNA, 68 bp, Homo sapiens
taaattcagaaggcattaagaggacatttattttttaaacgattttctccttggcacttattaaatac

SEQ ID NO: 146855 - DNA, 67 bp, Homo sapiens
cagaaggcattaagaggacatttattttttaaacgattttctccttggcacttattaaatacctatt

SEQ ID NO: 146856 - DNA, 65 bp, Homo sapiens
ttaagaggacatttattttttaaacgattttctccttggcacttattaaatacctatttaaaata

SEQ ID NO: 146857 - DNA, 64 bp, Homo sapiens
ttttttaaacgattttctccttggcacttattaaatacctatttaaaataaattcaagaataac

SEQ ID NO: 146858 - DNA, 67 bp, Homo sapiens
acgattttctccttggcacttattaaatacctatttaaaataaattcaagaataacttttatatatc

SEQ ID NO: 146859 - DNA, 70 bp, Homo sapiens
tctccttggcacttattaaatacctatttaaaataaattcaagaataacttttatatatctagtctgccc

SEQ ID NO: 146860 - DNA, 67 bp, Homo sapiens
cttattaaatacctatttaaaataaattcaagaataacttttatatatctagtctgccccttgtatt

SEQ ID NO: 146861 - DNA, 67 bp, Homo sapiens
ttaaatacctatttaaaataaattcaagaataacttttatatatctagtctgccccttgtatttatt

SEQ ID NO: 146862 - DNA, 73 bp, Homo sapiens
gcgtgagccagtgtacccagcctcttgtgtttatttaaaaagaaatactggcgtttgtcgaatgatggagtct

SEQ ID NO: 146863 - DNA, 69 bp, Homo sapiens
agtgtacccagcctcttgtgtttatttaaaaagaaatactggcgtttgtcgaatgatggagtcttattt

SEQ ID NO: 146864 - DNA, 69 bp, Homo sapiens
cccagcctcttgtgtttatttaaaaagaaatactggcgtttgtcgaatgatggagtcttattttcaaac

SEQ ID NO: 146865 - DNA, 68 bp, Homo sapiens
gtgtttatttaaaaagaaatactggcgtttgtcgaatgatggagtcttattttcaaacttttgtatta

SEQ ID NO: 146866 - DNA, 69 bp, Homo sapiens
aaagaaatactggcgtttgtcgaatgatggagtcttattttcaaacttttgtattaaatatattttcgc

SEQ ID NO: 146867 - DNA, 73 bp, Homo sapiens
ctggcgtttgtcgaatgatggagtcttattttcaaacttttgtattaaatatattttcgctttcaccagatca

SEQ ID NO: 146868 - DNA, 74 bp, Homo sapiens
tgtcgaatgatggagtcttattttcaaacttttgtattaaatatattttcgctttcaccagatcagtaaatcag

SEQ ID NO: 146869 - DNA, 75 bp, Homo sapiens
gtcttattttcaaacttttgtattaaatatattttcgctttcaccagatcagtaaatcagtgtatcagatgagtc

SEQ ID NO: 146870 - DNA, 77 bp, Homo sapiens
caaacttttgtattaaatatattttcgctttcaccagatcagtaaatcagtgtatcagatgagtcttgctggaagtc

SEQ ID NO: 146871 - DNA, 80 bp, Homo sapiens
attaaatatattttcgctttcaccagatcagtaaatcagtgtatcagatgagtcttgctggaagtctgatgtagtttgtg

SEQ ID NO: 146872 - DNA, 81 bp, Homo sapiens
atatattttcgctttcaccagatcagtaaatcagtgtatcagatgagtcttgctggaagtctgatgtagtttgtgtatagt

SEQ ID NO: 146873 - DNA, 80 bp, Homo sapiens
ttcaccagatcagtaaatcagtgtatcagatgagtcttgctggaagtctgatgtagtttgtgtatagttttagaccaaat

SEQ ID NO: 146874 - DNA, 81 bp, Homo sapiens
atcagtaaatcagtgtatcagatgagtcttgctggaagtctgatgtagtttgtgtatagttttagaccaaatttatatgca

SEQ ID NO: 146875 - DNA, 77 bp, Homo sapiens
atgagtcttgctggaagtctgatgtagtttgtgtatagttttagaccaaatttatatgcagagataacgcaggaaaa

SEQ ID NO: 146876 - DNA, 76 bp, Homo sapiens
gctggaagtctgatgtagtttgtgtatagttttagaccaaatttatatgcagagataacgcaggaaaagataatta

SEQ ID NO: 146877 - DNA, 75 bp, Homo sapiens
ctgatgtagtttgtgtatagttttagaccaaatttatatgcagagataacgcaggaaaagataattaagtctatc

SEQ ID NO: 146878 - DNA, 75 bp, Homo sapiens
gtgtatagttttagaccaaatttatatgcagagataacgcaggaaaagataattaagtctatctaagattcagtg

SEQ ID NO: 146879 - DNA, 75 bp, Homo sapiens
gaccaaatttatatgcagagataacgcaggaaaagataattaagtctatctaagattcagtgggattagtaagcc

SEQ ID NO: 146880 - DNA, 74 bp, Homo sapiens
atttatatgcagagataacgcaggaaaagataattaagtctatctaagattcagtgggattagtaagccttaaa

SEQ ID NO: 146881 - DNA, 70 bp, Homo sapiens
cagagataacgcaggaaaagataattaagtctatctaagattcagtgggattagtaagccttaaaaaaaa

SEQ ID NO: 146882 - DNA, 69 bp, Homo sapiens
gaccaaatctgtttattgataggttatagaaaagcaaaatacttccttaaattaggcactttttgatag

SEQ ID NO: 146883 - DNA, 68 bp, Homo sapiens
ctgtttattgataggttatagaaaagcaaaatacttccttaaattaggcactttttgataggcttaaa

SEQ ID NO: 146884 - DNA, 70 bp, Homo sapiens
ttgataggttatagaaaagcaaaatacttccttaaattaggcactttttgataggcttaaataaatgatg

SEQ ID NO: 146885 - DNA, 72 bp, Homo sapiens
aaagcaaaatacttccttaaattaggcactttttgataggcttaaataaatgatgtataactgttcatgatg

SEQ ID NO: 146886 - DNA, 74 bp, Homo sapiens
acttccttaaattaggcactttttgataggcttaaataaatgatgtataactgttcatgatgttctgatattaa

SEQ ID NO: 146887 - DNA, 77 bp, Homo sapiens
aattaggcactttttgataggcttaaataaatgatgtataactgttcatgatgttctgatattaaatgaattgtaca

SEQ ID NO: 146888 - DNA, 78 bp, Homo sapiens
gcactttttgataggcttaaataaatgatgtataactgttcatgatgttctgatattaaatgaattgtacattcccag

SEQ ID NO: 146889 - DNA, 78 bp, Homo sapiens
aatgatgtataactgttcatgatgttctgatattaaatgaattgtacattcccaggatgaccttgagccctttttcta

SEQ ID NO: 146890 - DNA, 76 bp, Homo sapiens
tataactgttcatgatgttctgatattaaatgaattgtacattcccaggatgaccttgagccctttttctagaccc

SEQ ID NO: 146891 - DNA, 74 bp, Homo sapiens
tgatgttctgatattaaatgaattgtacattcccaggatgaccttgagccctttttctagaccctagtaattaa

SEQ ID NO: 146892 - DNA, 71 bp, Homo sapiens
aattgtacattcccaggatgaccttgagccctttttctagaccctagtaattaacctgattgctcattacc

SEQ ID NO: 146893 - DNA, 72 bp, Homo sapiens
attcccaggatgaccttgagccctttttctagaccctagtaattaacctgattgctcattacccagcattaa

SEQ ID NO: 146894 - DNA, 69 bp, Homo sapiens
accttgagccctttttctagaccctagtaattaacctgattgctcattacccagcattaaagccaaaaa

SEQ ID NO: 146895 - DNA, 66 bp, Homo sapiens
ccctttttctagaccctagtaattaacctgattgctcattacccagcattaaagccaaaaaaaaaa

SEQ ID NO: 146896 - DNA, 65 bp, Homo sapiens
aaaaaaaaaagcgggggcggaggatttacttgttcagaattaagatgtcaaggacaaggtcgtct

SEQ ID NO: 146897 - DNA, 68 bp, Homo sapiens
aaaaagcgggggcggaggatttacttgttcagaattaagatgtcaaggacaaggtcgtctttatttgc

SEQ ID NO: 146898 - DNA, 72 bp, Homo sapiens
ttacttgttcagaattaagatgtcaaggacaaggtcgtctttatttgccttctctcttttgcgtttgttata

SEQ ID NO: 146899 - DNA, 72 bp, Homo sapiens
aattaagatgtcaaggacaaggtcgtctttatttgccttctctcttttgcgtttgttatagtgtcagtaatc

SEQ ID NO: 146900 - DNA, 69 bp, Homo sapiens
aggacaaggtcgtctttatttgccttctctcttttgcgtttgttatagtgtcagtaatccccagggtgt

SEQ ID NO: 146901 - DNA, 68 bp, Homo sapiens
aaggtcgtctttatttgccttctctcttttgcgtttgttatagtgtcagtaatccccagggtgtttgg

SEQ ID NO: 146902 - DNA, 73 bp, Homo sapiens
ttatttgccttctctcttttgcgtttgttatagtgtcagtaatccccagggtgtttggggctcagattgcttc

SEQ ID NO: 146903 - DNA, 76 bp, Homo sapiens
tctctcttttgcgtttgttatagtgtcagtaatccccagggtgtttggggctcagattgcttcctcagagtatata

SEQ ID NO: 146904 - DNA, 77 bp, Homo sapiens
gtttgttatagtgtcagtaatccccagggtgtttggggctcagattgcttcctcagagtatatatgcctctagccta

SEQ ID NO: 146905 - DNA, 77 bp, Homo sapiens
tcagtaatccccagggtgtttggggctcagattgcttcctcagagtatatatgcctctagcctaccacttcaataat

SEQ ID NO: 146906 - DNA, 75 bp, Homo sapiens
tgtttggggctcagattgcttcctcagagtatatatgcctctagcctaccacttcaataattttctgtccttttt

SEQ ID NO: 146907 - DNA, 70 bp, Homo sapiens
attgcttcctcagagtatatatgcctctagcctaccacttcaataattttctgtccttttttcccccgtt

SEQ ID NO: 146908 - DNA, 68 bp, Homo sapiens
ttcctcagagtatatatgcctctagcctaccacttcaataattttctgtccttttttcccccgttttt

SEQ ID NO: 146909 - DNA, 67 bp, Homo sapiens
gagtatatatgcctctagcctaccacttcaataattttctgtccttttttcccccgttttttttgtg

SEQ ID NO: 146910 - DNA, 65 bp, Homo sapiens
atatatgcctctagcctaccacttcaataattttctgtccttttttcccccgttttttttgtgtt

SEQ ID NO: 146911 - DNA, 64 bp, Homo sapiens
atgcctctagcctaccacttcaataattttctgtccttttttcccccgttttttttgtgttttg

SEQ ID NO: 146912 - DNA, 61 bp, Homo sapiens
ctagcctaccacttcaataattttctgtccttttttcccccgttttttttgtgttttgttt

SEQ ID NO: 146913 - DNA, 72 bp, Homo sapiens
tgtgttttgtttttaaataacgatgccaggagacagaaaaccaacacctactccagaagaggctgttgagat

SEQ ID NO: 146914 - DNA, 76 bp, Homo sapiens
aataacgatgccaggagacagaaaaccaacacctactccagaagaggctgttgagattactgctggaataagccca

SEQ ID NO: 146915 - DNA, 73 bp, Homo sapiens
aaaaccaacacctactccagaagaggctgttgagattactgctggaataagcccaggataaaatctttatgtc

SEQ ID NO: 146916 - DNA, 75 bp, Homo sapiens
acctactccagaagaggctgttgagattactgctggaataagcccaggataaaatctttatgtcctttcagacaa

SEQ ID NO: 146917 - DNA, 75 bp, Homo sapiens
ggctgttgagattactgctggaataagcccaggataaaatctttatgtcctttcagacaaagcgtggattaaata

SEQ ID NO: 146918 - DNA, 74 bp, Homo sapiens
tgagattactgctggaataagcccaggataaaatctttatgtcctttcagacaaagcgtggattaaatagttta

SEQ ID NO: 146919 - DNA, 76 bp, Homo sapiens
tggaataagcccaggataaaatctttatgtcctttcagacaaagcgtggattaaatagtttatctgactcatatga

SEQ ID NO: 146920 - DNA, 76 bp, Homo sapiens
caggataaaatctttatgtcctttcagacaaagcgtggattaaatagtttatctgactcatatgactgcagtttct

SEQ ID NO: 146921 - DNA, 74 bp, Homo sapiens
aaaatctttatgtcctttcagacaaagcgtggattaaatagtttatctgactcatatgactgcagtttctttcg

SEQ ID NO: 146922 - DNA, 79 bp, Homo sapiens
tttcagacaaagcgtggattaaatagtttatctgactcatatgactgcagtttctttcggcctcatccagaaactgata

SEQ ID NO: 146923 - DNA, 77 bp, Homo sapiens
acaaagcgtggattaaatagtttatctgactcatatgactgcagtttctttcggcctcatccagaaactgatacaaa

SEQ ID NO: 146924 - DNA, 75 bp, Homo sapiens
gattaaatagtttatctgactcatatgactgcagtttctttcggcctcatccagaaactgatacaaagttgtttt

SEQ ID NO: 146925 - DNA, 74 bp, Homo sapiens
gtttatctgactcatatgactgcagtttctttcggcctcatccagaaactgatacaaagttgtttttttcttct

SEQ ID NO: 146926 - DNA, 71 bp, Homo sapiens
ctcatatgactgcagtttctttcggcctcatccagaaactgatacaaagttgtttttttcttcttcctttt

SEQ ID NO: 146927 - DNA, 81 bp, Homo sapiens
tttttctggtgcttctataatcttagcttatgctcagctgtgaaaaaagtaaatgtccaggcaggcactctctgcaacata

SEQ ID NO: 146928 - DNA, 80 bp, Homo sapiens
aatcttagcttatgctcagctgtgaaaaaagtaaatgtccaggcaggcactctctgcaacatagaattaaacatgcttcc

SEQ ID NO: 146929 - DNA, 81 bp, Homo sapiens
tatgctcagctgtgaaaaaagtaaatgtccaggcaggcactctctgcaacatagaattaaacatgcttcctgaacattgtt

SEQ ID NO: 146930 - DNA, 77 bp, Homo sapiens
aaaaagtaaatgtccaggcaggcactctctgcaacatagaattaaacatgcttcctgaacattgtttgcactttcat

SEQ ID NO: 146931 - DNA, 82 bp, Homo sapiens
gtaaatgtccaggcaggcactctctgcaacatagaattaaacatgcttcctgaacattgtttgcactttcatttgacagaga

SEQ ID NO: 146932 - DNA, 81 bp, Homo sapiens
aggcactctctgcaacatagaattaaacatgcttcctgaacattgtttgcactttcatttgacagagagcagaaatacagg

SEQ ID NO: 146933 - DNA, 81 bp, Homo sapiens
tctgcaacatagaattaaacatgcttcctgaacattgtttgcactttcatttgacagagagcagaaatacaggtttatgta

SEQ ID NO: 146934 - DNA, 78 bp, Homo sapiens
agaattaaacatgcttcctgaacattgtttgcactttcatttgacagagagcagaaatacaggtttatgtatccataa

SEQ ID NO: 146935 - DNA, 78 bp, Homo sapiens
cttcctgaacattgtttgcactttcatttgacagagagcagaaatacaggtttatgtatccataaatcctgtcatggt

SEQ ID NO: 146936 - DNA, 78 bp, Homo sapiens
attgtttgcactttcatttgacagagagcagaaatacaggtttatgtatccataaatcctgtcatggttgacaaagta

SEQ ID NO: 146937 - DNA, 78 bp, Homo sapiens
ttgcactttcatttgacagagagcagaaatacaggtttatgtatccataaatcctgtcatggttgacaaagtaattta

SEQ ID NO: 146938 - DNA, 76 bp, Homo sapiens
gacagagagcagaaatacaggtttatgtatccataaatcctgtcatggttgacaaagtaatttaatagtgttttga

SEQ ID NO: 146939 - DNA, 76 bp, Homo sapiens
gagcagaaatacaggtttatgtatccataaatcctgtcatggttgacaaagtaatttaatagtgttttgactcaga

SEQ ID NO: 146940 - DNA, 72 bp, Homo sapiens
ggtttatgtatccataaatcctgtcatggttgacaaagtaatttaatagtgttttgactcagaaccatccgt

SEQ ID NO: 146941 - DNA, 73 bp, Homo sapiens
gtatccataaatcctgtcatggttgacaaagtaatttaatagtgttttgactcagaaccatccgttaatacga

SEQ ID NO: 146942 - DNA, 74 bp, Homo sapiens
atcctgtcatggttgacaaagtaatttaatagtgttttgactcagaaccatccgttaatacgatttgagagaca

SEQ ID NO: 146943 - DNA, 75 bp, Homo sapiens
tcatggttgacaaagtaatttaatagtgttttgactcagaaccatccgttaatacgatttgagagacagagtaga

SEQ ID NO: 146944 - DNA, 72 bp, Homo sapiens
ggttgacaaagtaatttaatagtgttttgactcagaaccatccgttaatacgatttgagagacagagtagag

SEQ ID NO: 146945 - DNA, 73 bp, Homo sapiens
aaagtaatttaatagtgttttgactcagaaccatccgttaatacgatttgagagacagagtagagtgctcgtg

SEQ ID NO: 146946 - DNA, 83 bp, Homo sapiens
tgcatgtgtgtgtaggactggatggggtgggtgcagggcaggaagcatgtgacagaacaccaccacgctgcagtttcacaccc

SEQ ID NO: 146947 - DNA, 80 bp, Homo sapiens
gtgtgtgtaggactggatggggtgggtgcagggcaggaagcatgtgacagaacaccaccacgctgcagtttcacaccctc

SEQ ID NO: 146948 - DNA, 80 bp, Homo sapiens
gatggggtgggtgcagggcaggaagcatgtgacagaacaccaccacgctgcagtttcacaccctccctgcagcaataggt

SEQ ID NO: 146949 - DNA, 80 bp, Homo sapiens
gtgcagggcaggaagcatgtgacagaacaccaccacgctgcagtttcacaccctccctgcagcaataggttttaactgaa

SEQ ID NO: 146950 - DNA, 77 bp, Homo sapiens
aggaagcatgtgacagaacaccaccacgctgcagtttcacaccctccctgcagcaataggttttaactgaaaagcta

SEQ ID NO: 146951 - DNA, 77 bp, Homo sapiens
atgtgacagaacaccaccacgctgcagtttcacaccctccctgcagcaataggttttaactgaaaagctactactca

SEQ ID NO: 146952 - DNA, 78 bp, Homo sapiens
caccacgctgcagtttcacaccctccctgcagcaataggttttaactgaaaagctactactcatgctttgcaaattga

SEQ ID NO: 146953 - DNA, 76 bp, Homo sapiens
cagtttcacaccctccctgcagcaataggttttaactgaaaagctactactcatgctttgcaaattgatagtccca

SEQ ID NO: 146954 - DNA, 74 bp, Homo sapiens
ccctccctgcagcaataggttttaactgaaaagctactactcatgctttgcaaattgatagtcccactgaaaaa

SEQ ID NO: 146955 - DNA, 73 bp, Homo sapiens
cctgcagcaataggttttaactgaaaagctactactcatgctttgcaaattgatagtcccactgaaaaaaaaa

SEQ ID NO: 146956 - DNA, 65 bp, Homo sapiens
aaaaaaattaaattcttccgaaaaacactctgaggttttcgtgagcagaattggttgtagaaggg

SEQ ID NO: 146957 - DNA, 71 bp, Homo sapiens
ttaaattcttccgaaaaacactctgaggttttcgtgagcagaattggttgtagaaggggaaatagatcata

SEQ ID NO: 146958 - DNA, 72 bp, Homo sapiens
aaaaacactctgaggttttcgtgagcagaattggttgtagaaggggaaatagatcatatagcttaggccatt

SEQ ID NO: 146959 - DNA, 74 bp, Homo sapiens
actctgaggttttcgtgagcagaattggttgtagaaggggaaatagatcatatagcttaggccatttgaaagga

SEQ ID NO: 146960 - DNA, 76 bp, Homo sapiens
tttcgtgagcagaattggttgtagaaggggaaatagatcatatagcttaggccatttgaaaggacttgtcagttga

SEQ ID NO: 146961 - DNA, 75 bp, Homo sapiens
aaggggaaatagatcatatagcttaggccatttgaaaggacttgtcagttgactattgctggaatggaaccagtg

SEQ ID NO: 146962 - DNA, 77 bp, Homo sapiens
aaatagatcatatagcttaggccatttgaaaggacttgtcagttgactattgctggaatggaaccagtgtctagact

SEQ ID NO: 146963 - DNA, 76 bp, Homo sapiens
tatagcttaggccatttgaaaggacttgtcagttgactattgctggaatggaaccagtgtctagacttgttctttg

SEQ ID NO: 146964 - DNA, 75 bp, Homo sapiens
tttgaaaggacttgtcagttgactattgctggaatggaaccagtgtctagacttgttctttgtgatgcctttaaa

SEQ ID NO: 146965 - DNA, 73 bp, Homo sapiens
aggacttgtcagttgactattgctggaatggaaccagtgtctagacttgttctttgtgatgcctttaaaaaaa

SEQ ID NO: 146966 - DNA, 74 bp, Homo sapiens
aaaaaaaaatcagtgccttttaaccattcttacttaatcattcatggctgctgtgcccacaatgggcttcatgg

SEQ ID NO: 146967 - DNA, 78 bp, Homo sapiens
aaaatcagtgccttttaaccattcttacttaatcattcatggctgctgtgcccacaatgggcttcatggggcctcatg

SEQ ID NO: 146968 - DNA, 82 bp, Homo sapiens
tacttaatcattcatggctgctgtgcccacaatgggcttcatggggcctcatgtggtctttcatcaaaggcacagtgtttta

SEQ ID NO: 146969 - DNA, 80 bp, Homo sapiens
aatcattcatggctgctgtgcccacaatgggcttcatggggcctcatgtggtctttcatcaaaggcacagtgttttaaag

SEQ ID NO: 146970 - DNA, 76 bp, Homo sapiens
ctgtgcccacaatgggcttcatggggcctcatgtggtctttcatcaaaggcacagtgttttaaagtcttagaccat

SEQ ID NO: 146971 - DNA, 74 bp, Homo sapiens
ccacaatgggcttcatggggcctcatgtggtctttcatcaaaggcacagtgttttaaagtcttagaccattggg

SEQ ID NO: 146972 - DNA, 75 bp, Homo sapiens
cttcatggggcctcatgtggtctttcatcaaaggcacagtgttttaaagtcttagaccattggggattctgattc

SEQ ID NO: 146973 - DNA, 71 bp, Homo sapiens
atgtggtctttcatcaaaggcacagtgttttaaagtcttagaccattggggattctgattccccttattac

SEQ ID NO: 146974 - DNA, 71 bp, Homo sapiens
tttcatcaaaggcacagtgttttaaagtcttagaccattggggattctgattccccttattacgtggtgaa

SEQ ID NO: 146975 - DNA, 69 bp, Homo sapiens
cacagtgttttaaagtcttagaccattggggattctgattccccttattacgtggtgaatggtaatggt

SEQ ID NO: 146976 - DNA, 72 bp, Homo sapiens
ttaaagtcttagaccattggggattctgattccccttattacgtggtgaatggtaatggttcatagtcaata

SEQ ID NO: 146977 - DNA, 72 bp, Homo sapiens
ttagaccattggggattctgattccccttattacgtggtgaatggtaatggttcatagtcaatagttaggaa

SEQ ID NO: 146978 - DNA, 72 bp, Homo sapiens
gattctgattccccttattacgtggtgaatggtaatggttcatagtcaatagttaggaagttggtgaataac

SEQ ID NO: 146979 - DNA, 71 bp, Homo sapiens
attccccttattacgtggtgaatggtaatggttcatagtcaatagttaggaagttggtgaataactgagat

SEQ ID NO: 146980 - DNA, 73 bp, Homo sapiens
attacgtggtgaatggtaatggttcatagtcaatagttaggaagttggtgaataactgagattagacatttac

SEQ ID NO: 146981 - DNA, 72 bp, Homo sapiens
ggttcatagtcaatagttaggaagttggtgaataactgagattagacatttactgtcaaacagtggtaagtt

SEQ ID NO: 146982 - DNA, 71 bp, Homo sapiens
tcaatagttaggaagttggtgaataactgagattagacatttactgtcaaacagtggtaagttttttacat

SEQ ID NO: 146983 - DNA, 68 bp, Homo sapiens
ggaagttggtgaataactgagattagacatttactgtcaaacagtggtaagttttttacatttgtttt

SEQ ID NO: 146984 - DNA, 69 bp, Homo sapiens
actgagattagacatttactgtcaaacagtggtaagttttttacatttgtttttcattcaggtactttg

SEQ ID NO: 146985 - DNA, 67 bp, Homo sapiens
tactgtcaaacagtggtaagttttttacatttgtttttcattcaggtactttgttgttaagtgagtt

SEQ ID NO: 146986 - DNA, 65 bp, Homo sapiens
tggtaagttttttacatttgtttttcattcaggtactttgttgttaagtgagtttaaacctatcc

SEQ ID NO: 146987 - DNA, 68 bp, Homo sapiens
ttacatttgtttttcattcaggtactttgttgttaagtgagtttaaacctatcccagcacaccctact

SEQ ID NO: 146988 - DNA, 67 bp, Homo sapiens
ttttcattcaggtactttgttgttaagtgagtttaaacctatcccagcacaccctacttattttaac

SEQ ID NO: 146989 - DNA, 68 bp, Homo sapiens
tcaggtactttgttgttaagtgagtttaaacctatcccagcacaccctacttattttaacttttgcac

SEQ ID NO: 146990 - DNA, 72 bp, Homo sapiens
agtgagtttaaacctatcccagcacaccctacttattttaacttttgcactgttagttgacatattgtcata

SEQ ID NO: 146991 - DNA, 74 bp, Homo sapiens
aacctatcccagcacaccctacttattttaacttttgcactgttagttgacatattgtcataatatgtactgaa

SEQ ID NO: 146992 - DNA, 75 bp, Homo sapiens
gcacaccctacttattttaacttttgcactgttagttgacatattgtcataatatgtactgaaaacatttctgcg

SEQ ID NO: 146993 - DNA, 76 bp, Homo sapiens
ttttaacttttgcactgttagttgacatattgtcataatatgtactgaaaacatttctgcgtataaaacatcaaca

SEQ ID NO: 146994 - DNA, 79 bp, Homo sapiens
ttgcactgttagttgacatattgtcataatatgtactgaaaacatttctgcgtataaaacatcaacactgaattgtacc

SEQ ID NO: 146995 - DNA, 76 bp, Homo sapiens
tgttagttgacatattgtcataatatgtactgaaaacatttctgcgtataaaacatcaacactgaattgtaccttt

SEQ ID NO: 146996 - DNA, 77 bp, Homo sapiens
catattgtcataatatgtactgaaaacatttctgcgtataaaacatcaacactgaattgtaccttttatatgtactg

SEQ ID NO: 146997 - DNA, 77 bp, Homo sapiens
tgtactgaaaacatttctgcgtataaaacatcaacactgaattgtaccttttatatgtactgtttcatgtgactata

SEQ ID NO: 146998 - DNA, 75 bp, Homo sapiens
aacatttctgcgtataaaacatcaacactgaattgtaccttttatatgtactgtttcatgtgactatacaggacc

SEQ ID NO: 146999 - DNA, 77 bp, Homo sapiens
cgtataaaacatcaacactgaattgtaccttttatatgtactgtttcatgtgactatacaggaccttgcaaacatca

SEQ ID NO: 147000 - DNA, 77 bp, Homo sapiens
attgtaccttttatatgtactgtttcatgtgactatacaggaccttgcaaacatcaaaaattatattgtatgtgatc

SEQ ID NO: 147001 - DNA, 79 bp, Homo sapiens
ccttttatatgtactgtttcatgtgactatacaggaccttgcaaacatcaaaaattatattgtatgtgatctcaggata

SEQ ID NO: 147002 - DNA, 80 bp, Homo sapiens
gtactgtttcatgtgactatacaggaccttgcaaacatcaaaaattatattgtatgtgatctcaggatatataatggtaa

SEQ ID NO: 147003 - DNA, 80 bp, Homo sapiens
catgtgactatacaggaccttgcaaacatcaaaaattatattgtatgtgatctcaggatatataatggtaacaaaatcag

SEQ ID NO: 147004 - DNA, 81 bp, Homo sapiens
tacaggaccttgcaaacatcaaaaattatattgtatgtgatctcaggatatataatggtaacaaaatcagtgaatccagca

SEQ ID NO: 147005 - DNA, 81 bp, Homo sapiens
acatcaaaaattatattgtatgtgatctcaggatatataatggtaacaaaatcagtgaatccagcattgttactgcttctc

SEQ ID NO: 147006 - DNA, 84 bp, Homo sapiens
ttgtatgtgatctcaggatatataatggtaacaaaatcagtgaatccagcattgttactgcttctctcattatttgcatattct

SEQ ID NO: 147007 - DNA, 83 bp, Homo sapiens
tcaggatatataatggtaacaaaatcagtgaatccagcattgttactgcttctctcattatttgcatattcttatcaagtgag

SEQ ID NO: 147008 - DNA, 83 bp, Homo sapiens
tgaatccagcattgttactgcttctctcattatttgcatattcttatcaagtgagtgtttacaattatacatgtggacaacaa

SEQ ID NO: 147009 - DNA, 81 bp, Homo sapiens
tgttactgcttctctcattatttgcatattcttatcaagtgagtgtttacaattatacatgtggacaacaaccactcattg

SEQ ID NO: 147010 - DNA, 79 bp, Homo sapiens
cttctctcattatttgcatattcttatcaagtgagtgtttacaattatacatgtggacaacaaccactcattgttttca

SEQ ID NO: 147011 - DNA, 75 bp, Homo sapiens
atttgcatattcttatcaagtgagtgtttacaattatacatgtggacaacaaccactcattgttttcatttttat

SEQ ID NO: 147012 - DNA, 67 bp, Homo sapiens
ttatttaagccgggtcttaagaactggaatccttggtttcataattaaaagaggccctctttgtaga

SEQ ID NO: 147013 - DNA, 68 bp, Homo sapiens
gggtcttaagaactggaatccttggtttcataattaaaagaggccctctttgtagagatcaaaacaaa

SEQ ID NO: 147014 - DNA, 69 bp, Homo sapiens
agaactggaatccttggtttcataattaaaagaggccctctttgtagagatcaaaacaaaatttccaga

SEQ ID NO: 147015 - DNA, 69 bp, Homo sapiens
tggtttcataattaaaagaggccctctttgtagagatcaaaacaaaatttccagaatgttttaagtagc

SEQ ID NO: 147016 - DNA, 71 bp, Homo sapiens
attaaaagaggccctctttgtagagatcaaaacaaaatttccagaatgttttaagtagctcagttaatgca

SEQ ID NO: 147017 - DNA, 74 bp, Homo sapiens
aagaggccctctttgtagagatcaaaacaaaatttccagaatgttttaagtagctcagttaatgcagattgagc

SEQ ID NO: 147018 - DNA, 74 bp, Homo sapiens
ctttgtagagatcaaaacaaaatttccagaatgttttaagtagctcagttaatgcagattgagcctctacaaat

SEQ ID NO: 147019 - DNA, 73 bp, Homo sapiens
caaaacaaaatttccagaatgttttaagtagctcagttaatgcagattgagcctctacaaattttatatgctt

SEQ ID NO: 147020 - DNA, 74 bp, Homo sapiens
ccagaatgttttaagtagctcagttaatgcagattgagcctctacaaattttatatgctttagaaaaatatctt

SEQ ID NO: 147021 - DNA, 77 bp, Homo sapiens
gttttaagtagctcagttaatgcagattgagcctctacaaattttatatgctttagaaaaatatctttatgatgcca

SEQ ID NO: 147022 - DNA, 81 bp, Homo sapiens
gctcagttaatgcagattgagcctctacaaattttatatgctttagaaaaatatctttatgatgccaattatgcagattac

SEQ ID NO: 147023 - DNA, 81 bp, Homo sapiens
tgcagattgagcctctacaaattttatatgctttagaaaaatatctttatgatgccaattatgcagattacctcactggta

SEQ ID NO: 147024 - DNA, 79 bp, Homo sapiens
ttatatgctttagaaaaatatctttatgatgccaattatgcagattacctcactggtataatcaaaatgaccaactgga

SEQ ID NO: 147025 - DNA, 77 bp, Homo sapiens
gctttagaaaaatatctttatgatgccaattatgcagattacctcactggtataatcaaaatgaccaactggaaaga

SEQ ID NO: 147026 - DNA, 75 bp, Homo sapiens
atctttatgatgccaattatgcagattacctcactggtataatcaaaatgaccaactggaaagaaacaataagtt

SEQ ID NO: 147027 - DNA, 73 bp, Homo sapiens
atgcagattacctcactggtataatcaaaatgaccaactggaaagaaacaataagttttctaattattcatat

SEQ ID NO: 147028 - DNA, 70 bp, Homo sapiens
acctcactggtataatcaaaatgaccaactggaaagaaacaataagttttctaattattcatattaatct

SEQ ID NO: 147029 - DNA, 70 bp, Homo sapiens
atcaaaatgaccaactggaaagaaacaataagttttctaattattcatattaatctttaaagaactgcta

SEQ ID NO: 147030 - DNA, 66 bp, Homo sapiens
ggaaagaaacaataagttttctaattattcatattaatctttaaagaactgctattttaaaatact

SEQ ID NO: 147031 - DNA, 66 bp, Homo sapiens
agttttctaattattcatattaatctttaaagaactgctattttaaaatacttcttcccattgggt

SEQ ID NO: 147032 - DNA, 66 bp, Homo sapiens
ttattcatattaatctttaaagaactgctattttaaaatacttcttcccattgggttttataagtt

SEQ ID NO: 147033 - DNA, 68 bp, Homo sapiens
taatctttaaagaactgctattttaaaatacttcttcccattgggttttataagtttcagtgatgtct

SEQ ID NO: 147034 - DNA, 68 bp, Homo sapiens
agaactgctattttaaaatacttcttcccattgggttttataagtttcagtgatgtcttaggatttag

SEQ ID NO: 147035 - DNA, 65 bp, Homo sapiens
ttttaaaatacttcttcccattgggttttataagtttcagtgatgtcttaggatttagtgggttt

SEQ ID NO: 147036 - DNA, 66 bp, Homo sapiens
cccattgggttttataagtttcagtgatgtcttaggatttagtgggtttttttagcttgtttttgc

SEQ ID NO: 147037 - DNA, 69 bp, Homo sapiens
ataagtttcagtgatgtcttaggatttagtgggtttttttagcttgtttttgctttagttgatgaaaga

SEQ ID NO: 147038 - DNA, 69 bp, Homo sapiens
cagtgatgtcttaggatttagtgggtttttttagcttgtttttgctttagttgatgaaagataaggtaa

SEQ ID NO: 147039 - DNA, 69 bp, Homo sapiens
ttaggatttagtgggtttttttagcttgtttttgctttagttgatgaaagataaggtaatatcatttgc

SEQ ID NO: 147040 - DNA, 72 bp, Homo sapiens
gtgggtttttttagcttgtttttgctttagttgatgaaagataaggtaatatcatttgcttatgaaagagca

SEQ ID NO: 147041 - DNA, 72 bp, Homo sapiens
gcttgtttttgctttagttgatgaaagataaggtaatatcatttgcttatgaaagagcaatttacctaaagg

SEQ ID NO: 147042 - DNA, 72 bp, Homo sapiens
ttgctttagttgatgaaagataaggtaatatcatttgcttatgaaagagcaatttacctaaaggtaaattta

SEQ ID NO: 147043 - DNA, 69 bp, Homo sapiens
agttgatgaaagataaggtaatatcatttgcttatgaaagagcaatttacctaaaggtaaatttaaaaa

SEQ ID NO: 147044 - DNA, 82 bp, Homo sapiens
tatgttatatatatatctcctatctacacgatatattaggctctcatttattaaatgaactggggtgccagcacatctctaa

SEQ ID NO: 147045 - DNA, 83 bp, Homo sapiens
tatatatctcctatctacacgatatattaggctctcatttattaaatgaactggggtgccagcacatctctaacatgatcttc

SEQ ID NO: 147046 - DNA, 81 bp, Homo sapiens
tatctacacgatatattaggctctcatttattaaatgaactggggtgccagcacatctctaacatgatcttccagtgttta

SEQ ID NO: 147047 - DNA, 79 bp, Homo sapiens
acacgatatattaggctctcatttattaaatgaactggggtgccagcacatctctaacatgatcttccagtgtttatcc

SEQ ID NO: 147048 - DNA, 78 bp, Homo sapiens
ctctcatttattaaatgaactggggtgccagcacatctctaacatgatcttccagtgtttatcctggagtattatttc

SEQ ID NO: 147049 - DNA, 77 bp, Homo sapiens
atttattaaatgaactggggtgccagcacatctctaacatgatcttccagtgtttatcctggagtattatttcttca

SEQ ID NO: 147050 - DNA, 79 bp, Homo sapiens
aactggggtgccagcacatctctaacatgatcttccagtgtttatcctggagtattatttcttcatcttctatctcaag

SEQ ID NO: 147051 - DNA, 79 bp, Homo sapiens
agcacatctctaacatgatcttccagtgtttatcctggagtattatttcttcatcttctatctcaaggaagcgtacgta

SEQ ID NO: 147052 - DNA, 76 bp, Homo sapiens
taacatgatcttccagtgtttatcctggagtattatttcttcatcttctatctcaaggaagcgtacgtacatcctt

SEQ ID NO: 147053 - DNA, 72 bp, Homo sapiens
tgtttatcctggagtattatttcttcatcttctatctcaaggaagcgtacgtacatcctttctttacccaaa

SEQ ID NO: 147054 - DNA, 76 bp, Homo sapiens
agtattatttcttcatcttctatctcaaggaagcgtacgtacatcctttctttacccaaacatgctgcctgatata

SEQ ID NO: 147055 - DNA, 75 bp, Homo sapiens
ttcatcttctatctcaaggaagcgtacgtacatcctttctttacccaaacatgctgcctgatatacctaccctcc

SEQ ID NO: 147056 - DNA, 73 bp, Homo sapiens
tctatctcaaggaagcgtacgtacatcctttctttacccaaacatgctgcctgatatacctaccctccccaac

SEQ ID NO: 147057 - DNA, 70 bp, Homo sapiens
aagcgtacgtacatcctttctttacccaaacatgctgcctgatatacctaccctccccaacctgacgttc

SEQ ID NO: 147058 - DNA, 74 bp, Homo sapiens
atcctttctttacccaaacatgctgcctgatatacctaccctccccaacctgacgttctgatgttactgtcata

SEQ ID NO: 147059 - DNA, 75 bp, Homo sapiens
tttacccaaacatgctgcctgatatacctaccctccccaacctgacgttctgatgttactgtcatatctgaaatt

SEQ ID NO: 147060 - DNA, 79 bp, Homo sapiens
atgctgcctgatatacctaccctccccaacctgacgttctgatgttactgtcatatctgaaattttgcattctgagaaa

SEQ ID NO: 147061 - DNA, 76 bp, Homo sapiens
aacctgacgttctgatgttactgtcatatctgaaattttgcattctgagaaatttatgtccccaaactgcatttag

SEQ ID NO: 147062 - DNA, 78 bp, Homo sapiens
gatgttactgtcatatctgaaattttgcattctgagaaatttatgtccccaaactgcatttaggcaactactcttata

SEQ ID NO: 147063 - DNA, 76 bp, Homo sapiens
gtcatatctgaaattttgcattctgagaaatttatgtccccaaactgcatttaggcaactactcttataggtgaaa

SEQ ID NO: 147064 - DNA, 75 bp, Homo sapiens
ttttgcattctgagaaatttatgtccccaaactgcatttaggcaactactcttataggtgaaaacatctgattag

SEQ ID NO: 147065 - DNA, 74 bp, Homo sapiens
ttctgagaaatttatgtccccaaactgcatttaggcaactactcttataggtgaaaacatctgattaggtggta

SEQ ID NO: 147066 - DNA, 71 bp, Homo sapiens
aatttatgtccccaaactgcatttaggcaactactcttataggtgaaaacatctgattaggtggtagtggt

SEQ ID NO: 147067 - DNA, 76 bp, Homo sapiens
aaactgcatttaggcaactactcttataggtgaaaacatctgattaggtggtagtggttgatggattatagtcaca

SEQ ID NO: 147068 - DNA, 76 bp, Homo sapiens
tttaggcaactactcttataggtgaaaacatctgattaggtggtagtggttgatggattatagtcacaagataata

SEQ ID NO: 147069 - DNA, 75 bp, Homo sapiens
ctactcttataggtgaaaacatctgattaggtggtagtggttgatggattatagtcacaagataatacttcttta

SEQ ID NO: 147070 - DNA, 73 bp, Homo sapiens
aggtgaaaacatctgattaggtggtagtggttgatggattatagtcacaagataatacttctttaaaatttga

SEQ ID NO: 147071 - DNA, 73 bp, Homo sapiens
gtggtagtggttgatggattatagtcacaagataatacttctttaaaatttgaagacttctgcatcttaaaaa

SEQ ID NO: 147072 - DNA, 78 bp, Homo sapiens
tgatggattatagtcacaagataatacttctttaaaatttgaagacttctgcatcttaaaaatatcactgttctgtga

SEQ ID NO: 147073 - DNA, 75 bp, Homo sapiens
cacaagataatacttctttaaaatttgaagacttctgcatcttaaaaatatcactgttctgtgaagttgtctgga

SEQ ID NO: 147074 - DNA, 79 bp, Homo sapiens
aagacttctgcatcttaaaaatatcactgttctgtgaagttgtctggagttttaccaatatgagctgacatatattgct

SEQ ID NO: 147075 - DNA, 77 bp, Homo sapiens
tcttaaaaatatcactgttctgtgaagttgtctggagttttaccaatatgagctgacatatattgcttcccaggaaa

SEQ ID NO: 147076 - DNA, 78 bp, Homo sapiens
aaatatcactgttctgtgaagttgtctggagttttaccaatatgagctgacatatattgcttcccaggaaagagattg

SEQ ID NO: 147077 - DNA, 78 bp, Homo sapiens
tgtgaagttgtctggagttttaccaatatgagctgacatatattgcttcccaggaaagagattggaaattcaccataa

SEQ ID NO: 147078 - DNA, 76 bp, Homo sapiens
tctggagttttaccaatatgagctgacatatattgcttcccaggaaagagattggaaattcaccataaaactctaa

SEQ ID NO: 147079 - DNA, 74 bp, Homo sapiens
gttttaccaatatgagctgacatatattgcttcccaggaaagagattggaaattcaccataaaactctaattac

SEQ ID NO: 147080 - DNA, 73 bp, Homo sapiens
gagctgacatatattgcttcccaggaaagagattggaaattcaccataaaactctaattactttttggttatc

SEQ ID NO: 147081 - DNA, 71 bp, Homo sapiens
catatattgcttcccaggaaagagattggaaattcaccataaaactctaattactttttggttatcttatg

SEQ ID NO: 147082 - DNA, 69 bp, Homo sapiens
cccaggaaagagattggaaattcaccataaaactctaattactttttggttatcttatgtatctgaatt

SEQ ID NO: 147083 - DNA, 72 bp, Homo sapiens
gagattggaaattcaccataaaactctaattactttttggttatcttatgtatctgaattttgtttgagatg

SEQ ID NO: 147084 - DNA, 75 bp, Homo sapiens
caccataaaactctaattactttttggttatcttatgtatctgaattttgtttgagatgtcatgacatgacaaaa

SEQ ID NO: 147085 - DNA, 77 bp, Homo sapiens
ctctaattactttttggttatcttatgtatctgaattttgtttgagatgtcatgacatgacaaaatcgagtattcat

SEQ ID NO: 147086 - DNA, 77 bp, Homo sapiens
ttactttttggttatcttatgtatctgaattttgtttgagatgtcatgacatgacaaaatcgagtattcattttata

SEQ ID NO: 147087 - DNA, 79 bp, Homo sapiens
atcttatgtatctgaattttgtttgagatgtcatgacatgacaaaatcgagtattcattttataaatattaaatgagtc

SEQ ID NO: 147088 - DNA, 80 bp, Homo sapiens
tctgaattttgtttgagatgtcatgacatgacaaaatcgagtattcattttataaatattaaatgagtctagaattatgc

SEQ ID NO: 147089 - DNA, 81 bp, Homo sapiens
ttgagatgtcatgacatgacaaaatcgagtattcattttataaatattaaatgagtctagaattatgctaaggccttgtga

SEQ ID NO: 147090 - DNA, 80 bp, Homo sapiens
catgacatgacaaaatcgagtattcattttataaatattaaatgagtctagaattatgctaaggccttgtgaggaatgca

SEQ ID NO: 147091 - DNA, 75 bp, Homo sapiens
taaatattaaatgagtctagaattatgctaaggccttgtgaggaatgcagagattactaaaccctagttcctgct

SEQ ID NO: 147092 - DNA, 75 bp, Homo sapiens
attaaatgagtctagaattatgctaaggccttgtgaggaatgcagagattactaaaccctagttcctgcttgtgg

SEQ ID NO: 147093 - DNA, 77 bp, Homo sapiens
tctagaattatgctaaggccttgtgaggaatgcagagattactaaaccctagttcctgcttgtgggaagcctgtctg

SEQ ID NO: 147094 - DNA, 69 bp, Homo sapiens
agattactaaaccctagttcctgcttgtgggaagcctgtctggaggagaaagattagaacactaagggt

SEQ ID NO: 147095 - DNA, 69 bp, Homo sapiens
actaaaccctagttcctgcttgtgggaagcctgtctggaggagaaagattagaacactaagggttacaa

SEQ ID NO: 147096 - DNA, 76 bp, Homo sapiens
tgggaagcctgtctggaggagaaagattagaacactaagggttacaatccagagttgaatgtgattggagagtcaa

SEQ ID NO: 147097 - DNA, 73 bp, Homo sapiens
ctggaggagaaagattagaacactaagggttacaatccagagttgaatgtgattggagagtcaagggagggaa

SEQ ID NO: 147098 - DNA, 72 bp, Homo sapiens
agaaagattagaacactaagggttacaatccagagttgaatgtgattggagagtcaagggagggaagacttc

SEQ ID NO: 147099 - DNA, 71 bp, Homo sapiens
agaacactaagggttacaatccagagttgaatgtgattggagagtcaagggagggaagacttccagaaaag

SEQ ID NO: 147100 - DNA, 76 bp, Homo sapiens
ttacaatccagagttgaatgtgattggagagtcaagggagggaagacttccagaaaagggcagccagtggttgtga

SEQ ID NO: 147101 - DNA, 76 bp, Homo sapiens
agagttgaatgtgattggagagtcaagggagggaagacttccagaaaagggcagccagtggttgtgatgcactacc

SEQ ID NO: 147102 - DNA, 70 bp, Homo sapiens
agtcaagggagggaagacttccagaaaagggcagccagtggttgtgatgcactacccccttcttctaggt

SEQ ID NO: 147103 - DNA, 69 bp, Homo sapiens
gccagtggttgtgatgcactacccccttcttctaggttcccccaataggagtagaattccttgttcgtt

SEQ ID NO: 147104 - DNA, 70 bp, Homo sapiens
ttgtgatgcactacccccttcttctaggttcccccaataggagtagaattccttgttcgtttcataataa

SEQ ID NO: 147105 - DNA, 64 bp, Homo sapiens
actacccccttcttctaggttcccccaataggagtagaattccttgttcgtttcataataaatt

SEQ ID NO: 147106 - DNA, 66 bp, Homo sapiens
cttcttctaggttcccccaataggagtagaattccttgttcgtttcataataaatttttgttggga

SEQ ID NO: 147107 - DNA, 70 bp, Homo sapiens
ggagtagaattccttgttcgtttcataataaatttttgttgggagataactgtaggtgacctagagattc

SEQ ID NO: 147108 - DNA, 69 bp, Homo sapiens
cgtttcataataaatttttgttgggagataactgtaggtgacctagagattcctcattattttaaaata

SEQ ID NO: 147109 - DNA, 67 bp, Homo sapiens
taaatttttgttgggagataactgtaggtgacctagagattcctcattattttaaaataatcttttt

SEQ ID NO: 147110 - DNA, 66 bp, Homo sapiens
attattttaaaataatcttttttatccaccttatttctcctctccctgaaaaatctgtttagagaa

SEQ ID NO: 147111 - DNA, 72 bp, Homo sapiens
aataatcttttttatccaccttatttctcctctccctgaaaaatctgtttagagaactatagagattctgca

SEQ ID NO: 147112 - DNA, 72 bp, Homo sapiens
tttttatccaccttatttctcctctccctgaaaaatctgtttagagaactatagagattctgcagttaggga

SEQ ID NO: 147113 - DNA, 75 bp, Homo sapiens
ccttatttctcctctccctgaaaaatctgtttagagaactatagagattctgcagttagggagattctgcagtta

SEQ ID NO: 147114 - DNA, 78 bp, Homo sapiens
tctccctgaaaaatctgtttagagaactatagagattctgcagttagggagattctgcagttagcctcatttgtgtta

SEQ ID NO: 147115 - DNA, 77 bp, Homo sapiens
aaaaatctgtttagagaactatagagattctgcagttagggagattctgcagttagcctcatttgtgttagtcttca

SEQ ID NO: 147116 - DNA, 77 bp, Homo sapiens
agattctgcagttagcctcatttgtgttagtcttcacatgtggcaggcagtttgacgttaaaaagagtcagggaaca

SEQ ID NO: 147117 - DNA, 75 bp, Homo sapiens
ttagcctcatttgtgttagtcttcacatgtggcaggcagtttgacgttaaaaagagtcagggaacatgaaagtaa

SEQ ID NO: 147118 - DNA, 73 bp, Homo sapiens
atgtggcaggcagtttgacgttaaaaagagtcagggaacatgaaagtaattttttgctacatattagagctta

SEQ ID NO: 147119 - DNA, 71 bp, Homo sapiens
gcagtttgacgttaaaaagagtcagggaacatgaaagtaattttttgctacatattagagcttatcacttt

SEQ ID NO: 147120 - DNA, 70 bp, Homo sapiens
gtcagggaacatgaaagtaattttttgctacatattagagcttatcacttttaaggaatatccaaaacct

SEQ ID NO: 147121 - DNA, 72 bp, Homo sapiens
tagagcttatcacttttaaggaatatccaaaacctttccattatttaaagatatctgggattagatgaagtg

SEQ ID NO: 147122 - DNA, 71 bp, Homo sapiens
ggaatatccaaaacctttccattatttaaagatatctgggattagatgaagtgtagctaataattcttaag

SEQ ID NO: 147123 - DNA, 70 bp, Homo sapiens
ccaaaacctttccattatttaaagatatctgggattagatgaagtgtagctaataattcttaagggagga

SEQ ID NO: 147124 - DNA, 71 bp, Homo sapiens
ccattatttaaagatatctgggattagatgaagtgtagctaataattcttaagggaggatttaacagttaa

SEQ ID NO: 147125 - DNA, 72 bp, Homo sapiens
gatatctgggattagatgaagtgtagctaataattcttaagggaggatttaacagttaaagttggttttgca

SEQ ID NO: 147126 - DNA, 69 bp, Homo sapiens
tgggattagatgaagtgtagctaataattcttaagggaggatttaacagttaaagttggttttgcaact

SEQ ID NO: 147127 - DNA, 65 bp, Homo sapiens
ctaataattcttaagggaggatttaacagttaaagttggttttgcaacttaatgtaataatactt

SEQ ID NO: 147128 - DNA, 65 bp, Homo sapiens
ggaggatttaacagttaaagttggttttgcaacttaatgtaataatactttatttttaggaaagc

SEQ ID NO: 147129 - DNA, 69 bp, Homo sapiens
gttggttttgcaacttaatgtaataatactttatttttaggaaagctgttcagagcaccttattccttg

SEQ ID NO: 147130 - DNA, 71 bp, Homo sapiens
tgcaacttaatgtaataatactttatttttaggaaagctgttcagagcaccttattccttgttttgtaatc

SEQ ID NO: 147131 - DNA, 70 bp, Homo sapiens
atgtaataatactttatttttaggaaagctgttcagagcaccttattccttgttttgtaatccatcaccc

SEQ ID NO: 147132 - DNA, 72 bp, Homo sapiens
ttatttttaggaaagctgttcagagcaccttattccttgttttgtaatccatcacccctccatccatattaa

SEQ ID NO: 147133 - DNA, 74 bp, Homo sapiens
ttcagagcaccttattccttgttttgtaatccatcacccctccatccatattaatctttagcatggctgttttt

SEQ ID NO: 147134 - DNA, 71 bp, Homo sapiens
accttattccttgttttgtaatccatcacccctccatccatattaatctttagcatggctgttttttgttg

SEQ ID NO: 147135 - DNA, 71 bp, Homo sapiens
tttgttgttgttttccttgttttaatttggactataactgtgctcatatatctgtccagtgatttaaaaaa

SEQ ID NO: 147136 - DNA, 70 bp, Homo sapiens
gttgttttccttgttttaatttggactataactgtgctcatatatctgtccagtgatttaaaaaaatgtt

SEQ ID NO: 147137 - DNA, 72 bp, Homo sapiens
ttaatttggactataactgtgctcatatatctgtccagtgatttaaaaaaatgtttatcctaaaattctggg

SEQ ID NO: 147138 - DNA, 75 bp, Homo sapiens
ttggactataactgtgctcatatatctgtccagtgatttaaaaaaatgtttatcctaaaattctgggtatacaga

SEQ ID NO: 147139 - DNA, 75 bp, Homo sapiens
gctcatatatctgtccagtgatttaaaaaaatgtttatcctaaaattctgggtatacagatagatgggtagttgc

SEQ ID NO: 147140 - DNA, 71 bp, Homo sapiens
ctgtccagtgatttaaaaaaatgtttatcctaaaattctgggtatacagatagatgggtagttgcccatag

SEQ ID NO: 147141 - DNA, 72 bp, Homo sapiens
atttaaaaaaatgtttatcctaaaattctgggtatacagatagatgggtagttgcccatagggcatgatgct

SEQ ID NO: 147142 - DNA, 79 bp, Homo sapiens
tatcctaaaattctgggtatacagatagatgggtagttgcccatagggcatgatgcttctgaaagtagaattactgctg

SEQ ID NO: 147143 - DNA, 79 bp, Homo sapiens
tctgggtatacagatagatgggtagttgcccatagggcatgatgcttctgaaagtagaattactgctggtccctttgaa

SEQ ID NO: 147144 - DNA, 76 bp, Homo sapiens
gtagttgcccatagggcatgatgcttctgaaagtagaattactgctggtccctttgaacgttttccagctgaagta

SEQ ID NO: 147145 - DNA, 76 bp, Homo sapiens
atgcttctgaaagtagaattactgctggtccctttgaacgttttccagctgaagtaggcacacccaggcagtatga

SEQ ID NO: 147146 - DNA, 75 bp, Homo sapiens
aagtagaattactgctggtccctttgaacgttttccagctgaagtaggcacacccaggcagtatgagcatgttct

SEQ ID NO: 147147 - DNA, 77 bp, Homo sapiens
ctgctggtccctttgaacgttttccagctgaagtaggcacacccaggcagtatgagcatgttcttggaacaggctta

SEQ ID NO: 147148 - DNA, 78 bp, Homo sapiens
tttgaacgttttccagctgaagtaggcacacccaggcagtatgagcatgttcttggaacaggcttagctatttatgta

SEQ ID NO: 147149 - DNA, 77 bp, Homo sapiens
cgttttccagctgaagtaggcacacccaggcagtatgagcatgttcttggaacaggcttagctatttatgtaattta

SEQ ID NO: 147150 - DNA, 79 bp, Homo sapiens
aagtaggcacacccaggcagtatgagcatgttcttggaacaggcttagctatttatgtaatttactctgtgtctataga

SEQ ID NO: 147151 - DNA, 78 bp, Homo sapiens
ccaggcagtatgagcatgttcttggaacaggcttagctatttatgtaatttactctgtgtctatagaacacaatttta

SEQ ID NO: 147152 - DNA, 79 bp, Homo sapiens
cagtatgagcatgttcttggaacaggcttagctatttatgtaatttactctgtgtctatagaacacaattttatgacaa

SEQ ID NO: 147153 - DNA, 73 bp, Homo sapiens
gttcttggaacaggcttagctatttatgtaatttactctgtgtctatagaacacaattttatgacaaaccttg

SEQ ID NO: 147154 - DNA, 74 bp, Homo sapiens
gcttagctatttatgtaatttactctgtgtctatagaacacaattttatgacaaaccttgttcagccaggcctt

SEQ ID NO: 147155 - DNA, 73 bp, Homo sapiens
ttatgtaatttactctgtgtctatagaacacaattttatgacaaaccttgttcagccaggccttttagtctcc

SEQ ID NO: 147156 - DNA, 73 bp, Homo sapiens
tttactctgtgtctatagaacacaattttatgacaaaccttgttcagccaggccttttagtctcctcctctaa

SEQ ID NO: 147157 - DNA, 75 bp, Homo sapiens
tgtctatagaacacaattttatgacaaaccttgttcagccaggccttttagtctcctcctctaatctgtctctta

SEQ ID NO: 147158 - DNA, 77 bp, Homo sapiens
ttatgacaaaccttgttcagccaggccttttagtctcctcctctaatctgtctcttagaaatgatgattatggtgtc

SEQ ID NO: 147159 - DNA, 78 bp, Homo sapiens
aggccttttagtctcctcctctaatctgtctcttagaaatgatgattatggtgtcttcatataaatgcatgtatttat

SEQ ID NO: 147160 - DNA, 80 bp, Homo sapiens
agtctcctcctctaatctgtctcttagaaatgatgattatggtgtcttcatataaatgcatgtatttatttgtatggaat

SEQ ID NO: 147161 - DNA, 81 bp, Homo sapiens
atctgtctcttagaaatgatgattatggtgtcttcatataaatgcatgtatttatttgtatggaattagttttaacatgca

SEQ ID NO: 147162 - DNA, 80 bp, Homo sapiens
ctcttagaaatgatgattatggtgtcttcatataaatgcatgtatttatttgtatggaattagttttaacatgcattgtc

SEQ ID NO: 147163 - DNA, 80 bp, Homo sapiens
tgatgattatggtgtcttcatataaatgcatgtatttatttgtatggaattagttttaacatgcattgtcttatttcttc

SEQ ID NO: 147164 - DNA, 77 bp, Homo sapiens
tggtgtcttcatataaatgcatgtatttatttgtatggaattagttttaacatgcattgtcttatttcttcctcaaa

SEQ ID NO: 147165 - DNA, 71 bp, Homo sapiens
tttatttgtatggaattagttttaacatgcattgtcttatttcttcctcaaaacaaccctgtaagattatg

SEQ ID NO: 147166 - DNA, 74 bp, Homo sapiens
tgtatggaattagttttaacatgcattgtcttatttcttcctcaaaacaaccctgtaagattatgttcatttca

SEQ ID NO: 147167 - DNA, 75 bp, Homo sapiens
tttaacatgcattgtcttatttcttcctcaaaacaaccctgtaagattatgttcatttcaaatgtgtcttctcac

SEQ ID NO: 147168 - DNA, 75 bp, Homo sapiens
gcattgtcttatttcttcctcaaaacaaccctgtaagattatgttcatttcaaatgtgtcttctcactatgtaag

SEQ ID NO: 147169 - DNA, 73 bp, Homo sapiens
aaacaaccctgtaagattatgttcatttcaaatgtgtcttctcactatgtaagtatgactaacaaaaaggaga

SEQ ID NO: 147170 - DNA, 76 bp, Homo sapiens
ccctgtaagattatgttcatttcaaatgtgtcttctcactatgtaagtatgactaacaaaaaggagagcgagaata

SEQ ID NO: 147171 - DNA, 73 bp, Homo sapiens
gttcatttcaaatgtgtcttctcactatgtaagtatgactaacaaaaaggagagcgagaataaaaaacttctc

SEQ ID NO: 147172 - DNA, 73 bp, Homo sapiens
caaatgtgtcttctcactatgtaagtatgactaacaaaaaggagagcgagaataaaaaacttctctttcaata

SEQ ID NO: 147173 - DNA, 70 bp, Homo sapiens
gtcttctcactatgtaagtatgactaacaaaaaggagagcgagaataaaaaacttctctttcaataactt

SEQ ID NO: 147174 - DNA, 69 bp, Homo sapiens
tgtaagtatgactaacaaaaaggagagcgagaataaaaaacttctctttcaataactttctagtctagt

SEQ ID NO: 147175 - DNA, 67 bp, Homo sapiens
ggagagcgagaataaaaaacttctctttcaataactttctagtctagtttggaaagttcgtgaagtt

SEQ ID NO: 147176 - DNA, 68 bp, Homo sapiens
taaaaaacttctctttcaataactttctagtctagtttggaaagttcgtgaagtttagcaagtgaaca

SEQ ID NO: 147177 - DNA, 69 bp, Homo sapiens
aacttctctttcaataactttctagtctagtttggaaagttcgtgaagtttagcaagtgaacactgggc

SEQ ID NO: 147178 - DNA, 72 bp, Homo sapiens
aataactttctagtctagtttggaaagttcgtgaagtttagcaagtgaacactgggccaggccttcagagca

SEQ ID NO: 147179 - DNA, 75 bp, Homo sapiens
tagtctagtttggaaagttcgtgaagtttagcaagtgaacactgggccaggccttcagagcaagtcctgtggcaa

SEQ ID NO: 147180 - DNA, 76 bp, Homo sapiens
tcgtgaagtttagcaagtgaacactgggccaggccttcagagcaagtcctgtggcaactcgagttccattagggaa

SEQ ID NO: 147181 - DNA, 75 bp, Homo sapiens
aagtgaacactgggccaggccttcagagcaagtcctgtggcaactcgagttccattagggaaggctgactggaaa

SEQ ID NO: 147182 - DNA, 74 bp, Homo sapiens
actgggccaggccttcagagcaagtcctgtggcaactcgagttccattagggaaggctgactggaaatctgttt

SEQ ID NO: 147183 - DNA, 73 bp, Homo sapiens
aggccttcagagcaagtcctgtggcaactcgagttccattagggaaggctgactggaaatctgttttgttttg

SEQ ID NO: 147184 - DNA, 69 bp, Homo sapiens
tttgttttttttacaaaaattcagtgtggcgtgtattacgtagggtgtgcccagagcaccaaggtgtaa

SEQ ID NO: 147185 - DNA, 73 bp, Homo sapiens
tacaaaaattcagtgtggcgtgtattacgtagggtgtgcccagagcaccaaggtgtaagctggggacagttta

SEQ ID NO: 147186 - DNA, 73 bp, Homo sapiens
aaattcagtgtggcgtgtattacgtagggtgtgcccagagcaccaaggtgtaagctggggacagtttaacata

SEQ ID NO: 147187 - DNA, 75 bp, Homo sapiens
tgtattacgtagggtgtgcccagagcaccaaggtgtaagctggggacagtttaacataggtgtgtgttcagagta

SEQ ID NO: 147188 - DNA, 73 bp, Homo sapiens
tagggtgtgcccagagcaccaaggtgtaagctggggacagtttaacataggtgtgtgttcagagtaaggtaag

SEQ ID NO: 147189 - DNA, 74 bp, Homo sapiens
cagagcaccaaggtgtaagctggggacagtttaacataggtgtgtgttcagagtaaggtaagttacatagagga

SEQ ID NO: 147190 - DNA, 71 bp, Homo sapiens
aggtgtaagctggggacagtttaacataggtgtgtgttcagagtaaggtaagttacatagaggaaggctaa

SEQ ID NO: 147191 - DNA, 70 bp, Homo sapiens
tggggacagtttaacataggtgtgtgttcagagtaaggtaagttacatagaggaaggctaatagaaaatt

SEQ ID NO: 147192 - DNA, 71 bp, Homo sapiens
acagtttaacataggtgtgtgttcagagtaaggtaagttacatagaggaaggctaatagaaaatttagctg

SEQ ID NO: 147193 - DNA, 72 bp, Homo sapiens
ataggtgtgtgttcagagtaaggtaagttacatagaggaaggctaatagaaaatttagctgtacttcgagaa

SEQ ID NO: 147194 - DNA, 72 bp, Homo sapiens
ttcagagtaaggtaagttacatagaggaaggctaatagaaaatttagctgtacttcgagaacaggcttttga

SEQ ID NO: 147195 - DNA, 71 bp, Homo sapiens
gtaagttacatagaggaaggctaatagaaaatttagctgtacttcgagaacaggcttttgatccctattta

SEQ ID NO: 147196 - DNA, 72 bp, Homo sapiens
ggctaatagaaaatttagctgtacttcgagaacaggcttttgatccctatttatttcaatctaatatttgtg

SEQ ID NO: 147197 - DNA, 69 bp, Homo sapiens
aaatttagctgtacttcgagaacaggcttttgatccctatttatttcaatctaatatttgtgtttttag

SEQ ID NO: 147198 - DNA, 67 bp, Homo sapiens
tgtgtttttagtaatgaataggtaataggtcagaatttaaaaggttaaaaaaaggatatacattgaa

SEQ ID NO: 147199 - DNA, 66 bp, Homo sapiens
gtaatgaataggtaataggtcagaatttaaaaggttaaaaaaaggatatacattgaaaatcttccc

SEQ ID NO: 147200 - DNA, 64 bp, Homo sapiens
ggtaataggtcagaatttaaaaggttaaaaaaaggatatacattgaaaatcttccccctattcc

SEQ ID NO: 147201 - DNA, 63 bp, Homo sapiens
ggtcagaatttaaaaggttaaaaaaaggatatacattgaaaatcttccccctattccttcccc

SEQ ID NO: 147202 - DNA, 64 bp, Homo sapiens
aaaggttaaaaaaaggatatacattgaaaatcttccccctattccttcccccagcctccattcc

SEQ ID NO: 147203 - DNA, 66 bp, Homo sapiens
aaaaaggatatacattgaaaatcttccccctattccttcccccagcctccattccccagccttcct

SEQ ID NO: 147204 - DNA, 66 bp, Homo sapiens
attgaaaatcttccccctattccttcccccagcctccattccccagccttcctttctggaagtaat

SEQ ID NO: 147205 - DNA, 68 bp, Homo sapiens
aatcttccccctattccttcccccagcctccattccccagccttcctttctggaagtaattgatgtta

SEQ ID NO: 147206 - DNA, 70 bp, Homo sapiens
ttccttcccccagcctccattccccagccttcctttctggaagtaattgatgttaggactttcttgtgta

SEQ ID NO: 147207 - DNA, 74 bp, Homo sapiens
cccagccttcctttctggaagtaattgatgttaggactttcttgtgtatcattcccagtggtattttatgcata

SEQ ID NO: 147208 - DNA, 75 bp, Homo sapiens
ttcctttctggaagtaattgatgttaggactttcttgtgtatcattcccagtggtattttatgcatagtaagcaa

SEQ ID NO: 147209 - DNA, 77 bp, Homo sapiens
ggaagtaattgatgttaggactttcttgtgtatcattcccagtggtattttatgcatagtaagcaactccatatata

SEQ ID NO: 147210 - DNA, 79 bp, Homo sapiens
tcttgtgtatcattcccagtggtattttatgcatagtaagcaactccatatatatgttttcttctcattgatactttct

SEQ ID NO: 147211 - DNA, 78 bp, Homo sapiens
gtatcattcccagtggtattttatgcatagtaagcaactccatatatatgttttcttctcattgatactttcttcatt

SEQ ID NO: 147212 - DNA, 80 bp, Homo sapiens
ggtattttatgcatagtaagcaactccatatatatgttttcttctcattgatactttcttcatttatagaaatgctggca

SEQ ID NO: 147213 - DNA, 84 bp, Homo sapiens
tgcatagtaagcaactccatatatatgttttcttctcattgatactttcttcatttatagaaatgctggcatataatgcatctt

SEQ ID NO: 147214 - DNA, 80 bp, Homo sapiens
taagcaactccatatatatgttttcttctcattgatactttcttcatttatagaaatgctggcatataatgcatcttttt

SEQ ID NO: 147215 - DNA, 77 bp, Homo sapiens
catatatatgttttcttctcattgatactttcttcatttatagaaatgctggcatataatgcatctttttttaaaaa

SEQ ID NO: 147216 - DNA, 71 bp, Homo sapiens
ttaaaaatttattcttctaaacaatgtatcttggagattaccccaaatcaatgcaaaaagagcatccttat

SEQ ID NO: 147217 - DNA, 73 bp, Homo sapiens
attcttctaaacaatgtatcttggagattaccccaaatcaatgcaaaaagagcatccttattctttgttgtag

SEQ ID NO: 147218 - DNA, 75 bp, Homo sapiens
tctaaacaatgtatcttggagattaccccaaatcaatgcaaaaagagcatccttattctttgttgtagttgcgta

SEQ ID NO: 147219 - DNA, 72 bp, Homo sapiens
ttaccccaaatcaatgcaaaaagagcatccttattctttgttgtagttgcgtagcatttatttctttctagg

SEQ ID NO: 147220 - DNA, 75 bp, Homo sapiens
aagagcatccttattctttgttgtagttgcgtagcatttatttctttctaggtggcatgtaccatagttttcata

SEQ ID NO: 147221 - DNA, 74 bp, Homo sapiens
tattctttgttgtagttgcgtagcatttatttctttctaggtggcatgtaccatagttttcatagtcagttacc

SEQ ID NO: 147222 - DNA, 76 bp, Homo sapiens
tagttgcgtagcatttatttctttctaggtggcatgtaccatagttttcatagtcagttacctgtagatacacatt

SEQ ID NO: 147223 - DNA, 75 bp, Homo sapiens
tatttctttctaggtggcatgtaccatagttttcatagtcagttacctgtagatacacatttagattgtttccag

SEQ ID NO: 147224 - DNA, 77 bp, Homo sapiens
taggtggcatgtaccatagttttcatagtcagttacctgtagatacacatttagattgtttccagtatcttgctatt

SEQ ID NO: 147225 - DNA, 79 bp, Homo sapiens
tggcatgtaccatagttttcatagtcagttacctgtagatacacatttagattgtttccagtatcttgctatttgcaaa

SEQ ID NO: 147226 - DNA, 77 bp, Homo sapiens
catgtaccatagttttcatagtcagttacctgtagatacacatttagattgtttccagtatcttgctatttgcaaac

SEQ ID NO: 147227 - DNA, 77 bp, Homo sapiens
atagttttcatagtcagttacctgtagatacacatttagattgtttccagtatcttgctatttgcaaactaggctga

SEQ ID NO: 147228 - DNA, 76 bp, Homo sapiens
agttttcatagtcagttacctgtagatacacatttagattgtttccagtatcttgctatttgcaaactaggctgaa

SEQ ID NO: 147229 - DNA, 77 bp, Homo sapiens
cctgtagatacacatttagattgtttccagtatcttgctatttgcaaactaggctgaagtgaataactttgtacata

SEQ ID NO: 147230 - DNA, 73 bp, Homo sapiens
cacatttagattgtttccagtatcttgctatttgcaaactaggctgaagtgaataactttgtacatatttttt

SEQ ID NO: 147231 - DNA, 76 bp, Homo sapiens
tccagtatcttgctatttgcaaactaggctgaagtgaataactttgtacatattttttttgtacatgtaggaggca

SEQ ID NO: 147232 - DNA, 76 bp, Homo sapiens
tcttgctatttgcaaactaggctgaagtgaataactttgtacatattttttttgtacatgtaggaggcagtgctaa

SEQ ID NO: 147233 - DNA, 72 bp, Homo sapiens
aggctgaagtgaataactttgtacatattttttttgtacatgtaggaggcagtgctaaaggttagagaagtg

SEQ ID NO: 147234 - DNA, 73 bp, Homo sapiens
taactttgtacatattttttttgtacatgtaggaggcagtgctaaaggttagagaagtgtctgtgtaattaga

SEQ ID NO: 147235 - DNA, 77 bp, Homo sapiens
tttgtacatgtaggaggcagtgctaaaggttagagaagtgtctgtgtaattagaatttgctgactattgccaaatta

SEQ ID NO: 147236 - DNA, 75 bp, Homo sapiens
gaggcagtgctaaaggttagagaagtgtctgtgtaattagaatttgctgactattgccaaattaatgtccttaaa

SEQ ID NO: 147237 - DNA, 72 bp, Homo sapiens
agtgctaaaggttagagaagtgtctgtgtaattagaatttgctgactattgccaaattaatgtccttaaagg

SEQ ID NO: 147238 - DNA, 73 bp, Homo sapiens
agaagtgtctgtgtaattagaatttgctgactattgccaaattaatgtccttaaaggttgtagcacttaatcc

SEQ ID NO: 147239 - DNA, 72 bp, Homo sapiens
gtgtaattagaatttgctgactattgccaaattaatgtccttaaaggttgtagcacttaatcctcctaccaa

SEQ ID NO: 147240 - DNA, 72 bp, Homo sapiens
aatttgctgactattgccaaattaatgtccttaaaggttgtagcacttaatcctcctaccaatcatgggatt

SEQ ID NO: 147241 - DNA, 73 bp, Homo sapiens
ctattgccaaattaatgtccttaaaggttgtagcacttaatcctcctaccaatcatgggatttgagtgcctat

SEQ ID NO: 147242 - DNA, 70 bp, Homo sapiens
aaattaatgtccttaaaggttgtagcacttaatcctcctaccaatcatgggatttgagtgcctatttccc

SEQ ID NO: 147243 - DNA, 76 bp, Homo sapiens
tccttaaaggttgtagcacttaatcctcctaccaatcatgggatttgagtgcctatttccccatgtctatctcata

SEQ ID NO: 147244 - DNA, 79 bp, Homo sapiens
tagcacttaatcctcctaccaatcatgggatttgagtgcctatttccccatgtctatctcatagatggagtattgttaa

SEQ ID NO: 147245 - DNA, 78 bp, Homo sapiens
ttaatcctcctaccaatcatgggatttgagtgcctatttccccatgtctatctcatagatggagtattgttaatcttg

SEQ ID NO: 147246 - DNA, 80 bp, Homo sapiens
aatcatgggatttgagtgcctatttccccatgtctatctcatagatggagtattgttaatcttgtggctgtttgccaatc

SEQ ID NO: 147247 - DNA, 80 bp, Homo sapiens
tttgagtgcctatttccccatgtctatctcatagatggagtattgttaatcttgtggctgtttgccaatctacgtgtgaa

SEQ ID NO: 147248 - DNA, 77 bp, Homo sapiens
tatttccccatgtctatctcatagatggagtattgttaatcttgtggctgtttgccaatctacgtgtgaaaagtagt

SEQ ID NO: 147249 - DNA, 78 bp, Homo sapiens
tgtctatctcatagatggagtattgttaatcttgtggctgtttgccaatctacgtgtgaaaagtagtttctcagtagt

SEQ ID NO: 147250 - DNA, 74 bp, Homo sapiens
tggagtattgttaatcttgtggctgtttgccaatctacgtgtgaaaagtagtttctcagtagttgtaatgtttc

SEQ ID NO: 147251 - DNA, 73 bp, Homo sapiens
ttaatcttgtggctgtttgccaatctacgtgtgaaaagtagtttctcagtagttgtaatgtttccagggagaa

SEQ ID NO: 147252 - DNA, 72 bp, Homo sapiens
tgtttgccaatctacgtgtgaaaagtagtttctcagtagttgtaatgtttccagggagaaaacaatgcaaaa

SEQ ID NO: 147253 - DNA, 71 bp, Homo sapiens
caatctacgtgtgaaaagtagtttctcagtagttgtaatgtttccagggagaaaacaatgcaaaacaatta

SEQ ID NO: 147254 - DNA, 69 bp, Homo sapiens
aagtagtttctcagtagttgtaatgtttccagggagaaaacaatgcaaaacaattatctttttgtctct

SEQ ID NO: 147255 - DNA, 69 bp, Homo sapiens
gttgtaatgtttccagggagaaaacaatgcaaaacaattatctttttgtctcttttatgtttatttaca

SEQ ID NO: 147256 - DNA, 69 bp, Homo sapiens
tccagggagaaaacaatgcaaaacaattatctttttgtctcttttatgtttatttacatgtagtttagt

SEQ ID NO: 147257 - DNA, 68 bp, Homo sapiens
caatgcaaaacaattatctttttgtctcttttatgtttatttacatgtagtttagtttgttaattaag

SEQ ID NO: 147258 - DNA, 67 bp, Homo sapiens
caattatctttttgtctcttttatgtttatttacatgtagtttagtttgttaattaaggtgttgctt

SEQ ID NO: 147259 - DNA, 70 bp, Homo sapiens
tttgtctcttttatgtttatttacatgtagtttagtttgttaattaaggtgttgctttataattcaggca

SEQ ID NO: 147260 - DNA, 73 bp, Homo sapiens
ttatgtttatttacatgtagtttagtttgttaattaaggtgttgctttataattcaggcagcctgcatcttct

SEQ ID NO: 147261 - DNA, 74 bp, Homo sapiens
ttacatgtagtttagtttgttaattaaggtgttgctttataattcaggcagcctgcatcttcttaagtgtctaa

SEQ ID NO: 147262 - DNA, 73 bp, Homo sapiens
gtttagtttgttaattaaggtgttgctttataattcaggcagcctgcatcttcttaagtgtctaaagccataa

SEQ ID NO: 147263 - DNA, 75 bp, Homo sapiens
tgttaattaaggtgttgctttataattcaggcagcctgcatcttcttaagtgtctaaagccataagagaaactta

SEQ ID NO: 147264 - DNA, 74 bp, Homo sapiens
aaggtgttgctttataattcaggcagcctgcatcttcttaagtgtctaaagccataagagaaacttagtttcaa

SEQ ID NO: 147265 - DNA, 75 bp, Homo sapiens
tttataattcaggcagcctgcatcttcttaagtgtctaaagccataagagaaacttagtttcaaattctgagttc

SEQ ID NO: 147266 - DNA, 72 bp, Homo sapiens
gcctgcatcttcttaagtgtctaaagccataagagaaacttagtttcaaattctgagttccgggactgaaaa

SEQ ID NO: 147267 - DNA, 71 bp, Homo sapiens
atcttcttaagtgtctaaagccataagagaaacttagtttcaaattctgagttccgggactgaaaacatgc

SEQ ID NO: 147268 - DNA, 73 bp, Homo sapiens
tgtctaaagccataagagaaacttagtttcaaattctgagttccgggactgaaaacatgccagccattgttta

SEQ ID NO: 147269 - DNA, 71 bp, Homo sapiens
ataagagaaacttagtttcaaattctgagttccgggactgaaaacatgccagccattgtttatggggttgc

SEQ ID NO: 147270 - DNA, 76 bp, Homo sapiens
aaattctgagttccgggactgaaaacatgccagccattgtttatggggttgcctctgtgtggctggcaccctgtga

SEQ ID NO: 147271 - DNA, 77 bp, Homo sapiens
agttccgggactgaaaacatgccagccattgtttatggggttgcctctgtgtggctggcaccctgtgattcagtgag

SEQ ID NO: 147272 - DNA, 77 bp, Homo sapiens
aaacatgccagccattgtttatggggttgcctctgtgtggctggcaccctgtgattcagtgagggttctggccctaa

SEQ ID NO: 147273 - DNA, 76 bp, Homo sapiens
ccattgtttatggggttgcctctgtgtggctggcaccctgtgattcagtgagggttctggccctaacttccatgga

SEQ ID NO: 147274 - DNA, 77 bp, Homo sapiens
ttatggggttgcctctgtgtggctggcaccctgtgattcagtgagggttctggccctaacttccatggaacatatta

SEQ ID NO: 147275 - DNA, 79 bp, Homo sapiens
tctgtgtggctggcaccctgtgattcagtgagggttctggccctaacttccatggaacatattatctagagggagtaga

SEQ ID NO: 147276 - DNA, 79 bp, Homo sapiens
tggcaccctgtgattcagtgagggttctggccctaacttccatggaacatattatctagagggagtagagaggatgcaa

SEQ ID NO: 147277 - DNA, 79 bp, Homo sapiens
tgattcagtgagggttctggccctaacttccatggaacatattatctagagggagtagagaggatgcaataacagagaa

SEQ ID NO: 147278 - DNA, 77 bp, Homo sapiens
agtgagggttctggccctaacttccatggaacatattatctagagggagtagagaggatgcaataacagagaatgta

SEQ ID NO: 147279 - DNA, 75 bp, Homo sapiens
ccctaacttccatggaacatattatctagagggagtagagaggatgcaataacagagaatgtacggatagttacg

SEQ ID NO: 147280 - DNA, 81 bp, Homo sapiens
ttccatggaacatattatctagagggagtagagaggatgcaataacagagaatgtacggatagttacgggagcatctgcaa

SEQ ID NO: 147281 - DNA, 79 bp, Homo sapiens
aacatattatctagagggagtagagaggatgcaataacagagaatgtacggatagttacgggagcatctgcaagagaac

SEQ ID NO: 147282 - DNA, 76 bp, Homo sapiens
agggagtagagaggatgcaataacagagaatgtacggatagttacgggagcatctgcaagagaacctggacagttt

SEQ ID NO: 147283 - DNA, 74 bp, Homo sapiens
aataacagagaatgtacggatagttacgggagcatctgcaagagaacctggacagttttgggagtaagggagca

SEQ ID NO: 147284 - DNA, 74 bp, Homo sapiens
aatgtacggatagttacgggagcatctgcaagagaacctggacagttttgggagtaagggagcatcagggatgt

SEQ ID NO: 147285 - DNA, 73 bp, Homo sapiens
atagttacgggagcatctgcaagagaacctggacagttttgggagtaagggagcatcagggatgttttccaaa

SEQ ID NO: 147286 - DNA, 76 bp, Homo sapiens
agcatctgcaagagaacctggacagttttgggagtaagggagcatcagggatgttttccaaaagatgtctttcatc

SEQ ID NO: 147287 - DNA, 73 bp, Homo sapiens
agttttgggagtaagggagcatcagggatgttttccaaaagatgtctttcatctgcaacctgaagctttagta

SEQ ID NO: 147288 - DNA, 74 bp, Homo sapiens
agtaagggagcatcagggatgttttccaaaagatgtctttcatctgcaacctgaagctttagtaggaattatcc

SEQ ID NO: 147289 - DNA, 77 bp, Homo sapiens
atcagggatgttttccaaaagatgtctttcatctgcaacctgaagctttagtaggaattatccctgacacagatgga

SEQ ID NO: 147290 - DNA, 76 bp, Homo sapiens
gttttccaaaagatgtctttcatctgcaacctgaagctttagtaggaattatccctgacacagatggaagagagaa

SEQ ID NO: 147291 - DNA, 77 bp, Homo sapiens
aaaagatgtctttcatctgcaacctgaagctttagtaggaattatccctgacacagatggaagagagaagagggctc

SEQ ID NO: 147292 - DNA, 77 bp, Homo sapiens
ctttcatctgcaacctgaagctttagtaggaattatccctgacacagatggaagagagaagagggctccagatcggg

SEQ ID NO: 147293 - DNA, 74 bp, Homo sapiens
acctgaagctttagtaggaattatccctgacacagatggaagagagaagagggctccagatcggggcaagaaaa

SEQ ID NO: 147294 - DNA, 75 bp, Homo sapiens
tttagtaggaattatccctgacacagatggaagagagaagagggctccagatcggggcaagaaaagtgtgactta

SEQ ID NO: 147295 - DNA, 74 bp, Homo sapiens
acacagatggaagagagaagagggctccagatcggggcaagaaaagtgtgacttatctaactagcgagttgggg

SEQ ID NO: 147296 - DNA, 76 bp, Homo sapiens
ctccagatcggggcaagaaaagtgtgacttatctaactagcgagttgggggtagatgagcagcaaatagtgaagac

SEQ ID NO: 147297 - DNA, 76 bp, Homo sapiens
gggcaagaaaagtgtgacttatctaactagcgagttgggggtagatgagcagcaaatagtgaagactgaacagtaa

SEQ ID NO: 147298 - DNA, 75 bp, Homo sapiens
aaaagtgtgacttatctaactagcgagttgggggtagatgagcagcaaatagtgaagactgaacagtaatccaaa

SEQ ID NO: 147299 - DNA, 76 bp, Homo sapiens
actagcgagttgggggtagatgagcagcaaatagtgaagactgaacagtaatccaaaaggtggtgacacatttgaa

SEQ ID NO: 147300 - DNA, 78 bp, Homo sapiens
gtagatgagcagcaaatagtgaagactgaacagtaatccaaaaggtggtgacacatttgaagaaaaatagcttggaca

SEQ ID NO: 147301 - DNA, 74 bp, Homo sapiens
cagcaaatagtgaagactgaacagtaatccaaaaggtggtgacacatttgaagaaaaatagcttggacatttat

SEQ ID NO: 147302 - DNA, 71 bp, Homo sapiens
ctgaacagtaatccaaaaggtggtgacacatttgaagaaaaatagcttggacatttattttactctcttaa

SEQ ID NO: 147303 - DNA, 68 bp, Homo sapiens
atccaaaaggtggtgacacatttgaagaaaaatagcttggacatttattttactctcttaaaaattaa

SEQ ID NO: 147304 - DNA, 70 bp, Homo sapiens
tggtgacacatttgaagaaaaatagcttggacatttattttactctcttaaaaattaaactttggataga

SEQ ID NO: 147305 - DNA, 66 bp, Homo sapiens
agaaaaatagcttggacatttattttactctcttaaaaattaaactttggatagataacctattgg

SEQ ID NO: 147306 - DNA, 62 bp, Homo sapiens
acatttattttactctcttaaaaattaaactttggatagataacctattgggattttttttt

SEQ ID NO: 147307 - DNA, 76 bp, Homo sapiens
ggattttttttttaagctgtcatgctgttaaagaatgccttgataatgttggcaccgcctgttattccatatatca

SEQ ID NO: 147308 - DNA, 79 bp, Homo sapiens
tcatgctgttaaagaatgccttgataatgttggcaccgcctgttattccatatatcagtgccttttgatggttttgaaa

SEQ ID NO: 147309 - DNA, 77 bp, Homo sapiens
atgctgttaaagaatgccttgataatgttggcaccgcctgttattccatatatcagtgccttttgatggttttgaaa

SEQ ID NO: 147310 - DNA, 76 bp, Homo sapiens
tgttaaagaatgccttgataatgttggcaccgcctgttattccatatatcagtgccttttgatggttttgaaagtg

SEQ ID NO: 147311 - DNA, 75 bp, Homo sapiens
aatgccttgataatgttggcaccgcctgttattccatatatcagtgccttttgatggttttgaaagtgtgtttta

SEQ ID NO: 147312 - DNA, 76 bp, Homo sapiens
ttgataatgttggcaccgcctgttattccatatatcagtgccttttgatggttttgaaagtgtgttttattagata

SEQ ID NO: 147313 - DNA, 73 bp, Homo sapiens
ggcaccgcctgttattccatatatcagtgccttttgatggttttgaaagtgtgttttattagatatgttttaa

SEQ ID NO: 147314 - DNA, 75 bp, Homo sapiens
tccatatatcagtgccttttgatggttttgaaagtgtgttttattagatatgttttaatatgaaaacatatttga

SEQ ID NO: 147315 - DNA, 72 bp, Homo sapiens
cagtgccttttgatggttttgaaagtgtgttttattagatatgttttaatatgaaaacatatttgaccttca

SEQ ID NO: 147316 - DNA, 71 bp, Homo sapiens
tgatggttttgaaagtgtgttttattagatatgttttaatatgaaaacatatttgaccttcataccaaccc

SEQ ID NO: 147317 - DNA, 71 bp, Homo sapiens
gaaagtgtgttttattagatatgttttaatatgaaaacatatttgaccttcataccaaccctgagaagtgg

SEQ ID NO: 147318 - DNA, 70 bp, Homo sapiens
ttattagatatgttttaatatgaaaacatatttgaccttcataccaaccctgagaagtggttaggtttgg

SEQ ID NO: 147319 - DNA, 70 bp, Homo sapiens
gatatgttttaatatgaaaacatatttgaccttcataccaaccctgagaagtggttaggtttggtaatac

SEQ ID NO: 147320 - DNA, 71 bp, Homo sapiens
tgaaaacatatttgaccttcataccaaccctgagaagtggttaggtttggtaatactataccttctcacaa

SEQ ID NO: 147321 - DNA, 71 bp, Homo sapiens
tatttgaccttcataccaaccctgagaagtggttaggtttggtaatactataccttctcacaatgaggaaa

SEQ ID NO: 147322 - DNA, 73 bp, Homo sapiens
tgagaagtggttaggtttggtaatactataccttctcacaatgaggaaatagtcccaaagaggatgaatctta

SEQ ID NO: 147323 - DNA, 74 bp, Homo sapiens
ttaggtttggtaatactataccttctcacaatgaggaaatagtcccaaagaggatgaatcttatccaagattca

SEQ ID NO: 147324 - DNA, 76 bp, Homo sapiens
tttggtaatactataccttctcacaatgaggaaatagtcccaaagaggatgaatcttatccaagattcagcgccag

SEQ ID NO: 147325 - DNA, 82 bp, Homo sapiens
tataccttctcacaatgaggaaatagtcccaaagaggatgaatcttatccaagattcagcgccagtcttcagcagagccaga

SEQ ID NO: 147326 - DNA, 80 bp, Homo sapiens
aatagtcccaaagaggatgaatcttatccaagattcagcgccagtcttcagcagagccagatctagaatccaagatcttt

SEQ ID NO: 147327 - DNA, 80 bp, Homo sapiens
aaagaggatgaatcttatccaagattcagcgccagtcttcagcagagccagatctagaatccaagatcttttggcttccc

SEQ ID NO: 147328 - DNA, 82 bp, Homo sapiens
aatcttatccaagattcagcgccagtcttcagcagagccagatctagaatccaagatcttttggcttccctcgtcagcacat

SEQ ID NO: 147329 - DNA, 83 bp, Homo sapiens
aagattcagcgccagtcttcagcagagccagatctagaatccaagatcttttggcttccctcgtcagcacattgcctttgtgc

SEQ ID NO: 147330 - DNA, 82 bp, Homo sapiens
agtcttcagcagagccagatctagaatccaagatcttttggcttccctcgtcagcacattgcctttgtgctctctctatttc

SEQ ID NO: 147331 - DNA, 79 bp, Homo sapiens
agagccagatctagaatccaagatcttttggcttccctcgtcagcacattgcctttgtgctctctctatttcctggtta

SEQ ID NO: 147332 - DNA, 78 bp, Homo sapiens
tagaatccaagatcttttggcttccctcgtcagcacattgcctttgtgctctctctatttcctggttagtgataagta

SEQ ID NO: 147333 - DNA, 76 bp, Homo sapiens
tttggcttccctcgtcagcacattgcctttgtgctctctctatttcctggttagtgataagtaagcctttttgaga

SEQ ID NO: 147334 - DNA, 78 bp, Homo sapiens
tcagcacattgcctttgtgctctctctatttcctggttagtgataagtaagcctttttgagaatagcattgttataaa

SEQ ID NO: 147335 - DNA, 74 bp, Homo sapiens
ttcctggttagtgataagtaagcctttttgagaatagcattgttataaaaatgccgctctgttgaaacttgaga

SEQ ID NO: 147336 - DNA, 73 bp, Homo sapiens
agtgataagtaagcctttttgagaatagcattgttataaaaatgccgctctgttgaaacttgagagacttaaa

SEQ ID NO: 147337 - DNA, 73 bp, Homo sapiens
gtaagcctttttgagaatagcattgttataaaaatgccgctctgttgaaacttgagagacttaaaacacaata

SEQ ID NO: 147338 - DNA, 75 bp, Homo sapiens
attgttataaaaatgccgctctgttgaaacttgagagacttaaaacacaatattgcaagagcctcccagtctcag

SEQ ID NO: 147339 - DNA, 77 bp, Homo sapiens
aaaatgccgctctgttgaaacttgagagacttaaaacacaatattgcaagagcctcccagtctcagtggcatgtttc

SEQ ID NO: 147340 - DNA, 78 bp, Homo sapiens
tgaaacttgagagacttaaaacacaatattgcaagagcctcccagtctcagtggcatgtttcttcagccagctctttt

SEQ ID NO: 147341 - DNA, 77 bp, Homo sapiens
agagacttaaaacacaatattgcaagagcctcccagtctcagtggcatgtttcttcagccagctctttttagcttat

SEQ ID NO: 147342 - DNA, 76 bp, Homo sapiens
ttaaaacacaatattgcaagagcctcccagtctcagtggcatgtttcttcagccagctctttttagcttattaaaa

SEQ ID NO: 147343 - DNA, 79 bp, Homo sapiens
ttgcaagagcctcccagtctcagtggcatgtttcttcagccagctctttttagcttattaaaacaaactgtcatgctta

SEQ ID NO: 147344 - DNA, 79 bp, Homo sapiens
tcccagtctcagtggcatgtttcttcagccagctctttttagcttattaaaacaaactgtcatgcttagaagacattca

SEQ ID NO: 147345 - DNA, 78 bp, Homo sapiens
agtggcatgtttcttcagccagctctttttagcttattaaaacaaactgtcatgcttagaagacattcactcacatat

SEQ ID NO: 147346 - DNA, 75 bp, Homo sapiens
gtttcttcagccagctctttttagcttattaaaacaaactgtcatgcttagaagacattcactcacatattttat

SEQ ID NO: 147347 - DNA, 76 bp, Homo sapiens
gccagctctttttagcttattaaaacaaactgtcatgcttagaagacattcactcacatattttattttggtatca

SEQ ID NO: 147348 - DNA, 74 bp, Homo sapiens
agcttattaaaacaaactgtcatgcttagaagacattcactcacatattttattttggtatcagtgcgtttcct

SEQ ID NO: 147349 - DNA, 76 bp, Homo sapiens
aacaaactgtcatgcttagaagacattcactcacatattttattttggtatcagtgcgtttccttacagttacaca

SEQ ID NO: 147350 - DNA, 77 bp, Homo sapiens
atgcttagaagacattcactcacatattttattttggtatcagtgcgtttccttacagttacacaatgtcattccag

SEQ ID NO: 147351 - DNA, 74 bp, Homo sapiens
attttattttggtatcagtgcgtttccttacagttacacaatgtcattccaggaggagtgagaaatcaggccac

SEQ ID NO: 147352 - DNA, 80 bp, Homo sapiens
tatcagtgcgtttccttacagttacacaatgtcattccaggaggagtgagaaatcaggccacggccagcattgctgcctt

SEQ ID NO: 147353 - DNA, 80 bp, Homo sapiens
ttacacaatgtcattccaggaggagtgagaaatcaggccacggccagcattgctgccttttctggtccgaagcactggta

SEQ ID NO: 147354 - DNA, 77 bp, Homo sapiens
attccaggaggagtgagaaatcaggccacggccagcattgctgccttttctggtccgaagcactggtagtaggaaga

SEQ ID NO: 147355 - DNA, 74 bp, Homo sapiens
ttttctggtccgaagcactggtagtaggaagaggcagttaaatgtgaataccaaaatgcttctttgtagaagca

SEQ ID NO: 147356 - DNA, 71 bp, Homo sapiens
aagcactggtagtaggaagaggcagttaaatgtgaataccaaaatgcttctttgtagaagcaaaggaaaaa

SEQ ID NO: 147357 - DNA, 72 bp, Homo sapiens
taggaagaggcagttaaatgtgaataccaaaatgcttctttgtagaagcaaaggaaaaacgtagctcttgaa

SEQ ID NO: 147358 - DNA, 70 bp, Homo sapiens
gaggcagttaaatgtgaataccaaaatgcttctttgtagaagcaaaggaaaaacgtagctcttgaaaaaa

SEQ ID NO: 147359 - DNA, 67 bp, Homo sapiens
gtgaataccaaaatgcttctttgtagaagcaaaggaaaaacgtagctcttgaaaaaatgttttaggt

SEQ ID NO: 147360 - DNA, 70 bp, Homo sapiens
atgcttctttgtagaagcaaaggaaaaacgtagctcttgaaaaaatgttttaggttatgcataggacaac

SEQ ID NO: 147361 - DNA, 72 bp, Homo sapiens
ttgtagaagcaaaggaaaaacgtagctcttgaaaaaatgttttaggttatgcataggacaactggaatcaca

SEQ ID NO: 147362 - DNA, 69 bp, Homo sapiens
aaaggaaaaacgtagctcttgaaaaaatgttttaggttatgcataggacaactggaatcacacaccctc

SEQ ID NO: 147363 - DNA, 71 bp, Homo sapiens
aaaaatgttttaggttatgcataggacaactggaatcacacaccctcctaaaatgctaatatatttgtttc

SEQ ID NO: 147364 - DNA, 76 bp, Homo sapiens
ttttaggttatgcataggacaactggaatcacacaccctcctaaaatgctaatatatttgtttcttgcagcagtgt

SEQ ID NO: 147365 - DNA, 74 bp, Homo sapiens
ataggacaactggaatcacacaccctcctaaaatgctaatatatttgtttcttgcagcagtgttgaggttttta

SEQ ID NO: 147366 - DNA, 72 bp, Homo sapiens
aactggaatcacacaccctcctaaaatgctaatatatttgtttcttgcagcagtgttgaggtttttagaaaa

SEQ ID NO: 147367 - DNA, 71 bp, Homo sapiens
caccctcctaaaatgctaatatatttgtttcttgcagcagtgttgaggtttttagaaaactggtataacag

SEQ ID NO: 147368 - DNA, 75 bp, Homo sapiens
aaatgctaatatatttgtttcttgcagcagtgttgaggtttttagaaaactggtataacagtattctgagccagc

SEQ ID NO: 147369 - DNA, 79 bp, Homo sapiens
tgtttcttgcagcagtgttgaggtttttagaaaactggtataacagtattctgagccagctcagctgcttcagagcttt

SEQ ID NO: 147370 - DNA, 79 bp, Homo sapiens
aaaactggtataacagtattctgagccagctcagctgcttcagagcttttgtgtgtccttgcatagacaacttaatttc

SEQ ID NO: 147371 - DNA, 83 bp, Homo sapiens
taacagtattctgagccagctcagctgcttcagagcttttgtgtgtccttgcatagacaacttaatttctctaggattcagtc

SEQ ID NO: 147372 - DNA, 79 bp, Homo sapiens
ccagctcagctgcttcagagcttttgtgtgtccttgcatagacaacttaatttctctaggattcagtctcctcgtttta

SEQ ID NO: 147373 - DNA, 75 bp, Homo sapiens
tgcttcagagcttttgtgtgtccttgcatagacaacttaatttctctaggattcagtctcctcgttttattttta

SEQ ID NO: 147374 - DNA, 72 bp, Homo sapiens
cagagcttttgtgtgtccttgcatagacaacttaatttctctaggattcagtctcctcgttttatttttaaa

SEQ ID NO: 147375 - DNA, 69 bp, Homo sapiens
aaattattttatttgtaaatacctcatcgtggactccaaaagcatgtctcctcgttttaaaaactggca

SEQ ID NO: 147376 - DNA, 71 bp, Homo sapiens
tttatttgtaaatacctcatcgtggactccaaaagcatgtctcctcgttttaaaaactggcataataccta

SEQ ID NO: 147377 - DNA, 73 bp, Homo sapiens
tggactccaaaagcatgtctcctcgttttaaaaactggcataatacctaccacaaaggttgatgtgagaatta

SEQ ID NO: 147378 - DNA, 71 bp, Homo sapiens
ccaaaagcatgtctcctcgttttaaaaactggcataatacctaccacaaaggttgatgtgagaattaaata

SEQ ID NO: 147379 - DNA, 72 bp, Homo sapiens
aaaaactggcataatacctaccacaaaggttgatgtgagaattaaatagagctttatacagaattccctcag

SEQ ID NO: 147380 - DNA, 74 bp, Homo sapiens
ggcataatacctaccacaaaggttgatgtgagaattaaatagagctttatacagaattccctcaggcattttta

SEQ ID NO: 147381 - DNA, 73 bp, Homo sapiens
ggttgatgtgagaattaaatagagctttatacagaattccctcaggcatttttaagtttatgtaatagggatg

SEQ ID NO: 147382 - DNA, 74 bp, Homo sapiens
taaatagagctttatacagaattccctcaggcatttttaagtttatgtaatagggatgtatcttacagttgatg

SEQ ID NO: 147383 - DNA, 74 bp, Homo sapiens
gagctttatacagaattccctcaggcatttttaagtttatgtaatagggatgtatcttacagttgatgggtaca

SEQ ID NO: 147384 - DNA, 72 bp, Homo sapiens
gaattccctcaggcatttttaagtttatgtaatagggatgtatcttacagttgatgggtacatttagtgtag

SEQ ID NO: 147385 - DNA, 72 bp, Homo sapiens
attccctcaggcatttttaagtttatgtaatagggatgtatcttacagttgatgggtacatttagtgtagtc

SEQ ID NO: 147386 - DNA, 70 bp, Homo sapiens
aggcatttttaagtttatgtaatagggatgtatcttacagttgatgggtacatttagtgtagtcccccta

SEQ ID NO: 147387 - DNA, 69 bp, Homo sapiens
tttttaagtttatgtaatagggatgtatcttacagttgatgggtacatttagtgtagtccccctacctc

SEQ ID NO: 147388 - DNA, 71 bp, Homo sapiens
gtttatgtaatagggatgtatcttacagttgatgggtacatttagtgtagtccccctacctcccaagctaa

SEQ ID NO: 147389 - DNA, 72 bp, Homo sapiens
tgtaatagggatgtatcttacagttgatgggtacatttagtgtagtccccctacctcccaagctaataatgg

SEQ ID NO: 147390 - DNA, 72 bp, Homo sapiens
tatcttacagttgatgggtacatttagtgtagtccccctacctcccaagctaataatggtgcgtcgtacaat

SEQ ID NO: 147391 - DNA, 72 bp, Homo sapiens
agttgatgggtacatttagtgtagtccccctacctcccaagctaataatggtgcgtcgtacaattgatggta

SEQ ID NO: 147392 - DNA, 72 bp, Homo sapiens
gtacatttagtgtagtccccctacctcccaagctaataatggtgcgtcgtacaattgatggtaccaaattga

SEQ ID NO: 147393 - DNA, 73 bp, Homo sapiens
ttagtgtagtccccctacctcccaagctaataatggtgcgtcgtacaattgatggtaccaaattgaggtgata

SEQ ID NO: 147394 - DNA, 73 bp, Homo sapiens
ccctacctcccaagctaataatggtgcgtcgtacaattgatggtaccaaattgaggtgataataacatagaaa

SEQ ID NO: 147395 - DNA, 74 bp, Homo sapiens
tcccaagctaataatggtgcgtcgtacaattgatggtaccaaattgaggtgataataacatagaaagagtttaa

SEQ ID NO: 147396 - DNA, 75 bp, Homo sapiens
ataatggtgcgtcgtacaattgatggtaccaaattgaggtgataataacatagaaagagtttaatgcaacgtgaa

SEQ ID NO: 147397 - DNA, 75 bp, Homo sapiens
cgtacaattgatggtaccaaattgaggtgataataacatagaaagagtttaatgcaacgtgaagtacaaaatgca

SEQ ID NO: 147398 - DNA, 75 bp, Homo sapiens
gatggtaccaaattgaggtgataataacatagaaagagtttaatgcaacgtgaagtacaaaatgcattcaataag

SEQ ID NO: 147399 - DNA, 77 bp, Homo sapiens
gaggtgataataacatagaaagagtttaatgcaacgtgaagtacaaaatgcattcaataagtagctgctatcatttt

SEQ ID NO: 147400 - DNA, 76 bp, Homo sapiens
gataataacatagaaagagtttaatgcaacgtgaagtacaaaatgcattcaataagtagctgctatcattttttta

SEQ ID NO: 147401 - DNA, 72 bp, Homo sapiens
aaaaattaaatatggctgcttgttaaggccatatcccaggaggaaagtgtggtctctgctgggaggttggtc

SEQ ID NO: 147402 - DNA, 76 bp, Homo sapiens
ttaaatatggctgcttgttaaggccatatcccaggaggaaagtgtggtctctgctgggaggttggtctacatacag

SEQ ID NO: 147403 - DNA, 78 bp, Homo sapiens
ttgttaaggccatatcccaggaggaaagtgtggtctctgctgggaggttggtctacatacaggaagccagatgtgtga

SEQ ID NO: 147404 - DNA, 80 bp, Homo sapiens
aggaaagtgtggtctctgctgggaggttggtctacatacaggaagccagatgtgtgagatggctctagataggcagaagg

SEQ ID NO: 147405 - DNA, 82 bp, Homo sapiens
agtgtggtctctgctgggaggttggtctacatacaggaagccagatgtgtgagatggctctagataggcagaaggggagagc

SEQ ID NO: 147406 - DNA, 81 bp, Homo sapiens
tgggaggttggtctacatacaggaagccagatgtgtgagatggctctagataggcagaaggggagagctcgtgccctctag

SEQ ID NO: 147407 - DNA, 81 bp, Homo sapiens
tctacatacaggaagccagatgtgtgagatggctctagataggcagaaggggagagctcgtgccctctaggaacctattaa

SEQ ID NO: 147408 - DNA, 72 bp, Homo sapiens
ataggcagaaggggagagctcgtgccctctaggaacctattaatagatatcaagggtgggaaaaggcagtgt

SEQ ID NO: 147409 - DNA, 73 bp, Homo sapiens
ggagagctcgtgccctctaggaacctattaatagatatcaagggtgggaaaaggcagtgttttgtggtcatgt

SEQ ID NO: 147410 - DNA, 72 bp, Homo sapiens
gtgccctctaggaacctattaatagatatcaagggtgggaaaaggcagtgttttgtggtcatgttaaagtca

SEQ ID NO: 147411 - DNA, 73 bp, Homo sapiens
taggaacctattaatagatatcaagggtgggaaaaggcagtgttttgtggtcatgttaaagtcagtgtctata

SEQ ID NO: 147412 - DNA, 75 bp, Homo sapiens
tattaatagatatcaagggtgggaaaaggcagtgttttgtggtcatgttaaagtcagtgtctataccattgagga

SEQ ID NO: 147413 - DNA, 75 bp, Homo sapiens
tatcaagggtgggaaaaggcagtgttttgtggtcatgttaaagtcagtgtctataccattgaggaaagagctagc

SEQ ID NO: 147414 - DNA, 75 bp, Homo sapiens
aaaggcagtgttttgtggtcatgttaaagtcagtgtctataccattgaggaaagagctagccagagaaggactta

SEQ ID NO: 147415 - DNA, 75 bp, Homo sapiens
tttgtggtcatgttaaagtcagtgtctataccattgaggaaagagctagccagagaaggacttacaaactagatt

SEQ ID NO: 147416 - DNA, 74 bp, Homo sapiens
atgttaaagtcagtgtctataccattgaggaaagagctagccagagaaggacttacaaactagattttcttgat

SEQ ID NO: 147417 - DNA, 79 bp, Homo sapiens
agtgtctataccattgaggaaagagctagccagagaaggacttacaaactagattttcttgattcatgcaactatcata

SEQ ID NO: 147418 - DNA, 79 bp, Homo sapiens
tataccattgaggaaagagctagccagagaaggacttacaaactagattttcttgattcatgcaactatcatagaaatg

SEQ ID NO: 147419 - DNA, 76 bp, Homo sapiens
aggaaagagctagccagagaaggacttacaaactagattttcttgattcatgcaactatcatagaaatgtttattg

SEQ ID NO: 147420 - DNA, 77 bp, Homo sapiens
gccagagaaggacttacaaactagattttcttgattcatgcaactatcatagaaatgtttattgttgctttttgtca

SEQ ID NO: 147421 - DNA, 75 bp, Homo sapiens
ggacttacaaactagattttcttgattcatgcaactatcatagaaatgtttattgttgctttttgtcattttgtg

SEQ ID NO: 147422 - DNA, 75 bp, Homo sapiens
tagattttcttgattcatgcaactatcatagaaatgtttattgttgctttttgtcattttgtgttctttaaggac

SEQ ID NO: 147423 - DNA, 73 bp, Homo sapiens
catagaaatgtttattgttgctttttgtcattttgtgttctttaaggacgttgtacattgaatgtcttcagcc

SEQ ID NO: 147424 - DNA, 75 bp, Homo sapiens
tattgttgctttttgtcattttgtgttctttaaggacgttgtacattgaatgtcttcagccttatctcagttgtg

SEQ ID NO: 147425 - DNA, 77 bp, Homo sapiens
ttttgtgttctttaaggacgttgtacattgaatgtcttcagccttatctcagttgtggcttagagagagctggccag

SEQ ID NO: 147426 - DNA, 78 bp, Homo sapiens
taaggacgttgtacattgaatgtcttcagccttatctcagttgtggcttagagagagctggccaggaccaattgttta

SEQ ID NO: 147427 - DNA, 77 bp, Homo sapiens
tcttcagccttatctcagttgtggcttagagagagctggccaggaccaattgtttattctttgaccatggtgttaaa

SEQ ID NO: 147428 - DNA, 75 bp, Homo sapiens
cttatctcagttgtggcttagagagagctggccaggaccaattgtttattctttgaccatggtgttaaagggaga

SEQ ID NO: 147429 - DNA, 74 bp, Homo sapiens
agttgtggcttagagagagctggccaggaccaattgtttattctttgaccatggtgttaaagggagagtctggc

SEQ ID NO: 147430 - DNA, 71 bp, Homo sapiens
agagctggccaggaccaattgtttattctttgaccatggtgttaaagggagagtctggctccttttagtag

SEQ ID NO: 147431 - DNA, 70 bp, Homo sapiens
aggaccaattgtttattctttgaccatggtgttaaagggagagtctggctccttttagtaggagtagcag

SEQ ID NO: 147432 - DNA, 70 bp, Homo sapiens
aattgtttattctttgaccatggtgttaaagggagagtctggctccttttagtaggagtagcagtatttg

SEQ ID NO: 147433 - DNA, 72 bp, Homo sapiens
tttgaccatggtgttaaagggagagtctggctccttttagtaggagtagcagtatttggctggagaccctat

SEQ ID NO: 147434 - DNA, 72 bp, Homo sapiens
atggtgttaaagggagagtctggctccttttagtaggagtagcagtatttggctggagaccctattgggaga

SEQ ID NO: 147435 - DNA, 72 bp, Homo sapiens
gagtctggctccttttagtaggagtagcagtatttggctggagaccctattgggagagtggattttaggaaa

SEQ ID NO: 147436 - DNA, 70 bp, Homo sapiens
tggctccttttagtaggagtagcagtatttggctggagaccctattgggagagtggattttaggaaaggg

SEQ ID NO: 147437 - DNA, 71 bp, Homo sapiens
tagtaggagtagcagtatttggctggagaccctattgggagagtggattttaggaaaggggttaagagcca

SEQ ID NO: 147438 - DNA, 72 bp, Homo sapiens
agtatttggctggagaccctattgggagagtggattttaggaaaggggttaagagccaggtgcagtgtcaca

SEQ ID NO: 147439 - DNA, 72 bp, Homo sapiens
tggagaccctattgggagagtggattttaggaaaggggttaagagccaggtgcagtgtcacacacctgtagt

SEQ ID NO: 147440 - DNA, 64 bp, Homo sapiens
accccatctctgtaaaagaaggggattaggggattaggatgtaacggtttaactgctccccttt

SEQ ID NO: 147441 - DNA, 63 bp, Homo sapiens
tgtaaaagaaggggattaggggattaggatgtaacggtttaactgctccccttttggaaaacc

SEQ ID NO: 147442 - DNA, 62 bp, Homo sapiens
aagaaggggattaggggattaggatgtaacggtttaactgctccccttttggaaaacctcct

SEQ ID NO: 147443 - DNA, 68 bp, Homo sapiens
gggattaggatgtaacggtttaactgctccccttttggaaaacctccttccagtggcatgcttggagg

SEQ ID NO: 147444 - DNA, 71 bp, Homo sapiens
atgtaacggtttaactgctccccttttggaaaacctccttccagtggcatgcttggaggtgccaagttgca

SEQ ID NO: 147445 - DNA, 73 bp, Homo sapiens
gtttaactgctccccttttggaaaacctccttccagtggcatgcttggaggtgccaagttgcactttatgaga

SEQ ID NO: 147446 - DNA, 77 bp, Homo sapiens
aaacctccttccagtggcatgcttggaggtgccaagttgcactttatgagacgaggcagcctgtccttgtagatctt

SEQ ID NO: 147447 - DNA, 75 bp, Homo sapiens
ttggaggtgccaagttgcactttatgagacgaggcagcctgtccttgtagatctttccctgtaaacaaatccaaa

SEQ ID NO: 147448 - DNA, 74 bp, Homo sapiens
tttatgagacgaggcagcctgtccttgtagatctttccctgtaaacaaatccaaaagatctgtcttgtagttta

SEQ ID NO: 147449 - DNA, 70 bp, Homo sapiens
gtccttgtagatctttccctgtaaacaaatccaaaagatctgtcttgtagtttaagtgtctctaattagg

SEQ ID NO: 147450 - DNA, 70 bp, Homo sapiens
atctttccctgtaaacaaatccaaaagatctgtcttgtagtttaagtgtctctaattagggtggcgagaa

SEQ ID NO: 147451 - DNA, 75 bp, Homo sapiens
tgtaaacaaatccaaaagatctgtcttgtagtttaagtgtctctaattagggtggcgagaagagtgaagatgtga

SEQ ID NO: 147452 - DNA, 75 bp, Homo sapiens
aaatccaaaagatctgtcttgtagtttaagtgtctctaattagggtggcgagaagagtgaagatgtgagtctcag

SEQ ID NO: 147453 - DNA, 77 bp, Homo sapiens
tgtcttgtagtttaagtgtctctaattagggtggcgagaagagtgaagatgtgagtctcaggtagatggaacataaa

SEQ ID NO: 147454 - DNA, 78 bp, Homo sapiens
tgtagtttaagtgtctctaattagggtggcgagaagagtgaagatgtgagtctcaggtagatggaacataaaatgatc

SEQ ID NO: 147455 - DNA, 80 bp, Homo sapiens
tctaattagggtggcgagaagagtgaagatgtgagtctcaggtagatggaacataaaatgatctcatactatgcaaactt

SEQ ID NO: 147456 - DNA, 81 bp, Homo sapiens
tagggtggcgagaagagtgaagatgtgagtctcaggtagatggaacataaaatgatctcatactatgcaaacttttcagta

SEQ ID NO: 147457 - DNA, 80 bp, Homo sapiens
gagtgaagatgtgagtctcaggtagatggaacataaaatgatctcatactatgcaaacttttcagtagcctctcttttaa

SEQ ID NO: 147458 - DNA, 78 bp, Homo sapiens
aagatgtgagtctcaggtagatggaacataaaatgatctcatactatgcaaacttttcagtagcctctcttttaaatg

SEQ ID NO: 147459 - DNA, 75 bp, Homo sapiens
ctcaggtagatggaacataaaatgatctcatactatgcaaacttttcagtagcctctcttttaaatgtaggttta

SEQ ID NO: 147460 - DNA, 73 bp, Homo sapiens
ggaacataaaatgatctcatactatgcaaacttttcagtagcctctcttttaaatgtaggtttacaatgtgtt

SEQ ID NO: 147461 - DNA, 74 bp, Homo sapiens
gatctcatactatgcaaacttttcagtagcctctcttttaaatgtaggtttacaatgtgttttggtatacacaa

SEQ ID NO: 147462 - DNA, 69 bp, Homo sapiens
actatgcaaacttttcagtagcctctcttttaaatgtaggtttacaatgtgttttggtatacacaaaag

SEQ ID NO: 147463 - DNA, 67 bp, Homo sapiens
cttttcagtagcctctcttttaaatgtaggtttacaatgtgttttggtatacacaaaagtatttagg

SEQ ID NO: 147464 - DNA, 68 bp, Homo sapiens
acaatgtgttttggtatacacaaaagtatttagggataaagggacattaactctctaacttactctta

SEQ ID NO: 147465 - DNA, 66 bp, Homo sapiens
gttttggtatacacaaaagtatttagggataaagggacattaactctctaacttactcttaaacag

SEQ ID NO: 147466 - DNA, 66 bp, Homo sapiens
caaaagtatttagggataaagggacattaactctctaacttactcttaaacagttcaaaatgtagg

SEQ ID NO: 147467 - DNA, 71 bp, Homo sapiens
tttagggataaagggacattaactctctaacttactcttaaacagttcaaaatgtaggtgagcagaagaga

SEQ ID NO: 147468 - DNA, 72 bp, Homo sapiens
acttactcttaaacagttcaaaatgtaggtgagcagaagagaaaaatataaagcaaatgtaaaatgctaaca

SEQ ID NO: 147469 - DNA, 73 bp, Homo sapiens
cagttcaaaatgtaggtgagcagaagagaaaaatataaagcaaatgtaaaatgctaacatttgggaaatctgg

SEQ ID NO: 147470 - DNA, 71 bp, Homo sapiens
tgtaggtgagcagaagagaaaaatataaagcaaatgtaaaatgctaacatttgggaaatctgggtaaaagg

SEQ ID NO: 147471 - DNA, 71 bp, Homo sapiens
gcagaagagaaaaatataaagcaaatgtaaaatgctaacatttgggaaatctgggtaaaaggtatgtggga

SEQ ID NO: 147472 - DNA, 68 bp, Homo sapiens
aaatataaagcaaatgtaaaatgctaacatttgggaaatctgggtaaaaggtatgtgggaaatcctcc

SEQ ID NO: 147473 - DNA, 68 bp, Homo sapiens
caaatgtaaaatgctaacatttgggaaatctgggtaaaaggtatgtgggaaatcctcctactggcttt

SEQ ID NO: 147474 - DNA, 67 bp, Homo sapiens
aatgctaacatttgggaaatctgggtaaaaggtatgtgggaaatcctcctactggcttttgtagttt

SEQ ID NO: 147475 - DNA, 66 bp, Homo sapiens
atttgggaaatctgggtaaaaggtatgtgggaaatcctcctactggcttttgtagtttttctctaa

SEQ ID NO: 147476 - DNA, 68 bp, Homo sapiens
aaatctgggtaaaaggtatgtgggaaatcctcctactggcttttgtagtttttctctaatgaaatgaa

SEQ ID NO: 147477 - DNA, 65 bp, Homo sapiens
aaaaggtatgtgggaaatcctcctactggcttttgtagtttttctctaatgaaatgaattttttt

SEQ ID NO: 147478 - DNA, 76 bp, Homo sapiens
tttaaagaaaaaagtatgtatgttgaacatctttccatgcaaacacctatgtttatgttattaaatctgcatgcca

SEQ ID NO: 147479 - DNA, 78 bp, Homo sapiens
aaagtatgtatgttgaacatctttccatgcaaacacctatgtttatgttattaaatctgcatgccataccattgtacg

SEQ ID NO: 147480 - DNA, 82 bp, Homo sapiens
tatgttgaacatctttccatgcaaacacctatgtttatgttattaaatctgcatgccataccattgtacggatgcactgtaa

SEQ ID NO: 147481 - DNA, 81 bp, Homo sapiens
tgttgaacatctttccatgcaaacacctatgtttatgttattaaatctgcatgccataccattgtacggatgcactgtaaa

SEQ ID NO: 147482 - DNA, 80 bp, Homo sapiens
tctttccatgcaaacacctatgtttatgttattaaatctgcatgccataccattgtacggatgcactgtaaaggcagtta

SEQ ID NO: 147483 - DNA, 81 bp, Homo sapiens
aaacacctatgtttatgttattaaatctgcatgccataccattgtacggatgcactgtaaaggcagttagctagatgcatg

SEQ ID NO: 147484 - DNA, 82 bp, Homo sapiens
gtttatgttattaaatctgcatgccataccattgtacggatgcactgtaaaggcagttagctagatgcatgttgtttgccat

SEQ ID NO: 147485 - DNA, 81 bp, Homo sapiens
atgccataccattgtacggatgcactgtaaaggcagttagctagatgcatgttgtttgccatttgctcatttccaattatt

SEQ ID NO: 147486 - DNA, 81 bp, Homo sapiens
ataccattgtacggatgcactgtaaaggcagttagctagatgcatgttgtttgccatttgctcatttccaattatttgcca

SEQ ID NO: 147487 - DNA, 80 bp, Homo sapiens
acggatgcactgtaaaggcagttagctagatgcatgttgtttgccatttgctcatttccaattatttgccatgggaaaca

SEQ ID NO: 147488 - DNA, 80 bp, Homo sapiens
tgtaaaggcagttagctagatgcatgttgtttgccatttgctcatttccaattatttgccatgggaaacagtgctttgtg

SEQ ID NO: 147489 - DNA, 79 bp, Homo sapiens
ctagatgcatgttgtttgccatttgctcatttccaattatttgccatgggaaacagtgctttgtggagatccctaaata

SEQ ID NO: 147490 - DNA, 79 bp, Homo sapiens
atgttgtttgccatttgctcatttccaattatttgccatgggaaacagtgctttgtggagatccctaaatatgatatgc

SEQ ID NO: 147491 - DNA, 78 bp, Homo sapiens
atttgctcatttccaattatttgccatgggaaacagtgctttgtggagatccctaaatatgatatgccctcatatatt

SEQ ID NO: 147492 - DNA, 78 bp, Homo sapiens
ttccaattatttgccatgggaaacagtgctttgtggagatccctaaatatgatatgccctcatatatttggaatgaaa

SEQ ID NO: 147493 - DNA, 79 bp, Homo sapiens
attatttgccatgggaaacagtgctttgtggagatccctaaatatgatatgccctcatatatttggaatgaaatcactg

SEQ ID NO: 147494 - DNA, 76 bp, Homo sapiens
aaacagtgctttgtggagatccctaaatatgatatgccctcatatatttggaatgaaatcactgttcccctttgaa

SEQ ID NO: 147495 - DNA, 76 bp, Homo sapiens
tttgtggagatccctaaatatgatatgccctcatatatttggaatgaaatcactgttcccctttgaaacaccttca

SEQ ID NO: 147496 - DNA, 76 bp, Homo sapiens
ttgtggagatccctaaatatgatatgccctcatatatttggaatgaaatcactgttcccctttgaaacaccttcac

SEQ ID NO: 147497 - DNA, 75 bp, Homo sapiens
tccctaaatatgatatgccctcatatatttggaatgaaatcactgttcccctttgaaacaccttcactcccataa

SEQ ID NO: 147498 - DNA, 75 bp, Homo sapiens
aatatgatatgccctcatatatttggaatgaaatcactgttcccctttgaaacaccttcactcccataatggact

SEQ ID NO: 147499 - DNA, 75 bp, Homo sapiens
atatgccctcatatatttggaatgaaatcactgttcccctttgaaacaccttcactcccataatggacttgacag

SEQ ID NO: 147500 - DNA, 72 bp, Homo sapiens
atatttggaatgaaatcactgttcccctttgaaacaccttcactcccataatggacttgacaggaagattaa

SEQ ID NO: 147501 - DNA, 72 bp, Homo sapiens
gaatgaaatcactgttcccctttgaaacaccttcactcccataatggacttgacaggaagattaacagtaaa

SEQ ID NO: 147502 - DNA, 70 bp, Homo sapiens
aaatcactgttcccctttgaaacaccttcactcccataatggacttgacaggaagattaacagtaaatta

SEQ ID NO: 147503 - DNA, 69 bp, Homo sapiens
ttcccctttgaaacaccttcactcccataatggacttgacaggaagattaacagtaaattaaccaacta

SEQ ID NO: 147504 - DNA, 72 bp, Homo sapiens
cactcccataatggacttgacaggaagattaacagtaaattaaccaactaatgcttgaatctaagaccttat

SEQ ID NO: 147505 - DNA, 71 bp, Homo sapiens
ataatggacttgacaggaagattaacagtaaattaaccaactaatgcttgaatctaagaccttatttagaa

SEQ ID NO: 147506 - DNA, 70 bp, Homo sapiens
tgacaggaagattaacagtaaattaaccaactaatgcttgaatctaagaccttatttagaattttaaatg

SEQ ID NO: 147507 - DNA, 68 bp, Homo sapiens
cagtaaattaaccaactaatgcttgaatctaagaccttatttagaattttaaatgggttaaatggtga

SEQ ID NO: 147508 - DNA, 69 bp, Homo sapiens
accaactaatgcttgaatctaagaccttatttagaattttaaatgggttaaatggtgactattagtatc

SEQ ID NO: 147509 - DNA, 71 bp, Homo sapiens
gcttgaatctaagaccttatttagaattttaaatgggttaaatggtgactattagtatctggataaggtca

SEQ ID NO: 147510 - DNA, 71 bp, Homo sapiens
ttagaattttaaatgggttaaatggtgactattagtatctggataaggtcaatgttgctaatctaaaataa

SEQ ID NO: 147511 - DNA, 76 bp, Homo sapiens
atctggataaggtcaatgttgctaatctaaaataagctctcaaaatttcttcagtcctggttcatccaacataaca

SEQ ID NO: 147512 - DNA, 73 bp, Homo sapiens
aggtcaatgttgctaatctaaaataagctctcaaaatttcttcagtcctggttcatccaacataacaaaactc

SEQ ID NO: 147513 - DNA, 71 bp, Homo sapiens
gctaatctaaaataagctctcaaaatttcttcagtcctggttcatccaacataacaaaactcttggggaaa

SEQ ID NO: 147514 - DNA, 68 bp, Homo sapiens
agctctcaaaatttcttcagtcctggttcatccaacataacaaaactcttggggaaaaaaaacatttc

SEQ ID NO: 147515 - DNA, 68 bp, Homo sapiens
tcaaaatttcttcagtcctggttcatccaacataacaaaactcttggggaaaaaaaacatttcggcga

SEQ ID NO: 147516 - DNA, 70 bp, Homo sapiens
ttcagtcctggttcatccaacataacaaaactcttggggaaaaaaaacatttcggcgacatgaaacatct

SEQ ID NO: 147517 - DNA, 70 bp, Homo sapiens
atccaacataacaaaactcttggggaaaaaaaacatttcggcgacatgaaacatcttggcaaagtgtcta

SEQ ID NO: 147518 - DNA, 71 bp, Homo sapiens
ataacaaaactcttggggaaaaaaaacatttcggcgacatgaaacatcttggcaaagtgtctactgcttga

SEQ ID NO: 147519 - DNA, 75 bp, Homo sapiens
ggggaaaaaaaacatttcggcgacatgaaacatcttggcaaagtgtctactgcttgagtaattatggagatcaga

SEQ ID NO: 147520 - DNA, 76 bp, Homo sapiens
aaaaacatttcggcgacatgaaacatcttggcaaagtgtctactgcttgagtaattatggagatcagaaagaagtc

SEQ ID NO: 147521 - DNA, 79 bp, Homo sapiens
cgacatgaaacatcttggcaaagtgtctactgcttgagtaattatggagatcagaaagaagtctttcagtctcttgaag

SEQ ID NO: 147522 - DNA, 76 bp, Homo sapiens
aaacatcttggcaaagtgtctactgcttgagtaattatggagatcagaaagaagtctttcagtctcttgaagggtg

SEQ ID NO: 147523 - DNA, 77 bp, Homo sapiens
tctactgcttgagtaattatggagatcagaaagaagtctttcagtctcttgaagggtgtggctttttgaaatcactg

SEQ ID NO: 147524 - DNA, 75 bp, Homo sapiens
taattatggagatcagaaagaagtctttcagtctcttgaagggtgtggctttttgaaatcactgtgttggaaaca

SEQ ID NO: 147525 - DNA, 72 bp, Homo sapiens
tcagaaagaagtctttcagtctcttgaagggtgtggctttttgaaatcactgtgttggaaacaacggacaaa

SEQ ID NO: 147526 - DNA, 69 bp, Homo sapiens
aagtctttcagtctcttgaagggtgtggctttttgaaatcactgtgttggaaacaacggacaaatcttt

SEQ ID NO: 147527 - DNA, 70 bp, Homo sapiens
agtctcttgaagggtgtggctttttgaaatcactgtgttggaaacaacggacaaatcttttctgccttct

SEQ ID NO: 147528 - DNA, 67 bp, Homo sapiens
aagggtgtggctttttgaaatcactgtgttggaaacaacggacaaatcttttctgccttcttttaaa

SEQ ID NO: 147529 - DNA, 71 bp, Homo sapiens
gctttttgaaatcactgtgttggaaacaacggacaaatcttttctgccttcttttaaaatgtgcttcacta

SEQ ID NO: 147530 - DNA, 69 bp, Homo sapiens
cactgtgttggaaacaacggacaaatcttttctgccttcttttaaaatgtgcttcactatttttaatgg

SEQ ID NO: 147531 - DNA, 70 bp, Homo sapiens
ggacaaatcttttctgccttcttttaaaatgtgcttcactatttttaatggttgccaaatattttgattg

SEQ ID NO: 147532 - DNA, 74 bp, Homo sapiens
aaaatgtgcttcactatttttaatggttgccaaatattttgattggattcctagtctcattccagcaacacgta

SEQ ID NO: 147533 - DNA, 74 bp, Homo sapiens
ttcactatttttaatggttgccaaatattttgattggattcctagtctcattccagcaacacgtaggatgaggg

SEQ ID NO: 147534 - DNA, 73 bp, Homo sapiens
tttaatggttgccaaatattttgattggattcctagtctcattccagcaacacgtaggatgaggggaatattt

SEQ ID NO: 147535 - DNA, 74 bp, Homo sapiens
ccaaatattttgattggattcctagtctcattccagcaacacgtaggatgaggggaatattttttccagactca

SEQ ID NO: 147536 - DNA, 80 bp, Homo sapiens
ctagtctcattccagcaacacgtaggatgaggggaatattttttccagactcagcacagtcatgtgcttgttctattgat

SEQ ID NO: 147537 - DNA, 78 bp, Homo sapiens
attccagcaacacgtaggatgaggggaatattttttccagactcagcacagtcatgtgcttgttctattgattcacct

SEQ ID NO: 147538 - DNA, 76 bp, Homo sapiens
cgtaggatgaggggaatattttttccagactcagcacagtcatgtgcttgttctattgattcaccttcgactttta

SEQ ID NO: 147539 - DNA, 76 bp, Homo sapiens
tttttccagactcagcacagtcatgtgcttgttctattgattcaccttcgacttttaattgttatttttctaatga

SEQ ID NO: 147540 - DNA, 75 bp, Homo sapiens
acagtcatgtgcttgttctattgattcaccttcgacttttaattgttatttttctaatgatccatgtaaattgaa

SEQ ID NO: 147541 - DNA, 73 bp, Homo sapiens
gcttgttctattgattcaccttcgacttttaattgttatttttctaatgatccatgtaaattgaaatcgtaga

SEQ ID NO: 147542 - DNA, 72 bp, Homo sapiens
gattcaccttcgacttttaattgttatttttctaatgatccatgtaaattgaaatcgtagaatagtattaca

SEQ ID NO: 147543 - DNA, 71 bp, Homo sapiens
cttttaattgttatttttctaatgatccatgtaaattgaaatcgtagaatagtattacatttaccctcatg

SEQ ID NO: 147544 - DNA, 73 bp, Homo sapiens
gttatttttctaatgatccatgtaaattgaaatcgtagaatagtattacatttaccctcatgtaaaaacagca

SEQ ID NO: 147545 - DNA, 76 bp, Homo sapiens
ttctaatgatccatgtaaattgaaatcgtagaatagtattacatttaccctcatgtaaaaacagcatttctgtatc

SEQ ID NO: 147546 - DNA, 73 bp, Homo sapiens
tccatgtaaattgaaatcgtagaatagtattacatttaccctcatgtaaaaacagcatttctgtatcttaagt

SEQ ID NO: 147547 - DNA, 73 bp, Homo sapiens
ttgaaatcgtagaatagtattacatttaccctcatgtaaaaacagcatttctgtatcttaagtttgtgctaaa

SEQ ID NO: 147548 - DNA, 74 bp, Homo sapiens
tagtattacatttaccctcatgtaaaaacagcatttctgtatcttaagtttgtgctaaaatagagcacaaatgt

SEQ ID NO: 147549 - DNA, 73 bp, Homo sapiens
ttaccctcatgtaaaaacagcatttctgtatcttaagtttgtgctaaaatagagcacaaatgtttggtccagt

SEQ ID NO: 147550 - DNA, 70 bp, Homo sapiens
gtaaaaacagcatttctgtatcttaagtttgtgctaaaatagagcacaaatgtttggtccagtttttagg

SEQ ID NO: 147551 - DNA, 71 bp, Homo sapiens
aacagcatttctgtatcttaagtttgtgctaaaatagagcacaaatgtttggtccagtttttaggtgtttc

SEQ ID NO: 147552 - DNA, 69 bp, Homo sapiens
ctgtatcttaagtttgtgctaaaatagagcacaaatgtttggtccagtttttaggtgtttcttaatggt

SEQ ID NO: 147553 - DNA, 66 bp, Homo sapiens
agtttgtgctaaaatagagcacaaatgtttggtccagtttttaggtgtttcttaatggttttaaaa

SEQ ID NO: 147554 - DNA, 64 bp, Homo sapiens
agagcacaaatgtttggtccagtttttaggtgtttcttaatggttttaaaaacaaaaaggcctg

SEQ ID NO: 147555 - DNA, 65 bp, Homo sapiens
ggtccagtttttaggtgtttcttaatggttttaaaaacaaaaaggcctggttgtttgcatgtgta

SEQ ID NO: 147556 - DNA, 71 bp, Homo sapiens
aggtgtttcttaatggttttaaaaacaaaaaggcctggttgtttgcatgtgtaatgctagagatgattcca

SEQ ID NO: 147557 - DNA, 79 bp, Homo sapiens
aaaggcctggttgtttgcatgtgtaatgctagagatgattccagtggatcctgccagatgtaagggacacccttgattc

SEQ ID NO: 147558 - DNA, 79 bp, Homo sapiens
taatgctagagatgattccagtggatcctgccagatgtaagggacacccttgattctctttggttatacctgacttcaa

SEQ ID NO: 147559 - DNA, 75 bp, Homo sapiens
atgattccagtggatcctgccagatgtaagggacacccttgattctctttggttatacctgacttcaagactctt

SEQ ID NO: 147560 - DNA, 74 bp, Homo sapiens
tggatcctgccagatgtaagggacacccttgattctctttggttatacctgacttcaagactctttccaggaaa

SEQ ID NO: 147561 - DNA, 71 bp, Homo sapiens
agatgtaagggacacccttgattctctttggttatacctgacttcaagactctttccaggaaatttacatg

SEQ ID NO: 147562 - DNA, 69 bp, Homo sapiens
taagggacacccttgattctctttggttatacctgacttcaagactctttccaggaaatttacatgttt

SEQ ID NO: 147563 - DNA, 72 bp, Homo sapiens
gattctctttggttatacctgacttcaagactctttccaggaaatttacatgttttaaaaacagactgcatc

SEQ ID NO: 147564 - DNA, 71 bp, Homo sapiens
ctttggttatacctgacttcaagactctttccaggaaatttacatgttttaaaaacagactgcatctgaat

SEQ ID NO: 147565 - DNA, 68 bp, Homo sapiens
acctgacttcaagactctttccaggaaatttacatgttttaaaaacagactgcatctgaatttttttt

SEQ ID NO: 147566 - DNA, 80 bp, Homo sapiens
aggtgtgagccagcacacctggcctacatctgaattttgacattagattcaattacaggacggtgtgaatgtttgtatgc

SEQ ID NO: 147567 - DNA, 79 bp, Homo sapiens
cagcacacctggcctacatctgaattttgacattagattcaattacaggacggtgtgaatgtttgtatgctctatttcc

SEQ ID NO: 147568 - DNA, 75 bp, Homo sapiens
ctggcctacatctgaattttgacattagattcaattacaggacggtgtgaatgtttgtatgctctatttcctttt

SEQ ID NO: 147569 - DNA, 76 bp, Homo sapiens
ctgaattttgacattagattcaattacaggacggtgtgaatgtttgtatgctctatttcctttttcttcatccatg

SEQ ID NO: 147570 - DNA, 77 bp, Homo sapiens
ttgacattagattcaattacaggacggtgtgaatgtttgtatgctctatttcctttttcttcatccatggagtgaat

SEQ ID NO: 147571 - DNA, 76 bp, Homo sapiens
attcaattacaggacggtgtgaatgtttgtatgctctatttcctttttcttcatccatggagtgaattggaatgag

SEQ ID NO: 147572 - DNA, 75 bp, Homo sapiens
acggtgtgaatgtttgtatgctctatttcctttttcttcatccatggagtgaattggaatgagggaaatggtaga

SEQ ID NO: 147573 - DNA, 73 bp, Homo sapiens
gtttgtatgctctatttcctttttcttcatccatggagtgaattggaatgagggaaatggtagattaataaac

SEQ ID NO: 147574 - DNA, 74 bp, Homo sapiens
tctatttcctttttcttcatccatggagtgaattggaatgagggaaatggtagattaataaaccctagattgca

SEQ ID NO: 147575 - DNA, 74 bp, Homo sapiens
ttttcttcatccatggagtgaattggaatgagggaaatggtagattaataaaccctagattgcaaattagcaac

SEQ ID NO: 147576 - DNA, 73 bp, Homo sapiens
gagtgaattggaatgagggaaatggtagattaataaaccctagattgcaaattagcaaccagttctatattaa

SEQ ID NO: 147577 - DNA, 72 bp, Homo sapiens
tggtagattaataaaccctagattgcaaattagcaaccagttctatattaaattacacataaattagaacca

SEQ ID NO: 147578 - DNA, 71 bp, Homo sapiens
ataaaccctagattgcaaattagcaaccagttctatattaaattacacataaattagaaccaagaacagga

SEQ ID NO: 147579 - DNA, 71 bp, Homo sapiens
accctagattgcaaattagcaaccagttctatattaaattacacataaattagaaccaagaacaggaaaga

SEQ ID NO: 147580 - DNA, 71 bp, Homo sapiens
tagattgcaaattagcaaccagttctatattaaattacacataaattagaaccaagaacaggaaagaaccc

SEQ ID NO: 147581 - DNA, 70 bp, Homo sapiens
attagcaaccagttctatattaaattacacataaattagaaccaagaacaggaaagaaccccttgccatc

SEQ ID NO: 147582 - DNA, 70 bp, Homo sapiens
caaccagttctatattaaattacacataaattagaaccaagaacaggaaagaaccccttgccatctgttc

SEQ ID NO: 147583 - DNA, 73 bp, Homo sapiens
tattaaattacacataaattagaaccaagaacaggaaagaaccccttgccatctgttctctagctgcgaggta

SEQ ID NO: 147584 - DNA, 73 bp, Homo sapiens
tacacataaattagaaccaagaacaggaaagaaccccttgccatctgttctctagctgcgaggtaggtattaa

SEQ ID NO: 147585 - DNA, 71 bp, Homo sapiens
acataaattagaaccaagaacaggaaagaaccccttgccatctgttctctagctgcgaggtaggtattaaa

SEQ ID NO: 147586 - DNA, 71 bp, Homo sapiens
ataaattagaaccaagaacaggaaagaaccccttgccatctgttctctagctgcgaggtaggtattaaatg

SEQ ID NO: 147587 - DNA, 70 bp, Homo sapiens
aaccaagaacaggaaagaaccccttgccatctgttctctagctgcgaggtaggtattaaatggaccaaaa

SEQ ID NO: 147588 - DNA, 71 bp, Homo sapiens
aggaaagaaccccttgccatctgttctctagctgcgaggtaggtattaaatggaccaaaaagagcagagtt

SEQ ID NO: 147589 - DNA, 79 bp, Homo sapiens
ccttgccatctgttctctagctgcgaggtaggtattaaatggaccaaaaagagcagagttttatgcatagcagtggcag

SEQ ID NO: 147590 - DNA, 78 bp, Homo sapiens
atctgttctctagctgcgaggtaggtattaaatggaccaaaaagagcagagttttatgcatagcagtggcagtaatgg

SEQ ID NO: 147591 - DNA, 77 bp, Homo sapiens
gtaggtattaaatggaccaaaaagagcagagttttatgcatagcagtggcagtaatgggaaagtcatatgttgtata

SEQ ID NO: 147592 - DNA, 79 bp, Homo sapiens
aatggaccaaaaagagcagagttttatgcatagcagtggcagtaatgggaaagtcatatgttgtatagtacttgctgta

SEQ ID NO: 147593 - DNA, 80 bp, Homo sapiens
aaaaagagcagagttttatgcatagcagtggcagtaatgggaaagtcatatgttgtatagtacttgctgtactgtgccca

SEQ ID NO: 147594 - DNA, 87 bp, Homo sapiens
atagcagtggcagtaatgggaaagtcatatgttgtatagtacttgctgtactgtgcccatgatgcctggctcatgaattgacacaga

SEQ ID NO: 147595 - DNA, 86 bp, Homo sapiens
taatgggaaagtcatatgttgtatagtacttgctgtactgtgcccatgatgcctggctcatgaattgacacagagcaagttgctat

SEQ ID NO: 147596 - DNA, 87 bp, Homo sapiens
agtcatatgttgtatagtacttgctgtactgtgcccatgatgcctggctcatgaattgacacagagcaagttgctattccattgaaa

SEQ ID NO: 147597 - DNA, 86 bp, Homo sapiens
tgttgtatagtacttgctgtactgtgcccatgatgcctggctcatgaattgacacagagcaagttgctattccattgaaaaccata

SEQ ID NO: 147598 - DNA, 87 bp, Homo sapiens
tacttgctgtactgtgcccatgatgcctggctcatgaattgacacagagcaagttgctattccattgaaaaccatatgttccatgtc

SEQ ID NO: 147599 - DNA, 86 bp, Homo sapiens
tgcccatgatgcctggctcatgaattgacacagagcaagttgctattccattgaaaaccatatgttccatgtctctagttcagaaa

SEQ ID NO: 147600 - DNA, 80 bp, Homo sapiens
cctggctcatgaattgacacagagcaagttgctattccattgaaaaccatatgttccatgtctctagttcagaaaaaata

SEQ ID NO: 147601 - DNA, 80 bp, Homo sapiens
ctcatgaattgacacagagcaagttgctattccattgaaaaccatatgttccatgtctctagttcagaaaaaataattga

SEQ ID NO: 147602 - DNA, 76 bp, Homo sapiens
gacacagagcaagttgctattccattgaaaaccatatgttccatgtctctagttcagaaaaaataattgattttaa

SEQ ID NO: 147603 - DNA, 71 bp, Homo sapiens
agttgctattccattgaaaaccatatgttccatgtctctagttcagaaaaaataattgattttaatttaac

SEQ ID NO: 147604 - DNA, 71 bp, Homo sapiens
ccatatgttccatgtctctagttcagaaaaaataattgattttaatttaactttgcctactttctttgctc

SEQ ID NO: 147605 - DNA, 68 bp, Homo sapiens
ccatgtctctagttcagaaaaaataattgattttaatttaactttgcctactttctttgctcttaaaa

SEQ ID NO: 147606 - DNA, 69 bp, Homo sapiens
attgattttaatttaactttgcctactttctttgctcttaaaaatatgtagactgtaaaatgtcattcc

SEQ ID NO: 147607 - DNA, 75 bp, Homo sapiens
tttgcctactttctttgctcttaaaaatatgtagactgtaaaatgtcattccctaggcactgtctggtggtgata

SEQ ID NO: 147608 - DNA, 81 bp, Homo sapiens
tttgctcttaaaaatatgtagactgtaaaatgtcattccctaggcactgtctggtggtgataccagcagcagcaataatca

SEQ ID NO: 147609 - DNA, 79 bp, Homo sapiens
ttaaaaatatgtagactgtaaaatgtcattccctaggcactgtctggtggtgataccagcagcagcaataatcattatt

SEQ ID NO: 147610 - DNA, 79 bp, Homo sapiens
taaaatgtcattccctaggcactgtctggtggtgataccagcagcagcaataatcattatttgtttagctgggtattag

SEQ ID NO: 147611 - DNA, 78 bp, Homo sapiens
tctggtggtgataccagcagcagcaataatcattatttgtttagctgggtattaggaagaggtagaaatagtagatct

SEQ ID NO: 147612 - DNA, 76 bp, Homo sapiens
ataccagcagcagcaataatcattatttgtttagctgggtattaggaagaggtagaaatagtagatctttcctcta

SEQ ID NO: 147613 - DNA, 75 bp, Homo sapiens
cagcagcaataatcattatttgtttagctgggtattaggaagaggtagaaatagtagatctttcctctaagacaa

SEQ ID NO: 147614 - DNA, 71 bp, Homo sapiens
cattatttgtttagctgggtattaggaagaggtagaaatagtagatctttcctctaagacaataattaatc

SEQ ID NO: 147615 - DNA, 71 bp, Homo sapiens
tttagctgggtattaggaagaggtagaaatagtagatctttcctctaagacaataattaatctcctctacc

SEQ ID NO: 147616 - DNA, 70 bp, Homo sapiens
ggtattaggaagaggtagaaatagtagatctttcctctaagacaataattaatctcctctacccttacag

SEQ ID NO: 147617 - DNA, 72 bp, Homo sapiens
agaggtagaaatagtagatctttcctctaagacaataattaatctcctctacccttacagtctttctctgaa

SEQ ID NO: 147618 - DNA, 69 bp, Homo sapiens
gtagatctttcctctaagacaataattaatctcctctacccttacagtctttctctgaaaaaaactttg

SEQ ID NO: 147619 - DNA, 70 bp, Homo sapiens
tttcctctaagacaataattaatctcctctacccttacagtctttctctgaaaaaaactttgtgtgcgtc

SEQ ID NO: 147620 - DNA, 73 bp, Homo sapiens
agacaataattaatctcctctacccttacagtctttctctgaaaaaaactttgtgtgcgtctgtgtatgtata

SEQ ID NO: 147621 - DNA, 75 bp, Homo sapiens
atatatgcatgtatgtataaagtgaaatgctgactttaagtgagatatttttaactttaaaatgaattttggcag

SEQ ID NO: 147622 - DNA, 72 bp, Homo sapiens
taaagtgaaatgctgactttaagtgagatatttttaactttaaaatgaattttggcaggctagcatataaaa

SEQ ID NO: 147623 - DNA, 72 bp, Homo sapiens
gctgactttaagtgagatatttttaactttaaaatgaattttggcaggctagcatataaaaataatgaagag

SEQ ID NO: 147624 - DNA, 72 bp, Homo sapiens
gtgagatatttttaactttaaaatgaattttggcaggctagcatataaaaataatgaagagttatccttgat

SEQ ID NO: 147625 - DNA, 73 bp, Homo sapiens
ttaactttaaaatgaattttggcaggctagcatataaaaataatgaagagttatccttgattggacttagctc

SEQ ID NO: 147626 - DNA, 74 bp, Homo sapiens
aatgaattttggcaggctagcatataaaaataatgaagagttatccttgattggacttagctccttactttcga

SEQ ID NO: 147627 - DNA, 73 bp, Homo sapiens
attttggcaggctagcatataaaaataatgaagagttatccttgattggacttagctccttactttcgaccca

SEQ ID NO: 147628 - DNA, 75 bp, Homo sapiens
catataaaaataatgaagagttatccttgattggacttagctccttactttcgacccactaatgtgttcagatga

SEQ ID NO: 147629 - DNA, 76 bp, Homo sapiens
aaaaataatgaagagttatccttgattggacttagctccttactttcgacccactaatgtgttcagatgatcatca

SEQ ID NO: 147630 - DNA, 77 bp, Homo sapiens
aataatgaagagttatccttgattggacttagctccttactttcgacccactaatgtgttcagatgatcatcatctt

SEQ ID NO: 147631 - DNA, 79 bp, Homo sapiens
taatgaagagttatccttgattggacttagctccttactttcgacccactaatgtgttcagatgatcatcatctttgtc

SEQ ID NO: 147632 - DNA, 78 bp, Homo sapiens
attggacttagctccttactttcgacccactaatgtgttcagatgatcatcatctttgtcttcatttaatgtggctta

SEQ ID NO: 147633 - DNA, 78 bp, Homo sapiens
ttggacttagctccttactttcgacccactaatgtgttcagatgatcatcatctttgtcttcatttaatgtggcttat

SEQ ID NO: 147634 - DNA, 80 bp, Homo sapiens
ttactttcgacccactaatgtgttcagatgatcatcatctttgtcttcatttaatgtggcttattggttagctgttgcta

SEQ ID NO: 147635 - DNA, 82 bp, Homo sapiens
tactttcgacccactaatgtgttcagatgatcatcatctttgtcttcatttaatgtggcttattggttagctgttgctatga

SEQ ID NO: 147636 - DNA, 82 bp, Homo sapiens
tcatcatctttgtcttcatttaatgtggcttattggttagctgttgctatgaggtagctgactgtggcacctattctaatct

SEQ ID NO: 147637 - DNA, 78 bp, Homo sapiens
ttgtcttcatttaatgtggcttattggttagctgttgctatgaggtagctgactgtggcacctattctaatcttattt

SEQ ID NO: 147638 - DNA, 78 bp, Homo sapiens
atttaatgtggcttattggttagctgttgctatgaggtagctgactgtggcacctattctaatcttattttgtacatc

SEQ ID NO: 147639 - DNA, 78 bp, Homo sapiens
ttattggttagctgttgctatgaggtagctgactgtggcacctattctaatcttattttgtacatctcttattcccta

SEQ ID NO: 147640 - DNA, 77 bp, Homo sapiens
ttagctgttgctatgaggtagctgactgtggcacctattctaatcttattttgtacatctcttattccctaggttta

SEQ ID NO: 147641 - DNA, 72 bp, Homo sapiens
agctgactgtggcacctattctaatcttattttgtacatctcttattccctaggtttactaatatactaatt

SEQ ID NO: 147642 - DNA, 69 bp, Homo sapiens
ggcacctattctaatcttattttgtacatctcttattccctaggtttactaatatactaattttcttta

SEQ ID NO: 147643 - DNA, 67 bp, Homo sapiens
ctaatcttattttgtacatctcttattccctaggtttactaatatactaattttctttaataaagaa

SEQ ID NO: 147644 - DNA, 61 bp, Homo sapiens
ttccctaggtttactaatatactaattttctttaataaagaaattttagaaacttttaacc

SEQ ID NO: 147645 - DNA, 65 bp, Homo sapiens
actaattttctttaataaagaaattttagaaacttttaacctgagggtcaacagttagtctgcca

SEQ ID NO: 147646 - DNA, 69 bp, Homo sapiens
ctttaataaagaaattttagaaacttttaacctgagggtcaacagttagtctgccattgtctccatcat

SEQ ID NO: 147647 - DNA, 70 bp, Homo sapiens
aaattttagaaacttttaacctgagggtcaacagttagtctgccattgtctccatcattactgtgtttcc

SEQ ID NO: 147648 - DNA, 73 bp, Homo sapiens
aaacttttaacctgagggtcaacagttagtctgccattgtctccatcattactgtgtttccccacaagattca

SEQ ID NO: 147649 - DNA, 76 bp, Homo sapiens
ttaacctgagggtcaacagttagtctgccattgtctccatcattactgtgtttccccacaagattcagttagatta

SEQ ID NO: 147650 - DNA, 77 bp, Homo sapiens
aacagttagtctgccattgtctccatcattactgtgtttccccacaagattcagttagattaatctctctggtctta

SEQ ID NO: 147651 - DNA, 79 bp, Homo sapiens
tctgccattgtctccatcattactgtgtttccccacaagattcagttagattaatctctctggtcttatttcatccaaa

SEQ ID NO: 147652 - DNA, 75 bp, Homo sapiens
tccatcattactgtgtttccccacaagattcagttagattaatctctctggtcttatttcatccaaatgtaaagt

SEQ ID NO: 147653 - DNA, 73 bp, Homo sapiens
cattactgtgtttccccacaagattcagttagattaatctctctggtcttatttcatccaaatgtaaagttgt

SEQ ID NO: 147654 - DNA, 73 bp, Homo sapiens
cccacaagattcagttagattaatctctctggtcttatttcatccaaatgtaaagttgttgttgttttatata

SEQ ID NO: 147655 - DNA, 77 bp, Homo sapiens
tgcccaggcttcaaatgtaaagttcttaatacttagctagtagaaggtaagccttgagatgagtattgctgcattaa

SEQ ID NO: 147656 - DNA, 77 bp, Homo sapiens
cttcaaatgtaaagttcttaatacttagctagtagaaggtaagccttgagatgagtattgctgcattaatacagtca

SEQ ID NO: 147657 - DNA, 78 bp, Homo sapiens
taaagttcttaatacttagctagtagaaggtaagccttgagatgagtattgctgcattaatacagtcatccaccagta

SEQ ID NO: 147658 - DNA, 80 bp, Homo sapiens
ttaatacttagctagtagaaggtaagccttgagatgagtattgctgcattaatacagtcatccaccagtaccatcactct

SEQ ID NO: 147659 - DNA, 82 bp, Homo sapiens
tagaaggtaagccttgagatgagtattgctgcattaatacagtcatccaccagtaccatcactcttgactctggtttgctaa

SEQ ID NO: 147660 - DNA, 80 bp, Homo sapiens
agccttgagatgagtattgctgcattaatacagtcatccaccagtaccatcactcttgactctggtttgctaacctttta

SEQ ID NO: 147661 - DNA, 77 bp, Homo sapiens
agatgagtattgctgcattaatacagtcatccaccagtaccatcactcttgactctggtttgctaaccttttatttt

SEQ ID NO: 147662 - DNA, 75 bp, Homo sapiens
ttgctgcattaatacagtcatccaccagtaccatcactcttgactctggtttgctaaccttttattttttgcttt

SEQ ID NO: 147663 - DNA, 71 bp, Homo sapiens
aatacagtcatccaccagtaccatcactcttgactctggtttgctaaccttttattttttgcttttcactt

SEQ ID NO: 147664 - DNA, 71 bp, Homo sapiens
accagtaccatcactcttgactctggtttgctaaccttttattttttgcttttcactttcagcagacctac

SEQ ID NO: 147665 - DNA, 72 bp, Homo sapiens
atcactcttgactctggtttgctaaccttttattttttgcttttcactttcagcagacctactccaatgaag

SEQ ID NO: 147666 - DNA, 73 bp, Homo sapiens
tctggtttgctaaccttttattttttgcttttcactttcagcagacctactccaatgaagtccattgtgttga

SEQ ID NO: 147667 - DNA, 74 bp, Homo sapiens
taaccttttattttttgcttttcactttcagcagacctactccaatgaagtccattgtgttgaagagattctga

SEQ ID NO: 147668 - DNA, 77 bp, Homo sapiens
tttttgcttttcactttcagcagacctactccaatgaagtccattgtgttgaagagattctgaaggtgagttcactg

SEQ ID NO: 147669 - DNA, 77 bp, Homo sapiens
tttcactttcagcagacctactccaatgaagtccattgtgttgaagagattctgaaggtgagttcactgttaatctt

SEQ ID NO: 147670 - DNA, 78 bp, Homo sapiens
agcagacctactccaatgaagtccattgtgttgaagagattctgaaggtgagttcactgttaatctttctcatttgaa

SEQ ID NO: 147671 - DNA, 76 bp, Homo sapiens
actccaatgaagtccattgtgttgaagagattctgaaggtgagttcactgttaatctttctcatttgaagaaatat

SEQ ID NO: 147672 - DNA, 74 bp, Homo sapiens
gtccattgtgttgaagagattctgaaggtgagttcactgttaatctttctcatttgaagaaatatttaagtagg

SEQ ID NO: 147673 - DNA, 75 bp, Homo sapiens
tgaagagattctgaaggtgagttcactgttaatctttctcatttgaagaaatatttaagtaggtaggcgtacatc

SEQ ID NO: 147674 - DNA, 72 bp, Homo sapiens
ctgaaggtgagttcactgttaatctttctcatttgaagaaatatttaagtaggtaggcgtacatccatttac

SEQ ID NO: 147675 - DNA, 72 bp, Homo sapiens
gtgagttcactgttaatctttctcatttgaagaaatatttaagtaggtaggcgtacatccatttactttcac

SEQ ID NO: 147676 - DNA, 69 bp, Homo sapiens
atctttctcatttgaagaaatatttaagtaggtaggcgtacatccatttactttcactttaaagaacag

SEQ ID NO: 147677 - DNA, 70 bp, Homo sapiens
tttgaagaaatatttaagtaggtaggcgtacatccatttactttcactttaaagaacagttgccattggc

SEQ ID NO: 147678 - DNA, 69 bp, Homo sapiens
agaaatatttaagtaggtaggcgtacatccatttactttcactttaaagaacagttgccattggctggg

SEQ ID NO: 147679 - DNA, 64 bp, Homo sapiens
ataaaaaataaagaacagttgttgttcccaaaccccttttaaccatttctcccccactcatctc

SEQ ID NO: 147680 - DNA, 64 bp, Homo sapiens
aaataaagaacagttgttgttcccaaaccccttttaaccatttctcccccactcatctccaaag

SEQ ID NO: 147681 - DNA, 64 bp, Homo sapiens
agttgttgttcccaaaccccttttaaccatttctcccccactcatctccaaaggcaaaaataaa

SEQ ID NO: 147682 - DNA, 65 bp, Homo sapiens
aaaccccttttaaccatttctcccccactcatctccaaaggcaaaaataaaccagaatagtaaca

SEQ ID NO: 147683 - DNA, 68 bp, Homo sapiens
ttttaaccatttctcccccactcatctccaaaggcaaaaataaaccagaatagtaacagaagtagtct

SEQ ID NO: 147684 - DNA, 70 bp, Homo sapiens
tcccccactcatctccaaaggcaaaaataaaccagaatagtaacagaagtagtcttggaacgtaattgaa

SEQ ID NO: 147685 - DNA, 71 bp, Homo sapiens
tctccaaaggcaaaaataaaccagaatagtaacagaagtagtcttggaacgtaattgaattctctaccaga

SEQ ID NO: 147686 - DNA, 69 bp, Homo sapiens
ggcaaaaataaaccagaatagtaacagaagtagtcttggaacgtaattgaattctctaccagattttat

SEQ ID NO: 147687 - DNA, 69 bp, Homo sapiens
ataaaccagaatagtaacagaagtagtcttggaacgtaattgaattctctaccagattttattaattaa

SEQ ID NO: 147688 - DNA, 71 bp, Homo sapiens
tagtaacagaagtagtcttggaacgtaattgaattctctaccagattttattaattaaattgaagtctaca

SEQ ID NO: 147689 - DNA, 72 bp, Homo sapiens
gtagtcttggaacgtaattgaattctctaccagattttattaattaaattgaagtctacaaactgcaagaca

SEQ ID NO: 147690 - DNA, 71 bp, Homo sapiens
ggaacgtaattgaattctctaccagattttattaattaaattgaagtctacaaactgcaagacatttggac

SEQ ID NO: 147691 - DNA, 75 bp, Homo sapiens
tctctaccagattttattaattaaattgaagtctacaaactgcaagacatttggaccagatttttatggcatctc

SEQ ID NO: 147692 - DNA, 73 bp, Homo sapiens
ccagattttattaattaaattgaagtctacaaactgcaagacatttggaccagatttttatggcatctctcgt

SEQ ID NO: 147693 - DNA, 72 bp, Homo sapiens
ttaaattgaagtctacaaactgcaagacatttggaccagatttttatggcatctctcgttaagtttttctgg

SEQ ID NO: 147694 - DNA, 73 bp, Homo sapiens
aagtctacaaactgcaagacatttggaccagatttttatggcatctctcgttaagtttttctggttgtccata

SEQ ID NO: 147695 - DNA, 71 bp, Homo sapiens
aaactgcaagacatttggaccagatttttatggcatctctcgttaagtttttctggttgtccataaaggcc

SEQ ID NO: 147696 - DNA, 70 bp, Homo sapiens
acatttggaccagatttttatggcatctctcgttaagtttttctggttgtccataaaggcccaggagagt

SEQ ID NO: 147697 - DNA, 72 bp, Homo sapiens
agatttttatggcatctctcgttaagtttttctggttgtccataaaggcccaggagagttgctcacttccca

SEQ ID NO: 147698 - DNA, 70 bp, Homo sapiens
atctctcgttaagtttttctggttgtccataaaggcccaggagagttgctcacttcccagagaggaaact

SEQ ID NO: 147699 - DNA, 70 bp, Homo sapiens
ttaagtttttctggttgtccataaaggcccaggagagttgctcacttcccagagaggaaacttcctgtat

SEQ ID NO: 147700 - DNA, 75 bp, Homo sapiens
tttctggttgtccataaaggcccaggagagttgctcacttcccagagaggaaacttcctgtattgatgtgtggga

SEQ ID NO: 147701 - DNA, 75 bp, Homo sapiens
taaaggcccaggagagttgctcacttcccagagaggaaacttcctgtattgatgtgtgggaggcaccagtggtta

SEQ ID NO: 147702 - DNA, 77 bp, Homo sapiens
gagagttgctcacttcccagagaggaaacttcctgtattgatgtgtgggaggcaccagtggttaaacagtgcttgat

SEQ ID NO: 147703 - DNA, 77 bp, Homo sapiens
ttgctcacttcccagagaggaaacttcctgtattgatgtgtgggaggcaccagtggttaaacagtgcttgatttata

SEQ ID NO: 147704 - DNA, 73 bp, Homo sapiens
agaggaaacttcctgtattgatgtgtgggaggcaccagtggttaaacagtgcttgatttatacctcttggcgt

SEQ ID NO: 147705 - DNA, 74 bp, Homo sapiens
aaacttcctgtattgatgtgtgggaggcaccagtggttaaacagtgcttgatttatacctcttggcgttctgta

SEQ ID NO: 147706 - DNA, 76 bp, Homo sapiens
ttgatgtgtgggaggcaccagtggttaaacagtgcttgatttatacctcttggcgttctgtaggtgatacctaata

SEQ ID NO: 147707 - DNA, 73 bp, Homo sapiens
aggcaccagtggttaaacagtgcttgatttatacctcttggcgttctgtaggtgatacctaatacctatggcc

SEQ ID NO: 147708 - DNA, 75 bp, Homo sapiens
agtggttaaacagtgcttgatttatacctcttggcgttctgtaggtgatacctaatacctatggcctcatacata

SEQ ID NO: 147709 - DNA, 75 bp, Homo sapiens
agtgcttgatttatacctcttggcgttctgtaggtgatacctaatacctatggcctcatacatacagccttttct

SEQ ID NO: 147710 - DNA, 76 bp, Homo sapiens
atttatacctcttggcgttctgtaggtgatacctaatacctatggcctcatacatacagccttttcttcagtgaga

SEQ ID NO: 147711 - DNA, 75 bp, Homo sapiens
tgtaggtgatacctaatacctatggcctcatacatacagccttttcttcagtgagacgatgaaattttaaaggaa

SEQ ID NO: 147712 - DNA, 73 bp, Homo sapiens
acctaatacctatggcctcatacatacagccttttcttcagtgagacgatgaaattttaaaggaatgaaagaa

SEQ ID NO: 147713 - DNA, 74 bp, Homo sapiens
tatggcctcatacatacagccttttcttcagtgagacgatgaaattttaaaggaatgaaagaaaaatagtggga

SEQ ID NO: 147714 - DNA, 71 bp, Homo sapiens
acagccttttcttcagtgagacgatgaaattttaaaggaatgaaagaaaaatagtgggaagtagatggtca

SEQ ID NO: 147715 - DNA, 71 bp, Homo sapiens
cttcagtgagacgatgaaattttaaaggaatgaaagaaaaatagtgggaagtagatggtcatctttagact

SEQ ID NO: 147716 - DNA, 68 bp, Homo sapiens
tttaaaggaatgaaagaaaaatagtgggaagtagatggtcatctttagacttaccttgaaggattact

SEQ ID NO: 147717 - DNA, 68 bp, Homo sapiens
gaaaaatagtgggaagtagatggtcatctttagacttaccttgaaggattactttttgcttttgttta

SEQ ID NO: 147718 - DNA, 70 bp, Homo sapiens
gggaagtagatggtcatctttagacttaccttgaaggattactttttgcttttgtttattgaaactatgc

SEQ ID NO: 147719 - DNA, 73 bp, Homo sapiens
gtcatctttagacttaccttgaaggattactttttgcttttgtttattgaaactatgccatgaacatttgtgc

SEQ ID NO: 147720 - DNA, 73 bp, Homo sapiens
tagacttaccttgaaggattactttttgcttttgtttattgaaactatgccatgaacatttgtgcttccacaa

SEQ ID NO: 147721 - DNA, 77 bp, Homo sapiens
tgaaggattactttttgcttttgtttattgaaactatgccatgaacatttgtgcttccacaaatatgtcattgaata

SEQ ID NO: 147722 - DNA, 77 bp, Homo sapiens
ttgcttttgtttattgaaactatgccatgaacatttgtgcttccacaaatatgtcattgaatacattacccacttgt

SEQ ID NO: 147723 - DNA, 76 bp, Homo sapiens
gtttattgaaactatgccatgaacatttgtgcttccacaaatatgtcattgaatacattacccacttgttcaattt

SEQ ID NO: 147724 - DNA, 78 bp, Homo sapiens
tatgccatgaacatttgtgcttccacaaatatgtcattgaatacattacccacttgttcaatttttcttgtacaagga

SEQ ID NO: 147725 - DNA, 78 bp, Homo sapiens
tgaacatttgtgcttccacaaatatgtcattgaatacattacccacttgttcaatttttcttgtacaaggatgacaga

SEQ ID NO: 147726 - DNA, 76 bp, Homo sapiens
gcttccacaaatatgtcattgaatacattacccacttgttcaatttttcttgtacaaggatgacagattccttcta

SEQ ID NO: 147727 - DNA, 70 bp, Homo sapiens
atacattacccacttgttcaatttttcttgtacaaggatgacagattccttctagaacttaattccaggg

SEQ ID NO: 147728 - DNA, 69 bp, Homo sapiens
ttacccacttgttcaatttttcttgtacaaggatgacagattccttctagaacttaattccaggggaaa

SEQ ID NO: 147729 - DNA, 69 bp, Homo sapiens
acagattccttctagaacttaattccaggggaaaaatgttaactttcctcatgaactggcattctttct

SEQ ID NO: 147730 - DNA, 67 bp, Homo sapiens
ttccttctagaacttaattccaggggaaaaatgttaactttcctcatgaactggcattctttctttt

SEQ ID NO: 147731 - DNA, 71 bp, Homo sapiens
gggaaaaatgttaactttcctcatgaactggcattctttctttttatcagagaagaattatatataatgtt

SEQ ID NO: 147732 - DNA, 74 bp, Homo sapiens
tgttaactttcctcatgaactggcattctttctttttatcagagaagaattatatataatgtttcccattttgc

SEQ ID NO: 147733 - DNA, 73 bp, Homo sapiens
tcctcatgaactggcattctttctttttatcagagaagaattatatataatgtttcccattttgcctttaatt

SEQ ID NO: 147734 - DNA, 71 bp, Homo sapiens
ctggcattctttctttttatcagagaagaattatatataatgtttcccattttgcctttaatttccaggaa

SEQ ID NO: 147735 - DNA, 69 bp, Homo sapiens
ctttttatcagagaagaattatatataatgtttcccattttgcctttaatttccaggaaacccagagct

SEQ ID NO: 147736 - DNA, 69 bp, Homo sapiens
gaagaattatatataatgtttcccattttgcctttaatttccaggaaacccagagcttaattttaatgc

SEQ ID NO: 147737 - DNA, 69 bp, Homo sapiens
atataatgtttcccattttgcctttaatttccaggaaacccagagcttaattttaatgctcaggtacag

SEQ ID NO: 147738 - DNA, 68 bp, Homo sapiens
gtttcccattttgcctttaatttccaggaaacccagagcttaattttaatgctcaggtacagtaattg

SEQ ID NO: 147739 - DNA, 68 bp, Homo sapiens
gcctttaatttccaggaaacccagagcttaattttaatgctcaggtacagtaattgtaaaaactgagg

SEQ ID NO: 147740 - DNA, 66 bp, Homo sapiens
aacccagagcttaattttaatgctcaggtacagtaattgtaaaaactgagggttttgtgtattttt

SEQ ID NO: 147741 - DNA, 69 bp, Homo sapiens
tttaatgctcaggtacagtaattgtaaaaactgagggttttgtgtattttttatccctcttctgtggcc

SEQ ID NO: 147742 - DNA, 69 bp, Homo sapiens
tgctcaggtacagtaattgtaaaaactgagggttttgtgtattttttatccctcttctgtggcctttaa

SEQ ID NO: 147743 - DNA, 66 bp, Homo sapiens
attgtaaaaactgagggttttgtgtattttttatccctcttctgtggcctttaatttgcttctagg

SEQ ID NO: 147744 - DNA, 69 bp, Homo sapiens
ctgagggttttgtgtattttttatccctcttctgtggcctttaatttgcttctaggtcaattttaatga

SEQ ID NO: 147745 - DNA, 71 bp, Homo sapiens
tgtgtattttttatccctcttctgtggcctttaatttgcttctaggtcaattttaatgatattcttgtctt

SEQ ID NO: 147746 - DNA, 71 bp, Homo sapiens
ttatccctcttctgtggcctttaatttgcttctaggtcaattttaatgatattcttgtcttttactgtagg

SEQ ID NO: 147747 - DNA, 71 bp, Homo sapiens
tctgtggcctttaatttgcttctaggtcaattttaatgatattcttgtcttttactgtagggtttctgact

SEQ ID NO: 147748 - DNA, 68 bp, Homo sapiens
ggcctttaatttgcttctaggtcaattttaatgatattcttgtcttttactgtagggtttctgacttt

SEQ ID NO: 147749 - DNA, 68 bp, Homo sapiens
ttgcttctaggtcaattttaatgatattcttgtcttttactgtagggtttctgacttttttcttcttt

SEQ ID NO: 147750 - DNA, 76 bp, Homo sapiens
tttttaattagtagagagatgtatataataaatgtgactgttaatttgaatcactattgctcatattttctcaaaa

SEQ ID NO: 147751 - DNA, 78 bp, Homo sapiens
ttaattagtagagagatgtatataataaatgtgactgttaatttgaatcactattgctcatattttctcaaaatacat

SEQ ID NO: 147752 - DNA, 79 bp, Homo sapiens
agtagagagatgtatataataaatgtgactgttaatttgaatcactattgctcatattttctcaaaatacatttactca

SEQ ID NO: 147753 - DNA, 78 bp, Homo sapiens
gagagatgtatataataaatgtgactgttaatttgaatcactattgctcatattttctcaaaatacatttactcaatt

SEQ ID NO: 147754 - DNA, 75 bp, Homo sapiens
gtatataataaatgtgactgttaatttgaatcactattgctcatattttctcaaaatacatttactcaattttag

SEQ ID NO: 147755 - DNA, 74 bp, Homo sapiens
tataataaatgtgactgttaatttgaatcactattgctcatattttctcaaaatacatttactcaattttagtt

SEQ ID NO: 147756 - DNA, 72 bp, Homo sapiens
taaatgtgactgttaatttgaatcactattgctcatattttctcaaaatacatttactcaattttagttttt

SEQ ID NO: 147757 - DNA, 71 bp, Homo sapiens
gtgactgttaatttgaatcactattgctcatattttctcaaaatacatttactcaattttagttttttaac

SEQ ID NO: 147758 - DNA, 69 bp, Homo sapiens
tgttaatttgaatcactattgctcatattttctcaaaatacatttactcaattttagttttttaacttt

SEQ ID NO: 147759 - DNA, 69 bp, Homo sapiens
atttgaatcactattgctcatattttctcaaaatacatttactcaattttagttttttaacttttcatt

SEQ ID NO: 147760 - DNA, 68 bp, Homo sapiens
tcactattgctcatattttctcaaaatacatttactcaattttagttttttaacttttcattttaaag

SEQ ID NO: 147761 - DNA, 66 bp, Homo sapiens
gctcatattttctcaaaatacatttactcaattttagttttttaacttttcattttaaagtattaa

SEQ ID NO: 147762 - DNA, 65 bp, Homo sapiens
ctcaaaatacatttactcaattttagttttttaacttttcattttaaagtattaagtgatggtgg

SEQ ID NO: 147763 - DNA, 64 bp, Homo sapiens
tactcaattttagttttttaacttttcattttaaagtattaagtgatggtggtactaaaaccag

SEQ ID NO: 147764 - DNA, 66 bp, Homo sapiens
cttttcattttaaagtattaagtgatggtggtactaaaaccagtaattaagtatattggttatttc

SEQ ID NO: 147765 - DNA, 69 bp, Homo sapiens
tttaaagtattaagtgatggtggtactaaaaccagtaattaagtatattggttatttcctcacttgtga

SEQ ID NO: 147766 - DNA, 69 bp, Homo sapiens
agtgatggtggtactaaaaccagtaattaagtatattggttatttcctcacttgtgaaatttttgacag

SEQ ID NO: 147767 - DNA, 69 bp, Homo sapiens
tggtggtactaaaaccagtaattaagtatattggttatttcctcacttgtgaaatttttgacagtagta

SEQ ID NO: 147768 - DNA, 70 bp, Homo sapiens
gtatattggttatttcctcacttgtgaaatttttgacagtagtagtatctaaccagttgtttggaaaaca

SEQ ID NO: 147769 - DNA, 69 bp, Homo sapiens
ggttatttcctcacttgtgaaatttttgacagtagtagtatctaaccagttgtttggaaaacagcttgt

SEQ ID NO: 147770 - DNA, 68 bp, Homo sapiens
cctcacttgtgaaatttttgacagtagtagtatctaaccagttgtttggaaaacagcttgtttttgtt

SEQ ID NO: 147771 - DNA, 69 bp, Homo sapiens
ttttgacagtagtagtatctaaccagttgtttggaaaacagcttgtttttgtttcacagtcttttgtcc

SEQ ID NO: 147772 - DNA, 68 bp, Homo sapiens
acagtagtagtatctaaccagttgtttggaaaacagcttgtttttgtttcacagtcttttgtcccatt

SEQ ID NO: 147773 - DNA, 65 bp, Homo sapiens
aaccagttgtttggaaaacagcttgtttttgtttcacagtcttttgtcccattttgtagttaggg

SEQ ID NO: 147774 - DNA, 67 bp, Homo sapiens
gtttggaaaacagcttgtttttgtttcacagtcttttgtcccattttgtagttagggttttctgaga

SEQ ID NO: 147775 - DNA, 66 bp, Homo sapiens
gcttgtttttgtttcacagtcttttgtcccattttgtagttagggttttctgagaaagaaagaacc

SEQ ID NO: 147776 - DNA, 69 bp, Homo sapiens
tgtttcacagtcttttgtcccattttgtagttagggttttctgagaaagaaagaacctctagagaaaca

SEQ ID NO: 147777 - DNA, 67 bp, Homo sapiens
acagtcttttgtcccattttgtagttagggttttctgagaaagaaagaacctctagagaaacatacc

SEQ ID NO: 147778 - DNA, 64 bp, Homo sapiens
gtcccattttgtagttagggttttctgagaaagaaagaacctctagagaaacataccttttttt

SEQ ID NO: 147779 - DNA, 77 bp, Homo sapiens
tgagccaccgtacctggctgagaaacatactttgaactgctaacagtgaggaatttttgtcaaccagcatgtaagat

SEQ ID NO: 147780 - DNA, 75 bp, Homo sapiens
gtacctggctgagaaacatactttgaactgctaacagtgaggaatttttgtcaaccagcatgtaagattaaataa

SEQ ID NO: 147781 - DNA, 74 bp, Homo sapiens
ggctgagaaacatactttgaactgctaacagtgaggaatttttgtcaaccagcatgtaagattaaataagttac

SEQ ID NO: 147782 - DNA, 74 bp, Homo sapiens
catactttgaactgctaacagtgaggaatttttgtcaaccagcatgtaagattaaataagttacctcgattaca

SEQ ID NO: 147783 - DNA, 71 bp, Homo sapiens
actgctaacagtgaggaatttttgtcaaccagcatgtaagattaaataagttacctcgattacatttttta

SEQ ID NO: 147784 - DNA, 70 bp, Homo sapiens
gtgaggaatttttgtcaaccagcatgtaagattaaataagttacctcgattacattttttatcatccttt

SEQ ID NO: 147785 - DNA, 71 bp, Homo sapiens
tttgtcaaccagcatgtaagattaaataagttacctcgattacattttttatcatccttttcctcttctgt

SEQ ID NO: 147786 - DNA, 70 bp, Homo sapiens
agcatgtaagattaaataagttacctcgattacattttttatcatccttttcctcttctgtttctgaaat

SEQ ID NO: 147787 - DNA, 69 bp, Homo sapiens
ataagttacctcgattacattttttatcatccttttcctcttctgtttctgaaatttgttggtatggta

SEQ ID NO: 147788 - DNA, 69 bp, Homo sapiens
acctcgattacattttttatcatccttttcctcttctgtttctgaaatttgttggtatggtaagtcgta

SEQ ID NO: 147789 - DNA, 69 bp, Homo sapiens
tttttatcatccttttcctcttctgtttctgaaatttgttggtatggtaagtcgtaaacatactaagga

SEQ ID NO: 147790 - DNA, 70 bp, Homo sapiens
gaaatttgttggtatggtaagtcgtaaacatactaaggaatttaattatatactgtggccttggcatttc

SEQ ID NO: 147791 - DNA, 72 bp, Homo sapiens
ttgttggtatggtaagtcgtaaacatactaaggaatttaattatatactgtggccttggcatttcctctgaa

SEQ ID NO: 147792 - DNA, 72 bp, Homo sapiens
gtaagtcgtaaacatactaaggaatttaattatatactgtggccttggcatttcctctgaaattgtgcgtta

SEQ ID NO: 147793 - DNA, 75 bp, Homo sapiens
ggaatttaattatatactgtggccttggcatttcctctgaaattgtgcgttatttgttctatcattatttcagaa

SEQ ID NO: 147794 - DNA, 78 bp, Homo sapiens
ttatatactgtggccttggcatttcctctgaaattgtgcgttatttgttctatcattatttcagaagtaaatgcaaca

SEQ ID NO: 147795 - DNA, 76 bp, Homo sapiens
cttggcatttcctctgaaattgtgcgttatttgttctatcattatttcagaagtaaatgcaacagtgcaggtttgt

SEQ ID NO: 147796 - DNA, 76 bp, Homo sapiens
tttcctctgaaattgtgcgttatttgttctatcattatttcagaagtaaatgcaacagtgcaggtttgttgtcttc

SEQ ID NO: 147797 - DNA, 80 bp, Homo sapiens
aaattgtgcgttatttgttctatcattatttcagaagtaaatgcaacagtgcaggtttgttgtcttctgcatatgtcaga

SEQ ID NO: 147798 - DNA, 82 bp, Homo sapiens
ttatttgttctatcattatttcagaagtaaatgcaacagtgcaggtttgttgtcttctgcatatgtcagatgctcctcttag

SEQ ID NO: 147799 - DNA, 79 bp, Homo sapiens
attatttcagaagtaaatgcaacagtgcaggtttgttgtcttctgcatatgtcagatgctcctcttaggtttcggtgtg

SEQ ID NO: 147800 - DNA, 79 bp, Homo sapiens
aagtaaatgcaacagtgcaggtttgttgtcttctgcatatgtcagatgctcctcttaggtttcggtgtgtgttgaaata

SEQ ID NO: 147801 - DNA, 81 bp, Homo sapiens
aacagtgcaggtttgttgtcttctgcatatgtcagatgctcctcttaggtttcggtgtgtgttgaaataagacatgtcaca

SEQ ID NO: 147802 - DNA, 79 bp, Homo sapiens
ttctgcatatgtcagatgctcctcttaggtttcggtgtgtgttgaaataagacatgtcacatcctttatttaggaatgg

SEQ ID NO: 147803 - DNA, 74 bp, Homo sapiens
tcctcttaggtttcggtgtgtgttgaaataagacatgtcacatcctttatttaggaatggtggtattacagcac

SEQ ID NO: 147804 - DNA, 74 bp, Homo sapiens
aggtttcggtgtgtgttgaaataagacatgtcacatcctttatttaggaatggtggtattacagcaccagacaa

SEQ ID NO: 147805 - DNA, 77 bp, Homo sapiens
ttgaaataagacatgtcacatcctttatttaggaatggtggtattacagcaccagacaagcatctttaattgaagga

SEQ ID NO: 147806 - DNA, 75 bp, Homo sapiens
ataagacatgtcacatcctttatttaggaatggtggtattacagcaccagacaagcatctttaattgaaggaacc

SEQ ID NO: 147807 - DNA, 71 bp, Homo sapiens
tttaggaatggtggtattacagcaccagacaagcatctttaattgaaggaacccatccgtcctccttccct

SEQ ID NO: 147808 - DNA, 69 bp, Homo sapiens
accagacaagcatctttaattgaaggaacccatccgtcctccttcccttcccacccaggatcacgttag

SEQ ID NO: 147809 - DNA, 70 bp, Homo sapiens
acaagcatctttaattgaaggaacccatccgtcctccttcccttcccacccaggatcacgttagtgaatc

SEQ ID NO: 147810 - DNA, 69 bp, Homo sapiens
aacccatccgtcctccttcccttcccacccaggatcacgttagtgaatccttgcttacctcgaaatgct

SEQ ID NO: 147811 - DNA, 72 bp, Homo sapiens
ccttcccttcccacccaggatcacgttagtgaatccttgcttacctcgaaatgcttgagagagagtggttaa

SEQ ID NO: 147812 - DNA, 74 bp, Homo sapiens
cttcccacccaggatcacgttagtgaatccttgcttacctcgaaatgcttgagagagagtggttaatgtataaa

SEQ ID NO: 147813 - DNA, 78 bp, Homo sapiens
ttagtgaatccttgcttacctcgaaatgcttgagagagagtggttaatgtataaatcatgcccatttatgatttggaa

SEQ ID NO: 147814 - DNA, 78 bp, Homo sapiens
ttgcttacctcgaaatgcttgagagagagtggttaatgtataaatcatgcccatttatgatttggaaatcataacttg

SEQ ID NO: 147815 - DNA, 77 bp, Homo sapiens
aatgcttgagagagagtggttaatgtataaatcatgcccatttatgatttggaaatcataacttgggaaagcaaaca

SEQ ID NO: 147816 - DNA, 75 bp, Homo sapiens
agagagagtggttaatgtataaatcatgcccatttatgatttggaaatcataacttgggaaagcaaacagaagga

SEQ ID NO: 147817 - DNA, 74 bp, Homo sapiens
ttaatgtataaatcatgcccatttatgatttggaaatcataacttgggaaagcaaacagaaggacgtccaggac

SEQ ID NO: 147818 - DNA, 74 bp, Homo sapiens
ataaatcatgcccatttatgatttggaaatcataacttgggaaagcaaacagaaggacgtccaggactgaacag

SEQ ID NO: 147819 - DNA, 72 bp, Homo sapiens
ttatgatttggaaatcataacttgggaaagcaaacagaaggacgtccaggactgaacaggccataggccttt

SEQ ID NO: 147820 - DNA, 72 bp, Homo sapiens
tttggaaatcataacttgggaaagcaaacagaaggacgtccaggactgaacaggccataggccttttcatat

SEQ ID NO: 147821 - DNA, 73 bp, Homo sapiens
ataacttgggaaagcaaacagaaggacgtccaggactgaacaggccataggccttttcatattggagtctgcc

SEQ ID NO: 147822 - DNA, 76 bp, Homo sapiens
aaggacgtccaggactgaacaggccataggccttttcatattggagtctgccccttctcttctgtctgtgacctca

SEQ ID NO: 147823 - DNA, 75 bp, Homo sapiens
acaggccataggccttttcatattggagtctgccccttctcttctgtctgtgacctcagttaagttataggtcgc

SEQ ID NO: 147824 - DNA, 75 bp, Homo sapiens
ttttcatattggagtctgccccttctcttctgtctgtgacctcagttaagttataggtcgctgctgggctttggt

SEQ ID NO: 147825 - DNA, 73 bp, Homo sapiens
ttctgtctgtgacctcagttaagttataggtcgctgctgggctttggtttcctcattggtaaaatgaaggccc

SEQ ID NO: 147826 - DNA, 74 bp, Homo sapiens
tcagttaagttataggtcgctgctgggctttggtttcctcattggtaaaatgaaggccctgggctagcggatga

SEQ ID NO: 147827 - DNA, 75 bp, Homo sapiens
taagttataggtcgctgctgggctttggtttcctcattggtaaaatgaaggccctgggctagcggatgatctcca

SEQ ID NO: 147828 - DNA, 74 bp, Homo sapiens
ttggtttcctcattggtaaaatgaaggccctgggctagcggatgatctccagggtccattccagctcttactct

SEQ ID NO: 147829 - DNA, 76 bp, Homo sapiens
attggtaaaatgaaggccctgggctagcggatgatctccagggtccattccagctcttactcttgacgctgaccca

SEQ ID NO: 147830 - DNA, 79 bp, Homo sapiens
taaaatgaaggccctgggctagcggatgatctccagggtccattccagctcttactcttgacgctgacccagatgctac

SEQ ID NO: 147831 - DNA, 78 bp, Homo sapiens
ccctgggctagcggatgatctccagggtccattccagctcttactcttgacgctgacccagatgctactttcctttgc

SEQ ID NO: 147832 - DNA, 75 bp, Homo sapiens
atgatctccagggtccattccagctcttactcttgacgctgacccagatgctactttcctttgcctcccggttcc

SEQ ID NO: 147833 - DNA, 72 bp, Homo sapiens
acgctgacccagatgctactttcctttgcctcccggttcccgttctcatcttgtaccagcaatttattaaga

SEQ ID NO: 147834 - DNA, 71 bp, Homo sapiens
ctttgcctcccggttcccgttctcatcttgtaccagcaatttattaagattgccaggaatccaaacacaaa

SEQ ID NO: 147835 - DNA, 73 bp, Homo sapiens
tcccggttcccgttctcatcttgtaccagcaatttattaagattgccaggaatccaaacacaaatctttctga

SEQ ID NO: 147836 - DNA, 79 bp, Homo sapiens
ttctcatcttgtaccagcaatttattaagattgccaggaatccaaacacaaatctttctgatgggtgatagaggcagta

SEQ ID NO: 147837 - DNA, 75 bp, Homo sapiens
attgccaggaatccaaacacaaatctttctgatgggtgatagaggcagtaagtagtttcctaacagagaaaatca

SEQ ID NO: 147838 - DNA, 76 bp, Homo sapiens
caaacacaaatctttctgatgggtgatagaggcagtaagtagtttcctaacagagaaaatcaatcatagaagataa

SEQ ID NO: 147839 - DNA, 76 bp, Homo sapiens
caaatctttctgatgggtgatagaggcagtaagtagtttcctaacagagaaaatcaatcatagaagataatgtttg

SEQ ID NO: 147840 - DNA, 74 bp, Homo sapiens
atgggtgatagaggcagtaagtagtttcctaacagagaaaatcaatcatagaagataatgtttggttctctggg

SEQ ID NO: 147841 - DNA, 73 bp, Homo sapiens
ggcagtaagtagtttcctaacagagaaaatcaatcatagaagataatgtttggttctctggggtcagtattta

SEQ ID NO: 147842 - DNA, 70 bp, Homo sapiens
agtagtttcctaacagagaaaatcaatcatagaagataatgtttggttctctggggtcagtatttaaggg

SEQ ID NO: 147843 - DNA, 72 bp, Homo sapiens
agagaaaatcaatcatagaagataatgtttggttctctggggtcagtatttaagggggaagtgttgtaatga

SEQ ID NO: 147844 - DNA, 70 bp, Homo sapiens
aaatcaatcatagaagataatgtttggttctctggggtcagtatttaagggggaagtgttgtaatgaagg

SEQ ID NO: 147845 - DNA, 67 bp, Homo sapiens
aagataatgtttggttctctggggtcagtatttaagggggaagtgttgtaatgaaggggaagtggtg

SEQ ID NO: 147846 - DNA, 68 bp, Homo sapiens
tgtttggttctctggggtcagtatttaagggggaagtgttgtaatgaaggggaagtggtggcccataa

SEQ ID NO: 147847 - DNA, 71 bp, Homo sapiens
ggtcagtatttaagggggaagtgttgtaatgaaggggaagtggtggcccataactccagcaggctaatgga

SEQ ID NO: 147848 - DNA, 71 bp, Homo sapiens
tatttaagggggaagtgttgtaatgaaggggaagtggtggcccataactccagcaggctaatggagtaaga

SEQ ID NO: 147849 - DNA, 76 bp, Homo sapiens
aagtgttgtaatgaaggggaagtggtggcccataactccagcaggctaatggagtaagaagatagcagacatacac

SEQ ID NO: 147850 - DNA, 76 bp, Homo sapiens
taatgaaggggaagtggtggcccataactccagcaggctaatggagtaagaagatagcagacatacactgttagtt

SEQ ID NO: 147851 - DNA, 76 bp, Homo sapiens
aagtggtggcccataactccagcaggctaatggagtaagaagatagcagacatacactgttagttttcagggaatg

SEQ ID NO: 147852 - DNA, 78 bp, Homo sapiens
ataactccagcaggctaatggagtaagaagatagcagacatacactgttagttttcagggaatggtcatgcactaggg

SEQ ID NO: 147853 - DNA, 76 bp, Homo sapiens
aggctaatggagtaagaagatagcagacatacactgttagttttcagggaatggtcatgcactagggtctagaaag

SEQ ID NO: 147854 - DNA, 76 bp, Homo sapiens
aagatagcagacatacactgttagttttcagggaatggtcatgcactagggtctagaaagggcaacatgcccttgg

SEQ ID NO: 147855 - DNA, 77 bp, Homo sapiens
ttttcagggaatggtcatgcactagggtctagaaagggcaacatgcccttggtgggtgcatggagacacctcagatt

SEQ ID NO: 147856 - DNA, 77 bp, Homo sapiens
aatggtcatgcactagggtctagaaagggcaacatgcccttggtgggtgcatggagacacctcagattttctactta

SEQ ID NO: 147857 - DNA, 77 bp, Homo sapiens
atgcactagggtctagaaagggcaacatgcccttggtgggtgcatggagacacctcagattttctacttacaggcaa

SEQ ID NO: 147858 - DNA, 78 bp, Homo sapiens
tctagaaagggcaacatgcccttggtgggtgcatggagacacctcagattttctacttacaggcaagcctggcctcca

SEQ ID NO: 147859 - DNA, 77 bp, Homo sapiens
aacatgcccttggtgggtgcatggagacacctcagattttctacttacaggcaagcctggcctccacagtatcttgg

SEQ ID NO: 147860 - DNA, 76 bp, Homo sapiens
ttggtgggtgcatggagacacctcagattttctacttacaggcaagcctggcctccacagtatcttgggggattaa

SEQ ID NO: 147861 - DNA, 75 bp, Homo sapiens
atggagacacctcagattttctacttacaggcaagcctggcctccacagtatcttgggggattaatgtggtacca

SEQ ID NO: 147862 - DNA, 76 bp, Homo sapiens
tcagattttctacttacaggcaagcctggcctccacagtatcttgggggattaatgtggtaccagcaagcattacc

SEQ ID NO: 147863 - DNA, 75 bp, Homo sapiens
ttttctacttacaggcaagcctggcctccacagtatcttgggggattaatgtggtaccagcaagcattacctcag

SEQ ID NO: 147864 - DNA, 81 bp, Homo sapiens
acaggcaagcctggcctccacagtatcttgggggattaatgtggtaccagcaagcattacctcagtgcagcatttccatga

SEQ ID NO: 147865 - DNA, 83 bp, Homo sapiens
ctccacagtatcttgggggattaatgtggtaccagcaagcattacctcagtgcagcatttccatgatgctagtacaatgagtg

SEQ ID NO: 147866 - DNA, 85 bp, Homo sapiens
attaatgtggtaccagcaagcattacctcagtgcagcatttccatgatgctagtacaatgagtggtagcactatttatatgttca

SEQ ID NO: 147867 - DNA, 84 bp, Homo sapiens
tggtaccagcaagcattacctcagtgcagcatttccatgatgctagtacaatgagtggtagcactatttatatgttcatttgtt

SEQ ID NO: 147868 - DNA, 81 bp, Homo sapiens
attacctcagtgcagcatttccatgatgctagtacaatgagtggtagcactatttatatgttcatttgtttattcaacaaa

SEQ ID NO: 147869 - DNA, 82 bp, Homo sapiens
tcagtgcagcatttccatgatgctagtacaatgagtggtagcactatttatatgttcatttgtttattcaacaaatacttgt

SEQ ID NO: 147870 - DNA, 78 bp, Homo sapiens
atgctagtacaatgagtggtagcactatttatatgttcatttgtttattcaacaaatacttgttaagcctccacagca

SEQ ID NO: 147871 - DNA, 76 bp, Homo sapiens
gtggtagcactatttatatgttcatttgtttattcaacaaatacttgttaagcctccacagcactaggatgttgta

SEQ ID NO: 147872 - DNA, 76 bp, Homo sapiens
agcactatttatatgttcatttgtttattcaacaaatacttgttaagcctccacagcactaggatgttgtagtgaa

SEQ ID NO: 147873 - DNA, 76 bp, Homo sapiens
atatgttcatttgtttattcaacaaatacttgttaagcctccacagcactaggatgttgtagtgaataagacagag

SEQ ID NO: 147874 - DNA, 82 bp, Homo sapiens
tattcaacaaatacttgttaagcctccacagcactaggatgttgtagtgaataagacagagtgcttgctttcatggagatca

SEQ ID NO: 147875 - DNA, 80 bp, Homo sapiens
aaatacttgttaagcctccacagcactaggatgttgtagtgaataagacagagtgcttgctttcatggagatcagagtag

SEQ ID NO: 147876 - DNA, 81 bp, Homo sapiens
ttaagcctccacagcactaggatgttgtagtgaataagacagagtgcttgctttcatggagatcagagtagggaagagaaa

SEQ ID NO: 147877 - DNA, 81 bp, Homo sapiens
acagcactaggatgttgtagtgaataagacagagtgcttgctttcatggagatcagagtagggaagagaaatacatagtgt

SEQ ID NO: 147878 - DNA, 80 bp, Homo sapiens
atgttgtagtgaataagacagagtgcttgctttcatggagatcagagtagggaagagaaatacatagtgttgggtgttga

SEQ ID NO: 147879 - DNA, 82 bp, Homo sapiens
ataagacagagtgcttgctttcatggagatcagagtagggaagagaaatacatagtgttgggtgttgatggtgctgtgaata

SEQ ID NO: 147880 - DNA, 83 bp, Homo sapiens
agagtgcttgctttcatggagatcagagtagggaagagaaatacatagtgttgggtgttgatggtgctgtgaataatgcaaca

SEQ ID NO: 147881 - DNA, 81 bp, Homo sapiens
tttcatggagatcagagtagggaagagaaatacatagtgttgggtgttgatggtgctgtgaataatgcaacaggccagtaa

SEQ ID NO: 147882 - DNA, 79 bp, Homo sapiens
agatcagagtagggaagagaaatacatagtgttgggtgttgatggtgctgtgaataatgcaacaggccagtaaacagaa

SEQ ID NO: 147883 - DNA, 78 bp, Homo sapiens
aaatacatagtgttgggtgttgatggtgctgtgaataatgcaacaggccagtaaacagaaggctaggcagagggaaga

SEQ ID NO: 147884 - DNA, 77 bp, Homo sapiens
ttgggtgttgatggtgctgtgaataatgcaacaggccagtaaacagaaggctaggcagagggaagaactggtggaaa

SEQ ID NO: 147885 - DNA, 71 bp, Homo sapiens
aacaggccagtaaacagaaggctaggcagagggaagaactggtggaaaatcctcgaggtggtatcaagttg

SEQ ID NO: 147886 - DNA, 72 bp, Homo sapiens
gtaaacagaaggctaggcagagggaagaactggtggaaaatcctcgaggtggtatcaagttggtgtattaga

SEQ ID NO: 147887 - DNA, 71 bp, Homo sapiens
aagaactggtggaaaatcctcgaggtggtatcaagttggtgtattagaggaacaattagaactagacagtg

SEQ ID NO: 147888 - DNA, 76 bp, Homo sapiens
tggtggaaaatcctcgaggtggtatcaagttggtgtattagaggaacaattagaactagacagtgtctccagagca

SEQ ID NO: 147889 - DNA, 79 bp, Homo sapiens
tggtgtattagaggaacaattagaactagacagtgtctccagagcaggatgagcaaggagaaaaagacagtagctgtgg

SEQ ID NO: 147890 - DNA, 77 bp, Homo sapiens
aggaacaattagaactagacagtgtctccagagcaggatgagcaaggagaaaaagacagtagctgtggggcctggag

SEQ ID NO: 147891 - DNA, 80 bp, Homo sapiens
tagaactagacagtgtctccagagcaggatgagcaaggagaaaaagacagtagctgtggggcctggagggccagggctga

SEQ ID NO: 147892 - DNA, 77 bp, Homo sapiens
agtgtctccagagcaggatgagcaaggagaaaaagacagtagctgtggggcctggagggccagggctgacgtaggtc

SEQ ID NO: 147893 - DNA, 74 bp, Homo sapiens
aggagaaaaagacagtagctgtggggcctggagggccagggctgacgtaggtcccagtgatttgtctctgttca

SEQ ID NO: 147894 - DNA, 76 bp, Homo sapiens
aaaagacagtagctgtggggcctggagggccagggctgacgtaggtcccagtgatttgtctctgttcatgtgacaa

SEQ ID NO: 147895 - DNA, 78 bp, Homo sapiens
tagctgtggggcctggagggccagggctgacgtaggtcccagtgatttgtctctgttcatgtgacaagtcattgttaa

SEQ ID NO: 147896 - DNA, 76 bp, Homo sapiens
gagggccagggctgacgtaggtcccagtgatttgtctctgttcatgtgacaagtcattgttaaggtaggaagtgaa

SEQ ID NO: 147897 - DNA, 77 bp, Homo sapiens
ccagggctgacgtaggtcccagtgatttgtctctgttcatgtgacaagtcattgttaaggtaggaagtgaaatcatg

SEQ ID NO: 147898 - DNA, 81 bp, Homo sapiens
agtgatttgtctctgttcatgtgacaagtcattgttaaggtaggaagtgaaatcatggccttgtgagtctttctgagcagc

SEQ ID NO: 147899 - DNA, 75 bp, Homo sapiens
attgttaaggtaggaagtgaaatcatggccttgtgagtctttctgagcagcctcttctccttaataatggcccca

SEQ ID NO: 147900 - DNA, 75 bp, Homo sapiens
agtctttctgagcagcctcttctccttaataatggccccagttctcttaagtccctctagtaagctaggcatgta

SEQ ID NO: 147901 - DNA, 73 bp, Homo sapiens
agcagcctcttctccttaataatggccccagttctcttaagtccctctagtaagctaggcatgtagggaagta

SEQ ID NO: 147902 - DNA, 73 bp, Homo sapiens
taataatggccccagttctcttaagtccctctagtaagctaggcatgtagggaagtatataaatcctttcaga

SEQ ID NO: 147903 - DNA, 71 bp, Homo sapiens
agttctcttaagtccctctagtaagctaggcatgtagggaagtatataaatcctttcagactaccagggaa

SEQ ID NO: 147904 - DNA, 71 bp, Homo sapiens
ttaagtccctctagtaagctaggcatgtagggaagtatataaatcctttcagactaccagggaaccactta

SEQ ID NO: 147905 - DNA, 70 bp, Homo sapiens
tagtaagctaggcatgtagggaagtatataaatcctttcagactaccagggaaccacttagggtttgaaa

SEQ ID NO: 147906 - DNA, 69 bp, Homo sapiens
taggcatgtagggaagtatataaatcctttcagactaccagggaaccacttagggtttgaaagaattta

SEQ ID NO: 147907 - DNA, 66 bp, Homo sapiens
gggaagtatataaatcctttcagactaccagggaaccacttagggtttgaaagaatttatgtactt

SEQ ID NO: 147908 - DNA, 69 bp, Homo sapiens
taaatcctttcagactaccagggaaccacttagggtttgaaagaatttatgtactttccaactgcctga

SEQ ID NO: 147909 - DNA, 69 bp, Homo sapiens
agactaccagggaaccacttagggtttgaaagaatttatgtactttccaactgcctgatttaatagctg

SEQ ID NO: 147910 - DNA, 73 bp, Homo sapiens
tttgaaagaatttatgtactttccaactgcctgatttaatagctgggacagccttaggcatttggtgactaaa

SEQ ID NO: 147911 - DNA, 75 bp, Homo sapiens
atttatgtactttccaactgcctgatttaatagctgggacagccttaggcatttggtgactaaaagtcatagata

SEQ ID NO: 147912 - DNA, 77 bp, Homo sapiens
tttccaactgcctgatttaatagctgggacagccttaggcatttggtgactaaaagtcatagataccattgagattc

SEQ ID NO: 147913 - DNA, 75 bp, Homo sapiens
ctgatttaatagctgggacagccttaggcatttggtgactaaaagtcatagataccattgagattccaaataaat

SEQ ID NO: 147914 - DNA, 76 bp, Homo sapiens
ttaatagctgggacagccttaggcatttggtgactaaaagtcatagataccattgagattccaaataaattattga

SEQ ID NO: 147915 - DNA, 74 bp, Homo sapiens
ggacagccttaggcatttggtgactaaaagtcatagataccattgagattccaaataaattattgaaaaacata

SEQ ID NO: 147916 - DNA, 73 bp, Homo sapiens
ggcatttggtgactaaaagtcatagataccattgagattccaaataaattattgaaaaacataagggtgatgt

SEQ ID NO: 147917 - DNA, 73 bp, Homo sapiens
gactaaaagtcatagataccattgagattccaaataaattattgaaaaacataagggtgatgttttcagatac

SEQ ID NO: 147918 - DNA, 75 bp, Homo sapiens
tcatagataccattgagattccaaataaattattgaaaaacataagggtgatgttttcagataccttctcaatta

SEQ ID NO: 147919 - DNA, 72 bp, Homo sapiens
gagattccaaataaattattgaaaaacataagggtgatgttttcagataccttctcaattaattattacatg

SEQ ID NO: 147920 - DNA, 72 bp, Homo sapiens
tgaaaaacataagggtgatgttttcagataccttctcaattaattattacatgtttttgtgttgtaacatta

SEQ ID NO: 147921 - DNA, 74 bp, Homo sapiens
gggtgatgttttcagataccttctcaattaattattacatgtttttgtgttgtaacattataatggttctgtgc

SEQ ID NO: 147922 - DNA, 72 bp, Homo sapiens
tttcagataccttctcaattaattattacatgtttttgtgttgtaacattataatggttctgtgccttaaag

SEQ ID NO: 147923 - DNA, 71 bp, Homo sapiens
ccttctcaattaattattacatgtttttgtgttgtaacattataatggttctgtgccttaaagtattacca

SEQ ID NO: 147924 - DNA, 69 bp, Homo sapiens
attattacatgtttttgtgttgtaacattataatggttctgtgccttaaagtattaccaagtaaataaa

SEQ ID NO: 147925 - DNA, 71 bp, Homo sapiens
catgtttttgtgttgtaacattataatggttctgtgccttaaagtattaccaagtaaataaaacagcagga

SEQ ID NO: 147926 - DNA, 74 bp, Homo sapiens
tgtaacattataatggttctgtgccttaaagtattaccaagtaaataaaacagcaggaagctctctttggtgca

SEQ ID NO: 147927 - DNA, 74 bp, Homo sapiens
tataatggttctgtgccttaaagtattaccaagtaaataaaacagcaggaagctctctttggtgcagtattgaa

SEQ ID NO: 147928 - DNA, 70 bp, Homo sapiens
gtattaccaagtaaataaaacagcaggaagctctctttggtgcagtattgaaattcttttaaaactggac

SEQ ID NO: 147929 - DNA, 69 bp, Homo sapiens
ccaagtaaataaaacagcaggaagctctctttggtgcagtattgaaattcttttaaaactggactttta

SEQ ID NO: 147930 - DNA, 65 bp, Homo sapiens
tttggtgcagtattgaaattcttttaaaactggacttttaattaaaagttgtaatgcttttaatt

SEQ ID NO: 147931 - DNA, 71 bp, Homo sapiens
tggacttttaattaaaagttgtaatgcttttaatttattaagtgccttctgtgcagtattcattcagtacg

SEQ ID NO: 147932 - DNA, 72 bp, Homo sapiens
aaagttgtaatgcttttaatttattaagtgccttctgtgcagtattcattcagtacggtacataaagtactc

SEQ ID NO: 147933 - DNA, 74 bp, Homo sapiens
tattaagtgccttctgtgcagtattcattcagtacggtacataaagtactcttacaatactttgaaaataagtg

SEQ ID NO: 147934 - DNA, 74 bp, Homo sapiens
tgccttctgtgcagtattcattcagtacggtacataaagtactcttacaatactttgaaaataagtggttctag

SEQ ID NO: 147935 - DNA, 70 bp, Homo sapiens
gcagtattcattcagtacggtacataaagtactcttacaatactttgaaaataagtggttctagtttacc

SEQ ID NO: 147936 - DNA, 70 bp, Homo sapiens
cagtacggtacataaagtactcttacaatactttgaaaataagtggttctagtttacctcttagtgagca

SEQ ID NO: 147937 - DNA, 71 bp, Homo sapiens
ggtacataaagtactcttacaatactttgaaaataagtggttctagtttacctcttagtgagcattgagga

SEQ ID NO: 147938 - DNA, 71 bp, Homo sapiens
gtactcttacaatactttgaaaataagtggttctagtttacctcttagtgagcattgaggattagggttca

SEQ ID NO: 147939 - DNA, 71 bp, Homo sapiens
actttgaaaataagtggttctagtttacctcttagtgagcattgaggattagggttcagatgacttactta

SEQ ID NO: 147940 - DNA, 74 bp, Homo sapiens
aaataagtggttctagtttacctcttagtgagcattgaggattagggttcagatgacttacttaggctgacatg

SEQ ID NO: 147941 - DNA, 76 bp, Homo sapiens
ttctagtttacctcttagtgagcattgaggattagggttcagatgacttacttaggctgacatggctggtaaggat

SEQ ID NO: 147942 - DNA, 78 bp, Homo sapiens
ttagtgagcattgaggattagggttcagatgacttacttaggctgacatggctggtaaggattggagttaggattcaa

SEQ ID NO: 147943 - DNA, 75 bp, Homo sapiens
attgaggattagggttcagatgacttacttaggctgacatggctggtaaggattggagttaggattcaatctggg

SEQ ID NO: 147944 - DNA, 77 bp, Homo sapiens
gctgacatggctggtaaggattggagttaggattcaatctgggtctttggctatagccattattctttccagtatat

SEQ ID NO: 147945 - DNA, 73 bp, Homo sapiens
atggctggtaaggattggagttaggattcaatctgggtctttggctatagccattattctttccagtatattt

SEQ ID NO: 147946 - DNA, 71 bp, Homo sapiens
aaggattggagttaggattcaatctgggtctttggctatagccattattctttccagtatattttaggaaa

SEQ ID NO: 147947 - DNA, 74 bp, Homo sapiens
ttaggattcaatctgggtctttggctatagccattattctttccagtatattttaggaaagatctcctgttgtg

SEQ ID NO: 147948 - DNA, 74 bp, Homo sapiens
atctgggtctttggctatagccattattctttccagtatattttaggaaagatctcctgttgtgtcctgaacaa

SEQ ID NO: 147949 - DNA, 77 bp, Homo sapiens
tttggctatagccattattctttccagtatattttaggaaagatctcctgttgtgtcctgaacaaagcagatggcca

SEQ ID NO: 147950 - DNA, 74 bp, Homo sapiens
agtatattttaggaaagatctcctgttgtgtcctgaacaaagcagatggccagtcagtaaacaagggcacgagt

SEQ ID NO: 147951 - DNA, 75 bp, Homo sapiens
ttaggaaagatctcctgttgtgtcctgaacaaagcagatggccagtcagtaaacaagggcacgagttcactttta

SEQ ID NO: 147952 - DNA, 73 bp, Homo sapiens
atctcctgttgtgtcctgaacaaagcagatggccagtcagtaaacaagggcacgagttcacttttaacaaaaa

SEQ ID NO: 147953 - DNA, 72 bp, Homo sapiens
ttgtgtcctgaacaaagcagatggccagtcagtaaacaagggcacgagttcacttttaacaaaaattaagaa

SEQ ID NO: 147954 - DNA, 72 bp, Homo sapiens
agcagatggccagtcagtaaacaagggcacgagttcacttttaacaaaaattaagaaagccggcatcactta

SEQ ID NO: 147955 - DNA, 70 bp, Homo sapiens
cagtcagtaaacaagggcacgagttcacttttaacaaaaattaagaaagccggcatcacttacattactc

SEQ ID NO: 147956 - DNA, 69 bp, Homo sapiens
agtaaacaagggcacgagttcacttttaacaaaaattaagaaagccggcatcacttacattactcgtca

SEQ ID NO: 147957 - DNA, 73 bp, Homo sapiens
acgagttcacttttaacaaaaattaagaaagccggcatcacttacattactcgtcactgtgcgaggtcgctgc

SEQ ID NO: 147958 - DNA, 74 bp, Homo sapiens
acttttaacaaaaattaagaaagccggcatcacttacattactcgtcactgtgcgaggtcgctgctgtctctcc

SEQ ID NO: 147959 - DNA, 78 bp, Homo sapiens
aaaattaagaaagccggcatcacttacattactcgtcactgtgcgaggtcgctgctgtctctcctgaggctgtggtaa

SEQ ID NO: 147960 - DNA, 83 bp, Homo sapiens
aaagccggcatcacttacattactcgtcactgtgcgaggtcgctgctgtctctcctgaggctgtggtaacccacagagctgca

SEQ ID NO: 147961 - DNA, 80 bp, Homo sapiens
acttacattactcgtcactgtgcgaggtcgctgctgtctctcctgaggctgtggtaacccacagagctgcaatggggaag

SEQ ID NO: 147962 - DNA, 80 bp, Homo sapiens
cgaggtcgctgctgtctctcctgaggctgtggtaacccacagagctgcaatggggaagggcaacgggagacctgcacata

SEQ ID NO: 147963 - DNA, 77 bp, Homo sapiens
ctgtctctcctgaggctgtggtaacccacagagctgcaatggggaagggcaacgggagacctgcacataggttggaa

SEQ ID NO: 147964 - DNA, 76 bp, Homo sapiens
tgaggctgtggtaacccacagagctgcaatggggaagggcaacgggagacctgcacataggttggaagtggaagta

SEQ ID NO: 147965 - DNA, 75 bp, Homo sapiens
aatggggaagggcaacgggagacctgcacataggttggaagtggaagtacttgctacagtgccatctccagctgt

SEQ ID NO: 147966 - DNA, 80 bp, Homo sapiens
aacgggagacctgcacataggttggaagtggaagtacttgctacagtgccatctccagctgttgcaaggatcaaatggca

SEQ ID NO: 147967 - DNA, 80 bp, Homo sapiens
agacctgcacataggttggaagtggaagtacttgctacagtgccatctccagctgttgcaaggatcaaatggcatttttg

SEQ ID NO: 147968 - DNA, 79 bp, Homo sapiens
ataggttggaagtggaagtacttgctacagtgccatctccagctgttgcaaggatcaaatggcatttttgtggagatag

SEQ ID NO: 147969 - DNA, 80 bp, Homo sapiens
gaagtacttgctacagtgccatctccagctgttgcaaggatcaaatggcatttttgtggagataggttagccaggactta

SEQ ID NO: 147970 - DNA, 76 bp, Homo sapiens
atctccagctgttgcaaggatcaaatggcatttttgtggagataggttagccaggacttagaaaagaatgaggcgt

SEQ ID NO: 147971 - DNA, 76 bp, Homo sapiens
tgttgcaaggatcaaatggcatttttgtggagataggttagccaggacttagaaaagaatgaggcgttagaataca

SEQ ID NO: 147972 - DNA, 77 bp, Homo sapiens
tcaaatggcatttttgtggagataggttagccaggacttagaaaagaatgaggcgttagaatacatcatgtgttata

SEQ ID NO: 147973 - DNA, 74 bp, Homo sapiens
atttttgtggagataggttagccaggacttagaaaagaatgaggcgttagaatacatcatgtgttatacaggtg

SEQ ID NO: 147974 - DNA, 77 bp, Homo sapiens
tggagataggttagccaggacttagaaaagaatgaggcgttagaatacatcatgtgttatacaggtggagtaatata

SEQ ID NO: 147975 - DNA, 79 bp, Homo sapiens
gttagccaggacttagaaaagaatgaggcgttagaatacatcatgtgttatacaggtggagtaatatagcatgctgtgg

SEQ ID NO: 147976 - DNA, 82 bp, Homo sapiens
gaaaagaatgaggcgttagaatacatcatgtgttatacaggtggagtaatatagcatgctgtggggtcgcagattgctggta

SEQ ID NO: 147977 - DNA, 83 bp, Homo sapiens
atgaggcgttagaatacatcatgtgttatacaggtggagtaatatagcatgctgtggggtcgcagattgctggtagagttgta

SEQ ID NO: 147978 - DNA, 83 bp, Homo sapiens
ttagaatacatcatgtgttatacaggtggagtaatatagcatgctgtggggtcgcagattgctggtagagttgtatgtcaatt

SEQ ID NO: 147979 - DNA, 77 bp, Homo sapiens
atgtgttatacaggtggagtaatatagcatgctgtggggtcgcagattgctggtagagttgtatgtcaatttttttt

SEQ ID NO: 147980 - DNA, 79 bp, Homo sapiens
ggtgtgagctgctgcgcccggccgcatgtcgagtattaagccagtttgccgggcaggtctgacacatgtgggaaccacc

SEQ ID NO: 147981 - DNA, 77 bp, Homo sapiens
tgctgcgcccggccgcatgtcgagtattaagccagtttgccgggcaggtctgacacatgtgggaaccacctttgact

SEQ ID NO: 147982 - DNA, 73 bp, Homo sapiens
cccggccgcatgtcgagtattaagccagtttgccgggcaggtctgacacatgtgggaaccacctttgacttcc

SEQ ID NO: 147983 - DNA, 72 bp, Homo sapiens
atgtcgagtattaagccagtttgccgggcaggtctgacacatgtgggaaccacctttgacttcctggggtac

SEQ ID NO: 147984 - DNA, 72 bp, Homo sapiens
ttaagccagtttgccgggcaggtctgacacatgtgggaaccacctttgacttcctggggtaccttgactcaa

SEQ ID NO: 147985 - DNA, 73 bp, Homo sapiens
ttgccgggcaggtctgacacatgtgggaaccacctttgacttcctggggtaccttgactcaatcattttggac

SEQ ID NO: 147986 - DNA, 71 bp, Homo sapiens
tctgacacatgtgggaaccacctttgacttcctggggtaccttgactcaatcattttggacctcagttttt

SEQ ID NO: 147987 - DNA, 68 bp, Homo sapiens
atgtgggaaccacctttgacttcctggggtaccttgactcaatcattttggacctcagtttttttcaa

SEQ ID NO: 147988 - DNA, 70 bp, Homo sapiens
acctttgacttcctggggtaccttgactcaatcattttggacctcagtttttttcaatctgtagatgttg

SEQ ID NO: 147989 - DNA, 70 bp, Homo sapiens
tggggtaccttgactcaatcattttggacctcagtttttttcaatctgtagatgttggggttgtagttaa

SEQ ID NO: 147990 - DNA, 72 bp, Homo sapiens
cttgactcaatcattttggacctcagtttttttcaatctgtagatgttggggttgtagttaatggtctccaa

SEQ ID NO: 147991 - DNA, 71 bp, Homo sapiens
aatcattttggacctcagtttttttcaatctgtagatgttggggttgtagttaatggtctccaatgccatt

SEQ ID NO: 147992 - DNA, 70 bp, Homo sapiens
cagtttttttcaatctgtagatgttggggttgtagttaatggtctccaatgccattttggccttttagaa

SEQ ID NO: 147993 - DNA, 70 bp, Homo sapiens
tttttcaatctgtagatgttggggttgtagttaatggtctccaatgccattttggccttttagaaaagtg

SEQ ID NO: 147994 - DNA, 70 bp, Homo sapiens
gtgtatttgcaatttgacacatcttttttctgacatacctgttttcaacaagtatttttagaaaaatttg

SEQ ID NO: 147995 - DNA, 70 bp, Homo sapiens
gacacatcttttttctgacatacctgttttcaacaagtatttttagaaaaatttgtgaatgtgtttagaa

SEQ ID NO: 147996 - DNA, 70 bp, Homo sapiens
cacatcttttttctgacatacctgttttcaacaagtatttttagaaaaatttgtgaatgtgtttagaaga

SEQ ID NO: 147997 - DNA, 72 bp, Homo sapiens
ttttctgacatacctgttttcaacaagtatttttagaaaaatttgtgaatgtgtttagaagaattcatgtca

SEQ ID NO: 147998 - DNA, 74 bp, Homo sapiens
tctgacatacctgttttcaacaagtatttttagaaaaatttgtgaatgtgtttagaagaattcatgtcaagata

SEQ ID NO: 147999 - DNA, 74 bp, Homo sapiens
tgacatacctgttttcaacaagtatttttagaaaaatttgtgaatgtgtttagaagaattcatgtcaagataca

SEQ ID NO: 148000 - DNA, 74 bp, Homo sapiens
cctgttttcaacaagtatttttagaaaaatttgtgaatgtgtttagaagaattcatgtcaagatacatatatca

SEQ ID NO: 148001 - DNA, 74 bp, Homo sapiens
caacaagtatttttagaaaaatttgtgaatgtgtttagaagaattcatgtcaagatacatatatcaattgtaag

SEQ ID NO: 148002 - DNA, 73 bp, Homo sapiens
ttttagaaaaatttgtgaatgtgtttagaagaattcatgtcaagatacatatatcaattgtaagttttagaaa

SEQ ID NO: 148003 - DNA, 77 bp, Homo sapiens
gtgaatgtgtttagaagaattcatgtcaagatacatatatcaattgtaagttttagaaatctttccttcaactgaga

SEQ ID NO: 148004 - DNA, 74 bp, Homo sapiens
gtgtttagaagaattcatgtcaagatacatatatcaattgtaagttttagaaatctttccttcaactgagaaaa

SEQ ID NO: 148005 - DNA, 73 bp, Homo sapiens
gaattcatgtcaagatacatatatcaattgtaagttttagaaatctttccttcaactgagaaaattgtaaaaa

SEQ ID NO: 148006 - DNA, 72 bp, Homo sapiens
gatacatatatcaattgtaagttttagaaatctttccttcaactgagaaaattgtaaaaattaagcttctca

SEQ ID NO: 148007 - DNA, 66 bp, Homo sapiens
gttttagaaatctttccttcaactgagaaaattgtaaaaattaagcttctcaatggaaaagaaagg

SEQ ID NO: 148008 - DNA, 67 bp, Homo sapiens
tttccttcaactgagaaaattgtaaaaattaagcttctcaatggaaaagaaaggtaattttaagctc

SEQ ID NO: 148009 - DNA, 65 bp, Homo sapiens
aaattgtaaaaattaagcttctcaatggaaaagaaaggtaattttaagctcctctccttcaaaaa

SEQ ID NO: 148010 - DNA, 69 bp, Homo sapiens
tctcaatggaaaagaaaggtaattttaagctcctctccttcaaaaaagttcttatttgctaatagtgtg

SEQ ID NO: 148011 - DNA, 67 bp, Homo sapiens
aaggtaattttaagctcctctccttcaaaaaagttcttatttgctaatagtgtgtatcagggaaggg

SEQ ID NO: 148012 - DNA, 70 bp, Homo sapiens
ttttaagctcctctccttcaaaaaagttcttatttgctaatagtgtgtatcagggaagggtcaaatccat

SEQ ID NO: 148013 - DNA, 70 bp, Homo sapiens
tccttcaaaaaagttcttatttgctaatagtgtgtatcagggaagggtcaaatccattaaaactctccca

SEQ ID NO: 148014 - DNA, 69 bp, Homo sapiens
aaaagttcttatttgctaatagtgtgtatcagggaagggtcaaatccattaaaactctcccaagtggaa

SEQ ID NO: 148015 - DNA, 73 bp, Homo sapiens
ttgctaatagtgtgtatcagggaagggtcaaatccattaaaactctcccaagtggaacaagtgacctgaatta

SEQ ID NO: 148016 - DNA, 70 bp, Homo sapiens
aatagtgtgtatcagggaagggtcaaatccattaaaactctcccaagtggaacaagtgacctgaattact

SEQ ID NO: 148017 - DNA, 68 bp, Homo sapiens
agggaagggtcaaatccattaaaactctcccaagtggaacaagtgacctgaattacttgtttgcttaa

SEQ ID NO: 148018 - DNA, 68 bp, Homo sapiens
attaaaactctcccaagtggaacaagtgacctgaattacttgtttgcttaagtcaaacaggaaagttc

SEQ ID NO: 148019 - DNA, 68 bp, Homo sapiens
aagtggaacaagtgacctgaattacttgtttgcttaagtcaaacaggaaagttcttcttcctttgaac

SEQ ID NO: 148020 - DNA, 70 bp, Homo sapiens
gtgacctgaattacttgtttgcttaagtcaaacaggaaagttcttcttcctttgaactgaaataattcca

SEQ ID NO: 148021 - DNA, 71 bp, Homo sapiens
ttgcttaagtcaaacaggaaagttcttcttcctttgaactgaaataattccaggaaatgcagtaaagaagc

SEQ ID NO: 148022 - DNA, 70 bp, Homo sapiens
aaacaggaaagttcttcttcctttgaactgaaataattccaggaaatgcagtaaagaagctgagggagaa

SEQ ID NO: 148023 - DNA, 77 bp, Homo sapiens
tttgaactgaaataattccaggaaatgcagtaaagaagctgagggagaaagaatgcatcgaggagagactgcttttc

SEQ ID NO: 148024 - DNA, 76 bp, Homo sapiens
aaataattccaggaaatgcagtaaagaagctgagggagaaagaatgcatcgaggagagactgcttttccagcccaa

SEQ ID NO: 148025 - DNA, 77 bp, Homo sapiens
aggaaatgcagtaaagaagctgagggagaaagaatgcatcgaggagagactgcttttccagcccaacctgtcaccta

SEQ ID NO: 148026 - DNA, 80 bp, Homo sapiens
agctgagggagaaagaatgcatcgaggagagactgcttttccagcccaacctgtcacctacagtcttcacagctccacaa

SEQ ID NO: 148027 - DNA, 81 bp, Homo sapiens
aaagaatgcatcgaggagagactgcttttccagcccaacctgtcacctacagtcttcacagctccacaagctctggcagta

SEQ ID NO: 148028 - DNA, 79 bp, Homo sapiens
atcgaggagagactgcttttccagcccaacctgtcacctacagtcttcacagctccacaagctctggcagtacctgtta

SEQ ID NO: 148029 - DNA, 77 bp, Homo sapiens
tgcttttccagcccaacctgtcacctacagtcttcacagctccacaagctctggcagtacctgttacgtacagttta

SEQ ID NO: 148030 - DNA, 78 bp, Homo sapiens
cccaacctgtcacctacagtcttcacagctccacaagctctggcagtacctgttacgtacagtttatgtgcttgataa

SEQ ID NO: 148031 - DNA, 80 bp, Homo sapiens
cctgtcacctacagtcttcacagctccacaagctctggcagtacctgttacgtacagtttatgtgcttgataatattcag

SEQ ID NO: 148032 - DNA, 78 bp, Homo sapiens
cttcacagctccacaagctctggcagtacctgttacgtacagtttatgtgcttgataatattcagggtgttaaattca

SEQ ID NO: 148033 - DNA, 76 bp, Homo sapiens
tccacaagctctggcagtacctgttacgtacagtttatgtgcttgataatattcagggtgttaaattcattcacgt

SEQ ID NO: 148034 - DNA, 74 bp, Homo sapiens
tggcagtacctgttacgtacagtttatgtgcttgataatattcagggtgttaaattcattcacgttctatacct

SEQ ID NO: 148035 - DNA, 73 bp, Homo sapiens
gtacctgttacgtacagtttatgtgcttgataatattcagggtgttaaattcattcacgttctataccttgat

SEQ ID NO: 148036 - DNA, 72 bp, Homo sapiens
gcttgataatattcagggtgttaaattcattcacgttctataccttgattgtcttctacaaactggcgtttt

SEQ ID NO: 148037 - DNA, 67 bp, Homo sapiens
ggtgttaaattcattcacgttctataccttgattgtcttctacaaactggcgttttttagtttttta

SEQ ID NO: 148038 - DNA, 66 bp, Homo sapiens
ctataccttgattgtcttctacaaactggcgttttttagttttttatgttggagagctttaacttt

SEQ ID NO: 148039 - DNA, 69 bp, Homo sapiens
tcttctacaaactggcgttttttagttttttatgttggagagctttaacttttcaacatagcccactga

SEQ ID NO: 148040 - DNA, 66 bp, Homo sapiens
ttttagttttttatgttggagagctttaacttttcaacatagcccactgaaataggagttgttttt

SEQ ID NO: 148041 - DNA, 70 bp, Homo sapiens
tttatgttggagagctttaacttttcaacatagcccactgaaataggagttgttttttttaagtacatga

SEQ ID NO: 148042 - DNA, 69 bp, Homo sapiens
tggagagctttaacttttcaacatagcccactgaaataggagttgttttttttaagtacatgaaataac

SEQ ID NO: 148043 - DNA, 67 bp, Homo sapiens
cttttcaacatagcccactgaaataggagttgttttttttaagtacatgaaataacttttaagattg

SEQ ID NO: 148044 - DNA, 69 bp, Homo sapiens
catagcccactgaaataggagttgttttttttaagtacatgaaataacttttaagattgtacttgccat

SEQ ID NO: 148045 - DNA, 70 bp, Homo sapiens
ataggagttgttttttttaagtacatgaaataacttttaagattgtacttgccatttatgatcaatccat

SEQ ID NO: 148046 - DNA, 71 bp, Homo sapiens
ttttttttaagtacatgaaataacttttaagattgtacttgccatttatgatcaatccattctacattaag

SEQ ID NO: 148047 - DNA, 74 bp, Homo sapiens
agtacatgaaataacttttaagattgtacttgccatttatgatcaatccattctacattaagttcaaaatgtta

SEQ ID NO: 148048 - DNA, 75 bp, Homo sapiens
taacttttaagattgtacttgccatttatgatcaatccattctacattaagttcaaaatgttaagtagcaatgaa

SEQ ID NO: 148049 - DNA, 77 bp, Homo sapiens
ttaagattgtacttgccatttatgatcaatccattctacattaagttcaaaatgttaagtagcaatgaatgttctat

SEQ ID NO: 148050 - DNA, 76 bp, Homo sapiens
tacttgccatttatgatcaatccattctacattaagttcaaaatgttaagtagcaatgaatgttctatttataatt

SEQ ID NO: 148051 - DNA, 74 bp, Homo sapiens
tatgatcaatccattctacattaagttcaaaatgttaagtagcaatgaatgttctatttataatttactttttc

SEQ ID NO: 148052 - DNA, 68 bp, Homo sapiens
gttcaaaatgttaagtagcaatgaatgttctatttataatttactttttcttccctttccaaatatct

SEQ ID NO: 148053 - DNA, 69 bp, Homo sapiens
atgttaagtagcaatgaatgttctatttataatttactttttcttccctttccaaatatctttccagga

SEQ ID NO: 148054 - DNA, 69 bp, Homo sapiens
gcaatgaatgttctatttataatttactttttcttccctttccaaatatctttccaggaaatgacccat

SEQ ID NO: 148055 - DNA, 69 bp, Homo sapiens
tatttataatttactttttcttccctttccaaatatctttccaggaaatgacccattcatggccgcctc

SEQ ID NO: 148056 - DNA, 74 bp, Homo sapiens
ttccctttccaaatatctttccaggaaatgacccattcatggccgcctcctttgacagcaatacatacgcctag

SEQ ID NO: 148057 - DNA, 79 bp, Homo sapiens
aaatatctttccaggaaatgacccattcatggccgcctcctttgacagcaatacatacgcctagtacagctgagccatc

SEQ ID NO: 148058 - DNA, 76 bp, Homo sapiens
ttcatggccgcctcctttgacagcaatacatacgcctagtacagctgagccatccaagtttcctttccctacaaag

SEQ ID NO: 148059 - DNA, 69 bp, Homo sapiens
aatacatacgcctagtacagctgagccatccaagtttcctttccctacaaaggtaattccttaaaagta

SEQ ID NO: 148060 - DNA, 74 bp, Homo sapiens
ctagtacagctgagccatccaagtttcctttccctacaaaggtaattccttaaaagtatggcaggcattgcatc

SEQ ID NO: 148061 - DNA, 72 bp, Homo sapiens
tgagccatccaagtttcctttccctacaaaggtaattccttaaaagtatggcaggcattgcatccaccttag

SEQ ID NO: 148062 - DNA, 68 bp, Homo sapiens
aagtttcctttccctacaaaggtaattccttaaaagtatggcaggcattgcatccaccttagtgaaaa

SEQ ID NO: 148063 - DNA, 71 bp, Homo sapiens
tttccctacaaaggtaattccttaaaagtatggcaggcattgcatccaccttagtgaaaagcgtaaggcat

SEQ ID NO: 148064 - DNA, 76 bp, Homo sapiens
aaaggtaattccttaaaagtatggcaggcattgcatccaccttagtgaaaagcgtaaggcattgctgtgaggcaga

SEQ ID NO: 148065 - DNA, 79 bp, Homo sapiens
cttaaaagtatggcaggcattgcatccaccttagtgaaaagcgtaaggcattgctgtgaggcagattgataaagtatta

SEQ ID NO: 148066 - DNA, 81 bp, Homo sapiens
tatggcaggcattgcatccaccttagtgaaaagcgtaaggcattgctgtgaggcagattgataaagtattacttgttcaaa

SEQ ID NO: 148067 - DNA, 75 bp, Homo sapiens
accttagtgaaaagcgtaaggcattgctgtgaggcagattgataaagtattacttgttcaaatctttggaaatga

SEQ ID NO: 148068 - DNA, 73 bp, Homo sapiens
aaagcgtaaggcattgctgtgaggcagattgataaagtattacttgttcaaatctttggaaatgaggttaaaa

SEQ ID NO: 148069 - DNA, 72 bp, Homo sapiens
gaggcagattgataaagtattacttgttcaaatctttggaaatgaggttaaaattatgattaatttagcttc

SEQ ID NO: 148070 - DNA, 72 bp, Homo sapiens
aagtattacttgttcaaatctttggaaatgaggttaaaattatgattaatttagcttctacagtgcttcaga

SEQ ID NO: 148071 - DNA, 74 bp, Homo sapiens
gttcaaatctttggaaatgaggttaaaattatgattaatttagcttctacagtgcttcagaatgctttcaaaca

SEQ ID NO: 148072 - DNA, 76 bp, Homo sapiens
ttggaaatgaggttaaaattatgattaatttagcttctacagtgcttcagaatgctttcaaacatttattctgcaa

SEQ ID NO: 148073 - DNA, 75 bp, Homo sapiens
ggttaaaattatgattaatttagcttctacagtgcttcagaatgctttcaaacatttattctgcaacttagaaca

SEQ ID NO: 148074 - DNA, 79 bp, Homo sapiens
tatgattaatttagcttctacagtgcttcagaatgctttcaaacatttattctgcaacttagaacatcctagattttca

SEQ ID NO: 148075 - DNA, 74 bp, Homo sapiens
ttcagaatgctttcaaacatttattctgcaacttagaacatcctagattttcataaagctttataatttataaa

SEQ ID NO: 148076 - DNA, 73 bp, Homo sapiens
caaacatttattctgcaacttagaacatcctagattttcataaagctttataatttataaaaagcattcagga

SEQ ID NO: 148077 - DNA, 72 bp, Homo sapiens
ctgcaacttagaacatcctagattttcataaagctttataatttataaaaagcattcaggattttccaatac

SEQ ID NO: 148078 - DNA, 72 bp, Homo sapiens
gaacatcctagattttcataaagctttataatttataaaaagcattcaggattttccaatacgttctctcat

SEQ ID NO: 148079 - DNA, 72 bp, Homo sapiens
gattttcataaagctttataatttataaaaagcattcaggattttccaatacgttctctcatttgaggatcc

SEQ ID NO: 148080 - DNA, 71 bp, Homo sapiens
cataaagctttataatttataaaaagcattcaggattttccaatacgttctctcatttgaggatccttact

SEQ ID NO: 148081 - DNA, 72 bp, Homo sapiens
atttataaaaagcattcaggattttccaatacgttctctcatttgaggatccttactttagagatgggagaa

SEQ ID NO: 148082 - DNA, 73 bp, Homo sapiens
taaaaagcattcaggattttccaatacgttctctcatttgaggatccttactttagagatgggagaacagagg

SEQ ID NO: 148083 - DNA, 72 bp, Homo sapiens
attttccaatacgttctctcatttgaggatccttactttagagatgggagaacagaggggcagggaaattga

SEQ ID NO: 148084 - DNA, 74 bp, Homo sapiens
aatacgttctctcatttgaggatccttactttagagatgggagaacagaggggcagggaaattgagtgtgtgat

SEQ ID NO: 148085 - DNA, 74 bp, Homo sapiens
atttgaggatccttactttagagatgggagaacagaggggcagggaaattgagtgtgtgatttctcgttcagaa

SEQ ID NO: 148086 - DNA, 81 bp, Homo sapiens
ttagagatgggagaacagaggggcagggaaattgagtgtgtgatttctcgttcagaattagatatatgcacatacatctta

SEQ ID NO: 148087 - DNA, 82 bp, Homo sapiens
aacagaggggcagggaaattgagtgtgtgatttctcgttcagaattagatatatgcacatacatcttacatatctcacactc

SEQ ID NO: 148088 - DNA, 81 bp, Homo sapiens
cagggaaattgagtgtgtgatttctcgttcagaattagatatatgcacatacatcttacatatctcacactccctacattt

SEQ ID NO: 148089 - DNA, 82 bp, Homo sapiens
aaattgagtgtgtgatttctcgttcagaattagatatatgcacatacatcttacatatctcacactccctacattttcttga

SEQ ID NO: 148090 - DNA, 83 bp, Homo sapiens
tgtgatttctcgttcagaattagatatatgcacatacatcttacatatctcacactccctacattttcttgagtttaatgtga

SEQ ID NO: 148091 - DNA, 83 bp, Homo sapiens
tcagaattagatatatgcacatacatcttacatatctcacactccctacattttcttgagtttaatgtgatcagttacactag

SEQ ID NO: 148092 - DNA, 78 bp, Homo sapiens
tacatcttacatatctcacactccctacattttcttgagtttaatgtgatcagttacactagtgctggtttaataaca

SEQ ID NO: 148093 - DNA, 77 bp, Homo sapiens
ttacatatctcacactccctacattttcttgagtttaatgtgatcagttacactagtgctggtttaataacaagcaa

SEQ ID NO: 148094 - DNA, 73 bp, Homo sapiens
cacactccctacattttcttgagtttaatgtgatcagttacactagtgctggtttaataacaagcaaataaac

SEQ ID NO: 148095 - DNA, 76 bp, Homo sapiens
ttcttgagtttaatgtgatcagttacactagtgctggtttaataacaagcaaataaactgctgacttgtgtgtttc

SEQ ID NO: 148096 - DNA, 76 bp, Homo sapiens
gagtttaatgtgatcagttacactagtgctggtttaataacaagcaaataaactgctgacttgtgtgtttctgtta

SEQ ID NO: 148097 - DNA, 78 bp, Homo sapiens
tgatcagttacactagtgctggtttaataacaagcaaataaactgctgacttgtgtgtttctgttacagtatttatga

SEQ ID NO: 148098 - DNA, 75 bp, Homo sapiens
actagtgctggtttaataacaagcaaataaactgctgacttgtgtgtttctgttacagtatttatgaacaatgcg

SEQ ID NO: 148099 - DNA, 75 bp, Homo sapiens
aataacaagcaaataaactgctgacttgtgtgtttctgttacagtatttatgaacaatgcgttaaaacactgcca

SEQ ID NO: 148100 - DNA, 74 bp, Homo sapiens
caaataaactgctgacttgtgtgtttctgttacagtatttatgaacaatgcgttaaaacactgccattctcctt

SEQ ID NO: 148101 - DNA, 72 bp, Homo sapiens
aactgctgacttgtgtgtttctgttacagtatttatgaacaatgcgttaaaacactgccattctcctttttt

SEQ ID NO: 148102 - DNA, 70 bp, Homo sapiens
ttgtgtgtttctgttacagtatttatgaacaatgcgttaaaacactgccattctccttttttttaattta

SEQ ID NO: 148103 - DNA, 69 bp, Homo sapiens
tgttacagtatttatgaacaatgcgttaaaacactgccattctccttttttttaatttatacttttgga

SEQ ID NO: 148104 - DNA, 67 bp, Homo sapiens
atgaacaatgcgttaaaacactgccattctccttttttttaatttatacttttggataaccttcaaa

SEQ ID NO: 148105 - DNA, 69 bp, Homo sapiens
ctgccattctccttttttttaatttatacttttggataaccttcaaaatgtagaaatagcaccttcaga

SEQ ID NO: 148106 - DNA, 68 bp, Homo sapiens
ctccttttttttaatttatacttttggataaccttcaaaatgtagaaatagcaccttcagatctgtgt

SEQ ID NO: 148107 - DNA, 77 bp, Homo sapiens
atttatacttttggataaccttcaaaatgtagaaatagcaccttcagatctgtgttttgttcaatctgatatgcatg

SEQ ID NO: 148108 - DNA, 78 bp, Homo sapiens
acttttggataaccttcaaaatgtagaaatagcaccttcagatctgtgttttgttcaatctgatatgcatgttcattg

SEQ ID NO: 148109 - DNA, 79 bp, Homo sapiens
aaccttcaaaatgtagaaatagcaccttcagatctgtgttttgttcaatctgatatgcatgttcattgttttatataca

SEQ ID NO: 148110 - DNA, 84 bp, Homo sapiens
gtagaaatagcaccttcagatctgtgttttgttcaatctgatatgcatgttcattgttttatatacataatacatatattgaga

SEQ ID NO: 148111 - DNA, 86 bp, Homo sapiens
agcaccttcagatctgtgttttgttcaatctgatatgcatgttcattgttttatatacataatacatatattgagagagtgagaga

SEQ ID NO: 148112 - DNA, 85 bp, Homo sapiens
gatctgtgttttgttcaatctgatatgcatgttcattgttttatatacataatacatatattgagagagtgagagagctattcct

SEQ ID NO: 148113 - DNA, 86 bp, Homo sapiens
gttcaatctgatatgcatgttcattgttttatatacataatacatatattgagagagtgagagagctattcctttccatgatactg

SEQ ID NO: 148114 - DNA, 86 bp, Homo sapiens
ctgatatgcatgttcattgttttatatacataatacatatattgagagagtgagagagctattcctttccatgatactgttgtgaa

SEQ ID NO: 148115 - DNA, 79 bp, Homo sapiens
cattgttttatatacataatacatatattgagagagtgagagagctattcctttccatgatactgttgtgaaaagtagt

SEQ ID NO: 148116 - DNA, 81 bp, Homo sapiens
ttatatacataatacatatattgagagagtgagagagctattcctttccatgatactgttgtgaaaagtagttctaggcca

SEQ ID NO: 148117 - DNA, 79 bp, Homo sapiens
taatacatatattgagagagtgagagagctattcctttccatgatactgttgtgaaaagtagttctaggccaggtatgg

SEQ ID NO: 148118 - DNA, 64 bp, Homo sapiens
aaaaaaaaaaggttctatctacaaaaactcaaatttgctactttatatatttacttattttcta

SEQ ID NO: 148119 - DNA, 65 bp, Homo sapiens
aaaaaggttctatctacaaaaactcaaatttgctactttatatatttacttattttctaataatt

SEQ ID NO: 148120 - DNA, 66 bp, Homo sapiens
ggttctatctacaaaaactcaaatttgctactttatatatttacttattttctaataatttttaaa

SEQ ID NO: 148121 - DNA, 69 bp, Homo sapiens
acaaaaaaaacagtgactcattattgcttgttttaaattaaagcactaagctctgtaaaaatatctttg

SEQ ID NO: 148122 - DNA, 74 bp, Homo sapiens
cagtgactcattattgcttgttttaaattaaagcactaagctctgtaaaaatatctttgtgcaacaacaaagga

SEQ ID NO: 148123 - DNA, 71 bp, Homo sapiens
actcattattgcttgttttaaattaaagcactaagctctgtaaaaatatctttgtgcaacaacaaaggaaa

SEQ ID NO: 148124 - DNA, 68 bp, Homo sapiens
gcttgttttaaattaaagcactaagctctgtaaaaatatctttgtgcaacaacaaaggaaaaataaac

SEQ ID NO: 148125 - DNA, 71 bp, Homo sapiens
taaagcactaagctctgtaaaaatatctttgtgcaacaacaaaggaaaaataaactctaggaaagaagaga

SEQ ID NO: 148126 - DNA, 72 bp, Homo sapiens
gctctgtaaaaatatctttgtgcaacaacaaaggaaaaataaactctaggaaagaagagaagcaatgaaagc

SEQ ID NO: 148127 - DNA, 70 bp, Homo sapiens
atatctttgtgcaacaacaaaggaaaaataaactctaggaaagaagagaagcaatgaaagctaaaattag

SEQ ID NO: 148128 - DNA, 71 bp, Homo sapiens
tgtgcaacaacaaaggaaaaataaactctaggaaagaagagaagcaatgaaagctaaaattaggttaatca

SEQ ID NO: 148129 - DNA, 72 bp, Homo sapiens
aactctaggaaagaagagaagcaatgaaagctaaaattaggttaatcaatattttcaacttatgcatgaaaa

SEQ ID NO: 148130 - DNA, 70 bp, Homo sapiens
ggaaagaagagaagcaatgaaagctaaaattaggttaatcaatattttcaacttatgcatgaaaaaagtt

SEQ ID NO: 148131 - DNA, 75 bp, Homo sapiens
aagctaaaattaggttaatcaatattttcaacttatgcatgaaaaaagtttgaatagatggatagctgcaagtca

SEQ ID NO: 148132 - DNA, 77 bp, Homo sapiens
attaggttaatcaatattttcaacttatgcatgaaaaaagtttgaatagatggatagctgcaagtcataatgaaata

SEQ ID NO: 148133 - DNA, 80 bp, Homo sapiens
attttcaacttatgcatgaaaaaagtttgaatagatggatagctgcaagtcataatgaaataattatagaatctgtgatg

SEQ ID NO: 148134 - DNA, 81 bp, Homo sapiens
tatgcatgaaaaaagtttgaatagatggatagctgcaagtcataatgaaataattatagaatctgtgatgggtagtatggg

SEQ ID NO: 148135 - DNA, 78 bp, Homo sapiens
aaaagtttgaatagatggatagctgcaagtcataatgaaataattatagaatctgtgatgggtagtatgggtattctc

SEQ ID NO: 148136 - DNA, 78 bp, Homo sapiens
gatagctgcaagtcataatgaaataattatagaatctgtgatgggtagtatgggtattctctacactgtttccatttt

SEQ ID NO: 148137 - DNA, 75 bp, Homo sapiens
atgaaataattatagaatctgtgatgggtagtatgggtattctctacactgtttccatttttctagatatttgaa

SEQ ID NO: 148138 - DNA, 75 bp, Homo sapiens
tatagaatctgtgatgggtagtatgggtattctctacactgtttccatttttctagatatttgaaagtttcataa

SEQ ID NO: 148139 - DNA, 73 bp, Homo sapiens
gtgatgggtagtatgggtattctctacactgtttccatttttctagatatttgaaagtttcataagactatcc

SEQ ID NO: 148140 - DNA, 70 bp, Homo sapiens
ggtagtatgggtattctctacactgtttccatttttctagatatttgaaagtttcataagactatccttt

SEQ ID NO: 148141 - DNA, 71 bp, Homo sapiens
tatgggtattctctacactgtttccatttttctagatatttgaaagtttcataagactatccttttaatac

SEQ ID NO: 148142 - DNA, 72 bp, Homo sapiens
tctctacactgtttccatttttctagatatttgaaagtttcataagactatccttttaatactaaaagctca

SEQ ID NO: 148143 - DNA, 69 bp, Homo sapiens
cactgtttccatttttctagatatttgaaagtttcataagactatccttttaatactaaaagctcaacg

SEQ ID NO: 148144 - DNA, 68 bp, Homo sapiens
ctgtttccatttttctagatatttgaaagtttcataagactatccttttaatactaaaagctcaacgg

SEQ ID NO: 148145 - DNA, 68 bp, Homo sapiens
catttttctagatatttgaaagtttcataagactatccttttaatactaaaagctcaacggttttctc

SEQ ID NO: 148146 - DNA, 68 bp, Homo sapiens
tctagatatttgaaagtttcataagactatccttttaatactaaaagctcaacggttttctctttaac

SEQ ID NO: 148147 - DNA, 67 bp, Homo sapiens
ctagatatttgaaagtttcataagactatccttttaatactaaaagctcaacggttttctctttaac

SEQ ID NO: 148148 - DNA, 65 bp, Homo sapiens
agtttcataagactatccttttaatactaaaagctcaacggttttctctttaactttataagcct

SEQ ID NO: 148149 - DNA, 67 bp, Homo sapiens
ttcataagactatccttttaatactaaaagctcaacggttttctctttaactttataagccttaatc

SEQ ID NO: 148150 - DNA, 63 bp, Homo sapiens
ccttttaatactaaaagctcaacggttttctctttaactttataagccttaatcttttaataa

SEQ ID NO: 148151 - DNA, 64 bp, Homo sapiens
ctaaaagctcaacggttttctctttaactttataagccttaatcttttaataattagatatttt

SEQ ID NO: 148152 - DNA, 62 bp, Homo sapiens
aacggttttctctttaactttataagccttaatcttttaataattagatatttttattttct

SEQ ID NO: 148153 - DNA, 69 bp, Homo sapiens
tttttattttctttctaggactctcagcatgtcagttctgtaacccaaaaccaaagtaagtaaatttga

SEQ ID NO: 148154 - DNA, 70 bp, Homo sapiens
ttttctttctaggactctcagcatgtcagttctgtaacccaaaaccaaagtaagtaaatttgaaactgct

SEQ ID NO: 148155 - DNA, 72 bp, Homo sapiens
actctcagcatgtcagttctgtaacccaaaaccaaagtaagtaaatttgaaactgcttattggattggagaa

SEQ ID NO: 148156 - DNA, 71 bp, Homo sapiens
catgtcagttctgtaacccaaaaccaaagtaagtaaatttgaaactgcttattggattggagaacaaagca

SEQ ID NO: 148157 - DNA, 69 bp, Homo sapiens
ccaaagtaagtaaatttgaaactgcttattggattggagaacaaagcatagcttttactgtttaacgta

SEQ ID NO: 148158 - DNA, 69 bp, Homo sapiens
taaatttgaaactgcttattggattggagaacaaagcatagcttttactgtttaacgtaaaaacattag

SEQ ID NO: 148159 - DNA, 69 bp, Homo sapiens
ttgaaactgcttattggattggagaacaaagcatagcttttactgtttaacgtaaaaacattagtaaaa

SEQ ID NO: 148160 - DNA, 69 bp, Homo sapiens
ctgcttattggattggagaacaaagcatagcttttactgtttaacgtaaaaacattagtaaaaaatgcc

SEQ ID NO: 148161 - DNA, 70 bp, Homo sapiens
ggattggagaacaaagcatagcttttactgtttaacgtaaaaacattagtaaaaaatgccccagcagaga

SEQ ID NO: 148162 - DNA, 69 bp, Homo sapiens
aacaaagcatagcttttactgtttaacgtaaaaacattagtaaaaaatgccccagcagagatgaggcct

SEQ ID NO: 148163 - DNA, 70 bp, Homo sapiens
aagcatagcttttactgtttaacgtaaaaacattagtaaaaaatgccccagcagagatgaggccttccta

SEQ ID NO: 148164 - DNA, 69 bp, Homo sapiens
atagcttttactgtttaacgtaaaaacattagtaaaaaatgccccagcagagatgaggccttcctatgt

SEQ ID NO: 148165 - DNA, 70 bp, Homo sapiens
tttactgtttaacgtaaaaacattagtaaaaaatgccccagcagagatgaggccttcctatgttgaaaga

SEQ ID NO: 148166 - DNA, 70 bp, Homo sapiens
actgtttaacgtaaaaacattagtaaaaaatgccccagcagagatgaggccttcctatgttgaaagaata

SEQ ID NO: 148167 - DNA, 70 bp, Homo sapiens
tttaacgtaaaaacattagtaaaaaatgccccagcagagatgaggccttcctatgttgaaagaataggaa

SEQ ID NO: 148168 - DNA, 72 bp, Homo sapiens
taaaaacattagtaaaaaatgccccagcagagatgaggccttcctatgttgaaagaataggaaaggagaaca

SEQ ID NO: 148169 - DNA, 72 bp, Homo sapiens
attagtaaaaaatgccccagcagagatgaggccttcctatgttgaaagaataggaaaggagaacaaatataa

SEQ ID NO: 148170 - DNA, 71 bp, Homo sapiens
aaaaatgccccagcagagatgaggccttcctatgttgaaagaataggaaaggagaacaaatataaaactat

SEQ ID NO: 148171 - DNA, 72 bp, Homo sapiens
cagagatgaggccttcctatgttgaaagaataggaaaggagaacaaatataaaactattctttatgtgggat

SEQ ID NO: 148172 - DNA, 69 bp, Homo sapiens
gaggccttcctatgttgaaagaataggaaaggagaacaaatataaaactattctttatgtgggatttaa

SEQ ID NO: 148173 - DNA, 69 bp, Homo sapiens
tgttgaaagaataggaaaggagaacaaatataaaactattctttatgtgggatttaaaattgttgacca

SEQ ID NO: 148174 - DNA, 70 bp, Homo sapiens
gaataggaaaggagaacaaatataaaactattctttatgtgggatttaaaattgttgaccaggcgcagtg

SEQ ID NO: 148175 - DNA, 67 bp, Homo sapiens
caaacaaaaaccaaaataagattgttgcaaagagttaataaagatgttttagtgaaatactaaacaa

SEQ ID NO: 148176 - DNA, 71 bp, Homo sapiens
accaaaataagattgttgcaaagagttaataaagatgttttagtgaaatactaaacaaatgcagtgtggta

SEQ ID NO: 148177 - DNA, 75 bp, Homo sapiens
gattgttgcaaagagttaataaagatgttttagtgaaatactaaacaaatgcagtgtggtattactgacacatag

SEQ ID NO: 148178 - DNA, 75 bp, Homo sapiens
agagttaataaagatgttttagtgaaatactaaacaaatgcagtgtggtattactgacacatagtagctgtacca

SEQ ID NO: 148179 - DNA, 76 bp, Homo sapiens
aaagatgttttagtgaaatactaaacaaatgcagtgtggtattactgacacatagtagctgtaccaaatgtgactc

SEQ ID NO: 148180 - DNA, 79 bp, Homo sapiens
ttttagtgaaatactaaacaaatgcagtgtggtattactgacacatagtagctgtaccaaatgtgactctcacagctag

SEQ ID NO: 148181 - DNA, 80 bp, Homo sapiens
aatactaaacaaatgcagtgtggtattactgacacatagtagctgtaccaaatgtgactctcacagctaggaattgtata

SEQ ID NO: 148182 - DNA, 81 bp, Homo sapiens
aaatgcagtgtggtattactgacacatagtagctgtaccaaatgtgactctcacagctaggaattgtatacaacagtagat

SEQ ID NO: 148183 - DNA, 83 bp, Homo sapiens
tattactgacacatagtagctgtaccaaatgtgactctcacagctaggaattgtatacaacagtagattggagtgtgtcattc

SEQ ID NO: 148184 - DNA, 79 bp, Homo sapiens
atagtagctgtaccaaatgtgactctcacagctaggaattgtatacaacagtagattggagtgtgtcattcttgtgttt

SEQ ID NO: 148185 - DNA, 77 bp, Homo sapiens
tgtaccaaatgtgactctcacagctaggaattgtatacaacagtagattggagtgtgtcattcttgtgttttaaaaa

SEQ ID NO: 148186 - DNA, 75 bp, Homo sapiens
aatgtgactctcacagctaggaattgtatacaacagtagattggagtgtgtcattcttgtgttttaaaaaacaaa

SEQ ID NO: 148187 - DNA, 72 bp, Homo sapiens
cacagctaggaattgtatacaacagtagattggagtgtgtcattcttgtgttttaaaaaacaaaactaagaa

SEQ ID NO: 148188 - DNA, 66 bp, Homo sapiens
gttttaaaaaacaaaactaagaaatttttataaggaatatgacatacagtttgtctagccccacta

SEQ ID NO: 148189 - DNA, 71 bp, Homo sapiens
acaaaactaagaaatttttataaggaatatgacatacagtttgtctagccccactatatttgtttgccatg

SEQ ID NO: 148190 - DNA, 71 bp, Homo sapiens
gaaatttttataaggaatatgacatacagtttgtctagccccactatatttgtttgccatgtaattctttt

SEQ ID NO: 148191 - DNA, 75 bp, Homo sapiens
tttataaggaatatgacatacagtttgtctagccccactatatttgtttgccatgtaattctttttcagcctgag

SEQ ID NO: 148192 - DNA, 73 bp, Homo sapiens
aatatgacatacagtttgtctagccccactatatttgtttgccatgtaattctttttcagcctgagggttaaa

SEQ ID NO: 148193 - DNA, 74 bp, Homo sapiens
acagtttgtctagccccactatatttgtttgccatgtaattctttttcagcctgagggttaaatctgccctgca

SEQ ID NO: 148194 - DNA, 73 bp, Homo sapiens
ccactatatttgtttgccatgtaattctttttcagcctgagggttaaatctgccctgcagctagtttttgtaa

SEQ ID NO: 148195 - DNA, 72 bp, Homo sapiens
atatttgtttgccatgtaattctttttcagcctgagggttaaatctgccctgcagctagtttttgtaaataa

SEQ ID NO: 148196 - DNA, 70 bp, Homo sapiens
aaagttttattgggacatagctgcacccatttatctagtattctacaaagtatagcacaaaaaacctaaa

SEQ ID NO: 148197 - DNA, 74 bp, Homo sapiens
tgggacatagctgcacccatttatctagtattctacaaagtatagcacaaaaaacctaaaatatttattgtctg

SEQ ID NO: 148198 - DNA, 73 bp, Homo sapiens
agctgcacccatttatctagtattctacaaagtatagcacaaaaaacctaaaatatttattgtctggcctctg

SEQ ID NO: 148199 - DNA, 72 bp, Homo sapiens
cccatttatctagtattctacaaagtatagcacaaaaaacctaaaatatttattgtctggcctctgtagata

SEQ ID NO: 148200 - DNA, 71 bp, Homo sapiens
ttctacaaagtatagcacaaaaaacctaaaatatttattgtctggcctctgtagataaaatttgctgttcc

SEQ ID NO: 148201 - DNA, 74 bp, Homo sapiens
gtatagcacaaaaaacctaaaatatttattgtctggcctctgtagataaaatttgctgttccctgctgtagaga

SEQ ID NO: 148202 - DNA, 73 bp, Homo sapiens
aaaacctaaaatatttattgtctggcctctgtagataaaatttgctgttccctgctgtagagatactgaataa

SEQ ID NO: 148203 - DNA, 78 bp, Homo sapiens
ctaaaatatttattgtctggcctctgtagataaaatttgctgttccctgctgtagagatactgaataagatcttgcaa

SEQ ID NO: 148204 - DNA, 78 bp, Homo sapiens
aatatttattgtctggcctctgtagataaaatttgctgttccctgctgtagagatactgaataagatcttgcaaagaa

SEQ ID NO: 148205 - DNA, 78 bp, Homo sapiens
atatttattgtctggcctctgtagataaaatttgctgttccctgctgtagagatactgaataagatcttgcaaagaag

SEQ ID NO: 148206 - DNA, 79 bp, Homo sapiens
tctggcctctgtagataaaatttgctgttccctgctgtagagatactgaataagatcttgcaaagaagtcataactaaa

SEQ ID NO: 148207 - DNA, 76 bp, Homo sapiens
cctctgtagataaaatttgctgttccctgctgtagagatactgaataagatcttgcaaagaagtcataactaaaat

SEQ ID NO: 148208 - DNA, 75 bp, Homo sapiens
gtagataaaatttgctgttccctgctgtagagatactgaataagatcttgcaaagaagtcataactaaaatttcc

SEQ ID NO: 148209 - DNA, 76 bp, Homo sapiens
tgttccctgctgtagagatactgaataagatcttgcaaagaagtcataactaaaatttccccaaaatgcagataaa

SEQ ID NO: 148210 - DNA, 74 bp, Homo sapiens
gctgtagagatactgaataagatcttgcaaagaagtcataactaaaatttccccaaaatgcagataaataaacc

SEQ ID NO: 148211 - DNA, 73 bp, Homo sapiens
gatcttgcaaagaagtcataactaaaatttccccaaaatgcagataaataaacccgactatattgctacagta

SEQ ID NO: 148212 - DNA, 72 bp, Homo sapiens
agaagtcataactaaaatttccccaaaatgcagataaataaacccgactatattgctacagtattgtatgag

SEQ ID NO: 148213 - DNA, 71 bp, Homo sapiens
aactaaaatttccccaaaatgcagataaataaacccgactatattgctacagtattgtatgagtagctagg

SEQ ID NO: 148214 - DNA, 73 bp, Homo sapiens
cccaaaatgcagataaataaacccgactatattgctacagtattgtatgagtagctaggtaaaattaactgaa

SEQ ID NO: 148215 - DNA, 75 bp, Homo sapiens
agataaataaacccgactatattgctacagtattgtatgagtagctaggtaaaattaactgaaatggatggctgc

SEQ ID NO: 148216 - DNA, 75 bp, Homo sapiens
ataaacccgactatattgctacagtattgtatgagtagctaggtaaaattaactgaaatggatggctgcttggga

SEQ ID NO: 148217 - DNA, 71 bp, Homo sapiens
agtattgtatgagtagctaggtaaaattaactgaaatggatggctgcttgggaagattgggaaatcttttt

SEQ ID NO: 148218 - DNA, 73 bp, Homo sapiens
aggtaaaattaactgaaatggatggctgcttgggaagattgggaaatcttttttctccacatcttggcagcta

SEQ ID NO: 148219 - DNA, 76 bp, Homo sapiens
aactgaaatggatggctgcttgggaagattgggaaatcttttttctccacatcttggcagctagcccagaccagtg

SEQ ID NO: 148220 - DNA, 79 bp, Homo sapiens
ctgcttgggaagattgggaaatcttttttctccacatcttggcagctagcccagaccagtggagtgtgcacaggtctga

SEQ ID NO: 148221 - DNA, 78 bp, Homo sapiens
aagattgggaaatcttttttctccacatcttggcagctagcccagaccagtggagtgtgcacaggtctgaaggcagaa

SEQ ID NO: 148222 - DNA, 81 bp, Homo sapiens
aaatcttttttctccacatcttggcagctagcccagaccagtggagtgtgcacaggtctgaaggcagaacaccagctcagc

SEQ ID NO: 148223 - DNA, 81 bp, Homo sapiens
atcttggcagctagcccagaccagtggagtgtgcacaggtctgaaggcagaacaccagctcagccgtgggtggggttgcta

SEQ ID NO: 148224 - DNA, 81 bp, Homo sapiens
ctagcccagaccagtggagtgtgcacaggtctgaaggcagaacaccagctcagccgtgggtggggttgctatgcaccactc

SEQ ID NO: 148225 - DNA, 79 bp, Homo sapiens
agtggagtgtgcacaggtctgaaggcagaacaccagctcagccgtgggtggggttgctatgcaccactctgcccccacc

SEQ ID NO: 148226 - DNA, 76 bp, Homo sapiens
aacaccagctcagccgtgggtggggttgctatgcaccactctgcccccaccttcggtctgcttgggttgctggtca

SEQ ID NO: 148227 - DNA, 78 bp, Homo sapiens
gtgggtggggttgctatgcaccactctgcccccaccttcggtctgcttgggttgctggtcatgcaggtggcatgtctt

SEQ ID NO: 148228 - DNA, 77 bp, Homo sapiens
ccactctgcccccaccttcggtctgcttgggttgctggtcatgcaggtggcatgtctttcacggggttgctcatggt

SEQ ID NO: 148229 - DNA, 75 bp, Homo sapiens
cccaccttcggtctgcttgggttgctggtcatgcaggtggcatgtctttcacggggttgctcatggtttgtttta

SEQ ID NO: 148230 - DNA, 77 bp, Homo sapiens
gttgctggtcatgcaggtggcatgtctttcacggggttgctcatggtttgttttattgctaactcatggtttagaaa

SEQ ID NO: 148231 - DNA, 73 bp, Homo sapiens
atgcaggtggcatgtctttcacggggttgctcatggtttgttttattgctaactcatggtttagaaagaacct

SEQ ID NO: 148232 - DNA, 69 bp, Homo sapiens
tttcacggggttgctcatggtttgttttattgctaactcatggtttagaaagaacctttagtccattaa

SEQ ID NO: 148233 - DNA, 70 bp, Homo sapiens
gttgctcatggtttgttttattgctaactcatggtttagaaagaacctttagtccattaaaccatttgat

SEQ ID NO: 148234 - DNA, 66 bp, Homo sapiens
gtttgttttattgctaactcatggtttagaaagaacctttagtccattaaaccatttgatttcccc

SEQ ID NO: 148235 - DNA, 67 bp, Homo sapiens
ttgctaactcatggtttagaaagaacctttagtccattaaaccatttgatttccccttttagcaaaa

SEQ ID NO: 148236 - DNA, 66 bp, Homo sapiens
atggtttagaaagaacctttagtccattaaaccatttgatttccccttttagcaaaatatagttga

SEQ ID NO: 148237 - DNA, 70 bp, Homo sapiens
acctttagtccattaaaccatttgatttccccttttagcaaaatatagttgaagatgaactgataagcac

SEQ ID NO: 148238 - DNA, 72 bp, Homo sapiens
ccattaaaccatttgatttccccttttagcaaaatatagttgaagatgaactgataagcactttcttggcca

SEQ ID NO: 148239 - DNA, 75 bp, Homo sapiens
atttgatttccccttttagcaaaatatagttgaagatgaactgataagcactttcttggccagggatggatcatc

SEQ ID NO: 148240 - DNA, 79 bp, Homo sapiens
cttttagcaaaatatagttgaagatgaactgataagcactttcttggccagggatggatcatcctcttgccctatgcag

SEQ ID NO: 148241 - DNA, 79 bp, Homo sapiens
aaaatatagttgaagatgaactgataagcactttcttggccagggatggatcatcctcttgccctatgcagtaatgtgg

SEQ ID NO: 148242 - DNA, 80 bp, Homo sapiens
ttgaagatgaactgataagcactttcttggccagggatggatcatcctcttgccctatgcagtaatgtgggtcaattcct

SEQ ID NO: 148243 - DNA, 77 bp, Homo sapiens
aactgataagcactttcttggccagggatggatcatcctcttgccctatgcagtaatgtgggtcaattccttgttac

SEQ ID NO: 148244 - DNA, 78 bp, Homo sapiens
ctttcttggccagggatggatcatcctcttgccctatgcagtaatgtgggtcaattccttgttactctgatgagaaat

SEQ ID NO: 148245 - DNA, 79 bp, Homo sapiens
agggatggatcatcctcttgccctatgcagtaatgtgggtcaattccttgttactctgatgagaaattgtccaacattg

SEQ ID NO: 148246 - DNA, 77 bp, Homo sapiens
atcctcttgccctatgcagtaatgtgggtcaattccttgttactctgatgagaaattgtccaacattggtgggtctc

SEQ ID NO: 148247 - DNA, 76 bp, Homo sapiens
aattccttgttactctgatgagaaattgtccaacattggtgggtctcctggaggtcctggctcaccagctgcttac

SEQ ID NO: 148248 - DNA, 76 bp, Homo sapiens
atgagaaattgtccaacattggtgggtctcctggaggtcctggctcaccagctgcttacccccacatcttttatgc

SEQ ID NO: 148249 - DNA, 77 bp, Homo sapiens
caacattggtgggtctcctggaggtcctggctcaccagctgcttacccccacatcttttatgctgctgtcactttat

SEQ ID NO: 148250 - DNA, 79 bp, Homo sapiens
ttggtgggtctcctggaggtcctggctcaccagctgcttacccccacatcttttatgctgctgtcactttattctgcta

SEQ ID NO: 148251 - DNA, 79 bp, Homo sapiens
gaggtcctggctcaccagctgcttacccccacatcttttatgctgctgtcactttattctgctattccggcagccttat

SEQ ID NO: 148252 - DNA, 80 bp, Homo sapiens
tgcttacccccacatcttttatgctgctgtcactttattctgctattccggcagccttatttatctttgtgagaatgtga

SEQ ID NO: 148253 - DNA, 77 bp, Homo sapiens
ttttatgctgctgtcactttattctgctattccggcagccttatttatctttgtgagaatgtgacctgaaaaagagg

SEQ ID NO: 148254 - DNA, 73 bp, Homo sapiens
actttattctgctattccggcagccttatttatctttgtgagaatgtgacctgaaaaagagggatctagtttg

SEQ ID NO: 148255 - DNA, 77 bp, Homo sapiens
attctgctattccggcagccttatttatctttgtgagaatgtgacctgaaaaagagggatctagtttgttgcatgta

SEQ ID NO: 148256 - DNA, 77 bp, Homo sapiens
cagccttatttatctttgtgagaatgtgacctgaaaaagagggatctagtttgttgcatgtaggatgaagaggatgg

SEQ ID NO: 148257 - DNA, 76 bp, Homo sapiens
ttatttatctttgtgagaatgtgacctgaaaaagagggatctagtttgttgcatgtaggatgaagaggatggtggg

SEQ ID NO: 148258 - DNA, 80 bp, Homo sapiens
tgtgagaatgtgacctgaaaaagagggatctagtttgttgcatgtaggatgaagaggatggtggggtatggatggatata

SEQ ID NO: 148259 - DNA, 78 bp, Homo sapiens
ctgaaaaagagggatctagtttgttgcatgtaggatgaagaggatggtggggtatggatggatatagctttcagtgaa

SEQ ID NO: 148260 - DNA, 78 bp, Homo sapiens
aaagagggatctagtttgttgcatgtaggatgaagaggatggtggggtatggatggatatagctttcagtgaagagaa

SEQ ID NO: 148261 - DNA, 79 bp, Homo sapiens
tttgttgcatgtaggatgaagaggatggtggggtatggatggatatagctttcagtgaagagaagacaaacatttctta

SEQ ID NO: 148262 - DNA, 76 bp, Homo sapiens
aagaggatggtggggtatggatggatatagctttcagtgaagagaagacaaacatttcttaaagtatgcccagcaa

SEQ ID NO: 148263 - DNA, 77 bp, Homo sapiens
tttcagtgaagagaagacaaacatttcttaaagtatgcccagcaagtcaactctgatttcttcaacacttgatctta

SEQ ID NO: 148264 - DNA, 76 bp, Homo sapiens
gaagacaaacatttcttaaagtatgcccagcaagtcaactctgatttcttcaacacttgatcttatggtactggta

SEQ ID NO: 148265 - DNA, 74 bp, Homo sapiens
atttcttaaagtatgcccagcaagtcaactctgatttcttcaacacttgatcttatggtactggtacataggtt

SEQ ID NO: 148266 - DNA, 75 bp, Homo sapiens
ttaaagtatgcccagcaagtcaactctgatttcttcaacacttgatcttatggtactggtacataggttttagag

SEQ ID NO: 148267 - DNA, 75 bp, Homo sapiens
agcaagtcaactctgatttcttcaacacttgatcttatggtactggtacataggttttagagtctctggagaggg

SEQ ID NO: 148268 - DNA, 73 bp, Homo sapiens
aactctgatttcttcaacacttgatcttatggtactggtacataggttttagagtctctggagaggggaggta

SEQ ID NO: 148269 - DNA, 71 bp, Homo sapiens
tcaacacttgatcttatggtactggtacataggttttagagtctctggagaggggaggtagggggatttta

SEQ ID NO: 148270 - DNA, 70 bp, Homo sapiens
ttgatcttatggtactggtacataggttttagagtctctggagaggggaggtagggggattttacttgga

SEQ ID NO: 148271 - DNA, 69 bp, Homo sapiens
tactggtacataggttttagagtctctggagaggggaggtagggggattttacttggatgccctagtgt

SEQ ID NO: 148272 - DNA, 68 bp, Homo sapiens
aggggaggtagggggattttacttggatgccctagtgttatatgtccacaattgcaaaacccagaccc

SEQ ID NO: 148273 - DNA, 71 bp, Homo sapiens
ggggattttacttggatgccctagtgttatatgtccacaattgcaaaacccagaccctgtggaatttagaa

SEQ ID NO: 148274 - DNA, 75 bp, Homo sapiens
ctagtgttatatgtccacaattgcaaaacccagaccctgtggaatttagaacccaggcaagatgatcgtgtggag

SEQ ID NO: 148275 - DNA, 75 bp, Homo sapiens
ttatatgtccacaattgcaaaacccagaccctgtggaatttagaacccaggcaagatgatcgtgtggagtccctg

SEQ ID NO: 148276 - DNA, 75 bp, Homo sapiens
aattgcaaaacccagaccctgtggaatttagaacccaggcaagatgatcgtgtggagtccctgtgaatggtctga

SEQ ID NO: 148277 - DNA, 75 bp, Homo sapiens
ttagaacccaggcaagatgatcgtgtggagtccctgtgaatggtctgaagaggaggggcctctgcccctctcgtt

SEQ ID NO: 148278 - DNA, 74 bp, Homo sapiens
tggagtccctgtgaatggtctgaagaggaggggcctctgcccctctcgtttggagtcttggtcctagctttcta

SEQ ID NO: 148279 - DNA, 75 bp, Homo sapiens
tccctgtgaatggtctgaagaggaggggcctctgcccctctcgtttggagtcttggtcctagctttctagacaga

SEQ ID NO: 148280 - DNA, 72 bp, Homo sapiens
tgaagaggaggggcctctgcccctctcgtttggagtcttggtcctagctttctagacagaggggaggccatt

SEQ ID NO: 148281 - DNA, 73 bp, Homo sapiens
gggcctctgcccctctcgtttggagtcttggtcctagctttctagacagaggggaggccatttgaaaatatca

SEQ ID NO: 148282 - DNA, 75 bp, Homo sapiens
ccctctcgtttggagtcttggtcctagctttctagacagaggggaggccatttgaaaatatcatataagagctgc

SEQ ID NO: 148283 - DNA, 78 bp, Homo sapiens
tcgtttggagtcttggtcctagctttctagacagaggggaggccatttgaaaatatcatataagagctgctgccacca

SEQ ID NO: 148284 - DNA, 81 bp, Homo sapiens
ttctagacagaggggaggccatttgaaaatatcatataagagctgctgccaccatgagggcaaagtgactaattgcaaata

SEQ ID NO: 148285 - DNA, 81 bp, Homo sapiens
acagaggggaggccatttgaaaatatcatataagagctgctgccaccatgagggcaaagtgactaattgcaaatatgcaag

SEQ ID NO: 148286 - DNA, 83 bp, Homo sapiens
tttgaaaatatcatataagagctgctgccaccatgagggcaaagtgactaattgcaaatatgcaagggtctccacatgacatt

SEQ ID NO: 148287 - DNA, 83 bp, Homo sapiens
aaatatcatataagagctgctgccaccatgagggcaaagtgactaattgcaaatatgcaagggtctccacatgacatttgtgg

SEQ ID NO: 148288 - DNA, 81 bp, Homo sapiens
ccatgagggcaaagtgactaattgcaaatatgcaagggtctccacatgacatttgtgggaaatgtcattcagccctgccta

SEQ ID NO: 148289 - DNA, 76 bp, Homo sapiens
aaagtgactaattgcaaatatgcaagggtctccacatgacatttgtgggaaatgtcattcagccctgcctaaaagg

SEQ ID NO: 148290 - DNA, 74 bp, Homo sapiens
aaatatgcaagggtctccacatgacatttgtgggaaatgtcattcagccctgcctaaaaggtacccatgtttct

SEQ ID NO: 148291 - DNA, 73 bp, Homo sapiens
tccacatgacatttgtgggaaatgtcattcagccctgcctaaaaggtacccatgtttctttttcacttccaat

SEQ ID NO: 148292 - DNA, 68 bp, Homo sapiens
attcagccctgcctaaaaggtacccatgtttctttttcacttccaattctgtttcaggtccctattac

SEQ ID NO: 148293 - DNA, 70 bp, Homo sapiens
taaaaggtacccatgtttctttttcacttccaattctgtttcaggtccctattacctcatgtctagacaa

SEQ ID NO: 148294 - DNA, 76 bp, Homo sapiens
tacccatgtttctttttcacttccaattctgtttcaggtccctattacctcatgtctagacaaatgcagctgcctc

SEQ ID NO: 148295 - DNA, 76 bp, Homo sapiens
ttttcacttccaattctgtttcaggtccctattacctcatgtctagacaaatgcagctgcctccacacgtaacatt

SEQ ID NO: 148296 - DNA, 76 bp, Homo sapiens
aattctgtttcaggtccctattacctcatgtctagacaaatgcagctgcctccacacgtaacatttcctgctccct

SEQ ID NO: 148297 - DNA, 77 bp, Homo sapiens
ttcaggtccctattacctcatgtctagacaaatgcagctgcctccacacgtaacatttcctgctcccttctaagtta

SEQ ID NO: 148298 - DNA, 78 bp, Homo sapiens
cctattacctcatgtctagacaaatgcagctgcctccacacgtaacatttcctgctcccttctaagttatgccaggta

SEQ ID NO: 148299 - DNA, 79 bp, Homo sapiens
tctagacaaatgcagctgcctccacacgtaacatttcctgctcccttctaagttatgccaggtagcactaccagagtaa

SEQ ID NO: 148300 - DNA, 76 bp, Homo sapiens
aaatgcagctgcctccacacgtaacatttcctgctcccttctaagttatgccaggtagcactaccagagtaatcct

SEQ ID NO: 148301 - DNA, 76 bp, Homo sapiens
ctccacacgtaacatttcctgctcccttctaagttatgccaggtagcactaccagagtaatccttctgaggaatca

SEQ ID NO: 148302 - DNA, 77 bp, Homo sapiens
ctcccttctaagttatgccaggtagcactaccagagtaatccttctgaggaatcactgtgtcatgttcctgtttaga

SEQ ID NO: 148303 - DNA, 83 bp, Homo sapiens
actaccagagtaatccttctgaggaatcactgtgtcatgttcctgtttagatcattgatgtgtctcatagcccagcaaataca

SEQ ID NO: 148304 - DNA, 84 bp, Homo sapiens
taatccttctgaggaatcactgtgtcatgttcctgtttagatcattgatgtgtctcatagcccagcaaatacagtcataacttc

SEQ ID NO: 148305 - DNA, 82 bp, Homo sapiens
ttcctgtttagatcattgatgtgtctcatagcccagcaaatacagtcataacttcccatcctggccttcagagccctctgaa

SEQ ID NO: 148306 - DNA, 83 bp, Homo sapiens
atcattgatgtgtctcatagcccagcaaatacagtcataacttcccatcctggccttcagagccctctgaaatctgcttccgc

SEQ ID NO: 148307 - DNA, 81 bp, Homo sapiens
agcaaatacagtcataacttcccatcctggccttcagagccctctgaaatctgcttccgcctgtttcagtgctgtccagca

SEQ ID NO: 148308 - DNA, 82 bp, Homo sapiens
tacagtcataacttcccatcctggccttcagagccctctgaaatctgcttccgcctgtttcagtgctgtccagcacagattc

SEQ ID NO: 148309 - DNA, 83 bp, Homo sapiens
acttcccatcctggccttcagagccctctgaaatctgcttccgcctgtttcagtgctgtccagcacagattctgcacctcagc

SEQ ID NO: 148310 - DNA, 82 bp, Homo sapiens
cttcagagccctctgaaatctgcttccgcctgtttcagtgctgtccagcacagattctgcacctcagccctgccctttccaa

SEQ ID NO: 148311 - DNA, 81 bp, Homo sapiens
agccctctgaaatctgcttccgcctgtttcagtgctgtccagcacagattctgcacctcagccctgccctttccaaactca

SEQ ID NO: 148312 - DNA, 79 bp, Homo sapiens
aaatctgcttccgcctgtttcagtgctgtccagcacagattctgcacctcagccctgccctttccaaactcagaccctc

SEQ ID NO: 148313 - DNA, 78 bp, Homo sapiens
tgtttcagtgctgtccagcacagattctgcacctcagccctgccctttccaaactcagaccctcttcttcttgtttgt

SEQ ID NO: 148314 - DNA, 77 bp, Homo sapiens
agtgctgtccagcacagattctgcacctcagccctgccctttccaaactcagaccctcttcttcttgtttgttccca

SEQ ID NO: 148315 - DNA, 74 bp, Homo sapiens
acagattctgcacctcagccctgccctttccaaactcagaccctcttcttcttgtttgttcccactgtcctctc

SEQ ID NO: 148316 - DNA, 73 bp, Homo sapiens
acctcagccctgccctttccaaactcagaccctcttcttcttgtttgttcccactgtcctctctctcttgcca

SEQ ID NO: 148317 - DNA, 79 bp, Homo sapiens
tgccctttccaaactcagaccctcttcttcttgtttgttcccactgtcctctctctcttgccagcatcactctgccaga

SEQ ID NO: 148318 - DNA, 78 bp, Homo sapiens
tttccaaactcagaccctcttcttcttgtttgttcccactgtcctctctctcttgccagcatcactctgccagaatct

SEQ ID NO: 148319 - DNA, 81 bp, Homo sapiens
cctcttcttcttgtttgttcccactgtcctctctctcttgccagcatcactctgccagaatcttggctgtcctttgtgata

SEQ ID NO: 148320 - DNA, 81 bp, Homo sapiens
ttgtttgttcccactgtcctctctctcttgccagcatcactctgccagaatcttggctgtcctttgtgatacaattcattt

SEQ ID NO: 148321 - DNA, 79 bp, Homo sapiens
ctctctctcttgccagcatcactctgccagaatcttggctgtcctttgtgatacaattcattttgttctttctttaatt

SEQ ID NO: 148322 - DNA, 79 bp, Homo sapiens
ttgccagcatcactctgccagaatcttggctgtcctttgtgatacaattcattttgttctttctttaatttgctgcctt

SEQ ID NO: 148323 - DNA, 75 bp, Homo sapiens
tctgccagaatcttggctgtcctttgtgatacaattcattttgttctttctttaatttgctgcctttggtattac

SEQ ID NO: 148324 - DNA, 73 bp, Homo sapiens
atcttggctgtcctttgtgatacaattcattttgttctttctttaatttgctgcctttggtattaccaagaga

SEQ ID NO: 148325 - DNA, 72 bp, Homo sapiens
acaattcattttgttctttctttaatttgctgcctttggtattaccaagagagcaaccattctgtgatttcc

SEQ ID NO: 148326 - DNA, 73 bp, Homo sapiens
tttaatttgctgcctttggtattaccaagagagcaaccattctgtgatttcccagggcagttaatttatgtat

SEQ ID NO: 148327 - DNA, 75 bp, Homo sapiens
tttgctgcctttggtattaccaagagagcaaccattctgtgatttcccagggcagttaatttatgtattgacttg

SEQ ID NO: 148328 - DNA, 74 bp, Homo sapiens
ttggtattaccaagagagcaaccattctgtgatttcccagggcagttaatttatgtattgacttgtgtacttaa

SEQ ID NO: 148329 - DNA, 76 bp, Homo sapiens
aagagagcaaccattctgtgatttcccagggcagttaatttatgtattgacttgtgtacttaatctcacagtgcct

SEQ ID NO: 148330 - DNA, 77 bp, Homo sapiens
tctgtgatttcccagggcagttaatttatgtattgacttgtgtacttaatctcacagtgccttggattatagatatt

SEQ ID NO: 148331 - DNA, 76 bp, Homo sapiens
gatttcccagggcagttaatttatgtattgacttgtgtacttaatctcacagtgccttggattatagatatttatg

SEQ ID NO: 148332 - DNA, 76 bp, Homo sapiens
ttaatttatgtattgacttgtgtacttaatctcacagtgccttggattatagatatttatggacccgtttcatgtc

SEQ ID NO: 148333 - DNA, 77 bp, Homo sapiens
ttatgtattgacttgtgtacttaatctcacagtgccttggattatagatatttatggacccgtttcatgtccctcag

SEQ ID NO: 148334 - DNA, 77 bp, Homo sapiens
acttgtgtacttaatctcacagtgccttggattatagatatttatggacccgtttcatgtccctcagtcaacagtga

SEQ ID NO: 148335 - DNA, 81 bp, Homo sapiens
ttaatctcacagtgccttggattatagatatttatggacccgtttcatgtccctcagtcaacagtgagctctctgaggaca

SEQ ID NO: 148336 - DNA, 78 bp, Homo sapiens
agtgccttggattatagatatttatggacccgtttcatgtccctcagtcaacagtgagctctctgaggacagggccaa

SEQ ID NO: 148337 - DNA, 82 bp, Homo sapiens
tcatgtccctcagtcaacagtgagctctctgaggacagggccaaatgccttaaacatgttggtatctatgaggtagtctata

SEQ ID NO: 148338 - DNA, 79 bp, Homo sapiens
cctcagtcaacagtgagctctctgaggacagggccaaatgccttaaacatgttggtatctatgaggtagtctataaata

SEQ ID NO: 148339 - DNA, 78 bp, Homo sapiens
agggccaaatgccttaaacatgttggtatctatgaggtagtctataaatagctgctgaatgaatgaattgcaggtggg

SEQ ID NO: 148340 - DNA, 80 bp, Homo sapiens
ttaaacatgttggtatctatgaggtagtctataaatagctgctgaatgaatgaattgcaggtggggagttgaataatgaa

SEQ ID NO: 148341 - DNA, 80 bp, Homo sapiens
tgttggtatctatgaggtagtctataaatagctgctgaatgaatgaattgcaggtggggagttgaataatgaagggacag

SEQ ID NO: 148342 - DNA, 80 bp, Homo sapiens
tatgaggtagtctataaatagctgctgaatgaatgaattgcaggtggggagttgaataatgaagggacaggtgggatgga

SEQ ID NO: 148343 - DNA, 80 bp, Homo sapiens
tgaatgaatgaattgcaggtggggagttgaataatgaagggacaggtgggatggagagcacctaggacagagctgtctaa

SEQ ID NO: 148344 - DNA, 77 bp, Homo sapiens
aatgaattgcaggtggggagttgaataatgaagggacaggtgggatggagagcacctaggacagagctgtctaaaga

SEQ ID NO: 148345 - DNA, 77 bp, Homo sapiens
tggggagttgaataatgaagggacaggtgggatggagagcacctaggacagagctgtctaaagagagtgataacaaa

SEQ ID NO: 148346 - DNA, 79 bp, Homo sapiens
ttgaataatgaagggacaggtgggatggagagcacctaggacagagctgtctaaagagagtgataacaaatcactaata

SEQ ID NO: 148347 - DNA, 79 bp, Homo sapiens
gacaggtgggatggagagcacctaggacagagctgtctaaagagagtgataacaaatcactaatatctttgtaaagtca

SEQ ID NO: 148348 - DNA, 78 bp, Homo sapiens
atggagagcacctaggacagagctgtctaaagagagtgataacaaatcactaatatctttgtaaagtcacatgggacc

SEQ ID NO: 148349 - DNA, 76 bp, Homo sapiens
agcacctaggacagagctgtctaaagagagtgataacaaatcactaatatctttgtaaagtcacatgggacccagg

SEQ ID NO: 148350 - DNA, 78 bp, Homo sapiens
agagctgtctaaagagagtgataacaaatcactaatatctttgtaaagtcacatgggacccagggcgctgggagcata

SEQ ID NO: 148351 - DNA, 79 bp, Homo sapiens
atcactaatatctttgtaaagtcacatgggacccagggcgctgggagcatagccctggcagagtgcttccatgtgggcc

SEQ ID NO: 148352 - DNA, 79 bp, Homo sapiens
tgtaaagtcacatgggacccagggcgctgggagcatagccctggcagagtgcttccatgtgggcctccacccctgtcaa

SEQ ID NO: 148353 - DNA, 77 bp, Homo sapiens
agggcgctgggagcatagccctggcagagtgcttccatgtgggcctccacccctgtcaaggacagggaggtcttcca

SEQ ID NO: 148354 - DNA, 75 bp, Homo sapiens
agcatagccctggcagagtgcttccatgtgggcctccacccctgtcaaggacagggaggtcttccaacaggtagg

SEQ ID NO: 148355 - DNA, 73 bp, Homo sapiens
ctggcagagtgcttccatgtgggcctccacccctgtcaaggacagggaggtcttccaacaggtaggtaagttc

SEQ ID NO: 148356 - DNA, 71 bp, Homo sapiens
cttccatgtgggcctccacccctgtcaaggacagggaggtcttccaacaggtaggtaagttcctggcgtca

SEQ ID NO: 148357 - DNA, 71 bp, Homo sapiens
tgtgggcctccacccctgtcaaggacagggaggtcttccaacaggtaggtaagttcctggcgtcataggta

SEQ ID NO: 148358 - DNA, 74 bp, Homo sapiens
cctgtcaaggacagggaggtcttccaacaggtaggtaagttcctggcgtcataggtagggtatgctgcaagcaa

SEQ ID NO: 148359 - DNA, 73 bp, Homo sapiens
aaggacagggaggtcttccaacaggtaggtaagttcctggcgtcataggtagggtatgctgcaagcaatgatt

SEQ ID NO: 148360 - DNA, 73 bp, Homo sapiens
aggtcttccaacaggtaggtaagttcctggcgtcataggtagggtatgctgcaagcaatgattttcagtgttt

SEQ ID NO: 148361 - DNA, 73 bp, Homo sapiens
aacaggtaggtaagttcctggcgtcataggtagggtatgctgcaagcaatgattttcagtgtttttggcctat

SEQ ID NO: 148362 - DNA, 74 bp, Homo sapiens
taagttcctggcgtcataggtagggtatgctgcaagcaatgattttcagtgtttttggcctattgagaggtttt

SEQ ID NO: 148363 - DNA, 76 bp, Homo sapiens
gtcataggtagggtatgctgcaagcaatgattttcagtgtttttggcctattgagaggtttttgattctgaaccaa

SEQ ID NO: 148364 - DNA, 79 bp, Homo sapiens
gtatgctgcaagcaatgattttcagtgtttttggcctattgagaggtttttgattctgaaccaagcattctctctagaa

SEQ ID NO: 148365 - DNA, 74 bp, Homo sapiens
aagcaatgattttcagtgtttttggcctattgagaggtttttgattctgaaccaagcattctctctagaagtaa

SEQ ID NO: 148366 - DNA, 75 bp, Homo sapiens
tttcagtgtttttggcctattgagaggtttttgattctgaaccaagcattctctctagaagtaacataaatgtca

SEQ ID NO: 148367 - DNA, 78 bp, Homo sapiens
gagaggtttttgattctgaaccaagcattctctctagaagtaacataaatgtcatcttataatgctaagattgtacca

SEQ ID NO: 148368 - DNA, 80 bp, Homo sapiens
ttttgattctgaaccaagcattctctctagaagtaacataaatgtcatcttataatgctaagattgtaccaagtgcagtg

SEQ ID NO: 148369 - DNA, 78 bp, Homo sapiens
caagcattctctctagaagtaacataaatgtcatcttataatgctaagattgtaccaagtgcagtgtgtttaggtaaa

SEQ ID NO: 148370 - DNA, 75 bp, Homo sapiens
ctctctagaagtaacataaatgtcatcttataatgctaagattgtaccaagtgcagtgtgtttaggtaaaaactg

SEQ ID NO: 148371 - DNA, 72 bp, Homo sapiens
aagtaacataaatgtcatcttataatgctaagattgtaccaagtgcagtgtgtttaggtaaaaactggggac

SEQ ID NO: 148372 - DNA, 72 bp, Homo sapiens
aatgtcatcttataatgctaagattgtaccaagtgcagtgtgtttaggtaaaaactggggaccgacataaaa

SEQ ID NO: 148373 - DNA, 72 bp, Homo sapiens
ttataatgctaagattgtaccaagtgcagtgtgtttaggtaaaaactggggaccgacataaaagaactcaca

SEQ ID NO: 148374 - DNA, 74 bp, Homo sapiens
aaaaactggggaccgacataaaagaactcacaactaaggatcttgtaaatatgtgtcattgtgctgctttgatg

SEQ ID NO: 148375 - DNA, 77 bp, Homo sapiens
acataaaagaactcacaactaaggatcttgtaaatatgtgtcattgtgctgctttgatgtttctctcccccacagaa

SEQ ID NO: 148376 - DNA, 77 bp, Homo sapiens
aaagaactcacaactaaggatcttgtaaatatgtgtcattgtgctgctttgatgtttctctcccccacagaacaata

SEQ ID NO: 148377 - DNA, 80 bp, Homo sapiens
taaggatcttgtaaatatgtgtcattgtgctgctttgatgtttctctcccccacagaacaatatgatacatcttcaaaaa

SEQ ID NO: 148378 - DNA, 83 bp, Homo sapiens
atgtgtcattgtgctgctttgatgtttctctcccccacagaacaatatgatacatcttcaaaaactcactcaaattctcagca

SEQ ID NO: 148379 - DNA, 77 bp, Homo sapiens
tgtttctctcccccacagaacaatatgatacatcttcaaaaactcactcaaattctcagcaaggaacgtcatcgtaa

SEQ ID NO: 148380 - DNA, 77 bp, Homo sapiens
cacagaacaatatgatacatcttcaaaaactcactcaaattctcagcaaggaacgtcatcgtaagtgaaatgctttt

SEQ ID NO: 148381 - DNA, 73 bp, Homo sapiens
acatcttcaaaaactcactcaaattctcagcaaggaacgtcatcgtaagtgaaatgctttttgtgtattaaaa

SEQ ID NO: 148382 - DNA, 81 bp, Homo sapiens
tatttacatgctagaaaagttgttagaaatcatttcacattcattcttctctgtgtccctgcccattccagcatgctcgaa

SEQ ID NO: 148383 - DNA, 78 bp, Homo sapiens
tagaaaagttgttagaaatcatttcacattcattcttctctgtgtccctgcccattccagcatgctcgaagacgacct

SEQ ID NO: 148384 - DNA, 81 bp, Homo sapiens
agttgttagaaatcatttcacattcattcttctctgtgtccctgcccattccagcatgctcgaagacgaccttcagctcag

SEQ ID NO: 148385 - DNA, 85 bp, Homo sapiens
aatcatttcacattcattcttctctgtgtccctgcccattccagcatgctcgaagacgaccttcagctcagtgacagtgaggaca

SEQ ID NO: 148386 - DNA, 84 bp, Homo sapiens
attcttctctgtgtccctgcccattccagcatgctcgaagacgaccttcagctcagtgacagtgaggacagtgacagtgaacaa

SEQ ID NO: 148387 - DNA, 83 bp, Homo sapiens
tgtgtccctgcccattccagcatgctcgaagacgaccttcagctcagtgacagtgaggacagtgacagtgaacaagtaagtgt

SEQ ID NO: 148388 - DNA, 85 bp, Homo sapiens
ccattccagcatgctcgaagacgaccttcagctcagtgacagtgaggacagtgacagtgaacaagtaagtgttgcacagcctgta

SEQ ID NO: 148389 - DNA, 84 bp, Homo sapiens
agcatgctcgaagacgaccttcagctcagtgacagtgaggacagtgacagtgaacaagtaagtgttgcacagcctgtaatacca

SEQ ID NO: 148390 - DNA, 80 bp, Homo sapiens
aagacgaccttcagctcagtgacagtgaggacagtgacagtgaacaagtaagtgttgcacagcctgtaataccaggagtc

SEQ ID NO: 148391 - DNA, 78 bp, Homo sapiens
agctcagtgacagtgaggacagtgacagtgaacaagtaagtgttgcacagcctgtaataccaggagtccttttaaata

SEQ ID NO: 148392 - DNA, 76 bp, Homo sapiens
agtgaggacagtgacagtgaacaagtaagtgttgcacagcctgtaataccaggagtccttttaaatacatctaaca

SEQ ID NO: 148393 - DNA, 78 bp, Homo sapiens
acagtgacagtgaacaagtaagtgttgcacagcctgtaataccaggagtccttttaaatacatctaacagatctgagc

SEQ ID NO: 148394 - DNA, 72 bp, Homo sapiens
ctgtaataccaggagtccttttaaatacatctaacagatctgagctgcttgttctaacctgttttttgttct

SEQ ID NO: 148395 - DNA, 71 bp, Homo sapiens
ataccaggagtccttttaaatacatctaacagatctgagctgcttgttctaacctgttttttgttcttttc

SEQ ID NO: 148396 - DNA, 71 bp, Homo sapiens
taacagatctgagctgcttgttctaacctgttttttgttcttttcctggtctttcttccccttattgtgaa

SEQ ID NO: 148397 - DNA, 71 bp, Homo sapiens
atctgagctgcttgttctaacctgttttttgttcttttcctggtctttcttccccttattgtgaatgccta

SEQ ID NO: 148398 - DNA, 66 bp, Homo sapiens
cttgttctaacctgttttttgttcttttcctggtctttcttccccttattgtgaatgcctagaccc

SEQ ID NO: 148399 - DNA, 68 bp, Homo sapiens
tttttgttcttttcctggtctttcttccccttattgtgaatgcctagaccccagagaagcctccctcc

SEQ ID NO: 148400 - DNA, 73 bp, Homo sapiens
gttcttttcctggtctttcttccccttattgtgaatgcctagaccccagagaagcctccctcctcatctgcac

SEQ ID NO: 148401 - DNA, 73 bp, Homo sapiens
tttcttccccttattgtgaatgcctagaccccagagaagcctccctcctcatctgcacctccaaggtaccgtg

SEQ ID NO: 148402 - DNA, 74 bp, Homo sapiens
ttattgtgaatgcctagaccccagagaagcctccctcctcatctgcacctccaaggtaccgtgtgggtttctcc

SEQ ID NO: 148403 - DNA, 74 bp, Homo sapiens
gtgaatgcctagaccccagagaagcctccctcctcatctgcacctccaaggtaccgtgtgggtttctccccatc

SEQ ID NO: 148404 - DNA, 76 bp, Homo sapiens
ccagagaagcctccctcctcatctgcacctccaaggtaccgtgtgggtttctccccatctgtacagaatgtttgca

SEQ ID NO: 148405 - DNA, 72 bp, Homo sapiens
ctccctcctcatctgcacctccaaggtaccgtgtgggtttctccccatctgtacagaatgtttgcaattttt

SEQ ID NO: 148406 - DNA, 71 bp, Homo sapiens
atctgcacctccaaggtaccgtgtgggtttctccccatctgtacagaatgtttgcaattttttaccaaatg

SEQ ID NO: 148407 - DNA, 68 bp, Homo sapiens
tccaaggtaccgtgtgggtttctccccatctgtacagaatgtttgcaattttttaccaaatgggaaaa

SEQ ID NO: 148408 - DNA, 73 bp, Homo sapiens
aaatccaccttgtatcgtgccttctaattttatcttttggttgctttgcagtgctccacagtcccttccagaa

SEQ ID NO: 148409 - DNA, 79 bp, Homo sapiens
tatcgtgccttctaattttatcttttggttgctttgcagtgctccacagtcccttccagaaccagtggcatcagcacat

SEQ ID NO: 148410 - DNA, 81 bp, Homo sapiens
aattttatcttttggttgctttgcagtgctccacagtcccttccagaaccagtggcatcagcacattccagcagtgcagag

SEQ ID NO: 148411 - DNA, 86 bp, Homo sapiens
tatcttttggttgctttgcagtgctccacagtcccttccagaaccagtggcatcagcacattccagcagtgcagagtcagaaagca

SEQ ID NO: 148412 - DNA, 89 bp, Homo sapiens
ttgctttgcagtgctccacagtcccttccagaaccagtggcatcagcacattccagcagtgcagagtcagaaagcaccagtgactcaga

SEQ ID NO: 148413 - DNA, 87 bp, Homo sapiens
tccacagtcccttccagaaccagtggcatcagcacattccagcagtgcagagtcagaaagcaccagtgactcagacagttcctcaga

SEQ ID NO: 148414 - DNA, 88 bp, Homo sapiens
tcccttccagaaccagtggcatcagcacattccagcagtgcagagtcagaaagcaccagtgactcagacagttcctcagactcagaga

SEQ ID NO: 148415 - DNA, 90 bp, Homo sapiens
agtggcatcagcacattccagcagtgcagagtcagaaagcaccagtgactcagacagttcctcagactcagagagcgagagcagttcaag

SEQ ID NO: 148416 - DNA, 90 bp, Homo sapiens
gcacattccagcagtgcagagtcagaaagcaccagtgactcagacagttcctcagactcagagagcgagagcagttcaagtgacagcgaa

SEQ ID NO: 148417 - DNA, 86 bp, Homo sapiens
agcagtgcagagtcagaaagcaccagtgactcagacagttcctcagactcagagagcgagagcagttcaagtgacagcgaagaaaa

SEQ ID NO: 148418 - DNA, 84 bp, Homo sapiens
agagtcagaaagcaccagtgactcagacagttcctcagactcagagagcgagagcagttcaagtgacagcgaagaaaatgagcc

SEQ ID NO: 148419 - DNA, 80 bp, Homo sapiens
accagtgactcagacagttcctcagactcagagagcgagagcagttcaagtgacagcgaagaaaatgagcccctagaaac

SEQ ID NO: 148420 - DNA, 79 bp, Homo sapiens
actcagacagttcctcagactcagagagcgagagcagttcaagtgacagcgaagaaaatgagcccctagaaaccccagc

SEQ ID NO: 148421 - DNA, 77 bp, Homo sapiens
agttcctcagactcagagagcgagagcagttcaagtgacagcgaagaaaatgagcccctagaaaccccagctccgga

SEQ ID NO: 148422 - DNA, 73 bp, Homo sapiens
agagagcgagagcagttcaagtgacagcgaagaaaatgagcccctagaaaccccagctccggaggtaccgtgt

SEQ ID NO: 148423 - DNA, 71 bp, Homo sapiens
cgagagcagttcaagtgacagcgaagaaaatgagcccctagaaaccccagctccggaggtaccgtgttccc

SEQ ID NO: 148424 - DNA, 67 bp, Homo sapiens
aagaaaatgagcccctagaaaccccagctccggaggtaccgtgttccccctcgagatggccacctta

SEQ ID NO: 148425 - DNA, 73 bp, Homo sapiens
ttctttctttccttatttttagcctgagcctccaacaacaaacaaatggcagctggacaactggctgaccaaa

SEQ ID NO: 148426 - DNA, 81 bp, Homo sapiens
ttttagcctgagcctccaacaacaaacaaatggcagctggacaactggctgaccaaagtcagccagccagctgcgccacca

SEQ ID NO: 148427 - DNA, 79 bp, Homo sapiens
agcctccaacaacaaacaaatggcagctggacaactggctgaccaaagtcagccagccagctgcgccaccagagggccc

SEQ ID NO: 148428 - DNA, 81 bp, Homo sapiens
aacaaacaaatggcagctggacaactggctgaccaaagtcagccagccagctgcgccaccagagggccccaggagcacaga

SEQ ID NO: 148429 - DNA, 79 bp, Homo sapiens
agctggacaactggctgaccaaagtcagccagccagctgcgccaccagagggccccaggagcacagagcccccacggcg

SEQ ID NO: 148430 - DNA, 78 bp, Homo sapiens
aactggctgaccaaagtcagccagccagctgcgccaccagagggccccaggagcacagagcccccacggcggcaccca

SEQ ID NO: 148431 - DNA, 77 bp, Homo sapiens
accaaagtcagccagccagctgcgccaccagagggccccaggagcacagagcccccacggcggcacccagagagtaa

SEQ ID NO: 148432 - DNA, 79 bp, Homo sapiens
agccagctgcgccaccagagggccccaggagcacagagcccccacggcggcacccagagagtaagggcagcagcgacag

SEQ ID NO: 148433 - DNA, 77 bp, Homo sapiens
ccaccagagggccccaggagcacagagcccccacggcggcacccagagagtaagggcagcagcgacagtgccacgag

SEQ ID NO: 148434 - DNA, 82 bp, Homo sapiens
gccccaggagcacagagcccccacggcggcacccagagagtaagggcagcagcgacagtgccacgagtcaggagcattctga

SEQ ID NO: 148435 - DNA, 79 bp, Homo sapiens
cccacggcggcacccagagagtaagggcagcagcgacagtgccacgagtcaggagcattctgaatccaaagatcctccc

SEQ ID NO: 148436 - DNA, 77 bp, Homo sapiens
acccagagagtaagggcagcagcgacagtgccacgagtcaggagcattctgaatccaaagatcctccccctaaaagc

SEQ ID NO: 148437 - DNA, 78 bp, Homo sapiens
agtaagggcagcagcgacagtgccacgagtcaggagcattctgaatccaaagatcctccccctaaaagctccagcaaa

SEQ ID NO: 148438 - DNA, 74 bp, Homo sapiens
agcgacagtgccacgagtcaggagcattctgaatccaaagatcctccccctaaaagctccagcaaagccccccg

SEQ ID NO: 148439 - DNA, 72 bp, Homo sapiens
agtgccacgagtcaggagcattctgaatccaaagatcctccccctaaaagctccagcaaagccccccgggcc

SEQ ID NO: 148440 - DNA, 68 bp, Homo sapiens
aggagcattctgaatccaaagatcctccccctaaaagctccagcaaagccccccgggccccacccgaa

SEQ ID NO: 148441 - DNA, 66 bp, Homo sapiens
attctgaatccaaagatcctccccctaaaagctccagcaaagccccccgggccccacccgaagccc

SEQ ID NO: 148442 - DNA, 64 bp, Homo sapiens
aatccaaagatcctccccctaaaagctccagcaaagccccccgggccccacccgaagcccccca

SEQ ID NO: 148443 - DNA, 62 bp, Homo sapiens
aaagatcctccccctaaaagctccagcaaagccccccgggccccacccgaagccccccaccc

SEQ ID NO: 148444 - DNA, 66 bp, Homo sapiens
taaaagctccagcaaagccccccgggccccacccgaagccccccaccccggaaagaggagctgtca

SEQ ID NO: 148445 - DNA, 67 bp, Homo sapiens
tccagcaaagccccccgggccccacccgaagccccccaccccggaaagaggagctgtcagaagtctc

SEQ ID NO: 148446 - DNA, 63 bp, Homo sapiens
aaagccccccgggccccacccgaagccccccaccccggaaagaggagctgtcagaagtctccg

SEQ ID NO: 148447 - DNA, 68 bp, Homo sapiens
ccccgggccccacccgaagccccccaccccggaaagaggagctgtcagaagtctccggcacagcagga

SEQ ID NO: 148448 - DNA, 69 bp, Homo sapiens
ccgggccccacccgaagccccccaccccggaaagaggagctgtcagaagtctccggcacagcaggagcc

SEQ ID NO: 148449 - DNA, 71 bp, Homo sapiens
aaagaggagctgtcagaagtctccggcacagcaggagcccccacaaaggcaaaccgttggaaccaaacaac

SEQ ID NO: 148450 - DNA, 69 bp, Homo sapiens
ctgtcagaagtctccggcacagcaggagcccccacaaaggcaaaccgttggaaccaaacaacccaaaaa

SEQ ID NO: 148451 - DNA, 68 bp, Homo sapiens
tctccggcacagcaggagcccccacaaaggcaaaccgttggaaccaaacaacccaaaaaacctgtcaa

SEQ ID NO: 148452 - DNA, 65 bp, Homo sapiens
aaaggcaaaccgttggaaccaaacaacccaaaaaacctgtcaaggcctctgcccgggcaggttca

SEQ ID NO: 148453 - DNA, 64 bp, Homo sapiens
aaaccgttggaaccaaacaacccaaaaaacctgtcaaggcctctgcccgggcaggttcacggac

SEQ ID NO: 148454 - DNA, 69 bp, Homo sapiens
aaaaacctgtcaaggcctctgcccgggcaggttcacggaccagcctgcagggggaaagggagccagggc

SEQ ID NO: 148455 - DNA, 72 bp, Homo sapiens
tcaaggcctctgcccgggcaggttcacggaccagcctgcagggggaaagggagccagggcttcttccctatg

SEQ ID NO: 148456 - DNA, 72 bp, Homo sapiens
tgcccgggcaggttcacggaccagcctgcagggggaaagggagccagggcttcttccctatggctcccgaga

SEQ ID NO: 148457 - DNA, 70 bp, Homo sapiens
aggttcacggaccagcctgcagggggaaagggagccagggcttcttccctatggctcccgagaccagact

SEQ ID NO: 148458 - DNA, 71 bp, Homo sapiens
accagcctgcagggggaaagggagccagggcttcttccctatggctcccgagaccagacttccaaagacaa

SEQ ID NO: 148459 - DNA, 70 bp, Homo sapiens
ggggaaagggagccagggcttcttccctatggctcccgagaccagacttccaaagacaagcccaaggtga

SEQ ID NO: 148460 - DNA, 71 bp, Homo sapiens
agccagggcttcttccctatggctcccgagaccagacttccaaagacaagcccaaggtgaagacgaaagga

SEQ ID NO: 148461 - DNA, 69 bp, Homo sapiens
cttcttccctatggctcccgagaccagacttccaaagacaagcccaaggtgaagacgaaaggacggccc

SEQ ID NO: 148462 - DNA, 68 bp, Homo sapiens
cctatggctcccgagaccagacttccaaagacaagcccaaggtgaagacgaaaggacggccccgggcc

SEQ ID NO: 148463 - DNA, 70 bp, Homo sapiens
agaccagacttccaaagacaagcccaaggtgaagacgaaaggacggccccgggccgcagcaagcaacgaa

SEQ ID NO: 148464 - DNA, 71 bp, Homo sapiens
acaagcccaaggtgaagacgaaaggacggccccgggccgcagcaagcaacgaacccaagccagcagtgccc

SEQ ID NO: 148465 - DNA, 71 bp, Homo sapiens
aagacgaaaggacggccccgggccgcagcaagcaacgaacccaagccagcagtgcccccctccagtgagaa

SEQ ID NO: 148466 - DNA, 71 bp, Homo sapiens
aaaggacggccccgggccgcagcaagcaacgaacccaagccagcagtgcccccctccagtgagaagaagaa

SEQ ID NO: 148467 - DNA, 76 bp, Homo sapiens
ccgggccgcagcaagcaacgaacccaagccagcagtgcccccctccagtgagaagaagaagcacaagagctccctc

SEQ ID NO: 148468 - DNA, 75 bp, Homo sapiens
agcaagcaacgaacccaagccagcagtgcccccctccagtgagaagaagaagcacaagagctccctccctgcccc

SEQ ID NO: 148469 - DNA, 77 bp, Homo sapiens
caagccagcagtgcccccctccagtgagaagaagaagcacaagagctccctccctgccccctctaaggctctctcag

SEQ ID NO: 148470 - DNA, 75 bp, Homo sapiens
agtgcccccctccagtgagaagaagaagcacaagagctccctccctgccccctctaaggctctctcaggcccaga

SEQ ID NO: 148471 - DNA, 75 bp, Homo sapiens
tccagtgagaagaagaagcacaagagctccctccctgccccctctaaggctctctcaggcccagaacccgcgaag

SEQ ID NO: 148472 - DNA, 75 bp, Homo sapiens
agcacaagagctccctccctgccccctctaaggctctctcaggcccagaacccgcgaaggacaatgtggaggaca

SEQ ID NO: 148473 - DNA, 75 bp, Homo sapiens
ctctaaggctctctcaggcccagaacccgcgaaggacaatgtggaggacaggacccctgagcactttgctcttgt

SEQ ID NO: 148474 - DNA, 74 bp, Homo sapiens
aggctctctcaggcccagaacccgcgaaggacaatgtggaggacaggacccctgagcactttgctcttgttccc

SEQ ID NO: 148475 - DNA, 74 bp, Homo sapiens
cgaaggacaatgtggaggacaggacccctgagcactttgctcttgttcccctgactgagagccagggcccaccc

SEQ ID NO: 148476 - DNA, 75 bp, Homo sapiens
acaatgtggaggacaggacccctgagcactttgctcttgttcccctgactgagagccagggcccaccccacagtg

SEQ ID NO: 148477 - DNA, 78 bp, Homo sapiens
ggacccctgagcactttgctcttgttcccctgactgagagccagggcccaccccacagtggcagcggcagcaggacta

SEQ ID NO: 148478 - DNA, 81 bp, Homo sapiens
ctgagcactttgctcttgttcccctgactgagagccagggcccaccccacagtggcagcggcagcaggactagtggctgcc

SEQ ID NO: 148479 - DNA, 79 bp, Homo sapiens
tcttgttcccctgactgagagccagggcccaccccacagtggcagcggcagcaggactagtggctgccgccaagccgtg

SEQ ID NO: 148480 - DNA, 80 bp, Homo sapiens
ctgactgagagccagggcccaccccacagtggcagcggcagcaggactagtggctgccgccaagccgtggtggtccagga

SEQ ID NO: 148481 - DNA, 78 bp, Homo sapiens
agagccagggcccaccccacagtggcagcggcagcaggactagtggctgccgccaagccgtggtggtccaggaggaca

SEQ ID NO: 148482 - DNA, 79 bp, Homo sapiens
accccacagtggcagcggcagcaggactagtggctgccgccaagccgtggtggtccaggaggacagccgcaaagacaga

SEQ ID NO: 148483 - DNA, 80 bp, Homo sapiens
gcagcggcagcaggactagtggctgccgccaagccgtggtggtccaggaggacagccgcaaagacagactcccattgcct

SEQ ID NO: 148484 - DNA, 78 bp, Homo sapiens
agcaggactagtggctgccgccaagccgtggtggtccaggaggacagccgcaaagacagactcccattgcctttgaga

SEQ ID NO: 148485 - DNA, 78 bp, Homo sapiens
tagtggctgccgccaagccgtggtggtccaggaggacagccgcaaagacagactcccattgcctttgagagacaccaa

SEQ ID NO: 148486 - DNA, 78 bp, Homo sapiens
ccaagccgtggtggtccaggaggacagccgcaaagacagactcccattgcctttgagagacaccaagctgctctcacc

SEQ ID NO: 148487 - DNA, 81 bp, Homo sapiens
tggtccaggaggacagccgcaaagacagactcccattgcctttgagagacaccaagctgctctcaccgctcagggacactc

SEQ ID NO: 148488 - DNA, 79 bp, Homo sapiens
aggaggacagccgcaaagacagactcccattgcctttgagagacaccaagctgctctcaccgctcagggacactcctcc

SEQ ID NO: 148489 - DNA, 78 bp, Homo sapiens
aagacagactcccattgcctttgagagacaccaagctgctctcaccgctcagggacactcctcccccacaaagcttga

SEQ ID NO: 148490 - DNA, 81 bp, Homo sapiens
tcccattgcctttgagagacaccaagctgctctcaccgctcagggacactcctcccccacaaagcttgatggtgaagatca

SEQ ID NO: 148491 - DNA, 79 bp, Homo sapiens
tttgagagacaccaagctgctctcaccgctcagggacactcctcccccacaaagcttgatggtgaagatcaccctagac

SEQ ID NO: 148492 - DNA, 79 bp, Homo sapiens
accaagctgctctcaccgctcagggacactcctcccccacaaagcttgatggtgaagatcaccctagacctgctctctc

SEQ ID NO: 148493 - DNA, 77 bp, Homo sapiens
tctcaccgctcagggacactcctcccccacaaagcttgatggtgaagatcaccctagacctgctctctcggataccc

SEQ ID NO: 148494 - DNA, 74 bp, Homo sapiens
agggacactcctcccccacaaagcttgatggtgaagatcaccctagacctgctctctcggataccccagcctcc

SEQ ID NO: 148495 - DNA, 73 bp, Homo sapiens
tcctcccccacaaagcttgatggtgaagatcaccctagacctgctctctcggataccccagcctcccgggaag

SEQ ID NO: 148496 - DNA, 73 bp, Homo sapiens
aaagcttgatggtgaagatcaccctagacctgctctctcggataccccagcctcccgggaaggggagccgcca

SEQ ID NO: 148497 - DNA, 72 bp, Homo sapiens
atggtgaagatcaccctagacctgctctctcggataccccagcctcccgggaaggggagccgccagaggaaa

SEQ ID NO: 148498 - DNA, 71 bp, Homo sapiens
accctagacctgctctctcggataccccagcctcccgggaaggggagccgccagaggaaagcagaagataa

SEQ ID NO: 148499 - DNA, 72 bp, Homo sapiens
acctgctctctcggataccccagcctcccgggaaggggagccgccagaggaaagcagaagataaacagccgc

SEQ ID NO: 148500 - DNA, 70 bp, Homo sapiens
ataccccagcctcccgggaaggggagccgccagaggaaagcagaagataaacagccgcccgcagggaaga

SEQ ID NO: 148501 - DNA, 75 bp, Homo sapiens
ctcccgggaaggggagccgccagaggaaagcagaagataaacagccgcccgcagggaagaagcacagctctgaga

SEQ ID NO: 148502 - DNA, 78 bp, Homo sapiens
aaggggagccgccagaggaaagcagaagataaacagccgcccgcagggaagaagcacagctctgagaagaggagctca

SEQ ID NO: 148503 - DNA, 82 bp, Homo sapiens
cagaggaaagcagaagataaacagccgcccgcagggaagaagcacagctctgagaagaggagctcagacagctcaagcaagt

SEQ ID NO: 148504 - DNA, 80 bp, Homo sapiens
ataaacagccgcccgcagggaagaagcacagctctgagaagaggagctcagacagctcaagcaagttggccaaaaagaga

SEQ ID NO: 148505 - DNA, 80 bp, Homo sapiens
ccgcagggaagaagcacagctctgagaagaggagctcagacagctcaagcaagttggccaaaaagagaaaggtgagtgtg

SEQ ID NO: 148506 - DNA, 79 bp, Homo sapiens
aagaagcacagctctgagaagaggagctcagacagctcaagcaagttggccaaaaagagaaaggtgagtgtggggagac

SEQ ID NO: 148507 - DNA, 80 bp, Homo sapiens
tctgagaagaggagctcagacagctcaagcaagttggccaaaaagagaaaggtgagtgtggggagactgccctgactcca

SEQ ID NO: 148508 - DNA, 78 bp, Homo sapiens
ctgtacaattatgttggtaataatttgctttgctgattatactgtaatagggtgaagcagaaagagactgtgataaca

SEQ ID NO: 148509 - DNA, 77 bp, Homo sapiens
gttggtaataatttgctttgctgattatactgtaatagggtgaagcagaaagagactgtgataacaagaaaatcaga

SEQ ID NO: 148510 - DNA, 78 bp, Homo sapiens
ataatttgctttgctgattatactgtaatagggtgaagcagaaagagactgtgataacaagaaaatcagactggagaa

SEQ ID NO: 148511 - DNA, 78 bp, Homo sapiens
ttgctgattatactgtaatagggtgaagcagaaagagactgtgataacaagaaaatcagactggagaaggaaatcaaa

SEQ ID NO: 148512 - DNA, 79 bp, Homo sapiens
tactgtaatagggtgaagcagaaagagactgtgataacaagaaaatcagactggagaaggaaatcaaatcacagtcatc

SEQ ID NO: 148513 - DNA, 80 bp, Homo sapiens
aagcagaaagagactgtgataacaagaaaatcagactggagaaggaaatcaaatcacagtcatcttcatcttcatcctcc

SEQ ID NO: 148514 - DNA, 79 bp, Homo sapiens
agactgtgataacaagaaaatcagactggagaaggaaatcaaatcacagtcatcttcatcttcatcctcccacaaagaa

SEQ ID NO: 148515 - DNA, 78 bp, Homo sapiens
taacaagaaaatcagactggagaaggaaatcaaatcacagtcatcttcatcttcatcctcccacaaagaatcttctaa

SEQ ID NO: 148516 - DNA, 76 bp, Homo sapiens
aaaatcagactggagaaggaaatcaaatcacagtcatcttcatcttcatcctcccacaaagaatcttctaaaacaa

SEQ ID NO: 148517 - DNA, 77 bp, Homo sapiens
gaaggaaatcaaatcacagtcatcttcatcttcatcctcccacaaagaatcttctaaaacaaagtgagtatagagat

SEQ ID NO: 148518 - DNA, 78 bp, Homo sapiens
aaatcaaatcacagtcatcttcatcttcatcctcccacaaagaatcttctaaaacaaagtgagtatagagattagcaa

SEQ ID NO: 148519 - DNA, 76 bp, Homo sapiens
catcttcatcttcatcctcccacaaagaatcttctaaaacaaagtgagtatagagattagcaaccacctaatctac

SEQ ID NO: 148520 - DNA, 74 bp, Homo sapiens
cttgatgtgtactttgcctcctcttagttttacgtgatgtttcactccaggccctccaggccctcctcacagtc

SEQ ID NO: 148521 - DNA, 72 bp, Homo sapiens
tttgcctcctcttagttttacgtgatgtttcactccaggccctccaggccctcctcacagtcctcaaagaag

SEQ ID NO: 148522 - DNA, 72 bp, Homo sapiens
cctcttagttttacgtgatgtttcactccaggccctccaggccctcctcacagtcctcaaagaaggaaatgc

SEQ ID NO: 148523 - DNA, 73 bp, Homo sapiens
ttacgtgatgtttcactccaggccctccaggccctcctcacagtcctcaaagaaggaaatgctccccccgcca

SEQ ID NO: 148524 - DNA, 71 bp, Homo sapiens
tttcactccaggccctccaggccctcctcacagtcctcaaagaaggaaatgctccccccgccacccgtgtc

SEQ ID NO: 148525 - DNA, 71 bp, Homo sapiens
tccaggccctcctcacagtcctcaaagaaggaaatgctccccccgccacccgtgtcctcgtcctcccagaa

SEQ ID NO: 148526 - DNA, 72 bp, Homo sapiens
ctcctcacagtcctcaaagaaggaaatgctccccccgccacccgtgtcctcgtcctcccagaagccagccaa

SEQ ID NO: 148527 - DNA, 72 bp, Homo sapiens
ctcaaagaaggaaatgctccccccgccacccgtgtcctcgtcctcccagaagccagccaagcctgcacttaa

SEQ ID NO: 148528 - DNA, 72 bp, Homo sapiens
aggaaatgctccccccgccacccgtgtcctcgtcctcccagaagccagccaagcctgcacttaagaggtcaa

SEQ ID NO: 148529 - DNA, 73 bp, Homo sapiens
ccccgccacccgtgtcctcgtcctcccagaagccagccaagcctgcacttaagaggtcaaggcgggaagcaga

SEQ ID NO: 148530 - DNA, 74 bp, Homo sapiens
acccgtgtcctcgtcctcccagaagccagccaagcctgcacttaagaggtcaaggcgggaagcagacacctgtg

SEQ ID NO: 148531 - DNA, 76 bp, Homo sapiens
tcgtcctcccagaagccagccaagcctgcacttaagaggtcaaggcgggaagcagacacctgtggccaggaccctc

SEQ ID NO: 148532 - DNA, 73 bp, Homo sapiens
agaagccagccaagcctgcacttaagaggtcaaggcgggaagcagacacctgtggccaggaccctcccaaaag

SEQ ID NO: 148533 - DNA, 74 bp, Homo sapiens
aagcctgcacttaagaggtcaaggcgggaagcagacacctgtggccaggaccctcccaaaagtgccagcagtac

SEQ ID NO: 148534 - DNA, 74 bp, Homo sapiens
acttaagaggtcaaggcgggaagcagacacctgtggccaggaccctcccaaaagtgccagcagtaccaagagca

SEQ ID NO: 148535 - DNA, 75 bp, Homo sapiens
gtcaaggcgggaagcagacacctgtggccaggaccctcccaaaagtgccagcagtaccaagagcaaccacaaaga

SEQ ID NO: 148536 - DNA, 75 bp, Homo sapiens
aagcagacacctgtggccaggaccctcccaaaagtgccagcagtaccaagagcaaccacaaagactcttccattc

SEQ ID NO: 148537 - DNA, 76 bp, Homo sapiens
tggccaggaccctcccaaaagtgccagcagtaccaagagcaaccacaaagactcttccattcccaagcagagaaga

SEQ ID NO: 148538 - DNA, 74 bp, Homo sapiens
accctcccaaaagtgccagcagtaccaagagcaaccacaaagactcttccattcccaagcagagaagagtagag

SEQ ID NO: 148539 - DNA, 73 bp, Homo sapiens
aaaagtgccagcagtaccaagagcaaccacaaagactcttccattcccaagcagagaagagtagaggggaagg

SEQ ID NO: 148540 - DNA, 74 bp, Homo sapiens
agtaccaagagcaaccacaaagactcttccattcccaagcagagaagagtagaggggaagggctccagaagctc

SEQ ID NO: 148541 - DNA, 74 bp, Homo sapiens
aaccacaaagactcttccattcccaagcagagaagagtagaggggaagggctccagaagctcctcggagcacaa

SEQ ID NO: 148542 - DNA, 76 bp, Homo sapiens
aaagactcttccattcccaagcagagaagagtagaggggaagggctccagaagctcctcggagcacaaggtgagca

SEQ ID NO: 148543 - DNA, 76 bp, Homo sapiens
ttcccaagcagagaagagtagaggggaagggctccagaagctcctcggagcacaaggtgagcaggggcggcggtca

SEQ ID NO: 148544 - DNA, 75 bp, Homo sapiens
agaagagtagaggggaagggctccagaagctcctcggagcacaaggtgagcaggggcggcggtcactctgtaaga

SEQ ID NO: 148545 - DNA, 67 bp, Homo sapiens
attttttttttgaagggttcttccggagatactgcaaatccttttccagtgccttctttgccaaatg

SEQ ID NO: 148546 - DNA, 70 bp, Homo sapiens
tttgaagggttcttccggagatactgcaaatccttttccagtgccttctttgccaaatggtaactctaaa

SEQ ID NO: 148547 - DNA, 70 bp, Homo sapiens
gttcttccggagatactgcaaatccttttccagtgccttctttgccaaatggtaactctaaaccagggaa

SEQ ID NO: 148548 - DNA, 72 bp, Homo sapiens
agatactgcaaatccttttccagtgccttctttgccaaatggtaactctaaaccagggaagcctcaagtgaa

SEQ ID NO: 148549 - DNA, 69 bp, Homo sapiens
aaatccttttccagtgccttctttgccaaatggtaactctaaaccagggaagcctcaagtgaagtttga

SEQ ID NO: 148550 - DNA, 71 bp, Homo sapiens
agtgccttctttgccaaatggtaactctaaaccagggaagcctcaagtgaagtttgacaagtaagacttca

SEQ ID NO: 148551 - DNA, 72 bp, Homo sapiens
ctttgccaaatggtaactctaaaccagggaagcctcaagtgaagtttgacaagtaagacttcagatgatttc

SEQ ID NO: 148552 - DNA, 73 bp, Homo sapiens
taactctaaaccagggaagcctcaagtgaagtttgacaagtaagacttcagatgatttcttcttgctctgttt

SEQ ID NO: 148553 - DNA, 71 bp, Homo sapiens
aaaccagggaagcctcaagtgaagtttgacaagtaagacttcagatgatttcttcttgctctgttttgttt

SEQ ID NO: 148554 - DNA, 72 bp, Homo sapiens
tcttatcttgccctagtctagtaatttttggctcatatgacctgtccctggtttttcctctttttcagacaa

SEQ ID NO: 148555 - DNA, 71 bp, Homo sapiens
ctagtctagtaatttttggctcatatgacctgtccctggtttttcctctttttcagacaacaagcagacct

SEQ ID NO: 148556 - DNA, 74 bp, Homo sapiens
ctagtaatttttggctcatatgacctgtccctggtttttcctctttttcagacaacaagcagaccttcacatga

SEQ ID NO: 148557 - DNA, 75 bp, Homo sapiens
ttggctcatatgacctgtccctggtttttcctctttttcagacaacaagcagaccttcacatgagggaggcaaaa

SEQ ID NO: 148558 - DNA, 71 bp, Homo sapiens
acctgtccctggtttttcctctttttcagacaacaagcagaccttcacatgagggaggcaaaaaagatgaa

SEQ ID NO: 148559 - DNA, 75 bp, Homo sapiens
ttttcctctttttcagacaacaagcagaccttcacatgagggaggcaaaaaagatgaagcagaaagcagagttaa

SEQ ID NO: 148560 - DNA, 76 bp, Homo sapiens
ttttcagacaacaagcagaccttcacatgagggaggcaaaaaagatgaagcagaaagcagagttaatggttagtat

SEQ ID NO: 148561 - DNA, 75 bp, Homo sapiens
caagcagaccttcacatgagggaggcaaaaaagatgaagcagaaagcagagttaatggttagtattggcccttta

SEQ ID NO: 148562 - DNA, 73 bp, Homo sapiens
accttcacatgagggaggcaaaaaagatgaagcagaaagcagagttaatggttagtattggccctttatctct

SEQ ID NO: 148563 - DNA, 72 bp, Homo sapiens
ggaggcaaaaaagatgaagcagaaagcagagttaatggttagtattggccctttatctctttggtagaatgt

SEQ ID NO: 148564 - DNA, 74 bp, Homo sapiens
aagatgaagcagaaagcagagttaatggttagtattggccctttatctctttggtagaatgttttctgatagta

SEQ ID NO: 148565 - DNA, 72 bp, Homo sapiens
gaagcagaaagcagagttaatggttagtattggccctttatctctttggtagaatgttttctgatagtaaaa

SEQ ID NO: 148566 - DNA, 73 bp, Homo sapiens
taaatcaaggtttgtcttcagcctaacaatgaccatgttcttctcctgcagacggacagggttggaaaggctt

SEQ ID NO: 148567 - DNA, 72 bp, Homo sapiens
tttgtcttcagcctaacaatgaccatgttcttctcctgcagacggacagggttggaaaggcttttaagtacc

SEQ ID NO: 148568 - DNA, 71 bp, Homo sapiens
taacaatgaccatgttcttctcctgcagacggacagggttggaaaggcttttaagtacctggaagccgtct

SEQ ID NO: 148569 - DNA, 70 bp, Homo sapiens
atgttcttctcctgcagacggacagggttggaaaggcttttaagtacctggaagccgtcttgtccttcat

SEQ ID NO: 148570 - DNA, 71 bp, Homo sapiens
ctgcagacggacagggttggaaaggcttttaagtacctggaagccgtcttgtccttcattgagtgcggaat

SEQ ID NO: 148571 - DNA, 71 bp, Homo sapiens
acagggttggaaaggcttttaagtacctggaagccgtcttgtccttcattgagtgcggaattgccacagag

SEQ ID NO: 148572 - DNA, 73 bp, Homo sapiens
gttggaaaggcttttaagtacctggaagccgtcttgtccttcattgagtgcggaattgccacagagtctgaaa

SEQ ID NO: 148573 - DNA, 76 bp, Homo sapiens
cttttaagtacctggaagccgtcttgtccttcattgagtgcggaattgccacagagtctgaaagccagtcatccaa

SEQ ID NO: 148574 - DNA, 80 bp, Homo sapiens
aagccgtcttgtccttcattgagtgcggaattgccacagagtctgaaagccagtcatccaagtcagcttactctgtctac

SEQ ID NO: 148575 - DNA, 83 bp, Homo sapiens
tgtccttcattgagtgcggaattgccacagagtctgaaagccagtcatccaagtcagcttactctgtctactcagaaactgta

SEQ ID NO: 148576 - DNA, 84 bp, Homo sapiens
ttgagtgcggaattgccacagagtctgaaagccagtcatccaagtcagcttactctgtctactcagaaactgtagatctcatta

SEQ ID NO: 148577 - DNA, 80 bp, Homo sapiens
aattgccacagagtctgaaagccagtcatccaagtcagcttactctgtctactcagaaactgtagatctcattaagtaag

SEQ ID NO: 148578 - DNA, 80 bp, Homo sapiens
agtctgaaagccagtcatccaagtcagcttactctgtctactcagaaactgtagatctcattaagtaagtgccgagtcat

SEQ ID NO: 148579 - DNA, 80 bp, Homo sapiens
aagccagtcatccaagtcagcttactctgtctactcagaaactgtagatctcattaagtaagtgccgagtcattgtgctt

SEQ ID NO: 148580 - DNA, 77 bp, Homo sapiens
aagtcagcttactctgtctactcagaaactgtagatctcattaagtaagtgccgagtcattgtgctttcctcttaag

SEQ ID NO: 148581 - DNA, 71 bp, Homo sapiens
gtaagttgtatttgtgtctgcctttgtttaaaacctgatgtacttttatattttcctatagattcataatg

SEQ ID NO: 148582 - DNA, 72 bp, Homo sapiens
ttgtgtctgcctttgtttaaaacctgatgtacttttatattttcctatagattcataatgtcattaaaatcc

SEQ ID NO: 148583 - DNA, 72 bp, Homo sapiens
ctgcctttgtttaaaacctgatgtacttttatattttcctatagattcataatgtcattaaaatccttctca

SEQ ID NO: 148584 - DNA, 77 bp, Homo sapiens
aaacctgatgtacttttatattttcctatagattcataatgtcattaaaatccttctcagatgccacagcgccaaca

SEQ ID NO: 148585 - DNA, 77 bp, Homo sapiens
gtacttttatattttcctatagattcataatgtcattaaaatccttctcagatgccacagcgccaacacaagagaaa

SEQ ID NO: 148586 - DNA, 80 bp, Homo sapiens
tatattttcctatagattcataatgtcattaaaatccttctcagatgccacagcgccaacacaagagaaaatatttgctg

SEQ ID NO: 148587 - DNA, 81 bp, Homo sapiens
tatagattcataatgtcattaaaatccttctcagatgccacagcgccaacacaagagaaaatatttgctgttttatggtgc

SEQ ID NO: 148588 - DNA, 77 bp, Homo sapiens
taatgtcattaaaatccttctcagatgccacagcgccaacacaagagaaaatatttgctgttttatggtgcgtattt

SEQ ID NO: 148589 - DNA, 74 bp, Homo sapiens
aaaatccttctcagatgccacagcgccaacacaagagaaaatatttgctgttttatggtgcgtattttcctttg

SEQ ID NO: 148590 - DNA, 74 bp, Homo sapiens
atgccacagcgccaacacaagagaaaatatttgctgttttatggtgcgtattttcctttgtctaaatagtacta

SEQ ID NO: 148591 - DNA, 71 bp, Homo sapiens
cagcgccaacacaagagaaaatatttgctgttttatggtgcgtattttcctttgtctaaatagtactaaat

SEQ ID NO: 148592 - DNA, 70 bp, Homo sapiens
gagaaaatatttgctgttttatggtgcgtattttcctttgtctaaatagtactaaatttgtttttgcatc

SEQ ID NO: 148593 - DNA, 83 bp, Homo sapiens
tgtagtatgatagtcacgtgcagtttcacttctgtctttgttcatagcatgcgttgccagtccattttgaacatggcgatgtt

SEQ ID NO: 148594 - DNA, 81 bp, Homo sapiens
tagtcacgtgcagtttcacttctgtctttgttcatagcatgcgttgccagtccattttgaacatggcgatgtttcgttgta

SEQ ID NO: 148595 - DNA, 78 bp, Homo sapiens
gtgcagtttcacttctgtctttgttcatagcatgcgttgccagtccattttgaacatggcgatgtttcgttgtaaaaa

SEQ ID NO: 148596 - DNA, 78 bp, Homo sapiens
ctgtctttgttcatagcatgcgttgccagtccattttgaacatggcgatgtttcgttgtaaaaaagacatagcaataa

SEQ ID NO: 148597 - DNA, 74 bp, Homo sapiens
atgcgttgccagtccattttgaacatggcgatgtttcgttgtaaaaaagacatagcaataaagtattctcgtac

SEQ ID NO: 148598 - DNA, 72 bp, Homo sapiens
ccagtccattttgaacatggcgatgtttcgttgtaaaaaagacatagcaataaagtattctcgtactcttaa

SEQ ID NO: 148599 - DNA, 72 bp, Homo sapiens
catggcgatgtttcgttgtaaaaaagacatagcaataaagtattctcgtactcttaataaacacttcgagag

SEQ ID NO: 148600 - DNA, 70 bp, Homo sapiens
cgatgtttcgttgtaaaaaagacatagcaataaagtattctcgtactcttaataaacacttcgagagttc

SEQ ID NO: 148601 - DNA, 70 bp, Homo sapiens
aaaaagacatagcaataaagtattctcgtactcttaataaacacttcgagagttcttccaaagtcgccca

SEQ ID NO: 148602 - DNA, 71 bp, Homo sapiens
agcaataaagtattctcgtactcttaataaacacttcgagagttcttccaaagtcgcccaggcaccttctc

SEQ ID NO: 148603 - DNA, 73 bp, Homo sapiens
taaagtattctcgtactcttaataaacacttcgagagttcttccaaagtcgcccaggcaccttctccatgcat

SEQ ID NO: 148604 - DNA, 74 bp, Homo sapiens
ctcttaataaacacttcgagagttcttccaaagtcgcccaggcaccttctccatgcattgcaaggtaactctaa

SEQ ID NO: 148605 - DNA, 75 bp, Homo sapiens
taaacacttcgagagttcttccaaagtcgcccaggcaccttctccatgcattgcaaggtaactctaagtctaata

SEQ ID NO: 148606 - DNA, 73 bp, Homo sapiens
agagttcttccaaagtcgcccaggcaccttctccatgcattgcaaggtaactctaagtctaatataaataatt

SEQ ID NO: 148607 - DNA, 74 bp, Homo sapiens
ttccaaagtcgcccaggcaccttctccatgcattgcaaggtaactctaagtctaatataaataatttccagaat

SEQ ID NO: 148608 - DNA, 77 bp, Homo sapiens
actgactgatcagttatctcttctcttccacctcccagaagcacaggcacaccatcccctctttccccaatgccttc

SEQ ID NO: 148609 - DNA, 77 bp, Homo sapiens
atcagttatctcttctcttccacctcccagaagcacaggcacaccatcccctctttccccaatgccttctcctgcca

SEQ ID NO: 148610 - DNA, 76 bp, Homo sapiens
tcttctcttccacctcccagaagcacaggcacaccatcccctctttccccaatgccttctcctgccagctccgtag

SEQ ID NO: 148611 - DNA, 75 bp, Homo sapiens
tcccagaagcacaggcacaccatcccctctttccccaatgccttctcctgccagctccgtagggtcccagtcaag

SEQ ID NO: 148612 - DNA, 77 bp, Homo sapiens
aagcacaggcacaccatcccctctttccccaatgccttctcctgccagctccgtagggtcccagtcaagtgctggca

SEQ ID NO: 148613 - DNA, 74 bp, Homo sapiens
acaccatcccctctttccccaatgccttctcctgccagctccgtagggtcccagtcaagtgctggcagtgtggg

SEQ ID NO: 148614 - DNA, 75 bp, Homo sapiens
cctctttccccaatgccttctcctgccagctccgtagggtcccagtcaagtgctggcagtgtggggagcagtggg

SEQ ID NO: 148615 - DNA, 80 bp, Homo sapiens
aatgccttctcctgccagctccgtagggtcccagtcaagtgctggcagtgtggggagcagtggggtggctgccactatca

SEQ ID NO: 148616 - DNA, 81 bp, Homo sapiens
ctgccagctccgtagggtcccagtcaagtgctggcagtgtggggagcagtggggtggctgccactatcagcaccccagtca

SEQ ID NO: 148617 - DNA, 81 bp, Homo sapiens
tagggtcccagtcaagtgctggcagtgtggggagcagtggggtggctgccactatcagcaccccagtcaccatccagaata

SEQ ID NO: 148618 - DNA, 85 bp, Homo sapiens
tcaagtgctggcagtgtggggagcagtggggtggctgccactatcagcaccccagtcaccatccagaatatgacatcttcctatg

SEQ ID NO: 148619 - DNA, 86 bp, Homo sapiens
gcagtgtggggagcagtggggtggctgccactatcagcaccccagtcaccatccagaatatgacatcttcctatgtcaccatcaca

SEQ ID NO: 148620 - DNA, 86 bp, Homo sapiens
gagcagtggggtggctgccactatcagcaccccagtcaccatccagaatatgacatcttcctatgtcaccatcacatcccatgttc

SEQ ID NO: 148621 - DNA, 83 bp, Homo sapiens
gggtggctgccactatcagcaccccagtcaccatccagaatatgacatcttcctatgtcaccatcacatcccatgttcttacc

SEQ ID NO: 148622 - DNA, 81 bp, Homo sapiens
actatcagcaccccagtcaccatccagaatatgacatcttcctatgtcaccatcacatcccatgttcttaccgcctttgac

SEQ ID NO: 148623 - DNA, 78 bp, Homo sapiens
cccagtcaccatccagaatatgacatcttcctatgtcaccatcacatcccatgttcttaccgcctttgacctttggga

SEQ ID NO: 148624 - DNA, 77 bp, Homo sapiens
atccagaatatgacatcttcctatgtcaccatcacatcccatgttcttaccgcctttgacctttgggaacaggccga

SEQ ID NO: 148625 - DNA, 75 bp, Homo sapiens
aatatgacatcttcctatgtcaccatcacatcccatgttcttaccgcctttgacctttgggaacaggccgaggcc

SEQ ID NO: 148626 - DNA, 74 bp, Homo sapiens
ctatgtcaccatcacatcccatgttcttaccgcctttgacctttgggaacaggccgaggccctcacgaggaaga

SEQ ID NO: 148627 - DNA, 70 bp, Homo sapiens
atcacatcccatgttcttaccgcctttgacctttgggaacaggccgaggccctcacgaggaagaataaag

SEQ ID NO: 148628 - DNA, 67 bp, Homo sapiens
atgttcttaccgcctttgacctttgggaacaggccgaggccctcacgaggaagaataaaggtaaata

SEQ ID NO: 148629 - DNA, 66 bp, Homo sapiens
cttaccgcctttgacctttgggaacaggccgaggccctcacgaggaagaataaaggtaaataaatg

SEQ ID NO: 148630 - DNA, 67 bp, Homo sapiens
ctttgggaacaggccgaggccctcacgaggaagaataaaggtaaataaatggctttgtggtggtaat

SEQ ID NO: 148631 - DNA, 77 bp, Homo sapiens
tttgttttttttgcagaattctttgctcggctcagcacaaatgtgtgcaccttggccctcaacagcagtttggtgga

SEQ ID NO: 148632 - DNA, 83 bp, Homo sapiens
ttgcagaattctttgctcggctcagcacaaatgtgtgcaccttggccctcaacagcagtttggtggacctggtgcactataca

SEQ ID NO: 148633 - DNA, 80 bp, Homo sapiens
aattctttgctcggctcagcacaaatgtgtgcaccttggccctcaacagcagtttggtggacctggtgcactatacacga

SEQ ID NO: 148634 - DNA, 78 bp, Homo sapiens
acaaatgtgtgcaccttggccctcaacagcagtttggtggacctggtgcactatacacgacagggttttcagcagcta

SEQ ID NO: 148635 - DNA, 75 bp, Homo sapiens
accttggccctcaacagcagtttggtggacctggtgcactatacacgacagggttttcagcagctacaagaatta

SEQ ID NO: 148636 - DNA, 73 bp, Homo sapiens
aacagcagtttggtggacctggtgcactatacacgacagggttttcagcagctacaagaattaaccaaaacac

SEQ ID NO: 148637 - DNA, 71 bp, Homo sapiens
agtttggtggacctggtgcactatacacgacagggttttcagcagctacaagaattaaccaaaacacctta

SEQ ID NO: 148638 - DNA, 72 bp, Homo sapiens
acctggtgcactatacacgacagggttttcagcagctacaagaattaaccaaaacaccttaatggagcccca

SEQ ID NO: 148639 - DNA, 72 bp, Homo sapiens
tatacacgacagggttttcagcagctacaagaattaaccaaaacaccttaatggagccccaggttgattcaa

SEQ ID NO: 148640 - DNA, 71 bp, Homo sapiens
gttttcagcagctacaagaattaaccaaaacaccttaatggagccccaggttgattcaatgccttgggaac

SEQ ID NO: 148641 - DNA, 68 bp, Homo sapiens
agctacaagaattaaccaaaacaccttaatggagccccaggttgattcaatgccttgggaactatttt

SEQ ID NO: 148642 - DNA, 69 bp, Homo sapiens
aagaattaaccaaaacaccttaatggagccccaggttgattcaatgccttgggaactatttttgcacat

SEQ ID NO: 148643 - DNA, 71 bp, Homo sapiens
aaaacaccttaatggagccccaggttgattcaatgccttgggaactatttttgcacattggaagcctcaaa

SEQ ID NO: 148644 - DNA, 75 bp, Homo sapiens
taatggagccccaggttgattcaatgccttgggaactatttttgcacattggaagcctcaaaaacagtccagaca

SEQ ID NO: 148645 - DNA, 75 bp, Homo sapiens
aggttgattcaatgccttgggaactatttttgcacattggaagcctcaaaaacagtccagacatttgtttcatca

SEQ ID NO: 148646 - DNA, 74 bp, Homo sapiens
aatgccttgggaactatttttgcacattggaagcctcaaaaacagtccagacatttgtttcatcaggacaccaa

SEQ ID NO: 148647 - DNA, 72 bp, Homo sapiens
actatttttgcacattggaagcctcaaaaacagtccagacatttgtttcatcaggacaccaaactctaaaaa

SEQ ID NO: 148648 - DNA, 74 bp, Homo sapiens
tttgcacattggaagcctcaaaaacagtccagacatttgtttcatcaggacaccaaactctaaaaaagaagcac

SEQ ID NO: 148649 - DNA, 73 bp, Homo sapiens
aagcctcaaaaacagtccagacatttgtttcatcaggacaccaaactctaaaaaagaagcaccacgagatggc

SEQ ID NO: 148650 - DNA, 73 bp, Homo sapiens
aaacagtccagacatttgtttcatcaggacaccaaactctaaaaaagaagcaccacgagatggccaggacatt

SEQ ID NO: 148651 - DNA, 72 bp, Homo sapiens
atttgtttcatcaggacaccaaactctaaaaaagaagcaccacgagatggccaggacatttgtccacttaaa

SEQ ID NO: 148652 - DNA, 74 bp, Homo sapiens
aaactctaaaaaagaagcaccacgagatggccaggacatttgtccacttaaactctcaacaacagtgtgatcat

SEQ ID NO: 148653 - DNA, 76 bp, Homo sapiens
aaaaagaagcaccacgagatggccaggacatttgtccacttaaactctcaacaacagtgtgatcattggttggaca

SEQ ID NO: 148654 - DNA, 79 bp, Homo sapiens
acgagatggccaggacatttgtccacttaaactctcaacaacagtgtgatcattggttggacactgtggttatgcagaa

SEQ ID NO: 148655 - DNA, 81 bp, Homo sapiens
atttgtccacttaaactctcaacaacagtgtgatcattggttggacactgtggttatgcagaagcagagatgaggaggctg

SEQ ID NO: 148656 - DNA, 84 bp, Homo sapiens
ttaaactctcaacaacagtgtgatcattggttggacactgtggttatgcagaagcagagatgaggaggctggccccagagatga

SEQ ID NO: 148657 - DNA, 83 bp, Homo sapiens
aacaacagtgtgatcattggttggacactgtggttatgcagaagcagagatgaggaggctggccccagagatgatcttgccct

SEQ ID NO: 148658 - DNA, 81 bp, Homo sapiens
tcattggttggacactgtggttatgcagaagcagagatgaggaggctggccccagagatgatcttgcccttcctaactaaa

SEQ ID NO: 148659 - DNA, 80 bp, Homo sapiens
gttatgcagaagcagagatgaggaggctggccccagagatgatcttgcccttcctaactaaaggacagaagtgcaattta

SEQ ID NO: 148660 - DNA, 77 bp, Homo sapiens
cagagatgaggaggctggccccagagatgatcttgcccttcctaactaaaggacagaagtgcaatttagcttaaatg

SEQ ID NO: 148661 - DNA, 72 bp, Homo sapiens
tcttgcccttcctaactaaaggacagaagtgcaatttagcttaaatgggtgtatgaatggtctagaaacatt

SEQ ID NO: 148662 - DNA, 71 bp, Homo sapiens
ccttcctaactaaaggacagaagtgcaatttagcttaaatgggtgtatgaatggtctagaaacatttctat

SEQ ID NO: 148663 - DNA, 69 bp, Homo sapiens
ctaaaggacagaagtgcaatttagcttaaatgggtgtatgaatggtctagaaacatttctatttttttt

SEQ ID NO: 148664 - DNA, 69 bp, Homo sapiens
attttttttttaaaccagcaggatacaagttgcaaatgaaatgaggagaaacagtttcaactctgaaag

SEQ ID NO: 148665 - DNA, 73 bp, Homo sapiens
ttttaaaccagcaggatacaagttgcaaatgaaatgaggagaaacagtttcaactctgaaagtgaatttcacg

SEQ ID NO: 148666 - DNA, 79 bp, Homo sapiens
ttgcaaatgaaatgaggagaaacagtttcaactctgaaagtgaatttcacgtcatctcagtagccacgctagtccattc

SEQ ID NO: 148667 - DNA, 76 bp, Homo sapiens
aaatgaggagaaacagtttcaactctgaaagtgaatttcacgtcatctcagtagccacgctagtccattcccagaa

SEQ ID NO: 148668 - DNA, 73 bp, Homo sapiens
aaacagtttcaactctgaaagtgaatttcacgtcatctcagtagccacgctagtccattcccagaaggaaatt

SEQ ID NO: 148669 - DNA, 72 bp, Homo sapiens
ttcaactctgaaagtgaatttcacgtcatctcagtagccacgctagtccattcccagaaggaaatttttttt

SEQ ID NO: 148670 - DNA, 70 bp, Homo sapiens
ttcttttgagttttgggagaaatatttgtttagtaacttctaatggccatctgtaaaccataagtaatga

SEQ ID NO: 148671 - DNA, 70 bp, Homo sapiens
gttttgggagaaatatttgtttagtaacttctaatggccatctgtaaaccataagtaatgaaggactcca

SEQ ID NO: 148672 - DNA, 72 bp, Homo sapiens
ggagaaatatttgtttagtaacttctaatggccatctgtaaaccataagtaatgaaggactccactgtgccc

SEQ ID NO: 148673 - DNA, 75 bp, Homo sapiens
ttagtaacttctaatggccatctgtaaaccataagtaatgaaggactccactgtgccccactttctgccaatgaa

SEQ ID NO: 148674 - DNA, 78 bp, Homo sapiens
taatggccatctgtaaaccataagtaatgaaggactccactgtgccccactttctgccaatgaacagtggcttgataa

SEQ ID NO: 148675 - DNA, 76 bp, Homo sapiens
atctgtaaaccataagtaatgaaggactccactgtgccccactttctgccaatgaacagtggcttgataataccaa

SEQ ID NO: 148676 - DNA, 76 bp, Homo sapiens
taagtaatgaaggactccactgtgccccactttctgccaatgaacagtggcttgataataccaagtattgttgtaa

SEQ ID NO: 148677 - DNA, 73 bp, Homo sapiens
actgtgccccactttctgccaatgaacagtggcttgataataccaagtattgttgtaatttataaaattgaag

SEQ ID NO: 148678 - DNA, 72 bp, Homo sapiens
ccactttctgccaatgaacagtggcttgataataccaagtattgttgtaatttataaaattgaaggcaaccc

SEQ ID NO: 148679 - DNA, 71 bp, Homo sapiens
aatgaacagtggcttgataataccaagtattgttgtaatttataaaattgaaggcaacccccgctcctgcc

SEQ ID NO: 148680 - DNA, 69 bp, Homo sapiens
agtggcttgataataccaagtattgttgtaatttataaaattgaaggcaacccccgctcctgccgcccc

SEQ ID NO: 148681 - DNA, 68 bp, Homo sapiens
taataccaagtattgttgtaatttataaaattgaaggcaacccccgctcctgccgcccccaatctccc

SEQ ID NO: 148682 - DNA, 71 bp, Homo sapiens
tattgttgtaatttataaaattgaaggcaacccccgctcctgccgcccccaatctccccattgcctagagc

SEQ ID NO: 148683 - DNA, 74 bp, Homo sapiens
tttataaaattgaaggcaacccccgctcctgccgcccccaatctccccattgcctagagcgctgcacattgacc

SEQ ID NO: 148684 - DNA, 77 bp, Homo sapiens
ttgaaggcaacccccgctcctgccgcccccaatctccccattgcctagagcgctgcacattgaccccagctctgact

SEQ ID NO: 148685 - DNA, 82 bp, Homo sapiens
cgctcctgccgcccccaatctccccattgcctagagcgctgcacattgaccccagctctgacttctcattactgtgctgaaa

SEQ ID NO: 148686 - DNA, 83 bp, Homo sapiens
tcctgccgcccccaatctccccattgcctagagcgctgcacattgaccccagctctgacttctcattactgtgctgaaagtca

SEQ ID NO: 148687 - DNA, 81 bp, Homo sapiens
cccccaatctccccattgcctagagcgctgcacattgaccccagctctgacttctcattactgtgctgaaagtcagcccac

SEQ ID NO: 148688 - DNA, 82 bp, Homo sapiens
aatctccccattgcctagagcgctgcacattgaccccagctctgacttctcattactgtgctgaaagtcagcccacgtcgga

SEQ ID NO: 148689 - DNA, 83 bp, Homo sapiens
ttgcctagagcgctgcacattgaccccagctctgacttctcattactgtgctgaaagtcagcccacgtcggagcggtgaggag

SEQ ID NO: 148690 - DNA, 84 bp, Homo sapiens
tagagcgctgcacattgaccccagctctgacttctcattactgtgctgaaagtcagcccacgtcggagcggtgaggaggagcca

SEQ ID NO: 148691 - DNA, 83 bp, Homo sapiens
cacattgaccccagctctgacttctcattactgtgctgaaagtcagcccacgtcggagcggtgaggaggagccacagcacatg

SEQ ID NO: 148692 - DNA, 82 bp, Homo sapiens
acattgaccccagctctgacttctcattactgtgctgaaagtcagcccacgtcggagcggtgaggaggagccacagcacatg

SEQ ID NO: 148693 - DNA, 82 bp, Homo sapiens
tctgacttctcattactgtgctgaaagtcagcccacgtcggagcggtgaggaggagccacagcacatggggtgccacctcga

SEQ ID NO: 148694 - DNA, 79 bp, Homo sapiens
agtcagcccacgtcggagcggtgaggaggagccacagcacatggggtgccacctcgaggtctgcacaggaggacttggc

SEQ ID NO: 148695 - DNA, 81 bp, Homo sapiens
tcggagcggtgaggaggagccacagcacatggggtgccacctcgaggtctgcacaggaggacttggcgctgccatttccta

SEQ ID NO: 148696 - DNA, 77 bp, Homo sapiens
acagcacatggggtgccacctcgaggtctgcacaggaggacttggcgctgccatttcctacccctgccatttcccac

SEQ ID NO: 148697 - DNA, 76 bp, Homo sapiens
ggtgccacctcgaggtctgcacaggaggacttggcgctgccatttcctacccctgccatttcccacccctgcttca

SEQ ID NO: 148698 - DNA, 73 bp, Homo sapiens
caggaggacttggcgctgccatttcctacccctgccatttcccacccctgcttcagcgaaagggactctctaa

SEQ ID NO: 148699 - DNA, 73 bp, Homo sapiens
acttggcgctgccatttcctacccctgccatttcccacccctgcttcagcgaaagggactctctaacagggca

SEQ ID NO: 148700 - DNA, 72 bp, Homo sapiens
atttcctacccctgccatttcccacccctgcttcagcgaaagggactctctaacagggcagtcactgttgac

SEQ ID NO: 148701 - DNA, 75 bp, Homo sapiens
cctgccatttcccacccctgcttcagcgaaagggactctctaacagggcagtcactgttgactctattctgaatt

SEQ ID NO: 148702 - DNA, 74 bp, Homo sapiens
atttcccacccctgcttcagcgaaagggactctctaacagggcagtcactgttgactctattctgaatttcctc

SEQ ID NO: 148703 - DNA, 73 bp, Homo sapiens
cttcagcgaaagggactctctaacagggcagtcactgttgactctattctgaatttcctcccttggggaagaa

SEQ ID NO: 148704 - DNA, 70 bp, Homo sapiens
aaagggactctctaacagggcagtcactgttgactctattctgaatttcctcccttggggaagaagggaa

SEQ ID NO: 148705 - DNA, 72 bp, Homo sapiens
tctaacagggcagtcactgttgactctattctgaatttcctcccttggggaagaagggaaccaacatttata

SEQ ID NO: 148706 - DNA, 71 bp, Homo sapiens
agtcactgttgactctattctgaatttcctcccttggggaagaagggaaccaacatttatacctgaccaga

SEQ ID NO: 148707 - DNA, 71 bp, Homo sapiens
ttgactctattctgaatttcctcccttggggaagaagggaaccaacatttatacctgaccagatggctaaa

SEQ ID NO: 148708 - DNA, 69 bp, Homo sapiens
tgaatttcctcccttggggaagaagggaaccaacatttatacctgaccagatggctaaagtgcttttaa

SEQ ID NO: 148709 - DNA, 66 bp, Homo sapiens
ccttggggaagaagggaaccaacatttatacctgaccagatggctaaagtgcttttaaagttttgt

SEQ ID NO: 148710 - DNA, 69 bp, Homo sapiens
gaaccaacatttatacctgaccagatggctaaagtgcttttaaagttttgtttaagtagagctggaatt

SEQ ID NO: 148711 - DNA, 74 bp, Homo sapiens
ttatacctgaccagatggctaaagtgcttttaaagttttgtttaagtagagctggaatttgaggtgctgatctg

SEQ ID NO: 148712 - DNA, 73 bp, Homo sapiens
atggctaaagtgcttttaaagttttgtttaagtagagctggaatttgaggtgctgatctgtggtctacagtta

SEQ ID NO: 148713 - DNA, 73 bp, Homo sapiens
agtgcttttaaagttttgtttaagtagagctggaatttgaggtgctgatctgtggtctacagttatgtggtaa

SEQ ID NO: 148714 - DNA, 76 bp, Homo sapiens
taaagttttgtttaagtagagctggaatttgaggtgctgatctgtggtctacagttatgtggtaactcatgttgtc

SEQ ID NO: 148715 - DNA, 79 bp, Homo sapiens
aggtgctgatctgtggtctacagttatgtggtaactcatgttgtccagccaactcagagtttcgtcagtgaacaagaaa

SEQ ID NO: 148716 - DNA, 79 bp, Homo sapiens
tctgtggtctacagttatgtggtaactcatgttgtccagccaactcagagtttcgtcagtgaacaagaaacatgaaatc

SEQ ID NO: 148717 - DNA, 78 bp, Homo sapiens
acagttatgtggtaactcatgttgtccagccaactcagagtttcgtcagtgaacaagaaacatgaaatctgcttctta

SEQ ID NO: 148718 - DNA, 79 bp, Homo sapiens
taactcatgttgtccagccaactcagagtttcgtcagtgaacaagaaacatgaaatctgcttcttagagaggctatatt

SEQ ID NO: 148719 - DNA, 79 bp, Homo sapiens
ttgtccagccaactcagagtttcgtcagtgaacaagaaacatgaaatctgcttcttagagaggctatatttttctgcta

SEQ ID NO: 148720 - DNA, 76 bp, Homo sapiens
aactcagagtttcgtcagtgaacaagaaacatgaaatctgcttcttagagaggctatatttttctgctacaaatat

SEQ ID NO: 148721 - DNA, 75 bp, Homo sapiens
tttcgtcagtgaacaagaaacatgaaatctgcttcttagagaggctatatttttctgctacaaatattttatatt

SEQ ID NO: 148722 - DNA, 75 bp, Homo sapiens
agaaacatgaaatctgcttcttagagaggctatatttttctgctacaaatattttatatttatagcaaaactaga

SEQ ID NO: 148723 - DNA, 73 bp, Homo sapiens
gcttcttagagaggctatatttttctgctacaaatattttatatttatagcaaaactagactttcagagtcct

SEQ ID NO: 148724 - DNA, 74 bp, Homo sapiens
gaggctatatttttctgctacaaatattttatatttatagcaaaactagactttcagagtccttgattgtctag

SEQ ID NO: 148725 - DNA, 70 bp, Homo sapiens
aaaactagactttcagagtccttgattgtctaggggaagttaactccctgagaggatgtagagatttggg

SEQ ID NO: 148726 - DNA, 73 bp, Homo sapiens
tttcagagtccttgattgtctaggggaagttaactccctgagaggatgtagagatttggggtggttgattaga

SEQ ID NO: 148727 - DNA, 69 bp, Homo sapiens
attgtctaggggaagttaactccctgagaggatgtagagatttggggtggttgattagacttttgaaaa

SEQ ID NO: 148728 - DNA, 75 bp, Homo sapiens
aggatgtagagatttggggtggttgattagacttttgaaaaactcatcaccacatgccttcactccagagtgttc

SEQ ID NO: 148729 - DNA, 79 bp, Homo sapiens
tggttgattagacttttgaaaaactcatcaccacatgccttcactccagagtgttctcagctagatttgatttggttga

SEQ ID NO: 148730 - DNA, 77 bp, Homo sapiens
aaaaactcatcaccacatgccttcactccagagtgttctcagctagatttgatttggttgaggaggaactgtggccc

SEQ ID NO: 148731 - DNA, 75 bp, Homo sapiens
acatgccttcactccagagtgttctcagctagatttgatttggttgaggaggaactgtggccctccgtaagttat

SEQ ID NO: 148732 - DNA, 77 bp, Homo sapiens
tgttctcagctagatttgatttggttgaggaggaactgtggccctccgtaagttattgccatagtgtatgcattaaa

SEQ ID NO: 148733 - DNA, 74 bp, Homo sapiens
tagatttgatttggttgaggaggaactgtggccctccgtaagttattgccatagtgtatgcattaaaccaagtc

SEQ ID NO: 148734 - DNA, 71 bp, Homo sapiens
atttggttgaggaggaactgtggccctccgtaagttattgccatagtgtatgcattaaaccaagtccattt

SEQ ID NO: 148735 - DNA, 74 bp, Homo sapiens
gaactgtggccctccgtaagttattgccatagtgtatgcattaaaccaagtccattttgaatgacctaaaatga

SEQ ID NO: 148736 - DNA, 75 bp, Homo sapiens
gtaagttattgccatagtgtatgcattaaaccaagtccattttgaatgacctaaaatgaagtaacacaatcagaa

SEQ ID NO: 148737 - DNA, 77 bp, Homo sapiens
tagtgtatgcattaaaccaagtccattttgaatgacctaaaatgaagtaacacaatcagaaatcccatgtgcccata

SEQ ID NO: 148738 - DNA, 75 bp, Homo sapiens
ttaaaccaagtccattttgaatgacctaaaatgaagtaacacaatcagaaatcccatgtgcccataagcacagat

SEQ ID NO: 148739 - DNA, 74 bp, Homo sapiens
aagtccattttgaatgacctaaaatgaagtaacacaatcagaaatcccatgtgcccataagcacagatttttct

SEQ ID NO: 148740 - DNA, 76 bp, Homo sapiens
tttgaatgacctaaaatgaagtaacacaatcagaaatcccatgtgcccataagcacagatttttctttttcattga

SEQ ID NO: 148741 - DNA, 72 bp, Homo sapiens
atgaagtaacacaatcagaaatcccatgtgcccataagcacagatttttctttttcattgaaactttaaagg

SEQ ID NO: 148742 - DNA, 72 bp, Homo sapiens
cacaatcagaaatcccatgtgcccataagcacagatttttctttttcattgaaactttaaaggttattattg

SEQ ID NO: 148743 - DNA, 70 bp, Homo sapiens
cagaaatcccatgtgcccataagcacagatttttctttttcattgaaactttaaaggttattattggaaa

SEQ ID NO: 148744 - DNA, 69 bp, Homo sapiens
gtgcccataagcacagatttttctttttcattgaaactttaaaggttattattggaaacattactttga

SEQ ID NO: 148745 - DNA, 66 bp, Homo sapiens
ctttttcattgaaactttaaaggttattattggaaacattactttgagtgcagtgtttttaaaagc

SEQ ID NO: 148746 - DNA, 67 bp, Homo sapiens
cattgaaactttaaaggttattattggaaacattactttgagtgcagtgtttttaaaagccaattct

SEQ ID NO: 148747 - DNA, 65 bp, Homo sapiens
aaaggttattattggaaacattactttgagtgcagtgtttttaaaagccaattcttttttatccc

SEQ ID NO: 148748 - DNA, 67 bp, Homo sapiens
tggaaacattactttgagtgcagtgtttttaaaagccaattcttttttatcccttttagaagtagaa

SEQ ID NO: 148749 - DNA, 69 bp, Homo sapiens
cattactttgagtgcagtgtttttaaaagccaattcttttttatcccttttagaagtagaatttgcaca

SEQ ID NO: 148750 - DNA, 68 bp, Homo sapiens
gtgcagtgtttttaaaagccaattcttttttatcccttttagaagtagaatttgcacacttactacaa

SEQ ID NO: 148751 - DNA, 71 bp, Homo sapiens
aaagccaattcttttttatcccttttagaagtagaatttgcacacttactacaattgaggagtgtcatctc

SEQ ID NO: 148752 - DNA, 72 bp, Homo sapiens
caattcttttttatcccttttagaagtagaatttgcacacttactacaattgaggagtgtcatctctataac

SEQ ID NO: 148753 - DNA, 73 bp, Homo sapiens
ttatcccttttagaagtagaatttgcacacttactacaattgaggagtgtcatctctataactttttctccgc

SEQ ID NO: 148754 - DNA, 73 bp, Homo sapiens
aagtagaatttgcacacttactacaattgaggagtgtcatctctataactttttctccgcctttgtcccattc

SEQ ID NO: 148755 - DNA, 75 bp, Homo sapiens
tttgcacacttactacaattgaggagtgtcatctctataactttttctccgcctttgtcccattctgcccctgta

SEQ ID NO: 148756 - DNA, 74 bp, Homo sapiens
ttactacaattgaggagtgtcatctctataactttttctccgcctttgtcccattctgcccctgtacatgtttc

SEQ ID NO: 148757 - DNA, 72 bp, Homo sapiens
tttttctccgcctttgtcccattctgcccctgtacatgtttcctaccaagcatgtttcacattttcctatta

SEQ ID NO: 148758 - DNA, 73 bp, Homo sapiens
ctttgtcccattctgcccctgtacatgtttcctaccaagcatgtttcacattttcctattagtggaggaggga

SEQ ID NO: 148759 - DNA, 74 bp, Homo sapiens
tctgcccctgtacatgtttcctaccaagcatgtttcacattttcctattagtggaggagggagaaccatattta

SEQ ID NO: 148760 - DNA, 73 bp, Homo sapiens
ctgtacatgtttcctaccaagcatgtttcacattttcctattagtggaggagggagaaccatatttatttata

SEQ ID NO: 148761 - DNA, 75 bp, Homo sapiens
tcctaccaagcatgtttcacattttcctattagtggaggagggagaaccatatttatttataatgaagacatcta

SEQ ID NO: 148762 - DNA, 75 bp, Homo sapiens
gcatgtttcacattttcctattagtggaggagggagaaccatatttatttataatgaagacatctaagatcccta

SEQ ID NO: 148763 - DNA, 77 bp, Homo sapiens
attagtggaggagggagaaccatatttatttataatgaagacatctaagatccctatgatgaatgcaggaactctct

SEQ ID NO: 148764 - DNA, 77 bp, Homo sapiens
ggagaaccatatttatttataatgaagacatctaagatccctatgatgaatgcaggaactctcttggtagtttgtaa

SEQ ID NO: 148765 - DNA, 78 bp, Homo sapiens
ataatgaagacatctaagatccctatgatgaatgcaggaactctcttggtagtttgtaaatacacaaagggatgtgtc

SEQ ID NO: 148766 - DNA, 77 bp, Homo sapiens
acatctaagatccctatgatgaatgcaggaactctcttggtagtttgtaaatacacaaagggatgtgtcgagggatg

SEQ ID NO: 148767 - DNA, 80 bp, Homo sapiens
tatgatgaatgcaggaactctcttggtagtttgtaaatacacaaagggatgtgtcgagggatgggagcgatgcttatctc

SEQ ID NO: 148768 - DNA, 78 bp, Homo sapiens
aatgcaggaactctcttggtagtttgtaaatacacaaagggatgtgtcgagggatgggagcgatgcttatctctcaca

SEQ ID NO: 148769 - DNA, 78 bp, Homo sapiens
actctcttggtagtttgtaaatacacaaagggatgtgtcgagggatgggagcgatgcttatctctcacagtgtgagtg

SEQ ID NO: 148770 - DNA, 81 bp, Homo sapiens
tagtttgtaaatacacaaagggatgtgtcgagggatgggagcgatgcttatctctcacagtgtgagtggtctgtgtgaggc

SEQ ID NO: 148771 - DNA, 80 bp, Homo sapiens
acaaagggatgtgtcgagggatgggagcgatgcttatctctcacagtgtgagtggtctgtgtgaggctgttccttcagtt

SEQ ID NO: 148772 - DNA, 83 bp, Homo sapiens
atgtgtcgagggatgggagcgatgcttatctctcacagtgtgagtggtctgtgtgaggctgttccttcagtttcttctccaga

SEQ ID NO: 148773 - DNA, 81 bp, Homo sapiens
atgggagcgatgcttatctctcacagtgtgagtggtctgtgtgaggctgttccttcagtttcttctccagactgttctttg

SEQ ID NO: 148774 - DNA, 81 bp, Homo sapiens
tgcttatctctcacagtgtgagtggtctgtgtgaggctgttccttcagtttcttctccagactgttctttggttgtcacta

SEQ ID NO: 148775 - DNA, 75 bp, Homo sapiens
agtggtctgtgtgaggctgttccttcagtttcttctccagactgttctttggttgtcactaagtcagaggtctgg

SEQ ID NO: 148776 - DNA, 73 bp, Homo sapiens
ccttcagtttcttctccagactgttctttggttgtcactaagtcagaggtctggtccctcatgtttaggtgaa

SEQ ID NO: 148777 - DNA, 77 bp, Homo sapiens
agactgttctttggttgtcactaagtcagaggtctggtccctcatgtttaggtgaaagccagagaatgacagctgta

SEQ ID NO: 148778 - DNA, 80 bp, Homo sapiens
ctttggttgtcactaagtcagaggtctggtccctcatgtttaggtgaaagccagagaatgacagctgtagtcatatctga

SEQ ID NO: 148779 - DNA, 87 bp, Homo sapiens
tctggtccctcatgtttaggtgaaagccagagaatgacagctgtagtcatatctgagcataagaccttgatgtgtgattcctgatga

SEQ ID NO: 148780 - DNA, 82 bp, Homo sapiens
atgtttaggtgaaagccagagaatgacagctgtagtcatatctgagcataagaccttgatgtgtgattcctgatgaccggtt

SEQ ID NO: 148781 - DNA, 83 bp, Homo sapiens
agaatgacagctgtagtcatatctgagcataagaccttgatgtgtgattcctgatgaccggtttcatttattcatgttataaa

SEQ ID NO: 148782 - DNA, 82 bp, Homo sapiens
acagctgtagtcatatctgagcataagaccttgatgtgtgattcctgatgaccggtttcatttattcatgttataaagcaaa

SEQ ID NO: 148783 - DNA, 79 bp, Homo sapiens
atatctgagcataagaccttgatgtgtgattcctgatgaccggtttcatttattcatgttataaagcaaagccctggtc

SEQ ID NO: 148784 - DNA, 73 bp, Homo sapiens
ataagaccttgatgtgtgattcctgatgaccggtttcatttattcatgttataaagcaaagccctggtccttt

SEQ ID NO: 148785 - DNA, 73 bp, Homo sapiens
ttgatgtgtgattcctgatgaccggtttcatttattcatgttataaagcaaagccctggtcctttttaaacta

SEQ ID NO: 148786 - DNA, 68 bp, Homo sapiens
attcctgatgaccggtttcatttattcatgttataaagcaaagccctggtcctttttaaactactagt

SEQ ID NO: 148787 - DNA, 66 bp, Homo sapiens
ttcatgttataaagcaaagccctggtcctttttaaactactagttttaaaaacctgtgttaaatga

SEQ ID NO: 148788 - DNA, 63 bp, Homo sapiens
aaagcaaagccctggtcctttttaaactactagttttaaaaacctgtgttaaatgaacagtaa

SEQ ID NO: 148789 - DNA, 67 bp, Homo sapiens
ttaaactactagttttaaaaacctgtgttaaatgaacagtaattgcctggtaggtttggtgtgtgtg

SEQ ID NO: 148790 - DNA, 77 bp, Homo sapiens
ttaaatgaacagtaattgcctggtaggtttggtgtgtgtgtagcattgtgtgtccatctgttatatgtaaaggacaa

SEQ ID NO: 148791 - DNA, 77 bp, Homo sapiens
agtaattgcctggtaggtttggtgtgtgtgtagcattgtgtgtccatctgttatatgtaaaggacaaggcaccagaa

SEQ ID NO: 148792 - DNA, 78 bp, Homo sapiens
taggtttggtgtgtgtgtagcattgtgtgtccatctgttatatgtaaaggacaaggcaccagaatcaggctttatttc

SEQ ID NO: 148793 - DNA, 81 bp, Homo sapiens
gtgtgtgtagcattgtgtgtccatctgttatatgtaaaggacaaggcaccagaatcaggctttatttcgatattgaagatg

SEQ ID NO: 148794 - DNA, 79 bp, Homo sapiens
tagcattgtgtgtccatctgttatatgtaaaggacaaggcaccagaatcaggctttatttcgatattgaagatgttatt

SEQ ID NO: 148795 - DNA, 76 bp, Homo sapiens
gtccatctgttatatgtaaaggacaaggcaccagaatcaggctttatttcgatattgaagatgttatttaacatct

SEQ ID NO: 148796 - DNA, 73 bp, Homo sapiens
gttatatgtaaaggacaaggcaccagaatcaggctttatttcgatattgaagatgttatttaacatctttctt

SEQ ID NO: 148797 - DNA, 70 bp, Homo sapiens
aaaggacaaggcaccagaatcaggctttatttcgatattgaagatgttatttaacatctttcttttttcc

SEQ ID NO: 148798 - DNA, 70 bp, Homo sapiens
ccagaatcaggctttatttcgatattgaagatgttatttaacatctttcttttttccttactcccttagc

SEQ ID NO: 148799 - DNA, 69 bp, Homo sapiens
caggctttatttcgatattgaagatgttatttaacatctttcttttttccttactcccttagccatccc

SEQ ID NO: 148800 - DNA, 67 bp, Homo sapiens
ttcgatattgaagatgttatttaacatctttcttttttccttactcccttagccatcccctcccctt

SEQ ID NO: 148801 - DNA, 66 bp, Homo sapiens
atgttatttaacatctttcttttttccttactcccttagccatcccctccccttttgtcctatcat

SEQ ID NO: 148802 - DNA, 66 bp, Homo sapiens
atctttcttttttccttactcccttagccatcccctccccttttgtcctatcattccctagaacaa

SEQ ID NO: 148803 - DNA, 69 bp, Homo sapiens
tttccttactcccttagccatcccctccccttttgtcctatcattccctagaacaagccacctgtcaat

SEQ ID NO: 148804 - DNA, 71 bp, Homo sapiens
ttactcccttagccatcccctccccttttgtcctatcattccctagaacaagccacctgtcaattgtgaag

SEQ ID NO: 148805 - DNA, 70 bp, Homo sapiens
tcccctccccttttgtcctatcattccctagaacaagccacctgtcaattgtgaagggttgtgttcttta

SEQ ID NO: 148806 - DNA, 82 bp, Homo sapiens
acctgtcaattgtgaagggttgtgttctttatggcaggttctatgcagattgtgccagagcatgtgcgtgttctgttggcaa

SEQ ID NO: 148807 - DNA, 82 bp, Homo sapiens
aattgtgaagggttgtgttctttatggcaggttctatgcagattgtgccagagcatgtgcgtgttctgttggcaagccacag

SEQ ID NO: 148808 - DNA, 86 bp, Homo sapiens
ttgtgttctttatggcaggttctatgcagattgtgccagagcatgtgcgtgttctgttggcaagccacagtgctcccttgactgaa

SEQ ID NO: 148809 - DNA, 85 bp, Homo sapiens
ctttatggcaggttctatgcagattgtgccagagcatgtgcgtgttctgttggcaagccacagtgctcccttgactgaagacatt

SEQ ID NO: 148810 - DNA, 85 bp, Homo sapiens
ttctatgcagattgtgccagagcatgtgcgtgttctgttggcaagccacagtgctcccttgactgaagacatttccaggtagatt

SEQ ID NO: 148811 - DNA, 84 bp, Homo sapiens
attgtgccagagcatgtgcgtgttctgttggcaagccacagtgctcccttgactgaagacatttccaggtagatttctcagcca

SEQ ID NO: 148812 - DNA, 80 bp, Homo sapiens
atgtgcgtgttctgttggcaagccacagtgctcccttgactgaagacatttccaggtagatttctcagccagctctaaaa

SEQ ID NO: 148813 - DNA, 80 bp, Homo sapiens
ttctgttggcaagccacagtgctcccttgactgaagacatttccaggtagatttctcagccagctctaaaacagattgct

SEQ ID NO: 148814 - DNA, 77 bp, Homo sapiens
aagccacagtgctcccttgactgaagacatttccaggtagatttctcagccagctctaaaacagattgctttttcag

SEQ ID NO: 148815 - DNA, 75 bp, Homo sapiens
ctcccttgactgaagacatttccaggtagatttctcagccagctctaaaacagattgctttttcagtggccttac

SEQ ID NO: 148816 - DNA, 76 bp, Homo sapiens
ttgactgaagacatttccaggtagatttctcagccagctctaaaacagattgctttttcagtggccttactctttg

SEQ ID NO: 148817 - DNA, 71 bp, Homo sapiens
atttccaggtagatttctcagccagctctaaaacagattgctttttcagtggccttactctttgtgggttt

SEQ ID NO: 148818 - DNA, 69 bp, Homo sapiens
gtagatttctcagccagctctaaaacagattgctttttcagtggccttactctttgtgggttttttttt

SEQ ID NO: 148819 - DNA, 72 bp, Homo sapiens
tataaagattttatttgtcccttgaaaaagtaacaaatgtgcatagatcaatttgtactactttggtcattg

SEQ ID NO: 148820 - DNA, 78 bp, Homo sapiens
taacaaatgtgcatagatcaatttgtactactttggtcattggatatttctgatccttattgcattgtacctaaagga

SEQ ID NO: 148821 - DNA, 73 bp, Homo sapiens
caatttgtactactttggtcattggatatttctgatccttattgcattgtacctaaaggagagtaactaatgg

SEQ ID NO: 148822 - DNA, 71 bp, Homo sapiens
ctactttggtcattggatatttctgatccttattgcattgtacctaaaggagagtaactaatggtaacctt

SEQ ID NO: 148823 - DNA, 71 bp, Homo sapiens
cattggatatttctgatccttattgcattgtacctaaaggagagtaactaatggtaacctttttaatagag

SEQ ID NO: 148824 - DNA, 70 bp, Homo sapiens
ctgatccttattgcattgtacctaaaggagagtaactaatggtaacctttttaatagagtatgtgaaagg

SEQ ID NO: 148825 - DNA, 71 bp, Homo sapiens
attgcattgtacctaaaggagagtaactaatggtaacctttttaatagagtatgtgaaaggtagtggctga

SEQ ID NO: 148826 - DNA, 70 bp, Homo sapiens
tacctaaaggagagtaactaatggtaacctttttaatagagtatgtgaaaggtagtggctgatgaatcct

SEQ ID NO: 148827 - DNA, 70 bp, Homo sapiens
gtaactaatggtaacctttttaatagagtatgtgaaaggtagtggctgatgaatccttaacgttcatagg

SEQ ID NO: 148828 - DNA, 73 bp, Homo sapiens
agtatgtgaaaggtagtggctgatgaatccttaacgttcatagggtctttttgctgttacggttgtatataga

SEQ ID NO: 148829 - DNA, 72 bp, Homo sapiens
aaggtagtggctgatgaatccttaacgttcatagggtctttttgctgttacggttgtatatagaggtctgaa

SEQ ID NO: 148830 - DNA, 71 bp, Homo sapiens
ctgatgaatccttaacgttcatagggtctttttgctgttacggttgtatatagaggtctgaaggattttta

SEQ ID NO: 148831 - DNA, 68 bp, Homo sapiens
cttaacgttcatagggtctttttgctgttacggttgtatatagaggtctgaaggatttttaaaatgat

SEQ ID NO: 148832 - DNA, 74 bp, Homo sapiens
gtctttttgctgttacggttgtatatagaggtctgaaggatttttaaaatgatttgcactttttcactgcatgc

SEQ ID NO: 148833 - DNA, 76 bp, Homo sapiens
tgctgttacggttgtatatagaggtctgaaggatttttaaaatgatttgcactttttcactgcatgcttacaattc

SEQ ID NO: 148834 - DNA, 75 bp, Homo sapiens
gttgtatatagaggtctgaaggatttttaaaatgatttgcactttttcactgcatgcttacaattcccaaaggca

SEQ ID NO: 148835 - DNA, 75 bp, Homo sapiens
gtctgaaggatttttaaaatgatttgcactttttcactgcatgcttacaattcccaaaggcaaaatctgtactga

SEQ ID NO: 148836 - DNA, 75 bp, Homo sapiens
tttttaaaatgatttgcactttttcactgcatgcttacaattcccaaaggcaaaatctgtactgaggtagatcat

SEQ ID NO: 148837 - DNA, 76 bp, Homo sapiens
aaaatgatttgcactttttcactgcatgcttacaattcccaaaggcaaaatctgtactgaggtagatcatttgaaa

SEQ ID NO: 148838 - DNA, 76 bp, Homo sapiens
ttttcactgcatgcttacaattcccaaaggcaaaatctgtactgaggtagatcatttgaaagggctagattataaa

SEQ ID NO: 148839 - DNA, 75 bp, Homo sapiens
actgcatgcttacaattcccaaaggcaaaatctgtactgaggtagatcatttgaaagggctagattataaaatta

SEQ ID NO: 148840 - DNA, 72 bp, Homo sapiens
ttcccaaaggcaaaatctgtactgaggtagatcatttgaaagggctagattataaaattaagccttagagta

SEQ ID NO: 148841 - DNA, 72 bp, Homo sapiens
aggcaaaatctgtactgaggtagatcatttgaaagggctagattataaaattaagccttagagtatggaaag

SEQ ID NO: 148842 - DNA, 72 bp, Homo sapiens
ctgtactgaggtagatcatttgaaagggctagattataaaattaagccttagagtatggaaagttcttataa

SEQ ID NO: 148843 - DNA, 71 bp, Homo sapiens
ggtagatcatttgaaagggctagattataaaattaagccttagagtatggaaagttcttataacaataata

SEQ ID NO: 148844 - DNA, 71 bp, Homo sapiens
agggctagattataaaattaagccttagagtatggaaagttcttataacaataatagtacacacttcagag

SEQ ID NO: 148845 - DNA, 74 bp, Homo sapiens
tataaaattaagccttagagtatggaaagttcttataacaataatagtacacacttcagagtaagacaaatgca

SEQ ID NO: 148846 - DNA, 75 bp, Homo sapiens
attaagccttagagtatggaaagttcttataacaataatagtacacacttcagagtaagacaaatgcaaagcatc

SEQ ID NO: 148847 - DNA, 76 bp, Homo sapiens
gagtatggaaagttcttataacaataatagtacacacttcagagtaagacaaatgcaaagcatcttaaggagtgaa

SEQ ID NO: 148848 - DNA, 75 bp, Homo sapiens
agttcttataacaataatagtacacacttcagagtaagacaaatgcaaagcatcttaaggagtgaaaatagagtg

SEQ ID NO: 148849 - DNA, 76 bp, Homo sapiens
caataatagtacacacttcagagtaagacaaatgcaaagcatcttaaggagtgaaaatagagtgtaaatcttgcct

SEQ ID NO: 148850 - DNA, 76 bp, Homo sapiens
acacttcagagtaagacaaatgcaaagcatcttaaggagtgaaaatagagtgtaaatcttgcctttggcactacaa

SEQ ID NO: 148851 - DNA, 75 bp, Homo sapiens
agtaagacaaatgcaaagcatcttaaggagtgaaaatagagtgtaaatcttgcctttggcactacaaggtgtgtg

SEQ ID NO: 148852 - DNA, 68 bp, Homo sapiens
ttttattttttaaagtgtttaatgtttctgtcctttctgtgaattattgaatttaagagccctgctaa

SEQ ID NO: 148853 - DNA, 70 bp, Homo sapiens
ttaaagtgtttaatgtttctgtcctttctgtgaattattgaatttaagagccctgctaaataatgaaaaa

SEQ ID NO: 148854 - DNA, 69 bp, Homo sapiens
gtttaatgtttctgtcctttctgtgaattattgaatttaagagccctgctaaataatgaaaaaacactt

SEQ ID NO: 148855 - DNA, 68 bp, Homo sapiens
ctgtcctttctgtgaattattgaatttaagagccctgctaaataatgaaaaaacactttactaaaatt

SEQ ID NO: 148856 - DNA, 70 bp, Homo sapiens
tctgtgaattattgaatttaagagccctgctaaataatgaaaaaacactttactaaaatttatcaaatta

SEQ ID NO: 148857 - DNA, 67 bp, Homo sapiens
gaatttaagagccctgctaaataatgaaaaaacactttactaaaatttatcaaattatactgggttc

SEQ ID NO: 148858 - DNA, 69 bp, Homo sapiens
gagccctgctaaataatgaaaaaacactttactaaaatttatcaaattatactgggttcggattgtgaa

SEQ ID NO: 148859 - DNA, 67 bp, Homo sapiens
aatgaaaaaacactttactaaaatttatcaaattatactgggttcggattgtgaaaacattggccac

SEQ ID NO: 148860 - DNA, 70 bp, Homo sapiens
acactttactaaaatttatcaaattatactgggttcggattgtgaaaacattggccacctagtagcagtg

SEQ ID NO: 148861 - DNA, 74 bp, Homo sapiens
tatcaaattatactgggttcggattgtgaaaacattggccacctagtagcagtggtgaggagtgggagggccca

SEQ ID NO: 148862 - DNA, 75 bp, Homo sapiens
tactgggttcggattgtgaaaacattggccacctagtagcagtggtgaggagtgggagggcccagcaagcattta

SEQ ID NO: 148863 - DNA, 78 bp, Homo sapiens
attgtgaaaacattggccacctagtagcagtggtgaggagtgggagggcccagcaagcatttatcagaaatagaatca

SEQ ID NO: 148864 - DNA, 81 bp, Homo sapiens
tgaggagtgggagggcccagcaagcatttatcagaaatagaatcacaataggaggagaatttgactgtctgatattatgat

SEQ ID NO: 148865 - DNA, 81 bp, Homo sapiens
gagggcccagcaagcatttatcagaaatagaatcacaataggaggagaatttgactgtctgatattatgatttgattacaa

SEQ ID NO: 148866 - DNA, 82 bp, Homo sapiens
cccagcaagcatttatcagaaatagaatcacaataggaggagaatttgactgtctgatattatgatttgattacaatactga

SEQ ID NO: 148867 - DNA, 79 bp, Homo sapiens
atttatcagaaatagaatcacaataggaggagaatttgactgtctgatattatgatttgattacaatactgaatgggaa

SEQ ID NO: 148868 - DNA, 78 bp, Homo sapiens
atagaatcacaataggaggagaatttgactgtctgatattatgatttgattacaatactgaatgggaaaagtatctaa

SEQ ID NO: 148869 - DNA, 77 bp, Homo sapiens
aatcacaataggaggagaatttgactgtctgatattatgatttgattacaatactgaatgggaaaagtatctaatat

SEQ ID NO: 148870 - DNA, 76 bp, Homo sapiens
caataggaggagaatttgactgtctgatattatgatttgattacaatactgaatgggaaaagtatctaatattttg

SEQ ID NO: 148871 - DNA, 74 bp, Homo sapiens
ttgactgtctgatattatgatttgattacaatactgaatgggaaaagtatctaatattttgtaacaaaaagacc

SEQ ID NO: 148872 - DNA, 75 bp, Homo sapiens
tgtctgatattatgatttgattacaatactgaatgggaaaagtatctaatattttgtaacaaaaagaccttcata

SEQ ID NO: 148873 - DNA, 73 bp, Homo sapiens
ttatgatttgattacaatactgaatgggaaaagtatctaatattttgtaacaaaaagaccttcatattatctg

SEQ ID NO: 148874 - DNA, 72 bp, Homo sapiens
tgattacaatactgaatgggaaaagtatctaatattttgtaacaaaaagaccttcatattatctgttttgac

SEQ ID NO: 148875 - DNA, 70 bp, Homo sapiens
ctgaatgggaaaagtatctaatattttgtaacaaaaagaccttcatattatctgttttgaccaaaatatg

SEQ ID NO: 148876 - DNA, 70 bp, Homo sapiens
agtatctaatattttgtaacaaaaagaccttcatattatctgttttgaccaaaatatgtagctatttccc

SEQ ID NO: 148877 - DNA, 70 bp, Homo sapiens
attttgtaacaaaaagaccttcatattatctgttttgaccaaaatatgtagctatttcccttacacagat

SEQ ID NO: 148878 - DNA, 75 bp, Homo sapiens
ttcatattatctgttttgaccaaaatatgtagctatttcccttacacagattggaccgcacttatctcccttgtc

SEQ ID NO: 148879 - DNA, 74 bp, Homo sapiens
ttatctgttttgaccaaaatatgtagctatttcccttacacagattggaccgcacttatctcccttgtcctgta

SEQ ID NO: 148880 - DNA, 72 bp, Homo sapiens
aaaatatgtagctatttcccttacacagattggaccgcacttatctcccttgtcctgtatcctttaatttca

SEQ ID NO: 148881 - DNA, 74 bp, Homo sapiens
atgtagctatttcccttacacagattggaccgcacttatctcccttgtcctgtatcctttaatttcaggtctca

SEQ ID NO: 148882 - DNA, 73 bp, Homo sapiens
cttacacagattggaccgcacttatctcccttgtcctgtatcctttaatttcaggtctcaggatgtttagaaa

SEQ ID NO: 148883 - DNA, 71 bp, Homo sapiens
attggaccgcacttatctcccttgtcctgtatcctttaatttcaggtctcaggatgtttagaaagctaaaa

SEQ ID NO: 148884 - DNA, 68 bp, Homo sapiens
acttatctcccttgtcctgtatcctttaatttcaggtctcaggatgtttagaaagctaaaacccccta

SEQ ID NO: 148885 - DNA, 67 bp, Homo sapiens
ttgtcctgtatcctttaatttcaggtctcaggatgtttagaaagctaaaaccccctacccctttctg

SEQ ID NO: 148886 - DNA, 66 bp, Homo sapiens
atcctttaatttcaggtctcaggatgtttagaaagctaaaaccccctacccctttctggctgaaaa

SEQ ID NO: 148887 - DNA, 67 bp, Homo sapiens
atttcaggtctcaggatgtttagaaagctaaaaccccctacccctttctggctgaaaacttgcctta

SEQ ID NO: 148888 - DNA, 67 bp, Homo sapiens
gatgtttagaaagctaaaaccccctacccctttctggctgaaaacttgccttatttggtatcttaca

SEQ ID NO: 148889 - DNA, 67 bp, Homo sapiens
tagaaagctaaaaccccctacccctttctggctgaaaacttgccttatttggtatcttacacattaa

SEQ ID NO: 148890 - DNA, 72 bp, Homo sapiens
cccctacccctttctggctgaaaacttgccttatttggtatcttacacattaatgttactagcatcaggagc

SEQ ID NO: 148891 - DNA, 74 bp, Homo sapiens
ctttctggctgaaaacttgccttatttggtatcttacacattaatgttactagcatcaggagcttactgtttta

SEQ ID NO: 148892 - DNA, 75 bp, Homo sapiens
ggctgaaaacttgccttatttggtatcttacacattaatgttactagcatcaggagcttactgttttattatgat

SEQ ID NO: 148893 - DNA, 77 bp, Homo sapiens
gccttatttggtatcttacacattaatgttactagcatcaggagcttactgttttattatgattcatcttcagtaat

SEQ ID NO: 148894 - DNA, 78 bp, Homo sapiens
gtatcttacacattaatgttactagcatcaggagcttactgttttattatgattcatcttcagtaatttttagaagca

SEQ ID NO: 148895 - DNA, 77 bp, Homo sapiens
taatgttactagcatcaggagcttactgttttattatgattcatcttcagtaatttttagaagcaagaagaaagcca

SEQ ID NO: 148896 - DNA, 78 bp, Homo sapiens
tactagcatcaggagcttactgttttattatgattcatcttcagtaatttttagaagcaagaagaaagccattgtgtc

SEQ ID NO: 148897 - DNA, 76 bp, Homo sapiens
caggagcttactgttttattatgattcatcttcagtaatttttagaagcaagaagaaagccattgtgtcctctaca

SEQ ID NO: 148898 - DNA, 74 bp, Homo sapiens
ctgttttattatgattcatcttcagtaatttttagaagcaagaagaaagccattgtgtcctctacaattaacaa

SEQ ID NO: 148899 - DNA, 75 bp, Homo sapiens
gattcatcttcagtaatttttagaagcaagaagaaagccattgtgtcctctacaattaacaaaacttatctctga

SEQ ID NO: 148900 - DNA, 74 bp, Homo sapiens
ttagaagcaagaagaaagccattgtgtcctctacaattaacaaaacttatctctgatatacaaagggatataaa

SEQ ID NO: 148901 - DNA, 75 bp, Homo sapiens
cattgtgtcctctacaattaacaaaacttatctctgatatacaaagggatataaatatatacacttaaatagaga

SEQ ID NO: 148902 - DNA, 71 bp, Homo sapiens
ctacaattaacaaaacttatctctgatatacaaagggatataaatatatacacttaaatagagaaaaagag

SEQ ID NO: 148903 - DNA, 74 bp, Homo sapiens
acttatctctgatatacaaagggatataaatatatacacttaaatagagaaaaagaggttgattgaattgtgcc

SEQ ID NO: 148904 - DNA, 76 bp, Homo sapiens
tctgatatacaaagggatataaatatatacacttaaatagagaaaaagaggttgattgaattgtgcctttgagtga

SEQ ID NO: 148905 - DNA, 71 bp, Homo sapiens
gggatataaatatatacacttaaatagagaaaaagaggttgattgaattgtgcctttgagtgaacccagtt

SEQ ID NO: 148906 - DNA, 70 bp, Homo sapiens
tatatacacttaaatagagaaaaagaggttgattgaattgtgcctttgagtgaacccagtttttaaatac

SEQ ID NO: 148907 - DNA, 69 bp, Homo sapiens
cttaaatagagaaaaagaggttgattgaattgtgcctttgagtgaacccagtttttaaataccgctgtg

SEQ ID NO: 148908 - DNA, 68 bp, Homo sapiens
agaaaaagaggttgattgaattgtgcctttgagtgaacccagtttttaaataccgctgtgtttgtttc

SEQ ID NO: 148909 - DNA, 72 bp, Homo sapiens
aggttgattgaattgtgcctttgagtgaacccagtttttaaataccgctgtgtttgtttcgccatggcttca

SEQ ID NO: 148910 - DNA, 73 bp, Homo sapiens
aattgtgcctttgagtgaacccagtttttaaataccgctgtgtttgtttcgccatggcttcagggatgctaca

SEQ ID NO: 148911 - DNA, 74 bp, Homo sapiens
tgaacccagtttttaaataccgctgtgtttgtttcgccatggcttcagggatgctacatggctcttgcaccttt

SEQ ID NO: 148912 - DNA, 73 bp, Homo sapiens
agtttttaaataccgctgtgtttgtttcgccatggcttcagggatgctacatggctcttgcaccttttactcc

SEQ ID NO: 148913 - DNA, 78 bp, Homo sapiens
aataccgctgtgtttgtttcgccatggcttcagggatgctacatggctcttgcaccttttactcctctgctttatgaa

SEQ ID NO: 148914 - DNA, 78 bp, Homo sapiens
tttgtttcgccatggcttcagggatgctacatggctcttgcaccttttactcctctgctttatgaagtttgagttgta

SEQ ID NO: 148915 - DNA, 80 bp, Homo sapiens
atggcttcagggatgctacatggctcttgcaccttttactcctctgctttatgaagtttgagttgtatttgtgcatctta

SEQ ID NO: 148916 - DNA, 76 bp, Homo sapiens
atgctacatggctcttgcaccttttactcctctgctttatgaagtttgagttgtatttgtgcatcttaaagtaggt

SEQ ID NO: 148917 - DNA, 75 bp, Homo sapiens
acatggctcttgcaccttttactcctctgctttatgaagtttgagttgtatttgtgcatcttaaagtaggttgag

SEQ ID NO: 148918 - DNA, 73 bp, Homo sapiens
accttttactcctctgctttatgaagtttgagttgtatttgtgcatcttaaagtaggttgaggcttgaggctg

SEQ ID NO: 148919 - DNA, 68 bp, Homo sapiens
gttttgttttcttgtacttaaacctgcttgcttcctaccacagattctttattttcccaaacactaca

SEQ ID NO: 148920 - DNA, 67 bp, Homo sapiens
gttttcttgtacttaaacctgcttgcttcctaccacagattctttattttcccaaacactacaaaaa

SEQ ID NO: 148921 - DNA, 65 bp, Homo sapiens
acttaaacctgcttgcttcctaccacagattctttattttcccaaacactacaaaaaaactttta

SEQ ID NO: 148922 - DNA, 65 bp, Homo sapiens
cttgcttcctaccacagattctttattttcccaaacactacaaaaaaacttttaaaactttgcca

SEQ ID NO: 148923 - DNA, 65 bp, Homo sapiens
ccacagattctttattttcccaaacactacaaaaaaacttttaaaactttgccatttcatctgtt

SEQ ID NO: 148924 - DNA, 67 bp, Homo sapiens
tattttcccaaacactacaaaaaaacttttaaaactttgccatttcatctgtttacactctttgcca

SEQ ID NO: 148925 - DNA, 72 bp, Homo sapiens
aaaacttttaaaactttgccatttcatctgtttacactctttgccactgattagcagtatttaaatcttgca

SEQ ID NO: 148926 - DNA, 76 bp, Homo sapiens
aaactttgccatttcatctgtttacactctttgccactgattagcagtatttaaatcttgcaagaatattttgtgc

SEQ ID NO: 148927 - DNA, 77 bp, Homo sapiens
ttgccatttcatctgtttacactctttgccactgattagcagtatttaaatcttgcaagaatattttgtgctttctt

SEQ ID NO: 148928 - DNA, 75 bp, Homo sapiens
ctgtttacactctttgccactgattagcagtatttaaatcttgcaagaatattttgtgctttctttagaaacaca

SEQ ID NO: 148929 - DNA, 75 bp, Homo sapiens
ctgattagcagtatttaaatcttgcaagaatattttgtgctttctttagaaacacaagagtatagatttttctca

SEQ ID NO: 148930 - DNA, 74 bp, Homo sapiens
ttaaatcttgcaagaatattttgtgctttctttagaaacacaagagtatagatttttctcactgaaaagtgaga

SEQ ID NO: 148931 - DNA, 74 bp, Homo sapiens
gcaagaatattttgtgctttctttagaaacacaagagtatagatttttctcactgaaaagtgagagttacgcat

SEQ ID NO: 148932 - DNA, 76 bp, Homo sapiens
atattttgtgctttctttagaaacacaagagtatagatttttctcactgaaaagtgagagttacgcattgcagcca

SEQ ID NO: 148933 - DNA, 78 bp, Homo sapiens
tttctttagaaacacaagagtatagatttttctcactgaaaagtgagagttacgcattgcagccatgaagggatgcta

SEQ ID NO: 148934 - DNA, 79 bp, Homo sapiens
aaacacaagagtatagatttttctcactgaaaagtgagagttacgcattgcagccatgaagggatgctaggatcaatta

SEQ ID NO: 148935 - DNA, 78 bp, Homo sapiens
gatttttctcactgaaaagtgagagttacgcattgcagccatgaagggatgctaggatcaattatggcagtacctttt

SEQ ID NO: 148936 - DNA, 78 bp, Homo sapiens
ttctcactgaaaagtgagagttacgcattgcagccatgaagggatgctaggatcaattatggcagtaccttttttccc

SEQ ID NO: 148937 - DNA, 75 bp, Homo sapiens
aaagtgagagttacgcattgcagccatgaagggatgctaggatcaattatggcagtaccttttttcccctcctgt

SEQ ID NO: 148938 - DNA, 69 bp, Homo sapiens
atcaattatggcagtaccttttttcccctcctgttcttgagccagttgtctcttttgttttgggtccca

SEQ ID NO: 148939 - DNA, 69 bp, Homo sapiens
ttttcccctcctgttcttgagccagttgtctcttttgttttgggtcccacttaggattaatggatgtaa

SEQ ID NO: 148940 - DNA, 70 bp, Homo sapiens
tgttcttgagccagttgtctcttttgttttgggtcccacttaggattaatggatgtaaggtattttcctg

SEQ ID NO: 148941 - DNA, 67 bp, Homo sapiens
agttgtctcttttgttttgggtcccacttaggattaatggatgtaaggtattttcctgtgcctttat

SEQ ID NO: 148942 - DNA, 68 bp, Homo sapiens
cttttgttttgggtcccacttaggattaatggatgtaaggtattttcctgtgcctttattttgtgtca

SEQ ID NO: 148943 - DNA, 71 bp, Homo sapiens
ttgggtcccacttaggattaatggatgtaaggtattttcctgtgcctttattttgtgtcattctattggaa

SEQ ID NO: 148944 - DNA, 71 bp, Homo sapiens
cttaggattaatggatgtaaggtattttcctgtgcctttattttgtgtcattctattggaaggaggtgtaa

SEQ ID NO: 148945 - DNA, 74 bp, Homo sapiens
atggatgtaaggtattttcctgtgcctttattttgtgtcattctattggaaggaggtgtaacggcagaatagca

SEQ ID NO: 148946 - DNA, 73 bp, Homo sapiens
gtattttcctgtgcctttattttgtgtcattctattggaaggaggtgtaacggcagaatagcatcgtgttggg

SEQ ID NO: 148947 - DNA, 71 bp, Homo sapiens
ctttattttgtgtcattctattggaaggaggtgtaacggcagaatagcatcgtgttgggggttttccttca

SEQ ID NO: 148948 - DNA, 71 bp, Homo sapiens
ttttgtgtcattctattggaaggaggtgtaacggcagaatagcatcgtgttgggggttttccttcaaacac

SEQ ID NO: 148949 - DNA, 73 bp, Homo sapiens
ttctattggaaggaggtgtaacggcagaatagcatcgtgttgggggttttccttcaaacactgcaagtgatat

SEQ ID NO: 148950 - DNA, 76 bp, Homo sapiens
aggaggtgtaacggcagaatagcatcgtgttgggggttttccttcaaacactgcaagtgatattgccaccatgtga

SEQ ID NO: 148951 - DNA, 78 bp, Homo sapiens
agaatagcatcgtgttgggggttttccttcaaacactgcaagtgatattgccaccatgtgaacctcaaatatgcaatc

SEQ ID NO: 148952 - DNA, 76 bp, Homo sapiens
atcgtgttgggggttttccttcaaacactgcaagtgatattgccaccatgtgaacctcaaatatgcaatccagttg

SEQ ID NO: 148953 - DNA, 77 bp, Homo sapiens
gttttccttcaaacactgcaagtgatattgccaccatgtgaacctcaaatatgcaatccagttgtgttggtttctcg

SEQ ID NO: 148954 - DNA, 80 bp, Homo sapiens
ttcaaacactgcaagtgatattgccaccatgtgaacctcaaatatgcaatccagttgtgttggtttctcggtgacttgga

SEQ ID NO: 148955 - DNA, 79 bp, Homo sapiens
agtgatattgccaccatgtgaacctcaaatatgcaatccagttgtgttggtttctcggtgacttggagtgttcatctct

SEQ ID NO: 148956 - DNA, 79 bp, Homo sapiens
ccaccatgtgaacctcaaatatgcaatccagttgtgttggtttctcggtgacttggagtgttcatctcttcatgaattg

SEQ ID NO: 148957 - DNA, 79 bp, Homo sapiens
gttggtttctcggtgacttggagtgttcatctcttcatgaattgtgagcactgaccatgttcttcagttcttaattatg

SEQ ID NO: 148958 - DNA, 80 bp, Homo sapiens
acttggagtgttcatctcttcatgaattgtgagcactgaccatgttcttcagttcttaattatggtgagttgacaaatac

SEQ ID NO: 148959 - DNA, 80 bp, Homo sapiens
agtgttcatctcttcatgaattgtgagcactgaccatgttcttcagttcttaattatggtgagttgacaaataccaacta

SEQ ID NO: 148960 - DNA, 78 bp, Homo sapiens
ttcatgaattgtgagcactgaccatgttcttcagttcttaattatggtgagttgacaaataccaactactgcttttct

SEQ ID NO: 148961 - DNA, 72 bp, Homo sapiens
ccatgttcttcagttcttaattatggtgagttgacaaataccaactactgcttttctttaggtggctataaa

SEQ ID NO: 148962 - DNA, 70 bp, Homo sapiens
cagttcttaattatggtgagttgacaaataccaactactgcttttctttaggtggctataaatttcttac

SEQ ID NO: 148963 - DNA, 71 bp, Homo sapiens
aattatggtgagttgacaaataccaactactgcttttctttaggtggctataaatttcttactgtcaggag

SEQ ID NO: 148964 - DNA, 71 bp, Homo sapiens
agttgacaaataccaactactgcttttctttaggtggctataaatttcttactgtcaggaggaaatgacat

SEQ ID NO: 148965 - DNA, 72 bp, Homo sapiens
accaactactgcttttctttaggtggctataaatttcttactgtcaggaggaaatgacattatattctgttc

SEQ ID NO: 148966 - DNA, 74 bp, Homo sapiens
ttttctttaggtggctataaatttcttactgtcaggaggaaatgacattatattctgttccactgaacgtcaga

SEQ ID NO: 148967 - DNA, 78 bp, Homo sapiens
tttaggtggctataaatttcttactgtcaggaggaaatgacattatattctgttccactgaacgtcagagatcagcag

SEQ ID NO: 148968 - DNA, 80 bp, Homo sapiens
tataaatttcttactgtcaggaggaaatgacattatattctgttccactgaacgtcagagatcagcaggcactgtactgg

SEQ ID NO: 148969 - DNA, 82 bp, Homo sapiens
ttactgtcaggaggaaatgacattatattctgttccactgaacgtcagagatcagcaggcactgtactgggtagagaagtgc

SEQ ID NO: 148970 - DNA, 81 bp, Homo sapiens
aaatgacattatattctgttccactgaacgtcagagatcagcaggcactgtactgggtagagaagtgcctatacttctcta

SEQ ID NO: 148971 - DNA, 79 bp, Homo sapiens
attatattctgttccactgaacgtcagagatcagcaggcactgtactgggtagagaagtgcctatacttctctacctaa

SEQ ID NO: 148972 - DNA, 80 bp, Homo sapiens
tgttccactgaacgtcagagatcagcaggcactgtactgggtagagaagtgcctatacttctctacctaagagggcagga

SEQ ID NO: 148973 - DNA, 71 bp, Homo sapiens
actgtactgggtagagaagtgcctatacttctctacctaagagggcaggagggaaaccctacagctccttg

SEQ ID NO: 148974 - DNA, 73 bp, Homo sapiens
cctatacttctctacctaagagggcaggagggaaaccctacagctccttgtgagcctatatattagtatatcg

SEQ ID NO: 148975 - DNA, 74 bp, Homo sapiens
caggagggaaaccctacagctccttgtgagcctatatattagtatatcggcctggagaggacaagggaataaga

SEQ ID NO: 148976 - DNA, 75 bp, Homo sapiens
aaaccctacagctccttgtgagcctatatattagtatatcggcctggagaggacaagggaataagaccactcata

SEQ ID NO: 148977 - DNA, 78 bp, Homo sapiens
ctccttgtgagcctatatattagtatatcggcctggagaggacaagggaataagaccactcatagtgaggctggccaa

SEQ ID NO: 148978 - DNA, 79 bp, Homo sapiens
agcctatatattagtatatcggcctggagaggacaagggaataagaccactcatagtgaggctggccaagctgcactgg

SEQ ID NO: 148979 - DNA, 78 bp, Homo sapiens
atattagtatatcggcctggagaggacaagggaataagaccactcatagtgaggctggccaagctgcactggtcggac

SEQ ID NO: 148980 - DNA, 79 bp, Homo sapiens
atcggcctggagaggacaagggaataagaccactcatagtgaggctggccaagctgcactggtcggaccaggcagtggc

SEQ ID NO: 148981 - DNA, 78 bp, Homo sapiens
acaagggaataagaccactcatagtgaggctggccaagctgcactggtcggaccaggcagtggctgacctaaggaaga

SEQ ID NO: 148982 - DNA, 79 bp, Homo sapiens
aataagaccactcatagtgaggctggccaagctgcactggtcggaccaggcagtggctgacctaaggaagacaacttgc

SEQ ID NO: 148983 - DNA, 77 bp, Homo sapiens
atagtgaggctggccaagctgcactggtcggaccaggcagtggctgacctaaggaagacaacttgctttgcttaaaa

SEQ ID NO: 148984 - DNA, 75 bp, Homo sapiens
tggccaagctgcactggtcggaccaggcagtggctgacctaaggaagacaacttgctttgcttaaaagtagattt

SEQ ID NO: 148985 - DNA, 72 bp, Homo sapiens
aagctgcactggtcggaccaggcagtggctgacctaaggaagacaacttgctttgcttaaaagtagattttt

SEQ ID NO: 148986 - DNA, 73 bp, Homo sapiens
gaccaggcagtggctgacctaaggaagacaacttgctttgcttaaaagtagattttttaagcaatgcttaaca

SEQ ID NO: 148987 - DNA, 76 bp, Homo sapiens
tggctgacctaaggaagacaacttgctttgcttaaaagtagattttttaagcaatgcttaacacaggcagcattca

SEQ ID NO: 148988 - DNA, 73 bp, Homo sapiens
taaggaagacaacttgctttgcttaaaagtagattttttaagcaatgcttaacacaggcagcattcacctttg

SEQ ID NO: 148989 - DNA, 74 bp, Homo sapiens
aacttgctttgcttaaaagtagattttttaagcaatgcttaacacaggcagcattcacctttgttcaggccatc

SEQ ID NO: 148990 - DNA, 76 bp, Homo sapiens
tttgcttaaaagtagattttttaagcaatgcttaacacaggcagcattcacctttgttcaggccatcgacatgtat

SEQ ID NO: 148991 - DNA, 76 bp, Homo sapiens
gtagattttttaagcaatgcttaacacaggcagcattcacctttgttcaggccatcgacatgtattgttaaaatta

SEQ ID NO: 148992 - DNA, 79 bp, Homo sapiens
tttaagcaatgcttaacacaggcagcattcacctttgttcaggccatcgacatgtattgttaaaattactgcatatccc

SEQ ID NO: 148993 - DNA, 80 bp, Homo sapiens
ttaacacaggcagcattcacctttgttcaggccatcgacatgtattgttaaaattactgcatatccccctcagatatcaa

SEQ ID NO: 148994 - DNA, 78 bp, Homo sapiens
cattcacctttgttcaggccatcgacatgtattgttaaaattactgcatatccccctcagatatcaagtatacactgt

SEQ ID NO: 148995 - DNA, 79 bp, Homo sapiens
ctttgttcaggccatcgacatgtattgttaaaattactgcatatccccctcagatatcaagtatacactgttcatgttg

SEQ ID NO: 148996 - DNA, 78 bp, Homo sapiens
atcgacatgtattgttaaaattactgcatatccccctcagatatcaagtatacactgttcatgttggggttgtgtgtg

SEQ ID NO: 148997 - DNA, 78 bp, Homo sapiens
atgtattgttaaaattactgcatatccccctcagatatcaagtatacactgttcatgttggggttgtgtgtgtgtatg

SEQ ID NO: 148998 - DNA, 71 bp, Homo sapiens
tttttttttctgaatgtgatcatgttttggatgatacctgagcagggttgccttttttttatttattacca

SEQ ID NO: 148999 - DNA, 74 bp, Homo sapiens
ttttctgaatgtgatcatgttttggatgatacctgagcagggttgccttttttttatttattaccattatatat

SEQ ID NO: 149000 - DNA, 67 bp, Homo sapiens
atattatatattttttgctttcttataactttggaggaaagtcaaatcttggtattattaaaattgt

SEQ ID NO: 149001 - DNA, 66 bp, Homo sapiens
atatattttttgctttcttataactttggaggaaagtcaaatcttggtattattaaaattgtttta

SEQ ID NO: 149002 - DNA, 66 bp, Homo sapiens
tgctttcttataactttggaggaaagtcaaatcttggtattattaaaattgttttaaaaaggagta

SEQ ID NO: 149003 - DNA, 65 bp, Homo sapiens
ttggaggaaagtcaaatcttggtattattaaaattgttttaaaaaggagtaaattttccagttga

SEQ ID NO: 149004 - DNA, 66 bp, Homo sapiens
gaaagtcaaatcttggtattattaaaattgttttaaaaaggagtaaattttccagttgataaatga

SEQ ID NO: 149005 - DNA, 66 bp, Homo sapiens
atcttggtattattaaaattgttttaaaaaggagtaaattttccagttgataaatgaaaatcactg

SEQ ID NO: 149006 - DNA, 66 bp, Homo sapiens
ggtattattaaaattgttttaaaaaggagtaaattttccagttgataaatgaaaatcactggccta

SEQ ID NO: 149007 - DNA, 65 bp, Homo sapiens
gttttaaaaaggagtaaattttccagttgataaatgaaaatcactggcctatgtttaataagttt

SEQ ID NO: 149008 - DNA, 65 bp, Homo sapiens
aaaaaggagtaaattttccagttgataaatgaaaatcactggcctatgtttaataagtttttctt

SEQ ID NO: 149009 - DNA, 66 bp, Homo sapiens
aaaaggagtaaattttccagttgataaatgaaaatcactggcctatgtttaataagtttttcttta

SEQ ID NO: 149010 - DNA, 69 bp, Homo sapiens
ttccagttgataaatgaaaatcactggcctatgtttaataagtttttctttaattactgtggaataacg

SEQ ID NO: 149011 - DNA, 71 bp, Homo sapiens
cagttgataaatgaaaatcactggcctatgtttaataagtttttctttaattactgtggaataacgtgcca

SEQ ID NO: 149012 - DNA, 71 bp, Homo sapiens
gttgataaatgaaaatcactggcctatgtttaataagtttttctttaattactgtggaataacgtgccagc

SEQ ID NO: 149013 - DNA, 75 bp, Homo sapiens
aatcactggcctatgtttaataagtttttctttaattactgtggaataacgtgccagctatcatcaacacaatga

SEQ ID NO: 149014 - DNA, 73 bp, Homo sapiens
agtttttctttaattactgtggaataacgtgccagctatcatcaacacaatgattttgtacatagggtaggga

SEQ ID NO: 149015 - DNA, 79 bp, Homo sapiens
ttctttaattactgtggaataacgtgccagctatcatcaacacaatgattttgtacatagggtagggaagcagtgatgc

SEQ ID NO: 149016 - DNA, 85 bp, Homo sapiens
tgccagctatcatcaacacaatgattttgtacatagggtagggaagcagtgatgctctcaatgggaagatgtgcaacacaaatta

SEQ ID NO: 149017 - DNA, 77 bp, Homo sapiens
tacatagggtagggaagcagtgatgctctcaatgggaagatgtgcaacacaaattaaggggaactccatgtatttta

SEQ ID NO: 149018 - DNA, 77 bp, Homo sapiens
tagggaagcagtgatgctctcaatgggaagatgtgcaacacaaattaaggggaactccatgtattttacctacttca

SEQ ID NO: 149019 - DNA, 77 bp, Homo sapiens
agtgatgctctcaatgggaagatgtgcaacacaaattaaggggaactccatgtattttacctacttcagcaatggaa

SEQ ID NO: 149020 - DNA, 73 bp, Homo sapiens
aatgggaagatgtgcaacacaaattaaggggaactccatgtattttacctacttcagcaatggaactgcaact

SEQ ID NO: 149021 - DNA, 72 bp, Homo sapiens
atgtgcaacacaaattaaggggaactccatgtattttacctacttcagcaatggaactgcaacttggggctt

SEQ ID NO: 149022 - DNA, 70 bp, Homo sapiens
aaattaaggggaactccatgtattttacctacttcagcaatggaactgcaacttggggctttgtgaataa

SEQ ID NO: 149023 - DNA, 72 bp, Homo sapiens
aactccatgtattttacctacttcagcaatggaactgcaacttggggctttgtgaataaaatttagctgcct

SEQ ID NO: 149024 - DNA, 73 bp, Homo sapiens
atgtattttacctacttcagcaatggaactgcaacttggggctttgtgaataaaatttagctgccttgtatag

SEQ ID NO: 149025 - DNA, 75 bp, Homo sapiens
ttcagcaatggaactgcaacttggggctttgtgaataaaatttagctgccttgtatagtcgtttgaaagaatatg

SEQ ID NO: 149026 - DNA, 74 bp, Homo sapiens
aatggaactgcaacttggggctttgtgaataaaatttagctgccttgtatagtcgtttgaaagaatatgtgatc

SEQ ID NO: 149027 - DNA, 76 bp, Homo sapiens
ttggggctttgtgaataaaatttagctgccttgtatagtcgtttgaaagaatatgtgatctgtgagagaattatag

SEQ ID NO: 149028 - DNA, 75 bp, Homo sapiens
gctttgtgaataaaatttagctgccttgtatagtcgtttgaaagaatatgtgatctgtgagagaattatagtttt

SEQ ID NO: 149029 - DNA, 72 bp, Homo sapiens
aaaatttagctgccttgtatagtcgtttgaaagaatatgtgatctgtgagagaattatagtttttttttaga

SEQ ID NO: 149030 - DNA, 74 bp, Homo sapiens
gccttgtatagtcgtttgaaagaatatgtgatctgtgagagaattatagtttttttttagaagaaaaatctgca

SEQ ID NO: 149031 - DNA, 72 bp, Homo sapiens
agtcgtttgaaagaatatgtgatctgtgagagaattatagtttttttttagaagaaaaatctgcaaaagatc

SEQ ID NO: 149032 - DNA, 73 bp, Homo sapiens
agaatatgtgatctgtgagagaattatagtttttttttagaagaaaaatctgcaaaagatctttccaaagaca

SEQ ID NO: 149033 - DNA, 73 bp, Homo sapiens
ctgtgagagaattatagtttttttttagaagaaaaatctgcaaaagatctttccaaagacaatgtgccacaga

SEQ ID NO: 149034 - DNA, 71 bp, Homo sapiens
gagaattatagtttttttttagaagaaaaatctgcaaaagatctttccaaagacaatgtgccacagatctt

SEQ ID NO: 149035 - DNA, 75 bp, Homo sapiens
tttttagaagaaaaatctgcaaaagatctttccaaagacaatgtgccacagatcttttgttctctgtaatgagga

SEQ ID NO: 149036 - DNA, 76 bp, Homo sapiens
aaaaatctgcaaaagatctttccaaagacaatgtgccacagatcttttgttctctgtaatgaggattaattgctgt

SEQ ID NO: 149037 - DNA, 76 bp, Homo sapiens
gcaaaagatctttccaaagacaatgtgccacagatcttttgttctctgtaatgaggattaattgctgtttaaacaa

SEQ ID NO: 149038 - DNA, 74 bp, Homo sapiens
atctttccaaagacaatgtgccacagatcttttgttctctgtaatgaggattaattgctgtttaaacaaaaatg

SEQ ID NO: 149039 - DNA, 76 bp, Homo sapiens
agacaatgtgccacagatcttttgttctctgtaatgaggattaattgctgtttaaacaaaaatgtaattgttcatc

SEQ ID NO: 149040 - DNA, 70 bp, Homo sapiens
tttgttctctgtaatgaggattaattgctgtttaaacaaaaatgtaattgttcatctttaaattctttcc

SEQ ID NO: 149041 - DNA, 70 bp, Homo sapiens
tgaggattaattgctgtttaaacaaaaatgtaattgttcatctttaaattctttccttttcataagagga

SEQ ID NO: 149042 - DNA, 68 bp, Homo sapiens
tttaaacaaaaatgtaattgttcatctttaaattctttccttttcataagaggatcaagctgtaaaaa

SEQ ID NO: 149043 - DNA, 67 bp, Homo sapiens
aatgtaattgttcatctttaaattctttccttttcataagaggatcaagctgtaaaaaaacaaaaaa

SEQ ID NO: 149044 - DNA, 73 bp, Homo sapiens
cccgctccagagcgcggggggcgctgtgcggggcccaggctgcggctccgctcccggccacggggggcgctgc

SEQ ID NO: 149045 - DNA, 74 bp, Homo sapiens
agagcgcggggggcgctgtgcggggcccaggctgcggctccgctcccggccacggggggcgctgcgctgcgccg

SEQ ID NO: 149046 - DNA, 74 bp, Homo sapiens
cgctgtgcggggcccaggctgcggctccgctcccggccacggggggcgctgcgctgcgccggtggttggtggtg

SEQ ID NO: 149047 - DNA, 73 bp, Homo sapiens
gggcccaggctgcggctccgctcccggccacggggggcgctgcgctgcgccggtggttggtggtggctgttgg

SEQ ID NO: 149048 - DNA, 71 bp, Homo sapiens
aggctgcggctccgctcccggccacggggggcgctgcgctgcgccggtggttggtggtggctgttgggggg

SEQ ID NO: 149049 - DNA, 68 bp, Homo sapiens
tccgctcccggccacggggggcgctgcgctgcgccggtggttggtggtggctgttggggggggtgggg

SEQ ID NO: 149050 - DNA, 65 bp, Homo sapiens
acggggggcgctgcgctgcgccggtggttggtggtggctgttggggggggtgggggggaacggcg

SEQ ID NO: 149051 - DNA, 68 bp, Homo sapiens
tgcgctgcgccggtggttggtggtggctgttggggggggtgggggggaacggcggccgcgggtggtgc

SEQ ID NO: 149052 - DNA, 64 bp, Homo sapiens
ggtggttggtggtggctgttggggggggtgggggggaacggcggccgcgggtggtgcggaggga

SEQ ID NO: 149053 - DNA, 64 bp, Homo sapiens
ttggtggtggctgttggggggggtgggggggaacggcggccgcgggtggtgcggagggaggcct

SEQ ID NO: 149054 - DNA, 65 bp, Homo sapiens
tgttggggggggtgggggggaacggcggccgcgggtggtgcggagggaggccttgcgggcggatc

SEQ ID NO: 149055 - DNA, 68 bp, Homo sapiens
ggggggaacggcggccgcgggtggtgcggagggaggccttgcgggcggatcgggcgcttggcggcgga

SEQ ID NO: 149056 - DNA, 69 bp, Homo sapiens
aacggcggccgcgggtggtgcggagggaggccttgcgggcggatcgggcgcttggcggcggaggtggtg

SEQ ID NO: 149057 - DNA, 69 bp, Homo sapiens
cgggtggtgcggagggaggccttgcgggcggatcgggcgcttggcggcggaggtggtgggaggcggcgg

SEQ ID NO: 149058 - DNA, 69 bp, Homo sapiens
agggaggccttgcgggcggatcgggcgcttggcggcggaggtggtgggaggcggcgggcgggagcgcgg

SEQ ID NO: 149059 - DNA, 70 bp, Homo sapiens
ccttgcgggcggatcgggcgcttggcggcggaggtggtgggaggcggcgggcgggagcgcgggtcaggcc

SEQ ID NO: 149060 - DNA, 69 bp, Homo sapiens
cttggcggcggaggtggtgggaggcggcgggcgggagcgcgggtcaggccggccccggcgatggcggac

SEQ ID NO: 149061 - DNA, 69 bp, Homo sapiens
aggtggtgggaggcggcgggcgggagcgcgggtcaggccggccccggcgatggcggacgcggcggcctc

SEQ ID NO: 149062 - DNA, 68 bp, Homo sapiens
cggcgggcgggagcgcgggtcaggccggccccggcgatggcggacgcggcggcctccccggtgggcaa

SEQ ID NO: 149063 - DNA, 72 bp, Homo sapiens
cgggagcgcgggtcaggccggccccggcgatggcggacgcggcggcctccccggtgggcaagcggctgctgc

SEQ ID NO: 149064 - DNA, 76 bp, Homo sapiens
tcaggccggccccggcgatggcggacgcggcggcctccccggtgggcaagcggctgctgctgctgttcgcggacac

SEQ ID NO: 149065 - DNA, 78 bp, Homo sapiens
cccggcgatggcggacgcggcggcctccccggtgggcaagcggctgctgctgctgttcgcggacactgcggcctcagc

SEQ ID NO: 149066 - DNA, 78 bp, Homo sapiens
atggcggacgcggcggcctccccggtgggcaagcggctgctgctgctgttcgcggacactgcggcctcagcctcggcc

SEQ ID NO: 149067 - DNA, 77 bp, Homo sapiens
cggcggcctccccggtgggcaagcggctgctgctgctgttcgcggacactgcggcctcagcctcggcctcggctccc

SEQ ID NO: 149068 - DNA, 79 bp, Homo sapiens
cccggtgggcaagcggctgctgctgctgttcgcggacactgcggcctcagcctcggcctcggctcccgcggcggcagcg

SEQ ID NO: 149069 - DNA, 82 bp, Homo sapiens
aagcggctgctgctgctgttcgcggacactgcggcctcagcctcggcctcggctcccgcggcggcagcggcgagcggagatc

SEQ ID NO: 149070 - DNA, 81 bp, Homo sapiens
gacactgcggcctcagcctcggcctcggctcccgcggcggcagcggcgagcggagatccggggcctgcgctgcgcactcga

SEQ ID NO: 149071 - DNA, 81 bp, Homo sapiens
tgcggcctcagcctcggcctcggctcccgcggcggcagcggcgagcggagatccggggcctgcgctgcgcactcgagcctg

SEQ ID NO: 149072 - DNA, 79 bp, Homo sapiens
tcggcctcggctcccgcggcggcagcggcgagcggagatccggggcctgcgctgcgcactcgagcctggcgggccggca

SEQ ID NO: 149073 - DNA, 77 bp, Homo sapiens
ctcccgcggcggcagcggcgagcggagatccggggcctgcgctgcgcactcgagcctggcgggccggcacggtgcgg

SEQ ID NO: 149074 - DNA, 79 bp, Homo sapiens
ggcagcggcgagcggagatccggggcctgcgctgcgcactcgagcctggcgggccggcacggtgcgggccatgagcggg

SEQ ID NO: 149075 - DNA, 77 bp, Homo sapiens
agcggagatccggggcctgcgctgcgcactcgagcctggcgggccggcacggtgcgggccatgagcggggcggtgcc

SEQ ID NO: 149076 - DNA, 77 bp, Homo sapiens
gggcctgcgctgcgcactcgagcctggcgggccggcacggtgcgggccatgagcggggcggtgccccaggacctagc

SEQ ID NO: 149077 - DNA, 76 bp, Homo sapiens
ctgcgcactcgagcctggcgggccggcacggtgcgggccatgagcggggcggtgccccaggacctagcggtgagtg

SEQ ID NO: 149078 - DNA, 73 bp, Homo sapiens
actcgagcctggcgggccggcacggtgcgggccatgagcggggcggtgccccaggacctagcggtgagtggcg

SEQ ID NO: 149079 - DNA, 74 bp, Homo sapiens
gccggcacggtgcgggccatgagcggggcggtgccccaggacctagcggtgagtggcggccgagtcgggcactc

SEQ ID NO: 149080 - DNA, 75 bp, Homo sapiens
agatttttccaagtgtgacttccaaactgctttttatctcttgcagatctttgtagaatttgatggctgtaactg

SEQ ID NO: 149081 - DNA, 77 bp, Homo sapiens
tttccaagtgtgacttccaaactgctttttatctcttgcagatctttgtagaatttgatggctgtaactggaagcaa

SEQ ID NO: 149082 - DNA, 76 bp, Homo sapiens
tccaaactgctttttatctcttgcagatctttgtagaatttgatggctgtaactggaagcaacactcctgggtaaa

SEQ ID NO: 149083 - DNA, 78 bp, Homo sapiens
tttttatctcttgcagatctttgtagaatttgatggctgtaactggaagcaacactcctgggtaaaagttcatgctga

SEQ ID NO: 149084 - DNA, 78 bp, Homo sapiens
ttgcagatctttgtagaatttgatggctgtaactggaagcaacactcctgggtaaaagttcatgctgaggaagttatc

SEQ ID NO: 149085 - DNA, 76 bp, Homo sapiens
tttgtagaatttgatggctgtaactggaagcaacactcctgggtaaaagttcatgctgaggaagttatcgtgcttc

SEQ ID NO: 149086 - DNA, 77 bp, Homo sapiens
aatttgatggctgtaactggaagcaacactcctgggtaaaagttcatgctgaggaagttatcgtgcttctgctggaa

SEQ ID NO: 149087 - DNA, 76 bp, Homo sapiens
taactggaagcaacactcctgggtaaaagttcatgctgaggaagttatcgtgcttctgctggaagggtctcttgta

SEQ ID NO: 149088 - DNA, 76 bp, Homo sapiens
aagcaacactcctgggtaaaagttcatgctgaggaagttatcgtgcttctgctggaagggtctcttgtatgggcgc

SEQ ID NO: 149089 - DNA, 75 bp, Homo sapiens
tgggtaaaagttcatgctgaggaagttatcgtgcttctgctggaagggtctcttgtatgggcgccccgtgaggac

SEQ ID NO: 149090 - DNA, 75 bp, Homo sapiens
agttcatgctgaggaagttatcgtgcttctgctggaagggtctcttgtatgggcgccccgtgaggacccagtcct

SEQ ID NO: 149091 - DNA, 72 bp, Homo sapiens
aggaagttatcgtgcttctgctggaagggtctcttgtatgggcgccccgtgaggacccagtccttctccagg

SEQ ID NO: 149092 - DNA, 76 bp, Homo sapiens
tgcttctgctggaagggtctcttgtatgggcgccccgtgaggacccagtccttctccagggcattcgagtctccat

SEQ ID NO: 149093 - DNA, 76 bp, Homo sapiens
tggaagggtctcttgtatgggcgccccgtgaggacccagtccttctccagggcattcgagtctccattgcacaatg

SEQ ID NO: 149094 - DNA, 78 bp, Homo sapiens
tctcttgtatgggcgccccgtgaggacccagtccttctccagggcattcgagtctccattgcacaatggccagccctg

SEQ ID NO: 149095 - DNA, 76 bp, Homo sapiens
gccccgtgaggacccagtccttctccagggcattcgagtctccattgcacaatggccagccctggtgagtggcttt

SEQ ID NO: 149096 - DNA, 75 bp, Homo sapiens
aggacccagtccttctccagggcattcgagtctccattgcacaatggccagccctggtgagtggcttttactggg

SEQ ID NO: 149097 - DNA, 79 bp, Homo sapiens
cttctccagggcattcgagtctccattgcacaatggccagccctggtgagtggcttttactgggtgggaacatgtctga

SEQ ID NO: 149098 - DNA, 70 bp, Homo sapiens
ttttattcccaagttctaatcaatttcttgtcattgtacttcacagacttttactccccttgtagataaa

SEQ ID NO: 149099 - DNA, 70 bp, Homo sapiens
caagttctaatcaatttcttgtcattgtacttcacagacttttactccccttgtagataaactgggtttg

SEQ ID NO: 149100 - DNA, 69 bp, Homo sapiens
ctaatcaatttcttgtcattgtacttcacagacttttactccccttgtagataaactgggtttgggttc

SEQ ID NO: 149101 - DNA, 70 bp, Homo sapiens
tcttgtcattgtacttcacagacttttactccccttgtagataaactgggtttgggttctgtggttccag

SEQ ID NO: 149102 - DNA, 69 bp, Homo sapiens
tacttcacagacttttactccccttgtagataaactgggtttgggttctgtggttccagtggaatatct

SEQ ID NO: 149103 - DNA, 69 bp, Homo sapiens
acttttactccccttgtagataaactgggtttgggttctgtggttccagtggaatatcttctggatcga

SEQ ID NO: 149104 - DNA, 74 bp, Homo sapiens
ttgtagataaactgggtttgggttctgtggttccagtggaatatcttctggatcgagagcttcggttcctgtca

SEQ ID NO: 149105 - DNA, 75 bp, Homo sapiens
taaactgggtttgggttctgtggttccagtggaatatcttctggatcgagagcttcggttcctgtcagatgccaa

SEQ ID NO: 149106 - DNA, 80 bp, Homo sapiens
ggttctgtggttccagtggaatatcttctggatcgagagcttcggttcctgtcagatgccaatgggttgcatctgtttca

SEQ ID NO: 149107 - DNA, 79 bp, Homo sapiens
ttccagtggaatatcttctggatcgagagcttcggttcctgtcagatgccaatgggttgcatctgtttcaggtatttaa

SEQ ID NO: 149108 - DNA, 78 bp, Homo sapiens
aatatcttctggatcgagagcttcggttcctgtcagatgccaatgggttgcatctgtttcaggtatttaacacttgct

SEQ ID NO: 149109 - DNA, 79 bp, Homo sapiens
tggatcgagagcttcggttcctgtcagatgccaatgggttgcatctgtttcaggtatttaacacttgctttagtcttga

SEQ ID NO: 149110 - DNA, 76 bp, Homo sapiens
ttcggttcctgtcagatgccaatgggttgcatctgtttcaggtatttaacacttgctttagtcttgagcctattat

SEQ ID NO: 149111 - DNA, 73 bp, Homo sapiens
tgctattcattttaacattcagttgttttcttcttttatctttaccagatgggaacagatagccaaaaccaga

SEQ ID NO: 149112 - DNA, 71 bp, Homo sapiens
taacattcagttgttttcttcttttatctttaccagatgggaacagatagccaaaaccagattcttttgga

SEQ ID NO: 149113 - DNA, 72 bp, Homo sapiens
ttcagttgttttcttcttttatctttaccagatgggaacagatagccaaaaccagattcttttggaacatgc

SEQ ID NO: 149114 - DNA, 75 bp, Homo sapiens
cttttatctttaccagatgggaacagatagccaaaaccagattcttttggaacatgctgcactgagagaaacagt

SEQ ID NO: 149115 - DNA, 77 bp, Homo sapiens
atctttaccagatgggaacagatagccaaaaccagattcttttggaacatgctgcactgagagaaacagttaatgct

SEQ ID NO: 149116 - DNA, 79 bp, Homo sapiens
gaacagatagccaaaaccagattcttttggaacatgctgcactgagagaaacagttaatgctttgatcagtgaccaaaa

SEQ ID NO: 149117 - DNA, 79 bp, Homo sapiens
tagccaaaaccagattcttttggaacatgctgcactgagagaaacagttaatgctttgatcagtgaccaaaagctacaa

SEQ ID NO: 149118 - DNA, 81 bp, Homo sapiens
accagattcttttggaacatgctgcactgagagaaacagttaatgctttgatcagtgaccaaaagctacaagagatattca

SEQ ID NO: 149119 - DNA, 80 bp, Homo sapiens
aacatgctgcactgagagaaacagttaatgctttgatcagtgaccaaaagctacaagagatattcagccgaggtaagaac

SEQ ID NO: 149120 - DNA, 76 bp, Homo sapiens
actgagagaaacagttaatgctttgatcagtgaccaaaagctacaagagatattcagccgaggtaagaacggatag

SEQ ID NO: 149121 - DNA, 75 bp, Homo sapiens
aaacagttaatgctttgatcagtgaccaaaagctacaagagatattcagccgaggtaagaacggatagtcttctg

SEQ ID NO: 149122 - DNA, 77 bp, Homo sapiens
taatgctttgatcagtgaccaaaagctacaagagatattcagccgaggtaagaacggatagtcttctgtccctgaac

SEQ ID NO: 149123 - DNA, 73 bp, Homo sapiens
aaatatagcttagccaaaaatactcaatactgactgatctcccttttaggtccctacagtgttcaaggtcaca

SEQ ID NO: 149124 - DNA, 71 bp, Homo sapiens
ccaaaaatactcaatactgactgatctcccttttaggtccctacagtgttcaaggtcacagggtcaaaata

SEQ ID NO: 149125 - DNA, 75 bp, Homo sapiens
aatactcaatactgactgatctcccttttaggtccctacagtgttcaaggtcacagggtcaaaatatatcagcca

SEQ ID NO: 149126 - DNA, 72 bp, Homo sapiens
actgatctcccttttaggtccctacagtgttcaaggtcacagggtcaaaatatatcagccagagggggaaga

SEQ ID NO: 149127 - DNA, 69 bp, Homo sapiens
ctcccttttaggtccctacagtgttcaaggtcacagggtcaaaatatatcagccagagggggaagaagg

SEQ ID NO: 149128 - DNA, 75 bp, Homo sapiens
cctacagtgttcaaggtcacagggtcaaaatatatcagccagagggggaagaagggtggctctatggtgttgtga

SEQ ID NO: 149129 - DNA, 77 bp, Homo sapiens
ttcaaggtcacagggtcaaaatatatcagccagagggggaagaagggtggctctatggtgttgtgagccatcaggac

SEQ ID NO: 149130 - DNA, 78 bp, Homo sapiens
acagggtcaaaatatatcagccagagggggaagaagggtggctctatggtgttgtgagccatcaggactccatcactc

SEQ ID NO: 149131 - DNA, 78 bp, Homo sapiens
aaaatatatcagccagagggggaagaagggtggctctatggtgttgtgagccatcaggactccatcactcgtcttatg

SEQ ID NO: 149132 - DNA, 77 bp, Homo sapiens
agagggggaagaagggtggctctatggtgttgtgagccatcaggactccatcactcgtcttatggaggtgtctgtaa

SEQ ID NO: 149133 - DNA, 80 bp, Homo sapiens
aagaagggtggctctatggtgttgtgagccatcaggactccatcactcgtcttatggaggtgtctgtaactgaggtgaga

SEQ ID NO: 149134 - DNA, 82 bp, Homo sapiens
ctctatggtgttgtgagccatcaggactccatcactcgtcttatggaggtgtctgtaactgaggtgagactctgtgttattc

SEQ ID NO: 149135 - DNA, 82 bp, Homo sapiens
tgttgtgagccatcaggactccatcactcgtcttatggaggtgtctgtaactgaggtgagactctgtgttattctgtctaag

SEQ ID NO: 149136 - DNA, 80 bp, Homo sapiens
atcaggactccatcactcgtcttatggaggtgtctgtaactgaggtgagactctgtgttattctgtctaaggtccatcca

SEQ ID NO: 149137 - DNA, 74 bp, Homo sapiens
ttatataattatgtctttatggacaaggcattaaatatctttttcccctcctactgtagagtggtgagatcaag

SEQ ID NO: 149138 - DNA, 73 bp, Homo sapiens
attatgtctttatggacaaggcattaaatatctttttcccctcctactgtagagtggtgagatcaagtcggta

SEQ ID NO: 149139 - DNA, 74 bp, Homo sapiens
tttatggacaaggcattaaatatctttttcccctcctactgtagagtggtgagatcaagtcggtagatcccaga

SEQ ID NO: 149140 - DNA, 78 bp, Homo sapiens
ttaaatatctttttcccctcctactgtagagtggtgagatcaagtcggtagatcccagactaatccatgtgatgctga

SEQ ID NO: 149141 - DNA, 80 bp, Homo sapiens
tttttcccctcctactgtagagtggtgagatcaagtcggtagatcccagactaatccatgtgatgctgatggataattca

SEQ ID NO: 149142 - DNA, 83 bp, Homo sapiens
cctcctactgtagagtggtgagatcaagtcggtagatcccagactaatccatgtgatgctgatggataattcagcgcctcaaa

SEQ ID NO: 149143 - DNA, 83 bp, Homo sapiens
gtggtgagatcaagtcggtagatcccagactaatccatgtgatgctgatggataattcagcgcctcaaagcgaggtacagtaa

SEQ ID NO: 149144 - DNA, 82 bp, Homo sapiens
agatcaagtcggtagatcccagactaatccatgtgatgctgatggataattcagcgcctcaaagcgaggtacagtaatggac

SEQ ID NO: 149145 - DNA, 84 bp, Homo sapiens
cggtagatcccagactaatccatgtgatgctgatggataattcagcgcctcaaagcgaggtacagtaatggactgcattcctga

SEQ ID NO: 149146 - DNA, 91 bp, Homo sapiens
taatccatgtgatgctgatggataattcagcgcctcaaagcgaggtacagtaatggactgcattcctgagcagactcatgagcttgcatta

SEQ ID NO: 149147 - DNA, 91 bp, Homo sapiens
atgtgatgctgatggataattcagcgcctcaaagcgaggtacagtaatggactgcattcctgagcagactcatgagcttgcattatcttgc

SEQ ID NO: 149148 - DNA, 63 bp, Homo sapiens
tgaaagtttccttgtaatcttttttgaattttgttttgtaggggggtacgttaaaagcagtaa

SEQ ID NO: 149149 - DNA, 63 bp, Homo sapiens
tgtaatcttttttgaattttgttttgtaggggggtacgttaaaagcagtaaaatcttccaaag

SEQ ID NO: 149150 - DNA, 64 bp, Homo sapiens
gaattttgttttgtaggggggtacgttaaaagcagtaaaatcttccaaaggaaagaagaagaga

SEQ ID NO: 149151 - DNA, 67 bp, Homo sapiens
tgttttgtaggggggtacgttaaaagcagtaaaatcttccaaaggaaagaagaagagagaaagcata

SEQ ID NO: 149152 - DNA, 68 bp, Homo sapiens
gggtacgttaaaagcagtaaaatcttccaaaggaaagaagaagagagaaagcatagaggggaaagatg

SEQ ID NO: 149153 - DNA, 70 bp, Homo sapiens
ttaaaagcagtaaaatcttccaaaggaaagaagaagagagaaagcatagaggggaaagatggccggagga

SEQ ID NO: 149154 - DNA, 70 bp, Homo sapiens
taaaatcttccaaaggaaagaagaagagagaaagcatagaggggaaagatggccggaggaggaaaagtgc

SEQ ID NO: 149155 - DNA, 70 bp, Homo sapiens
aaaggaaagaagaagagagaaagcatagaggggaaagatggccggaggaggaaaagtgcttcggactctg

SEQ ID NO: 149156 - DNA, 75 bp, Homo sapiens
gagagaaagcatagaggggaaagatggccggaggaggaaaagtgcttcggactctgggtgtgaccctgcatcaaa

SEQ ID NO: 149157 - DNA, 72 bp, Homo sapiens
atagaggggaaagatggccggaggaggaaaagtgcttcggactctgggtgtgaccctgcatcaaagaaatta

SEQ ID NO: 149158 - DNA, 70 bp, Homo sapiens
gggaaagatggccggaggaggaaaagtgcttcggactctgggtgtgaccctgcatcaaagaaattaaaag

SEQ ID NO: 149159 - DNA, 70 bp, Homo sapiens
ggccggaggaggaaaagtgcttcggactctgggtgtgaccctgcatcaaagaaattaaaaggagacaggg

SEQ ID NO: 149160 - DNA, 72 bp, Homo sapiens
aaagtgcttcggactctgggtgtgaccctgcatcaaagaaattaaaaggagacaggggtgaagtagacagta

SEQ ID NO: 149161 - DNA, 74 bp, Homo sapiens
actctgggtgtgaccctgcatcaaagaaattaaaaggagacaggggtgaagtagacagtaatgggagcgatgga

SEQ ID NO: 149162 - DNA, 76 bp, Homo sapiens
tgtgaccctgcatcaaagaaattaaaaggagacaggggtgaagtagacagtaatgggagcgatggaggtgaggcaa

SEQ ID NO: 149163 - DNA, 72 bp, Homo sapiens
ttaaaaggagacaggggtgaagtagacagtaatgggagcgatggaggtgaggcaagccgagggccctggaaa

SEQ ID NO: 149164 - DNA, 72 bp, Homo sapiens
agacaggggtgaagtagacagtaatgggagcgatggaggtgaggcaagccgagggccctggaaaggagggaa

SEQ ID NO: 149165 - DNA, 76 bp, Homo sapiens
gtgaagtagacagtaatgggagcgatggaggtgaggcaagccgagggccctggaaaggagggaatgccagtggaga

SEQ ID NO: 149166 - DNA, 75 bp, Homo sapiens
agtaatgggagcgatggaggtgaggcaagccgagggccctggaaaggagggaatgccagtggagagccagggctg

SEQ ID NO: 149167 - DNA, 79 bp, Homo sapiens
atggaggtgaggcaagccgagggccctggaaaggagggaatgccagtggagagccagggctggatcagagagccaagca

SEQ ID NO: 149168 - DNA, 79 bp, Homo sapiens
gcaagccgagggccctggaaaggagggaatgccagtggagagccagggctggatcagagagccaagcagccaccgtcta

SEQ ID NO: 149169 - DNA, 77 bp, Homo sapiens
agggccctggaaaggagggaatgccagtggagagccagggctggatcagagagccaagcagccaccgtctacatttg

SEQ ID NO: 149170 - DNA, 78 bp, Homo sapiens
aggagggaatgccagtggagagccagggctggatcagagagccaagcagccaccgtctacatttgtcccccagataaa

SEQ ID NO: 149171 - DNA, 79 bp, Homo sapiens
atgccagtggagagccagggctggatcagagagccaagcagccaccgtctacatttgtcccccagataaaccgcaacat

SEQ ID NO: 149172 - DNA, 78 bp, Homo sapiens
agccagggctggatcagagagccaagcagccaccgtctacatttgtcccccagataaaccgcaacattcgctttgcca

SEQ ID NO: 149173 - DNA, 73 bp, Homo sapiens
agccaagcagccaccgtctacatttgtcccccagataaaccgcaacattcgctttgccacttacaccaaagaa

SEQ ID NO: 149174 - DNA, 69 bp, Homo sapiens
agccaccgtctacatttgtcccccagataaaccgcaacattcgctttgccacttacaccaaagaaaacg

SEQ ID NO: 149175 - DNA, 72 bp, Homo sapiens
tctacatttgtcccccagataaaccgcaacattcgctttgccacttacaccaaagaaaacggcaggactctg

SEQ ID NO: 149176 - DNA, 76 bp, Homo sapiens
cagataaaccgcaacattcgctttgccacttacaccaaagaaaacggcaggactctggtggtgcaggatgagcctg

SEQ ID NO: 149177 - DNA, 74 bp, Homo sapiens
aaaccgcaacattcgctttgccacttacaccaaagaaaacggcaggactctggtggtgcaggatgagcctgtag

SEQ ID NO: 149178 - DNA, 76 bp, Homo sapiens
acttacaccaaagaaaacggcaggactctggtggtgcaggatgagcctgtaggtggggacacacctgcatctttca

SEQ ID NO: 149179 - DNA, 78 bp, Homo sapiens
aagaaaacggcaggactctggtggtgcaggatgagcctgtaggtggggacacacctgcatctttcactccatattcta

SEQ ID NO: 149180 - DNA, 82 bp, Homo sapiens
aggactctggtggtgcaggatgagcctgtaggtggggacacacctgcatctttcactccatattctacagccacaggtcaga

SEQ ID NO: 149181 - DNA, 81 bp, Homo sapiens
gtggtgcaggatgagcctgtaggtggggacacacctgcatctttcactccatattctacagccacaggtcagacacctttg

SEQ ID NO: 149182 - DNA, 79 bp, Homo sapiens
atgagcctgtaggtggggacacacctgcatctttcactccatattctacagccacaggtcagacacctttggccccaga

SEQ ID NO: 149183 - DNA, 76 bp, Homo sapiens
gtaggtggggacacacctgcatctttcactccatattctacagccacaggtcagacacctttggccccagaggtgg

SEQ ID NO: 149184 - DNA, 75 bp, Homo sapiens
acctgcatctttcactccatattctacagccacaggtcagacacctttggccccagaggtgggtggagccgaaaa

SEQ ID NO: 149185 - DNA, 73 bp, Homo sapiens
atctttcactccatattctacagccacaggtcagacacctttggccccagaggtgggtggagccgaaaacaaa

SEQ ID NO: 149186 - DNA, 72 bp, Homo sapiens
atattctacagccacaggtcagacacctttggccccagaggtgggtggagccgaaaacaaagaggcaggaaa

SEQ ID NO: 149187 - DNA, 69 bp, Homo sapiens
acaggtcagacacctttggccccagaggtgggtggagccgaaaacaaagaggcaggaaaaacactggaa

SEQ ID NO: 149188 - DNA, 67 bp, Homo sapiens
agacacctttggccccagaggtgggtggagccgaaaacaaagaggcaggaaaaacactggaacaagt

SEQ ID NO: 149189 - DNA, 70 bp, Homo sapiens
cccagaggtgggtggagccgaaaacaaagaggcaggaaaaacactggaacaagttggccagggcatagtg

SEQ ID NO: 149190 - DNA, 70 bp, Homo sapiens
aggtgggtggagccgaaaacaaagaggcaggaaaaacactggaacaagttggccagggcatagtggcttc

SEQ ID NO: 149191 - DNA, 73 bp, Homo sapiens
aaaacaaagaggcaggaaaaacactggaacaagttggccagggcatagtggcttccgcagctgtggtcactac

SEQ ID NO: 149192 - DNA, 76 bp, Homo sapiens
aggcaggaaaaacactggaacaagttggccagggcatagtggcttccgcagctgtggtcactaccgccagctccac

SEQ ID NO: 149193 - DNA, 74 bp, Homo sapiens
aaaacactggaacaagttggccagggcatagtggcttccgcagctgtggtcactaccgccagctccaccccaaa

SEQ ID NO: 149194 - DNA, 79 bp, Homo sapiens
acaagttggccagggcatagtggcttccgcagctgtggtcactaccgccagctccaccccaaacacagtgaggatctca

SEQ ID NO: 149195 - DNA, 79 bp, Homo sapiens
agggcatagtggcttccgcagctgtggtcactaccgccagctccaccccaaacacagtgaggatctcagacactggcct

SEQ ID NO: 149196 - DNA, 82 bp, Homo sapiens
tagtggcttccgcagctgtggtcactaccgccagctccaccccaaacacagtgaggatctcagacactggccttgcagcagg

SEQ ID NO: 149197 - DNA, 81 bp, Homo sapiens
ctgtggtcactaccgccagctccaccccaaacacagtgaggatctcagacactggccttgcagcagggactgtgccagaaa

SEQ ID NO: 149198 - DNA, 79 bp, Homo sapiens
actaccgccagctccaccccaaacacagtgaggatctcagacactggccttgcagcagggactgtgccagaaaaacaga

SEQ ID NO: 149199 - DNA, 79 bp, Homo sapiens
agctccaccccaaacacagtgaggatctcagacactggccttgcagcagggactgtgccagaaaaacagaaaggcagcc

SEQ ID NO: 149200 - DNA, 79 bp, Homo sapiens
aaacacagtgaggatctcagacactggccttgcagcagggactgtgccagaaaaacagaaaggcagccggtcgcaggcc

SEQ ID NO: 149201 - DNA, 76 bp, Homo sapiens
acactggccttgcagcagggactgtgccagaaaaacagaaaggcagccggtcgcaggcctcgggagaggtgagtta

SEQ ID NO: 149202 - DNA, 76 bp, Homo sapiens
tgtgccagaaaaacagaaaggcagccggtcgcaggcctcgggagaggtgagttacttcaggggcagatttgcaaga

SEQ ID NO: 149203 - DNA, 72 bp, Homo sapiens
aaaaacagaaaggcagccggtcgcaggcctcgggagaggtgagttacttcaggggcagatttgcaagatttg

SEQ ID NO: 149204 - DNA, 82 bp, Homo sapiens
tagattgtcatgagaagccagcatcactaattcaggctatcttcctttcagaattcaagaaattctattctggcctcttctg

SEQ ID NO: 149205 - DNA, 78 bp, Homo sapiens
agaagccagcatcactaattcaggctatcttcctttcagaattcaagaaattctattctggcctcttctggatttgga

SEQ ID NO: 149206 - DNA, 77 bp, Homo sapiens
atcactaattcaggctatcttcctttcagaattcaagaaattctattctggcctcttctggatttggagcacctctc

SEQ ID NO: 149207 - DNA, 75 bp, Homo sapiens
ttcaggctatcttcctttcagaattcaagaaattctattctggcctcttctggatttggagcacctctccctagt

SEQ ID NO: 149208 - DNA, 76 bp, Homo sapiens
tttcagaattcaagaaattctattctggcctcttctggatttggagcacctctccctagttcatcgcaacctttga

SEQ ID NO: 149209 - DNA, 73 bp, Homo sapiens
attcaagaaattctattctggcctcttctggatttggagcacctctccctagttcatcgcaacctttgacttt

SEQ ID NO: 149210 - DNA, 73 bp, Homo sapiens
aattctattctggcctcttctggatttggagcacctctccctagttcatcgcaacctttgacttttggaagtg

SEQ ID NO: 149211 - DNA, 74 bp, Homo sapiens
tcttctggatttggagcacctctccctagttcatcgcaacctttgacttttggaagtggaaggagccagtccaa

SEQ ID NO: 149212 - DNA, 72 bp, Homo sapiens
atttggagcacctctccctagttcatcgcaacctttgacttttggaagtggaaggagccagtccaatggtgt

SEQ ID NO: 149213 - DNA, 75 bp, Homo sapiens
tctccctagttcatcgcaacctttgacttttggaagtggaaggagccagtccaatggtgttctagccacagagaa

SEQ ID NO: 149214 - DNA, 74 bp, Homo sapiens
ctagttcatcgcaacctttgacttttggaagtggaaggagccagtccaatggtgttctagccacagagaacaaa

SEQ ID NO: 149215 - DNA, 69 bp, Homo sapiens
aacctttgacttttggaagtggaaggagccagtccaatggtgttctagccacagagaacaaacctttgg

SEQ ID NO: 149216 - DNA, 70 bp, Homo sapiens
acttttggaagtggaaggagccagtccaatggtgttctagccacagagaacaaacctttgggcttctctt

SEQ ID NO: 149217 - DNA, 76 bp, Homo sapiens
aaggagccagtccaatggtgttctagccacagagaacaaacctttgggcttctcttttggctgtagctctgcacaa

SEQ ID NO: 149218 - DNA, 78 bp, Homo sapiens
tccaatggtgttctagccacagagaacaaacctttgggcttctcttttggctgtagctctgcacaagaggcacagaaa

SEQ ID NO: 149219 - DNA, 80 bp, Homo sapiens
tgttctagccacagagaacaaacctttgggcttctcttttggctgtagctctgcacaagaggcacagaaagacactgatc

SEQ ID NO: 149220 - DNA, 77 bp, Homo sapiens
agagaacaaacctttgggcttctcttttggctgtagctctgcacaagaggcacagaaagacactgatctctccaaaa

SEQ ID NO: 149221 - DNA, 75 bp, Homo sapiens
ctttgggcttctcttttggctgtagctctgcacaagaggcacagaaagacactgatctctccaaaaacttgtttt

SEQ ID NO: 149222 - DNA, 80 bp, Homo sapiens
ttctcttttggctgtagctctgcacaagaggcacagaaagacactgatctctccaaaaacttgttttttcaatgcatgtc

SEQ ID NO: 149223 - DNA, 78 bp, Homo sapiens
tgtagctctgcacaagaggcacagaaagacactgatctctccaaaaacttgttttttcaatgcatgtcccaaacttta

SEQ ID NO: 149224 - DNA, 73 bp, Homo sapiens
cacaagaggcacagaaagacactgatctctccaaaaacttgttttttcaatgcatgtcccaaactttacctac

SEQ ID NO: 149225 - DNA, 70 bp, Homo sapiens
acagaaagacactgatctctccaaaaacttgttttttcaatgcatgtcccaaactttacctaccagtaac

SEQ ID NO: 149226 - DNA, 70 bp, Homo sapiens
actgatctctccaaaaacttgttttttcaatgcatgtcccaaactttacctaccagtaactacttcacta

SEQ ID NO: 149227 - DNA, 68 bp, Homo sapiens
ctctccaaaaacttgttttttcaatgcatgtcccaaactttacctaccagtaactacttcactactgt

SEQ ID NO: 149228 - DNA, 69 bp, Homo sapiens
acttgttttttcaatgcatgtcccaaactttacctaccagtaactacttcactactgtttcagagagtt

SEQ ID NO: 149229 - DNA, 71 bp, Homo sapiens
aaactttacctaccagtaactacttcactactgtttcagagagtttggctgatgattcttctagtcgggac

SEQ ID NO: 149230 - DNA, 75 bp, Homo sapiens
ttacctaccagtaactacttcactactgtttcagagagtttggctgatgattcttctagtcgggactcattcaaa

SEQ ID NO: 149231 - DNA, 79 bp, Homo sapiens
actactgtttcagagagtttggctgatgattcttctagtcgggactcattcaaacaaagccttgagagcctgagctcag

SEQ ID NO: 149232 - DNA, 80 bp, Homo sapiens
tgatgattcttctagtcgggactcattcaaacaaagccttgagagcctgagctcaggcctgtgtaaaggcagatccgttc

SEQ ID NO: 149233 - DNA, 77 bp, Homo sapiens
ttcttctagtcgggactcattcaaacaaagccttgagagcctgagctcaggcctgtgtaaaggcagatccgttcttg

SEQ ID NO: 149234 - DNA, 78 bp, Homo sapiens
ggactcattcaaacaaagccttgagagcctgagctcaggcctgtgtaaaggcagatccgttcttggaacagacactaa

SEQ ID NO: 149235 - DNA, 78 bp, Homo sapiens
acaaagccttgagagcctgagctcaggcctgtgtaaaggcagatccgttcttggaacagacactaagccaggctctaa

SEQ ID NO: 149236 - DNA, 79 bp, Homo sapiens
agctcaggcctgtgtaaaggcagatccgttcttggaacagacactaagccaggctctaaggctggcagctctgtggacc

SEQ ID NO: 149237 - DNA, 78 bp, Homo sapiens
tgtgtaaaggcagatccgttcttggaacagacactaagccaggctctaaggctggcagctctgtggaccggaaagtgc

SEQ ID NO: 149238 - DNA, 79 bp, Homo sapiens
agatccgttcttggaacagacactaagccaggctctaaggctggcagctctgtggaccggaaagtgcctgcagagtcca

SEQ ID NO: 149239 - DNA, 80 bp, Homo sapiens
ttcttggaacagacactaagccaggctctaaggctggcagctctgtggaccggaaagtgcctgcagagtccatgcccacc

SEQ ID NO: 149240 - DNA, 81 bp, Homo sapiens
agacactaagccaggctctaaggctggcagctctgtggaccggaaagtgcctgcagagtccatgcccaccctcactccagc

SEQ ID NO: 149241 - DNA, 78 bp, Homo sapiens
aggctctaaggctggcagctctgtggaccggaaagtgcctgcagagtccatgcccaccctcactccagccttcccacg

SEQ ID NO: 149242 - DNA, 78 bp, Homo sapiens
tggcagctctgtggaccggaaagtgcctgcagagtccatgcccaccctcactccagccttcccacggagcctcctaaa

SEQ ID NO: 149243 - DNA, 76 bp, Homo sapiens
ctctgtggaccggaaagtgcctgcagagtccatgcccaccctcactccagccttcccacggagcctcctaaatgcc

SEQ ID NO: 149244 - DNA, 73 bp, Homo sapiens
cggaaagtgcctgcagagtccatgcccaccctcactccagccttcccacggagcctcctaaatgcccgtaccc

SEQ ID NO: 149245 - DNA, 74 bp, Homo sapiens
agagtccatgcccaccctcactccagccttcccacggagcctcctaaatgcccgtaccccagagaatcatgaaa

SEQ ID NO: 149246 - DNA, 71 bp, Homo sapiens
cccaccctcactccagccttcccacggagcctcctaaatgcccgtaccccagagaatcatgaaaatctatt

SEQ ID NO: 149247 - DNA, 69 bp, Homo sapiens
ttcccacggagcctcctaaatgcccgtaccccagagaatcatgaaaatctatttttacagccccccaaa

SEQ ID NO: 149248 - DNA, 69 bp, Homo sapiens
ctcctaaatgcccgtaccccagagaatcatgaaaatctatttttacagccccccaaattgtcccgagaa

SEQ ID NO: 149249 - DNA, 69 bp, Homo sapiens
aaatgcccgtaccccagagaatcatgaaaatctatttttacagccccccaaattgtcccgagaagagcc

SEQ ID NO: 149250 - DNA, 70 bp, Homo sapiens
agagaatcatgaaaatctatttttacagccccccaaattgtcccgagaagagccttctaatcctttcctg

SEQ ID NO: 149251 - DNA, 72 bp, Homo sapiens
aattgtcccgagaagagccttctaatcctttcctggcatttgtggagaaagttgaacacagccctttcagta

SEQ ID NO: 149252 - DNA, 75 bp, Homo sapiens
agaagagccttctaatcctttcctggcatttgtggagaaagttgaacacagccctttcagtagttttgcatctca

SEQ ID NO: 149253 - DNA, 78 bp, Homo sapiens
taatcctttcctggcatttgtggagaaagttgaacacagccctttcagtagttttgcatctcaggcatcaggtagctc

SEQ ID NO: 149254 - DNA, 79 bp, Homo sapiens
agaaagttgaacacagccctttcagtagttttgcatctcaggcatcaggtagctcctcttctgctaccactgtcacctc

SEQ ID NO: 149255 - DNA, 80 bp, Homo sapiens
ttgaacacagccctttcagtagttttgcatctcaggcatcaggtagctcctcttctgctaccactgtcacctccaaggtg

SEQ ID NO: 149256 - DNA, 80 bp, Homo sapiens
cctttcagtagttttgcatctcaggcatcaggtagctcctcttctgctaccactgtcacctccaaggtggcacccagctg

SEQ ID NO: 149257 - DNA, 81 bp, Homo sapiens
tagttttgcatctcaggcatcaggtagctcctcttctgctaccactgtcacctccaaggtggcacccagctggcccgagtc

SEQ ID NO: 149258 - DNA, 84 bp, Homo sapiens
tctcaggcatcaggtagctcctcttctgctaccactgtcacctccaaggtggcacccagctggcccgagtctcactcctctgca

SEQ ID NO: 149259 - DNA, 82 bp, Homo sapiens
tagctcctcttctgctaccactgtcacctccaaggtggcacccagctggcccgagtctcactcctctgcagattcggcatct

SEQ ID NO: 149260 - DNA, 78 bp, Homo sapiens
actgtcacctccaaggtggcacccagctggcccgagtctcactcctctgcagattcggcatctttagcaaagaagaaa

SEQ ID NO: 149261 - DNA, 76 bp, Homo sapiens
aaggtggcacccagctggcccgagtctcactcctctgcagattcggcatctttagcaaagaagaaacccctcttca

SEQ ID NO: 149262 - DNA, 75 bp, Homo sapiens
acccagctggcccgagtctcactcctctgcagattcggcatctttagcaaagaagaaacccctcttcattacaac

SEQ ID NO: 149263 - DNA, 76 bp, Homo sapiens
ccgagtctcactcctctgcagattcggcatctttagcaaagaagaaacccctcttcattacaactgactcctccaa

SEQ ID NO: 149264 - DNA, 76 bp, Homo sapiens
actcctctgcagattcggcatctttagcaaagaagaaacccctcttcattacaactgactcctccaagctagtatc

SEQ ID NO: 149265 - DNA, 74 bp, Homo sapiens
agattcggcatctttagcaaagaagaaacccctcttcattacaactgactcctccaagctagtatctggtgttc

SEQ ID NO: 149266 - DNA, 74 bp, Homo sapiens
aaagaagaaacccctcttcattacaactgactcctccaagctagtatctggtgttctgggctcagctcttacca

SEQ ID NO: 149267 - DNA, 77 bp, Homo sapiens
attacaactgactcctccaagctagtatctggtgttctgggctcagctcttaccagtgggggcccaagcctctctgc

SEQ ID NO: 149268 - DNA, 76 bp, Homo sapiens
actcctccaagctagtatctggtgttctgggctcagctcttaccagtgggggcccaagcctctctgccatggggaa

SEQ ID NO: 149269 - DNA, 79 bp, Homo sapiens
tagtatctggtgttctgggctcagctcttaccagtgggggcccaagcctctctgccatggggaatggccgctccagctc

SEQ ID NO: 149270 - DNA, 80 bp, Homo sapiens
tgttctgggctcagctcttaccagtgggggcccaagcctctctgccatggggaatggccgctccagctcgcccaccagca

SEQ ID NO: 149271 - DNA, 81 bp, Homo sapiens
ctcagctcttaccagtgggggcccaagcctctctgccatggggaatggccgctccagctcgcccaccagcagcctcactca

SEQ ID NO: 149272 - DNA, 81 bp, Homo sapiens
taccagtgggggcccaagcctctctgccatggggaatggccgctccagctcgcccaccagcagcctcactcagcccattga

SEQ ID NO: 149273 - DNA, 84 bp, Homo sapiens
aagcctctctgccatggggaatggccgctccagctcgcccaccagcagcctcactcagcccattgagatgccaactctctcctc

SEQ ID NO: 149274 - DNA, 85 bp, Homo sapiens
tctctgccatggggaatggccgctccagctcgcccaccagcagcctcactcagcccattgagatgccaactctctcctctagccc

SEQ ID NO: 149275 - DNA, 83 bp, Homo sapiens
aatggccgctccagctcgcccaccagcagcctcactcagcccattgagatgccaactctctcctctagccccacagaggagag

SEQ ID NO: 149276 - DNA, 84 bp, Homo sapiens
tccagctcgcccaccagcagcctcactcagcccattgagatgccaactctctcctctagccccacagaggagaggccaactgtg

SEQ ID NO: 149277 - DNA, 82 bp, Homo sapiens
tcactcagcccattgagatgccaactctctcctctagccccacagaggagaggccaactgtggggcctgggcagcaggacaa

SEQ ID NO: 149278 - DNA, 79 bp, Homo sapiens
agcccattgagatgccaactctctcctctagccccacagaggagaggccaactgtggggcctgggcagcaggacaatcc

SEQ ID NO: 149279 - DNA, 71 bp, Homo sapiens
cacagaggagaggccaactgtggggcctgggcagcaggacaatcccctcctcaaaacctttagtaacgtct

SEQ ID NO: 149280 - DNA, 69 bp, Homo sapiens
aggagaggccaactgtggggcctgggcagcaggacaatcccctcctcaaaacctttagtaacgtctttg

SEQ ID NO: 149281 - DNA, 71 bp, Homo sapiens
aactgtggggcctgggcagcaggacaatcccctcctcaaaacctttagtaacgtctttggcaggcactcag

SEQ ID NO: 149282 - DNA, 73 bp, Homo sapiens
ggcagcaggacaatcccctcctcaaaacctttagtaacgtctttggcaggcactcaggcggctttctgtcctc

SEQ ID NO: 149283 - DNA, 69 bp, Homo sapiens
aggacaatcccctcctcaaaacctttagtaacgtctttggcaggcactcaggcggctttctgtcctccc

SEQ ID NO: 149284 - DNA, 71 bp, Homo sapiens
ctcaaaacctttagtaacgtctttggcaggcactcaggcggctttctgtcctccccggcagatttttcaca

SEQ ID NO: 149285 - DNA, 72 bp, Homo sapiens
tttagtaacgtctttggcaggcactcaggcggctttctgtcctccccggcagatttttcacaggagaacaaa

SEQ ID NO: 149286 - DNA, 74 bp, Homo sapiens
tctttggcaggcactcaggcggctttctgtcctccccggcagatttttcacaggagaacaaagctccttttgaa

SEQ ID NO: 149287 - DNA, 72 bp, Homo sapiens
actcaggcggctttctgtcctccccggcagatttttcacaggagaacaaagctccttttgaagctgtgaaaa

SEQ ID NO: 149288 - DNA, 71 bp, Homo sapiens
ctttctgtcctccccggcagatttttcacaggagaacaaagctccttttgaagctgtgaaaaggttctcac

SEQ ID NO: 149289 - DNA, 73 bp, Homo sapiens
tccccggcagatttttcacaggagaacaaagctccttttgaagctgtgaaaaggttctcactggatgaacgaa

SEQ ID NO: 149290 - DNA, 73 bp, Homo sapiens
agatttttcacaggagaacaaagctccttttgaagctgtgaaaaggttctcactggatgaacgaagcttggct

SEQ ID NO: 149291 - DNA, 76 bp, Homo sapiens
aggagaacaaagctccttttgaagctgtgaaaaggttctcactggatgaacgaagcttggcttgcagacaagactc

SEQ ID NO: 149292 - DNA, 76 bp, Homo sapiens
aaagctccttttgaagctgtgaaaaggttctcactggatgaacgaagcttggcttgcagacaagactcggactcca

SEQ ID NO: 149293 - DNA, 78 bp, Homo sapiens
ttttgaagctgtgaaaaggttctcactggatgaacgaagcttggcttgcagacaagactcggactccagcaccaacag

SEQ ID NO: 149294 - DNA, 78 bp, Homo sapiens
aaaaggttctcactggatgaacgaagcttggcttgcagacaagactcggactccagcaccaacagtgacctgtcagat

SEQ ID NO: 149295 - DNA, 85 bp, Homo sapiens
tctcactggatgaacgaagcttggcttgcagacaagactcggactccagcaccaacagtgacctgtcagatttgagtgactctga

SEQ ID NO: 149296 - DNA, 85 bp, Homo sapiens
aacgaagcttggcttgcagacaagactcggactccagcaccaacagtgacctgtcagatttgagtgactctgaggagcagctgca

SEQ ID NO: 149297 - DNA, 87 bp, Homo sapiens
ttggcttgcagacaagactcggactccagcaccaacagtgacctgtcagatttgagtgactctgaggagcagctgcaggctaagaca

SEQ ID NO: 149298 - DNA, 84 bp, Homo sapiens
acaagactcggactccagcaccaacagtgacctgtcagatttgagtgactctgaggagcagctgcaggctaagacaggcctgaa

SEQ ID NO: 149299 - DNA, 83 bp, Homo sapiens
actccagcaccaacagtgacctgtcagatttgagtgactctgaggagcagctgcaggctaagacaggcctgaagggaattcca

SEQ ID NO: 149300 - DNA, 84 bp, Homo sapiens
aacagtgacctgtcagatttgagtgactctgaggagcagctgcaggctaagacaggcctgaagggaattccagagcacctgatg

SEQ ID NO: 149301 - DNA, 82 bp, Homo sapiens
acctgtcagatttgagtgactctgaggagcagctgcaggctaagacaggcctgaagggaattccagagcacctgatggggaa

SEQ ID NO: 149302 - DNA, 81 bp, Homo sapiens
tttgagtgactctgaggagcagctgcaggctaagacaggcctgaagggaattccagagcacctgatggggaagctgggccc

SEQ ID NO: 149303 - DNA, 78 bp, Homo sapiens
aggagcagctgcaggctaagacaggcctgaagggaattccagagcacctgatggggaagctgggccccaatggggagc

SEQ ID NO: 149304 - DNA, 80 bp, Homo sapiens
ctgcaggctaagacaggcctgaagggaattccagagcacctgatggggaagctgggccccaatggggagcgcagtgctga

SEQ ID NO: 149305 - DNA, 80 bp, Homo sapiens
taagacaggcctgaagggaattccagagcacctgatggggaagctgggccccaatggggagcgcagtgctgagctgttgc

SEQ ID NO: 149306 - DNA, 79 bp, Homo sapiens
ttccagagcacctgatggggaagctgggccccaatggggagcgcagtgctgagctgttgctgggcaaaagcaaagggaa

SEQ ID NO: 149307 - DNA, 77 bp, Homo sapiens
cctgatggggaagctgggccccaatggggagcgcagtgctgagctgttgctgggcaaaagcaaagggaagcaggccc

SEQ ID NO: 149308 - DNA, 73 bp, Homo sapiens
gtgctgagctgttgctgggcaaaagcaaagggaagcaggcccccaagggccggcctcggactgcccccctgaa

SEQ ID NO: 149309 - DNA, 68 bp, Homo sapiens
aaaagcaaagggaagcaggcccccaagggccggcctcggactgcccccctgaaaggtgatcctgctgg

SEQ ID NO: 149310 - DNA, 69 bp, Homo sapiens
agggaagcaggcccccaagggccggcctcggactgcccccctgaaaggtgatcctgctggggctatatt

SEQ ID NO: 149311 - DNA, 77 bp, Homo sapiens
tgtttacacctcatgacaaacttttcttctctcccccttgccacagttggccagtcagtgctgaaagatgtaagcaa

SEQ ID NO: 149312 - DNA, 77 bp, Homo sapiens
ctcatgacaaacttttcttctctcccccttgccacagttggccagtcagtgctgaaagatgtaagcaaagtgaagaa

SEQ ID NO: 149313 - DNA, 75 bp, Homo sapiens
aaacttttcttctctcccccttgccacagttggccagtcagtgctgaaagatgtaagcaaagtgaagaagctgaa

SEQ ID NO: 149314 - DNA, 81 bp, Homo sapiens
ttctctcccccttgccacagttggccagtcagtgctgaaagatgtaagcaaagtgaagaagctgaagcaatctggagagcc

SEQ ID NO: 149315 - DNA, 84 bp, Homo sapiens
ttgccacagttggccagtcagtgctgaaagatgtaagcaaagtgaagaagctgaagcaatctggagagcccttcctgcaggatg

SEQ ID NO: 149316 - DNA, 86 bp, Homo sapiens
ccagtcagtgctgaaagatgtaagcaaagtgaagaagctgaagcaatctggagagcccttcctgcaggatgggtcatgcatcaatg

SEQ ID NO: 149317 - DNA, 86 bp, Homo sapiens
ctgaaagatgtaagcaaagtgaagaagctgaagcaatctggagagcccttcctgcaggatgggtcatgcatcaatgtggcacctca

SEQ ID NO: 149318 - DNA, 88 bp, Homo sapiens
atgtaagcaaagtgaagaagctgaagcaatctggagagcccttcctgcaggatgggtcatgcatcaatgtggcacctcatctgcacaa

SEQ ID NO: 149319 - DNA, 88 bp, Homo sapiens
agtgaagaagctgaagcaatctggagagcccttcctgcaggatgggtcatgcatcaatgtggcacctcatctgcacaagtgtcgtgaa

SEQ ID NO: 149320 - DNA, 89 bp, Homo sapiens
ctgaagcaatctggagagcccttcctgcaggatgggtcatgcatcaatgtggcacctcatctgcacaagtgtcgtgaatgccgcctgga

SEQ ID NO: 149321 - DNA, 87 bp, Homo sapiens
atctggagagcccttcctgcaggatgggtcatgcatcaatgtggcacctcatctgcacaagtgtcgtgaatgccgcctggagcggta

SEQ ID NO: 149322 - DNA, 84 bp, Homo sapiens
tcctgcaggatgggtcatgcatcaatgtggcacctcatctgcacaagtgtcgtgaatgccgcctggagcggtaccggaagttta

SEQ ID NO: 149323 - DNA, 80 bp, Homo sapiens
atgggtcatgcatcaatgtggcacctcatctgcacaagtgtcgtgaatgccgcctggagcggtaccggaagtttaaggaa

SEQ ID NO: 149324 - DNA, 78 bp, Homo sapiens
atcaatgtggcacctcatctgcacaagtgtcgtgaatgccgcctggagcggtaccggaagtttaaggaacaggagcaa

SEQ ID NO: 149325 - DNA, 77 bp, Homo sapiens
acctcatctgcacaagtgtcgtgaatgccgcctggagcggtaccggaagtttaaggaacaggagcaagatgattcta

SEQ ID NO: 149326 - DNA, 77 bp, Homo sapiens
atctgcacaagtgtcgtgaatgccgcctggagcggtaccggaagtttaaggaacaggagcaagatgattctactgta

SEQ ID NO: 149327 - DNA, 74 bp, Homo sapiens
tcgtgaatgccgcctggagcggtaccggaagtttaaggaacaggagcaagatgattctactgtagcctgccgtt

SEQ ID NO: 149328 - DNA, 71 bp, Homo sapiens
cctggagcggtaccggaagtttaaggaacaggagcaagatgattctactgtagcctgccgtttctttcact

SEQ ID NO: 149329 - DNA, 71 bp, Homo sapiens
taccggaagtttaaggaacaggagcaagatgattctactgtagcctgccgtttctttcacttccggaggta

SEQ ID NO: 149330 - DNA, 70 bp, Homo sapiens
agtttaaggaacaggagcaagatgattctactgtagcctgccgtttctttcacttccggaggtacccaaa

SEQ ID NO: 149331 - DNA, 70 bp, Homo sapiens
aacaggagcaagatgattctactgtagcctgccgtttctttcacttccggaggtacccaaactcctgttt

SEQ ID NO: 149332 - DNA, 68 bp, Homo sapiens
aagatgattctactgtagcctgccgtttctttcacttccggaggtacccaaactcctgttttcctcct

SEQ ID NO: 149333 - DNA, 77 bp, Homo sapiens
ttagtttgcgttgctcctgcgatttaccatgtatttgatcatgtctcaggttgatcttcactcgaaaaggggtactc

SEQ ID NO: 149334 - DNA, 77 bp, Homo sapiens
cgttgctcctgcgatttaccatgtatttgatcatgtctcaggttgatcttcactcgaaaaggggtactccgtgtgga

SEQ ID NO: 149335 - DNA, 72 bp, Homo sapiens
ttaccatgtatttgatcatgtctcaggttgatcttcactcgaaaaggggtactccgtgtggaggggttttta

SEQ ID NO: 149336 - DNA, 71 bp, Homo sapiens
atgtatttgatcatgtctcaggttgatcttcactcgaaaaggggtactccgtgtggaggggtttttaagcc

SEQ ID NO: 149337 - DNA, 68 bp, Homo sapiens
atgtctcaggttgatcttcactcgaaaaggggtactccgtgtggaggggtttttaagcccccagcaaa

SEQ ID NO: 149338 - DNA, 66 bp, Homo sapiens
ggttgatcttcactcgaaaaggggtactccgtgtggaggggtttttaagcccccagcaaagtgacc

SEQ ID NO: 149339 - DNA, 68 bp, Homo sapiens
actcgaaaaggggtactccgtgtggaggggtttttaagcccccagcaaagtgaccctgatgccatgaa

SEQ ID NO: 149340 - DNA, 71 bp, Homo sapiens
tactccgtgtggaggggtttttaagcccccagcaaagtgaccctgatgccatgaacctgtggattccctct

SEQ ID NO: 149341 - DNA, 71 bp, Homo sapiens
gtgtggaggggtttttaagcccccagcaaagtgaccctgatgccatgaacctgtggattccctcttcctcc

SEQ ID NO: 149342 - DNA, 74 bp, Homo sapiens
ttttaagcccccagcaaagtgaccctgatgccatgaacctgtggattccctcttcctccctagcagaagggata

SEQ ID NO: 149343 - DNA, 78 bp, Homo sapiens
gcaaagtgaccctgatgccatgaacctgtggattccctcttcctccctagcagaagggatagatctagagacctcaaa

SEQ ID NO: 149344 - DNA, 77 bp, Homo sapiens
accctgatgccatgaacctgtggattccctcttcctccctagcagaagggatagatctagagacctcaaaatacatc

SEQ ID NO: 149345 - DNA, 76 bp, Homo sapiens
atgaacctgtggattccctcttcctccctagcagaagggatagatctagagacctcaaaatacatcctggccaatg

SEQ ID NO: 149346 - DNA, 75 bp, Homo sapiens
ctgtggattccctcttcctccctagcagaagggatagatctagagacctcaaaatacatcctggccaatgttggg

SEQ ID NO: 149347 - DNA, 77 bp, Homo sapiens
tcttcctccctagcagaagggatagatctagagacctcaaaatacatcctggccaatgttggggaccagttctgcca

SEQ ID NO: 149348 - DNA, 78 bp, Homo sapiens
atagatctagagacctcaaaatacatcctggccaatgttggggaccagttctgccagctcgtaatgtctgagaaggag

SEQ ID NO: 149349 - DNA, 81 bp, Homo sapiens
tagagacctcaaaatacatcctggccaatgttggggaccagttctgccagctcgtaatgtctgagaaggaggccatgatga

SEQ ID NO: 149350 - DNA, 80 bp, Homo sapiens
aaaatacatcctggccaatgttggggaccagttctgccagctcgtaatgtctgagaaggaggccatgatgatggtggagc

SEQ ID NO: 149351 - DNA, 80 bp, Homo sapiens
caatgttggggaccagttctgccagctcgtaatgtctgagaaggaggccatgatgatggtggagccacaccgtaagtcac

SEQ ID NO: 149352 - DNA, 81 bp, Homo sapiens
gaccagttctgccagctcgtaatgtctgagaaggaggccatgatgatggtggagccacaccgtaagtcaccttctcacttg

SEQ ID NO: 149353 - DNA, 82 bp, Homo sapiens
ttctgccagctcgtaatgtctgagaaggaggccatgatgatggtggagccacaccgtaagtcaccttctcacttgtcttcca

SEQ ID NO: 149354 - DNA, 80 bp, Homo sapiens
taatgtctgagaaggaggccatgatgatggtggagccacaccgtaagtcaccttctcacttgtcttccaggtgctcctag

SEQ ID NO: 149355 - DNA, 81 bp, Homo sapiens
ttgttattggtcaggatgatcaatgccaattctgtttcctctttccaccagagaaagtggcatggaagcgagctgtgcgtg

SEQ ID NO: 149356 - DNA, 80 bp, Homo sapiens
atgatcaatgccaattctgtttcctctttccaccagagaaagtggcatggaagcgagctgtgcgtggtgtacgggagatg

SEQ ID NO: 149357 - DNA, 79 bp, Homo sapiens
aatgccaattctgtttcctctttccaccagagaaagtggcatggaagcgagctgtgcgtggtgtacgggagatgtgtga

SEQ ID NO: 149358 - DNA, 80 bp, Homo sapiens
tttcctctttccaccagagaaagtggcatggaagcgagctgtgcgtggtgtacgggagatgtgtgatgtgtgtgaaacaa

SEQ ID NO: 149359 - DNA, 82 bp, Homo sapiens
ttccaccagagaaagtggcatggaagcgagctgtgcgtggtgtacgggagatgtgtgatgtgtgtgaaacaactctcttcaa

SEQ ID NO: 149360 - DNA, 82 bp, Homo sapiens
agaaagtggcatggaagcgagctgtgcgtggtgtacgggagatgtgtgatgtgtgtgaaacaactctcttcaacatccactg

SEQ ID NO: 149361 - DNA, 80 bp, Homo sapiens
atggaagcgagctgtgcgtggtgtacgggagatgtgtgatgtgtgtgaaacaactctcttcaacatccactgggtttgtc

SEQ ID NO: 149362 - DNA, 79 bp, Homo sapiens
tgcgtggtgtacgggagatgtgtgatgtgtgtgaaacaactctcttcaacatccactgggtttgtcgcaaatgtggatt

SEQ ID NO: 149363 - DNA, 77 bp, Homo sapiens
ggtgtacgggagatgtgtgatgtgtgtgaaacaactctcttcaacatccactgggtttgtcgcaaatgtggatttgg

SEQ ID NO: 149364 - DNA, 78 bp, Homo sapiens
tgtgatgtgtgtgaaacaactctcttcaacatccactgggtttgtcgcaaatgtggatttggggtctgccttgactgt

SEQ ID NO: 149365 - DNA, 76 bp, Homo sapiens
tgtgtgtgaaacaactctcttcaacatccactgggtttgtcgcaaatgtggatttggggtctgccttgactgttac

SEQ ID NO: 149366 - DNA, 74 bp, Homo sapiens
tctcttcaacatccactgggtttgtcgcaaatgtggatttggggtctgccttgactgttaccggctcaggaaaa

SEQ ID NO: 149367 - DNA, 71 bp, Homo sapiens
aacatccactgggtttgtcgcaaatgtggatttggggtctgccttgactgttaccggctcaggaaaagccg

SEQ ID NO: 149368 - DNA, 73 bp, Homo sapiens
tttgtcgcaaatgtggatttggggtctgccttgactgttaccggctcaggaaaagccggccacgcagtggtaa

SEQ ID NO: 149369 - DNA, 71 bp, Homo sapiens
atgtggatttggggtctgccttgactgttaccggctcaggaaaagccggccacgcagtggtaagtaaacat

SEQ ID NO: 149370 - DNA, 70 bp, Homo sapiens
atttggggtctgccttgactgttaccggctcaggaaaagccggccacgcagtggtaagtaaacattgtcc

SEQ ID NO: 149371 - DNA, 72 bp, Homo sapiens
ccttgactgttaccggctcaggaaaagccggccacgcagtggtaagtaaacattgtcctgtgtagctcgaaa

SEQ ID NO: 149372 - DNA, 76 bp, Homo sapiens
ggatccatttttgtgacccttataaaataagtgaaatcatttctatttcagagacagaagagatgggtgatgaaga

SEQ ID NO: 149373 - DNA, 75 bp, Homo sapiens
tgtgacccttataaaataagtgaaatcatttctatttcagagacagaagagatgggtgatgaagaagttttctcc

SEQ ID NO: 149374 - DNA, 74 bp, Homo sapiens
aaaataagtgaaatcatttctatttcagagacagaagagatgggtgatgaagaagttttctcctggttgaagtg

SEQ ID NO: 149375 - DNA, 76 bp, Homo sapiens
aaatcatttctatttcagagacagaagagatgggtgatgaagaagttttctcctggttgaagtgtgcaaagggaca

SEQ ID NO: 149376 - DNA, 76 bp, Homo sapiens
tatttcagagacagaagagatgggtgatgaagaagttttctcctggttgaagtgtgcaaagggacagtcccacgaa

SEQ ID NO: 149377 - DNA, 74 bp, Homo sapiens
agaagagatgggtgatgaagaagttttctcctggttgaagtgtgcaaagggacagtcccacgaaccagagaatc

SEQ ID NO: 149378 - DNA, 76 bp, Homo sapiens
atgggtgatgaagaagttttctcctggttgaagtgtgcaaagggacagtcccacgaaccagagaatctcatgccca

SEQ ID NO: 149379 - DNA, 73 bp, Homo sapiens
aagttttctcctggttgaagtgtgcaaagggacagtcccacgaaccagagaatctcatgcccacacaaattat

SEQ ID NO: 149380 - DNA, 78 bp, Homo sapiens
ttctcctggttgaagtgtgcaaagggacagtcccacgaaccagagaatctcatgcccacacaaattattcctggcaca

SEQ ID NO: 149381 - DNA, 75 bp, Homo sapiens
aagtgtgcaaagggacagtcccacgaaccagagaatctcatgcccacacaaattattcctggcacaggtaaggaa

SEQ ID NO: 149382 - DNA, 72 bp, Homo sapiens
gacagtcccacgaaccagagaatctcatgcccacacaaattattcctggcacaggtaaggaaattccttttt

SEQ ID NO: 149383 - DNA, 71 bp, Homo sapiens
acgaaccagagaatctcatgcccacacaaattattcctggcacaggtaaggaaattccttttttagatttg

SEQ ID NO: 149384 - DNA, 74 bp, Homo sapiens
ggcatatatgagtattctggtgttatttttattgttacatttttttcccagctctttacaatattggagacatg

SEQ ID NO: 149385 - DNA, 73 bp, Homo sapiens
ttctggtgttatttttattgttacatttttttcccagctctttacaatattggagacatggtacatgctgccc

SEQ ID NO: 149386 - DNA, 71 bp, Homo sapiens
atttttattgttacatttttttcccagctctttacaatattggagacatggtacatgctgcccggggcaag

SEQ ID NO: 149387 - DNA, 72 bp, Homo sapiens
tacatttttttcccagctctttacaatattggagacatggtacatgctgcccggggcaagtggggaattaaa

SEQ ID NO: 149388 - DNA, 72 bp, Homo sapiens
tttttcccagctctttacaatattggagacatggtacatgctgcccggggcaagtggggaattaaagcaaac

SEQ ID NO: 149389 - DNA, 75 bp, Homo sapiens
tttacaatattggagacatggtacatgctgcccggggcaagtggggaattaaagcaaactgcccttgtatcagtc

SEQ ID NO: 149390 - DNA, 76 bp, Homo sapiens
atattggagacatggtacatgctgcccggggcaagtggggaattaaagcaaactgcccttgtatcagtcgacagaa

SEQ ID NO: 149391 - DNA, 75 bp, Homo sapiens
atggtacatgctgcccggggcaagtggggaattaaagcaaactgcccttgtatcagtcgacagaacaaatctgta

SEQ ID NO: 149392 - DNA, 73 bp, Homo sapiens
cccggggcaagtggggaattaaagcaaactgcccttgtatcagtcgacagaacaaatctgtattgagacctgc

SEQ ID NO: 149393 - DNA, 74 bp, Homo sapiens
aagtggggaattaaagcaaactgcccttgtatcagtcgacagaacaaatctgtattgagacctgccgtcaccaa

SEQ ID NO: 149394 - DNA, 78 bp, Homo sapiens
aattaaagcaaactgcccttgtatcagtcgacagaacaaatctgtattgagacctgccgtcaccaatgggatgtcaca

SEQ ID NO: 149395 - DNA, 77 bp, Homo sapiens
aactgcccttgtatcagtcgacagaacaaatctgtattgagacctgccgtcaccaatgggatgtcacaggtaaactg

SEQ ID NO: 149396 - DNA, 79 bp, Homo sapiens
tatcagtcgacagaacaaatctgtattgagacctgccgtcaccaatgggatgtcacaggtaaactggtgtgtgtgggta

SEQ ID NO: 149397 - DNA, 75 bp, Homo sapiens
agaacaaatctgtattgagacctgccgtcaccaatgggatgtcacaggtaaactggtgtgtgtgggtataactaa

SEQ ID NO: 149398 - DNA, 75 bp, Homo sapiens
tttttctacccaagcacagcactctaattatgttggccttctgcattttagcttcctagcataaaccctagtgcc

SEQ ID NO: 149399 - DNA, 75 bp, Homo sapiens
acagcactctaattatgttggccttctgcattttagcttcctagcataaaccctagtgcctcttctggaaacgaa

SEQ ID NO: 149400 - DNA, 73 bp, Homo sapiens
tctaattatgttggccttctgcattttagcttcctagcataaaccctagtgcctcttctggaaacgaaactac

SEQ ID NO: 149401 - DNA, 73 bp, Homo sapiens
tgttggccttctgcattttagcttcctagcataaaccctagtgcctcttctggaaacgaaactaccttctctg

SEQ ID NO: 149402 - DNA, 70 bp, Homo sapiens
attttagcttcctagcataaaccctagtgcctcttctggaaacgaaactaccttctctggtggaggagga

SEQ ID NO: 149403 - DNA, 71 bp, Homo sapiens
ctagcataaaccctagtgcctcttctggaaacgaaactaccttctctggtggaggaggaccggcaccagta

SEQ ID NO: 149404 - DNA, 69 bp, Homo sapiens
taaaccctagtgcctcttctggaaacgaaactaccttctctggtggaggaggaccggcaccagtaacaa

SEQ ID NO: 149405 - DNA, 71 bp, Homo sapiens
tcttctggaaacgaaactaccttctctggtggaggaggaccggcaccagtaacaactccagagccggacca

SEQ ID NO: 149406 - DNA, 69 bp, Homo sapiens
aaacgaaactaccttctctggtggaggaggaccggcaccagtaacaactccagagccggaccatgttcc

SEQ ID NO: 149407 - DNA, 71 bp, Homo sapiens
actaccttctctggtggaggaggaccggcaccagtaacaactccagagccggaccatgttcccaaagccga

SEQ ID NO: 149408 - DNA, 79 bp, Homo sapiens
tggaggaggaccggcaccagtaacaactccagagccggaccatgttcccaaagccgacagcactgacatcagatctgaa

SEQ ID NO: 149409 - DNA, 80 bp, Homo sapiens
cggcaccagtaacaactccagagccggaccatgttcccaaagccgacagcactgacatcagatctgaagagcctctgaaa

SEQ ID NO: 149410 - DNA, 80 bp, Homo sapiens
agtaacaactccagagccggaccatgttcccaaagccgacagcactgacatcagatctgaagagcctctgaaaacagaca

SEQ ID NO: 149411 - DNA, 82 bp, Homo sapiens
gagccggaccatgttcccaaagccgacagcactgacatcagatctgaagagcctctgaaaacagacagttcggcatcaaata

SEQ ID NO: 149412 - DNA, 83 bp, Homo sapiens
atgttcccaaagccgacagcactgacatcagatctgaagagcctctgaaaacagacagttcggcatcaaatagcaatagtgaa

SEQ ID NO: 149413 - DNA, 83 bp, Homo sapiens
ccaaagccgacagcactgacatcagatctgaagagcctctgaaaacagacagttcggcatcaaatagcaatagtgaactgaaa

SEQ ID NO: 149414 - DNA, 83 bp, Homo sapiens
actgacatcagatctgaagagcctctgaaaacagacagttcggcatcaaatagcaatagtgaactgaaagccatcaggcctcc

SEQ ID NO: 149415 - DNA, 82 bp, Homo sapiens
atcagatctgaagagcctctgaaaacagacagttcggcatcaaatagcaatagtgaactgaaagccatcaggcctccttgcc

SEQ ID NO: 149416 - DNA, 79 bp, Homo sapiens
aagagcctctgaaaacagacagttcggcatcaaatagcaatagtgaactgaaagccatcaggcctccttgccctgacac

SEQ ID NO: 149417 - DNA, 76 bp, Homo sapiens
aaaacagacagttcggcatcaaatagcaatagtgaactgaaagccatcaggcctccttgccctgacacggccccac

SEQ ID NO: 149418 - DNA, 75 bp, Homo sapiens
agttcggcatcaaatagcaatagtgaactgaaagccatcaggcctccttgccctgacacggccccaccctcctcc

SEQ ID NO: 149419 - DNA, 75 bp, Homo sapiens
aaatagcaatagtgaactgaaagccatcaggcctccttgccctgacacggccccaccctcctccgccctgcactg

SEQ ID NO: 149420 - DNA, 76 bp, Homo sapiens
tgaactgaaagccatcaggcctccttgccctgacacggccccaccctcctccgccctgcactggttggcagattta

SEQ ID NO: 149421 - DNA, 76 bp, Homo sapiens
ccatcaggcctccttgccctgacacggccccaccctcctccgccctgcactggttggcagatttagcaactcagaa

SEQ ID NO: 149422 - DNA, 75 bp, Homo sapiens
tccttgccctgacacggccccaccctcctccgccctgcactggttggcagatttagcaactcagaaggctaaaga

SEQ ID NO: 149423 - DNA, 74 bp, Homo sapiens
tgacacggccccaccctcctccgccctgcactggttggcagatttagcaactcagaaggctaaagaagaaacaa

SEQ ID NO: 149424 - DNA, 76 bp, Homo sapiens
caccctcctccgccctgcactggttggcagatttagcaactcagaaggctaaagaagaaacaaaaggtgagatgca

SEQ ID NO: 149425 - DNA, 77 bp, Homo sapiens
tcctccgccctgcactggttggcagatttagcaactcagaaggctaaagaagaaacaaaaggtgagatgcacacaaa

SEQ ID NO: 149426 - DNA, 79 bp, Homo sapiens
tggttggcagatttagcaactcagaaggctaaagaagaaacaaaaggtgagatgcacacaaacctctgctctgcctatg

SEQ ID NO: 149427 - DNA, 73 bp, Homo sapiens
ttattcctttttgtacctaatgctgttcctggttatgttcttacagaagcagggtccctgaggtcggtgctca

SEQ ID NO: 149428 - DNA, 72 bp, Homo sapiens
ctttttgtacctaatgctgttcctggttatgttcttacagaagcagggtccctgaggtcggtgctcaataaa

SEQ ID NO: 149429 - DNA, 76 bp, Homo sapiens
ctaatgctgttcctggttatgttcttacagaagcagggtccctgaggtcggtgctcaataaagagtctcattcacc

SEQ ID NO: 149430 - DNA, 73 bp, Homo sapiens
ttcctggttatgttcttacagaagcagggtccctgaggtcggtgctcaataaagagtctcattcaccctttgg

SEQ ID NO: 149431 - DNA, 75 bp, Homo sapiens
tcttacagaagcagggtccctgaggtcggtgctcaataaagagtctcattcaccctttgggctggactcgttcaa

SEQ ID NO: 149432 - DNA, 74 bp, Homo sapiens
agggtccctgaggtcggtgctcaataaagagtctcattcaccctttgggctggactcgttcaactccactgcaa

SEQ ID NO: 149433 - DNA, 74 bp, Homo sapiens
aggtcggtgctcaataaagagtctcattcaccctttgggctggactcgttcaactccactgcaaaggtctctcc

SEQ ID NO: 149434 - DNA, 76 bp, Homo sapiens
tcaataaagagtctcattcaccctttgggctggactcgttcaactccactgcaaaggtctctccgctgactccaaa

SEQ ID NO: 149435 - DNA, 74 bp, Homo sapiens
aaagagtctcattcaccctttgggctggactcgttcaactccactgcaaaggtctctccgctgactccaaagct

SEQ ID NO: 149436 - DNA, 72 bp, Homo sapiens
attcaccctttgggctggactcgttcaactccactgcaaaggtctctccgctgactccaaagctttttaaca

SEQ ID NO: 149437 - DNA, 75 bp, Homo sapiens
tggactcgttcaactccactgcaaaggtctctccgctgactccaaagctttttaacagtctgttgctgggtccca

SEQ ID NO: 149438 - DNA, 76 bp, Homo sapiens
ttcaactccactgcaaaggtctctccgctgactccaaagctttttaacagtctgttgctgggtcccactgcctcca

SEQ ID NO: 149439 - DNA, 74 bp, Homo sapiens
tgcaaaggtctctccgctgactccaaagctttttaacagtctgttgctgggtcccactgcctccaacaacaaaa

SEQ ID NO: 149440 - DNA, 72 bp, Homo sapiens
gtctctccgctgactccaaagctttttaacagtctgttgctgggtcccactgcctccaacaacaaaaccgaa

SEQ ID NO: 149441 - DNA, 69 bp, Homo sapiens
tccaaagctttttaacagtctgttgctgggtcccactgcctccaacaacaaaaccgaagggtctagcct

SEQ ID NO: 149442 - DNA, 70 bp, Homo sapiens
agctttttaacagtctgttgctgggtcccactgcctccaacaacaaaaccgaagggtctagccttcgaga

SEQ ID NO: 149443 - DNA, 71 bp, Homo sapiens
agtctgttgctgggtcccactgcctccaacaacaaaaccgaagggtctagccttcgagacctccttcactc

SEQ ID NO: 149444 - DNA, 68 bp, Homo sapiens
tcccactgcctccaacaacaaaaccgaagggtctagccttcgagacctccttcactccgggccgggaa

SEQ ID NO: 149445 - DNA, 65 bp, Homo sapiens
tccaacaacaaaaccgaagggtctagccttcgagacctccttcactccgggccgggaaaacttcc

SEQ ID NO: 149446 - DNA, 64 bp, Homo sapiens
aagggtctagccttcgagacctccttcactccgggccgggaaaacttcctcaaacccccttgga

SEQ ID NO: 149447 - DNA, 66 bp, Homo sapiens
tcgagacctccttcactccgggccgggaaaacttcctcaaacccccttggacacaggcataccctt

SEQ ID NO: 149448 - DNA, 64 bp, Homo sapiens
cctccttcactccgggccgggaaaacttcctcaaacccccttggacacaggcataccctttccc

SEQ ID NO: 149449 - DNA, 66 bp, Homo sapiens
gccgggaaaacttcctcaaacccccttggacacaggcataccctttcccccggtcttctctacatc

SEQ ID NO: 149450 - DNA, 69 bp, Homo sapiens
aacttcctcaaacccccttggacacaggcataccctttcccccggtcttctctacatcctcagcagtaa

SEQ ID NO: 149451 - DNA, 72 bp, Homo sapiens
aaacccccttggacacaggcataccctttcccccggtcttctctacatcctcagcagtaagtgtcctctgca

SEQ ID NO: 149452 - DNA, 75 bp, Homo sapiens
acacaggcataccctttcccccggtcttctctacatcctcagcagtaagtgtcctctgcaactgtagccttttca

SEQ ID NO: 149453 - DNA, 72 bp, Homo sapiens
ataccctttcccccggtcttctctacatcctcagcagtaagtgtcctctgcaactgtagccttttcagcttt

SEQ ID NO: 149454 - DNA, 78 bp, Homo sapiens
tcatggtgcctcagtcaagcttacctggtggatttgtgtctggcagggagtgaagagcaaggccagcctacccaactt

SEQ ID NO: 149455 - DNA, 77 bp, Homo sapiens
tcagtcaagcttacctggtggatttgtgtctggcagggagtgaagagcaaggccagcctacccaactttcttgacca

SEQ ID NO: 149456 - DNA, 76 bp, Homo sapiens
aagcttacctggtggatttgtgtctggcagggagtgaagagcaaggccagcctacccaactttcttgaccacatca

SEQ ID NO: 149457 - DNA, 79 bp, Homo sapiens
gatttgtgtctggcagggagtgaagagcaaggccagcctacccaactttcttgaccacatcattgcctcagtggtagaa

SEQ ID NO: 149458 - DNA, 77 bp, Homo sapiens
tggcagggagtgaagagcaaggccagcctacccaactttcttgaccacatcattgcctcagtggtagaaaataagaa

SEQ ID NO: 149459 - DNA, 74 bp, Homo sapiens
gggagtgaagagcaaggccagcctacccaactttcttgaccacatcattgcctcagtggtagaaaataagaaaa

SEQ ID NO: 149460 - DNA, 75 bp, Homo sapiens
aaggccagcctacccaactttcttgaccacatcattgcctcagtggtagaaaataagaaaacctcagatgcttca

SEQ ID NO: 149461 - DNA, 73 bp, Homo sapiens
cctacccaactttcttgaccacatcattgcctcagtggtagaaaataagaaaacctcagatgcttcaaagcgg

SEQ ID NO: 149462 - DNA, 77 bp, Homo sapiens
tttcttgaccacatcattgcctcagtggtagaaaataagaaaacctcagatgcttcaaagcgggcctgcaacttgac

SEQ ID NO: 149463 - DNA, 77 bp, Homo sapiens
atcattgcctcagtggtagaaaataagaaaacctcagatgcttcaaagcgggcctgcaacttgactgatacccagaa

SEQ ID NO: 149464 - DNA, 74 bp, Homo sapiens
gtggtagaaaataagaaaacctcagatgcttcaaagcgggcctgcaacttgactgatacccagaaggaagtgaa

SEQ ID NO: 149465 - DNA, 74 bp, Homo sapiens
aaaataagaaaacctcagatgcttcaaagcgggcctgcaacttgactgatacccagaaggaagtgaaggagatg

SEQ ID NO: 149466 - DNA, 77 bp, Homo sapiens
ctcagatgcttcaaagcgggcctgcaacttgactgatacccagaaggaagtgaaggagatggtgatggggttaaatg

SEQ ID NO: 149467 - DNA, 77 bp, Homo sapiens
atgcttcaaagcgggcctgcaacttgactgatacccagaaggaagtgaaggagatggtgatggggttaaatgtgcta

SEQ ID NO: 149468 - DNA, 76 bp, Homo sapiens
cctgcaacttgactgatacccagaaggaagtgaaggagatggtgatggggttaaatgtgctagatccccatacttc

SEQ ID NO: 149469 - DNA, 75 bp, Homo sapiens
aacttgactgatacccagaaggaagtgaaggagatggtgatggggttaaatgtgctagatccccatacttctcac

SEQ ID NO: 149470 - DNA, 74 bp, Homo sapiens
atacccagaaggaagtgaaggagatggtgatggggttaaatgtgctagatccccatacttctcactcctggctt

SEQ ID NO: 149471 - DNA, 76 bp, Homo sapiens
aagtgaaggagatggtgatggggttaaatgtgctagatccccatacttctcactcctggctttgtgatgggaggct

SEQ ID NO: 149472 - DNA, 79 bp, Homo sapiens
agatggtgatggggttaaatgtgctagatccccatacttctcactcctggctttgtgatgggaggcttctgtgtctcca

SEQ ID NO: 149473 - DNA, 80 bp, Homo sapiens
ttaaatgtgctagatccccatacttctcactcctggctttgtgatgggaggcttctgtgtctccatgaccccagcaacaa

SEQ ID NO: 149474 - DNA, 77 bp, Homo sapiens
tacttctcactcctggctttgtgatgggaggcttctgtgtctccatgaccccagcaacaaaaacaattggaagatct

SEQ ID NO: 149475 - DNA, 75 bp, Homo sapiens
ttgtgatgggaggcttctgtgtctccatgaccccagcaacaaaaacaattggaagatcttccgggagtgttggaa

SEQ ID NO: 149476 - DNA, 74 bp, Homo sapiens
aggcttctgtgtctccatgaccccagcaacaaaaacaattggaagatcttccgggagtgttggaagcaaggtca

SEQ ID NO: 149477 - DNA, 71 bp, Homo sapiens
ccagcaacaaaaacaattggaagatcttccgggagtgttggaagcaaggtcaggtaagcaagaataagtcg

SEQ ID NO: 149478 - DNA, 69 bp, Homo sapiens
aaaaacaattggaagatcttccgggagtgttggaagcaaggtcaggtaagcaagaataagtcgttccaa

SEQ ID NO: 149479 - DNA, 70 bp, Homo sapiens
attggaagatcttccgggagtgttggaagcaaggtcaggtaagcaagaataagtcgttccaagggccaat

SEQ ID NO: 149480 - DNA, 72 bp, Homo sapiens
tttcctagattgctctgattgggatatttttgtttccacagccagtgctggtttcgggggtacataaaaagc

SEQ ID NO: 149481 - DNA, 75 bp, Homo sapiens
tctgattgggatatttttgtttccacagccagtgctggtttcgggggtacataaaaagctcaagtctgagctctg

SEQ ID NO: 149482 - DNA, 74 bp, Homo sapiens
tatttttgtttccacagccagtgctggtttcgggggtacataaaaagctcaagtctgagctctggaagccagaa

SEQ ID NO: 149483 - DNA, 75 bp, Homo sapiens
tgtttccacagccagtgctggtttcgggggtacataaaaagctcaagtctgagctctggaagccagaagccttta

SEQ ID NO: 149484 - DNA, 72 bp, Homo sapiens
agtgctggtttcgggggtacataaaaagctcaagtctgagctctggaagccagaagcctttagccaggaatt

SEQ ID NO: 149485 - DNA, 73 bp, Homo sapiens
tttcgggggtacataaaaagctcaagtctgagctctggaagccagaagcctttagccaggaatttggagacca

SEQ ID NO: 149486 - DNA, 77 bp, Homo sapiens
tacataaaaagctcaagtctgagctctggaagccagaagcctttagccaggaatttggagaccaggatgtagacttg

SEQ ID NO: 149487 - DNA, 77 bp, Homo sapiens
aagtctgagctctggaagccagaagcctttagccaggaatttggagaccaggatgtagacttggtgaactgcaggaa

SEQ ID NO: 149488 - DNA, 77 bp, Homo sapiens
ctggaagccagaagcctttagccaggaatttggagaccaggatgtagacttggtgaactgcaggaactgtgctataa

SEQ ID NO: 149489 - DNA, 75 bp, Homo sapiens
agaagcctttagccaggaatttggagaccaggatgtagacttggtgaactgcaggaactgtgctataatttccga

SEQ ID NO: 149490 - DNA, 76 bp, Homo sapiens
ttagccaggaatttggagaccaggatgtagacttggtgaactgcaggaactgtgctataatttccgatgtgaaagt

SEQ ID NO: 149491 - DNA, 74 bp, Homo sapiens
atttggagaccaggatgtagacttggtgaactgcaggaactgtgctataatttccgatgtgaaagttcgggatt

SEQ ID NO: 149492 - DNA, 74 bp, Homo sapiens
aggatgtagacttggtgaactgcaggaactgtgctataatttccgatgtgaaagttcgggatttctgggatggt

SEQ ID NO: 149493 - DNA, 79 bp, Homo sapiens
ttggtgaactgcaggaactgtgctataatttccgatgtgaaagttcgggatttctgggatggtttcgagatcatatgca

SEQ ID NO: 149494 - DNA, 77 bp, Homo sapiens
aactgcaggaactgtgctataatttccgatgtgaaagttcgggatttctgggatggtttcgagatcatatgcagtaa

SEQ ID NO: 149495 - DNA, 79 bp, Homo sapiens
tgctataatttccgatgtgaaagttcgggatttctgggatggtttcgagatcatatgcagtaagtagctttcatatcta

SEQ ID NO: 149496 - DNA, 75 bp, Homo sapiens
aatttccgatgtgaaagttcgggatttctgggatggtttcgagatcatatgcagtaagtagctttcatatctagt

SEQ ID NO: 149497 - DNA, 79 bp, Homo sapiens
aaagttcgggatttctgggatggtttcgagatcatatgcagtaagtagctttcatatctagttcagtgatagcagactg

SEQ ID NO: 149498 - DNA, 75 bp, Homo sapiens
aaatcggacaccagccaaaccagcagatgtttgtgggagtattctctgtcttccagaacgactacggtcagaaga

SEQ ID NO: 149499 - DNA, 80 bp, Homo sapiens
caaaccagcagatgtttgtgggagtattctctgtcttccagaacgactacggtcagaagatgggcagccaatggtgctca

SEQ ID NO: 149500 - DNA, 78 bp, Homo sapiens
agatgtttgtgggagtattctctgtcttccagaacgactacggtcagaagatgggcagccaatggtgctcaaactcaa

SEQ ID NO: 149501 - DNA, 78 bp, Homo sapiens
ttgtgggagtattctctgtcttccagaacgactacggtcagaagatgggcagccaatggtgctcaaactcaaggactg

SEQ ID NO: 149502 - DNA, 77 bp, Homo sapiens
attctctgtcttccagaacgactacggtcagaagatgggcagccaatggtgctcaaactcaaggactggcctcctgg

SEQ ID NO: 149503 - DNA, 75 bp, Homo sapiens
ttccagaacgactacggtcagaagatgggcagccaatggtgctcaaactcaaggactggcctcctggggaagatt

SEQ ID NO: 149504 - DNA, 77 bp, Homo sapiens
actacggtcagaagatgggcagccaatggtgctcaaactcaaggactggcctcctggggaagattttcgagacatga

SEQ ID NO: 149505 - DNA, 77 bp, Homo sapiens
atgggcagccaatggtgctcaaactcaaggactggcctcctggggaagattttcgagacatgatgccaaccaggtta

SEQ ID NO: 149506 - DNA, 77 bp, Homo sapiens
aatggtgctcaaactcaaggactggcctcctggggaagattttcgagacatgatgccaaccaggttagtgacctgca

SEQ ID NO: 149507 - DNA, 76 bp, Homo sapiens
aaactcaaggactggcctcctggggaagattttcgagacatgatgccaaccaggttagtgacctgcagtggtgtca

SEQ ID NO: 149508 - DNA, 78 bp, Homo sapiens
aaggactggcctcctggggaagattttcgagacatgatgccaaccaggttagtgacctgcagtggtgtcatcttcaga

SEQ ID NO: 149509 - DNA, 73 bp, Homo sapiens
tttcttcccctataacaagctaagtcatctttcctgcacttttataggtttgaagatctgatggagaaccttc

SEQ ID NO: 149510 - DNA, 78 bp, Homo sapiens
tataacaagctaagtcatctttcctgcacttttataggtttgaagatctgatggagaaccttcctctgccagaatata

SEQ ID NO: 149511 - DNA, 76 bp, Homo sapiens
taagtcatctttcctgcacttttataggtttgaagatctgatggagaaccttcctctgccagaatataccaaacga

SEQ ID NO: 149512 - DNA, 77 bp, Homo sapiens
atctttcctgcacttttataggtttgaagatctgatggagaaccttcctctgccagaatataccaaacgagatggca

SEQ ID NO: 149513 - DNA, 77 bp, Homo sapiens
acttttataggtttgaagatctgatggagaaccttcctctgccagaatataccaaacgagatggcaggctcaatctg

SEQ ID NO: 149514 - DNA, 81 bp, Homo sapiens
ttgaagatctgatggagaaccttcctctgccagaatataccaaacgagatggcaggctcaatctggcctctaggctaccta

SEQ ID NO: 149515 - DNA, 77 bp, Homo sapiens
atggagaaccttcctctgccagaatataccaaacgagatggcaggctcaatctggcctctaggctacctagctactt

SEQ ID NO: 149516 - DNA, 76 bp, Homo sapiens
aaccttcctctgccagaatataccaaacgagatggcaggctcaatctggcctctaggctacctagctactttgtaa

SEQ ID NO: 149517 - DNA, 77 bp, Homo sapiens
agaatataccaaacgagatggcaggctcaatctggcctctaggctacctagctactttgtaaggcctgatctgggcc

SEQ ID NO: 149518 - DNA, 77 bp, Homo sapiens
aaacgagatggcaggctcaatctggcctctaggctacctagctactttgtaaggcctgatctgggccccaagatgta

SEQ ID NO: 149519 - DNA, 77 bp, Homo sapiens
caggctcaatctggcctctaggctacctagctactttgtaaggcctgatctgggccccaagatgtacaacgcctatg

SEQ ID NO: 149520 - DNA, 76 bp, Homo sapiens
aatctggcctctaggctacctagctactttgtaaggcctgatctgggccccaagatgtacaacgcctatggtatga

SEQ ID NO: 149521 - DNA, 75 bp, Homo sapiens
ctctaggctacctagctactttgtaaggcctgatctgggccccaagatgtacaacgcctatggtatgagggagag

SEQ ID NO: 149522 - DNA, 74 bp, Homo sapiens
ctactttgtaaggcctgatctgggccccaagatgtacaacgcctatggtatgagggagaggctaaaattgctct

SEQ ID NO: 149523 - DNA, 74 bp, Homo sapiens
ttgtaaggcctgatctgggccccaagatgtacaacgcctatggtatgagggagaggctaaaattgctcttttgg

SEQ ID NO: 149524 - DNA, 72 bp, Homo sapiens
attcttccaaatattggcccttcaccttgcatattttcctttctcctttagggttgataacagcagaagata

SEQ ID NO: 149525 - DNA, 73 bp, Homo sapiens
tattggcccttcaccttgcatattttcctttctcctttagggttgataacagcagaagatagaagagttggta

SEQ ID NO: 149526 - DNA, 71 bp, Homo sapiens
accttgcatattttcctttctcctttagggttgataacagcagaagatagaagagttggtacaacaaatct

SEQ ID NO: 149527 - DNA, 74 bp, Homo sapiens
ttcctttctcctttagggttgataacagcagaagatagaagagttggtacaacaaatcttcacttagatgtgtc

SEQ ID NO: 149528 - DNA, 78 bp, Homo sapiens
tcctttagggttgataacagcagaagatagaagagttggtacaacaaatcttcacttagatgtgtctgatgctgttaa

SEQ ID NO: 149529 - DNA, 83 bp, Homo sapiens
ttgataacagcagaagatagaagagttggtacaacaaatcttcacttagatgtgtctgatgctgttaatgtgatggtgtatgt

SEQ ID NO: 149530 - DNA, 80 bp, Homo sapiens
agaagatagaagagttggtacaacaaatcttcacttagatgtgtctgatgctgttaatgtgatggtgtatgttgggattc

SEQ ID NO: 149531 - DNA, 80 bp, Homo sapiens
tagaagagttggtacaacaaatcttcacttagatgtgtctgatgctgttaatgtgatggtgtatgttgggattcccatcg

SEQ ID NO: 149532 - DNA, 81 bp, Homo sapiens
aacaaatcttcacttagatgtgtctgatgctgttaatgtgatggtgtatgttgggattcccatcggggagggtgctcatga

SEQ ID NO: 149533 - DNA, 83 bp, Homo sapiens
tcttcacttagatgtgtctgatgctgttaatgtgatggtgtatgttgggattcccatcggggagggtgctcatgatgaaggta

SEQ ID NO: 149534 - DNA, 83 bp, Homo sapiens
tgtgtctgatgctgttaatgtgatggtgtatgttgggattcccatcggggagggtgctcatgatgaaggtatgctttctagaa

SEQ ID NO: 149535 - DNA, 80 bp, Homo sapiens
tgttaatgtgatggtgtatgttgggattcccatcggggagggtgctcatgatgaaggtatgctttctagaatccactgct

SEQ ID NO: 149536 - DNA, 79 bp, Homo sapiens
atgtgatggtgtatgttgggattcccatcggggagggtgctcatgatgaaggtatgctttctagaatccactgctttag

SEQ ID NO: 149537 - DNA, 78 bp, Homo sapiens
gtatgttgggattcccatcggggagggtgctcatgatgaaggtatgctttctagaatccactgctttaggatggtgag

SEQ ID NO: 149538 - DNA, 78 bp, Homo sapiens
tggtactgaaatggctgactacattgaaagtgtcattttgctcttttcagaggtactcaagacaattgacgagggaga

SEQ ID NO: 149539 - DNA, 79 bp, Homo sapiens
aatggctgactacattgaaagtgtcattttgctcttttcagaggtactcaagacaattgacgagggagatgccgatgag

SEQ ID NO: 149540 - DNA, 80 bp, Homo sapiens
tacattgaaagtgtcattttgctcttttcagaggtactcaagacaattgacgagggagatgccgatgaggtgacgaagca

SEQ ID NO: 149541 - DNA, 81 bp, Homo sapiens
attttgctcttttcagaggtactcaagacaattgacgagggagatgccgatgaggtgacgaagcagaggattcatgatgga

SEQ ID NO: 149542 - DNA, 80 bp, Homo sapiens
ctcttttcagaggtactcaagacaattgacgagggagatgccgatgaggtgacgaagcagaggattcatgatggaaaaga

SEQ ID NO: 149543 - DNA, 79 bp, Homo sapiens
aggtactcaagacaattgacgagggagatgccgatgaggtgacgaagcagaggattcatgatggaaaagagaagccagg

SEQ ID NO: 149544 - DNA, 83 bp, Homo sapiens
attgacgagggagatgccgatgaggtgacgaagcagaggattcatgatggaaaagagaagccaggtgctttatggcacatcta

SEQ ID NO: 149545 - DNA, 86 bp, Homo sapiens
cgagggagatgccgatgaggtgacgaagcagaggattcatgatggaaaagagaagccaggtgctttatggcacatctatgcagcca

SEQ ID NO: 149546 - DNA, 87 bp, Homo sapiens
atgaggtgacgaagcagaggattcatgatggaaaagagaagccaggtgctttatggcacatctatgcagccaaggatgcagagaaga

SEQ ID NO: 149547 - DNA, 84 bp, Homo sapiens
acgaagcagaggattcatgatggaaaagagaagccaggtgctttatggcacatctatgcagccaaggatgcagagaagatccgg

SEQ ID NO: 149548 - DNA, 85 bp, Homo sapiens
ttcatgatggaaaagagaagccaggtgctttatggcacatctatgcagccaaggatgcagagaagatccgggagctgctccgaaa

SEQ ID NO: 149549 - DNA, 80 bp, Homo sapiens
aaaagagaagccaggtgctttatggcacatctatgcagccaaggatgcagagaagatccgggagctgctccgaaaggtac

SEQ ID NO: 149550 - DNA, 80 bp, Homo sapiens
aagccaggtgctttatggcacatctatgcagccaaggatgcagagaagatccgggagctgctccgaaaggtacgcccctg

SEQ ID NO: 149551 - DNA, 79 bp, Homo sapiens
ctttatggcacatctatgcagccaaggatgcagagaagatccgggagctgctccgaaaggtacgcccctgggtgggctg

SEQ ID NO: 149552 - DNA, 81 bp, Homo sapiens
atctatgcagccaaggatgcagagaagatccgggagctgctccgaaaggtacgcccctgggtgggctgtgctcccagctca

SEQ ID NO: 149553 - DNA, 72 bp, Homo sapiens
taatgatttttaattttcccatctttggatttgattatggcttcaggttggagaagaacaaggccaagagaa

SEQ ID NO: 149554 - DNA, 69 bp, Homo sapiens
atttttaattttcccatctttggatttgattatggcttcaggttggagaagaacaaggccaagagaacc

SEQ ID NO: 149555 - DNA, 73 bp, Homo sapiens
atctttggatttgattatggcttcaggttggagaagaacaaggccaagagaacccccctgatcatgacccaat

SEQ ID NO: 149556 - DNA, 75 bp, Homo sapiens
tttgattatggcttcaggttggagaagaacaaggccaagagaacccccctgatcatgacccaattcatgaccaaa

SEQ ID NO: 149557 - DNA, 72 bp, Homo sapiens
cttcaggttggagaagaacaaggccaagagaacccccctgatcatgacccaattcatgaccaaagttggtac

SEQ ID NO: 149558 - DNA, 73 bp, Homo sapiens
ttggagaagaacaaggccaagagaacccccctgatcatgacccaattcatgaccaaagttggtacctggacca

SEQ ID NO: 149559 - DNA, 71 bp, Homo sapiens
aacaaggccaagagaacccccctgatcatgacccaattcatgaccaaagttggtacctggaccagaccctc

SEQ ID NO: 149560 - DNA, 71 bp, Homo sapiens
aacccccctgatcatgacccaattcatgaccaaagttggtacctggaccagaccctccgtaagcgactcta

SEQ ID NO: 149561 - DNA, 76 bp, Homo sapiens
cctgatcatgacccaattcatgaccaaagttggtacctggaccagaccctccgtaagcgactctatgaggagtatg

SEQ ID NO: 149562 - DNA, 74 bp, Homo sapiens
acccaattcatgaccaaagttggtacctggaccagaccctccgtaagcgactctatgaggagtatggcgtgcaa

SEQ ID NO: 149563 - DNA, 73 bp, Homo sapiens
accaaagttggtacctggaccagaccctccgtaagcgactctatgaggagtatggcgtgcaaggctgggctat

SEQ ID NO: 149564 - DNA, 78 bp, Homo sapiens
tggtacctggaccagaccctccgtaagcgactctatgaggagtatggcgtgcaaggctgggctattgtgcagttccta

SEQ ID NO: 149565 - DNA, 78 bp, Homo sapiens
agaccctccgtaagcgactctatgaggagtatggcgtgcaaggctgggctattgtgcagttcctaggtgatgctgttt

SEQ ID NO: 149566 - DNA, 82 bp, Homo sapiens
tccgtaagcgactctatgaggagtatggcgtgcaaggctgggctattgtgcagttcctaggtgatgctgttttcatacctgc

SEQ ID NO: 149567 - DNA, 82 bp, Homo sapiens
actctatgaggagtatggcgtgcaaggctgggctattgtgcagttcctaggtgatgctgttttcatacctgctggagcccca

SEQ ID NO: 149568 - DNA, 80 bp, Homo sapiens
agtatggcgtgcaaggctgggctattgtgcagttcctaggtgatgctgttttcatacctgctggagccccacaccaggtg

SEQ ID NO: 149569 - DNA, 77 bp, Homo sapiens
aaggctgggctattgtgcagttcctaggtgatgctgttttcatacctgctggagccccacaccaggtgggttcctgc

SEQ ID NO: 149570 - DNA, 76 bp, Homo sapiens
ggctattgtgcagttcctaggtgatgctgttttcatacctgctggagccccacaccaggtgggttcctgcttgggg

SEQ ID NO: 149571 - DNA, 74 bp, Homo sapiens
cctaggtgatgctgttttcatacctgctggagccccacaccaggtgggttcctgcttgggggttgggctgaaca

SEQ ID NO: 149572 - DNA, 81 bp, Homo sapiens
tattgaatctctaatgtctgatatttctcctctgcactttgcccttctcaggttcacaatctatacagttgcataaaagta

SEQ ID NO: 149573 - DNA, 80 bp, Homo sapiens
taatgtctgatatttctcctctgcactttgcccttctcaggttcacaatctatacagttgcataaaagtagcagaagact

SEQ ID NO: 149574 - DNA, 78 bp, Homo sapiens
atatttctcctctgcactttgcccttctcaggttcacaatctatacagttgcataaaagtagcagaagactttgtatc

SEQ ID NO: 149575 - DNA, 77 bp, Homo sapiens
actttgcccttctcaggttcacaatctatacagttgcataaaagtagcagaagactttgtatctccagaacatgtaa

SEQ ID NO: 149576 - DNA, 79 bp, Homo sapiens
ttctcaggttcacaatctatacagttgcataaaagtagcagaagactttgtatctccagaacatgtaaagcactgtttc

SEQ ID NO: 149577 - DNA, 79 bp, Homo sapiens
acaatctatacagttgcataaaagtagcagaagactttgtatctccagaacatgtaaagcactgtttccgcctgactca

SEQ ID NO: 149578 - DNA, 78 bp, Homo sapiens
tatacagttgcataaaagtagcagaagactttgtatctccagaacatgtaaagcactgtttccgcctgactcaggaat

SEQ ID NO: 149579 - DNA, 78 bp, Homo sapiens
ataaaagtagcagaagactttgtatctccagaacatgtaaagcactgtttccgcctgactcaggaattcaggcatctc

SEQ ID NO: 149580 - DNA, 80 bp, Homo sapiens
aagactttgtatctccagaacatgtaaagcactgtttccgcctgactcaggaattcaggcatctctctaacactcataca

SEQ ID NO: 149581 - DNA, 83 bp, Homo sapiens
tttgtatctccagaacatgtaaagcactgtttccgcctgactcaggaattcaggcatctctctaacactcatacaaatcatga

SEQ ID NO: 149582 - DNA, 80 bp, Homo sapiens
agaacatgtaaagcactgtttccgcctgactcaggaattcaggcatctctctaacactcatacaaatcatgaggataaac

SEQ ID NO: 149583 - DNA, 79 bp, Homo sapiens
actgtttccgcctgactcaggaattcaggcatctctctaacactcatacaaatcatgaggataaactgcaggtaaataa

SEQ ID NO: 149584 - DNA, 80 bp, Homo sapiens
ttccgcctgactcaggaattcaggcatctctctaacactcatacaaatcatgaggataaactgcaggtaaataactcctc

SEQ ID NO: 149585 - DNA, 76 bp, Homo sapiens
aggaattcaggcatctctctaacactcatacaaatcatgaggataaactgcaggtaaataactcctccctctaccc

SEQ ID NO: 149586 - DNA, 76 bp, Homo sapiens
atctctctaacactcatacaaatcatgaggataaactgcaggtaaataactcctccctctaccccactctgtcttc

SEQ ID NO: 149587 - DNA, 78 bp, Homo sapiens
aactgactttgctgtacaccttctctaggtgaagaacatcatttaccatgcagtgaaagatgcggttggcaccctcaa

SEQ ID NO: 149588 - DNA, 81 bp, Homo sapiens
tgtacaccttctctaggtgaagaacatcatttaccatgcagtgaaagatgcggttggcaccctcaaggctcatgaatccaa

SEQ ID NO: 149589 - DNA, 78 bp, Homo sapiens
accttctctaggtgaagaacatcatttaccatgcagtgaaagatgcggttggcaccctcaaggctcatgaatccaaac

SEQ ID NO: 149590 - DNA, 78 bp, Homo sapiens
aagaacatcatttaccatgcagtgaaagatgcggttggcaccctcaaggctcatgaatccaaactggcaaggtcctag

SEQ ID NO: 149591 - DNA, 79 bp, Homo sapiens
atttaccatgcagtgaaagatgcggttggcaccctcaaggctcatgaatccaaactggcaaggtcctaggcatggagaa

SEQ ID NO: 149592 - DNA, 79 bp, Homo sapiens
atgcagtgaaagatgcggttggcaccctcaaggctcatgaatccaaactggcaaggtcctaggcatggagaaactccaa

SEQ ID NO: 149593 - DNA, 77 bp, Homo sapiens
cggttggcaccctcaaggctcatgaatccaaactggcaaggtcctaggcatggagaaactccaagctcctctgtgaa

SEQ ID NO: 149594 - DNA, 79 bp, Homo sapiens
cctcaaggctcatgaatccaaactggcaaggtcctaggcatggagaaactccaagctcctctgtgaagcaggtctttca

SEQ ID NO: 149595 - DNA, 80 bp, Homo sapiens
ctcatgaatccaaactggcaaggtcctaggcatggagaaactccaagctcctctgtgaagcaggtctttcactcacaaca

SEQ ID NO: 149596 - DNA, 76 bp, Homo sapiens
aaactggcaaggtcctaggcatggagaaactccaagctcctctgtgaagcaggtctttcactcacaacacttaaca

SEQ ID NO: 149597 - DNA, 74 bp, Homo sapiens
aaggtcctaggcatggagaaactccaagctcctctgtgaagcaggtctttcactcacaacacttaacagggaac

SEQ ID NO: 149598 - DNA, 74 bp, Homo sapiens
atggagaaactccaagctcctctgtgaagcaggtctttcactcacaacacttaacagggaacggcagggctctt

SEQ ID NO: 149599 - DNA, 75 bp, Homo sapiens
aaactccaagctcctctgtgaagcaggtctttcactcacaacacttaacagggaacggcagggctctttgctgga

SEQ ID NO: 149600 - DNA, 77 bp, Homo sapiens
tctgtgaagcaggtctttcactcacaacacttaacagggaacggcagggctctttgctggagcagaggcccttcacc

SEQ ID NO: 149601 - DNA, 75 bp, Homo sapiens
aagcaggtctttcactcacaacacttaacagggaacggcagggctctttgctggagcagaggcccttcacccaga

SEQ ID NO: 149602 - DNA, 77 bp, Homo sapiens
tcacaacacttaacagggaacggcagggctctttgctggagcagaggcccttcacccagagccagtgtggtcagtat

SEQ ID NO: 149603 - DNA, 75 bp, Homo sapiens
acttaacagggaacggcagggctctttgctggagcagaggcccttcacccagagccagtgtggtcagtattccaa

SEQ ID NO: 149604 - DNA, 77 bp, Homo sapiens
aacggcagggctctttgctggagcagaggcccttcacccagagccagtgtggtcagtattccaaactctccagccac

SEQ ID NO: 149605 - DNA, 79 bp, Homo sapiens
ctctttgctggagcagaggcccttcacccagagccagtgtggtcagtattccaaactctccagccactctcttctacgc

SEQ ID NO: 149606 - DNA, 79 bp, Homo sapiens
agcagaggcccttcacccagagccagtgtggtcagtattccaaactctccagccactctcttctacgctgcctcaacac

SEQ ID NO: 149607 - DNA, 80 bp, Homo sapiens
ttcacccagagccagtgtggtcagtattccaaactctccagccactctcttctacgctgcctcaacactgaaggttgaca

SEQ ID NO: 149608 - DNA, 78 bp, Homo sapiens
agccagtgtggtcagtattccaaactctccagccactctcttctacgctgcctcaacactgaaggttgacacaggaaa

SEQ ID NO: 149609 - DNA, 77 bp, Homo sapiens
tcagtattccaaactctccagccactctcttctacgctgcctcaacactgaaggttgacacaggaaagtcgtactgt

SEQ ID NO: 149610 - DNA, 79 bp, Homo sapiens
ctcaacactgaaggttgacacaggaaagtcgtactgttcacacacacagtttgagactccaagccaagagtgccacatc

SEQ ID NO: 149611 - DNA, 77 bp, Homo sapiens
actgaaggttgacacaggaaagtcgtactgttcacacacacagtttgagactccaagccaagagtgccacatcccta

SEQ ID NO: 149612 - DNA, 76 bp, Homo sapiens
acaggaaagtcgtactgttcacacacacagtttgagactccaagccaagagtgccacatccctatcctgtggcctt

SEQ ID NO: 149613 - DNA, 76 bp, Homo sapiens
aagtcgtactgttcacacacacagtttgagactccaagccaagagtgccacatccctatcctgtggccttttggaa

SEQ ID NO: 149614 - DNA, 75 bp, Homo sapiens
aagagtgccacatccctatcctgtggccttttggaaatccaaattgcctgaacatggcggggctttcctgcacat

SEQ ID NO: 149615 - DNA, 76 bp, Homo sapiens
ctatcctgtggccttttggaaatccaaattgcctgaacatggcggggctttcctgcacattctcctgatttgagat

SEQ ID NO: 149616 - DNA, 77 bp, Homo sapiens
gccttttggaaatccaaattgcctgaacatggcggggctttcctgcacattctcctgatttgagattcacgggcaca

SEQ ID NO: 149617 - DNA, 75 bp, Homo sapiens
aatccaaattgcctgaacatggcggggctttcctgcacattctcctgatttgagattcacgggcacacctttctt

SEQ ID NO: 149618 - DNA, 74 bp, Homo sapiens
aaattgcctgaacatggcggggctttcctgcacattctcctgatttgagattcacgggcacacctttcttttct

SEQ ID NO: 149619 - DNA, 70 bp, Homo sapiens
ttcttttcttttcctcttgtgcctagttaagtggaaatgtgtttggagataggggaaatcacataactgg

SEQ ID NO: 149620 - DNA, 72 bp, Homo sapiens
ttttcctcttgtgcctagttaagtggaaatgtgtttggagataggggaaatcacataactggtacaagtatg

SEQ ID NO: 149621 - DNA, 71 bp, Homo sapiens
ttgtgcctagttaagtggaaatgtgtttggagataggggaaatcacataactggtacaagtatggggtaat

SEQ ID NO: 149622 - DNA, 71 bp, Homo sapiens
ttaagtggaaatgtgtttggagataggggaaatcacataactggtacaagtatggggtaattgcttaaaca

SEQ ID NO: 149623 - DNA, 72 bp, Homo sapiens
gtttggagataggggaaatcacataactggtacaagtatggggtaattgcttaaacatgcctggtggaagtc

SEQ ID NO: 149624 - DNA, 78 bp, Homo sapiens
aaatcacataactggtacaagtatggggtaattgcttaaacatgcctggtggaagtctgatagcgtctctgcacgtga

SEQ ID NO: 149625 - DNA, 78 bp, Homo sapiens
actggtacaagtatggggtaattgcttaaacatgcctggtggaagtctgatagcgtctctgcacgtgacctctgacaa

SEQ ID NO: 149626 - DNA, 79 bp, Homo sapiens
gggtaattgcttaaacatgcctggtggaagtctgatagcgtctctgcacgtgacctctgacaaagcccatcccaggaga

SEQ ID NO: 149627 - DNA, 78 bp, Homo sapiens
attgcttaaacatgcctggtggaagtctgatagcgtctctgcacgtgacctctgacaaagcccatcccaggagacggg

SEQ ID NO: 149628 - DNA, 79 bp, Homo sapiens
atgcctggtggaagtctgatagcgtctctgcacgtgacctctgacaaagcccatcccaggagacggggtgaagctattc

SEQ ID NO: 149629 - DNA, 77 bp, Homo sapiens
aagtctgatagcgtctctgcacgtgacctctgacaaagcccatcccaggagacggggtgaagctattccccacactc

SEQ ID NO: 149630 - DNA, 78 bp, Homo sapiens
tgacctctgacaaagcccatcccaggagacggggtgaagctattccccacactctcctgtgaacactggagtcttgca

SEQ ID NO: 149631 - DNA, 77 bp, Homo sapiens
tctgacaaagcccatcccaggagacggggtgaagctattccccacactctcctgtgaacactggagtcttgcaagac

SEQ ID NO: 149632 - DNA, 74 bp, Homo sapiens
atcccaggagacggggtgaagctattccccacactctcctgtgaacactggagtcttgcaagacccagggagaa

SEQ ID NO: 149633 - DNA, 73 bp, Homo sapiens
ggggtgaagctattccccacactctcctgtgaacactggagtcttgcaagacccagggagaacccactgcttt

SEQ ID NO: 149634 - DNA, 74 bp, Homo sapiens
actctcctgtgaacactggagtcttgcaagacccagggagaacccactgcttttcccaggaggctccaggatta

SEQ ID NO: 149635 - DNA, 74 bp, Homo sapiens
tgtgaacactggagtcttgcaagacccagggagaacccactgcttttcccaggaggctccaggattaggaaatg

SEQ ID NO: 149636 - DNA, 72 bp, Homo sapiens
agtcttgcaagacccagggagaacccactgcttttcccaggaggctccaggattaggaaatgtgtgtattta

SEQ ID NO: 149637 - DNA, 69 bp, Homo sapiens
acccagggagaacccactgcttttcccaggaggctccaggattaggaaatgtgtgtatttagtgaaaaa

SEQ ID NO: 149638 - DNA, 69 bp, Homo sapiens
ttttcccaggaggctccaggattaggaaatgtgtgtatttagtgaaaaataggtttgtagtgaaatagt

SEQ ID NO: 149639 - DNA, 70 bp, Homo sapiens
ccaggaggctccaggattaggaaatgtgtgtatttagtgaaaaataggtttgtagtgaaatagttactat

SEQ ID NO: 149640 - DNA, 70 bp, Homo sapiens
ccaggattaggaaatgtgtgtatttagtgaaaaataggtttgtagtgaaatagttactatttcatgaaag

SEQ ID NO: 149641 - DNA, 70 bp, Homo sapiens
gaaatgtgtgtatttagtgaaaaataggtttgtagtgaaatagttactatttcatgaaagtagatatttt

SEQ ID NO: 149642 - DNA, 70 bp, Homo sapiens
tactatttcatgaaagtagatatttttagaatttttgaaataccacagttgttttcctggattataagga

SEQ ID NO: 149643 - DNA, 71 bp, Homo sapiens
tcatgaaagtagatatttttagaatttttgaaataccacagttgttttcctggattataaggaaaggcaca

SEQ ID NO: 149644 - DNA, 67 bp, Homo sapiens
atttttagaatttttgaaataccacagttgttttcctggattataaggaaaggcacattacatttag

SEQ ID NO: 149645 - DNA, 69 bp, Homo sapiens
tttttgaaataccacagttgttttcctggattataaggaaaggcacattacatttagtcttcctttcga

SEQ ID NO: 149646 - DNA, 69 bp, Homo sapiens
accacagttgttttcctggattataaggaaaggcacattacatttagtcttcctttcgatataaaactc

SEQ ID NO: 149647 - DNA, 69 bp, Homo sapiens
agttgttttcctggattataaggaaaggcacattacatttagtcttcctttcgatataaaactctttga

SEQ ID NO: 149648 - DNA, 71 bp, Homo sapiens
ctggattataaggaaaggcacattacatttagtcttcctttcgatataaaactctttgaagaaatatgatt

SEQ ID NO: 149649 - DNA, 72 bp, Homo sapiens
gaaaggcacattacatttagtcttcctttcgatataaaactctttgaagaaatatgatttttagaaatcagc

SEQ ID NO: 149650 - DNA, 73 bp, Homo sapiens
catttagtcttcctttcgatataaaactctttgaagaaatatgatttttagaaatcagctacccattatagca

SEQ ID NO: 149651 - DNA, 75 bp, Homo sapiens
tcctttcgatataaaactctttgaagaaatatgatttttagaaatcagctacccattatagcacaaaatcagcca

SEQ ID NO: 149652 - DNA, 74 bp, Homo sapiens
actctttgaagaaatatgatttttagaaatcagctacccattatagcacaaaatcagccaaagcagaattttta

SEQ ID NO: 149653 - DNA, 64 bp, Homo sapiens
tttaaaaattggcttttttaggattctttttctccccctcccatcttagtcttaccttgaggga

SEQ ID NO: 149654 - DNA, 67 bp, Homo sapiens
aattggcttttttaggattctttttctccccctcccatcttagtcttaccttgagggaacagtcata

SEQ ID NO: 149655 - DNA, 69 bp, Homo sapiens
ttaggattctttttctccccctcccatcttagtcttaccttgagggaacagtcatatgagaaggaactt

SEQ ID NO: 149656 - DNA, 72 bp, Homo sapiens
tttttctccccctcccatcttagtcttaccttgagggaacagtcatatgagaaggaactttgtcacatctaa

SEQ ID NO: 149657 - DNA, 76 bp, Homo sapiens
tcccatcttagtcttaccttgagggaacagtcatatgagaaggaactttgtcacatctaagctgtggtgtgttccc

SEQ ID NO: 149658 - DNA, 77 bp, Homo sapiens
ttagtcttaccttgagggaacagtcatatgagaaggaactttgtcacatctaagctgtggtgtgttccccatgtgtg

SEQ ID NO: 149659 - DNA, 79 bp, Homo sapiens
agggaacagtcatatgagaaggaactttgtcacatctaagctgtggtgtgttccccatgtgtgtgtacaacactggtga

SEQ ID NO: 149660 - DNA, 78 bp, Homo sapiens
atatgagaaggaactttgtcacatctaagctgtggtgtgttccccatgtgtgtgtacaacactggtgactccaggaac

SEQ ID NO: 149661 - DNA, 75 bp, Homo sapiens
aaggaactttgtcacatctaagctgtggtgtgttccccatgtgtgtgtacaacactggtgactccaggaaccatt

SEQ ID NO: 149662 - DNA, 77 bp, Homo sapiens
tttgtcacatctaagctgtggtgtgttccccatgtgtgtgtacaacactggtgactccaggaaccattttcacctat

SEQ ID NO: 149663 - DNA, 78 bp, Homo sapiens
ttgtcacatctaagctgtggtgtgttccccatgtgtgtgtacaacactggtgactccaggaaccattttcacctatta

SEQ ID NO: 149664 - DNA, 76 bp, Homo sapiens
acatctaagctgtggtgtgttccccatgtgtgtgtacaacactggtgactccaggaaccattttcacctattacca

SEQ ID NO: 149665 - DNA, 75 bp, Homo sapiens
taagctgtggtgtgttccccatgtgtgtgtacaacactggtgactccaggaaccattttcacctattaccagtgt

SEQ ID NO: 149666 - DNA, 74 bp, Homo sapiens
tgtggtgtgttccccatgtgtgtgtacaacactggtgactccaggaaccattttcacctattaccagtgttccc

SEQ ID NO: 149667 - DNA, 73 bp, Homo sapiens
tgtgttccccatgtgtgtgtacaacactggtgactccaggaaccattttcacctattaccagtgttccctggg

SEQ ID NO: 149668 - DNA, 72 bp, Homo sapiens
atgtgtgtgtacaacactggtgactccaggaaccattttcacctattaccagtgttccctggggactcctct

SEQ ID NO: 149669 - DNA, 70 bp, Homo sapiens
tacaacactggtgactccaggaaccattttcacctattaccagtgttccctggggactcctcttaatgtt

SEQ ID NO: 149670 - DNA, 69 bp, Homo sapiens
actggtgactccaggaaccattttcacctattaccagtgttccctggggactcctcttaatgtttccaa

SEQ ID NO: 149671 - DNA, 67 bp, Homo sapiens
aggaaccattttcacctattaccagtgttccctggggactcctcttaatgtttccaaatgggaagga

SEQ ID NO: 149672 - DNA, 68 bp, Homo sapiens
ttttcacctattaccagtgttccctggggactcctcttaatgtttccaaatgggaaggacagttgatt

SEQ ID NO: 149673 - DNA, 68 bp, Homo sapiens
agtgttccctggggactcctcttaatgtttccaaatgggaaggacagttgatttccaacatgaggttt

SEQ ID NO: 149674 - DNA, 67 bp, Homo sapiens
cctggggactcctcttaatgtttccaaatgggaaggacagttgatttccaacatgaggttttttgtt

SEQ ID NO: 149675 - DNA, 71 bp, Homo sapiens
tttatccagaaatattttcagcaaaactttccaactgagtggagtctgattaaggatttatttgaaaatgg

SEQ ID NO: 149676 - DNA, 71 bp, Homo sapiens
ccagaaatattttcagcaaaactttccaactgagtggagtctgattaaggatttatttgaaaatggtggga

SEQ ID NO: 149677 - DNA, 74 bp, Homo sapiens
ttcagcaaaactttccaactgagtggagtctgattaaggatttatttgaaaatggtgggattcattggcccata

SEQ ID NO: 149678 - DNA, 72 bp, Homo sapiens
actttccaactgagtggagtctgattaaggatttatttgaaaatggtgggattcattggcccataggtacat

SEQ ID NO: 149679 - DNA, 72 bp, Homo sapiens
aactgagtggagtctgattaaggatttatttgaaaatggtgggattcattggcccataggtacattggaaaa

SEQ ID NO: 149680 - DNA, 73 bp, Homo sapiens
agtggagtctgattaaggatttatttgaaaatggtgggattcattggcccataggtacattggaaaatgtata

SEQ ID NO: 149681 - DNA, 74 bp, Homo sapiens
agtctgattaaggatttatttgaaaatggtgggattcattggcccataggtacattggaaaatgtatatctctc

SEQ ID NO: 149682 - DNA, 75 bp, Homo sapiens
ttaaggatttatttgaaaatggtgggattcattggcccataggtacattggaaaatgtatatctctccagctgta

SEQ ID NO: 149683 - DNA, 75 bp, Homo sapiens
atttatttgaaaatggtgggattcattggcccataggtacattggaaaatgtatatctctccagctgtactgtag

SEQ ID NO: 149684 - DNA, 79 bp, Homo sapiens
tttgaaaatggtgggattcattggcccataggtacattggaaaatgtatatctctccagctgtactgtagtgccctgca

SEQ ID NO: 149685 - DNA, 80 bp, Homo sapiens
gtgggattcattggcccataggtacattggaaaatgtatatctctccagctgtactgtagtgccctgcaggctgtttata

SEQ ID NO: 149686 - DNA, 81 bp, Homo sapiens
attcattggcccataggtacattggaaaatgtatatctctccagctgtactgtagtgccctgcaggctgtttatatgttca

SEQ ID NO: 149687 - DNA, 79 bp, Homo sapiens
ccataggtacattggaaaatgtatatctctccagctgtactgtagtgccctgcaggctgtttatatgttcacagttact

SEQ ID NO: 149688 - DNA, 77 bp, Homo sapiens
gtacattggaaaatgtatatctctccagctgtactgtagtgccctgcaggctgtttatatgttcacagttacttttt

SEQ ID NO: 149689 - DNA, 73 bp, Homo sapiens
aaaatgtatatctctccagctgtactgtagtgccctgcaggctgtttatatgttcacagttactttttttttt

SEQ ID NO: 149690 - DNA, 68 bp, Homo sapiens
aagtcatttaatgtagaatacttttaatttcactttctgtattttaattttgttgaagggctgattgg

SEQ ID NO: 149691 - DNA, 69 bp, Homo sapiens
atgtagaatacttttaatttcactttctgtattttaattttgttgaagggctgattgggatttccatgt

SEQ ID NO: 149692 - DNA, 69 bp, Homo sapiens
gaatacttttaatttcactttctgtattttaattttgttgaagggctgattgggatttccatgttctta

SEQ ID NO: 149693 - DNA, 69 bp, Homo sapiens
cactttctgtattttaattttgttgaagggctgattgggatttccatgttcttattaaaaatctaacaa

SEQ ID NO: 149694 - DNA, 68 bp, Homo sapiens
attttaattttgttgaagggctgattgggatttccatgttcttattaaaaatctaacaaatctgtttg

SEQ ID NO: 149695 - DNA, 71 bp, Homo sapiens
ttgttgaagggctgattgggatttccatgttcttattaaaaatctaacaaatctgtttggagtggactaaa

SEQ ID NO: 149696 - DNA, 70 bp, Homo sapiens
gggctgattgggatttccatgttcttattaaaaatctaacaaatctgtttggagtggactaaattattcg

SEQ ID NO: 149697 - DNA, 68 bp, Homo sapiens
tttccatgttcttattaaaaatctaacaaatctgtttggagtggactaaattattcgtgtaccaaccc

SEQ ID NO: 149698 - DNA, 67 bp, Homo sapiens
tttcataaataggaaactagcaagaattaacattcctagaaaggcgaaaggtacaaaaaataccgac

SEQ ID NO: 149699 - DNA, 66 bp, Homo sapiens
taggaaactagcaagaattaacattcctagaaaggcgaaaggtacaaaaaataccgacttagttta

SEQ ID NO: 149700 - DNA, 67 bp, Homo sapiens
actagcaagaattaacattcctagaaaggcgaaaggtacaaaaaataccgacttagtttattggata

SEQ ID NO: 149701 - DNA, 64 bp, Homo sapiens
aacattcctagaaaggcgaaaggtacaaaaaataccgacttagtttattggataaaaacagtgg

SEQ ID NO: 149702 - DNA, 65 bp, Homo sapiens
gaaaggcgaaaggtacaaaaaataccgacttagtttattggataaaaacagtggtaaaatggaca

SEQ ID NO: 149703 - DNA, 66 bp, Homo sapiens
gaaaggtacaaaaaataccgacttagtttattggataaaaacagtggtaaaatggacataaagcca

SEQ ID NO: 149704 - DNA, 69 bp, Homo sapiens
ataccgacttagtttattggataaaaacagtggtaaaatggacataaagccaaaagtgagaacagaaca

SEQ ID NO: 149705 - DNA, 71 bp, Homo sapiens
gtttattggataaaaacagtggtaaaatggacataaagccaaaagtgagaacagaacattttcatatcctc

SEQ ID NO: 149706 - DNA, 70 bp, Homo sapiens
ataaaaacagtggtaaaatggacataaagccaaaagtgagaacagaacattttcatatcctccccacact

SEQ ID NO: 149707 - DNA, 72 bp, Homo sapiens
tggtaaaatggacataaagccaaaagtgagaacagaacattttcatatcctccccacacttgaaaacatact

SEQ ID NO: 149708 - DNA, 74 bp, Homo sapiens
aatggacataaagccaaaagtgagaacagaacattttcatatcctccccacacttgaaaacatacttcccatca

SEQ ID NO: 149709 - DNA, 75 bp, Homo sapiens
aagccaaaagtgagaacagaacattttcatatcctccccacacttgaaaacatacttcccatcatctgggattca

SEQ ID NO: 149710 - DNA, 74 bp, Homo sapiens
agaacagaacattttcatatcctccccacacttgaaaacatacttcccatcatctgggattcaggtgttaggga

SEQ ID NO: 149711 - DNA, 75 bp, Homo sapiens
acattttcatatcctccccacacttgaaaacatacttcccatcatctgggattcaggtgttagggagccagagcc

SEQ ID NO: 149712 - DNA, 73 bp, Homo sapiens
tcctccccacacttgaaaacatacttcccatcatctgggattcaggtgttagggagccagagccccttccaaa

SEQ ID NO: 149713 - DNA, 74 bp, Homo sapiens
acttgaaaacatacttcccatcatctgggattcaggtgttagggagccagagccccttccaaatctctctctct

SEQ ID NO: 149714 - DNA, 76 bp, Homo sapiens
atacttcccatcatctgggattcaggtgttagggagccagagccccttccaaatctctctctcttcatcttccctg

SEQ ID NO: 149715 - DNA, 76 bp, Homo sapiens
atcatctgggattcaggtgttagggagccagagccccttccaaatctctctctcttcatcttccctggaagcaagg

SEQ ID NO: 149716 - DNA, 73 bp, Homo sapiens
attcaggtgttagggagccagagccccttccaaatctctctctcttcatcttccctggaagcaaggggaggaa

SEQ ID NO: 149717 - DNA, 74 bp, Homo sapiens
tagggagccagagccccttccaaatctctctctcttcatcttccctggaagcaaggggaggaagaagtcagaac

SEQ ID NO: 149718 - DNA, 71 bp, Homo sapiens
ccttccaaatctctctctcttcatcttccctggaagcaaggggaggaagaagtcagaacccaggggaggag

SEQ ID NO: 149719 - DNA, 72 bp, Homo sapiens
aaatctctctctcttcatcttccctggaagcaaggggaggaagaagtcagaacccaggggaggaggaagtca

SEQ ID NO: 149720 - DNA, 74 bp, Homo sapiens
ttcatcttccctggaagcaaggggaggaagaagtcagaacccaggggaggaggaagtcagaggcaatctcagtc

SEQ ID NO: 149721 - DNA, 73 bp, Homo sapiens
tggaagcaaggggaggaagaagtcagaacccaggggaggaggaagtcagaggcaatctcagtccttgtctacc

SEQ ID NO: 149722 - DNA, 71 bp, Homo sapiens
aagtcagaacccaggggaggaggaagtcagaggcaatctcagtccttgtctacccgttcatccctcaaaaa

SEQ ID NO: 149723 - DNA, 73 bp, Homo sapiens
caggggaggaggaagtcagaggcaatctcagtccttgtctacccgttcatccctcaaaaatctctgggttcga

SEQ ID NO: 149724 - DNA, 73 bp, Homo sapiens
aggaagtcagaggcaatctcagtccttgtctacccgttcatccctcaaaaatctctgggttcgagggaagcag

SEQ ID NO: 149725 - DNA, 71 bp, Homo sapiens
aggcaatctcagtccttgtctacccgttcatccctcaaaaatctctgggttcgagggaagcagggaagaaa

SEQ ID NO: 149726 - DNA, 70 bp, Homo sapiens
tctcagtccttgtctacccgttcatccctcaaaaatctctgggttcgagggaagcagggaagaaataagg

SEQ ID NO: 149727 - DNA, 68 bp, Homo sapiens
tgtctacccgttcatccctcaaaaatctctgggttcgagggaagcagggaagaaataaggggcaaggg

SEQ ID NO: 149728 - DNA, 68 bp, Homo sapiens
ttcatccctcaaaaatctctgggttcgagggaagcagggaagaaataaggggcaaggggggctaggga

SEQ ID NO: 149729 - DNA, 70 bp, Homo sapiens
tcgagggaagcagggaagaaataaggggcaaggggggctagggactggcctccagggcccactgccaata

SEQ ID NO: 149730 - DNA, 69 bp, Homo sapiens
agggaagaaataaggggcaaggggggctagggactggcctccagggcccactgccaataatgtcccaga

SEQ ID NO: 149731 - DNA, 76 bp, Homo sapiens
aaggggggctagggactggcctccagggcccactgccaataatgtcccagatagctatccttgtctgtatctcatc

SEQ ID NO: 149732 - DNA, 78 bp, Homo sapiens
tagggactggcctccagggcccactgccaataatgtcccagatagctatccttgtctgtatctcatccctaataggta

SEQ ID NO: 149733 - DNA, 78 bp, Homo sapiens
ccagggcccactgccaataatgtcccagatagctatccttgtctgtatctcatccctaataggtaccattgtcaggcc

SEQ ID NO: 149734 - DNA, 78 bp, Homo sapiens
cccactgccaataatgtcccagatagctatccttgtctgtatctcatccctaataggtaccattgtcaggccttggga

SEQ ID NO: 149735 - DNA, 78 bp, Homo sapiens
aataatgtcccagatagctatccttgtctgtatctcatccctaataggtaccattgtcaggccttgggagagagagga

SEQ ID NO: 149736 - DNA, 77 bp, Homo sapiens
agatagctatccttgtctgtatctcatccctaataggtaccattgtcaggccttgggagagagaggaaaagcaggta

SEQ ID NO: 149737 - DNA, 77 bp, Homo sapiens
tgtctgtatctcatccctaataggtaccattgtcaggccttgggagagagaggaaaagcaggtagatggttcgagaa

SEQ ID NO: 149738 - DNA, 75 bp, Homo sapiens
tatctcatccctaataggtaccattgtcaggccttgggagagagaggaaaagcaggtagatggttcgagaaccaa

SEQ ID NO: 149739 - DNA, 74 bp, Homo sapiens
taataggtaccattgtcaggccttgggagagagaggaaaagcaggtagatggttcgagaaccaaatgtggtctc

SEQ ID NO: 149740 - DNA, 74 bp, Homo sapiens
attgtcaggccttgggagagagaggaaaagcaggtagatggttcgagaaccaaatgtggtctccagactctttc

SEQ ID NO: 149741 - DNA, 75 bp, Homo sapiens
gggagagagaggaaaagcaggtagatggttcgagaaccaaatgtggtctccagactctttcccagagtcagcaaa

SEQ ID NO: 149742 - DNA, 73 bp, Homo sapiens
aggaaaagcaggtagatggttcgagaaccaaatgtggtctccagactctttcccagagtcagcaaaagccctg

SEQ ID NO: 149743 - DNA, 72 bp, Homo sapiens
aggtagatggttcgagaaccaaatgtggtctccagactctttcccagagtcagcaaaagccctggggtgacc

SEQ ID NO: 149744 - DNA, 73 bp, Homo sapiens
tcgagaaccaaatgtggtctccagactctttcccagagtcagcaaaagccctggggtgacccccaggactcta

SEQ ID NO: 149745 - DNA, 72 bp, Homo sapiens
aaatgtggtctccagactctttcccagagtcagcaaaagccctggggtgacccccaggactctaggagccac

SEQ ID NO: 149746 - DNA, 72 bp, Homo sapiens
tctccagactctttcccagagtcagcaaaagccctggggtgacccccaggactctaggagccactccttttc

SEQ ID NO: 149747 - DNA, 71 bp, Homo sapiens
tctttcccagagtcagcaaaagccctggggtgacccccaggactctaggagccactccttttccctccagc

SEQ ID NO: 149748 - DNA, 69 bp, Homo sapiens
agtcagcaaaagccctggggtgacccccaggactctaggagccactccttttccctccagcccaaccaa

SEQ ID NO: 149749 - DNA, 68 bp, Homo sapiens
tggggtgacccccaggactctaggagccactccttttccctccagcccaaccaagaggtgaaaagaaa

SEQ ID NO: 149750 - DNA, 68 bp, Homo sapiens
cccaggactctaggagccactccttttccctccagcccaaccaagaggtgaaaagaaattccttggga

SEQ ID NO: 149751 - DNA, 71 bp, Homo sapiens
taggagccactccttttccctccagcccaaccaagaggtgaaaagaaattccttgggacacagcatcccaa

SEQ ID NO: 149752 - DNA, 71 bp, Homo sapiens
tccttttccctccagcccaaccaagaggtgaaaagaaattccttgggacacagcatcccaagccactctta

SEQ ID NO: 149753 - DNA, 72 bp, Homo sapiens
ttccctccagcccaaccaagaggtgaaaagaaattccttgggacacagcatcccaagccactcttaaatctc

SEQ ID NO: 149754 - DNA, 72 bp, Homo sapiens
accaagaggtgaaaagaaattccttgggacacagcatcccaagccactcttaaatctccacatcgctttcct

SEQ ID NO: 149755 - DNA, 75 bp, Homo sapiens
aaaagaaattccttgggacacagcatcccaagccactcttaaatctccacatcgctttccttgtcattgtcatgg

SEQ ID NO: 149756 - DNA, 80 bp, Homo sapiens
aattccttgggacacagcatcccaagccactcttaaatctccacatcgctttccttgtcattgtcatggtctccatcata

SEQ ID NO: 149757 - DNA, 81 bp, Homo sapiens
tcccaagccactcttaaatctccacatcgctttccttgtcattgtcatggtctccatcatagaactcattgggtgcctctg

SEQ ID NO: 149758 - DNA, 83 bp, Homo sapiens
tcttaaatctccacatcgctttccttgtcattgtcatggtctccatcatagaactcattgggtgcctctggcctgcaaagcaa

SEQ ID NO: 149759 - DNA, 74 bp, Homo sapiens
aacctccccagcaagcctattgaaagtaggctgaagtccctgctcccagacctgctatagttctcctcaggacc

SEQ ID NO: 149760 - DNA, 78 bp, Homo sapiens
aagcctattgaaagtaggctgaagtccctgctcccagacctgctatagttctcctcaggacccctctcctctgcatca

SEQ ID NO: 149761 - DNA, 80 bp, Homo sapiens
aaagtaggctgaagtccctgctcccagacctgctatagttctcctcaggacccctctcctctgcatcagcctcatcagtc

SEQ ID NO: 149762 - DNA, 82 bp, Homo sapiens
aagtccctgctcccagacctgctatagttctcctcaggacccctctcctctgcatcagcctcatcagtcctgtcataggtca

SEQ ID NO: 149763 - DNA, 84 bp, Homo sapiens
ctcccagacctgctatagttctcctcaggacccctctcctctgcatcagcctcatcagtcctgtcataggtcaggaggtctgca

SEQ ID NO: 149764 - DNA, 86 bp, Homo sapiens
tatagttctcctcaggacccctctcctctgcatcagcctcatcagtcctgtcataggtcaggaggtctgcaggcacgtcatgaatc

SEQ ID NO: 149765 - DNA, 87 bp, Homo sapiens
tcctcaggacccctctcctctgcatcagcctcatcagtcctgtcataggtcaggaggtctgcaggcacgtcatgaatctggacacta

SEQ ID NO: 149766 - DNA, 91 bp, Homo sapiens
ctctcctctgcatcagcctcatcagtcctgtcataggtcaggaggtctgcaggcacgtcatgaatctggacactaggtgcatggttcagca

SEQ ID NO: 149767 - DNA, 89 bp, Homo sapiens
catcagcctcatcagtcctgtcataggtcaggaggtctgcaggcacgtcatgaatctggacactaggtgcatggttcagcatcttcagg

SEQ ID NO: 149768 - DNA, 85 bp, Homo sapiens
atcagtcctgtcataggtcaggaggtctgcaggcacgtcatgaatctggacactaggtgcatggttcagcatcttcaggttttca

SEQ ID NO: 149769 - DNA, 84 bp, Homo sapiens
tgtcataggtcaggaggtctgcaggcacgtcatgaatctggacactaggtgcatggttcagcatcttcaggttttcaaagattg

SEQ ID NO: 149770 - DNA, 82 bp, Homo sapiens
aggaggtctgcaggcacgtcatgaatctggacactaggtgcatggttcagcatcttcaggttttcaaagattgtctggcgga

SEQ ID NO: 149771 - DNA, 82 bp, Homo sapiens
aggcacgtcatgaatctggacactaggtgcatggttcagcatcttcaggttttcaaagattgtctggcggatctggtccaga

SEQ ID NO: 149772 - DNA, 80 bp, Homo sapiens
atgaatctggacactaggtgcatggttcagcatcttcaggttttcaaagattgtctggcggatctggtccagatactggt

SEQ ID NO: 149773 - DNA, 79 bp, Homo sapiens
acactaggtgcatggttcagcatcttcaggttttcaaagattgtctggcggatctggtccagatactggttggaaatga

SEQ ID NO: 149774 - DNA, 78 bp, Homo sapiens
atggttcagcatcttcaggttttcaaagattgtctggcggatctggtccagatactggttggaaatgaggaatacaga

SEQ ID NO: 149775 - DNA, 77 bp, Homo sapiens
atcttcaggttttcaaagattgtctggcggatctggtccagatactggttggaaatgaggaatacagagtgagcagt

SEQ ID NO: 149776 - DNA, 83 bp, Homo sapiens
tctcctgggctccacctttcaggagaagtttgtgctcagcttttctgagctgctgacctggcgtgagttctgattctcgatgc

SEQ ID NO: 149777 - DNA, 84 bp, Homo sapiens
tccacctttcaggagaagtttgtgctcagcttttctgagctgctgacctggcgtgagttctgattctcgatgcgggtgctgaca

SEQ ID NO: 149778 - DNA, 87 bp, Homo sapiens
ttcaggagaagtttgtgctcagcttttctgagctgctgacctggcgtgagttctgattctcgatgcgggtgctgacatctggatgaa

SEQ ID NO: 149779 - DNA, 86 bp, Homo sapiens
agtttgtgctcagcttttctgagctgctgacctggcgtgagttctgattctcgatgcgggtgctgacatctggatgaagtgtgaag

SEQ ID NO: 149780 - DNA, 85 bp, Homo sapiens
tttctgagctgctgacctggcgtgagttctgattctcgatgcgggtgctgacatctggatgaagtgtgaagtctggggcaaagta

SEQ ID NO: 149781 - DNA, 83 bp, Homo sapiens
ctgctgacctggcgtgagttctgattctcgatgcgggtgctgacatctggatgaagtgtgaagtctggggcaaagtactcgaa

SEQ ID NO: 149782 - DNA, 80 bp, Homo sapiens
cgtgagttctgattctcgatgcgggtgctgacatctggatgaagtgtgaagtctggggcaaagtactcgaagtattcttg

SEQ ID NO: 149783 - DNA, 79 bp, Homo sapiens
gttctgattctcgatgcgggtgctgacatctggatgaagtgtgaagtctggggcaaagtactcgaagtattcttgggga

SEQ ID NO: 149784 - DNA, 77 bp, Homo sapiens
atgcgggtgctgacatctggatgaagtgtgaagtctggggcaaagtactcgaagtattcttggggaggagaggagaa

SEQ ID NO: 149785 - DNA, 76 bp, Homo sapiens
acatctggatgaagtgtgaagtctggggcaaagtactcgaagtattcttggggaggagaggagaaagtatggctca

SEQ ID NO: 149786 - DNA, 76 bp, Homo sapiens
atgaagtgtgaagtctggggcaaagtactcgaagtattcttggggaggagaggagaaagtatggctcagactgaga

SEQ ID NO: 149787 - DNA, 75 bp, Homo sapiens
gtgaagtctggggcaaagtactcgaagtattcttggggaggagaggagaaagtatggctcagactgagaaaggca

SEQ ID NO: 149788 - DNA, 70 bp, Homo sapiens
aaaccaggtcattctggaatctggtgagaatggccttcctgttatgggggtgttgtggggtggtccttac

SEQ ID NO: 149789 - DNA, 71 bp, Homo sapiens
ttctggaatctggtgagaatggccttcctgttatgggggtgttgtggggtggtccttaccactatagggaa

SEQ ID NO: 149790 - DNA, 71 bp, Homo sapiens
gtgagaatggccttcctgttatgggggtgttgtggggtggtccttaccactatagggaagctcctcactaa

SEQ ID NO: 149791 - DNA, 70 bp, Homo sapiens
aatggccttcctgttatgggggtgttgtggggtggtccttaccactatagggaagctcctcactaatggc

SEQ ID NO: 149792 - DNA, 71 bp, Homo sapiens
ctgttatgggggtgttgtggggtggtccttaccactatagggaagctcctcactaatggcctcttctacca

SEQ ID NO: 149793 - DNA, 79 bp, Homo sapiens
tgttgtggggtggtccttaccactatagggaagctcctcactaatggcctcttctaccagcagcgatgtctcatatgtc

SEQ ID NO: 149794 - DNA, 79 bp, Homo sapiens
tggtccttaccactatagggaagctcctcactaatggcctcttctaccagcagcgatgtctcatatgtcctgaaaccaa

SEQ ID NO: 149795 - DNA, 80 bp, Homo sapiens
accactatagggaagctcctcactaatggcctcttctaccagcagcgatgtctcatatgtcctgaaaccaaccagcagag

SEQ ID NO: 149796 - DNA, 82 bp, Homo sapiens
aagctcctcactaatggcctcttctaccagcagcgatgtctcatatgtcctgaaaccaaccagcagaggggagcaggctgac

SEQ ID NO: 149797 - DNA, 80 bp, Homo sapiens
actaatggcctcttctaccagcagcgatgtctcatatgtcctgaaaccaaccagcagaggggagcaggctgaccaagtgg

SEQ ID NO: 149798 - DNA, 81 bp, Homo sapiens
tcttctaccagcagcgatgtctcatatgtcctgaaaccaaccagcagaggggagcaggctgaccaagtgggctgaaggacc

SEQ ID NO: 149799 - DNA, 78 bp, Homo sapiens
acaccctagctcacactggacaacaggggaggaaatcaggagagtgctcaccagcagcgggcaacatttcggacagta

SEQ ID NO: 149800 - DNA, 79 bp, Homo sapiens
ctagctcacactggacaacaggggaggaaatcaggagagtgctcaccagcagcgggcaacatttcggacagtataacca

SEQ ID NO: 149801 - DNA, 76 bp, Homo sapiens
ctggacaacaggggaggaaatcaggagagtgctcaccagcagcgggcaacatttcggacagtataaccaccaccac

SEQ ID NO: 149802 - DNA, 77 bp, Homo sapiens
aggaaatcaggagagtgctcaccagcagcgggcaacatttcggacagtataaccaccaccacccagcacgagtagag

SEQ ID NO: 149803 - DNA, 78 bp, Homo sapiens
aggagagtgctcaccagcagcgggcaacatttcggacagtataaccaccaccacccagcacgagtagagggatattga

SEQ ID NO: 149804 - DNA, 78 bp, Homo sapiens
ccagcagcgggcaacatttcggacagtataaccaccaccacccagcacgagtagagggatattgaagctcttgacata

SEQ ID NO: 149805 - DNA, 78 bp, Homo sapiens
gcaacatttcggacagtataaccaccaccacccagcacgagtagagggatattgaagctcttgacatattcaacgcat

SEQ ID NO: 149806 - DNA, 76 bp, Homo sapiens
atttcggacagtataaccaccaccacccagcacgagtagagggatattgaagctcttgacatattcaacgcattcc

SEQ ID NO: 149807 - DNA, 74 bp, Homo sapiens
accaccaccacccagcacgagtagagggatattgaagctcttgacatattcaacgcattccctgttaaaaggaa

SEQ ID NO: 149808 - DNA, 74 bp, Homo sapiens
acccagcacgagtagagggatattgaagctcttgacatattcaacgcattccctgttaaaaggaaccagaggaa

SEQ ID NO: 149809 - DNA, 75 bp, Homo sapiens
acgagtagagggatattgaagctcttgacatattcaacgcattccctgttaaaaggaaccagaggaagatgtgga

SEQ ID NO: 149810 - DNA, 70 bp, Homo sapiens
acccacgtactgaagtccaaggccacttaaaaaccttggggagaagaaggagagcaagtctcacccatgc

SEQ ID NO: 149811 - DNA, 71 bp, Homo sapiens
gtactgaagtccaaggccacttaaaaaccttggggagaagaaggagagcaagtctcacccatgccctcgga

SEQ ID NO: 149812 - DNA, 71 bp, Homo sapiens
aggccacttaaaaaccttggggagaagaaggagagcaagtctcacccatgccctcggatgctgaggttaaa

SEQ ID NO: 149813 - DNA, 73 bp, Homo sapiens
ttaaaaaccttggggagaagaaggagagcaagtctcacccatgccctcggatgctgaggttaaagcagcccaa

SEQ ID NO: 149814 - DNA, 83 bp, Homo sapiens
gagaagaaggagagcaagtctcacccatgccctcggatgctgaggttaaagcagcccaatcgatcacagcccagagagtcagc

SEQ ID NO: 149815 - DNA, 83 bp, Homo sapiens
aaggagagcaagtctcacccatgccctcggatgctgaggttaaagcagcccaatcgatcacagcccagagagtcagctccaca

SEQ ID NO: 149816 - DNA, 82 bp, Homo sapiens
aagtctcacccatgccctcggatgctgaggttaaagcagcccaatcgatcacagcccagagagtcagctccacactgcaaaa

SEQ ID NO: 149817 - DNA, 80 bp, Homo sapiens
atgccctcggatgctgaggttaaagcagcccaatcgatcacagcccagagagtcagctccacactgcaaaaagcaaaacc

SEQ ID NO: 149818 - DNA, 78 bp, Homo sapiens
atgctgaggttaaagcagcccaatcgatcacagcccagagagtcagctccacactgcaaaaagcaaaaccccaggaaa

SEQ ID NO: 149819 - DNA, 81 bp, Homo sapiens
ttaaagcagcccaatcgatcacagcccagagagtcagctccacactgcaaaaagcaaaaccccaggaaagtgcagtgatca

SEQ ID NO: 149820 - DNA, 82 bp, Homo sapiens
aatcgatcacagcccagagagtcagctccacactgcaaaaagcaaaaccccaggaaagtgcagtgatcagaactgatcagaa

SEQ ID NO: 149821 - DNA, 78 bp, Homo sapiens
ttcccttgctctctttccccaagcccaggcagaacactcctgaggaggaactgacagtattacctggagcacaatgca

SEQ ID NO: 149822 - DNA, 76 bp, Homo sapiens
ttccccaagcccaggcagaacactcctgaggaggaactgacagtattacctggagcacaatgcacgtgggttggta

SEQ ID NO: 149823 - DNA, 77 bp, Homo sapiens
ccaggcagaacactcctgaggaggaactgacagtattacctggagcacaatgcacgtgggttggtagaagtccacta

SEQ ID NO: 149824 - DNA, 75 bp, Homo sapiens
agaacactcctgaggaggaactgacagtattacctggagcacaatgcacgtgggttggtagaagtccactacctg

SEQ ID NO: 149825 - DNA, 73 bp, Homo sapiens
aggaggaactgacagtattacctggagcacaatgcacgtgggttggtagaagtccactacctggttgataacc

SEQ ID NO: 149826 - DNA, 72 bp, Homo sapiens
acagtattacctggagcacaatgcacgtgggttggtagaagtccactacctggttgataaccggctggaaaa

SEQ ID NO: 149827 - DNA, 72 bp, Homo sapiens
ttacctggagcacaatgcacgtgggttggtagaagtccactacctggttgataaccggctggaaaaggtgct

SEQ ID NO: 149828 - DNA, 70 bp, Homo sapiens
acaatgcacgtgggttggtagaagtccactacctggttgataaccggctggaaaaggtgcttgtaacctg

SEQ ID NO: 149829 - DNA, 69 bp, Homo sapiens
ttggtagaagtccactacctggttgataaccggctggaaaaggtgcttgtaacctgggagagggccaaa

SEQ ID NO: 149830 - DNA, 69 bp, Homo sapiens
agaagtccactacctggttgataaccggctggaaaaggtgcttgtaacctgggagagggccaaagatgg

SEQ ID NO: 149831 - DNA, 71 bp, Homo sapiens
tacctggttgataaccggctggaaaaggtgcttgtaacctgggagagggccaaagatgggcacctggcacc

SEQ ID NO: 149832 - DNA, 68 bp, Homo sapiens
ataaccggctggaaaaggtgcttgtaacctgggagagggccaaagatgggcacctggcaccccaaggg

SEQ ID NO: 149833 - DNA, 69 bp, Homo sapiens
tatttcaaggagaaaaagaaggggcctagggaacagagggaagacttcggtacttactctggtcatcaa

SEQ ID NO: 149834 - DNA, 71 bp, Homo sapiens
agaaaaagaaggggcctagggaacagagggaagacttcggtacttactctggtcatcaatgccatcccgca

SEQ ID NO: 149835 - DNA, 74 bp, Homo sapiens
gggcctagggaacagagggaagacttcggtacttactctggtcatcaatgccatcccgcaggggcacgttcaga

SEQ ID NO: 149836 - DNA, 75 bp, Homo sapiens
aacagagggaagacttcggtacttactctggtcatcaatgccatcccgcaggggcacgttcagacagtagtagcg

SEQ ID NO: 149837 - DNA, 78 bp, Homo sapiens
aagacttcggtacttactctggtcatcaatgccatcccgcaggggcacgttcagacagtagtagcggccactctctgc

SEQ ID NO: 149838 - DNA, 80 bp, Homo sapiens
tacttactctggtcatcaatgccatcccgcaggggcacgttcagacagtagtagcggccactctctgccccgacttcata

SEQ ID NO: 149839 - DNA, 82 bp, Homo sapiens
gtcatcaatgccatcccgcaggggcacgttcagacagtagtagcggccactctctgccccgacttcatacatgtcacctgta

SEQ ID NO: 149840 - DNA, 78 bp, Homo sapiens
aatgccatcccgcaggggcacgttcagacagtagtagcggccactctctgccccgacttcatacatgtcacctgtagg

SEQ ID NO: 149841 - DNA, 75 bp, Homo sapiens
aggggcacgttcagacagtagtagcggccactctctgccccgacttcatacatgtcacctgtagggaagtgggtg

SEQ ID NO: 149842 - DNA, 75 bp, Homo sapiens
acgttcagacagtagtagcggccactctctgccccgacttcatacatgtcacctgtagggaagtgggtggtggta

SEQ ID NO: 149843 - DNA, 77 bp, Homo sapiens
tagtagcggccactctctgccccgacttcatacatgtcacctgtagggaagtgggtggtggtagccacacatgggaa

SEQ ID NO: 149844 - DNA, 76 bp, Homo sapiens
actctctgccccgacttcatacatgtcacctgtagggaagtgggtggtggtagccacacatgggaagcacccacaa

SEQ ID NO: 149845 - DNA, 69 bp, Homo sapiens
taaagagctgaagggtgcaaaggggaaagtaatccctattcccatacctgtgccagggaagaagtaatt

SEQ ID NO: 149846 - DNA, 66 bp, Homo sapiens
agggtgcaaaggggaaagtaatccctattcccatacctgtgccagggaagaagtaatttccgtatt

SEQ ID NO: 149847 - DNA, 66 bp, Homo sapiens
aaaggggaaagtaatccctattcccatacctgtgccagggaagaagtaatttccgtatttgtggaa

SEQ ID NO: 149848 - DNA, 69 bp, Homo sapiens
aagtaatccctattcccatacctgtgccagggaagaagtaatttccgtatttgtggaaggacaccgtca

SEQ ID NO: 149849 - DNA, 71 bp, Homo sapiens
tattcccatacctgtgccagggaagaagtaatttccgtatttgtggaaggacaccgtcatgacccggtcag

SEQ ID NO: 149850 - DNA, 70 bp, Homo sapiens
gccagggaagaagtaatttccgtatttgtggaaggacaccgtcatgacccggtcagtgaggtagaaagct

SEQ ID NO: 149851 - DNA, 70 bp, Homo sapiens
aagaagtaatttccgtatttgtggaaggacaccgtcatgacccggtcagtgaggtagaaagcttcttgaa

SEQ ID NO: 149852 - DNA, 70 bp, Homo sapiens
atttccgtatttgtggaaggacaccgtcatgacccggtcagtgaggtagaaagcttcttgaaccccgtca

SEQ ID NO: 149853 - DNA, 76 bp, Homo sapiens
gaaggacaccgtcatgacccggtcagtgaggtagaaagcttcttgaaccccgtcaccatggtggatgtcaatgtca

SEQ ID NO: 149854 - DNA, 76 bp, Homo sapiens
acaccgtcatgacccggtcagtgaggtagaaagcttcttgaaccccgtcaccatggtggatgtcaatgtcaatgta

SEQ ID NO: 149855 - DNA, 75 bp, Homo sapiens
acccggtcagtgaggtagaaagcttcttgaaccccgtcaccatggtggatgtcaatgtcaatgtagagcacccga

SEQ ID NO: 149856 - DNA, 75 bp, Homo sapiens
gtagaaagcttcttgaaccccgtcaccatggtggatgtcaatgtcaatgtagagcacccgagggtggtacctaga

SEQ ID NO: 149857 - DNA, 74 bp, Homo sapiens
agcttcttgaaccccgtcaccatggtggatgtcaatgtcaatgtagagcacccgagggtggtacctagagggaa

SEQ ID NO: 149858 - DNA, 75 bp, Homo sapiens
cgtcaccatggtggatgtcaatgtcaatgtagagcacccgagggtggtacctagagggaagccaaagccagggtc

SEQ ID NO: 149859 - DNA, 77 bp, Homo sapiens
atggtggatgtcaatgtcaatgtagagcacccgagggtggtacctagagggaagccaaagccagggtctgagctaga

SEQ ID NO: 149860 - DNA, 72 bp, Homo sapiens
agggttgagactgagagacctcctcagccaagaatcccgtaactgcccccatctcctcctgggctacttact

SEQ ID NO: 149861 - DNA, 76 bp, Homo sapiens
actgagagacctcctcagccaagaatcccgtaactgcccccatctcctcctgggctacttacttgagcagctccag

SEQ ID NO: 149862 - DNA, 80 bp, Homo sapiens
tcagccaagaatcccgtaactgcccccatctcctcctgggctacttacttgagcagctccaggatgccaatcacaatgtc

SEQ ID NO: 149863 - DNA, 79 bp, Homo sapiens
atcccgtaactgcccccatctcctcctgggctacttacttgagcagctccaggatgccaatcacaatgtcgttgacata

SEQ ID NO: 149864 - DNA, 83 bp, Homo sapiens
taactgcccccatctcctcctgggctacttacttgagcagctccaggatgccaatcacaatgtcgttgacatagcagaagcca

SEQ ID NO: 149865 - DNA, 85 bp, Homo sapiens
tctcctcctgggctacttacttgagcagctccaggatgccaatcacaatgtcgttgacatagcagaagccagaggcctatggcaa

SEQ ID NO: 149866 - DNA, 86 bp, Homo sapiens
ctacttacttgagcagctccaggatgccaatcacaatgtcgttgacatagcagaagccagaggcctatggcaagacagtggtctca

SEQ ID NO: 149867 - DNA, 87 bp, Homo sapiens
ttgagcagctccaggatgccaatcacaatgtcgttgacatagcagaagccagaggcctatggcaagacagtggtctcataaagagaa

SEQ ID NO: 149868 - DNA, 84 bp, Homo sapiens
aggatgccaatcacaatgtcgttgacatagcagaagccagaggcctatggcaagacagtggtctcataaagagaagagcaattc

SEQ ID NO: 149869 - DNA, 81 bp, Homo sapiens
aatcacaatgtcgttgacatagcagaagccagaggcctatggcaagacagtggtctcataaagagaagagcaattcccctc

SEQ ID NO: 149870 - DNA, 82 bp, Homo sapiens
atgtcgttgacatagcagaagccagaggcctatggcaagacagtggtctcataaagagaagagcaattcccctcccagctgc

SEQ ID NO: 149871 - DNA, 78 bp, Homo sapiens
atagcagaagccagaggcctatggcaagacagtggtctcataaagagaagagcaattcccctcccagctgccccccac

SEQ ID NO: 149872 - DNA, 72 bp, Homo sapiens
agtggtctcataaagagaagagcaattcccctcccagctgccccccaccatcatcctaaacacctaccctag

SEQ ID NO: 149873 - DNA, 73 bp, Homo sapiens
ccccccaccatcatcctaaacacctaccctaggatggccactgtctttcccatcacctcctcactcacctcaa

SEQ ID NO: 149874 - DNA, 73 bp, Homo sapiens
accatcatcctaaacacctaccctaggatggccactgtctttcccatcacctcctcactcacctcaaacttct

SEQ ID NO: 149875 - DNA, 77 bp, Homo sapiens
taaacacctaccctaggatggccactgtctttcccatcacctcctcactcacctcaaacttcttggcatggtgcaga

SEQ ID NO: 149876 - DNA, 79 bp, Homo sapiens
taggatggccactgtctttcccatcacctcctcactcacctcaaacttcttggcatggtgcagaccaccagcccagtta

SEQ ID NO: 149877 - DNA, 78 bp, Homo sapiens
actgtctttcccatcacctcctcactcacctcaaacttcttggcatggtgcagaccaccagcccagttaatggcaata

SEQ ID NO: 149878 - DNA, 83 bp, Homo sapiens
catcacctcctcactcacctcaaacttcttggcatggtgcagaccaccagcccagttaatggcaatatcacagatctgaaaga

SEQ ID NO: 149879 - DNA, 82 bp, Homo sapiens
tcctcactcacctcaaacttcttggcatggtgcagaccaccagcccagttaatggcaatatcacagatctgaaagacaaaca

SEQ ID NO: 149880 - DNA, 81 bp, Homo sapiens
tcaaacttcttggcatggtgcagaccaccagcccagttaatggcaatatcacagatctgaaagacaaacacctaagtcaca

SEQ ID NO: 149881 - DNA, 80 bp, Homo sapiens
ttcttggcatggtgcagaccaccagcccagttaatggcaatatcacagatctgaaagacaaacacctaagtcacagtcct

SEQ ID NO: 149882 - DNA, 76 bp, Homo sapiens
agaccaccagcccagttaatggcaatatcacagatctgaaagacaaacacctaagtcacagtccttcctgcccacc

SEQ ID NO: 149883 - DNA, 76 bp, Homo sapiens
accagcccagttaatggcaatatcacagatctgaaagacaaacacctaagtcacagtccttcctgcccacccctca

SEQ ID NO: 149884 - DNA, 77 bp, Homo sapiens
ttaatggcaatatcacagatctgaaagacaaacacctaagtcacagtccttcctgcccacccctcaagctgggagcc

SEQ ID NO: 149885 - DNA, 71 bp, Homo sapiens
gttaaatcccgagtccagggatccagaggaaaggaagaacaggactcgggactatgtcaccttgttgttca

SEQ ID NO: 149886 - DNA, 76 bp, Homo sapiens
cagggatccagaggaaaggaagaacaggactcgggactatgtcaccttgttgttcagctgggttgctccttgcaga

SEQ ID NO: 149887 - DNA, 78 bp, Homo sapiens
gaggaaaggaagaacaggactcgggactatgtcaccttgttgttcagctgggttgctccttgcagagatgcgcctgtg

SEQ ID NO: 149888 - DNA, 77 bp, Homo sapiens
aaggaagaacaggactcgggactatgtcaccttgttgttcagctgggttgctccttgcagagatgcgcctgtgtaac

SEQ ID NO: 149889 - DNA, 80 bp, Homo sapiens
actcgggactatgtcaccttgttgttcagctgggttgctccttgcagagatgcgcctgtgtaacgcgagcagaactcaaa

SEQ ID NO: 149890 - DNA, 80 bp, Homo sapiens
actatgtcaccttgttgttcagctgggttgctccttgcagagatgcgcctgtgtaacgcgagcagaactcaaagagcccg

SEQ ID NO: 149891 - DNA, 79 bp, Homo sapiens
ttgttgttcagctgggttgctccttgcagagatgcgcctgtgtaacgcgagcagaactcaaagagcccgggaaacactg

SEQ ID NO: 149892 - DNA, 79 bp, Homo sapiens
agctgggttgctccttgcagagatgcgcctgtgtaacgcgagcagaactcaaagagcccgggaaacactgggctgcagg

SEQ ID NO: 149893 - DNA, 78 bp, Homo sapiens
cttgcagagatgcgcctgtgtaacgcgagcagaactcaaagagcccgggaaacactgggctgcagggaagaggaacaa

SEQ ID NO: 149894 - DNA, 75 bp, Homo sapiens
agatgcgcctgtgtaacgcgagcagaactcaaagagcccgggaaacactgggctgcagggaagaggaacaagttg

SEQ ID NO: 149895 - DNA, 72 bp, Homo sapiens
tgtaacgcgagcagaactcaaagagcccgggaaacactgggctgcagggaagaggaacaagttggaaccctc

SEQ ID NO: 149896 - DNA, 72 bp, Homo sapiens
agcagaactcaaagagcccgggaaacactgggctgcagggaagaggaacaagttggaaccctcctgcctctg

SEQ ID NO: 149897 - DNA, 74 bp, Homo sapiens
cttggcattaaactgttagacatcaaaactcccagtcctccctcaccagtcatcgcctacgttgaaggcattaa

SEQ ID NO: 149898 - DNA, 73 bp, Homo sapiens
ttaaactgttagacatcaaaactcccagtcctccctcaccagtcatcgcctacgttgaaggcattaagactct

SEQ ID NO: 149899 - DNA, 75 bp, Homo sapiens
tagacatcaaaactcccagtcctccctcaccagtcatcgcctacgttgaaggcattaagactcttggtgaagcct

SEQ ID NO: 149900 - DNA, 75 bp, Homo sapiens
aaactcccagtcctccctcaccagtcatcgcctacgttgaaggcattaagactcttggtgaagccttgcatattg

SEQ ID NO: 149901 - DNA, 80 bp, Homo sapiens
agtcatcgcctacgttgaaggcattaagactcttggtgaagccttgcatattggtggggctgactctctgcaggaagtca

SEQ ID NO: 149902 - DNA, 79 bp, Homo sapiens
ctacgttgaaggcattaagactcttggtgaagccttgcatattggtggggctgactctctgcaggaagtcaatgtagtc

SEQ ID NO: 149903 - DNA, 78 bp, Homo sapiens
attaagactcttggtgaagccttgcatattggtggggctgactctctgcaggaagtcaatgtagtcctcggagtggaa

SEQ ID NO: 149904 - DNA, 83 bp, Homo sapiens
ttggtgaagccttgcatattggtggggctgactctctgcaggaagtcaatgtagtcctcggagtggaagcggcacatgtcatg

SEQ ID NO: 149905 - DNA, 81 bp, Homo sapiens
aagccttgcatattggtggggctgactctctgcaggaagtcaatgtagtcctcggagtggaagcggcacatgtcatgttgg

SEQ ID NO: 149906 - DNA, 80 bp, Homo sapiens
tattggtggggctgactctctgcaggaagtcaatgtagtcctcggagtggaagcggcacatgtcatgttgggaggcctgg

SEQ ID NO: 149907 - DNA, 80 bp, Homo sapiens
actctctgcaggaagtcaatgtagtcctcggagtggaagcggcacatgtcatgttgggaggcctggtatggcttgaagac

SEQ ID NO: 149908 - DNA, 78 bp, Homo sapiens
gaagtcaatgtagtcctcggagtggaagcggcacatgtcatgttgggaggcctggtatggcttgaagacctcgggatg

SEQ ID NO: 149909 - DNA, 78 bp, Homo sapiens
aatgtagtcctcggagtggaagcggcacatgtcatgttgggaggcctggtatggcttgaagacctcgggatggagaca

SEQ ID NO: 149910 - DNA, 78 bp, Homo sapiens
agtggaagcggcacatgtcatgttgggaggcctggtatggcttgaagacctcgggatggagacacaagatgaacccag

SEQ ID NO: 149911 - DNA, 78 bp, Homo sapiens
aagcggcacatgtcatgttgggaggcctggtatggcttgaagacctcgggatggagacacaagatgaacccaggcagg

SEQ ID NO: 149912 - DNA, 78 bp, Homo sapiens
tgtcatgttgggaggcctggtatggcttgaagacctcgggatggagacacaagatgaacccaggcagggtcagcccca

SEQ ID NO: 149913 - DNA, 78 bp, Homo sapiens
cctggtatggcttgaagacctcgggatggagacacaagatgaacccaggcagggtcagccccactccacaggctcaga

SEQ ID NO: 149914 - DNA, 77 bp, Homo sapiens
cttgaagacctcgggatggagacacaagatgaacccaggcagggtcagccccactccacaggctcagaccacccata

SEQ ID NO: 149915 - DNA, 77 bp, Homo sapiens
atggagacacaagatgaacccaggcagggtcagccccactccacaggctcagaccacccatactgaacccagtcctg

SEQ ID NO: 149916 - DNA, 77 bp, Homo sapiens
atgaacccaggcagggtcagccccactccacaggctcagaccacccatactgaacccagtcctggagactatatgaa

SEQ ID NO: 149917 - DNA, 78 bp, Homo sapiens
agggtcagccccactccacaggctcagaccacccatactgaacccagtcctggagactatatgaagccaaacatagca

SEQ ID NO: 149918 - DNA, 79 bp, Homo sapiens
ccactccacaggctcagaccacccatactgaacccagtcctggagactatatgaagccaaacatagcattcccctcatc

SEQ ID NO: 149919 - DNA, 78 bp, Homo sapiens
aggctcagaccacccatactgaacccagtcctggagactatatgaagccaaacatagcattcccctcatcccacaatc

SEQ ID NO: 149920 - DNA, 76 bp, Homo sapiens
acccatactgaacccagtcctggagactatatgaagccaaacatagcattcccctcatcccacaatccttaagtca

SEQ ID NO: 149921 - DNA, 78 bp, Homo sapiens
tactgaacccagtcctggagactatatgaagccaaacatagcattcccctcatcccacaatccttaagtcagtagaga

SEQ ID NO: 149922 - DNA, 78 bp, Homo sapiens
tggagactatatgaagccaaacatagcattcccctcatcccacaatccttaagtcagtagagagactccgattaacca

SEQ ID NO: 149923 - DNA, 76 bp, Homo sapiens
tatatgaagccaaacatagcattcccctcatcccacaatccttaagtcagtagagagactccgattaaccaggtaa

SEQ ID NO: 149924 - DNA, 72 bp, Homo sapiens
aaacatagcattcccctcatcccacaatccttaagtcagtagagagactccgattaaccaggtaagttatta

SEQ ID NO: 149925 - DNA, 70 bp, Homo sapiens
taagtcagtagagagactccgattaaccaggtaagttattacaaatgagccccctgaagaccacttcttt

SEQ ID NO: 149926 - DNA, 67 bp, Homo sapiens
ctccgattaaccaggtaagttattacaaatgagccccctgaagaccacttcttttcctttccacctc

SEQ ID NO: 149927 - DNA, 71 bp, Homo sapiens
taagttattacaaatgagccccctgaagaccacttcttttcctttccacctccagctcagcctatcgtacc

SEQ ID NO: 149928 - DNA, 73 bp, Homo sapiens
tattacaaatgagccccctgaagaccacttcttttcctttccacctccagctcagcctatcgtaccttctcaa

SEQ ID NO: 149929 - DNA, 70 bp, Homo sapiens
ctacggccacagctcgccccaccccccaacccccggccgaggcggcggaactcacgatcatcttcttata

SEQ ID NO: 149930 - DNA, 69 bp, Homo sapiens
agctcgccccaccccccaacccccggccgaggcggcggaactcacgatcatcttcttatagagaccgta

SEQ ID NO: 149931 - DNA, 70 bp, Homo sapiens
accccccaacccccggccgaggcggcggaactcacgatcatcttcttatagagaccgtaatgcaggacca

SEQ ID NO: 149932 - DNA, 76 bp, Homo sapiens
ccccggccgaggcggcggaactcacgatcatcttcttatagagaccgtaatgcaggaccaggctatgggtcaatgc

SEQ ID NO: 149933 - DNA, 78 bp, Homo sapiens
aggcggcggaactcacgatcatcttcttatagagaccgtaatgcaggaccaggctatgggtcaatgccaggcgatggg

SEQ ID NO: 149934 - DNA, 79 bp, Homo sapiens
aactcacgatcatcttcttatagagaccgtaatgcaggaccaggctatgggtcaatgccaggcgatggggcttcatagg

SEQ ID NO: 149935 - DNA, 79 bp, Homo sapiens
atcttcttatagagaccgtaatgcaggaccaggctatgggtcaatgccaggcgatggggcttcatagggtgtccagctc

SEQ ID NO: 149936 - DNA, 78 bp, Homo sapiens
ttatagagaccgtaatgcaggaccaggctatgggtcaatgccaggcgatggggcttcatagggtgtccagctcctggg

SEQ ID NO: 149937 - DNA, 76 bp, Homo sapiens
cgtaatgcaggaccaggctatgggtcaatgccaggcgatggggcttcatagggtgtccagctcctgggggtgggga

SEQ ID NO: 149938 - DNA, 74 bp, Homo sapiens
accaggctatgggtcaatgccaggcgatggggcttcatagggtgtccagctcctgggggtggggagaagagagt

SEQ ID NO: 149939 - DNA, 78 bp, Homo sapiens
tgggtcaatgccaggcgatggggcttcatagggtgtccagctcctgggggtggggagaagagagttcgtcagctctca

SEQ ID NO: 149940 - DNA, 73 bp, Homo sapiens
cgatggggcttcatagggtgtccagctcctgggggtggggagaagagagttcgtcagctctcacccctggagt

SEQ ID NO: 149941 - DNA, 70 bp, Homo sapiens
aaaacctccgtgtcccaactcctcatgcatatccctgtttcctcaccgtagtggaagttgcccacgtcgg

SEQ ID NO: 149942 - DNA, 73 bp, Homo sapiens
tgtcccaactcctcatgcatatccctgtttcctcaccgtagtggaagttgcccacgtcggggtcgtagaaata

SEQ ID NO: 149943 - DNA, 72 bp, Homo sapiens
aactcctcatgcatatccctgtttcctcaccgtagtggaagttgcccacgtcggggtcgtagaaataggcca

SEQ ID NO: 149944 - DNA, 68 bp, Homo sapiens
atatccctgtttcctcaccgtagtggaagttgcccacgtcggggtcgtagaaataggccacggtcttg

SEQ ID NO: 149945 - DNA, 71 bp, Homo sapiens
tgtttcctcaccgtagtggaagttgcccacgtcggggtcgtagaaataggccacggtcttggccatggtgc

SEQ ID NO: 149946 - DNA, 69 bp, Homo sapiens
ccgtagtggaagttgcccacgtcggggtcgtagaaataggccacggtcttggccatggtgccggcggga

SEQ ID NO: 149947 - DNA, 71 bp, Homo sapiens
agttgcccacgtcggggtcgtagaaataggccacggtcttggccatggtgccggcgggagcaggccccgca

SEQ ID NO: 149948 - DNA, 71 bp, Homo sapiens
gggtcgtagaaataggccacggtcttggccatggtgccggcgggagcaggccccgcacctccgccgcccgc

SEQ ID NO: 149949 - DNA, 72 bp, Homo sapiens
tagaaataggccacggtcttggccatggtgccggcgggagcaggccccgcacctccgccgcccgccgcccgc

SEQ ID NO: 149950 - DNA, 71 bp, Homo sapiens
acggtcttggccatggtgccggcgggagcaggccccgcacctccgccgcccgccgcccgcggccgccgcca

SEQ ID NO: 149951 - DNA, 71 bp, Homo sapiens
ggccatggtgccggcgggagcaggccccgcacctccgccgcccgccgcccgcggccgccgccagcccctcc

SEQ ID NO: 149952 - DNA, 70 bp, Homo sapiens
gggagcaggccccgcacctccgccgcccgccgcccgcggccgccgccagcccctccccggccgtgcgtgc

SEQ ID NO: 149953 - DNA, 72 bp, Homo sapiens
cccgcacctccgccgcccgccgcccgcggccgccgccagcccctccccggccgtgcgtgctgcgcaagcacg

SEQ ID NO: 149954 - DNA, 72 bp, Homo sapiens
acctccgccgcccgccgcccgcggccgccgccagcccctccccggccgtgcgtgctgcgcaagcacgtagcc

SEQ ID NO: 149955 - DNA, 76 bp, Homo sapiens
cggcgctaggggcgcggggcccgaggcgggcgcggccgcgggcgccgccgcagccatgagcggcagcagcggcgga

SEQ ID NO: 149956 - DNA, 76 bp, Homo sapiens
gggcgcggggcccgaggcgggcgcggccgcgggcgccgccgcagccatgagcggcagcagcggcggagccgccgcc

SEQ ID NO: 149957 - DNA, 76 bp, Homo sapiens
aggcgggcgcggccgcgggcgccgccgcagccatgagcggcagcagcggcggagccgccgcccccgccgcgtcctc

SEQ ID NO: 149958 - DNA, 75 bp, Homo sapiens
cgcggccgcgggcgccgccgcagccatgagcggcagcagcggcggagccgccgcccccgccgcgtcctccggccc

SEQ ID NO: 149959 - DNA, 76 bp, Homo sapiens
gccgccgcagccatgagcggcagcagcggcggagccgccgcccccgccgcgtcctccggccccgccgcggcggcca

SEQ ID NO: 149960 - DNA, 75 bp, Homo sapiens
ccatgagcggcagcagcggcggagccgccgcccccgccgcgtcctccggccccgccgcggcggccagcgcggctg

SEQ ID NO: 149961 - DNA, 73 bp, Homo sapiens
cagcagcggcggagccgccgcccccgccgcgtcctccggccccgccgcggcggccagcgcggctggctcgggc

SEQ ID NO: 149962 - DNA, 70 bp, Homo sapiens
cggagccgccgcccccgccgcgtcctccggccccgccgcggcggccagcgcggctggctcgggctgcggg

SEQ ID NO: 149963 - DNA, 69 bp, Homo sapiens
cccccgccgcgtcctccggccccgccgcggcggccagcgcggctggctcgggctgcgggggcggtgccg

SEQ ID NO: 149964 - DNA, 70 bp, Homo sapiens
ccgcgtcctccggccccgccgcggcggccagcgcggctggctcgggctgcgggggcggtgccggcgaggg

SEQ ID NO: 149965 - DNA, 73 bp, Homo sapiens
cccgccgcggcggccagcgcggctggctcgggctgcgggggcggtgccggcgagggggcagaggaggcggcca

SEQ ID NO: 149966 - DNA, 73 bp, Homo sapiens
cggccagcgcggctggctcgggctgcgggggcggtgccggcgagggggcagaggaggcggccaaggacctggc

SEQ ID NO: 149967 - DNA, 73 bp, Homo sapiens
cggctggctcgggctgcgggggcggtgccggcgagggggcagaggaggcggccaaggacctggccgacatcgc

SEQ ID NO: 149968 - DNA, 72 bp, Homo sapiens
ggctgcgggggcggtgccggcgagggggcagaggaggcggccaaggacctggccgacatcgcggccttcttc

SEQ ID NO: 149969 - DNA, 73 bp, Homo sapiens
gcggtgccggcgagggggcagaggaggcggccaaggacctggccgacatcgcggccttcttccgatccggtga

SEQ ID NO: 149970 - DNA, 74 bp, Homo sapiens
cgagggggcagaggaggcggccaaggacctggccgacatcgcggccttcttccgatccggtgagtgcaactgcg

SEQ ID NO: 149971 - DNA, 73 bp, Homo sapiens
agaggaggcggccaaggacctggccgacatcgcggccttcttccgatccggtgagtgcaactgcggccggccc

SEQ ID NO: 149972 - DNA, 73 bp, Homo sapiens
cggccaaggacctggccgacatcgcggccttcttccgatccggtgagtgcaactgcggccggcccgcccagcg

SEQ ID NO: 149973 - DNA, 81 bp, Homo sapiens
aaggcatgcggccgcagttacagcatgctggctgctcctcactgcccatttgggatatctagaggttgtttgttggtgttc

SEQ ID NO: 149974 - DNA, 81 bp, Homo sapiens
ccgcagttacagcatgctggctgctcctcactgcccatttgggatatctagaggttgtttgttggtgttctgggatcctga

SEQ ID NO: 149975 - DNA, 81 bp, Homo sapiens
ttacagcatgctggctgctcctcactgcccatttgggatatctagaggttgtttgttggtgttctgggatcctgagggaca

SEQ ID NO: 149976 - DNA, 77 bp, Homo sapiens
ctgctcctcactgcccatttgggatatctagaggttgtttgttggtgttctgggatcctgagggacactgccaactg

SEQ ID NO: 149977 - DNA, 73 bp, Homo sapiens
actgcccatttgggatatctagaggttgtttgttggtgttctgggatcctgagggacactgccaactgttaac

SEQ ID NO: 149978 - DNA, 71 bp, Homo sapiens
atttgggatatctagaggttgtttgttggtgttctgggatcctgagggacactgccaactgttaacctttg

SEQ ID NO: 149979 - DNA, 74 bp, Homo sapiens
atctagaggttgtttgttggtgttctgggatcctgagggacactgccaactgttaacctttggcagatagtgac

SEQ ID NO: 149980 - DNA, 73 bp, Homo sapiens
tgtttgttggtgttctgggatcctgagggacactgccaactgttaacctttggcagatagtgactgttttact

SEQ ID NO: 149981 - DNA, 72 bp, Homo sapiens
tctgggatcctgagggacactgccaactgttaacctttggcagatagtgactgttttacttcgattttattt

SEQ ID NO: 149982 - DNA, 69 bp, Homo sapiens
agggacactgccaactgttaacctttggcagatagtgactgttttacttcgattttattttcgtggtaa

SEQ ID NO: 149983 - DNA, 67 bp, Homo sapiens
tgccaactgttaacctttggcagatagtgactgttttacttcgattttattttcgtggtaaccgttt

SEQ ID NO: 149984 - DNA, 64 bp, Homo sapiens
gttaacctttggcagatagtgactgttttacttcgattttattttcgtggtaaccgttttttaa

SEQ ID NO: 149985 - DNA, 65 bp, Homo sapiens
tggcagatagtgactgttttacttcgattttattttcgtggtaaccgttttttaaaaaagattaa

SEQ ID NO: 149986 - DNA, 62 bp, Homo sapiens
tgactgttttacttcgattttattttcgtggtaaccgttttttaaaaaagattaataaatta

SEQ ID NO: 149987 - DNA, 64 bp, Homo sapiens
gattttattttcgtggtaaccgttttttaaaaaagattaataaattacccaagaggacatggca

SEQ ID NO: 149988 - DNA, 68 bp, Homo sapiens
tttaaaaaagattaataaattacccaagaggacatggcagaaggtaaggatgtgtcccagactttaaa

SEQ ID NO: 149989 - DNA, 69 bp, Homo sapiens
aagattaataaattacccaagaggacatggcagaaggtaaggatgtgtcccagactttaaaaaatacag

SEQ ID NO: 149990 - DNA, 69 bp, Homo sapiens
taaggaattaactgtcactctggcaacccagtaattttattttctccttctgtatttcagggtttcgaa

SEQ ID NO: 149991 - DNA, 68 bp, Homo sapiens
taactgtcactctggcaacccagtaattttattttctccttctgtatttcagggtttcgaaaaaacga

SEQ ID NO: 149992 - DNA, 67 bp, Homo sapiens
ggcaacccagtaattttattttctccttctgtatttcagggtttcgaaaaaacgatgaaatgaaagc

SEQ ID NO: 149993 - DNA, 69 bp, Homo sapiens
ccagtaattttattttctccttctgtatttcagggtttcgaaaaaacgatgaaatgaaagctatggatg

SEQ ID NO: 149994 - DNA, 70 bp, Homo sapiens
ttctccttctgtatttcagggtttcgaaaaaacgatgaaatgaaagctatggatgttttaccaattttga

SEQ ID NO: 149995 - DNA, 69 bp, Homo sapiens
cttctgtatttcagggtttcgaaaaaacgatgaaatgaaagctatggatgttttaccaattttgaagga

SEQ ID NO: 149996 - DNA, 69 bp, Homo sapiens
tcagggtttcgaaaaaacgatgaaatgaaagctatggatgttttaccaattttgaaggaaaaagttgca

SEQ ID NO: 149997 - DNA, 69 bp, Homo sapiens
aaaacgatgaaatgaaagctatggatgttttaccaattttgaaggaaaaagttgcatacctttcaggta

SEQ ID NO: 149998 - DNA, 67 bp, Homo sapiens
tgaaagctatggatgttttaccaattttgaaggaaaaagttgcatacctttcaggtaaagtttaact

SEQ ID NO: 149999 - DNA, 66 bp, Homo sapiens
tggatgttttaccaattttgaaggaaaaagttgcatacctttcaggtaaagtttaactttcaactc

SEQ ID NO: 150000 - DNA, 68 bp, Homo sapiens
ccaattttgaaggaaaaagttgcatacctttcaggtaaagtttaactttcaactctgctctatccaac

SEQ ID NO: 150001 - DNA, 72 bp, Homo sapiens
aggaaaaagttgcatacctttcaggtaaagtttaactttcaactctgctctatccaactgctctgacacaat

SEQ ID NO: 150002 - DNA, 70 bp, Homo sapiens
tttctgtcttatcttgtgtctaagtgtattcctaatgtttgttttttaggtgggagagataaacgtggag

SEQ ID NO: 150003 - DNA, 68 bp, Homo sapiens
ttgtgtctaagtgtattcctaatgtttgttttttaggtgggagagataaacgtggaggtcccatttta

SEQ ID NO: 150004 - DNA, 64 bp, Homo sapiens
agtgtattcctaatgtttgttttttaggtgggagagataaacgtggaggtcccattttaacgtt

SEQ ID NO: 150005 - DNA, 64 bp, Homo sapiens
ttcctaatgtttgttttttaggtgggagagataaacgtggaggtcccattttaacgtttccggc

SEQ ID NO: 150006 - DNA, 70 bp, Homo sapiens
tttttaggtgggagagataaacgtggaggtcccattttaacgtttccggcccgcagcaatcatgacagaa

SEQ ID NO: 150007 - DNA, 74 bp, Homo sapiens
gagagataaacgtggaggtcccattttaacgtttccggcccgcagcaatcatgacagaatacgacaggaggatc

SEQ ID NO: 150008 - DNA, 73 bp, Homo sapiens
ataaacgtggaggtcccattttaacgtttccggcccgcagcaatcatgacagaatacgacaggaggatctcag

SEQ ID NO: 150009 - DNA, 77 bp, Homo sapiens
ccattttaacgtttccggcccgcagcaatcatgacagaatacgacaggaggatctcaggagactcatttcctatcta

SEQ ID NO: 150010 - DNA, 79 bp, Homo sapiens
ttaacgtttccggcccgcagcaatcatgacagaatacgacaggaggatctcaggagactcatttcctatctagcctgta

SEQ ID NO: 150011 - DNA, 81 bp, Homo sapiens
cgcagcaatcatgacagaatacgacaggaggatctcaggagactcatttcctatctagcctgtattcccaggtaagttctg

SEQ ID NO: 150012 - DNA, 79 bp, Homo sapiens
aatcatgacagaatacgacaggaggatctcaggagactcatttcctatctagcctgtattcccaggtaagttctgtgtg

SEQ ID NO: 150013 - DNA, 77 bp, Homo sapiens
aatacgacaggaggatctcaggagactcatttcctatctagcctgtattcccaggtaagttctgtgtggcttgtgct

SEQ ID NO: 150014 - DNA, 82 bp, Homo sapiens
gatctcaggagactcatttcctatctagcctgtattcccaggtaagttctgtgtggcttgtgcttgtcactgatgtcacatt

SEQ ID NO: 150015 - DNA, 81 bp, Homo sapiens
tggcaagagatgtaacccgtcttcagccatgttttctttctctgcagcgaggaggtctgcaagcgtggcttcacggtgatc

SEQ ID NO: 150016 - DNA, 79 bp, Homo sapiens
agatgtaacccgtcttcagccatgttttctttctctgcagcgaggaggtctgcaagcgtggcttcacggtgatcgtgga

SEQ ID NO: 150017 - DNA, 82 bp, Homo sapiens
tcttcagccatgttttctttctctgcagcgaggaggtctgcaagcgtggcttcacggtgatcgtggacatgcgtgggtccaa

SEQ ID NO: 150018 - DNA, 79 bp, Homo sapiens
ttttctttctctgcagcgaggaggtctgcaagcgtggcttcacggtgatcgtggacatgcgtgggtccaagtgggactc

SEQ ID NO: 150019 - DNA, 82 bp, Homo sapiens
tttctctgcagcgaggaggtctgcaagcgtggcttcacggtgatcgtggacatgcgtgggtccaagtgggactccatcaagc

SEQ ID NO: 150020 - DNA, 78 bp, Homo sapiens
aggaggtctgcaagcgtggcttcacggtgatcgtggacatgcgtgggtccaagtgggactccatcaagccccttctga

SEQ ID NO: 150021 - DNA, 78 bp, Homo sapiens
aagcgtggcttcacggtgatcgtggacatgcgtgggtccaagtgggactccatcaagccccttctgaagatcctgcag

SEQ ID NO: 150022 - DNA, 78 bp, Homo sapiens
ttcacggtgatcgtggacatgcgtgggtccaagtgggactccatcaagccccttctgaagatcctgcaggagtccttc

SEQ ID NO: 150023 - DNA, 79 bp, Homo sapiens
atcgtggacatgcgtgggtccaagtgggactccatcaagccccttctgaagatcctgcaggagtccttcccctgctgca

SEQ ID NO: 150024 - DNA, 80 bp, Homo sapiens
atgcgtgggtccaagtgggactccatcaagccccttctgaagatcctgcaggagtccttcccctgctgcatccatgtggc

SEQ ID NO: 150025 - DNA, 83 bp, Homo sapiens
tccaagtgggactccatcaagccccttctgaagatcctgcaggagtccttcccctgctgcatccatgtggccctgatcatcaa

SEQ ID NO: 150026 - DNA, 83 bp, Homo sapiens
atcaagccccttctgaagatcctgcaggagtccttcccctgctgcatccatgtggccctgatcatcaagccagacaacttctg

SEQ ID NO: 150027 - DNA, 85 bp, Homo sapiens
cttctgaagatcctgcaggagtccttcccctgctgcatccatgtggccctgatcatcaagccagacaacttctggcagaaacaga

SEQ ID NO: 150028 - DNA, 83 bp, Homo sapiens
atcctgcaggagtccttcccctgctgcatccatgtggccctgatcatcaagccagacaacttctggcagaaacagaggactaa

SEQ ID NO: 150029 - DNA, 81 bp, Homo sapiens
tccttcccctgctgcatccatgtggccctgatcatcaagccagacaacttctggcagaaacagaggactaattttggcagt

SEQ ID NO: 150030 - DNA, 83 bp, Homo sapiens
tgctgcatccatgtggccctgatcatcaagccagacaacttctggcagaaacagaggactaattttggcagttctaaatttga

SEQ ID NO: 150031 - DNA, 76 bp, Homo sapiens
atgtggccctgatcatcaagccagacaacttctggcagaaacagaggactaattttggcagttctaaatttgaatt

SEQ ID NO: 150032 - DNA, 74 bp, Homo sapiens
atcatcaagccagacaacttctggcagaaacagaggactaattttggcagttctaaatttgaatttgaggtaac

SEQ ID NO: 150033 - DNA, 71 bp, Homo sapiens
aagccagacaacttctggcagaaacagaggactaattttggcagttctaaatttgaatttgaggtaacttc

SEQ ID NO: 150034 - DNA, 67 bp, Homo sapiens
aacttctggcagaaacagaggactaattttggcagttctaaatttgaatttgaggtaacttcccccg

SEQ ID NO: 150035 - DNA, 68 bp, Homo sapiens
agaaacagaggactaattttggcagttctaaatttgaatttgaggtaacttcccccgtgtggctagac

SEQ ID NO: 150036 - DNA, 70 bp, Homo sapiens
tataaaattggttcatcttctcatacgtgattttttttcccttaagacaaatatggtctctttagaaggc

SEQ ID NO: 150037 - DNA, 70 bp, Homo sapiens
tggttcatcttctcatacgtgattttttttcccttaagacaaatatggtctctttagaaggccttaccaa

SEQ ID NO: 150038 - DNA, 69 bp, Homo sapiens
tctcatacgtgattttttttcccttaagacaaatatggtctctttagaaggccttaccaaagtagttga

SEQ ID NO: 150039 - DNA, 68 bp, Homo sapiens
ttttttttcccttaagacaaatatggtctctttagaaggccttaccaaagtagttgatccttctcagc

SEQ ID NO: 150040 - DNA, 71 bp, Homo sapiens
cttaagacaaatatggtctctttagaaggccttaccaaagtagttgatccttctcagctaactcctgagtt

SEQ ID NO: 150041 - DNA, 74 bp, Homo sapiens
aaatatggtctctttagaaggccttaccaaagtagttgatccttctcagctaactcctgagtttgatggctgcc

SEQ ID NO: 150042 - DNA, 76 bp, Homo sapiens
tctctttagaaggccttaccaaagtagttgatccttctcagctaactcctgagtttgatggctgcctggaatacaa

SEQ ID NO: 150043 - DNA, 76 bp, Homo sapiens
cttaccaaagtagttgatccttctcagctaactcctgagtttgatggctgcctggaatacaaccacgaagaatgga

SEQ ID NO: 150044 - DNA, 76 bp, Homo sapiens
aaagtagttgatccttctcagctaactcctgagtttgatggctgcctggaatacaaccacgaagaatggattgaaa

SEQ ID NO: 150045 - DNA, 79 bp, Homo sapiens
ttctcagctaactcctgagtttgatggctgcctggaatacaaccacgaagaatggattgaaatcagagttgcttttgaa

SEQ ID NO: 150046 - DNA, 78 bp, Homo sapiens
taactcctgagtttgatggctgcctggaatacaaccacgaagaatggattgaaatcagagttgcttttgaagactaca

SEQ ID NO: 150047 - DNA, 79 bp, Homo sapiens
agtttgatggctgcctggaatacaaccacgaagaatggattgaaatcagagttgcttttgaagactacattagcaatgc

SEQ ID NO: 150048 - DNA, 79 bp, Homo sapiens
cctggaatacaaccacgaagaatggattgaaatcagagttgcttttgaagactacattagcaatgccacccacatgctg

SEQ ID NO: 150049 - DNA, 79 bp, Homo sapiens
aatacaaccacgaagaatggattgaaatcagagttgcttttgaagactacattagcaatgccacccacatgctgtctcg

SEQ ID NO: 150050 - DNA, 79 bp, Homo sapiens
aagaatggattgaaatcagagttgcttttgaagactacattagcaatgccacccacatgctgtctcggctggaggaact

SEQ ID NO: 150051 - DNA, 81 bp, Homo sapiens
attgaaatcagagttgcttttgaagactacattagcaatgccacccacatgctgtctcggctggaggaacttcaggacatc

SEQ ID NO: 150052 - DNA, 81 bp, Homo sapiens
tgcttttgaagactacattagcaatgccacccacatgctgtctcggctggaggaacttcaggacatcctagctaagaagga

SEQ ID NO: 150053 - DNA, 82 bp, Homo sapiens
aagactacattagcaatgccacccacatgctgtctcggctggaggaacttcaggacatcctagctaagaaggagctgcctca

SEQ ID NO: 150054 - DNA, 81 bp, Homo sapiens
attagcaatgccacccacatgctgtctcggctggaggaacttcaggacatcctagctaagaaggagctgcctcaggattta

SEQ ID NO: 150055 - DNA, 77 bp, Homo sapiens
ccacccacatgctgtctcggctggaggaacttcaggacatcctagctaagaaggagctgcctcaggatttagagggg

SEQ ID NO: 150056 - DNA, 78 bp, Homo sapiens
tctcggctggaggaacttcaggacatcctagctaagaaggagctgcctcaggatttagagggggctcggaatatgatc

SEQ ID NO: 150057 - DNA, 76 bp, Homo sapiens
ggaacttcaggacatcctagctaagaaggagctgcctcaggatttagagggggctcggaatatgatcgaggaacat

SEQ ID NO: 150058 - DNA, 79 bp, Homo sapiens
aggacatcctagctaagaaggagctgcctcaggatttagagggggctcggaatatgatcgaggaacattctcagctgaa

SEQ ID NO: 150059 - DNA, 78 bp, Homo sapiens
cctagctaagaaggagctgcctcaggatttagagggggctcggaatatgatcgaggaacattctcagctgaagaagaa

SEQ ID NO: 150060 - DNA, 77 bp, Homo sapiens
aaggagctgcctcaggatttagagggggctcggaatatgatcgaggaacattctcagctgaagaagaaggtgattaa

SEQ ID NO: 150061 - DNA, 74 bp, Homo sapiens
aggatttagagggggctcggaatatgatcgaggaacattctcagctgaagaagaaggtgattaaggcccccatc

SEQ ID NO: 150062 - DNA, 75 bp, Homo sapiens
gggctcggaatatgatcgaggaacattctcagctgaagaagaaggtgattaaggcccccatcgaggacctggatt

SEQ ID NO: 150063 - DNA, 75 bp, Homo sapiens
aatatgatcgaggaacattctcagctgaagaagaaggtgattaaggcccccatcgaggacctggatttggaggga

SEQ ID NO: 150064 - DNA, 77 bp, Homo sapiens
gaacattctcagctgaagaagaaggtgattaaggcccccatcgaggacctggatttggagggacagaagctgcttca

SEQ ID NO: 150065 - DNA, 76 bp, Homo sapiens
agctgaagaagaaggtgattaaggcccccatcgaggacctggatttggagggacagaagctgcttcagaggataca

SEQ ID NO: 150066 - DNA, 76 bp, Homo sapiens
attaaggcccccatcgaggacctggatttggagggacagaagctgcttcagaggatacagagcagtgaaagctttc

SEQ ID NO: 150067 - DNA, 75 bp, Homo sapiens
atcgaggacctggatttggagggacagaagctgcttcagaggatacagagcagtgaaagctttcccaaaaagaac

SEQ ID NO: 150068 - DNA, 77 bp, Homo sapiens
acctggatttggagggacagaagctgcttcagaggatacagagcagtgaaagctttcccaaaaagaactcaggctca

SEQ ID NO: 150069 - DNA, 78 bp, Homo sapiens
agggacagaagctgcttcagaggatacagagcagtgaaagctttcccaaaaagaactcaggctcaggcaatgcggacc

SEQ ID NO: 150070 - DNA, 79 bp, Homo sapiens
ctgcttcagaggatacagagcagtgaaagctttcccaaaaagaactcaggctcaggcaatgcggacctgcagaacctct

SEQ ID NO: 150071 - DNA, 77 bp, Homo sapiens
aggatacagagcagtgaaagctttcccaaaaagaactcaggctcaggcaatgcggacctgcagaacctcttgcccaa

SEQ ID NO: 150072 - DNA, 74 bp, Homo sapiens
agtgaaagctttcccaaaaagaactcaggctcaggcaatgcggacctgcagaacctcttgcccaaggtgtccac

SEQ ID NO: 150073 - DNA, 76 bp, Homo sapiens
aagctttcccaaaaagaactcaggctcaggcaatgcggacctgcagaacctcttgcccaaggtgtccaccatgctg

SEQ ID NO: 150074 - DNA, 78 bp, Homo sapiens
aaaaagaactcaggctcaggcaatgcggacctgcagaacctcttgcccaaggtgtccaccatgctggaccggctgcac

SEQ ID NO: 150075 - DNA, 86 bp, Homo sapiens
tcaggcaatgcggacctgcagaacctcttgcccaaggtgtccaccatgctggaccggctgcactcgacacggcagcatctgcacca

SEQ ID NO: 150076 - DNA, 84 bp, Homo sapiens
aatgcggacctgcagaacctcttgcccaaggtgtccaccatgctggaccggctgcactcgacacggcagcatctgcaccagatg

SEQ ID NO: 150077 - DNA, 89 bp, Homo sapiens
tcttgcccaaggtgtccaccatgctggaccggctgcactcgacacggcagcatctgcaccagatgtggcatgtgaggaagctgaagctg

SEQ ID NO: 150078 - DNA, 91 bp, Homo sapiens
tgtccaccatgctggaccggctgcactcgacacggcagcatctgcaccagatgtggcatgtgaggaagctgaagctggaccagtgcttcca

SEQ ID NO: 150079 - DNA, 89 bp, Homo sapiens
cactcgacacggcagcatctgcaccagatgtggcatgtgaggaagctgaagctggaccagtgcttccagctgaggctgtttgaacagga

SEQ ID NO: 150080 - DNA, 83 bp, Homo sapiens
agatgtggcatgtgaggaagctgaagctggaccagtgcttccagctgaggctgtttgaacaggatgctgagaaggtaaagacg

SEQ ID NO: 150081 - DNA, 78 bp, Homo sapiens
ggaagctgaagctggaccagtgcttccagctgaggctgtttgaacaggatgctgagaaggtaaagacgggggaggcta

SEQ ID NO: 150082 - DNA, 78 bp, Homo sapiens
agtgcttccagctgaggctgtttgaacaggatgctgagaaggtaaagacgggggaggctaatgcctcagtggacatgg

SEQ ID NO: 150083 - DNA, 73 bp, Homo sapiens
tttctctttctggagtgattgcgggttgtctttttccttccggtagatgtttgactggatcacacacaacaaa

SEQ ID NO: 150084 - DNA, 73 bp, Homo sapiens
ttctggagtgattgcgggttgtctttttccttccggtagatgtttgactggatcacacacaacaaaggcctgt

SEQ ID NO: 150085 - DNA, 70 bp, Homo sapiens
attgcgggttgtctttttccttccggtagatgtttgactggatcacacacaacaaaggcctgtttctaaa

SEQ ID NO: 150086 - DNA, 74 bp, Homo sapiens
tctttttccttccggtagatgtttgactggatcacacacaacaaaggcctgtttctaaacagctacacagagat

SEQ ID NO: 150087 - DNA, 75 bp, Homo sapiens
ccttccggtagatgtttgactggatcacacacaacaaaggcctgtttctaaacagctacacagagattgggacca

SEQ ID NO: 150088 - DNA, 79 bp, Homo sapiens
atgtttgactggatcacacacaacaaaggcctgtttctaaacagctacacagagattgggaccagccaccctcatgcca

SEQ ID NO: 150089 - DNA, 80 bp, Homo sapiens
atcacacacaacaaaggcctgtttctaaacagctacacagagattgggaccagccaccctcatgccatggagcttcagac

SEQ ID NO: 150090 - DNA, 81 bp, Homo sapiens
aaaggcctgtttctaaacagctacacagagattgggaccagccaccctcatgccatggagcttcagacgcagcacaatcac

SEQ ID NO: 150091 - DNA, 85 bp, Homo sapiens
tgtttctaaacagctacacagagattgggaccagccaccctcatgccatggagcttcagacgcagcacaatcactttgccatgaa

SEQ ID NO: 150092 - DNA, 85 bp, Homo sapiens
ctacacagagattgggaccagccaccctcatgccatggagcttcagacgcagcacaatcactttgccatgaactgtatggtaaga

SEQ ID NO: 150093 - DNA, 84 bp, Homo sapiens
agagattgggaccagccaccctcatgccatggagcttcagacgcagcacaatcactttgccatgaactgtatggtaagacactc

SEQ ID NO: 150094 - DNA, 84 bp, Homo sapiens
agccaccctcatgccatggagcttcagacgcagcacaatcactttgccatgaactgtatggtaagacactcggaacagctggac

SEQ ID NO: 150095 - DNA, 86 bp, Homo sapiens
atgccatggagcttcagacgcagcacaatcactttgccatgaactgtatggtaagacactcggaacagctggaccctggcatgtga

SEQ ID NO: 150096 - DNA, 70 bp, Homo sapiens
ctcctatttgctctcccctaaggagccctcttttcctgcccactttccagaacgtgtatgtaaatataaa

SEQ ID NO: 150097 - DNA, 72 bp, Homo sapiens
tctcccctaaggagccctcttttcctgcccactttccagaacgtgtatgtaaatataaaccgcatcatgtcg

SEQ ID NO: 150098 - DNA, 72 bp, Homo sapiens
aaggagccctcttttcctgcccactttccagaacgtgtatgtaaatataaaccgcatcatgtcggtggccaa

SEQ ID NO: 150099 - DNA, 74 bp, Homo sapiens
ttttcctgcccactttccagaacgtgtatgtaaatataaaccgcatcatgtcggtggccaatcgtctggtggag

SEQ ID NO: 150100 - DNA, 77 bp, Homo sapiens
actttccagaacgtgtatgtaaatataaaccgcatcatgtcggtggccaatcgtctggtggagtctggccactatgc

SEQ ID NO: 150101 - DNA, 82 bp, Homo sapiens
aacgtgtatgtaaatataaaccgcatcatgtcggtggccaatcgtctggtggagtctggccactatgcctcgcagcagatca

SEQ ID NO: 150102 - DNA, 85 bp, Homo sapiens
gtaaatataaaccgcatcatgtcggtggccaatcgtctggtggagtctggccactatgcctcgcagcagatcaggcagatcgcga

SEQ ID NO: 150103 - DNA, 89 bp, Homo sapiens
accgcatcatgtcggtggccaatcgtctggtggagtctggccactatgcctcgcagcagatcaggcagatcgcgagtcagctggagcag

SEQ ID NO: 150104 - DNA, 87 bp, Homo sapiens
gtcggtggccaatcgtctggtggagtctggccactatgcctcgcagcagatcaggcagatcgcgagtcagctggagcaggagtggaa

SEQ ID NO: 150105 - DNA, 86 bp, Homo sapiens
aatcgtctggtggagtctggccactatgcctcgcagcagatcaggcagatcgcgagtcagctggagcaggagtggaaggcgtttgc

SEQ ID NO: 150106 - DNA, 88 bp, Homo sapiens
agtctggccactatgcctcgcagcagatcaggcagatcgcgagtcagctggagcaggagtggaaggcgtttgcggcagccctggatga

SEQ ID NO: 150107 - DNA, 88 bp, Homo sapiens
actatgcctcgcagcagatcaggcagatcgcgagtcagctggagcaggagtggaaggcgtttgcggcagccctggatgagcggagcac

SEQ ID NO: 150108 - DNA, 87 bp, Homo sapiens
agcagatcaggcagatcgcgagtcagctggagcaggagtggaaggcgtttgcggcagccctggatgagcggagcaccttgctggaca

SEQ ID NO: 150109 - DNA, 85 bp, Homo sapiens
cagatcgcgagtcagctggagcaggagtggaaggcgtttgcggcagccctggatgagcggagcaccttgctggacatgtcctcca

SEQ ID NO: 150110 - DNA, 81 bp, Homo sapiens
agtcagctggagcaggagtggaaggcgtttgcggcagccctggatgagcggagcaccttgctggacatgtcctccattttc

SEQ ID NO: 150111 - DNA, 79 bp, Homo sapiens
agcaggagtggaaggcgtttgcggcagccctggatgagcggagcaccttgctggacatgtcctccattttccaccagaa

SEQ ID NO: 150112 - DNA, 76 bp, Homo sapiens
aaggcgtttgcggcagccctggatgagcggagcaccttgctggacatgtcctccattttccaccagaaggccgaaa

SEQ ID NO: 150113 - DNA, 77 bp, Homo sapiens
tttgcggcagccctggatgagcggagcaccttgctggacatgtcctccattttccaccagaaggccgaaaaggtcag

SEQ ID NO: 150114 - DNA, 76 bp, Homo sapiens
ccctggatgagcggagcaccttgctggacatgtcctccattttccaccagaaggccgaaaaggtcagtgccttgaa

SEQ ID NO: 150115 - DNA, 73 bp, Homo sapiens
agcggagcaccttgctggacatgtcctccattttccaccagaaggccgaaaaggtcagtgccttgaaccccca

SEQ ID NO: 150116 - DNA, 72 bp, Homo sapiens
ttgctggacatgtcctccattttccaccagaaggccgaaaaggtcagtgccttgaacccccagcccacgagg

SEQ ID NO: 150117 - DNA, 74 bp, Homo sapiens
caatataaattgtcattgatagaaataatctttttttaaccttccaagtatatgagcaacgtggattcatggtg

SEQ ID NO: 150118 - DNA, 75 bp, Homo sapiens
tgtcattgatagaaataatctttttttaaccttccaagtatatgagcaacgtggattcatggtgtaaagcttgcg

SEQ ID NO: 150119 - DNA, 71 bp, Homo sapiens
aaataatctttttttaaccttccaagtatatgagcaacgtggattcatggtgtaaagcttgcggtgaggta

SEQ ID NO: 150120 - DNA, 73 bp, Homo sapiens
tttttaaccttccaagtatatgagcaacgtggattcatggtgtaaagcttgcggtgaggtagaccttccctca

SEQ ID NO: 150121 - DNA, 77 bp, Homo sapiens
aaccttccaagtatatgagcaacgtggattcatggtgtaaagcttgcggtgaggtagaccttccctcagagctgcag

SEQ ID NO: 150122 - DNA, 82 bp, Homo sapiens
tatatgagcaacgtggattcatggtgtaaagcttgcggtgaggtagaccttccctcagagctgcaggacctagaagatgcca

SEQ ID NO: 150123 - DNA, 80 bp, Homo sapiens
aacgtggattcatggtgtaaagcttgcggtgaggtagaccttccctcagagctgcaggacctagaagatgccattcatca

SEQ ID NO: 150124 - DNA, 80 bp, Homo sapiens
tgtaaagcttgcggtgaggtagaccttccctcagagctgcaggacctagaagatgccattcatcaccaccagggaatata

SEQ ID NO: 150125 - DNA, 83 bp, Homo sapiens
ttgcggtgaggtagaccttccctcagagctgcaggacctagaagatgccattcatcaccaccagggaatatatgaacatatca

SEQ ID NO: 150126 - DNA, 83 bp, Homo sapiens
tagaccttccctcagagctgcaggacctagaagatgccattcatcaccaccagggaatatatgaacatatcactcttgcttat

SEQ ID NO: 150127 - DNA, 85 bp, Homo sapiens
tcagagctgcaggacctagaagatgccattcatcaccaccagggaatatatgaacatatcactcttgcttattctgaggtaagtg

SEQ ID NO: 150128 - DNA, 80 bp, Homo sapiens
aggacctagaagatgccattcatcaccaccagggaatatatgaacatatcactcttgcttattctgaggtaagtggccag

SEQ ID NO: 150129 - DNA, 79 bp, Homo sapiens
agatgccattcatcaccaccagggaatatatgaacatatcactcttgcttattctgaggtaagtggccagttttactta

SEQ ID NO: 150130 - DNA, 79 bp, Homo sapiens
tcatcaccaccagggaatatatgaacatatcactcttgcttattctgaggtaagtggccagttttacttacattgcaaa

SEQ ID NO: 150131 - DNA, 78 bp, Homo sapiens
gccaaacctcagatcgtgaagaatcactcatttcttttgtgggcaggtcagccaagatgggaagtcgctccttgacaa

SEQ ID NO: 150132 - DNA, 79 bp, Homo sapiens
acctcagatcgtgaagaatcactcatttcttttgtgggcaggtcagccaagatgggaagtcgctccttgacaagctcca

SEQ ID NO: 150133 - DNA, 77 bp, Homo sapiens
aagaatcactcatttcttttgtgggcaggtcagccaagatgggaagtcgctccttgacaagctccagcggcccttga

SEQ ID NO: 150134 - DNA, 75 bp, Homo sapiens
atttcttttgtgggcaggtcagccaagatgggaagtcgctccttgacaagctccagcggcccttgactcccggca

SEQ ID NO: 150135 - DNA, 77 bp, Homo sapiens
tttgtgggcaggtcagccaagatgggaagtcgctccttgacaagctccagcggcccttgactcccggcagctccgat

SEQ ID NO: 150136 - DNA, 77 bp, Homo sapiens
agccaagatgggaagtcgctccttgacaagctccagcggcccttgactcccggcagctccgattccctgacagcctc

SEQ ID NO: 150137 - DNA, 78 bp, Homo sapiens
tgggaagtcgctccttgacaagctccagcggcccttgactcccggcagctccgattccctgacagcctctgccaacta

SEQ ID NO: 150138 - DNA, 77 bp, Homo sapiens
cgctccttgacaagctccagcggcccttgactcccggcagctccgattccctgacagcctctgccaactactccaag

SEQ ID NO: 150139 - DNA, 77 bp, Homo sapiens
aagctccagcggcccttgactcccggcagctccgattccctgacagcctctgccaactactccaaggccgtgcacca

SEQ ID NO: 150140 - DNA, 81 bp, Homo sapiens
cttgactcccggcagctccgattccctgacagcctctgccaactactccaaggccgtgcaccatgtcctggatgtcatcca

SEQ ID NO: 150141 - DNA, 84 bp, Homo sapiens
cggcagctccgattccctgacagcctctgccaactactccaaggccgtgcaccatgtcctggatgtcatccacgaggtgctgca

SEQ ID NO: 150142 - DNA, 83 bp, Homo sapiens
tccgattccctgacagcctctgccaactactccaaggccgtgcaccatgtcctggatgtcatccacgaggtgctgcaccacca

SEQ ID NO: 150143 - DNA, 84 bp, Homo sapiens
agcctctgccaactactccaaggccgtgcaccatgtcctggatgtcatccacgaggtgctgcaccaccagcggcagctggagaa

SEQ ID NO: 150144 - DNA, 84 bp, Homo sapiens
aactactccaaggccgtgcaccatgtcctggatgtcatccacgaggtgctgcaccaccagcggcagctggagaacatctggcaa

SEQ ID NO: 150145 - DNA, 84 bp, Homo sapiens
aaggccgtgcaccatgtcctggatgtcatccacgaggtgctgcaccaccagcggcagctggagaacatctggcaacaccgcaag

SEQ ID NO: 150146 - DNA, 87 bp, Homo sapiens
ccatgtcctggatgtcatccacgaggtgctgcaccaccagcggcagctggagaacatctggcaacaccgcaaggtccggctgcatca

SEQ ID NO: 150147 - DNA, 87 bp, Homo sapiens
tcctggatgtcatccacgaggtgctgcaccaccagcggcagctggagaacatctggcaacaccgcaaggtccggctgcatcagaggc

SEQ ID NO: 150148 - DNA, 86 bp, Homo sapiens
acgaggtgctgcaccaccagcggcagctggagaacatctggcaacaccgcaaggtccggctgcatcagaggctgcagctgtgtgtt

SEQ ID NO: 150149 - DNA, 89 bp, Homo sapiens
gtgctgcaccaccagcggcagctggagaacatctggcaacaccgcaaggtccggctgcatcagaggctgcagctgtgtgttttccagca

SEQ ID NO: 150150 - DNA, 85 bp, Homo sapiens
agcggcagctggagaacatctggcaacaccgcaaggtccggctgcatcagaggctgcagctgtgtgttttccagcaggacgttca

SEQ ID NO: 150151 - DNA, 83 bp, Homo sapiens
agaacatctggcaacaccgcaaggtccggctgcatcagaggctgcagctgtgtgttttccagcaggacgttcagcaggtcagt

SEQ ID NO: 150152 - DNA, 83 bp, Homo sapiens
atctggcaacaccgcaaggtccggctgcatcagaggctgcagctgtgtgttttccagcaggacgttcagcaggtcagtttcgc

SEQ ID NO: 150153 - DNA, 84 bp, Homo sapiens
aaggtccggctgcatcagaggctgcagctgtgtgttttccagcaggacgttcagcaggtcagtttcgcctcatgcccttctgca

SEQ ID NO: 150154 - DNA, 78 bp, Homo sapiens
atggcaggacattgtttttatggcatatgtacctgtatttcattgtaggtgctagactggatcgagaaccacggagaa

SEQ ID NO: 150155 - DNA, 78 bp, Homo sapiens
attgtttttatggcatatgtacctgtatttcattgtaggtgctagactggatcgagaaccacggagaagcatttctga

SEQ ID NO: 150156 - DNA, 82 bp, Homo sapiens
ttatggcatatgtacctgtatttcattgtaggtgctagactggatcgagaaccacggagaagcatttctgagcaaacataca

SEQ ID NO: 150157 - DNA, 79 bp, Homo sapiens
tgtacctgtatttcattgtaggtgctagactggatcgagaaccacggagaagcatttctgagcaaacatacaggtgtgg

SEQ ID NO: 150158 - DNA, 78 bp, Homo sapiens
tttcattgtaggtgctagactggatcgagaaccacggagaagcatttctgagcaaacatacaggtgtggggaaatctc

SEQ ID NO: 150159 - DNA, 78 bp, Homo sapiens
ctagactggatcgagaaccacggagaagcatttctgagcaaacatacaggtgtggggaaatctcttcatcgggccaga

SEQ ID NO: 150160 - DNA, 80 bp, Homo sapiens
atcgagaaccacggagaagcatttctgagcaaacatacaggtgtggggaaatctcttcatcgggccagagcattgcagaa

SEQ ID NO: 150161 - DNA, 81 bp, Homo sapiens
ggagaagcatttctgagcaaacatacaggtgtggggaaatctcttcatcgggccagagcattgcagaaacgtcatgaagat

SEQ ID NO: 150162 - DNA, 79 bp, Homo sapiens
atttctgagcaaacatacaggtgtggggaaatctcttcatcgggccagagcattgcagaaacgtcatgaagattttgaa

SEQ ID NO: 150163 - DNA, 78 bp, Homo sapiens
agcaaacatacaggtgtggggaaatctcttcatcgggccagagcattgcagaaacgtcatgaagattttgaagaagtg

SEQ ID NO: 150164 - DNA, 78 bp, Homo sapiens
tgtggggaaatctcttcatcgggccagagcattgcagaaacgtcatgaagattttgaagaagtggcacaggtaaaaca

SEQ ID NO: 150165 - DNA, 77 bp, Homo sapiens
aaatctcttcatcgggccagagcattgcagaaacgtcatgaagattttgaagaagtggcacaggtaaaacaatggct

SEQ ID NO: 150166 - DNA, 76 bp, Homo sapiens
gggccagagcattgcagaaacgtcatgaagattttgaagaagtggcacaggtaaaacaatggcttctattatttta

SEQ ID NO: 150167 - DNA, 75 bp, Homo sapiens
cattgcagaaacgtcatgaagattttgaagaagtggcacaggtaaaacaatggcttctattattttatcccataa

SEQ ID NO: 150168 - DNA, 78 bp, Homo sapiens
tctgcttttcacttaccttctgtttctctgggatgttctcttgtgcagaacacatacaccaatgcggataaattactg

SEQ ID NO: 150169 - DNA, 80 bp, Homo sapiens
ttcacttaccttctgtttctctgggatgttctcttgtgcagaacacatacaccaatgcggataaattactggaagcagca

SEQ ID NO: 150170 - DNA, 84 bp, Homo sapiens
tttctctgggatgttctcttgtgcagaacacatacaccaatgcggataaattactggaagcagcagaacagctggctcagactg

SEQ ID NO: 150171 - DNA, 84 bp, Homo sapiens
atgttctcttgtgcagaacacatacaccaatgcggataaattactggaagcagcagaacagctggctcagactggggaatgtga

SEQ ID NO: 150172 - DNA, 82 bp, Homo sapiens
ctcttgtgcagaacacatacaccaatgcggataaattactggaagcagcagaacagctggctcagactggggaatgtgaccc

SEQ ID NO: 150173 - DNA, 79 bp, Homo sapiens
catacaccaatgcggataaattactggaagcagcagaacagctggctcagactggggaatgtgaccccgaagagattta

SEQ ID NO: 150174 - DNA, 78 bp, Homo sapiens
accaatgcggataaattactggaagcagcagaacagctggctcagactggggaatgtgaccccgaagagatttatcag

SEQ ID NO: 150175 - DNA, 81 bp, Homo sapiens
ataaattactggaagcagcagaacagctggctcagactggggaatgtgaccccgaagagatttatcaggctgcccatcagc

SEQ ID NO: 150176 - DNA, 82 bp, Homo sapiens
cagcagaacagctggctcagactggggaatgtgaccccgaagagatttatcaggctgcccatcagctggaagaccggattca

SEQ ID NO: 150177 - DNA, 78 bp, Homo sapiens
agctggctcagactggggaatgtgaccccgaagagatttatcaggctgcccatcagctggaagaccggattcaagatt

SEQ ID NO: 150178 - DNA, 74 bp, Homo sapiens
actggggaatgtgaccccgaagagatttatcaggctgcccatcagctggaagaccggattcaagatttcgttcg

SEQ ID NO: 150179 - DNA, 76 bp, Homo sapiens
aatgtgaccccgaagagatttatcaggctgcccatcagctggaagaccggattcaagatttcgttcggcgtgttga

SEQ ID NO: 150180 - DNA, 79 bp, Homo sapiens
agagatttatcaggctgcccatcagctggaagaccggattcaagatttcgttcggcgtgttgagcagcgaaagatccta

SEQ ID NO: 150181 - DNA, 79 bp, Homo sapiens
tttatcaggctgcccatcagctggaagaccggattcaagatttcgttcggcgtgttgagcagcgaaagatcctactgga

SEQ ID NO: 150182 - DNA, 78 bp, Homo sapiens
atcagctggaagaccggattcaagatttcgttcggcgtgttgagcagcgaaagatcctactggacatgtcagtgtcct

SEQ ID NO: 150183 - DNA, 77 bp, Homo sapiens
ctggaagaccggattcaagatttcgttcggcgtgttgagcagcgaaagatcctactggacatgtcagtgtcctttca

SEQ ID NO: 150184 - DNA, 78 bp, Homo sapiens
attcaagatttcgttcggcgtgttgagcagcgaaagatcctactggacatgtcagtgtcctttcacacccatgtgaaa

SEQ ID NO: 150185 - DNA, 77 bp, Homo sapiens
tttcgttcggcgtgttgagcagcgaaagatcctactggacatgtcagtgtcctttcacacccatgtgaaagaggtaa

SEQ ID NO: 150186 - DNA, 79 bp, Homo sapiens
ttgagcagcgaaagatcctactggacatgtcagtgtcctttcacacccatgtgaaagaggtaaggtgccaggagaccaa

SEQ ID NO: 150187 - DNA, 76 bp, Homo sapiens
aaagatcctactggacatgtcagtgtcctttcacacccatgtgaaagaggtaaggtgccaggagaccaaaatatga

SEQ ID NO: 150188 - DNA, 80 bp, Homo sapiens
tactggacatgtcagtgtcctttcacacccatgtgaaagaggtaaggtgccaggagaccaaaatatgatctgtgcttgaa

SEQ ID NO: 150189 - DNA, 76 bp, Homo sapiens
tggtgcagccaggccggccggcctcacccccctctccccttccccagctgtggacgtggctggaggagctgcagaa

SEQ ID NO: 150190 - DNA, 73 bp, Homo sapiens
agccaggccggccggcctcacccccctctccccttccccagctgtggacgtggctggaggagctgcagaagga

SEQ ID NO: 150191 - DNA, 76 bp, Homo sapiens
cctcacccccctctccccttccccagctgtggacgtggctggaggagctgcagaaggagctgctggacgacgtgta

SEQ ID NO: 150192 - DNA, 79 bp, Homo sapiens
ctctccccttccccagctgtggacgtggctggaggagctgcagaaggagctgctggacgacgtgtatgccgagtcggtg

SEQ ID NO: 150193 - DNA, 82 bp, Homo sapiens
ttccccagctgtggacgtggctggaggagctgcagaaggagctgctggacgacgtgtatgccgagtcggtggaggccgtgca

SEQ ID NO: 150194 - DNA, 83 bp, Homo sapiens
tggacgtggctggaggagctgcagaaggagctgctggacgacgtgtatgccgagtcggtggaggccgtgcaggacctcatcaa

SEQ ID NO: 150195 - DNA, 83 bp, Homo sapiens
tggaggagctgcagaaggagctgctggacgacgtgtatgccgagtcggtggaggccgtgcaggacctcatcaagcgctttggc

SEQ ID NO: 150196 - DNA, 85 bp, Homo sapiens
agctgcagaaggagctgctggacgacgtgtatgccgagtcggtggaggccgtgcaggacctcatcaagcgctttggccagcagca

SEQ ID NO: 150197 - DNA, 84 bp, Homo sapiens
ggagctgctggacgacgtgtatgccgagtcggtggaggccgtgcaggacctcatcaagcgctttggccagcagcagcagaccac

SEQ ID NO: 150198 - DNA, 82 bp, Homo sapiens
acgtgtatgccgagtcggtggaggccgtgcaggacctcatcaagcgctttggccagcagcagcagaccaccctgcaggtgac

SEQ ID NO: 150199 - DNA, 85 bp, Homo sapiens
gagtcggtggaggccgtgcaggacctcatcaagcgctttggccagcagcagcagaccaccctgcaggtgactgtcaacgtgatca

SEQ ID NO: 150200 - DNA, 82 bp, Homo sapiens
aggccgtgcaggacctcatcaagcgctttggccagcagcagcagaccaccctgcaggtgactgtcaacgtgatcaaggaagg

SEQ ID NO: 150201 - DNA, 80 bp, Homo sapiens
aggacctcatcaagcgctttggccagcagcagcagaccaccctgcaggtgactgtcaacgtgatcaaggaaggggaggac

SEQ ID NO: 150202 - DNA, 83 bp, Homo sapiens
atcaagcgctttggccagcagcagcagaccaccctgcaggtgactgtcaacgtgatcaaggaaggggaggacctcatccagca

SEQ ID NO: 150203 - DNA, 83 bp, Homo sapiens
tttggccagcagcagcagaccaccctgcaggtgactgtcaacgtgatcaaggaaggggaggacctcatccagcagctcaggtg

SEQ ID NO: 150204 - DNA, 79 bp, Homo sapiens
agcagaccaccctgcaggtgactgtcaacgtgatcaaggaaggggaggacctcatccagcagctcaggtgggcctcacc

SEQ ID NO: 150205 - DNA, 77 bp, Homo sapiens
accctgcaggtgactgtcaacgtgatcaaggaaggggaggacctcatccagcagctcaggtgggcctcacccctctc

SEQ ID NO: 150206 - DNA, 75 bp, Homo sapiens
actgtcaacgtgatcaaggaaggggaggacctcatccagcagctcaggtgggcctcacccctctcctggtccgaa

SEQ ID NO: 150207 - DNA, 80 bp, Homo sapiens
acaatgtgtgactttctcatccaattcctgttcctctgtgtgctctcgcagggactctgccatctccagtaacaagaccc

SEQ ID NO: 150208 - DNA, 77 bp, Homo sapiens
actttctcatccaattcctgttcctctgtgtgctctcgcagggactctgccatctccagtaacaagaccccccacaa

SEQ ID NO: 150209 - DNA, 78 bp, Homo sapiens
aattcctgttcctctgtgtgctctcgcagggactctgccatctccagtaacaagaccccccacaacagctccatcaac

SEQ ID NO: 150210 - DNA, 81 bp, Homo sapiens
ttcctctgtgtgctctcgcagggactctgccatctccagtaacaagaccccccacaacagctccatcaaccacattgagac

SEQ ID NO: 150211 - DNA, 83 bp, Homo sapiens
ctctcgcagggactctgccatctccagtaacaagaccccccacaacagctccatcaaccacattgagacggtgctgcagcagc

SEQ ID NO: 150212 - DNA, 82 bp, Homo sapiens
actctgccatctccagtaacaagaccccccacaacagctccatcaaccacattgagacggtgctgcagcagctggacgaggc

SEQ ID NO: 150213 - DNA, 83 bp, Homo sapiens
atctccagtaacaagaccccccacaacagctccatcaaccacattgagacggtgctgcagcagctggacgaggcgcagtcgca

SEQ ID NO: 150214 - DNA, 83 bp, Homo sapiens
aacaagaccccccacaacagctccatcaaccacattgagacggtgctgcagcagctggacgaggcgcagtcgcagatggagga

SEQ ID NO: 150215 - DNA, 88 bp, Homo sapiens
aacagctccatcaaccacattgagacggtgctgcagcagctggacgaggcgcagtcgcagatggaggagctcttccaggagcgcaaga

SEQ ID NO: 150216 - DNA, 89 bp, Homo sapiens
atcaaccacattgagacggtgctgcagcagctggacgaggcgcagtcgcagatggaggagctcttccaggagcgcaagatcaagctgga

SEQ ID NO: 150217 - DNA, 89 bp, Homo sapiens
acattgagacggtgctgcagcagctggacgaggcgcagtcgcagatggaggagctcttccaggagcgcaagatcaagctggagctcttc

SEQ ID NO: 150218 - DNA, 93 bp, Homo sapiens
ctgcagcagctggacgaggcgcagtcgcagatggaggagctcttccaggagcgcaagatcaagctggagctcttcctgcagctgcgcatcttc

SEQ ID NO: 150219 - DNA, 90 bp, Homo sapiens
agctggacgaggcgcagtcgcagatggaggagctcttccaggagcgcaagatcaagctggagctcttcctgcagctgcgcatcttcgaga

SEQ ID NO: 150220 - DNA, 90 bp, Homo sapiens
gcagtcgcagatggaggagctcttccaggagcgcaagatcaagctggagctcttcctgcagctgcgcatcttcgagagggacgccatcga

SEQ ID NO: 150221 - DNA, 87 bp, Homo sapiens
agatggaggagctcttccaggagcgcaagatcaagctggagctcttcctgcagctgcgcatcttcgagagggacgccatcgacgtga

SEQ ID NO: 150222 - DNA, 85 bp, Homo sapiens
agctcttccaggagcgcaagatcaagctggagctcttcctgcagctgcgcatcttcgagagggacgccatcgacgtgagtgtccc

SEQ ID NO: 150223 - DNA, 85 bp, Homo sapiens
aggagcgcaagatcaagctggagctcttcctgcagctgcgcatcttcgagagggacgccatcgacgtgagtgtcccgcggctggc

SEQ ID NO: 150224 - DNA, 86 bp, Homo sapiens
agatcaagctggagctcttcctgcagctgcgcatcttcgagagggacgccatcgacgtgagtgtcccgcggctggcgcctgcctgc

SEQ ID NO: 150225 - DNA, 78 bp, Homo sapiens
ctgcatgtatattttttttgtcttgatcttaaataccttctttcagattatctcagacctcgagtcttggaatgatga

SEQ ID NO: 150226 - DNA, 74 bp, Homo sapiens
attttttttgtcttgatcttaaataccttctttcagattatctcagacctcgagtcttggaatgatgagctttc

SEQ ID NO: 150227 - DNA, 80 bp, Homo sapiens
ttttgtcttgatcttaaataccttctttcagattatctcagacctcgagtcttggaatgatgagctttctcagcaaatga

SEQ ID NO: 150228 - DNA, 80 bp, Homo sapiens
atcttaaataccttctttcagattatctcagacctcgagtcttggaatgatgagctttctcagcaaatgaatgacttcga

SEQ ID NO: 150229 - DNA, 85 bp, Homo sapiens
tctttcagattatctcagacctcgagtcttggaatgatgagctttctcagcaaatgaatgacttcgacacagaagatctcacgat

SEQ ID NO: 150230 - DNA, 88 bp, Homo sapiens
attatctcagacctcgagtcttggaatgatgagctttctcagcaaatgaatgacttcgacacagaagatctcacgattgcagagcagc

SEQ ID NO: 150231 - DNA, 88 bp, Homo sapiens
acctcgagtcttggaatgatgagctttctcagcaaatgaatgacttcgacacagaagatctcacgattgcagagcagcgcctccagca

SEQ ID NO: 150232 - DNA, 91 bp, Homo sapiens
ttggaatgatgagctttctcagcaaatgaatgacttcgacacagaagatctcacgattgcagagcagcgcctccagcaccatgcagacaaa

SEQ ID NO: 150233 - DNA, 90 bp, Homo sapiens
tttctcagcaaatgaatgacttcgacacagaagatctcacgattgcagagcagcgcctccagcaccatgcagacaaagccttgaccatga

SEQ ID NO: 150234 - DNA, 86 bp, Homo sapiens
aaatgaatgacttcgacacagaagatctcacgattgcagagcagcgcctccagcaccatgcagacaaagccttgaccatgaacaac

SEQ ID NO: 150235 - DNA, 86 bp, Homo sapiens
ttcgacacagaagatctcacgattgcagagcagcgcctccagcaccatgcagacaaagccttgaccatgaacaacttgacttttga

SEQ ID NO: 150236 - DNA, 85 bp, Homo sapiens
acagaagatctcacgattgcagagcagcgcctccagcaccatgcagacaaagccttgaccatgaacaacttgacttttgacgtca

SEQ ID NO: 150237 - DNA, 82 bp, Homo sapiens
acgattgcagagcagcgcctccagcaccatgcagacaaagccttgaccatgaacaacttgacttttgacgtcatccaccaag

SEQ ID NO: 150238 - DNA, 80 bp, Homo sapiens
cagcgcctccagcaccatgcagacaaagccttgaccatgaacaacttgacttttgacgtcatccaccaagggcaagatct

SEQ ID NO: 150239 - DNA, 81 bp, Homo sapiens
agcaccatgcagacaaagccttgaccatgaacaacttgacttttgacgtcatccaccaagggcaagatcttctgcagtatg

SEQ ID NO: 150240 - DNA, 79 bp, Homo sapiens
agacaaagccttgaccatgaacaacttgacttttgacgtcatccaccaagggcaagatcttctgcagtatgtcaatgag

SEQ ID NO: 150241 - DNA, 79 bp, Homo sapiens
aagccttgaccatgaacaacttgacttttgacgtcatccaccaagggcaagatcttctgcagtatgtcaatgaggtcca

SEQ ID NO: 150242 - DNA, 77 bp, Homo sapiens
aacaacttgacttttgacgtcatccaccaagggcaagatcttctgcagtatgtcaatgaggtccaggcctctggtaa

SEQ ID NO: 150243 - DNA, 80 bp, Homo sapiens
ttgacttttgacgtcatccaccaagggcaagatcttctgcagtatgtcaatgaggtccaggcctctggtaagagggctca

SEQ ID NO: 150244 - DNA, 81 bp, Homo sapiens
acgtcatccaccaagggcaagatcttctgcagtatgtcaatgaggtccaggcctctggtaagagggctcactccatctgtg

SEQ ID NO: 150245 - DNA, 81 bp, Homo sapiens
ggcaagatcttctgcagtatgtcaatgaggtccaggcctctggtaagagggctcactccatctgtgtccgttgtgatttct

SEQ ID NO: 150246 - DNA, 80 bp, Homo sapiens
agaaggttgaagtgctagctgaattctagggtctccctttaatgtccacaggtgtggagctgctgtgtgatagagatgta

SEQ ID NO: 150247 - DNA, 83 bp, Homo sapiens
agtgctagctgaattctagggtctccctttaatgtccacaggtgtggagctgctgtgtgatagagatgtagacatggcaactc

SEQ ID NO: 150248 - DNA, 79 bp, Homo sapiens
aattctagggtctccctttaatgtccacaggtgtggagctgctgtgtgatagagatgtagacatggcaactcgggtcca

SEQ ID NO: 150249 - DNA, 80 bp, Homo sapiens
cctttaatgtccacaggtgtggagctgctgtgtgatagagatgtagacatggcaactcgggtccaggacctgctggagtt

SEQ ID NO: 150250 - DNA, 83 bp, Homo sapiens
tccacaggtgtggagctgctgtgtgatagagatgtagacatggcaactcgggtccaggacctgctggagtttcttcatgaaaa

SEQ ID NO: 150251 - DNA, 83 bp, Homo sapiens
tggagctgctgtgtgatagagatgtagacatggcaactcgggtccaggacctgctggagtttcttcatgaaaaacagcaggaa

SEQ ID NO: 150252 - DNA, 79 bp, Homo sapiens
tgtgatagagatgtagacatggcaactcgggtccaggacctgctggagtttcttcatgaaaaacagcaggaattggatt

SEQ ID NO: 150253 - DNA, 78 bp, Homo sapiens
tagagatgtagacatggcaactcgggtccaggacctgctggagtttcttcatgaaaaacagcaggaattggatttagc

SEQ ID NO: 150254 - DNA, 79 bp, Homo sapiens
acatggcaactcgggtccaggacctgctggagtttcttcatgaaaaacagcaggaattggatttagccgcagagcagca

SEQ ID NO: 150255 - DNA, 78 bp, Homo sapiens
gtccaggacctgctggagtttcttcatgaaaaacagcaggaattggatttagccgcagagcagcatcggaaacacctg

SEQ ID NO: 150256 - DNA, 80 bp, Homo sapiens
acctgctggagtttcttcatgaaaaacagcaggaattggatttagccgcagagcagcatcggaaacacctggagcagtgc

SEQ ID NO: 150257 - DNA, 84 bp, Homo sapiens
tttcttcatgaaaaacagcaggaattggatttagccgcagagcagcatcggaaacacctggagcagtgcgtgcagctgcgccac

SEQ ID NO: 150258 - DNA, 85 bp, Homo sapiens
aaaacagcaggaattggatttagccgcagagcagcatcggaaacacctggagcagtgcgtgcagctgcgccacctgcaggcagaa

SEQ ID NO: 150259 - DNA, 85 bp, Homo sapiens
aggaattggatttagccgcagagcagcatcggaaacacctggagcagtgcgtgcagctgcgccacctgcaggcagaagtgaaaca

SEQ ID NO: 150260 - DNA, 86 bp, Homo sapiens
atttagccgcagagcagcatcggaaacacctggagcagtgcgtgcagctgcgccacctgcaggcagaagtgaaacaggtgagcaaa

SEQ ID NO: 150261 - DNA, 86 bp, Homo sapiens
cagcatcggaaacacctggagcagtgcgtgcagctgcgccacctgcaggcagaagtgaaacaggtgagcaaacgactggatgcttg

SEQ ID NO: 150262 - DNA, 83 bp, Homo sapiens
tcggaaacacctggagcagtgcgtgcagctgcgccacctgcaggcagaagtgaaacaggtgagcaaacgactggatgcttggg

SEQ ID NO: 150263 - DNA, 75 bp, Homo sapiens
attctctgggaagtccactgcttggagttatcctgtgtaatgtttcaggtgctgggttggatccgcaacggagag

SEQ ID NO: 150264 - DNA, 75 bp, Homo sapiens
agtccactgcttggagttatcctgtgtaatgtttcaggtgctgggttggatccgcaacggagagtccatgttaaa

SEQ ID NO: 150265 - DNA, 75 bp, Homo sapiens
tggagttatcctgtgtaatgtttcaggtgctgggttggatccgcaacggagagtccatgttaaatgccggactta

SEQ ID NO: 150266 - DNA, 77 bp, Homo sapiens
ttatcctgtgtaatgtttcaggtgctgggttggatccgcaacggagagtccatgttaaatgccggacttatcacagc

SEQ ID NO: 150267 - DNA, 77 bp, Homo sapiens
tttcaggtgctgggttggatccgcaacggagagtccatgttaaatgccggacttatcacagccagctcgttacaaga

SEQ ID NO: 150268 - DNA, 78 bp, Homo sapiens
ggtgctgggttggatccgcaacggagagtccatgttaaatgccggacttatcacagccagctcgttacaagaggcaga

SEQ ID NO: 150269 - DNA, 83 bp, Homo sapiens
tggatccgcaacggagagtccatgttaaatgccggacttatcacagccagctcgttacaagaggcagagcagctccagcgaga

SEQ ID NO: 150270 - DNA, 84 bp, Homo sapiens
agagtccatgttaaatgccggacttatcacagccagctcgttacaagaggcagagcagctccagcgagagcacgagcagttcca

SEQ ID NO: 150271 - DNA, 86 bp, Homo sapiens
atgttaaatgccggacttatcacagccagctcgttacaagaggcagagcagctccagcgagagcacgagcagttccagcatgccat

SEQ ID NO: 150272 - DNA, 85 bp, Homo sapiens
ccggacttatcacagccagctcgttacaagaggcagagcagctccagcgagagcacgagcagttccagcatgccattgaggtaag

SEQ ID NO: 150273 - DNA, 85 bp, Homo sapiens
acagccagctcgttacaagaggcagagcagctccagcgagagcacgagcagttccagcatgccattgaggtaagggcgctgggcc

SEQ ID NO: 150274 - DNA, 86 bp, Homo sapiens
ttacaagaggcagagcagctccagcgagagcacgagcagttccagcatgccattgaggtaagggcgctgggcctgcctgtgtgttg

SEQ ID NO: 150275 - DNA, 85 bp, Homo sapiens
agagcagctccagcgagagcacgagcagttccagcatgccattgaggtaagggcgctgggcctgcctgtgtgttggctctttcat

SEQ ID NO: 150276 - DNA, 81 bp, Homo sapiens
tggggacactgacaaataagccttcccttttgttctctgtctctagaaaacacatcagagcgcgctgcaggtgcagcagaa

SEQ ID NO: 150277 - DNA, 81 bp, Homo sapiens
actgacaaataagccttcccttttgttctctgtctctagaaaacacatcagagcgcgctgcaggtgcagcagaaggcagaa

SEQ ID NO: 150278 - DNA, 84 bp, Homo sapiens
ataagccttcccttttgttctctgtctctagaaaacacatcagagcgcgctgcaggtgcagcagaaggcagaagccatgctaca

SEQ ID NO: 150279 - DNA, 85 bp, Homo sapiens
ttttgttctctgtctctagaaaacacatcagagcgcgctgcaggtgcagcagaaggcagaagccatgctacaggccaaccactac

SEQ ID NO: 150280 - DNA, 90 bp, Homo sapiens
tgtctctagaaaacacatcagagcgcgctgcaggtgcagcagaaggcagaagccatgctacaggccaaccactacgacatggacatgatc

SEQ ID NO: 150281 - DNA, 86 bp, Homo sapiens
aaaacacatcagagcgcgctgcaggtgcagcagaaggcagaagccatgctacaggccaaccactacgacatggacatgatccggga

SEQ ID NO: 150282 - DNA, 86 bp, Homo sapiens
agcgcgctgcaggtgcagcagaaggcagaagccatgctacaggccaaccactacgacatggacatgatccgggactgcgccgagaa

SEQ ID NO: 150283 - DNA, 82 bp, Homo sapiens
aggtgcagcagaaggcagaagccatgctacaggccaaccactacgacatggacatgatccgggactgcgccgagaaggtggc

SEQ ID NO: 150284 - DNA, 80 bp, Homo sapiens
aaggcagaagccatgctacaggccaaccactacgacatggacatgatccgggactgcgccgagaaggtggcgtctcactg

SEQ ID NO: 150285 - DNA, 81 bp, Homo sapiens
aagccatgctacaggccaaccactacgacatggacatgatccgggactgcgccgagaaggtggcgtctcactggcaacagc

SEQ ID NO: 150286 - DNA, 84 bp, Homo sapiens
tacaggccaaccactacgacatggacatgatccgggactgcgccgagaaggtggcgtctcactggcaacagctcatgctcaaga

SEQ ID NO: 150287 - DNA, 86 bp, Homo sapiens
tacgacatggacatgatccgggactgcgccgagaaggtggcgtctcactggcaacagctcatgctcaagatggaagatcgcctcaa

SEQ ID NO: 150288 - DNA, 85 bp, Homo sapiens
acatgatccgggactgcgccgagaaggtggcgtctcactggcaacagctcatgctcaagatggaagatcgcctcaagctcgtcaa

SEQ ID NO: 150289 - DNA, 85 bp, Homo sapiens
ggactgcgccgagaaggtggcgtctcactggcaacagctcatgctcaagatggaagatcgcctcaagctcgtcaacgcctctgtc

SEQ ID NO: 150290 - DNA, 84 bp, Homo sapiens
agaaggtggcgtctcactggcaacagctcatgctcaagatggaagatcgcctcaagctcgtcaacgcctctgtcgctttctaca

SEQ ID NO: 150291 - DNA, 84 bp, Homo sapiens
gtctcactggcaacagctcatgctcaagatggaagatcgcctcaagctcgtcaacgcctctgtcgctttctacaaaacctcaga

SEQ ID NO: 150292 - DNA, 83 bp, Homo sapiens
actggcaacagctcatgctcaagatggaagatcgcctcaagctcgtcaacgcctctgtcgctttctacaaaacctcagagcag

SEQ ID NO: 150293 - DNA, 80 bp, Homo sapiens
atgctcaagatggaagatcgcctcaagctcgtcaacgcctctgtcgctttctacaaaacctcagagcaggtcaggggaga

SEQ ID NO: 150294 - DNA, 76 bp, Homo sapiens
aagatggaagatcgcctcaagctcgtcaacgcctctgtcgctttctacaaaacctcagagcaggtcaggggagagg

SEQ ID NO: 150295 - DNA, 74 bp, Homo sapiens
ctcaagctcgtcaacgcctctgtcgctttctacaaaacctcagagcaggtcaggggagaggttcccttccttga

SEQ ID NO: 150296 - DNA, 74 bp, Homo sapiens
tcaacgcctctgtcgctttctacaaaacctcagagcaggtcaggggagaggttcccttccttgaactccactga

SEQ ID NO: 150297 - DNA, 83 bp, Homo sapiens
cagtggcagatgccaagtctgagcctcaaacttttcctgctcacaggtctgcagcgtcctcgagagcctggaacaggagtaca

SEQ ID NO: 150298 - DNA, 81 bp, Homo sapiens
atgccaagtctgagcctcaaacttttcctgctcacaggtctgcagcgtcctcgagagcctggaacaggagtacaagagaga

SEQ ID NO: 150299 - DNA, 79 bp, Homo sapiens
agtctgagcctcaaacttttcctgctcacaggtctgcagcgtcctcgagagcctggaacaggagtacaagagagaagaa

SEQ ID NO: 150300 - DNA, 77 bp, Homo sapiens
aaacttttcctgctcacaggtctgcagcgtcctcgagagcctggaacaggagtacaagagagaagaagactggtgtg

SEQ ID NO: 150301 - DNA, 78 bp, Homo sapiens
ctcacaggtctgcagcgtcctcgagagcctggaacaggagtacaagagagaagaagactggtgtggcggggcggataa

SEQ ID NO: 150302 - DNA, 77 bp, Homo sapiens
ggtctgcagcgtcctcgagagcctggaacaggagtacaagagagaagaagactggtgtggcggggcggataagctgg

SEQ ID NO: 150303 - DNA, 76 bp, Homo sapiens
tcgagagcctggaacaggagtacaagagagaagaagactggtgtggcggggcggataagctgggcccaaactctga

SEQ ID NO: 150304 - DNA, 74 bp, Homo sapiens
gaacaggagtacaagagagaagaagactggtgtggcggggcggataagctgggcccaaactctgagacggacca

SEQ ID NO: 150305 - DNA, 73 bp, Homo sapiens
agtacaagagagaagaagactggtgtggcggggcggataagctgggcccaaactctgagacggaccacgtgac

SEQ ID NO: 150306 - DNA, 76 bp, Homo sapiens
aagaagactggtgtggcggggcggataagctgggcccaaactctgagacggaccacgtgacgcccatgatcagcaa

SEQ ID NO: 150307 - DNA, 77 bp, Homo sapiens
actggtgtggcggggcggataagctgggcccaaactctgagacggaccacgtgacgcccatgatcagcaagcacctg

SEQ ID NO: 150308 - DNA, 80 bp, Homo sapiens
cggataagctgggcccaaactctgagacggaccacgtgacgcccatgatcagcaagcacctggagcagaaggaggcattc

SEQ ID NO: 150309 - DNA, 80 bp, Homo sapiens
aagctgggcccaaactctgagacggaccacgtgacgcccatgatcagcaagcacctggagcagaaggaggcattcctgaa

SEQ ID NO: 150310 - DNA, 79 bp, Homo sapiens
aaactctgagacggaccacgtgacgcccatgatcagcaagcacctggagcagaaggaggcattcctgaaggtaggggca

SEQ ID NO: 150311 - DNA, 83 bp, Homo sapiens
accacgtgacgcccatgatcagcaagcacctggagcagaaggaggcattcctgaaggtaggggcagcgctgcgggacagtgca

SEQ ID NO: 150312 - DNA, 84 bp, Homo sapiens
acgcccatgatcagcaagcacctggagcagaaggaggcattcctgaaggtaggggcagcgctgcgggacagtgcacccatcaga

SEQ ID NO: 150313 - DNA, 73 bp, Homo sapiens
acgtttgtagaagtcaaattagcaacacattgctctccattgttttttaggcttgcacccttgctcggaggaa

SEQ ID NO: 150314 - DNA, 76 bp, Homo sapiens
aagtcaaattagcaacacattgctctccattgttttttaggcttgcacccttgctcggaggaatgcagacgtcttc

SEQ ID NO: 150315 - DNA, 77 bp, Homo sapiens
tagcaacacattgctctccattgttttttaggcttgcacccttgctcggaggaatgcagacgtcttcctgaaatacc

SEQ ID NO: 150316 - DNA, 77 bp, Homo sapiens
ttgctctccattgttttttaggcttgcacccttgctcggaggaatgcagacgtcttcctgaaatacctgcacaggaa

SEQ ID NO: 150317 - DNA, 79 bp, Homo sapiens
tttttaggcttgcacccttgctcggaggaatgcagacgtcttcctgaaatacctgcacaggaacagcgtgaacatgcca

SEQ ID NO: 150318 - DNA, 81 bp, Homo sapiens
cttgcacccttgctcggaggaatgcagacgtcttcctgaaatacctgcacaggaacagcgtgaacatgccaggaatggtga

SEQ ID NO: 150319 - DNA, 83 bp, Homo sapiens
ttgctcggaggaatgcagacgtcttcctgaaatacctgcacaggaacagcgtgaacatgccaggaatggtgacgcacatcaaa

SEQ ID NO: 150320 - DNA, 83 bp, Homo sapiens
aatgcagacgtcttcctgaaatacctgcacaggaacagcgtgaacatgccaggaatggtgacgcacatcaaagctcctgaaca

SEQ ID NO: 150321 - DNA, 82 bp, Homo sapiens
ttcctgaaatacctgcacaggaacagcgtgaacatgccaggaatggtgacgcacatcaaagctcctgaacagcaagtgaaaa

SEQ ID NO: 150322 - DNA, 82 bp, Homo sapiens
aatacctgcacaggaacagcgtgaacatgccaggaatggtgacgcacatcaaagctcctgaacagcaagtgaaaagtgagta

SEQ ID NO: 150323 - DNA, 82 bp, Homo sapiens
acaggaacagcgtgaacatgccaggaatggtgacgcacatcaaagctcctgaacagcaagtgaaaagtgagtagagctggga

SEQ ID NO: 150324 - DNA, 81 bp, Homo sapiens
cgtgaacatgccaggaatggtgacgcacatcaaagctcctgaacagcaagtgaaaagtgagtagagctgggagtctccagg

SEQ ID NO: 150325 - DNA, 78 bp, Homo sapiens
aggaatggtgacgcacatcaaagctcctgaacagcaagtgaaaagtgagtagagctgggagtctccaggggtggccca

SEQ ID NO: 150326 - DNA, 77 bp, Homo sapiens
tttaattgattgcaagcaccaacatacatcattttcttttttctctcagatatcttgaatgaactcttccaacggga

SEQ ID NO: 150327 - DNA, 74 bp, Homo sapiens
aagcaccaacatacatcattttcttttttctctcagatatcttgaatgaactcttccaacgggagaacagggta

SEQ ID NO: 150328 - DNA, 75 bp, Homo sapiens
aacatacatcattttcttttttctctcagatatcttgaatgaactcttccaacgggagaacagggtattgcatta

SEQ ID NO: 150329 - DNA, 76 bp, Homo sapiens
ttcttttttctctcagatatcttgaatgaactcttccaacgggagaacagggtattgcattactggaccatgagga

SEQ ID NO: 150330 - DNA, 77 bp, Homo sapiens
ttttctctcagatatcttgaatgaactcttccaacgggagaacagggtattgcattactggaccatgaggaagagac

SEQ ID NO: 150331 - DNA, 76 bp, Homo sapiens
atatcttgaatgaactcttccaacgggagaacagggtattgcattactggaccatgaggaagagacggctggacca

SEQ ID NO: 150332 - DNA, 76 bp, Homo sapiens
aactcttccaacgggagaacagggtattgcattactggaccatgaggaagagacggctggaccagtgtcagcagta

SEQ ID NO: 150333 - DNA, 78 bp, Homo sapiens
gggagaacagggtattgcattactggaccatgaggaagagacggctggaccagtgtcagcagtacgtggtctttgaga

SEQ ID NO: 150334 - DNA, 77 bp, Homo sapiens
aacagggtattgcattactggaccatgaggaagagacggctggaccagtgtcagcagtacgtggtctttgagaggag

SEQ ID NO: 150335 - DNA, 79 bp, Homo sapiens
attactggaccatgaggaagagacggctggaccagtgtcagcagtacgtggtctttgagaggagtgccaagcaggtcag

SEQ ID NO: 150336 - DNA, 81 bp, Homo sapiens
accatgaggaagagacggctggaccagtgtcagcagtacgtggtctttgagaggagtgccaagcaggtcagtgcacacctg

SEQ ID NO: 150337 - DNA, 81 bp, Homo sapiens
aagagacggctggaccagtgtcagcagtacgtggtctttgagaggagtgccaagcaggtcagtgcacacctggtgcccagc

SEQ ID NO: 150338 - DNA, 78 bp, Homo sapiens
accagtgtcagcagtacgtggtctttgagaggagtgccaagcaggtcagtgcacacctggtgcccagcctccccctaa

SEQ ID NO: 150339 - DNA, 78 bp, Homo sapiens
tcaggaatgtgtagccctctgactccattcattccttccccttccaggctttggaatggatccatgacaatggcgagt

SEQ ID NO: 150340 - DNA, 75 bp, Homo sapiens
tagccctctgactccattcattccttccccttccaggctttggaatggatccatgacaatggcgagttctacctt

SEQ ID NO: 150341 - DNA, 75 bp, Homo sapiens
actccattcattccttccccttccaggctttggaatggatccatgacaatggcgagttctacctttccacacaca

SEQ ID NO: 150342 - DNA, 74 bp, Homo sapiens
attcattccttccccttccaggctttggaatggatccatgacaatggcgagttctacctttccacacacacctc

SEQ ID NO: 150343 - DNA, 77 bp, Homo sapiens
ttccaggctttggaatggatccatgacaatggcgagttctacctttccacacacacctccacgggctccagtataca

SEQ ID NO: 150344 - DNA, 78 bp, Homo sapiens
tttggaatggatccatgacaatggcgagttctacctttccacacacacctccacgggctccagtatacagcacaccca

SEQ ID NO: 150345 - DNA, 79 bp, Homo sapiens
atccatgacaatggcgagttctacctttccacacacacctccacgggctccagtatacagcacacccaggagctcctga

SEQ ID NO: 150346 - DNA, 76 bp, Homo sapiens
acaatggcgagttctacctttccacacacacctccacgggctccagtatacagcacacccaggagctcctgaaaga

SEQ ID NO: 150347 - DNA, 76 bp, Homo sapiens
ttctacctttccacacacacctccacgggctccagtatacagcacacccaggagctcctgaaagagcacgaggagt

SEQ ID NO: 150348 - DNA, 78 bp, Homo sapiens
acacacctccacgggctccagtatacagcacacccaggagctcctgaaagagcacgaggagttccagataactgcaaa

SEQ ID NO: 150349 - DNA, 75 bp, Homo sapiens
acgggctccagtatacagcacacccaggagctcctgaaagagcacgaggagttccagataactgcaaaggtgggt

SEQ ID NO: 150350 - DNA, 77 bp, Homo sapiens
agtatacagcacacccaggagctcctgaaagagcacgaggagttccagataactgcaaaggtgggttcagagtgtac

SEQ ID NO: 150351 - DNA, 75 bp, Homo sapiens
acacccaggagctcctgaaagagcacgaggagttccagataactgcaaaggtgggttcagagtgtactttgtata

SEQ ID NO: 150352 - DNA, 75 bp, Homo sapiens
ctcctgaaagagcacgaggagttccagataactgcaaaggtgggttcagagtgtactttgtatagtggcctctaa

SEQ ID NO: 150353 - DNA, 76 bp, Homo sapiens
agtcggattcatttgcctcacaatactttcctgttgttttttgcagcaaaccaaagagagagtgaagctattgata

SEQ ID NO: 150354 - DNA, 78 bp, Homo sapiens
attcatttgcctcacaatactttcctgttgttttttgcagcaaaccaaagagagagtgaagctattgatacagctggc

SEQ ID NO: 150355 - DNA, 77 bp, Homo sapiens
acaatactttcctgttgttttttgcagcaaaccaaagagagagtgaagctattgatacagctggctgatggcttttg

SEQ ID NO: 150356 - DNA, 77 bp, Homo sapiens
tttcctgttgttttttgcagcaaaccaaagagagagtgaagctattgatacagctggctgatggcttttgtgaaaaa

SEQ ID NO: 150357 - DNA, 81 bp, Homo sapiens
tttttgcagcaaaccaaagagagagtgaagctattgatacagctggctgatggcttttgtgaaaaagggcatgcccatgcg

SEQ ID NO: 150358 - DNA, 81 bp, Homo sapiens
ccaaagagagagtgaagctattgatacagctggctgatggcttttgtgaaaaagggcatgcccatgcggcagagataaaaa

SEQ ID NO: 150359 - DNA, 80 bp, Homo sapiens
agagtgaagctattgatacagctggctgatggcttttgtgaaaaagggcatgcccatgcggcagagataaaaaaatgtgt

SEQ ID NO: 150360 - DNA, 82 bp, Homo sapiens
tattgatacagctggctgatggcttttgtgaaaaagggcatgcccatgcggcagagataaaaaaatgtgttactgctgtgga

SEQ ID NO: 150361 - DNA, 79 bp, Homo sapiens
tggctgatggcttttgtgaaaaagggcatgcccatgcggcagagataaaaaaatgtgttactgctgtggataagaggta

SEQ ID NO: 150362 - DNA, 76 bp, Homo sapiens
cttttgtgaaaaagggcatgcccatgcggcagagataaaaaaatgtgttactgctgtggataagaggtacagagat

SEQ ID NO: 150363 - DNA, 78 bp, Homo sapiens
gtgaaaaagggcatgcccatgcggcagagataaaaaaatgtgttactgctgtggataagaggtacagagatttctctc

SEQ ID NO: 150364 - DNA, 79 bp, Homo sapiens
cccatgcggcagagataaaaaaatgtgttactgctgtggataagaggtacagagatttctctctgcggatggagaagta

SEQ ID NO: 150365 - DNA, 76 bp, Homo sapiens
agagataaaaaaatgtgttactgctgtggataagaggtacagagatttctctctgcggatggagaagtacaggacc

SEQ ID NO: 150366 - DNA, 76 bp, Homo sapiens
aaatgtgttactgctgtggataagaggtacagagatttctctctgcggatggagaagtacaggacctctttggaaa

SEQ ID NO: 150367 - DNA, 76 bp, Homo sapiens
tgttactgctgtggataagaggtacagagatttctctctgcggatggagaagtacaggacctctttggaaaaagcc

SEQ ID NO: 150368 - DNA, 71 bp, Homo sapiens
ataagaggtacagagatttctctctgcggatggagaagtacaggacctctttggaaaaagccctggggatt

SEQ ID NO: 150369 - DNA, 74 bp, Homo sapiens
tacagagatttctctctgcggatggagaagtacaggacctctttggaaaaagccctggggatttcttcagattc

SEQ ID NO: 150370 - DNA, 72 bp, Homo sapiens
tttctctctgcggatggagaagtacaggacctctttggaaaaagccctggggatttcttcagattccaacaa

SEQ ID NO: 150371 - DNA, 68 bp, Homo sapiens
atggagaagtacaggacctctttggaaaaagccctggggatttcttcagattccaacaaatcggtaaa

SEQ ID NO: 150372 - DNA, 67 bp, Homo sapiens
agtacaggacctctttggaaaaagccctggggatttcttcagattccaacaaatcggtaaatggcct

SEQ ID NO: 150373 - DNA, 70 bp, Homo sapiens
ttggaaaaagccctggggatttcttcagattccaacaaatcggtaaatggccttgtgcaaactgaataaa

SEQ ID NO: 150374 - DNA, 70 bp, Homo sapiens
aaagccctggggatttcttcagattccaacaaatcggtaaatggccttgtgcaaactgaataaattatgg

SEQ ID NO: 150375 - DNA, 80 bp, Homo sapiens
cctctctgctgatttaattaactgagttcattggctctgttattccacagagtaaaagtctccagctagatatcattcca

SEQ ID NO: 150376 - DNA, 78 bp, Homo sapiens
atttaattaactgagttcattggctctgttattccacagagtaaaagtctccagctagatatcattccagccagtatc

SEQ ID NO: 150377 - DNA, 81 bp, Homo sapiens
aactgagttcattggctctgttattccacagagtaaaagtctccagctagatatcattccagccagtatccctggctcaga

SEQ ID NO: 150378 - DNA, 79 bp, Homo sapiens
ctctgttattccacagagtaaaagtctccagctagatatcattccagccagtatccctggctcagaggtgaaacttcga

SEQ ID NO: 150379 - DNA, 82 bp, Homo sapiens
ttattccacagagtaaaagtctccagctagatatcattccagccagtatccctggctcagaggtgaaacttcgagatgctgc

SEQ ID NO: 150380 - DNA, 84 bp, Homo sapiens
taaaagtctccagctagatatcattccagccagtatccctggctcagaggtgaaacttcgagatgctgctcatgaacttaatga

SEQ ID NO: 150381 - DNA, 84 bp, Homo sapiens
gctagatatcattccagccagtatccctggctcagaggtgaaacttcgagatgctgctcatgaacttaatgaagagaagcggaa

SEQ ID NO: 150382 - DNA, 82 bp, Homo sapiens
atatcattccagccagtatccctggctcagaggtgaaacttcgagatgctgctcatgaacttaatgaagagaagcggaaatc

SEQ ID NO: 150383 - DNA, 80 bp, Homo sapiens
gtatccctggctcagaggtgaaacttcgagatgctgctcatgaacttaatgaagagaagcggaaatctgcccgcaggaaa

SEQ ID NO: 150384 - DNA, 80 bp, Homo sapiens
ctcagaggtgaaacttcgagatgctgctcatgaacttaatgaagagaagcggaaatctgcccgcaggaaagagtaagcca

SEQ ID NO: 150385 - DNA, 78 bp, Homo sapiens
aaacttcgagatgctgctcatgaacttaatgaagagaagcggaaatctgcccgcaggaaagagtaagccagtctttca

SEQ ID NO: 150386 - DNA, 80 bp, Homo sapiens
agatgctgctcatgaacttaatgaagagaagcggaaatctgcccgcaggaaagagtaagccagtctttcagaatctacca

SEQ ID NO: 150387 - DNA, 76 bp, Homo sapiens
atgaacttaatgaagagaagcggaaatctgcccgcaggaaagagtaagccagtctttcagaatctaccaggattca

SEQ ID NO: 150388 - DNA, 75 bp, Homo sapiens
ataaaagtagatagtgaagtaagctgcaccctgactgtactcctcactgtcttcctctctttaaggttcataatg

SEQ ID NO: 150389 - DNA, 80 bp, Homo sapiens
atagtgaagtaagctgcaccctgactgtactcctcactgtcttcctctctttaaggttcataatggctgagctcattcaa

SEQ ID NO: 150390 - DNA, 79 bp, Homo sapiens
taagctgcaccctgactgtactcctcactgtcttcctctctttaaggttcataatggctgagctcattcaaactgaaaa

SEQ ID NO: 150391 - DNA, 78 bp, Homo sapiens
tgactgtactcctcactgtcttcctctctttaaggttcataatggctgagctcattcaaactgaaaaggcttatgtaa

SEQ ID NO: 150392 - DNA, 77 bp, Homo sapiens
tactcctcactgtcttcctctctttaaggttcataatggctgagctcattcaaactgaaaaggcttatgtaagagac

SEQ ID NO: 150393 - DNA, 75 bp, Homo sapiens
tcctctctttaaggttcataatggctgagctcattcaaactgaaaaggcttatgtaagagacctccgggaatgta

SEQ ID NO: 150394 - DNA, 76 bp, Homo sapiens
ttaaggttcataatggctgagctcattcaaactgaaaaggcttatgtaagagacctccgggaatgtatggatgtaa

SEQ ID NO: 150395 - DNA, 74 bp, Homo sapiens
taatggctgagctcattcaaactgaaaaggcttatgtaagagacctccgggaatgtatggatgtaagtaagttt

SEQ ID NO: 150396 - DNA, 69 bp, Homo sapiens
agctcattcaaactgaaaaggcttatgtaagagacctccgggaatgtatggatgtaagtaagttttttt

SEQ ID NO: 150397 - DNA, 65 bp, Homo sapiens
caaactgaaaaggcttatgtaagagacctccgggaatgtatggatgtaagtaagttttttttttt

SEQ ID NO: 150398 - DNA, 70 bp, Homo sapiens
aaaatatggtgattatttttgtctaatccctgtttccctctcggctagacgtacctgtgggaaatgacca

SEQ ID NO: 150399 - DNA, 71 bp, Homo sapiens
ttatttttgtctaatccctgtttccctctcggctagacgtacctgtgggaaatgaccagtggcgtggaaga

SEQ ID NO: 150400 - DNA, 73 bp, Homo sapiens
tttgtctaatccctgtttccctctcggctagacgtacctgtgggaaatgaccagtggcgtggaagagattcca

SEQ ID NO: 150401 - DNA, 74 bp, Homo sapiens
tttccctctcggctagacgtacctgtgggaaatgaccagtggcgtggaagagattccacctggcattgtaaaca

SEQ ID NO: 150402 - DNA, 74 bp, Homo sapiens
ctctcggctagacgtacctgtgggaaatgaccagtggcgtggaagagattccacctggcattgtaaacaaagaa

SEQ ID NO: 150403 - DNA, 76 bp, Homo sapiens
tacctgtgggaaatgaccagtggcgtggaagagattccacctggcattgtaaacaaagaactcatcatcttcggaa

SEQ ID NO: 150404 - DNA, 77 bp, Homo sapiens
aaatgaccagtggcgtggaagagattccacctggcattgtaaacaaagaactcatcatcttcggaaacatgcaagaa

SEQ ID NO: 150405 - DNA, 77 bp, Homo sapiens
tggcgtggaagagattccacctggcattgtaaacaaagaactcatcatcttcggaaacatgcaagaaatctacgaat

SEQ ID NO: 150406 - DNA, 76 bp, Homo sapiens
agattccacctggcattgtaaacaaagaactcatcatcttcggaaacatgcaagaaatctacgaatttcataataa

SEQ ID NO: 150407 - DNA, 76 bp, Homo sapiens
acctggcattgtaaacaaagaactcatcatcttcggaaacatgcaagaaatctacgaatttcataataagtgagtg

SEQ ID NO: 150408 - DNA, 74 bp, Homo sapiens
gtaaacaaagaactcatcatcttcggaaacatgcaagaaatctacgaatttcataataagtgagtggctttttc

SEQ ID NO: 150409 - DNA, 76 bp, Homo sapiens
ctcatcatcttcggaaacatgcaagaaatctacgaatttcataataagtgagtggctttttctttgggagcagtta

SEQ ID NO: 150410 - DNA, 74 bp, Homo sapiens
tcggaaacatgcaagaaatctacgaatttcataataagtgagtggctttttctttgggagcagttacgcttgaa

SEQ ID NO: 150411 - DNA, 74 bp, Homo sapiens
gcatatctcactagtaaaatgttttaaaacacctttgtaatatgataccatttttattctttgcagcatattcc

SEQ ID NO: 150412 - DNA, 70 bp, Homo sapiens
aaaatgttttaaaacacctttgtaatatgataccatttttattctttgcagcatattcctaaaggagctg

SEQ ID NO: 150413 - DNA, 73 bp, Homo sapiens
ttaaaacacctttgtaatatgataccatttttattctttgcagcatattcctaaaggagctggaaaaatatga

SEQ ID NO: 150414 - DNA, 77 bp, Homo sapiens
ttgtaatatgataccatttttattctttgcagcatattcctaaaggagctggaaaaatatgaacagttgccagagga

SEQ ID NO: 150415 - DNA, 76 bp, Homo sapiens
taccatttttattctttgcagcatattcctaaaggagctggaaaaatatgaacagttgccagaggatgttggacat

SEQ ID NO: 150416 - DNA, 75 bp, Homo sapiens
ttttattctttgcagcatattcctaaaggagctggaaaaatatgaacagttgccagaggatgttggacattgttt

SEQ ID NO: 150417 - DNA, 73 bp, Homo sapiens
agcatattcctaaaggagctggaaaaatatgaacagttgccagaggatgttggacattgttttgttacttggg

SEQ ID NO: 150418 - DNA, 72 bp, Homo sapiens
taaaggagctggaaaaatatgaacagttgccagaggatgttggacattgttttgttacttgggtaatgaaac

SEQ ID NO: 150419 - DNA, 71 bp, Homo sapiens
gaaaaatatgaacagttgccagaggatgttggacattgttttgttacttgggtaatgaaacctcaaccatt

SEQ ID NO: 150420 - DNA, 73 bp, Homo sapiens
atatgaacagttgccagaggatgttggacattgttttgttacttgggtaatgaaacctcaaccatttgttctc

SEQ ID NO: 150421 - DNA, 71 bp, Homo sapiens
agaggatgttggacattgttttgttacttgggtaatgaaacctcaaccatttgttctctcccagctattag

SEQ ID NO: 150422 - DNA, 70 bp, Homo sapiens
ttggacattgttttgttacttgggtaatgaaacctcaaccatttgttctctcccagctattaggtgacgt

SEQ ID NO: 150423 - DNA, 74 bp, Homo sapiens
ctttttttttttggcttacaggcagacaagtttcagatgtatgtcacatattgcaaaaataagcctgattctac

SEQ ID NO: 150424 - DNA, 82 bp, Homo sapiens
ttttggcttacaggcagacaagtttcagatgtatgtcacatattgcaaaaataagcctgattctactcagctgatattggaa

SEQ ID NO: 150425 - DNA, 84 bp, Homo sapiens
ttacaggcagacaagtttcagatgtatgtcacatattgcaaaaataagcctgattctactcagctgatattggaacatgcaggg

SEQ ID NO: 150426 - DNA, 80 bp, Homo sapiens
aagtttcagatgtatgtcacatattgcaaaaataagcctgattctactcagctgatattggaacatgcagggtcctattt

SEQ ID NO: 150427 - DNA, 80 bp, Homo sapiens
tatgtcacatattgcaaaaataagcctgattctactcagctgatattggaacatgcagggtcctattttgacgtaagtaa

SEQ ID NO: 150428 - DNA, 77 bp, Homo sapiens
attgcaaaaataagcctgattctactcagctgatattggaacatgcagggtcctattttgacgtaagtaatagattc

SEQ ID NO: 150429 - DNA, 75 bp, Homo sapiens
aaataagcctgattctactcagctgatattggaacatgcagggtcctattttgacgtaagtaatagattcctaaa

SEQ ID NO: 150430 - DNA, 75 bp, Homo sapiens
attctactcagctgatattggaacatgcagggtcctattttgacgtaagtaatagattcctaaagagaccataat

SEQ ID NO: 150431 - DNA, 71 bp, Homo sapiens
gatattggaacatgcagggtcctattttgacgtaagtaatagattcctaaagagaccataattttccaagt

SEQ ID NO: 150432 - DNA, 76 bp, Homo sapiens
ttaatagtgtagccctatgataactcttgtttcttgtttggttttaatacaggagatacagcagcgacatggatta

SEQ ID NO: 150433 - DNA, 75 bp, Homo sapiens
ccctatgataactcttgtttcttgtttggttttaatacaggagatacagcagcgacatggattagccaattccat

SEQ ID NO: 150434 - DNA, 74 bp, Homo sapiens
ataactcttgtttcttgtttggttttaatacaggagatacagcagcgacatggattagccaattccatttcttc

SEQ ID NO: 150435 - DNA, 74 bp, Homo sapiens
tcttgtttggttttaatacaggagatacagcagcgacatggattagccaattccatttcttcctaccttattaa

SEQ ID NO: 150436 - DNA, 74 bp, Homo sapiens
gttttaatacaggagatacagcagcgacatggattagccaattccatttcttcctaccttattaaaccagttca

SEQ ID NO: 150437 - DNA, 75 bp, Homo sapiens
gagatacagcagcgacatggattagccaattccatttcttcctaccttattaaaccagttcagcgaataacgaag

SEQ ID NO: 150438 - DNA, 75 bp, Homo sapiens
acagcagcgacatggattagccaattccatttcttcctaccttattaaaccagttcagcgaataacgaagtatca

SEQ ID NO: 150439 - DNA, 70 bp, Homo sapiens
attagccaattccatttcttcctaccttattaaaccagttcagcgaataacgaagtatcagctcctttta

SEQ ID NO: 150440 - DNA, 69 bp, Homo sapiens
ttccatttcttcctaccttattaaaccagttcagcgaataacgaagtatcagctccttttaaaagtatg

SEQ ID NO: 150441 - DNA, 70 bp, Homo sapiens
cctaccttattaaaccagttcagcgaataacgaagtatcagctccttttaaaagtatgtataatgcgtct

SEQ ID NO: 150442 - DNA, 75 bp, Homo sapiens
ttattaaaccagttcagcgaataacgaagtatcagctccttttaaaagtatgtataatgcgtcttcagcctgtga

SEQ ID NO: 150443 - DNA, 75 bp, Homo sapiens
agttcagcgaataacgaagtatcagctccttttaaaagtatgtataatgcgtcttcagcctgtgaaattttatga

SEQ ID NO: 150444 - DNA, 78 bp, Homo sapiens
agagcattctgcagtctttacctagtttctgttgtttatctttgcaggagctgctgacgtgctgtgaggaaggaaagg

SEQ ID NO: 150445 - DNA, 76 bp, Homo sapiens
cagtctttacctagtttctgttgtttatctttgcaggagctgctgacgtgctgtgaggaaggaaagggagagatta

SEQ ID NO: 150446 - DNA, 75 bp, Homo sapiens
tttacctagtttctgttgtttatctttgcaggagctgctgacgtgctgtgaggaaggaaagggagagattaaaga

SEQ ID NO: 150447 - DNA, 79 bp, Homo sapiens
ttctgttgtttatctttgcaggagctgctgacgtgctgtgaggaaggaaagggagagattaaagatggcctggaggtga

SEQ ID NO: 150448 - DNA, 84 bp, Homo sapiens
tatctttgcaggagctgctgacgtgctgtgaggaaggaaagggagagattaaagatggcctggaggtgatgctcagcgtgccga

SEQ ID NO: 150449 - DNA, 83 bp, Homo sapiens
ctgctgacgtgctgtgaggaaggaaagggagagattaaagatggcctggaggtgatgctcagcgtgccgaagcgagccaatga

SEQ ID NO: 150450 - DNA, 82 bp, Homo sapiens
acgtgctgtgaggaaggaaagggagagattaaagatggcctggaggtgatgctcagcgtgccgaagcgagccaatgatgcca

SEQ ID NO: 150451 - DNA, 87 bp, Homo sapiens
ggaaagggagagattaaagatggcctggaggtgatgctcagcgtgccgaagcgagccaatgatgccatgcacctcagcatgctggaa

SEQ ID NO: 150452 - DNA, 86 bp, Homo sapiens
agagattaaagatggcctggaggtgatgctcagcgtgccgaagcgagccaatgatgccatgcacctcagcatgctggaaggtaaag

SEQ ID NO: 150453 - DNA, 86 bp, Homo sapiens
atggcctggaggtgatgctcagcgtgccgaagcgagccaatgatgccatgcacctcagcatgctggaaggtaaaggaccctccata

SEQ ID NO: 150454 - DNA, 83 bp, Homo sapiens
aggtgatgctcagcgtgccgaagcgagccaatgatgccatgcacctcagcatgctggaaggtaaaggaccctccataccccag

SEQ ID NO: 150455 - DNA, 86 bp, Homo sapiens
agcgtgccgaagcgagccaatgatgccatgcacctcagcatgctggaaggtaaaggaccctccataccccagtgtgcatctatgca

SEQ ID NO: 150456 - DNA, 68 bp, Homo sapiens
ttatttttcttttaaattgatttgcctcccttttttcatgttgtagggtttgatgaaaacattgagtc

SEQ ID NO: 150457 - DNA, 70 bp, Homo sapiens
ttttaaattgatttgcctcccttttttcatgttgtagggtttgatgaaaacattgagtctcagggagaac

SEQ ID NO: 150458 - DNA, 74 bp, Homo sapiens
attgatttgcctcccttttttcatgttgtagggtttgatgaaaacattgagtctcagggagaactcatcctaca

SEQ ID NO: 150459 - DNA, 73 bp, Homo sapiens
ttttttcatgttgtagggtttgatgaaaacattgagtctcagggagaactcatcctacaggaatccttccaag

SEQ ID NO: 150460 - DNA, 74 bp, Homo sapiens
atgttgtagggtttgatgaaaacattgagtctcagggagaactcatcctacaggaatccttccaagtgtgggac

SEQ ID NO: 150461 - DNA, 73 bp, Homo sapiens
tgatgaaaacattgagtctcagggagaactcatcctacaggaatccttccaagtgtgggacccaaaaacctta

SEQ ID NO: 150462 - DNA, 69 bp, Homo sapiens
aaacattgagtctcagggagaactcatcctacaggaatccttccaagtgtgggacccaaaaaccttaat

SEQ ID NO: 150463 - DNA, 66 bp, Homo sapiens
agggagaactcatcctacaggaatccttccaagtgtgggacccaaaaaccttaattcgaaagggtc

SEQ ID NO: 150464 - DNA, 66 bp, Homo sapiens
aactcatcctacaggaatccttccaagtgtgggacccaaaaaccttaattcgaaagggtcgagaac

SEQ ID NO: 150465 - DNA, 66 bp, Homo sapiens
gaatccttccaagtgtgggacccaaaaaccttaattcgaaagggtcgagaacggcatctcttcctt

SEQ ID NO: 150466 - DNA, 66 bp, Homo sapiens
ttccaagtgtgggacccaaaaaccttaattcgaaagggtcgagaacggcatctcttcctttttgaa

SEQ ID NO: 150467 - DNA, 65 bp, Homo sapiens
acccaaaaaccttaattcgaaagggtcgagaacggcatctcttcctttttgaaatgtccttagta

SEQ ID NO: 150468 - DNA, 66 bp, Homo sapiens
aaaccttaattcgaaagggtcgagaacggcatctcttcctttttgaaatgtccttagtatttagta

SEQ ID NO: 150469 - DNA, 69 bp, Homo sapiens
aacggcatctcttcctttttgaaatgtccttagtatttagtaaagaagtgaaagattccagtgggagaa

SEQ ID NO: 150470 - DNA, 70 bp, Homo sapiens
tctcttcctttttgaaatgtccttagtatttagtaaagaagtgaaagattccagtgggagaagcaagtac

SEQ ID NO: 150471 - DNA, 70 bp, Homo sapiens
gaaatgtccttagtatttagtaaagaagtgaaagattccagtgggagaagcaagtacctttataaaagca

SEQ ID NO: 150472 - DNA, 69 bp, Homo sapiens
tccttagtatttagtaaagaagtgaaagattccagtgggagaagcaagtacctttataaaagcaaattg

SEQ ID NO: 150473 - DNA, 69 bp, Homo sapiens
aaagaagtgaaagattccagtgggagaagcaagtacctttataaaagcaaattgtttgtaagtataggc

SEQ ID NO: 150474 - DNA, 70 bp, Homo sapiens
aagattccagtgggagaagcaagtacctttataaaagcaaattgtttgtaagtataggcgttcagaattg

SEQ ID NO: 150475 - DNA, 71 bp, Homo sapiens
cagtgggagaagcaagtacctttataaaagcaaattgtttgtaagtataggcgttcagaattgtaagtcta

SEQ ID NO: 150476 - DNA, 69 bp, Homo sapiens
gcaagtacctttataaaagcaaattgtttgtaagtataggcgttcagaattgtaagtctaaaggtaaca

SEQ ID NO: 150477 - DNA, 71 bp, Homo sapiens
gcaaattgtttgtaagtataggcgttcagaattgtaagtctaaaggtaacacaattgcagtctttttgtag

SEQ ID NO: 150478 - DNA, 72 bp, Homo sapiens
ttgtaagtataggcgttcagaattgtaagtctaaaggtaacacaattgcagtctttttgtaggtagagaaga

SEQ ID NO: 150479 - DNA, 71 bp, Homo sapiens
aggcgttcagaattgtaagtctaaaggtaacacaattgcagtctttttgtaggtagagaagaattgttcat

SEQ ID NO: 150480 - DNA, 71 bp, Homo sapiens
aattgtaagtctaaaggtaacacaattgcagtctttttgtaggtagagaagaattgttcattgtcttcagt

SEQ ID NO: 150481 - DNA, 70 bp, Homo sapiens
aaggtaacacaattgcagtctttttgtaggtagagaagaattgttcattgtcttcagtttaacctcccaa

SEQ ID NO: 150482 - DNA, 72 bp, Homo sapiens
aattgcagtctttttgtaggtagagaagaattgttcattgtcttcagtttaacctcccaatctgtcctgaaa

SEQ ID NO: 150483 - DNA, 75 bp, Homo sapiens
tagagaagaattgttcattgtcttcagtttaacctcccaatctgtcctgaaatgttcaagtctgaattgtggtag

SEQ ID NO: 150484 - DNA, 71 bp, Homo sapiens
attgttcattgtcttcagtttaacctcccaatctgtcctgaaatgttcaagtctgaattgtggtagggttt

SEQ ID NO: 150485 - DNA, 73 bp, Homo sapiens
ttcagtttaacctcccaatctgtcctgaaatgttcaagtctgaattgtggtagggttttcatcttcagtgaaa

SEQ ID NO: 150486 - DNA, 72 bp, Homo sapiens
tttaacctcccaatctgtcctgaaatgttcaagtctgaattgtggtagggttttcatcttcagtgaaattat

SEQ ID NO: 150487 - DNA, 73 bp, Homo sapiens
atctgtcctgaaatgttcaagtctgaattgtggtagggttttcatcttcagtgaaattatttcccaccctcaa

SEQ ID NO: 150488 - DNA, 71 bp, Homo sapiens
aaatgttcaagtctgaattgtggtagggttttcatcttcagtgaaattatttcccaccctcaagtccacta

SEQ ID NO: 150489 - DNA, 71 bp, Homo sapiens
aagtctgaattgtggtagggttttcatcttcagtgaaattatttcccaccctcaagtccactagagggtgc

SEQ ID NO: 150490 - DNA, 72 bp, Homo sapiens
tggtagggttttcatcttcagtgaaattatttcccaccctcaagtccactagagggtgctctggagtttata

SEQ ID NO: 150491 - DNA, 73 bp, Homo sapiens
ttcatcttcagtgaaattatttcccaccctcaagtccactagagggtgctctggagtttatagacttaggaaa

SEQ ID NO: 150492 - DNA, 70 bp, Homo sapiens
aaattatttcccaccctcaagtccactagagggtgctctggagtttatagacttaggaaacttgctcttc

SEQ ID NO: 150493 - DNA, 70 bp, Homo sapiens
atttcccaccctcaagtccactagagggtgctctggagtttatagacttaggaaacttgctcttcttaaa

SEQ ID NO: 150494 - DNA, 73 bp, Homo sapiens
aagtccactagagggtgctctggagtttatagacttaggaaacttgctcttcttaaatcctgtatcatataac

SEQ ID NO: 150495 - DNA, 75 bp, Homo sapiens
gggtgctctggagtttatagacttaggaaacttgctcttcttaaatcctgtatcatataactgcaggataagaaa

SEQ ID NO: 150496 - DNA, 74 bp, Homo sapiens
ctctggagtttatagacttaggaaacttgctcttcttaaatcctgtatcatataactgcaggataagaaaacat

SEQ ID NO: 150497 - DNA, 76 bp, Homo sapiens
gacttaggaaacttgctcttcttaaatcctgtatcatataactgcaggataagaaaacatttcataagtgaaatca

SEQ ID NO: 150498 - DNA, 76 bp, Homo sapiens
cttgctcttcttaaatcctgtatcatataactgcaggataagaaaacatttcataagtgaaatcatttatctccgg

SEQ ID NO: 150499 - DNA, 76 bp, Homo sapiens
cttcttaaatcctgtatcatataactgcaggataagaaaacatttcataagtgaaatcatttatctccggtgtgct

SEQ ID NO: 150500 - DNA, 76 bp, Homo sapiens
cctgtatcatataactgcaggataagaaaacatttcataagtgaaatcatttatctccggtgtgcttaactagctt

SEQ ID NO: 150501 - DNA, 74 bp, Homo sapiens
ataactgcaggataagaaaacatttcataagtgaaatcatttatctccggtgtgcttaactagctttataaata

SEQ ID NO: 150502 - DNA, 71 bp, Homo sapiens
ggataagaaaacatttcataagtgaaatcatttatctccggtgtgcttaactagctttataaataaaataa

SEQ ID NO: 150503 - DNA, 76 bp, Homo sapiens
tcataagtgaaatcatttatctccggtgtgcttaactagctttataaataaaataatcatatctatgactaagttc

SEQ ID NO: 150504 - DNA, 74 bp, Homo sapiens
gtgaaatcatttatctccggtgtgcttaactagctttataaataaaataatcatatctatgactaagttcttat

SEQ ID NO: 150505 - DNA, 75 bp, Homo sapiens
tctagaattttactgtcacctaattatataattgtctttttatccagacctcagagttgggtgtcacagaacatg

SEQ ID NO: 150506 - DNA, 74 bp, Homo sapiens
ttttactgtcacctaattatataattgtctttttatccagacctcagagttgggtgtcacagaacatgttgaag

SEQ ID NO: 150507 - DNA, 74 bp, Homo sapiens
aattatataattgtctttttatccagacctcagagttgggtgtcacagaacatgttgaaggagacccttgcaaa

SEQ ID NO: 150508 - DNA, 75 bp, Homo sapiens
ataattgtctttttatccagacctcagagttgggtgtcacagaacatgttgaaggagacccttgcaaatttgcac

SEQ ID NO: 150509 - DNA, 75 bp, Homo sapiens
tttttatccagacctcagagttgggtgtcacagaacatgttgaaggagacccttgcaaatttgcactgtgggtgg

SEQ ID NO: 150510 - DNA, 75 bp, Homo sapiens
tcagagttgggtgtcacagaacatgttgaaggagacccttgcaaatttgcactgtgggtggggagaacaccaact

SEQ ID NO: 150511 - DNA, 76 bp, Homo sapiens
tgtcacagaacatgttgaaggagacccttgcaaatttgcactgtgggtggggagaacaccaacttcagataataaa

SEQ ID NO: 150512 - DNA, 72 bp, Homo sapiens
agaacatgttgaaggagacccttgcaaatttgcactgtgggtggggagaacaccaacttcagataataaaat

SEQ ID NO: 150513 - DNA, 70 bp, Homo sapiens
aaggagacccttgcaaatttgcactgtgggtggggagaacaccaacttcagataataaaattgtccttaa

SEQ ID NO: 150514 - DNA, 69 bp, Homo sapiens
caaatttgcactgtgggtggggagaacaccaacttcagataataaaattgtccttaaggtacgttcatt

SEQ ID NO: 150515 - DNA, 69 bp, Homo sapiens
actgtgggtggggagaacaccaacttcagataataaaattgtccttaaggtacgttcatttgaagctgg

SEQ ID NO: 150516 - DNA, 73 bp, Homo sapiens
ggagaacaccaacttcagataataaaattgtccttaaggtacgttcatttgaagctgggaatgtgctgtttga

SEQ ID NO: 150517 - DNA, 71 bp, Homo sapiens
ggtctggaaagggccgttccgtatcctaagcaacgctaacaccttgttaaggcttccagcatagagaacaa

SEQ ID NO: 150518 - DNA, 76 bp, Homo sapiens
gttccgtatcctaagcaacgctaacaccttgttaaggcttccagcatagagaacaagcaggactggataaagcata

SEQ ID NO: 150519 - DNA, 78 bp, Homo sapiens
tatcctaagcaacgctaacaccttgttaaggcttccagcatagagaacaagcaggactggataaagcatatccgcgaa

SEQ ID NO: 150520 - DNA, 77 bp, Homo sapiens
aacgctaacaccttgttaaggcttccagcatagagaacaagcaggactggataaagcatatccgcgaagtcatccag

SEQ ID NO: 150521 - DNA, 78 bp, Homo sapiens
accttgttaaggcttccagcatagagaacaagcaggactggataaagcatatccgcgaagtcatccaggagcggacga

SEQ ID NO: 150522 - DNA, 80 bp, Homo sapiens
cttccagcatagagaacaagcaggactggataaagcatatccgcgaagtcatccaggagcggacgatccacctgaaggga

SEQ ID NO: 150523 - DNA, 79 bp, Homo sapiens
tagagaacaagcaggactggataaagcatatccgcgaagtcatccaggagcggacgatccacctgaagggagccctgaa

SEQ ID NO: 150524 - DNA, 79 bp, Homo sapiens
gactggataaagcatatccgcgaagtcatccaggagcggacgatccacctgaagggagccctgaaggagcccattcaca

SEQ ID NO: 150525 - DNA, 78 bp, Homo sapiens
taaagcatatccgcgaagtcatccaggagcggacgatccacctgaagggagccctgaaggagcccattcacatcccta

SEQ ID NO: 150526 - DNA, 75 bp, Homo sapiens
atccgcgaagtcatccaggagcggacgatccacctgaagggagccctgaaggagcccattcacatccctaagacc

SEQ ID NO: 150527 - DNA, 75 bp, Homo sapiens
atccaggagcggacgatccacctgaagggagccctgaaggagcccattcacatccctaagaccgctcccgccaca

SEQ ID NO: 150528 - DNA, 74 bp, Homo sapiens
cggacgatccacctgaagggagccctgaaggagcccattcacatccctaagaccgctcccgccacaagacagaa

SEQ ID NO: 150529 - DNA, 72 bp, Homo sapiens
acctgaagggagccctgaaggagcccattcacatccctaagaccgctcccgccacaagacagaagggaagga

SEQ ID NO: 150530 - DNA, 74 bp, Homo sapiens
agccctgaaggagcccattcacatccctaagaccgctcccgccacaagacagaagggaaggaggtgcgtgtctg

SEQ ID NO: 150531 - DNA, 75 bp, Homo sapiens
agcccattcacatccctaagaccgctcccgccacaagacagaagggaaggaggtgcgtgtctgggcgccactgga

SEQ ID NO: 150532 - DNA, 72 bp, Homo sapiens
acatccctaagaccgctcccgccacaagacagaagggaaggaggtgcgtgtctgggcgccactggaggtttg

SEQ ID NO: 150533 - DNA, 80 bp, Homo sapiens
actgccagctcagcagcatcaggaactaaaagtttctttgcaccgccagggatggagaggatctggacagccaaggagac

SEQ ID NO: 150534 - DNA, 80 bp, Homo sapiens
agcagcatcaggaactaaaagtttctttgcaccgccagggatggagaggatctggacagccaaggagacggcagcagcca

SEQ ID NO: 150535 - DNA, 77 bp, Homo sapiens
aactaaaagtttctttgcaccgccagggatggagaggatctggacagccaaggagacggcagcagccagcctgatac

SEQ ID NO: 150536 - DNA, 78 bp, Homo sapiens
aaagtttctttgcaccgccagggatggagaggatctggacagccaaggagacggcagcagccagcctgatacgatttc

SEQ ID NO: 150537 - DNA, 80 bp, Homo sapiens
accgccagggatggagaggatctggacagccaaggagacggcagcagccagcctgatacgatttccatcgcctcacggac

SEQ ID NO: 150538 - DNA, 82 bp, Homo sapiens
atggagaggatctggacagccaaggagacggcagcagccagcctgatacgatttccatcgcctcacggacgtctcagaacac

SEQ ID NO: 150539 - DNA, 84 bp, Homo sapiens
tggacagccaaggagacggcagcagccagcctgatacgatttccatcgcctcacggacgtctcagaacacgctggacagcgata

SEQ ID NO: 150540 - DNA, 81 bp, Homo sapiens
aaggagacggcagcagccagcctgatacgatttccatcgcctcacggacgtctcagaacacgctggacagcgataaggtga

SEQ ID NO: 150541 - DNA, 83 bp, Homo sapiens
agcagccagcctgatacgatttccatcgcctcacggacgtctcagaacacgctggacagcgataaggtgagtcactgccggca

SEQ ID NO: 150542 - DNA, 80 bp, Homo sapiens
ctgatacgatttccatcgcctcacggacgtctcagaacacgctggacagcgataaggtgagtcactgccggcactttgtg

SEQ ID NO: 150543 - DNA, 79 bp, Homo sapiens
acgatttccatcgcctcacggacgtctcagaacacgctggacagcgataaggtgagtcactgccggcactttgtgtgcg

SEQ ID NO: 150544 - DNA, 85 bp, Homo sapiens
atggctcacactggctgacctgtcctctcttcctctgttccccccagctctctggtggctgtgagctgacagtggtgatccatga

SEQ ID NO: 150545 - DNA, 83 bp, Homo sapiens
acactggctgacctgtcctctcttcctctgttccccccagctctctggtggctgtgagctgacagtggtgatccatgacttca

SEQ ID NO: 150546 - DNA, 85 bp, Homo sapiens
tgtcctctcttcctctgttccccccagctctctggtggctgtgagctgacagtggtgatccatgacttcaccgcttgcaacagca

SEQ ID NO: 150547 - DNA, 85 bp, Homo sapiens
ttcctctgttccccccagctctctggtggctgtgagctgacagtggtgatccatgacttcaccgcttgcaacagcaacgagctga

SEQ ID NO: 150548 - DNA, 84 bp, Homo sapiens
ccccagctctctggtggctgtgagctgacagtggtgatccatgacttcaccgcttgcaacagcaacgagctgaccatccgacgg

SEQ ID NO: 150549 - DNA, 84 bp, Homo sapiens
tctggtggctgtgagctgacagtggtgatccatgacttcaccgcttgcaacagcaacgagctgaccatccgacggggccagacc

SEQ ID NO: 150550 - DNA, 81 bp, Homo sapiens
tgagctgacagtggtgatccatgacttcaccgcttgcaacagcaacgagctgaccatccgacggggccagaccgtggaagt

SEQ ID NO: 150551 - DNA, 78 bp, Homo sapiens
agtggtgatccatgacttcaccgcttgcaacagcaacgagctgaccatccgacggggccagaccgtggaagttctgga

SEQ ID NO: 150552 - DNA, 79 bp, Homo sapiens
atgacttcaccgcttgcaacagcaacgagctgaccatccgacggggccagaccgtggaagttctggagcggccgcatga

SEQ ID NO: 150553 - DNA, 79 bp, Homo sapiens
ttcaccgcttgcaacagcaacgagctgaccatccgacggggccagaccgtggaagttctggagcggccgcatgacaagc

SEQ ID NO: 150554 - DNA, 77 bp, Homo sapiens
aacagcaacgagctgaccatccgacggggccagaccgtggaagttctggagcggccgcatgacaagcctgactggtg

SEQ ID NO: 150555 - DNA, 78 bp, Homo sapiens
tgaccatccgacggggccagaccgtggaagttctggagcggccgcatgacaagcctgactggtgtctggtgcggacaa

SEQ ID NO: 150556 - DNA, 77 bp, Homo sapiens
atccgacggggccagaccgtggaagttctggagcggccgcatgacaagcctgactggtgtctggtgcggacaactga

SEQ ID NO: 150557 - DNA, 77 bp, Homo sapiens
agaccgtggaagttctggagcggccgcatgacaagcctgactggtgtctggtgcggacaactgaccgctccccagcg

SEQ ID NO: 150558 - DNA, 78 bp, Homo sapiens
aagttctggagcggccgcatgacaagcctgactggtgtctggtgcggacaactgaccgctccccagcggcagaaggcc

SEQ ID NO: 150559 - DNA, 77 bp, Homo sapiens
agcggccgcatgacaagcctgactggtgtctggtgcggacaactgaccgctccccagcggcagaaggcctggtcccc

SEQ ID NO: 150560 - DNA, 77 bp, Homo sapiens
atgacaagcctgactggtgtctggtgcggacaactgaccgctccccagcggcagaaggcctggtcccctgtggttca

SEQ ID NO: 150561 - DNA, 77 bp, Homo sapiens
actggtgtctggtgcggacaactgaccgctccccagcggcagaaggcctggtcccctgtggttcactgtgcatcgcc

SEQ ID NO: 150562 - DNA, 78 bp, Homo sapiens
tgcggacaactgaccgctccccagcggcagaaggcctggtcccctgtggttcactgtgcatcgcccactccagaagta

SEQ ID NO: 150563 - DNA, 78 bp, Homo sapiens
aactgaccgctccccagcggcagaaggcctggtcccctgtggttcactgtgcatcgcccactccagaagtagcatgga

SEQ ID NO: 150564 - DNA, 81 bp, Homo sapiens
cagcggcagaaggcctggtcccctgtggttcactgtgcatcgcccactccagaagtagcatggaaatggagggcatcttca

SEQ ID NO: 150565 - DNA, 77 bp, Homo sapiens
ccctgtggttcactgtgcatcgcccactccagaagtagcatggaaatggagggcatcttcaaccacaaaggtaggaa

SEQ ID NO: 150566 - DNA, 79 bp, Homo sapiens
tggttcactgtgcatcgcccactccagaagtagcatggaaatggagggcatcttcaaccacaaaggtaggaatcagtgg

SEQ ID NO: 150567 - DNA, 76 bp, Homo sapiens
atcgcccactccagaagtagcatggaaatggagggcatcttcaaccacaaaggtaggaatcagtggggcatgggtg

SEQ ID NO: 150568 - DNA, 76 bp, Homo sapiens
actccagaagtagcatggaaatggagggcatcttcaaccacaaaggtaggaatcagtggggcatgggtggcagacc

SEQ ID NO: 150569 - DNA, 81 bp, Homo sapiens
agggtctgtgcgagtcagtgatactccctctctttctccctggcagactcgctctccgtctccagcaatgacgccagtcca

SEQ ID NO: 150570 - DNA, 83 bp, Homo sapiens
tgtgcgagtcagtgatactccctctctttctccctggcagactcgctctccgtctccagcaatgacgccagtccacccgcatc

SEQ ID NO: 150571 - DNA, 78 bp, Homo sapiens
atactccctctctttctccctggcagactcgctctccgtctccagcaatgacgccagtccacccgcatccgtggcttc

SEQ ID NO: 150572 - DNA, 78 bp, Homo sapiens
tctttctccctggcagactcgctctccgtctccagcaatgacgccagtccacccgcatccgtggcttccctccagccc

SEQ ID NO: 150573 - DNA, 79 bp, Homo sapiens
tcgctctccgtctccagcaatgacgccagtccacccgcatccgtggcttccctccagccccacatgatcggggcccaga

SEQ ID NO: 150574 - DNA, 78 bp, Homo sapiens
ccgtctccagcaatgacgccagtccacccgcatccgtggcttccctccagccccacatgatcggggcccagagctcgc

SEQ ID NO: 150575 - DNA, 74 bp, Homo sapiens
aatgacgccagtccacccgcatccgtggcttccctccagccccacatgatcggggcccagagctcgccgggccc

SEQ ID NO: 150576 - DNA, 73 bp, Homo sapiens
agtccacccgcatccgtggcttccctccagccccacatgatcggggcccagagctcgccgggccccaagcggc

SEQ ID NO: 150577 - DNA, 72 bp, Homo sapiens
atccgtggcttccctccagccccacatgatcggggcccagagctcgccgggccccaagcggccgggcaacac

SEQ ID NO: 150578 - DNA, 76 bp, Homo sapiens
tccagccccacatgatcggggcccagagctcgccgggccccaagcggccgggcaacaccctgcgcaagtggctcac

SEQ ID NO: 150579 - DNA, 75 bp, Homo sapiens
cccacatgatcggggcccagagctcgccgggccccaagcggccgggcaacaccctgcgcaagtggctcaccagcc

SEQ ID NO: 150580 - DNA, 76 bp, Homo sapiens
gcccagagctcgccgggccccaagcggccgggcaacaccctgcgcaagtggctcaccagccccgtgcggcggctca

SEQ ID NO: 150581 - DNA, 77 bp, Homo sapiens
tcgccgggccccaagcggccgggcaacaccctgcgcaagtggctcaccagccccgtgcggcggctcagcagcggcaa

SEQ ID NO: 150582 - DNA, 78 bp, Homo sapiens
caagcggccgggcaacaccctgcgcaagtggctcaccagccccgtgcggcggctcagcagcggcaaggccgacgggca

SEQ ID NO: 150583 - DNA, 78 bp, Homo sapiens
gggcaacaccctgcgcaagtggctcaccagccccgtgcggcggctcagcagcggcaaggccgacgggcacgtgaagaa

SEQ ID NO: 150584 - DNA, 84 bp, Homo sapiens
tgcgcaagtggctcaccagccccgtgcggcggctcagcagcggcaaggccgacgggcacgtgaagaagctggcgcacaagcaca

SEQ ID NO: 150585 - DNA, 80 bp, Homo sapiens
aagtggctcaccagccccgtgcggcggctcagcagcggcaaggccgacgggcacgtgaagaagctggcgcacaagcacaa

SEQ ID NO: 150586 - DNA, 79 bp, Homo sapiens
cccgtgcggcggctcagcagcggcaaggccgacgggcacgtgaagaagctggcgcacaagcacaagaagagccgcgagg

SEQ ID NO: 150587 - DNA, 81 bp, Homo sapiens
cggctcagcagcggcaaggccgacgggcacgtgaagaagctggcgcacaagcacaagaagagccgcgaggtccgcaagagc

SEQ ID NO: 150588 - DNA, 78 bp, Homo sapiens
agcggcaaggccgacgggcacgtgaagaagctggcgcacaagcacaagaagagccgcgaggtccgcaagagcgccgac

SEQ ID NO: 150589 - DNA, 80 bp, Homo sapiens
gacgggcacgtgaagaagctggcgcacaagcacaagaagagccgcgaggtccgcaagagcgccgacgccggctcgcagaa

SEQ ID NO: 150590 - DNA, 80 bp, Homo sapiens
tgaagaagctggcgcacaagcacaagaagagccgcgaggtccgcaagagcgccgacgccggctcgcagaaggactccgac

SEQ ID NO: 150591 - DNA, 79 bp, Homo sapiens
aagctggcgcacaagcacaagaagagccgcgaggtccgcaagagcgccgacgccggctcgcagaaggactccgacgaca

SEQ ID NO: 150592 - DNA, 77 bp, Homo sapiens
aagcacaagaagagccgcgaggtccgcaagagcgccgacgccggctcgcagaaggactccgacgacagtgcggccac

SEQ ID NO: 150593 - DNA, 75 bp, Homo sapiens
aagagccgcgaggtccgcaagagcgccgacgccggctcgcagaaggactccgacgacagtgcggccaccccgcag

SEQ ID NO: 150594 - DNA, 76 bp, Homo sapiens
tccgcaagagcgccgacgccggctcgcagaaggactccgacgacagtgcggccaccccgcaggacgagacggtcga

SEQ ID NO: 150595 - DNA, 74 bp, Homo sapiens
gccgacgccggctcgcagaaggactccgacgacagtgcggccaccccgcaggacgagacggtcgaggaggtgag

SEQ ID NO: 150596 - DNA, 76 bp, Homo sapiens
cgccggctcgcagaaggactccgacgacagtgcggccaccccgcaggacgagacggtcgaggaggtgaggctctgc

SEQ ID NO: 150597 - DNA, 73 bp, Homo sapiens
agaaggactccgacgacagtgcggccaccccgcaggacgagacggtcgaggaggtgaggctctgcccgctggt

SEQ ID NO: 150598 - DNA, 72 bp, Homo sapiens
ccgacgacagtgcggccaccccgcaggacgagacggtcgaggaggtgaggctctgcccgctggttggggccg

SEQ ID NO: 150599 - DNA, 80 bp, Homo sapiens
tctgtgaactggcctggaatataatgagcaaatcttgactggatttcagagaggccggaacgagggcctgagcagcggta

SEQ ID NO: 150600 - DNA, 78 bp, Homo sapiens
ctggaatataatgagcaaatcttgactggatttcagagaggccggaacgagggcctgagcagcggtactctctccaaa

SEQ ID NO: 150601 - DNA, 78 bp, Homo sapiens
atataatgagcaaatcttgactggatttcagagaggccggaacgagggcctgagcagcggtactctctccaaatcctc

SEQ ID NO: 150602 - DNA, 74 bp, Homo sapiens
aaatcttgactggatttcagagaggccggaacgagggcctgagcagcggtactctctccaaatcctcctcctcg

SEQ ID NO: 150603 - DNA, 77 bp, Homo sapiens
atttcagagaggccggaacgagggcctgagcagcggtactctctccaaatcctcctcctcggggatgcagagctgtg

SEQ ID NO: 150604 - DNA, 77 bp, Homo sapiens
agaggccggaacgagggcctgagcagcggtactctctccaaatcctcctcctcggggatgcagagctgtggagaaga

SEQ ID NO: 150605 - DNA, 77 bp, Homo sapiens
aacgagggcctgagcagcggtactctctccaaatcctcctcctcggggatgcagagctgtggagaagaggaaggcga

SEQ ID NO: 150606 - DNA, 74 bp, Homo sapiens
agcggtactctctccaaatcctcctcctcggggatgcagagctgtggagaagaggaaggcgaggagggggccga

SEQ ID NO: 150607 - DNA, 74 bp, Homo sapiens
tactctctccaaatcctcctcctcggggatgcagagctgtggagaagaggaaggcgaggagggggccgacgccg

SEQ ID NO: 150608 - DNA, 73 bp, Homo sapiens
aaatcctcctcctcggggatgcagagctgtggagaagaggaaggcgaggagggggccgacgccgtgcccctgc

SEQ ID NO: 150609 - DNA, 77 bp, Homo sapiens
gggatgcagagctgtggagaagaggaaggcgaggagggggccgacgccgtgcccctgccgccacccatggccatcca

SEQ ID NO: 150610 - DNA, 78 bp, Homo sapiens
agagctgtggagaagaggaaggcgaggagggggccgacgccgtgcccctgccgccacccatggccatccagcagcaca

SEQ ID NO: 150611 - DNA, 76 bp, Homo sapiens
agaagaggaaggcgaggagggggccgacgccgtgcccctgccgccacccatggccatccagcagcacagcctcctc

SEQ ID NO: 150612 - DNA, 80 bp, Homo sapiens
gaggagggggccgacgccgtgcccctgccgccacccatggccatccagcagcacagcctcctccagccagactcacagga

SEQ ID NO: 150613 - DNA, 81 bp, Homo sapiens
ccgacgccgtgcccctgccgccacccatggccatccagcagcacagcctcctccagccagactcacaggatgacaaggtaa

SEQ ID NO: 150614 - DNA, 79 bp, Homo sapiens
ccgtgcccctgccgccacccatggccatccagcagcacagcctcctccagccagactcacaggatgacaaggtaaaggg

SEQ ID NO: 150615 - DNA, 79 bp, Homo sapiens
ccacccatggccatccagcagcacagcctcctccagccagactcacaggatgacaaggtaaagggggatgagggctggg

SEQ ID NO: 150616 - DNA, 80 bp, Homo sapiens
atggccatccagcagcacagcctcctccagccagactcacaggatgacaaggtaaagggggatgagggctggggaatcca

SEQ ID NO: 150617 - DNA, 68 bp, Homo sapiens
taatgtgagcccttgccccaccccctccttttcttaatttcttctgtaggcctcttctcggttattag

SEQ ID NO: 150618 - DNA, 66 bp, Homo sapiens
agcccttgccccaccccctccttttcttaatttcttctgtaggcctcttctcggttattagtccgc

SEQ ID NO: 150619 - DNA, 67 bp, Homo sapiens
cccctccttttcttaatttcttctgtaggcctcttctcggttattagtccgccccaccagctccgaa

SEQ ID NO: 150620 - DNA, 72 bp, Homo sapiens
tcttaatttcttctgtaggcctcttctcggttattagtccgccccaccagctccgaaacaccgagtgcagcc

SEQ ID NO: 150621 - DNA, 73 bp, Homo sapiens
atttcttctgtaggcctcttctcggttattagtccgccccaccagctccgaaacaccgagtgcagccgagctc

SEQ ID NO: 150622 - DNA, 77 bp, Homo sapiens
taggcctcttctcggttattagtccgccccaccagctccgaaacaccgagtgcagccgagctcgtcagtgcaattga

SEQ ID NO: 150623 - DNA, 76 bp, Homo sapiens
ttattagtccgccccaccagctccgaaacaccgagtgcagccgagctcgtcagtgcaattgaggaactcgtgaaaa

SEQ ID NO: 150624 - DNA, 77 bp, Homo sapiens
agtccgccccaccagctccgaaacaccgagtgcagccgagctcgtcagtgcaattgaggaactcgtgaaaagcaaga

SEQ ID NO: 150625 - DNA, 79 bp, Homo sapiens
accagctccgaaacaccgagtgcagccgagctcgtcagtgcaattgaggaactcgtgaaaagcaagatggtgaggcctc

SEQ ID NO: 150626 - DNA, 78 bp, Homo sapiens
aaacaccgagtgcagccgagctcgtcagtgcaattgaggaactcgtgaaaagcaagatggtgaggcctcccagagaaa

SEQ ID NO: 150627 - DNA, 77 bp, Homo sapiens
agccgagctcgtcagtgcaattgaggaactcgtgaaaagcaagatggtgaggcctcccagagaaagtctgacttttg

SEQ ID NO: 150628 - DNA, 79 bp, Homo sapiens
tcgtcagtgcaattgaggaactcgtgaaaagcaagatggtgaggcctcccagagaaagtctgacttttggaagctgctc

SEQ ID NO: 150629 - DNA, 79 bp, Homo sapiens
aatcatgggctgtgggcagtaagtgttgttgattatgtcaatttcttccaggcactggaggatcgccccagctcactcc

SEQ ID NO: 150630 - DNA, 79 bp, Homo sapiens
tgtgggcagtaagtgttgttgattatgtcaatttcttccaggcactggaggatcgccccagctcactccttgttgacca

SEQ ID NO: 150631 - DNA, 77 bp, Homo sapiens
aagtgttgttgattatgtcaatttcttccaggcactggaggatcgccccagctcactccttgttgaccagggagata

SEQ ID NO: 150632 - DNA, 77 bp, Homo sapiens
attatgtcaatttcttccaggcactggaggatcgccccagctcactccttgttgaccagggagatagtagcagccct

SEQ ID NO: 150633 - DNA, 76 bp, Homo sapiens
atttcttccaggcactggaggatcgccccagctcactccttgttgaccagggagatagtagcagcccttccttcaa

SEQ ID NO: 150634 - DNA, 74 bp, Homo sapiens
tggaggatcgccccagctcactccttgttgaccagggagatagtagcagcccttccttcaacccttcggataat

SEQ ID NO: 150635 - DNA, 71 bp, Homo sapiens
ccccagctcactccttgttgaccagggagatagtagcagcccttccttcaacccttcggataattcccttc

SEQ ID NO: 150636 - DNA, 72 bp, Homo sapiens
ctcactccttgttgaccagggagatagtagcagcccttccttcaacccttcggataattcccttctctcttc

SEQ ID NO: 150637 - DNA, 70 bp, Homo sapiens
accagggagatagtagcagcccttccttcaacccttcggataattcccttctctcttcctcctcgcccat

SEQ ID NO: 150638 - DNA, 74 bp, Homo sapiens
atagtagcagcccttccttcaacccttcggataattcccttctctcttcctcctcgcccattgatgagatggaa

SEQ ID NO: 150639 - DNA, 71 bp, Homo sapiens
ccttccttcaacccttcggataattcccttctctcttcctcctcgcccattgatgagatggaagaaaggaa

SEQ ID NO: 150640 - DNA, 72 bp, Homo sapiens
aacccttcggataattcccttctctcttcctcctcgcccattgatgagatggaagaaaggaaatccagctct

SEQ ID NO: 150641 - DNA, 74 bp, Homo sapiens
ataattcccttctctcttcctcctcgcccattgatgagatggaagaaaggaaatccagctctttaaagagaaga

SEQ ID NO: 150642 - DNA, 76 bp, Homo sapiens
ctctcttcctcctcgcccattgatgagatggaagaaaggaaatccagctctttaaagagaagacagtaagacagaa

SEQ ID NO: 150643 - DNA, 76 bp, Homo sapiens
tcctcgcccattgatgagatggaagaaaggaaatccagctctttaaagagaagacagtaagacagaaatgttttca

SEQ ID NO: 150644 - DNA, 75 bp, Homo sapiens
ccattgatgagatggaagaaaggaaatccagctctttaaagagaagacagtaagacagaaatgttttcattctta

SEQ ID NO: 150645 - DNA, 71 bp, Homo sapiens
ggagcaaaggtacaaaaaaattcatttagaaaacagtttgcatgataaacaatattttttctctccagcta

SEQ ID NO: 150646 - DNA, 70 bp, Homo sapiens
aaaaattcatttagaaaacagtttgcatgataaacaatattttttctctccagctacgttttgcaagaac

SEQ ID NO: 150647 - DNA, 75 bp, Homo sapiens
ttagaaaacagtttgcatgataaacaatattttttctctccagctacgttttgcaagaactagtggagacagagc

SEQ ID NO: 150648 - DNA, 76 bp, Homo sapiens
aacagtttgcatgataaacaatattttttctctccagctacgttttgcaagaactagtggagacagagcgtgacta

SEQ ID NO: 150649 - DNA, 74 bp, Homo sapiens
taaacaatattttttctctccagctacgttttgcaagaactagtggagacagagcgtgactatgtgcgggacct

SEQ ID NO: 150650 - DNA, 76 bp, Homo sapiens
tttttctctccagctacgttttgcaagaactagtggagacagagcgtgactatgtgcgggaccttggctatgtggt

SEQ ID NO: 150651 - DNA, 78 bp, Homo sapiens
cagctacgttttgcaagaactagtggagacagagcgtgactatgtgcgggaccttggctatgtggttgaggtgtgtat

SEQ ID NO: 150652 - DNA, 79 bp, Homo sapiens
ttttgcaagaactagtggagacagagcgtgactatgtgcgggaccttggctatgtggttgaggtgtgtattgccagaaa

SEQ ID NO: 150653 - DNA, 77 bp, Homo sapiens
aactagtggagacagagcgtgactatgtgcgggaccttggctatgtggttgaggtgtgtattgccagaaatttagta

SEQ ID NO: 150654 - DNA, 77 bp, Homo sapiens
agagcgtgactatgtgcgggaccttggctatgtggttgaggtgtgtattgccagaaatttagtatcttcgtatcagt

SEQ ID NO: 150655 - DNA, 76 bp, Homo sapiens
actatgtgcgggaccttggctatgtggttgaggtgtgtattgccagaaatttagtatcttcgtatcagttccaaga

SEQ ID NO: 150656 - DNA, 74 bp, Homo sapiens
accttggctatgtggttgaggtgtgtattgccagaaatttagtatcttcgtatcagttccaagagttgtcaaaa

SEQ ID NO: 150657 - DNA, 78 bp, Homo sapiens
attcagacatattccatgaaatacacttatcataactgtttaattgtagggctacatggcacttatgaaagaagatgg

SEQ ID NO: 150658 - DNA, 76 bp, Homo sapiens
atattccatgaaatacacttatcataactgtttaattgtagggctacatggcacttatgaaagaagatggtgttcc

SEQ ID NO: 150659 - DNA, 78 bp, Homo sapiens
aaatacacttatcataactgtttaattgtagggctacatggcacttatgaaagaagatggtgttcctgatgacatgaa

SEQ ID NO: 150660 - DNA, 77 bp, Homo sapiens
atcataactgtttaattgtagggctacatggcacttatgaaagaagatggtgttcctgatgacatgaaaggaaaaga

SEQ ID NO: 150661 - DNA, 75 bp, Homo sapiens
tttaattgtagggctacatggcacttatgaaagaagatggtgttcctgatgacatgaaaggaaaagacaaaattg

SEQ ID NO: 150662 - DNA, 80 bp, Homo sapiens
tacatggcacttatgaaagaagatggtgttcctgatgacatgaaaggaaaagacaaaattgtgttcggcaacatccatca

SEQ ID NO: 150663 - DNA, 77 bp, Homo sapiens
ttatgaaagaagatggtgttcctgatgacatgaaaggaaaagacaaaattgtgttcggcaacatccatcagatttac

SEQ ID NO: 150664 - DNA, 76 bp, Homo sapiens
aagaagatggtgttcctgatgacatgaaaggaaaagacaaaattgtgttcggcaacatccatcagatttacgactg

SEQ ID NO: 150665 - DNA, 78 bp, Homo sapiens
ctgatgacatgaaaggaaaagacaaaattgtgttcggcaacatccatcagatttacgactggcacagagagtacgtaa

SEQ ID NO: 150666 - DNA, 76 bp, Homo sapiens
gaaaggaaaagacaaaattgtgttcggcaacatccatcagatttacgactggcacagagagtacgtaaacatgcat

SEQ ID NO: 150667 - DNA, 79 bp, Homo sapiens
aagacaaaattgtgttcggcaacatccatcagatttacgactggcacagagagtacgtaaacatgcattgtgcccgatg

SEQ ID NO: 150668 - DNA, 81 bp, Homo sapiens
aattgtgttcggcaacatccatcagatttacgactggcacagagagtacgtaaacatgcattgtgcccgatggtgtgcaaa

SEQ ID NO: 150669 - DNA, 67 bp, Homo sapiens
aaacctaaatctaaaattagaaggccacactggaaatagttctaatattttctcctttctttccagc

SEQ ID NO: 150670 - DNA, 67 bp, Homo sapiens
attagaaggccacactggaaatagttctaatattttctcctttctttccagcttttttttaggagag

SEQ ID NO: 150671 - DNA, 69 bp, Homo sapiens
cacactggaaatagttctaatattttctcctttctttccagcttttttttaggagagttagagaagtgc

SEQ ID NO: 150672 - DNA, 69 bp, Homo sapiens
atagttctaatattttctcctttctttccagcttttttttaggagagttagagaagtgccttgaagatc

SEQ ID NO: 150673 - DNA, 68 bp, Homo sapiens
tattttctcctttctttccagcttttttttaggagagttagagaagtgccttgaagatccagaaaaac

SEQ ID NO: 150674 - DNA, 68 bp, Homo sapiens
tttctttccagcttttttttaggagagttagagaagtgccttgaagatccagaaaaactaggatccct

SEQ ID NO: 150675 - DNA, 68 bp, Homo sapiens
cagcttttttttaggagagttagagaagtgccttgaagatccagaaaaactaggatccctttttgtta

SEQ ID NO: 150676 - DNA, 68 bp, Homo sapiens
tttaggagagttagagaagtgccttgaagatccagaaaaactaggatccctttttgttaaacacgtaa

SEQ ID NO: 150677 - DNA, 71 bp, Homo sapiens
agttagagaagtgccttgaagatccagaaaaactaggatccctttttgttaaacacgtaagcacaatagca

SEQ ID NO: 150678 - DNA, 73 bp, Homo sapiens
ttgaagatccagaaaaactaggatccctttttgttaaacacgtaagcacaatagcattgcttatatcctgttc

SEQ ID NO: 150679 - DNA, 74 bp, Homo sapiens
agaaaaactaggatccctttttgttaaacacgtaagcacaatagcattgcttatatcctgttctgatggtgtca

SEQ ID NO: 150680 - DNA, 75 bp, Homo sapiens
aactaggatccctttttgttaaacacgtaagcacaatagcattgcttatatcctgttctgatggtgtcatcctta

SEQ ID NO: 150681 - DNA, 69 bp, Homo sapiens
ttctaatcgaatttcccattgttataacccaactgtttgccttttttattcctaggagagaaggttgca

SEQ ID NO: 150682 - DNA, 70 bp, Homo sapiens
aatttcccattgttataacccaactgtttgccttttttattcctaggagagaaggttgcacatgtacata

SEQ ID NO: 150683 - DNA, 72 bp, Homo sapiens
ttataacccaactgtttgccttttttattcctaggagagaaggttgcacatgtacatagcttattgtcaaaa

SEQ ID NO: 150684 - DNA, 72 bp, Homo sapiens
caactgtttgccttttttattcctaggagagaaggttgcacatgtacatagcttattgtcaaaataaaccaa

SEQ ID NO: 150685 - DNA, 76 bp, Homo sapiens
tttttattcctaggagagaaggttgcacatgtacatagcttattgtcaaaataaaccaaagtctgagcacattgtc

SEQ ID NO: 150686 - DNA, 82 bp, Homo sapiens
taggagagaaggttgcacatgtacatagcttattgtcaaaataaaccaaagtctgagcacattgtctcagaatacattgata

SEQ ID NO: 150687 - DNA, 78 bp, Homo sapiens
gttgcacatgtacatagcttattgtcaaaataaaccaaagtctgagcacattgtctcagaatacattgataccttttt

SEQ ID NO: 150688 - DNA, 77 bp, Homo sapiens
catgtacatagcttattgtcaaaataaaccaaagtctgagcacattgtctcagaatacattgataccttttttgagg

SEQ ID NO: 150689 - DNA, 74 bp, Homo sapiens
ttgtcaaaataaaccaaagtctgagcacattgtctcagaatacattgataccttttttgaggtaagacctaaga

SEQ ID NO: 150690 - DNA, 75 bp, Homo sapiens
taaaccaaagtctgagcacattgtctcagaatacattgataccttttttgaggtaagacctaagatacaaacaga

SEQ ID NO: 150691 - DNA, 74 bp, Homo sapiens
aaagtctgagcacattgtctcagaatacattgataccttttttgaggtaagacctaagatacaaacagaaagta

SEQ ID NO: 150692 - DNA, 74 bp, Homo sapiens
cacattgtctcagaatacattgataccttttttgaggtaagacctaagatacaaacagaaagtatttctgaatc

SEQ ID NO: 150693 - DNA, 71 bp, Homo sapiens
aattgccctttaatgaacagcccatacgatcttttctctctcttaaaactgtaggacttaaagcagcgtct

SEQ ID NO: 150694 - DNA, 74 bp, Homo sapiens
taatgaacagcccatacgatcttttctctctcttaaaactgtaggacttaaagcagcgtcttggccacaggtta

SEQ ID NO: 150695 - DNA, 76 bp, Homo sapiens
atacgatcttttctctctcttaaaactgtaggacttaaagcagcgtcttggccacaggttacagctcacagatctg

SEQ ID NO: 150696 - DNA, 78 bp, Homo sapiens
tctctctcttaaaactgtaggacttaaagcagcgtcttggccacaggttacagctcacagatctgttgatcaaaccag

SEQ ID NO: 150697 - DNA, 80 bp, Homo sapiens
tcttaaaactgtaggacttaaagcagcgtcttggccacaggttacagctcacagatctgttgatcaaaccagtgcagaga

SEQ ID NO: 150698 - DNA, 85 bp, Homo sapiens
tgtaggacttaaagcagcgtcttggccacaggttacagctcacagatctgttgatcaaaccagtgcagagaatcatgaagtatca

SEQ ID NO: 150699 - DNA, 86 bp, Homo sapiens
aaagcagcgtcttggccacaggttacagctcacagatctgttgatcaaaccagtgcagagaatcatgaagtatcagctgttactga

SEQ ID NO: 150700 - DNA, 85 bp, Homo sapiens
cttggccacaggttacagctcacagatctgttgatcaaaccagtgcagagaatcatgaagtatcagctgttactgaaggtgagga

SEQ ID NO: 150701 - DNA, 85 bp, Homo sapiens
tacagctcacagatctgttgatcaaaccagtgcagagaatcatgaagtatcagctgttactgaaggtgaggaggtggcgggacaa

SEQ ID NO: 150702 - DNA, 81 bp, Homo sapiens
agatctgttgatcaaaccagtgcagagaatcatgaagtatcagctgttactgaaggtgaggaggtggcgggacaaactctg

SEQ ID NO: 150703 - DNA, 81 bp, Homo sapiens
ttgatcaaaccagtgcagagaatcatgaagtatcagctgttactgaaggtgaggaggtggcgggacaaactctggtgtcag

SEQ ID NO: 150704 - DNA, 79 bp, Homo sapiens
agtgcagagaatcatgaagtatcagctgttactgaaggtgaggaggtggcgggacaaactctggtgtcaggagtgagtt

SEQ ID NO: 150705 - DNA, 76 bp, Homo sapiens
aaaaataaaaggtcagctgctgttgtctttgtcaccattatcatgtcctctccatttcccttgcaggacttcctca

SEQ ID NO: 150706 - DNA, 78 bp, Homo sapiens
taaaaggtcagctgctgttgtctttgtcaccattatcatgtcctctccatttcccttgcaggacttcctcaagtattc

SEQ ID NO: 150707 - DNA, 75 bp, Homo sapiens
ctgttgtctttgtcaccattatcatgtcctctccatttcccttgcaggacttcctcaagtattccaaaaaggcca

SEQ ID NO: 150708 - DNA, 76 bp, Homo sapiens
tttgtcaccattatcatgtcctctccatttcccttgcaggacttcctcaagtattccaaaaaggccagcctggata

SEQ ID NO: 150709 - DNA, 77 bp, Homo sapiens
ttatcatgtcctctccatttcccttgcaggacttcctcaagtattccaaaaaggccagcctggatacatcagaatta

SEQ ID NO: 150710 - DNA, 79 bp, Homo sapiens
tccatttcccttgcaggacttcctcaagtattccaaaaaggccagcctggatacatcagaattagaggtacatgcatca

SEQ ID NO: 150711 - DNA, 79 bp, Homo sapiens
ttcccttgcaggacttcctcaagtattccaaaaaggccagcctggatacatcagaattagaggtacatgcatcagcggc

SEQ ID NO: 150712 - DNA, 79 bp, Homo sapiens
ttcctcaagtattccaaaaaggccagcctggatacatcagaattagaggtacatgcatcagcggctgtgggcacccaaa

SEQ ID NO: 150713 - DNA, 77 bp, Homo sapiens
aagtattccaaaaaggccagcctggatacatcagaattagaggtacatgcatcagcggctgtgggcacccaaatccc

SEQ ID NO: 150714 - DNA, 78 bp, Homo sapiens
aaggccagcctggatacatcagaattagaggtacatgcatcagcggctgtgggcacccaaatccccaccagcctcttt

SEQ ID NO: 150715 - DNA, 78 bp, Homo sapiens
cctggatacatcagaattagaggtacatgcatcagcggctgtgggcacccaaatccccaccagcctcttttcctaatc

SEQ ID NO: 150716 - DNA, 76 bp, Homo sapiens
acgtcagattttccctagaggaacttgagctttcactcttctctctcccctcccacagagagctgtggaagtcatg

SEQ ID NO: 150717 - DNA, 78 bp, Homo sapiens
attttccctagaggaacttgagctttcactcttctctctcccctcccacagagagctgtggaagtcatgtgcatagta

SEQ ID NO: 150718 - DNA, 79 bp, Homo sapiens
aacttgagctttcactcttctctctcccctcccacagagagctgtggaagtcatgtgcatagtacccaggcggtgcaac

SEQ ID NO: 150719 - DNA, 82 bp, Homo sapiens
tttcactcttctctctcccctcccacagagagctgtggaagtcatgtgcatagtacccaggcggtgcaacgacatgatgaac

SEQ ID NO: 150720 - DNA, 80 bp, Homo sapiens
cttctctctcccctcccacagagagctgtggaagtcatgtgcatagtacccaggcggtgcaacgacatgatgaacgtggg

SEQ ID NO: 150721 - DNA, 83 bp, Homo sapiens
tcccacagagagctgtggaagtcatgtgcatagtacccaggcggtgcaacgacatgatgaacgtggggcggctgcaaggattc

SEQ ID NO: 150722 - DNA, 80 bp, Homo sapiens
agctgtggaagtcatgtgcatagtacccaggcggtgcaacgacatgatgaacgtggggcggctgcaaggattcgacgtaa

SEQ ID NO: 150723 - DNA, 81 bp, Homo sapiens
tcatgtgcatagtacccaggcggtgcaacgacatgatgaacgtggggcggctgcaaggattcgacgtaatgcggctcttgt

SEQ ID NO: 150724 - DNA, 75 bp, Homo sapiens
atagtacccaggcggtgcaacgacatgatgaacgtggggcggctgcaaggattcgacgtaatgcggctcttgttt

SEQ ID NO: 150725 - DNA, 75 bp, Homo sapiens
ccaggcggtgcaacgacatgatgaacgtggggcggctgcaaggattcgacgtaatgcggctcttgttttttaaga

SEQ ID NO: 150726 - DNA, 76 bp, Homo sapiens
aacgacatgatgaacgtggggcggctgcaaggattcgacgtaatgcggctcttgttttttaagagagctcctctgc

SEQ ID NO: 150727 - DNA, 76 bp, Homo sapiens
atgaacgtggggcggctgcaaggattcgacgtaatgcggctcttgttttttaagagagctcctctgccttcatctc

SEQ ID NO: 150728 - DNA, 61 bp, Homo sapiens
aatgttttcttctccccttccttttccccctttatttcttgttttaggggaaaatcgttgc

SEQ ID NO: 150729 - DNA, 61 bp, Homo sapiens
tctccccttccttttccccctttatttcttgttttaggggaaaatcgttgcccagggtaaa

SEQ ID NO: 150730 - DNA, 66 bp, Homo sapiens
ttttccccctttatttcttgttttaggggaaaatcgttgcccagggtaaactgctcttgcaggaca

SEQ ID NO: 150731 - DNA, 72 bp, Homo sapiens
ttatttcttgttttaggggaaaatcgttgcccagggtaaactgctcttgcaggacacattcttggtcacaga

SEQ ID NO: 150732 - DNA, 73 bp, Homo sapiens
tcttgttttaggggaaaatcgttgcccagggtaaactgctcttgcaggacacattcttggtcacagaccaaga

SEQ ID NO: 150733 - DNA, 78 bp, Homo sapiens
ggaaaatcgttgcccagggtaaactgctcttgcaggacacattcttggtcacagaccaagatgcaggacttctgcctc

SEQ ID NO: 150734 - DNA, 83 bp, Homo sapiens
gttgcccagggtaaactgctcttgcaggacacattcttggtcacagaccaagatgcaggacttctgcctcgctgcagagagag

SEQ ID NO: 150735 - DNA, 86 bp, Homo sapiens
taaactgctcttgcaggacacattcttggtcacagaccaagatgcaggacttctgcctcgctgcagagagaggcgcatcttcctct

SEQ ID NO: 150736 - DNA, 87 bp, Homo sapiens
aggacacattcttggtcacagaccaagatgcaggacttctgcctcgctgcagagagaggcgcatcttcctctttgagcagatcgtca

SEQ ID NO: 150737 - DNA, 88 bp, Homo sapiens
acattcttggtcacagaccaagatgcaggacttctgcctcgctgcagagagaggcgcatcttcctctttgagcagatcgtcatattca

SEQ ID NO: 150738 - DNA, 88 bp, Homo sapiens
gaccaagatgcaggacttctgcctcgctgcagagagaggcgcatcttcctctttgagcagatcgtcatattcagcgaaccacttgata

SEQ ID NO: 150739 - DNA, 85 bp, Homo sapiens
atgcaggacttctgcctcgctgcagagagaggcgcatcttcctctttgagcagatcgtcatattcagcgaaccacttgataaaaa

SEQ ID NO: 150740 - DNA, 82 bp, Homo sapiens
cttctgcctcgctgcagagagaggcgcatcttcctctttgagcagatcgtcatattcagcgaaccacttgataaaaagaagg

SEQ ID NO: 150741 - DNA, 80 bp, Homo sapiens
agagagaggcgcatcttcctctttgagcagatcgtcatattcagcgaaccacttgataaaaagaagggcttctccatgcc

SEQ ID NO: 150742 - DNA, 78 bp, Homo sapiens
gcatcttcctctttgagcagatcgtcatattcagcgaaccacttgataaaaagaagggcttctccatgccgggattcc

SEQ ID NO: 150743 - DNA, 76 bp, Homo sapiens
tctttgagcagatcgtcatattcagcgaaccacttgataaaaagaagggcttctccatgccgggattcctgtttaa

SEQ ID NO: 150744 - DNA, 73 bp, Homo sapiens
atcgtcatattcagcgaaccacttgataaaaagaagggcttctccatgccgggattcctgtttaagaacagta

SEQ ID NO: 150745 - DNA, 72 bp, Homo sapiens
atattcagcgaaccacttgataaaaagaagggcttctccatgccgggattcctgtttaagaacagtatcaag

SEQ ID NO: 150746 - DNA, 70 bp, Homo sapiens
acttgataaaaagaagggcttctccatgccgggattcctgtttaagaacagtatcaaggtaacgtgtgtc

SEQ ID NO: 150747 - DNA, 71 bp, Homo sapiens
ataaaaagaagggcttctccatgccgggattcctgtttaagaacagtatcaaggtaacgtgtgtctctgtg

SEQ ID NO: 150748 - DNA, 71 bp, Homo sapiens
ttttttttaaggtgagttgcctttgcctggaggaaaatgtggaaaatgatccctgtaaatttgctctgaca

SEQ ID NO: 150749 - DNA, 74 bp, Homo sapiens
tttaaggtgagttgcctttgcctggaggaaaatgtggaaaatgatccctgtaaatttgctctgacatcgaggac

SEQ ID NO: 150750 - DNA, 74 bp, Homo sapiens
ctttgcctggaggaaaatgtggaaaatgatccctgtaaatttgctctgacatcgaggacgggtgacgtggtaga

SEQ ID NO: 150751 - DNA, 73 bp, Homo sapiens
aggaaaatgtggaaaatgatccctgtaaatttgctctgacatcgaggacgggtgacgtggtagagaccttcat

SEQ ID NO: 150752 - DNA, 75 bp, Homo sapiens
aatgtggaaaatgatccctgtaaatttgctctgacatcgaggacgggtgacgtggtagagaccttcattttgcat

SEQ ID NO: 150753 - DNA, 78 bp, Homo sapiens
atgatccctgtaaatttgctctgacatcgaggacgggtgacgtggtagagaccttcattttgcattcatctagtccaa

SEQ ID NO: 150754 - DNA, 77 bp, Homo sapiens
atttgctctgacatcgaggacgggtgacgtggtagagaccttcattttgcattcatctagtccaagtgtccggcaaa

SEQ ID NO: 150755 - DNA, 75 bp, Homo sapiens
acatcgaggacgggtgacgtggtagagaccttcattttgcattcatctagtccaagtgtccggcaaacttggatc

SEQ ID NO: 150756 - DNA, 77 bp, Homo sapiens
ggtgacgtggtagagaccttcattttgcattcatctagtccaagtgtccggcaaacttggatccatgaaatcaacca

SEQ ID NO: 150757 - DNA, 76 bp, Homo sapiens
tagagaccttcattttgcattcatctagtccaagtgtccggcaaacttggatccatgaaatcaaccaaattttaga

SEQ ID NO: 150758 - DNA, 73 bp, Homo sapiens
accttcattttgcattcatctagtccaagtgtccggcaaacttggatccatgaaatcaaccaaattttagaaa

SEQ ID NO: 150759 - DNA, 72 bp, Homo sapiens
tcatctagtccaagtgtccggcaaacttggatccatgaaatcaaccaaattttagaaaaccagcgcaatttt

SEQ ID NO: 150760 - DNA, 69 bp, Homo sapiens
tccaagtgtccggcaaacttggatccatgaaatcaaccaaattttagaaaaccagcgcaattttttaaa

SEQ ID NO: 150761 - DNA, 68 bp, Homo sapiens
gtccggcaaacttggatccatgaaatcaaccaaattttagaaaaccagcgcaattttttaaatggtaa

SEQ ID NO: 150762 - DNA, 70 bp, Homo sapiens
cttggatccatgaaatcaaccaaattttagaaaaccagcgcaattttttaaatggtaatgtgtgttctgt

SEQ ID NO: 150763 - DNA, 71 bp, Homo sapiens
tcaaccaaattttagaaaaccagcgcaattttttaaatggtaatgtgtgttctgttactagatgtgtgctt

SEQ ID NO: 150764 - DNA, 77 bp, Homo sapiens
ctccttggcgccctgacccagtctctcccgctgtcttgtcttacagccttgacatcgccaatcgagtaccagaggaa

SEQ ID NO: 150765 - DNA, 76 bp, Homo sapiens
ccctgacccagtctctcccgctgtcttgtcttacagccttgacatcgccaatcgagtaccagaggaaccacagcgg

SEQ ID NO: 150766 - DNA, 75 bp, Homo sapiens
acccagtctctcccgctgtcttgtcttacagccttgacatcgccaatcgagtaccagaggaaccacagcgggggc

SEQ ID NO: 150767 - DNA, 75 bp, Homo sapiens
tcccgctgtcttgtcttacagccttgacatcgccaatcgagtaccagaggaaccacagcgggggcggcggcggcg

SEQ ID NO: 150768 - DNA, 70 bp, Homo sapiens
cggcggcggcagcgggggcagcggcgggggtgggggcagcggcggcggcggggcccccagtggcggcagc

SEQ ID NO: 150769 - DNA, 70 bp, Homo sapiens
agcgggggcagcggcgggggtgggggcagcggcggcggcggggcccccagtggcggcagcggccacagtg

SEQ ID NO: 150770 - DNA, 71 bp, Homo sapiens
ggcagcggcgggggtgggggcagcggcggcggcggggcccccagtggcggcagcggccacagtggcggccc

SEQ ID NO: 150771 - DNA, 74 bp, Homo sapiens
gggtgggggcagcggcggcggcggggcccccagtggcggcagcggccacagtggcggccccagcagctgcggcg

SEQ ID NO: 150772 - DNA, 76 bp, Homo sapiens
ggcggcggcggggcccccagtggcggcagcggccacagtggcggccccagcagctgcggcggcgcccccagcacga

SEQ ID NO: 150773 - DNA, 78 bp, Homo sapiens
gggcccccagtggcggcagcggccacagtggcggccccagcagctgcggcggcgcccccagcacgagcaggagccggc

SEQ ID NO: 150774 - DNA, 79 bp, Homo sapiens
tggcggcagcggccacagtggcggccccagcagctgcggcggcgcccccagcacgagcaggagccggccctcccggatc

SEQ ID NO: 150775 - DNA, 75 bp, Homo sapiens
agcggccacagtggcggccccagcagctgcggcggcgcccccagcacgagcaggagccggccctcccggatcccc

SEQ ID NO: 150776 - DNA, 75 bp, Homo sapiens
agtggcggccccagcagctgcggcggcgcccccagcacgagcaggagccggccctcccggatcccccagcctgtc

SEQ ID NO: 150777 - DNA, 74 bp, Homo sapiens
agcagctgcggcggcgcccccagcacgagcaggagccggccctcccggatcccccagcctgtccgacaccaccc

SEQ ID NO: 150778 - DNA, 69 bp, Homo sapiens
cggcggcgcccccagcacgagcaggagccggccctcccggatcccccagcctgtccgacaccacccccc

SEQ ID NO: 150779 - DNA, 70 bp, Homo sapiens
ccccagcacgagcaggagccggccctcccggatcccccagcctgtccgacaccacccccccgtgctggtc

SEQ ID NO: 150780 - DNA, 71 bp, Homo sapiens
agcacgagcaggagccggccctcccggatcccccagcctgtccgacaccacccccccgtgctggtctcctc

SEQ ID NO: 150781 - DNA, 72 bp, Homo sapiens
acgagcaggagccggccctcccggatcccccagcctgtccgacaccacccccccgtgctggtctcctctgca

SEQ ID NO: 150782 - DNA, 72 bp, Homo sapiens
agccggccctcccggatcccccagcctgtccgacaccacccccccgtgctggtctcctctgcagcctcgagc

SEQ ID NO: 150783 - DNA, 74 bp, Homo sapiens
cctcccggatcccccagcctgtccgacaccacccccccgtgctggtctcctctgcagcctcgagccaggcagag

SEQ ID NO: 150784 - DNA, 79 bp, Homo sapiens
gatcccccagcctgtccgacaccacccccccgtgctggtctcctctgcagcctcgagccaggcagaggcagacaagatg

SEQ ID NO: 150785 - DNA, 80 bp, Homo sapiens
tgtccgacaccacccccccgtgctggtctcctctgcagcctcgagccaggcagaggcagacaagatgtcaggtacgtcca

SEQ ID NO: 150786 - DNA, 77 bp, Homo sapiens
cccgtgctggtctcctctgcagcctcgagccaggcagaggcagacaagatgtcaggtacgtccacccccgggccctc

SEQ ID NO: 150787 - DNA, 73 bp, Homo sapiens
agcctcgagccaggcagaggcagacaagatgtcaggtacgtccacccccgggccctccctgcctccccctggc

SEQ ID NO: 150788 - DNA, 71 bp, Homo sapiens
ccaggcagaggcagacaagatgtcaggtacgtccacccccgggccctccctgcctccccctggcgcggccc

SEQ ID NO: 150789 - DNA, 68 bp, Homo sapiens
aggcagacaagatgtcaggtacgtccacccccgggccctccctgcctccccctggcgcggcccccgag

SEQ ID NO: 150790 - DNA, 65 bp, Homo sapiens
atgtcaggtacgtccacccccgggccctccctgcctccccctggcgcggcccccgaggccggccc

SEQ ID NO: 150791 - DNA, 68 bp, Homo sapiens
ccgggccctccctgcctccccctggcgcggcccccgaggccggccccagcgcgcccagcaggcggccc

SEQ ID NO: 150792 - DNA, 70 bp, Homo sapiens
tgcctccccctggcgcggcccccgaggccggccccagcgcgcccagcaggcggccccccggcgcggacgc

SEQ ID NO: 150793 - DNA, 68 bp, Homo sapiens
cctggcgcggcccccgaggccggccccagcgcgcccagcaggcggccccccggcgcggacgccgaggg

SEQ ID NO: 150794 - DNA, 71 bp, Homo sapiens
cccagcgcgcccagcaggcggccccccggcgcggacgccgaggggtccgagcgagaagcggagccgatccc

SEQ ID NO: 150795 - DNA, 71 bp, Homo sapiens
cagcaggcggccccccggcgcggacgccgaggggtccgagcgagaagcggagccgatccccaagatgaagg

SEQ ID NO: 150796 - DNA, 72 bp, Homo sapiens
cggacgccgaggggtccgagcgagaagcggagccgatccccaagatgaaggtgctggagagccccaggaaag

SEQ ID NO: 150797 - DNA, 73 bp, Homo sapiens
aggggtccgagcgagaagcggagccgatccccaagatgaaggtgctggagagccccaggaaaggcgccgcgaa

SEQ ID NO: 150798 - DNA, 73 bp, Homo sapiens
agcgagaagcggagccgatccccaagatgaaggtgctggagagccccaggaaaggcgccgcgaacgcctcggg

SEQ ID NO: 150799 - DNA, 73 bp, Homo sapiens
agccgatccccaagatgaaggtgctggagagccccaggaaaggcgccgcgaacgcctcggggtcgagcccaga

SEQ ID NO: 150800 - DNA, 72 bp, Homo sapiens
atccccaagatgaaggtgctggagagccccaggaaaggcgccgcgaacgcctcggggtcgagcccagacgcc

SEQ ID NO: 150801 - DNA, 69 bp, Homo sapiens
aaggtgctggagagccccaggaaaggcgccgcgaacgcctcggggtcgagcccagacgcccccgccaag

SEQ ID NO: 150802 - DNA, 71 bp, Homo sapiens
gccccaggaaaggcgccgcgaacgcctcggggtcgagcccagacgcccccgccaaggacgcgcgcgctagc

SEQ ID NO: 150803 - DNA, 70 bp, Homo sapiens
aggaaaggcgccgcgaacgcctcggggtcgagcccagacgcccccgccaaggacgcgcgcgctagcctgg

SEQ ID NO: 150804 - DNA, 72 bp, Homo sapiens
ctcggggtcgagcccagacgcccccgccaaggacgcgcgcgctagcctgggcaccctgccgcttgggaagcc

SEQ ID NO: 150805 - DNA, 70 bp, Homo sapiens
agcccagacgcccccgccaaggacgcgcgcgctagcctgggcaccctgccgcttgggaagccccgggccg

SEQ ID NO: 150806 - DNA, 72 bp, Homo sapiens
ctagcctgggcaccctgccgcttgggaagccccgggccggggccgcttcgccgctgaactcgccgctctcca

SEQ ID NO: 150807 - DNA, 72 bp, Homo sapiens
gggccggggccgcttcgccgctgaactcgccgctctccagcgcggtcccttctctcggcaaggagcccttcc

SEQ ID NO: 150808 - DNA, 72 bp, Homo sapiens
gggccgcttcgccgctgaactcgccgctctccagcgcggtcccttctctcggcaaggagcccttccccccca

SEQ ID NO: 150809 - DNA, 74 bp, Homo sapiens
ctgaactcgccgctctccagcgcggtcccttctctcggcaaggagcccttcccccccagcagccccctgcagaa

SEQ ID NO: 150810 - DNA, 72 bp, Homo sapiens
tcgccgctctccagcgcggtcccttctctcggcaaggagcccttcccccccagcagccccctgcagaagggg

SEQ ID NO: 150811 - DNA, 70 bp, Homo sapiens
gcggtcccttctctcggcaaggagcccttcccccccagcagccccctgcagaaggggggctccttctgga

SEQ ID NO: 150812 - DNA, 72 bp, Homo sapiens
cttctctcggcaaggagcccttcccccccagcagccccctgcagaaggggggctccttctggagctccatcc

SEQ ID NO: 150813 - DNA, 69 bp, Homo sapiens
aaggagcccttcccccccagcagccccctgcagaaggggggctccttctggagctccatccccgcctcc

SEQ ID NO: 150814 - DNA, 70 bp, Homo sapiens
ccccccagcagccccctgcagaaggggggctccttctggagctccatccccgcctcccccgccagccgac

SEQ ID NO: 150815 - DNA, 67 bp, Homo sapiens
gggctccttctggagctccatccccgcctcccccgccagccgacccggctccttcaccttcccgggg

SEQ ID NO: 150816 - DNA, 69 bp, Homo sapiens
tggagctccatccccgcctcccccgccagccgacccggctccttcaccttcccgggggacagcgactcc

SEQ ID NO: 150817 - DNA, 70 bp, Homo sapiens
cgcctcccccgccagccgacccggctccttcaccttcccgggggacagcgactccctccagcggcagaca

SEQ ID NO: 150818 - DNA, 70 bp, Homo sapiens
ccgccagccgacccggctccttcaccttcccgggggacagcgactccctccagcggcagacaccccgcca

SEQ ID NO: 150819 - DNA, 68 bp, Homo sapiens
acccggctccttcaccttcccgggggacagcgactccctccagcggcagacaccccgccacgcggccc

SEQ ID NO: 150820 - DNA, 71 bp, Homo sapiens
cttcaccttcccgggggacagcgactccctccagcggcagacaccccgccacgcggcccctggcaaggata

SEQ ID NO: 150821 - DNA, 78 bp, Homo sapiens
ggggacagcgactccctccagcggcagacaccccgccacgcggcccctggcaaggatactgaccgcatgagcacgtgc

SEQ ID NO: 150822 - DNA, 78 bp, Homo sapiens
actccctccagcggcagacaccccgccacgcggcccctggcaaggatactgaccgcatgagcacgtgctcctcggcca

SEQ ID NO: 150823 - DNA, 82 bp, Homo sapiens
acgcggcccctggcaaggatactgaccgcatgagcacgtgctcctcggccagcgagcagtccgtgcagtccacccagagcaa

SEQ ID NO: 150824 - DNA, 81 bp, Homo sapiens
ctggcaaggatactgaccgcatgagcacgtgctcctcggccagcgagcagtccgtgcagtccacccagagcaacggggtaa

SEQ ID NO: 150825 - DNA, 80 bp, Homo sapiens
atactgaccgcatgagcacgtgctcctcggccagcgagcagtccgtgcagtccacccagagcaacggggtaagcgcgtcg

SEQ ID NO: 150826 - DNA, 73 bp, Homo sapiens
tcctcggccagcgagcagtccgtgcagtccacccagagcaacggggtaagcgcgtcggggggcccgcgccctc

SEQ ID NO: 150827 - DNA, 71 bp, Homo sapiens
ccagcgagcagtccgtgcagtccacccagagcaacggggtaagcgcgtcggggggcccgcgccctcccgcc

SEQ ID NO: 150828 - DNA, 68 bp, Homo sapiens
gtccgtgcagtccacccagagcaacggggtaagcgcgtcggggggcccgcgccctcccgcccccctgc

SEQ ID NO: 150829 - DNA, 67 bp, Homo sapiens
tccacccagagcaacggggtaagcgcgtcggggggcccgcgccctcccgcccccctgcctctgtccc

SEQ ID NO: 150830 - DNA, 66 bp, Homo sapiens
aacggggtaagcgcgtcggggggcccgcgccctcccgcccccctgcctctgtcccgccagctctaa

SEQ ID NO: 150831 - DNA, 68 bp, Homo sapiens
aagcgcgtcggggggcccgcgccctcccgcccccctgcctctgtcccgccagctctaaacgccaccgc

SEQ ID NO: 150832 - DNA, 71 bp, Homo sapiens
cccgcgccctcccgcccccctgcctctgtcccgccagctctaaacgccaccgcggctgttctcactaactc

SEQ ID NO: 150833 - DNA, 77 bp, Homo sapiens
tgcctctgtcccgccagctctaaacgccaccgcggctgttctcactaactcggctgcccagcgctctccgccgcccg

SEQ ID NO: 150834 - DNA, 76 bp, Homo sapiens
tgtcccgccagctctaaacgccaccgcggctgttctcactaactcggctgcccagcgctctccgccgcccgttgcg

SEQ ID NO: 150835 - DNA, 75 bp, Homo sapiens
agctctaaacgccaccgcggctgttctcactaactcggctgcccagcgctctccgccgcccgttgcggcctctac

SEQ ID NO: 150836 - DNA, 74 bp, Homo sapiens
ccaccgcggctgttctcactaactcggctgcccagcgctctccgccgcccgttgcggcctctacctgggaccag

SEQ ID NO: 150837 - DNA, 73 bp, Homo sapiens
taactcggctgcccagcgctctccgccgcccgttgcggcctctacctgggaccaggctaaccctcctgcgggc

SEQ ID NO: 150838 - DNA, 70 bp, Homo sapiens
agcgctctccgccgcccgttgcggcctctacctgggaccaggctaaccctcctgcgggccggcccacggc

SEQ ID NO: 150839 - DNA, 68 bp, Homo sapiens
ccgcccgttgcggcctctacctgggaccaggctaaccctcctgcgggccggcccacggcgctactaac

SEQ ID NO: 150840 - DNA, 69 bp, Homo sapiens
gttgcggcctctacctgggaccaggctaaccctcctgcgggccggcccacggcgctactaactactcct

SEQ ID NO: 150841 - DNA, 70 bp, Homo sapiens
ctgggaccaggctaaccctcctgcgggccggcccacggcgctactaactactccttgctttgttcgtgtc

SEQ ID NO: 150842 - DNA, 70 bp, Homo sapiens
aggctaaccctcctgcgggccggcccacggcgctactaactactccttgctttgttcgtgtcttctaata

SEQ ID NO: 150843 - DNA, 74 bp, Homo sapiens
ctgcgggccggcccacggcgctactaactactccttgctttgttcgtgtcttctaataagagcaagccgatcat

SEQ ID NO: 150844 - DNA, 75 bp, Homo sapiens
gcccacggcgctactaactactccttgctttgttcgtgtcttctaataagagcaagccgatcattaaccttctca

SEQ ID NO: 150845 - DNA, 75 bp, Homo sapiens
ctactaactactccttgctttgttcgtgtcttctaataagagcaagccgatcattaaccttctcaacgcagcgtc

SEQ ID NO: 150846 - DNA, 73 bp, Homo sapiens
aactactccttgctttgttcgtgtcttctaataagagcaagccgatcattaaccttctcaacgcagcgtcttt

SEQ ID NO: 150847 - DNA, 73 bp, Homo sapiens
tttgttcgtgtcttctaataagagcaagccgatcattaaccttctcaacgcagcgtcttttggtttcttccat

SEQ ID NO: 150848 - DNA, 73 bp, Homo sapiens
gtgtcttctaataagagcaagccgatcattaaccttctcaacgcagcgtcttttggtttcttccatttccaac

SEQ ID NO: 150849 - DNA, 75 bp, Homo sapiens
ataagagcaagccgatcattaaccttctcaacgcagcgtcttttggtttcttccatttccaaccagcagaatatc

SEQ ID NO: 150850 - DNA, 68 bp, Homo sapiens
acgcagcgtcttttggtttcttccatttccaaccagcagaatatcttcttggaactttcttttttaac

SEQ ID NO: 150851 - DNA, 69 bp, Homo sapiens
tttccaaccagcagaatatcttcttggaactttcttttttaacctctgccttcctcacgcacctatttt

SEQ ID NO: 150852 - DNA, 69 bp, Homo sapiens
aaccagcagaatatcttcttggaactttcttttttaacctctgccttcctcacgcacctattttttgga

SEQ ID NO: 150853 - DNA, 64 bp, Homo sapiens
ttcttggaactttcttttttaacctctgccttcctcacgcacctattttttggagggttccttt

SEQ ID NO: 150854 - DNA, 67 bp, Homo sapiens
tttcttttttaacctctgccttcctcacgcacctattttttggagggttccttttccctgctctcta

SEQ ID NO: 150855 - DNA, 67 bp, Homo sapiens
cttcctcacgcacctattttttggagggttccttttccctgctctctacctcctgtttaaattgaaa

SEQ ID NO: 150856 - DNA, 66 bp, Homo sapiens
ttggagggttccttttccctgctctctacctcctgtttaaattgaaacctgtacactttaagcttt

SEQ ID NO: 150857 - DNA, 70 bp, Homo sapiens
ttccttttccctgctctctacctcctgtttaaattgaaacctgtacactttaagctttttgctcatcgct

SEQ ID NO: 150858 - DNA, 70 bp, Homo sapiens
ctctctacctcctgtttaaattgaaacctgtacactttaagctttttgctcatcgcttggttttgctctt

SEQ ID NO: 150859 - DNA, 70 bp, Homo sapiens
cctgtttaaattgaaacctgtacactttaagctttttgctcatcgcttggttttgctcttttatgcctta

SEQ ID NO: 150860 - DNA, 72 bp, Homo sapiens
ttgaaacctgtacactttaagctttttgctcatcgcttggttttgctcttttatgccttaaattatctttgc

SEQ ID NO: 150861 - DNA, 71 bp, Homo sapiens
gtacactttaagctttttgctcatcgcttggttttgctcttttatgccttaaattatctttgcggcatttt

SEQ ID NO: 150862 - DNA, 74 bp, Homo sapiens
tttaagctttttgctcatcgcttggttttgctcttttatgccttaaattatctttgcggcatttttgactcatc

SEQ ID NO: 150863 - DNA, 76 bp, Homo sapiens
tcatcgcttggttttgctcttttatgccttaaattatctttgcggcatttttgactcatctgctggggaagaccat

SEQ ID NO: 150864 - DNA, 75 bp, Homo sapiens
ttttgctcttttatgccttaaattatctttgcggcatttttgactcatctgctggggaagaccattccctcaaga

SEQ ID NO: 150865 - DNA, 75 bp, Homo sapiens
tttgcggcatttttgactcatctgctggggaagaccattccctcaagaaaacttccaacagcaactcaaagcaaa

SEQ ID NO: 150866 - DNA, 73 bp, Homo sapiens
atttttgactcatctgctggggaagaccattccctcaagaaaacttccaacagcaactcaaagcaaactaaga

SEQ ID NO: 150867 - DNA, 72 bp, Homo sapiens
atctgctggggaagaccattccctcaagaaaacttccaacagcaactcaaagcaaactaagatgaaaaaatg

SEQ ID NO: 150868 - DNA, 68 bp, Homo sapiens
aagaccattccctcaagaaaacttccaacagcaactcaaagcaaactaagatgaaaaaatggggggaa

SEQ ID NO: 150869 - DNA, 71 bp, Homo sapiens
tcaagaaaacttccaacagcaactcaaagcaaactaagatgaaaaaatggggggaaagaatctgtccactg

SEQ ID NO: 150870 - DNA, 69 bp, Homo sapiens
aaacttccaacagcaactcaaagcaaactaagatgaaaaaatggggggaaagaatctgtccactgggaa

SEQ ID NO: 150871 - DNA, 68 bp, Homo sapiens
aactcaaagcaaactaagatgaaaaaatggggggaaagaatctgtccactgggaacgctttacgtcac

SEQ ID NO: 150872 - DNA, 67 bp, Homo sapiens
aagcaaactaagatgaaaaaatggggggaaagaatctgtccactgggaacgctttacgtcaccgtgt

SEQ ID NO: 150873 - DNA, 71 bp, Homo sapiens
agatgaaaaaatggggggaaagaatctgtccactgggaacgctttacgtcaccgtgttgctctggaagaca

SEQ ID NO: 150874 - DNA, 76 bp, Homo sapiens
gggaaagaatctgtccactgggaacgctttacgtcaccgtgttgctctggaagacagagactgctctgggcacctg

SEQ ID NO: 150875 - DNA, 78 bp, Homo sapiens
agaatctgtccactgggaacgctttacgtcaccgtgttgctctggaagacagagactgctctgggcacctggcgaggc

SEQ ID NO: 150876 - DNA, 81 bp, Homo sapiens
actgggaacgctttacgtcaccgtgttgctctggaagacagagactgctctgggcacctggcgaggcggctctgcagtgca

SEQ ID NO: 150877 - DNA, 81 bp, Homo sapiens
ctttacgtcaccgtgttgctctggaagacagagactgctctgggcacctggcgaggcggctctgcagtgcaggctggggcc

SEQ ID NO: 150878 - DNA, 81 bp, Homo sapiens
accgtgttgctctggaagacagagactgctctgggcacctggcgaggcggctctgcagtgcaggctggggccggtccctgc

SEQ ID NO: 150879 - DNA, 82 bp, Homo sapiens
aagacagagactgctctgggcacctggcgaggcggctctgcagtgcaggctggggccggtccctgcggcctgctgggctctg

SEQ ID NO: 150880 - DNA, 80 bp, Homo sapiens
ctgctctgggcacctggcgaggcggctctgcagtgcaggctggggccggtccctgcggcctgctgggctctggcctcgtt

SEQ ID NO: 150881 - DNA, 80 bp, Homo sapiens
cacctggcgaggcggctctgcagtgcaggctggggccggtccctgcggcctgctgggctctggcctcgtttggcccatca

SEQ ID NO: 150882 - DNA, 83 bp, Homo sapiens
cagtgcaggctggggccggtccctgcggcctgctgggctctggcctcgtttggcccatcactcatgctgccgtctcaagcaca

SEQ ID NO: 150883 - DNA, 78 bp, Homo sapiens
tggggccggtccctgcggcctgctgggctctggcctcgtttggcccatcactcatgctgccgtctcaagcacaagggt

SEQ ID NO: 150884 - DNA, 81 bp, Homo sapiens
ggtccctgcggcctgctgggctctggcctcgtttggcccatcactcatgctgccgtctcaagcacaagggttgctgtggtg

SEQ ID NO: 150885 - DNA, 79 bp, Homo sapiens
tgctgggctctggcctcgtttggcccatcactcatgctgccgtctcaagcacaagggttgctgtggtgggttttccctc

SEQ ID NO: 150886 - DNA, 77 bp, Homo sapiens
tcgtttggcccatcactcatgctgccgtctcaagcacaagggttgctgtggtgggttttccctctgtttcctgcttc

SEQ ID NO: 150887 - DNA, 78 bp, Homo sapiens
atcactcatgctgccgtctcaagcacaagggttgctgtggtgggttttccctctgtttcctgcttcctcactgtccta

SEQ ID NO: 150888 - DNA, 73 bp, Homo sapiens
ttgctgtggtgggttttccctctgtttcctgcttcctcactgtcctacccacctgtttcctacagggcagatg

SEQ ID NO: 150889 - DNA, 72 bp, Homo sapiens
ttttccctctgtttcctgcttcctcactgtcctacccacctgtttcctacagggcagatggcctggcccgta

SEQ ID NO: 150890 - DNA, 76 bp, Homo sapiens
tcctcactgtcctacccacctgtttcctacagggcagatggcctggcccgtaacactttcctgaaggcatgcgtga

SEQ ID NO: 150891 - DNA, 76 bp, Homo sapiens
tcctacccacctgtttcctacagggcagatggcctggcccgtaacactttcctgaaggcatgcgtgagtgaataga

SEQ ID NO: 150892 - DNA, 78 bp, Homo sapiens
tgtttcctacagggcagatggcctggcccgtaacactttcctgaaggcatgcgtgagtgaatagaactgttctaatga

SEQ ID NO: 150893 - DNA, 77 bp, Homo sapiens
agggcagatggcctggcccgtaacactttcctgaaggcatgcgtgagtgaatagaactgttctaatgagtgtatgtt

SEQ ID NO: 150894 - DNA, 77 bp, Homo sapiens
agatggcctggcccgtaacactttcctgaaggcatgcgtgagtgaatagaactgttctaatgagtgtatgtttgaac

SEQ ID NO: 150895 - DNA, 75 bp, Homo sapiens
taacactttcctgaaggcatgcgtgagtgaatagaactgttctaatgagtgtatgtttgaacgctttataaattt

SEQ ID NO: 150896 - DNA, 74 bp, Homo sapiens
ctttcctgaaggcatgcgtgagtgaatagaactgttctaatgagtgtatgtttgaacgctttataaatttttaa

SEQ ID NO: 150897 - DNA, 70 bp, Homo sapiens
gtgaatagaactgttctaatgagtgtatgtttgaacgctttataaatttttaaatacatttctctaaaag

SEQ ID NO: 150898 - DNA, 71 bp, Homo sapiens
tgagtgtatgtttgaacgctttataaatttttaaatacatttctctaaaagggtctgtgtctctctttata

SEQ ID NO: 150899 - DNA, 67 bp, Homo sapiens
tttgaacgctttataaatttttaaatacatttctctaaaagggtctgtgtctctctttatattaaaa

SEQ ID NO: 150900 - DNA, 84 bp, Homo sapiens
tttcagttcctccctgcctttctctgtcttcatctgtccctctgcagagtgaaagcagcagcagtagcaacatctccaccatgt

SEQ ID NO: 150901 - DNA, 87 bp, Homo sapiens
tccctgcctttctctgtcttcatctgtccctctgcagagtgaaagcagcagcagtagcaacatctccaccatgttggtgacacacga

SEQ ID NO: 150902 - DNA, 86 bp, Homo sapiens
tttctctgtcttcatctgtccctctgcagagtgaaagcagcagcagtagcaacatctccaccatgttggtgacacacgattacacg

SEQ ID NO: 150903 - DNA, 87 bp, Homo sapiens
ttcatctgtccctctgcagagtgaaagcagcagcagtagcaacatctccaccatgttggtgacacacgattacacggcagtgaagga

SEQ ID NO: 150904 - DNA, 88 bp, Homo sapiens
tctgcagagtgaaagcagcagcagtagcaacatctccaccatgttggtgacacacgattacacggcagtgaaggaggatgagatcaac

SEQ ID NO: 150905 - DNA, 83 bp, Homo sapiens
aaagcagcagcagtagcaacatctccaccatgttggtgacacacgattacacggcagtgaaggaggatgagatcaacgtctac

SEQ ID NO: 150906 - DNA, 81 bp, Homo sapiens
cagtagcaacatctccaccatgttggtgacacacgattacacggcagtgaaggaggatgagatcaacgtctaccaaggaga

SEQ ID NO: 150907 - DNA, 78 bp, Homo sapiens
aacatctccaccatgttggtgacacacgattacacggcagtgaaggaggatgagatcaacgtctaccaaggagaggtc

SEQ ID NO: 150908 - DNA, 76 bp, Homo sapiens
atgttggtgacacacgattacacggcagtgaaggaggatgagatcaacgtctaccaaggagaggtcgttcaaattc

SEQ ID NO: 150909 - DNA, 77 bp, Homo sapiens
acacacgattacacggcagtgaaggaggatgagatcaacgtctaccaaggagaggtcgttcaaattctggccagcaa

SEQ ID NO: 150910 - DNA, 78 bp, Homo sapiens
attacacggcagtgaaggaggatgagatcaacgtctaccaaggagaggtcgttcaaattctggccagcaaccagcaga

SEQ ID NO: 150911 - DNA, 77 bp, Homo sapiens
agtgaaggaggatgagatcaacgtctaccaaggagaggtcgttcaaattctggccagcaaccagcagaacatgtttc

SEQ ID NO: 150912 - DNA, 77 bp, Homo sapiens
atgagatcaacgtctaccaaggagaggtcgttcaaattctggccagcaaccagcagaacatgtttctggtgttccga

SEQ ID NO: 150913 - DNA, 77 bp, Homo sapiens
taccaaggagaggtcgttcaaattctggccagcaaccagcagaacatgtttctggtgttccgagccgccactgacca

SEQ ID NO: 150914 - DNA, 77 bp, Homo sapiens
aggagaggtcgttcaaattctggccagcaaccagcagaacatgtttctggtgttccgagccgccactgaccagtgcc

SEQ ID NO: 150915 - DNA, 79 bp, Homo sapiens
gttcaaattctggccagcaaccagcagaacatgtttctggtgttccgagccgccactgaccagtgccccgcagctgagg

SEQ ID NO: 150916 - DNA, 79 bp, Homo sapiens
agcaaccagcagaacatgtttctggtgttccgagccgccactgaccagtgccccgcagctgagggctggattccaggct

SEQ ID NO: 150917 - DNA, 77 bp, Homo sapiens
agaacatgtttctggtgttccgagccgccactgaccagtgccccgcagctgagggctggattccaggctttgtcctg

SEQ ID NO: 150918 - DNA, 77 bp, Homo sapiens
atgtttctggtgttccgagccgccactgaccagtgccccgcagctgagggctggattccaggctttgtcctgggcca

SEQ ID NO: 150919 - DNA, 81 bp, Homo sapiens
tgttccgagccgccactgaccagtgccccgcagctgagggctggattccaggctttgtcctgggccacaccagtgcagtca

SEQ ID NO: 150920 - DNA, 79 bp, Homo sapiens
actgaccagtgccccgcagctgagggctggattccaggctttgtcctgggccacaccagtgcagtcatcgtggagaacc

SEQ ID NO: 150921 - DNA, 77 bp, Homo sapiens
agtgccccgcagctgagggctggattccaggctttgtcctgggccacaccagtgcagtcatcgtggagaacccggac

SEQ ID NO: 150922 - DNA, 76 bp, Homo sapiens
tgagggctggattccaggctttgtcctgggccacaccagtgcagtcatcgtggagaacccggacgggactctcaag

SEQ ID NO: 150923 - DNA, 77 bp, Homo sapiens
attccaggctttgtcctgggccacaccagtgcagtcatcgtggagaacccggacgggactctcaagtgagtgcttga

SEQ ID NO: 150924 - DNA, 76 bp, Homo sapiens
tttgtcctgggccacaccagtgcagtcatcgtggagaacccggacgggactctcaagtgagtgcttgacagtaacg

SEQ ID NO: 150925 - DNA, 77 bp, Homo sapiens
ccacaccagtgcagtcatcgtggagaacccggacgggactctcaagtgagtgcttgacagtaacggcgtcctggcag

SEQ ID NO: 150926 - DNA, 77 bp, Homo sapiens
ttggtgaatgttggaaaggcataatacccacagtgtgttcatttcccctaggaagtcaacatcttggcacacagcac

SEQ ID NO: 150927 - DNA, 73 bp, Homo sapiens
aaaggcataatacccacagtgtgttcatttcccctaggaagtcaacatcttggcacacagcactccgtttaag

SEQ ID NO: 150928 - DNA, 72 bp, Homo sapiens
ataatacccacagtgtgttcatttcccctaggaagtcaacatcttggcacacagcactccgtttaaggaaaa

SEQ ID NO: 150929 - DNA, 72 bp, Homo sapiens
agtgtgttcatttcccctaggaagtcaacatcttggcacacagcactccgtttaaggaaaaaatctgagaaa

SEQ ID NO: 150930 - DNA, 70 bp, Homo sapiens
ccctaggaagtcaacatcttggcacacagcactccgtttaaggaaaaaatctgagaaaaaagataaagac

SEQ ID NO: 150931 - DNA, 70 bp, Homo sapiens
aagtcaacatcttggcacacagcactccgtttaaggaaaaaatctgagaaaaaagataaagacggcaaaa

SEQ ID NO: 150932 - DNA, 68 bp, Homo sapiens
atcttggcacacagcactccgtttaaggaaaaaatctgagaaaaaagataaagacggcaaaagggaag

SEQ ID NO: 150933 - DNA, 66 bp, Homo sapiens
acagcactccgtttaaggaaaaaatctgagaaaaaagataaagacggcaaaagggaaggcaagtta

SEQ ID NO: 150934 - DNA, 65 bp, Homo sapiens
aaggaaaaaatctgagaaaaaagataaagacggcaaaagggaaggcaagttagagaacggttatc

SEQ ID NO: 150935 - DNA, 67 bp, Homo sapiens
aaaatctgagaaaaaagataaagacggcaaaagggaaggcaagttagagaacggttatcggaagtca

SEQ ID NO: 150936 - DNA, 65 bp, Homo sapiens
aaaaagataaagacggcaaaagggaaggcaagttagagaacggttatcggaagtcacgggaagga

SEQ ID NO: 150937 - DNA, 68 bp, Homo sapiens
aagacggcaaaagggaaggcaagttagagaacggttatcggaagtcacgggaaggactcagcaacaag

SEQ ID NO: 150938 - DNA, 70 bp, Homo sapiens
aagggaaggcaagttagagaacggttatcggaagtcacgggaaggactcagcaacaaggtatctgtgaag

SEQ ID NO: 150939 - DNA, 70 bp, Homo sapiens
aagttagagaacggttatcggaagtcacgggaaggactcagcaacaaggtatctgtgaaggtgtgttcgg

SEQ ID NO: 150940 - DNA, 70 bp, Homo sapiens
acggttatcggaagtcacgggaaggactcagcaacaaggtatctgtgaaggtgtgttcgggggtcttcag

SEQ ID NO: 150941 - DNA, 73 bp, Homo sapiens
aagtcacgggaaggactcagcaacaaggtatctgtgaaggtgtgttcgggggtcttcaggagtccgtgtcatc

SEQ ID NO: 150942 - DNA, 73 bp, Homo sapiens
aacaataattgtagccctggaatgaaaggaatacaccttaaagtagctcatttcagttaatgcttgtttgctg

SEQ ID NO: 150943 - DNA, 73 bp, Homo sapiens
ttgtagccctggaatgaaaggaatacaccttaaagtagctcatttcagttaatgcttgtttgctgtttccatt

SEQ ID NO: 150944 - DNA, 75 bp, Homo sapiens
aatgaaaggaatacaccttaaagtagctcatttcagttaatgcttgtttgctgtttccatttcagcttctcaatc

SEQ ID NO: 150945 - DNA, 75 bp, Homo sapiens
aatacaccttaaagtagctcatttcagttaatgcttgtttgctgtttccatttcagcttctcaatcccaactaca

SEQ ID NO: 150946 - DNA, 76 bp, Homo sapiens
taaagtagctcatttcagttaatgcttgtttgctgtttccatttcagcttctcaatcccaactacatttatgacgg

SEQ ID NO: 150947 - DNA, 75 bp, Homo sapiens
atttcagttaatgcttgtttgctgtttccatttcagcttctcaatcccaactacatttatgacggtgagttctgt

SEQ ID NO: 150948 - DNA, 74 bp, Homo sapiens
aatgcttgtttgctgtttccatttcagcttctcaatcccaactacatttatgacggtgagttctgttctttttc

SEQ ID NO: 150949 - DNA, 74 bp, Homo sapiens
tttccatttcagcttctcaatcccaactacatttatgacggtgagttctgttctttttcttctagtcctagaga

SEQ ID NO: 150950 - DNA, 76 bp, Homo sapiens
tttcagcttctcaatcccaactacatttatgacggtgagttctgttctttttcttctagtcctagagatgattcta

SEQ ID NO: 150951 - DNA, 73 bp, Homo sapiens
aatcccaactacatttatgacggtgagttctgttctttttcttctagtcctagagatgattctagacctgtgg

SEQ ID NO: 150952 - DNA, 74 bp, Homo sapiens
actacatttatgacggtgagttctgttctttttcttctagtcctagagatgattctagacctgtggggcatgtt

SEQ ID NO: 150953 - DNA, 76 bp, Homo sapiens
acggtgagttctgttctttttcttctagtcctagagatgattctagacctgtggggcatgtttcagagcacttgag

SEQ ID NO: 150954 - DNA, 74 bp, Homo sapiens
gaggagccagggctgatgggcctttaccgactcctttcccatgcagttcccccagaattcgtcattccattgag

SEQ ID NO: 150955 - DNA, 74 bp, Homo sapiens
agggctgatgggcctttaccgactcctttcccatgcagttcccccagaattcgtcattccattgagtgaggtca

SEQ ID NO: 150956 - DNA, 74 bp, Homo sapiens
atgggcctttaccgactcctttcccatgcagttcccccagaattcgtcattccattgagtgaggtcacgtgtga

SEQ ID NO: 150957 - DNA, 75 bp, Homo sapiens
accgactcctttcccatgcagttcccccagaattcgtcattccattgagtgaggtcacgtgtgagacaggggaga

SEQ ID NO: 150958 - DNA, 76 bp, Homo sapiens
atgcagttcccccagaattcgtcattccattgagtgaggtcacgtgtgagacaggggagaccgttgttcttagatg

SEQ ID NO: 150959 - DNA, 77 bp, Homo sapiens
cccagaattcgtcattccattgagtgaggtcacgtgtgagacaggggagaccgttgttcttagatgtcgagtctgtg

SEQ ID NO: 150960 - DNA, 77 bp, Homo sapiens
aattcgtcattccattgagtgaggtcacgtgtgagacaggggagaccgttgttcttagatgtcgagtctgtggccgc

SEQ ID NO: 150961 - DNA, 76 bp, Homo sapiens
attgagtgaggtcacgtgtgagacaggggagaccgttgttcttagatgtcgagtctgtggccgccccaaagcctca

SEQ ID NO: 150962 - DNA, 73 bp, Homo sapiens
aggtcacgtgtgagacaggggagaccgttgttcttagatgtcgagtctgtggccgccccaaagcctcaattac

SEQ ID NO: 150963 - DNA, 71 bp, Homo sapiens
agacaggggagaccgttgttcttagatgtcgagtctgtggccgccccaaagcctcaattacctggaagggc

SEQ ID NO: 150964 - DNA, 71 bp, Homo sapiens
accgttgttcttagatgtcgagtctgtggccgccccaaagcctcaattacctggaagggccctgaacacaa

SEQ ID NO: 150965 - DNA, 73 bp, Homo sapiens
ttcttagatgtcgagtctgtggccgccccaaagcctcaattacctggaagggccctgaacacaacaccttgaa

SEQ ID NO: 150966 - DNA, 72 bp, Homo sapiens
agtctgtggccgccccaaagcctcaattacctggaagggccctgaacacaacaccttgaacaacgatggtca

SEQ ID NO: 150967 - DNA, 74 bp, Homo sapiens
cgccccaaagcctcaattacctggaagggccctgaacacaacaccttgaacaacgatggtcactacagcatctc

SEQ ID NO: 150968 - DNA, 74 bp, Homo sapiens
aaagcctcaattacctggaagggccctgaacacaacaccttgaacaacgatggtcactacagcatctcctacag

SEQ ID NO: 150969 - DNA, 75 bp, Homo sapiens
ttacctggaagggccctgaacacaacaccttgaacaacgatggtcactacagcatctcctacaggtgagggaggc

SEQ ID NO: 150970 - DNA, 75 bp, Homo sapiens
ctgaacacaacaccttgaacaacgatggtcactacagcatctcctacaggtgagggaggcccactcctggtgggt

SEQ ID NO: 150971 - DNA, 74 bp, Homo sapiens
aacaccttgaacaacgatggtcactacagcatctcctacaggtgagggaggcccactcctggtgggtttcgctg

SEQ ID NO: 150972 - DNA, 83 bp, Homo sapiens
acgtgctcagcttttctgatgcgcagtgtgttcccatctgtgccgcagtgacctgggagaggccacgctgaagattgtgggcg

SEQ ID NO: 150973 - DNA, 82 bp, Homo sapiens
tttctgatgcgcagtgtgttcccatctgtgccgcagtgacctgggagaggccacgctgaagattgtgggcgtgaccacggaa

SEQ ID NO: 150974 - DNA, 82 bp, Homo sapiens
atgcgcagtgtgttcccatctgtgccgcagtgacctgggagaggccacgctgaagattgtgggcgtgaccacggaagatgac

SEQ ID NO: 150975 - DNA, 82 bp, Homo sapiens
tgttcccatctgtgccgcagtgacctgggagaggccacgctgaagattgtgggcgtgaccacggaagatgacggcatctaca

SEQ ID NO: 150976 - DNA, 85 bp, Homo sapiens
tgccgcagtgacctgggagaggccacgctgaagattgtgggcgtgaccacggaagatgacggcatctacacgtgcatcgctgtca

SEQ ID NO: 150977 - DNA, 83 bp, Homo sapiens
ctgggagaggccacgctgaagattgtgggcgtgaccacggaagatgacggcatctacacgtgcatcgctgtcaatgacatggg

SEQ ID NO: 150978 - DNA, 84 bp, Homo sapiens
agaggccacgctgaagattgtgggcgtgaccacggaagatgacggcatctacacgtgcatcgctgtcaatgacatgggttcagc

SEQ ID NO: 150979 - DNA, 84 bp, Homo sapiens
ctgaagattgtgggcgtgaccacggaagatgacggcatctacacgtgcatcgctgtcaatgacatgggttcagcctcatcgtcg

SEQ ID NO: 150980 - DNA, 85 bp, Homo sapiens
tgggcgtgaccacggaagatgacggcatctacacgtgcatcgctgtcaatgacatgggttcagcctcatcgtcggccagcctgag

SEQ ID NO: 150981 - DNA, 82 bp, Homo sapiens
aagatgacggcatctacacgtgcatcgctgtcaatgacatgggttcagcctcatcgtcggccagcctgagggtcctaggtaa

SEQ ID NO: 150982 - DNA, 83 bp, Homo sapiens
catctacacgtgcatcgctgtcaatgacatgggttcagcctcatcgtcggccagcctgagggtcctaggtaagcaccgtgcaa

SEQ ID NO: 150983 - DNA, 82 bp, Homo sapiens
tgcatcgctgtcaatgacatgggttcagcctcatcgtcggccagcctgagggtcctaggtaagcaccgtgcaacgaggattc

SEQ ID NO: 150984 - DNA, 79 bp, Homo sapiens
tcaatgacatgggttcagcctcatcgtcggccagcctgagggtcctaggtaagcaccgtgcaacgaggattctacgtga

SEQ ID NO: 150985 - DNA, 75 bp, Homo sapiens
atgggttcagcctcatcgtcggccagcctgagggtcctaggtaagcaccgtgcaacgaggattctacgtgaccca

SEQ ID NO: 150986 - DNA, 75 bp, Homo sapiens
agccttcttacccaagaagctccacgggaaacaagctcaggcaggtgctgttcttcttgcaggtccagggatgga

SEQ ID NO: 150987 - DNA, 78 bp, Homo sapiens
aagaagctccacgggaaacaagctcaggcaggtgctgttcttcttgcaggtccagggatggatgggatcatggtgacc

SEQ ID NO: 150988 - DNA, 78 bp, Homo sapiens
acgggaaacaagctcaggcaggtgctgttcttcttgcaggtccagggatggatgggatcatggtgacctggaaagaca

SEQ ID NO: 150989 - DNA, 79 bp, Homo sapiens
acaagctcaggcaggtgctgttcttcttgcaggtccagggatggatgggatcatggtgacctggaaagacaactttgac

SEQ ID NO: 150990 - DNA, 79 bp, Homo sapiens
tgctgttcttcttgcaggtccagggatggatgggatcatggtgacctggaaagacaactttgactccttctacagtgaa

SEQ ID NO: 150991 - DNA, 77 bp, Homo sapiens
ttcttcttgcaggtccagggatggatgggatcatggtgacctggaaagacaactttgactccttctacagtgaagtg

SEQ ID NO: 150992 - DNA, 77 bp, Homo sapiens
aggtccagggatggatgggatcatggtgacctggaaagacaactttgactccttctacagtgaagtggctgagcttg

SEQ ID NO: 150993 - DNA, 81 bp, Homo sapiens
atgggatcatggtgacctggaaagacaactttgactccttctacagtgaagtggctgagcttggcaggtatgatgcacaac

SEQ ID NO: 150994 - DNA, 79 bp, Homo sapiens
atggtgacctggaaagacaactttgactccttctacagtgaagtggctgagcttggcaggtatgatgcacaacccagaa

SEQ ID NO: 150995 - DNA, 77 bp, Homo sapiens
aagacaactttgactccttctacagtgaagtggctgagcttggcaggtatgatgcacaacccagaacgccttccgaa

SEQ ID NO: 150996 - DNA, 78 bp, Homo sapiens
aactttgactccttctacagtgaagtggctgagcttggcaggtatgatgcacaacccagaacgccttccgaaagagca

SEQ ID NO: 150997 - DNA, 79 bp, Homo sapiens
agacctcagcagcctctgcaaatggtccccctgacatattttacaggggcagattctctgtcgttaagaaatgtgatca

SEQ ID NO: 150998 - DNA, 76 bp, Homo sapiens
agcctctgcaaatggtccccctgacatattttacaggggcagattctctgtcgttaagaaatgtgatcagaaagga

SEQ ID NO: 150999 - DNA, 72 bp, Homo sapiens
aaatggtccccctgacatattttacaggggcagattctctgtcgttaagaaatgtgatcagaaaggaaccaa

SEQ ID NO: 151000 - DNA, 78 bp, Homo sapiens
ctgacatattttacaggggcagattctctgtcgttaagaaatgtgatcagaaaggaaccaagcgagcagtggccacta

SEQ ID NO: 151001 - DNA, 75 bp, Homo sapiens
atattttacaggggcagattctctgtcgttaagaaatgtgatcagaaaggaaccaagcgagcagtggccactaag

SEQ ID NO: 151002 - DNA, 75 bp, Homo sapiens
agattctctgtcgttaagaaatgtgatcagaaaggaaccaagcgagcagtggccactaagtttgtgaacaagaag

SEQ ID NO: 151003 - DNA, 77 bp, Homo sapiens
tctgtcgttaagaaatgtgatcagaaaggaaccaagcgagcagtggccactaagtttgtgaacaagaagttgatgaa

SEQ ID NO: 151004 - DNA, 77 bp, Homo sapiens
aagaaatgtgatcagaaaggaaccaagcgagcagtggccactaagtttgtgaacaagaagttgatgaagcgcgacca

SEQ ID NO: 151005 - DNA, 76 bp, Homo sapiens
agaaaggaaccaagcgagcagtggccactaagtttgtgaacaagaagttgatgaagcgcgaccaggtcacccatga

SEQ ID NO: 151006 - DNA, 79 bp, Homo sapiens
aaccaagcgagcagtggccactaagtttgtgaacaagaagttgatgaagcgcgaccaggtcacccatgagcttggcatc

SEQ ID NO: 151007 - DNA, 81 bp, Homo sapiens
agtggccactaagtttgtgaacaagaagttgatgaagcgcgaccaggtcacccatgagcttggcatcctgcagagcctcca

SEQ ID NO: 151008 - DNA, 80 bp, Homo sapiens
ctaagtttgtgaacaagaagttgatgaagcgcgaccaggtcacccatgagcttggcatcctgcagagcctccagcacccc

SEQ ID NO: 151009 - DNA, 81 bp, Homo sapiens
aacaagaagttgatgaagcgcgaccaggtcacccatgagcttggcatcctgcagagcctccagcaccccctgcttgtcggc

SEQ ID NO: 151010 - DNA, 83 bp, Homo sapiens
ttgatgaagcgcgaccaggtcacccatgagcttggcatcctgcagagcctccagcaccccctgcttgtcggcctcctcgacac

SEQ ID NO: 151011 - DNA, 79 bp, Homo sapiens
accaggtcacccatgagcttggcatcctgcagagcctccagcaccccctgcttgtcggcctcctcgacacctttgagac

SEQ ID NO: 151012 - DNA, 79 bp, Homo sapiens
atgagcttggcatcctgcagagcctccagcaccccctgcttgtcggcctcctcgacacctttgagacccccaccagcta

SEQ ID NO: 151013 - DNA, 78 bp, Homo sapiens
cttggcatcctgcagagcctccagcaccccctgcttgtcggcctcctcgacacctttgagacccccaccagctacatc

SEQ ID NO: 151014 - DNA, 74 bp, Homo sapiens
agcctccagcaccccctgcttgtcggcctcctcgacacctttgagacccccaccagctacatcctggtcttaga

SEQ ID NO: 151015 - DNA, 72 bp, Homo sapiens
accccctgcttgtcggcctcctcgacacctttgagacccccaccagctacatcctggtcttagaaatgtgcg

SEQ ID NO: 151016 - DNA, 74 bp, Homo sapiens
cttgtcggcctcctcgacacctttgagacccccaccagctacatcctggtcttagaaatgtgcgtacacacctg

SEQ ID NO: 151017 - DNA, 73 bp, Homo sapiens
cctcctcgacacctttgagacccccaccagctacatcctggtcttagaaatgtgcgtacacacctggccttcc

SEQ ID NO: 151018 - DNA, 74 bp, Homo sapiens
acctttgagacccccaccagctacatcctggtcttagaaatgtgcgtacacacctggccttccctctgcccagc

SEQ ID NO: 151019 - DNA, 78 bp, Homo sapiens
ttcaaagcaaatcgcatcataacagtcacccgctcctgcctctttagggctgaccagggtcgcctcctggactgcgtg

SEQ ID NO: 151020 - DNA, 78 bp, Homo sapiens
aaatcgcatcataacagtcacccgctcctgcctctttagggctgaccagggtcgcctcctggactgcgtggtgcgatg

SEQ ID NO: 151021 - DNA, 75 bp, Homo sapiens
ataacagtcacccgctcctgcctctttagggctgaccagggtcgcctcctggactgcgtggtgcgatggggaagc

SEQ ID NO: 151022 - DNA, 75 bp, Homo sapiens
acccgctcctgcctctttagggctgaccagggtcgcctcctggactgcgtggtgcgatggggaagcctcactgaa

SEQ ID NO: 151023 - DNA, 75 bp, Homo sapiens
cctctttagggctgaccagggtcgcctcctggactgcgtggtgcgatggggaagcctcactgaagggaagatcag

SEQ ID NO: 151024 - DNA, 76 bp, Homo sapiens
ctgaccagggtcgcctcctggactgcgtggtgcgatggggaagcctcactgaagggaagatcagggcgcacctggg

SEQ ID NO: 151025 - DNA, 76 bp, Homo sapiens
tcgcctcctggactgcgtggtgcgatggggaagcctcactgaagggaagatcagggcgcacctgggggaggttctg

SEQ ID NO: 151026 - DNA, 77 bp, Homo sapiens
tggactgcgtggtgcgatggggaagcctcactgaagggaagatcagggcgcacctgggggaggttctggaagctgtc

SEQ ID NO: 151027 - DNA, 74 bp, Homo sapiens
cgatggggaagcctcactgaagggaagatcagggcgcacctgggggaggttctggaagctgtccggtacctgca

SEQ ID NO: 151028 - DNA, 75 bp, Homo sapiens
aagcctcactgaagggaagatcagggcgcacctgggggaggttctggaagctgtccggtacctgcacaactgcag

SEQ ID NO: 151029 - DNA, 77 bp, Homo sapiens
actgaagggaagatcagggcgcacctgggggaggttctggaagctgtccggtacctgcacaactgcaggatagcaca

SEQ ID NO: 151030 - DNA, 76 bp, Homo sapiens
atcagggcgcacctgggggaggttctggaagctgtccggtacctgcacaactgcaggatagcacacctggacctaa

SEQ ID NO: 151031 - DNA, 72 bp, Homo sapiens
acctgggggaggttctggaagctgtccggtacctgcacaactgcaggatagcacacctggacctaaaggttg

SEQ ID NO: 151032 - DNA, 73 bp, Homo sapiens
aggttctggaagctgtccggtacctgcacaactgcaggatagcacacctggacctaaaggttggtgaggcccc

SEQ ID NO: 151033 - DNA, 74 bp, Homo sapiens
aagctgtccggtacctgcacaactgcaggatagcacacctggacctaaaggttggtgaggccccgggcaggtga

SEQ ID NO: 151034 - DNA, 79 bp, Homo sapiens
taagcttaagattggatggtctgaaaatgacagttgtattctgatttccagcctgagaatatcctggtggatgagagtt

SEQ ID NO: 151035 - DNA, 80 bp, Homo sapiens
ttggatggtctgaaaatgacagttgtattctgatttccagcctgagaatatcctggtggatgagagtttagccaagccaa

SEQ ID NO: 151036 - DNA, 77 bp, Homo sapiens
aaaatgacagttgtattctgatttccagcctgagaatatcctggtggatgagagtttagccaagccaaccatcaaac

SEQ ID NO: 151037 - DNA, 79 bp, Homo sapiens
ttgtattctgatttccagcctgagaatatcctggtggatgagagtttagccaagccaaccatcaaactggctgactttg

SEQ ID NO: 151038 - DNA, 79 bp, Homo sapiens
atttccagcctgagaatatcctggtggatgagagtttagccaagccaaccatcaaactggctgactttggagatgctgt

SEQ ID NO: 151039 - DNA, 81 bp, Homo sapiens
agaatatcctggtggatgagagtttagccaagccaaccatcaaactggctgactttggagatgctgttcagctcaacacga

SEQ ID NO: 151040 - DNA, 80 bp, Homo sapiens
atgagagtttagccaagccaaccatcaaactggctgactttggagatgctgttcagctcaacacgacctactacatccac

SEQ ID NO: 151041 - DNA, 77 bp, Homo sapiens
aagccaaccatcaaactggctgactttggagatgctgttcagctcaacacgacctactacatccaccagttactggg

SEQ ID NO: 151042 - DNA, 77 bp, Homo sapiens
atcaaactggctgactttggagatgctgttcagctcaacacgacctactacatccaccagttactggggaaccctga

SEQ ID NO: 151043 - DNA, 77 bp, Homo sapiens
tgactttggagatgctgttcagctcaacacgacctactacatccaccagttactggggaaccctgaattcgcagccc

SEQ ID NO: 151044 - DNA, 77 bp, Homo sapiens
atgctgttcagctcaacacgacctactacatccaccagttactggggaaccctgaattcgcagcccctgaaatcatc

SEQ ID NO: 151045 - DNA, 75 bp, Homo sapiens
gttcagctcaacacgacctactacatccaccagttactggggaaccctgaattcgcagcccctgaaatcatcctc

SEQ ID NO: 151046 - DNA, 71 bp, Homo sapiens
acacgacctactacatccaccagttactggggaaccctgaattcgcagcccctgaaatcatcctcgggaac

SEQ ID NO: 151047 - DNA, 73 bp, Homo sapiens
tacatccaccagttactggggaaccctgaattcgcagcccctgaaatcatcctcgggaaccctgtctccctga

SEQ ID NO: 151048 - DNA, 71 bp, Homo sapiens
ttactggggaaccctgaattcgcagcccctgaaatcatcctcgggaaccctgtctccctgacctcggatac

SEQ ID NO: 151049 - DNA, 71 bp, Homo sapiens
aaccctgaattcgcagcccctgaaatcatcctcgggaaccctgtctccctgacctcggatacgtggagtgt

SEQ ID NO: 151050 - DNA, 77 bp, Homo sapiens
ttcgcagcccctgaaatcatcctcgggaaccctgtctccctgacctcggatacgtggagtgttggagtgctcacata

SEQ ID NO: 151051 - DNA, 74 bp, Homo sapiens
aatcatcctcgggaaccctgtctccctgacctcggatacgtggagtgttggagtgctcacatacgtacttctta

SEQ ID NO: 151052 - DNA, 73 bp, Homo sapiens
gtctccctgacctcggatacgtggagtgttggagtgctcacatacgtacttcttagtggcgtgtcccccttcc

SEQ ID NO: 151053 - DNA, 76 bp, Homo sapiens
ctgacctcggatacgtggagtgttggagtgctcacatacgtacttcttagtggcgtgtcccccttcctggatgaca

SEQ ID NO: 151054 - DNA, 76 bp, Homo sapiens
atacgtggagtgttggagtgctcacatacgtacttcttagtggcgtgtcccccttcctggatgacagtgtggaaga

SEQ ID NO: 151055 - DNA, 77 bp, Homo sapiens
gagtgctcacatacgtacttcttagtggcgtgtcccccttcctggatgacagtgtggaagagacctgcctgaacatt

SEQ ID NO: 151056 - DNA, 74 bp, Homo sapiens
atacgtacttcttagtggcgtgtcccccttcctggatgacagtgtggaagagacctgcctgaacatttgccgct

SEQ ID NO: 151057 - DNA, 75 bp, Homo sapiens
ttcttagtggcgtgtcccccttcctggatgacagtgtggaagagacctgcctgaacatttgccgcttagacttta

SEQ ID NO: 151058 - DNA, 77 bp, Homo sapiens
tcctggatgacagtgtggaagagacctgcctgaacatttgccgcttagactttagcttcccagatgactactttaaa

SEQ ID NO: 151059 - DNA, 75 bp, Homo sapiens
acagtgtggaagagacctgcctgaacatttgccgcttagactttagcttcccagatgactactttaaaggagtga

SEQ ID NO: 151060 - DNA, 74 bp, Homo sapiens
aagagacctgcctgaacatttgccgcttagactttagcttcccagatgactactttaaaggagtgagccagaag

SEQ ID NO: 151061 - DNA, 74 bp, Homo sapiens
tgaacatttgccgcttagactttagcttcccagatgactactttaaaggagtgagccagaaggccaaggagttc

SEQ ID NO: 151062 - DNA, 74 bp, Homo sapiens
tttgccgcttagactttagcttcccagatgactactttaaaggagtgagccagaaggccaaggagttcgtgtgc

SEQ ID NO: 151063 - DNA, 75 bp, Homo sapiens
agactttagcttcccagatgactactttaaaggagtgagccagaaggccaaggagttcgtgtgcttcctcctgca

SEQ ID NO: 151064 - DNA, 72 bp, Homo sapiens
actactttaaaggagtgagccagaaggccaaggagttcgtgtgcttcctcctgcaggaggaccccgccaagc

SEQ ID NO: 151065 - DNA, 76 bp, Homo sapiens
agtgagccagaaggccaaggagttcgtgtgcttcctcctgcaggaggaccccgccaagcgtccctcggctgcgctg

SEQ ID NO: 151066 - DNA, 76 bp, Homo sapiens
aggagttcgtgtgcttcctcctgcaggaggaccccgccaagcgtccctcggctgcgctggccctccaggagcagtg

SEQ ID NO: 151067 - DNA, 78 bp, Homo sapiens
ttcctcctgcaggaggaccccgccaagcgtccctcggctgcgctggccctccaggagcagtggctgcaggccggcaac

SEQ ID NO: 151068 - DNA, 78 bp, Homo sapiens
aggaggaccccgccaagcgtccctcggctgcgctggccctccaggagcagtggctgcaggccggcaacggcagaagca

SEQ ID NO: 151069 - DNA, 80 bp, Homo sapiens
gccaagcgtccctcggctgcgctggccctccaggagcagtggctgcaggccggcaacggcagaagcacgggcgtcctcga

SEQ ID NO: 151070 - DNA, 80 bp, Homo sapiens
tccctcggctgcgctggccctccaggagcagtggctgcaggccggcaacggcagaagcacgggcgtcctcgacacgtcca

SEQ ID NO: 151071 - DNA, 81 bp, Homo sapiens
tgcgctggccctccaggagcagtggctgcaggccggcaacggcagaagcacgggcgtcctcgacacgtccagactgacttc

SEQ ID NO: 151072 - DNA, 80 bp, Homo sapiens
caggagcagtggctgcaggccggcaacggcagaagcacgggcgtcctcgacacgtccagactgacttccttcattgagcg

SEQ ID NO: 151073 - DNA, 80 bp, Homo sapiens
tggctgcaggccggcaacggcagaagcacgggcgtcctcgacacgtccagactgacttccttcattgagcggcgcaaaca

SEQ ID NO: 151074 - DNA, 77 bp, Homo sapiens
agaagcacgggcgtcctcgacacgtccagactgacttccttcattgagcggcgcaaacaccagaatgatgttcgacc

SEQ ID NO: 151075 - DNA, 76 bp, Homo sapiens
acacgtccagactgacttccttcattgagcggcgcaaacaccagaatgatgttcgacctatccgtagcattaaaaa

SEQ ID NO: 151076 - DNA, 78 bp, Homo sapiens
ttccttcattgagcggcgcaaacaccagaatgatgttcgacctatccgtagcattaaaaactttctgcagagcaggct

SEQ ID NO: 151077 - DNA, 79 bp, Homo sapiens
gcgcaaacaccagaatgatgttcgacctatccgtagcattaaaaactttctgcagagcaggcttctgcctagagtttga

SEQ ID NO: 151078 - DNA, 77 bp, Homo sapiens
accagaatgatgttcgacctatccgtagcattaaaaactttctgcagagcaggcttctgcctagagtttgacctatc

SEQ ID NO: 151079 - DNA, 75 bp, Homo sapiens
atgttcgacctatccgtagcattaaaaactttctgcagagcaggcttctgcctagagtttgacctatccagaagt

SEQ ID NO: 151080 - DNA, 77 bp, Homo sapiens
tatccgtagcattaaaaactttctgcagagcaggcttctgcctagagtttgacctatccagaagttctttctcattc

SEQ ID NO: 151081 - DNA, 82 bp, Homo sapiens
tctgcagagcaggcttctgcctagagtttgacctatccagaagttctttctcattctctttcacctgccaatcagctgttaa

SEQ ID NO: 151082 - DNA, 78 bp, Homo sapiens
gcttctgcctagagtttgacctatccagaagttctttctcattctctttcacctgccaatcagctgttaatctgaatt

SEQ ID NO: 151083 - DNA, 78 bp, Homo sapiens
tagagtttgacctatccagaagttctttctcattctctttcacctgccaatcagctgttaatctgaattttcaagaga

SEQ ID NO: 151084 - DNA, 75 bp, Homo sapiens
acctatccagaagttctttctcattctctttcacctgccaatcagctgttaatctgaattttcaagagaaaacaa

SEQ ID NO: 151085 - DNA, 76 bp, Homo sapiens
agaagttctttctcattctctttcacctgccaatcagctgttaatctgaattttcaagagaaaacaagcaaacata

SEQ ID NO: 151086 - DNA, 81 bp, Homo sapiens
ttctcattctctttcacctgccaatcagctgttaatctgaattttcaagagaaaacaagcaaacataactgatcagctgcc

SEQ ID NO: 151087 - DNA, 80 bp, Homo sapiens
tttcacctgccaatcagctgttaatctgaattttcaagagaaaacaagcaaacataactgatcagctgccggtatgttca

SEQ ID NO: 151088 - DNA, 80 bp, Homo sapiens
taatctgaattttcaagagaaaacaagcaaacataactgatcagctgccggtatgttcatcgtgtgaaattgcattccaa

SEQ ID NO: 151089 - DNA, 80 bp, Homo sapiens
attttcaagagaaaacaagcaaacataactgatcagctgccggtatgttcatcgtgtgaaattgcattccaagtgagctg

SEQ ID NO: 151090 - DNA, 86 bp, Homo sapiens
aaacaagcaaacataactgatcagctgccggtatgttcatcgtgtgaaattgcattccaagtgagctgtgctcagcagtgcttgga

SEQ ID NO: 151091 - DNA, 89 bp, Homo sapiens
ggtatgttcatcgtgtgaaattgcattccaagtgagctgtgctcagcagtgcttggacacagagctgcaagctgcgctggggtggagga

SEQ ID NO: 151092 - DNA, 88 bp, Homo sapiens
tgtgaaattgcattccaagtgagctgtgctcagcagtgcttggacacagagctgcaagctgcgctggggtggaggaccgtcacttaca

SEQ ID NO: 151093 - DNA, 88 bp, Homo sapiens
attgcattccaagtgagctgtgctcagcagtgcttggacacagagctgcaagctgcgctggggtggaggaccgtcacttacactctgc

SEQ ID NO: 151094 - DNA, 86 bp, Homo sapiens
aagtgagctgtgctcagcagtgcttggacacagagctgcaagctgcgctggggtggaggaccgtcacttacactctgcccaaggca

SEQ ID NO: 151095 - DNA, 78 bp, Homo sapiens
gaggaccgtcacttacactctgcccaaggcagaggtcgcattgctgtatcacagtattttattcaggtttctgcaaaa

SEQ ID NO: 151096 - DNA, 77 bp, Homo sapiens
gtcacttacactctgcccaaggcagaggtcgcattgctgtatcacagtattttattcaggtttctgcaaaaaaataa

SEQ ID NO: 151097 - DNA, 61 bp, Homo sapiens
aaaaaataaaaagataacttttttaaacaaacatgaatagaattttgcaaatttaacgttt

SEQ ID NO: 151098 - DNA, 66 bp, Homo sapiens
aagataacttttttaaacaaacatgaatagaattttgcaaatttaacgttttcaagatttattcaa

SEQ ID NO: 151099 - DNA, 66 bp, Homo sapiens
ttttaaacaaacatgaatagaattttgcaaatttaacgttttcaagatttattcaaggaaacaaaa

SEQ ID NO: 151100 - DNA, 70 bp, Homo sapiens
acatgaatagaattttgcaaatttaacgttttcaagatttattcaaggaaacaaaatgcctatgttcaac

SEQ ID NO: 151101 - DNA, 69 bp, Homo sapiens
gaattttgcaaatttaacgttttcaagatttattcaaggaaacaaaatgcctatgttcaaccactggtg

SEQ ID NO: 151102 - DNA, 74 bp, Homo sapiens
tttcaagatttattcaaggaaacaaaatgcctatgttcaaccactggtgttaatgaacaaagatactgtgcgtc

SEQ ID NO: 151103 - DNA, 73 bp, Homo sapiens
atttattcaaggaaacaaaatgcctatgttcaaccactggtgttaatgaacaaagatactgtgcgtctctggg

SEQ ID NO: 151104 - DNA, 74 bp, Homo sapiens
aaacaaaatgcctatgttcaaccactggtgttaatgaacaaagatactgtgcgtctctggggaagacgcaccta

SEQ ID NO: 151105 - DNA, 76 bp, Homo sapiens
tatgttcaaccactggtgttaatgaacaaagatactgtgcgtctctggggaagacgcacctaggtggcggccactc

SEQ ID NO: 151106 - DNA, 76 bp, Homo sapiens
ttaatgaacaaagatactgtgcgtctctggggaagacgcacctaggtggcggccactcccatggccttgtctagga

SEQ ID NO: 151107 - DNA, 77 bp, Homo sapiens
acaaagatactgtgcgtctctggggaagacgcacctaggtggcggccactcccatggccttgtctaggactcagaga

SEQ ID NO: 151108 - DNA, 78 bp, Homo sapiens
tgtgcgtctctggggaagacgcacctaggtggcggccactcccatggccttgtctaggactcagagaccactcggctc

SEQ ID NO: 151109 - DNA, 77 bp, Homo sapiens
gggaagacgcacctaggtggcggccactcccatggccttgtctaggactcagagaccactcggctctgagcttccag

SEQ ID NO: 151110 - DNA, 82 bp, Homo sapiens
taggtggcggccactcccatggccttgtctaggactcagagaccactcggctctgagcttccaggcgcctcgtctgtgtgca

SEQ ID NO: 151111 - DNA, 82 bp, Homo sapiens
ccactcccatggccttgtctaggactcagagaccactcggctctgagcttccaggcgcctcgtctgtgtgcatctcacgccc

SEQ ID NO: 151112 - DNA, 83 bp, Homo sapiens
ttgtctaggactcagagaccactcggctctgagcttccaggcgcctcgtctgtgtgcatctcacgcccgacgtggcttctgaa

SEQ ID NO: 151113 - DNA, 83 bp, Homo sapiens
tgtctaggactcagagaccactcggctctgagcttccaggcgcctcgtctgtgtgcatctcacgcccgacgtggcttctgaaa

SEQ ID NO: 151114 - DNA, 84 bp, Homo sapiens
tcagagaccactcggctctgagcttccaggcgcctcgtctgtgtgcatctcacgcccgacgtggcttctgaaacgtgcattcaa

SEQ ID NO: 151115 - DNA, 81 bp, Homo sapiens
gaccactcggctctgagcttccaggcgcctcgtctgtgtgcatctcacgcccgacgtggcttctgaaacgtgcattcaacc

SEQ ID NO: 151116 - DNA, 80 bp, Homo sapiens
gctctgagcttccaggcgcctcgtctgtgtgcatctcacgcccgacgtggcttctgaaacgtgcattcaacctcaaactt

SEQ ID NO: 151117 - DNA, 79 bp, Homo sapiens
tctgagcttccaggcgcctcgtctgtgtgcatctcacgcccgacgtggcttctgaaacgtgcattcaacctcaaacttt

SEQ ID NO: 151118 - DNA, 77 bp, Homo sapiens
aggcgcctcgtctgtgtgcatctcacgcccgacgtggcttctgaaacgtgcattcaacctcaaacttttgcataaaa

SEQ ID NO: 151119 - DNA, 78 bp, Homo sapiens
tgtgtgcatctcacgcccgacgtggcttctgaaacgtgcattcaacctcaaacttttgcataaaatagaatgaatcgt

SEQ ID NO: 151120 - DNA, 73 bp, Homo sapiens
atctcacgcccgacgtggcttctgaaacgtgcattcaacctcaaacttttgcataaaatagaatgaatcgttt

SEQ ID NO: 151121 - DNA, 77 bp, Homo sapiens
gtggcttctgaaacgtgcattcaacctcaaacttttgcataaaatagaatgaatcgttttgctctgatgaaatgtag

SEQ ID NO: 151122 - DNA, 74 bp, Homo sapiens
aaacgtgcattcaacctcaaacttttgcataaaatagaatgaatcgttttgctctgatgaaatgtaggccttac

SEQ ID NO: 151123 - DNA, 77 bp, Homo sapiens
gcattcaacctcaaacttttgcataaaatagaatgaatcgttttgctctgatgaaatgtaggccttacttgtatata

SEQ ID NO: 151124 - DNA, 76 bp, Homo sapiens
acttttgcataaaatagaatgaatcgttttgctctgatgaaatgtaggccttacttgtatataagactgttcctgc

SEQ ID NO: 151125 - DNA, 74 bp, Homo sapiens
aaaatagaatgaatcgttttgctctgatgaaatgtaggccttacttgtatataagactgttcctgccttcggtc

SEQ ID NO: 151126 - DNA, 74 bp, Homo sapiens
gttttgctctgatgaaatgtaggccttacttgtatataagactgttcctgccttcggtctgtcattttcccacc

SEQ ID NO: 151127 - DNA, 71 bp, Homo sapiens
aaatgtaggccttacttgtatataagactgttcctgccttcggtctgtcattttcccacctgcctccccta

SEQ ID NO: 151128 - DNA, 70 bp, Homo sapiens
aggccttacttgtatataagactgttcctgccttcggtctgtcattttcccacctgcctcccctacccac

SEQ ID NO: 151129 - DNA, 67 bp, Homo sapiens
actgttcctgccttcggtctgtcattttcccacctgcctcccctacccaccccccacccaccacctg

SEQ ID NO: 151130 - DNA, 67 bp, Homo sapiens
ttcggtctgtcattttcccacctgcctcccctacccaccccccacccaccacctggggcttcctctg

SEQ ID NO: 151131 - DNA, 65 bp, Homo sapiens
tcattttcccacctgcctcccctacccaccccccacccaccacctggggcttcctctgggggtcc

SEQ ID NO: 151132 - DNA, 65 bp, Homo sapiens
tgcctcccctacccaccccccacccaccacctggggcttcctctgggggtccgagggtcttccca

SEQ ID NO: 151133 - DNA, 69 bp, Homo sapiens
tacccaccccccacccaccacctggggcttcctctgggggtccgagggtcttcccatcacatgaagaca

SEQ ID NO: 151134 - DNA, 70 bp, Homo sapiens
acccaccacctggggcttcctctgggggtccgagggtcttcccatcacatgaagacatcaggttgggtcc

SEQ ID NO: 151135 - DNA, 72 bp, Homo sapiens
cttcctctgggggtccgagggtcttcccatcacatgaagacatcaggttgggtcctgccccactgcccctcc

SEQ ID NO: 151136 - DNA, 76 bp, Homo sapiens
tcccatcacatgaagacatcaggttgggtcctgccccactgcccctccccctgttcctgccccaagccgtcaatca

SEQ ID NO: 151137 - DNA, 74 bp, Homo sapiens
atgaagacatcaggttgggtcctgccccactgcccctccccctgttcctgccccaagccgtcaatcagattgtg

SEQ ID NO: 151138 - DNA, 74 bp, Homo sapiens
atcaggttgggtcctgccccactgcccctccccctgttcctgccccaagccgtcaatcagattgtggagcagta

SEQ ID NO: 151139 - DNA, 78 bp, Homo sapiens
tgccccactgcccctccccctgttcctgccccaagccgtcaatcagattgtggagcagtacacagtcagatgaaaata

SEQ ID NO: 151140 - DNA, 75 bp, Homo sapiens
cccctccccctgttcctgccccaagccgtcaatcagattgtggagcagtacacagtcagatgaaaatactgtaaa

SEQ ID NO: 151141 - DNA, 80 bp, Homo sapiens
cctgttcctgccccaagccgtcaatcagattgtggagcagtacacagtcagatgaaaatactgtaaatgcactcattggg

SEQ ID NO: 151142 - DNA, 76 bp, Homo sapiens
cccaagccgtcaatcagattgtggagcagtacacagtcagatgaaaatactgtaaatgcactcattgggggttttt

SEQ ID NO: 151143 - DNA, 75 bp, Homo sapiens
cgtcaatcagattgtggagcagtacacagtcagatgaaaatactgtaaatgcactcattgggggttttttggttt

SEQ ID NO: 151144 - DNA, 74 bp, Homo sapiens
attgtggagcagtacacagtcagatgaaaatactgtaaatgcactcattgggggttttttggttttacttcata

SEQ ID NO: 151145 - DNA, 75 bp, Homo sapiens
gatgaaaatactgtaaatgcactcattgggggttttttggttttacttcatatcatgtgcaatgttgtggcttta

SEQ ID NO: 151146 - DNA, 72 bp, Homo sapiens
actgtaaatgcactcattgggggttttttggttttacttcatatcatgtgcaatgttgtggctttaacattt

SEQ ID NO: 151147 - DNA, 75 bp, Homo sapiens
tgcactcattgggggttttttggttttacttcatatcatgtgcaatgttgtggctttaacattttatgcaactat

SEQ ID NO: 151148 - DNA, 75 bp, Homo sapiens
ttttttggttttacttcatatcatgtgcaatgttgtggctttaacattttatgcaactatttatgaagacctctg

SEQ ID NO: 151149 - DNA, 76 bp, Homo sapiens
ggttttacttcatatcatgtgcaatgttgtggctttaacattttatgcaactatttatgaagacctctgttgtacc

SEQ ID NO: 151150 - DNA, 79 bp, Homo sapiens
catatcatgtgcaatgttgtggctttaacattttatgcaactatttatgaagacctctgttgtacctgtaataaatata

SEQ ID NO: 151151 - DNA, 76 bp, Homo sapiens
tgcaatgttgtggctttaacattttatgcaactatttatgaagacctctgttgtacctgtaataaatatatagaaa

SEQ ID NO: 151152 - DNA, 76 bp, Homo sapiens
atgcaactatttatgaagacctctgttgtacctgtaataaatatatagaaaaagcacatacttcgtatggtgagct

SEQ ID NO: 151153 - DNA, 74 bp, Homo sapiens
ttatgaagacctctgttgtacctgtaataaatatatagaaaaagcacatacttcgtatggtgagctttatggtt

SEQ ID NO: 151154 - DNA, 74 bp, Homo sapiens
gacctctgttgtacctgtaataaatatatagaaaaagcacatacttcgtatggtgagctttatggttttgtgtg

SEQ ID NO: 151155 - DNA, 79 bp, Homo sapiens
cgctgggcggcgctcggaccccttggcagccgcaggtgcctccccagcccagcccagctcagtccagcgcagcccagcc

SEQ ID NO: 151156 - DNA, 81 bp, Homo sapiens
cagcccagctcagtccagcgcagcccagcccagcccagcccggcgctcgcagcctccgccgcttccgggcagataggtgcc

SEQ ID NO: 151157 - DNA, 78 bp, Homo sapiens
tcagtccagcgcagcccagcccagcccagcccggcgctcgcagcctccgccgcttccgggcagataggtgccttttct

SEQ ID NO: 151158 - DNA, 77 bp, Homo sapiens
cagcccagcccagcccagcccggcgctcgcagcctccgccgcttccgggcagataggtgccttttcttgctccttgc

SEQ ID NO: 151159 - DNA, 76 bp, Homo sapiens
cagcccagcccggcgctcgcagcctccgccgcttccgggcagataggtgccttttcttgctccttgctcttggagt

SEQ ID NO: 151160 - DNA, 76 bp, Homo sapiens
cggcgctcgcagcctccgccgcttccgggcagataggtgccttttcttgctccttgctcttggagttcttctctta

SEQ ID NO: 151161 - DNA, 73 bp, Homo sapiens
agcctccgccgcttccgggcagataggtgccttttcttgctccttgctcttggagttcttctcttagtccctg

SEQ ID NO: 151162 - DNA, 75 bp, Homo sapiens
gcttccgggcagataggtgccttttcttgctccttgctcttggagttcttctcttagtccctgttccctggatga

SEQ ID NO: 151163 - DNA, 76 bp, Homo sapiens
agataggtgccttttcttgctccttgctcttggagttcttctcttagtccctgttccctggatgaaagcatcgctc

SEQ ID NO: 151164 - DNA, 77 bp, Homo sapiens
cttttcttgctccttgctcttggagttcttctcttagtccctgttccctggatgaaagcatcgctccgagcctcatg

SEQ ID NO: 151165 - DNA, 78 bp, Homo sapiens
tccttgctcttggagttcttctcttagtccctgttccctggatgaaagcatcgctccgagcctcatgggaggaatgaa

SEQ ID NO: 151166 - DNA, 76 bp, Homo sapiens
ctcttggagttcttctcttagtccctgttccctggatgaaagcatcgctccgagcctcatgggaggaatgaaggaa

SEQ ID NO: 151167 - DNA, 78 bp, Homo sapiens
tcttctcttagtccctgttccctggatgaaagcatcgctccgagcctcatgggaggaatgaaggaagaatcgagacta

SEQ ID NO: 151168 - DNA, 77 bp, Homo sapiens
agtccctgttccctggatgaaagcatcgctccgagcctcatgggaggaatgaaggaagaatcgagactaggtgagtg

SEQ ID NO: 151169 - DNA, 79 bp, Homo sapiens
tggatgaaagcatcgctccgagcctcatgggaggaatgaaggaagaatcgagactaggtgagtggtggtctagatttaa

SEQ ID NO: 151170 - DNA, 76 bp, Homo sapiens
tcgctccgagcctcatgggaggaatgaaggaagaatcgagactaggtgagtggtggtctagatttaacgaataata

SEQ ID NO: 151171 - DNA, 74 bp, Homo sapiens
agcctcatgggaggaatgaaggaagaatcgagactaggtgagtggtggtctagatttaacgaataataacaata

SEQ ID NO: 151172 - DNA, 73 bp, Homo sapiens
tagagtatagcatattattagggtactatttcttttcctatcctagatatccaactaaggcttcgggacatgt

SEQ ID NO: 151173 - DNA, 72 bp, Homo sapiens
atagcatattattagggtactatttcttttcctatcctagatatccaactaaggcttcgggacatgttttga

SEQ ID NO: 151174 - DNA, 72 bp, Homo sapiens
tattagggtactatttcttttcctatcctagatatccaactaaggcttcgggacatgttttgagcgaagatg

SEQ ID NO: 151175 - DNA, 72 bp, Homo sapiens
atttcttttcctatcctagatatccaactaaggcttcgggacatgttttgagcgaagatgggtgtttctgcc

SEQ ID NO: 151176 - DNA, 74 bp, Homo sapiens
tatcctagatatccaactaaggcttcgggacatgttttgagcgaagatgggtgtttctgcccggatagtataaa

SEQ ID NO: 151177 - DNA, 73 bp, Homo sapiens
atatccaactaaggcttcgggacatgttttgagcgaagatgggtgtttctgcccggatagtataaatcgagga

SEQ ID NO: 151178 - DNA, 74 bp, Homo sapiens
taaggcttcgggacatgttttgagcgaagatgggtgtttctgcccggatagtataaatcgaggatccaggtctg

SEQ ID NO: 151179 - DNA, 76 bp, Homo sapiens
acatgttttgagcgaagatgggtgtttctgcccggatagtataaatcgaggatccaggtctgggcagattcaacca

SEQ ID NO: 151180 - DNA, 76 bp, Homo sapiens
agcgaagatgggtgtttctgcccggatagtataaatcgaggatccaggtctgggcagattcaaccatgggagcgaa

SEQ ID NO: 151181 - DNA, 76 bp, Homo sapiens
tgtttctgcccggatagtataaatcgaggatccaggtctgggcagattcaaccatgggagcgaacacttcaagaaa

SEQ ID NO: 151182 - DNA, 73 bp, Homo sapiens
cccggatagtataaatcgaggatccaggtctgggcagattcaaccatgggagcgaacacttcaagaaaaccac

SEQ ID NO: 151183 - DNA, 77 bp, Homo sapiens
tataaatcgaggatccaggtctgggcagattcaaccatgggagcgaacacttcaagaaaaccaccagtgtttgatga

SEQ ID NO: 151184 - DNA, 75 bp, Homo sapiens
aggatccaggtctgggcagattcaaccatgggagcgaacacttcaagaaaaccaccagtgtttgatgaaaatgaa

SEQ ID NO: 151185 - DNA, 76 bp, Homo sapiens
gcagattcaaccatgggagcgaacacttcaagaaaaccaccagtgtttgatgaaaatgaagatggtaagaaatatg

SEQ ID NO: 151186 - DNA, 73 bp, Homo sapiens
aaccatgggagcgaacacttcaagaaaaccaccagtgtttgatgaaaatgaagatggtaagaaatatgggata

SEQ ID NO: 151187 - DNA, 74 bp, Homo sapiens
cgaacacttcaagaaaaccaccagtgtttgatgaaaatgaagatggtaagaaatatgggatagtggcatataaa

SEQ ID NO: 151188 - DNA, 73 bp, Homo sapiens
cttcaagaaaaccaccagtgtttgatgaaaatgaagatggtaagaaatatgggatagtggcatataaaaaata

SEQ ID NO: 151189 - DNA, 72 bp, Homo sapiens
ttattatttattagctactaaagagaaattgataattactcatgatattcttcttttttgttttacagtcaa

SEQ ID NO: 151190 - DNA, 72 bp, Homo sapiens
ttagctactaaagagaaattgataattactcatgatattcttcttttttgttttacagtcaactttgaccac

SEQ ID NO: 151191 - DNA, 72 bp, Homo sapiens
tactaaagagaaattgataattactcatgatattcttcttttttgttttacagtcaactttgaccactttga

SEQ ID NO: 151192 - DNA, 72 bp, Homo sapiens
gataattactcatgatattcttcttttttgttttacagtcaactttgaccactttgaaattttgcgagccat

SEQ ID NO: 151193 - DNA, 70 bp, Homo sapiens
catgatattcttcttttttgttttacagtcaactttgaccactttgaaattttgcgagccattgggaaag

SEQ ID NO: 151194 - DNA, 67 bp, Homo sapiens
ttcttttttgttttacagtcaactttgaccactttgaaattttgcgagccattgggaaaggcagttt

SEQ ID NO: 151195 - DNA, 68 bp, Homo sapiens
ttttgttttacagtcaactttgaccactttgaaattttgcgagccattgggaaaggcagttttgggaa

SEQ ID NO: 151196 - DNA, 69 bp, Homo sapiens
aactttgaccactttgaaattttgcgagccattgggaaaggcagttttgggaaggtgagaacaaattga

SEQ ID NO: 151197 - DNA, 69 bp, Homo sapiens
actttgaaattttgcgagccattgggaaaggcagttttgggaaggtgagaacaaattgaaatgattaac

SEQ ID NO: 151198 - DNA, 71 bp, Homo sapiens
aaattttgcgagccattgggaaaggcagttttgggaaggtgagaacaaattgaaatgattaaccaccagca

SEQ ID NO: 151199 - DNA, 71 bp, Homo sapiens
agccattgggaaaggcagttttgggaaggtgagaacaaattgaaatgattaaccaccagcagggttatgta

SEQ ID NO: 151200 - DNA, 70 bp, Homo sapiens
aaaggcagttttgggaaggtgagaacaaattgaaatgattaaccaccagcagggttatgtagcccaggga

SEQ ID NO: 151201 - DNA, 79 bp, Homo sapiens
atgatccattatctccctaatcactctctcactcgggttttcaccattaggtctgcattgtacagaagaatgataccaa

SEQ ID NO: 151202 - DNA, 79 bp, Homo sapiens
tatctccctaatcactctctcactcgggttttcaccattaggtctgcattgtacagaagaatgataccaagaagatgta

SEQ ID NO: 151203 - DNA, 78 bp, Homo sapiens
actctctcactcgggttttcaccattaggtctgcattgtacagaagaatgataccaagaagatgtacgcaatgaagta

SEQ ID NO: 151204 - DNA, 78 bp, Homo sapiens
tcgggttttcaccattaggtctgcattgtacagaagaatgataccaagaagatgtacgcaatgaagtacatgaataaa

SEQ ID NO: 151205 - DNA, 80 bp, Homo sapiens
ttcaccattaggtctgcattgtacagaagaatgataccaagaagatgtacgcaatgaagtacatgaataaacaaaagtgc

SEQ ID NO: 151206 - DNA, 83 bp, Homo sapiens
tctgcattgtacagaagaatgataccaagaagatgtacgcaatgaagtacatgaataaacaaaagtgcgtggagcgcaatgaa

SEQ ID NO: 151207 - DNA, 79 bp, Homo sapiens
agaagaatgataccaagaagatgtacgcaatgaagtacatgaataaacaaaagtgcgtggagcgcaatgaagtgagaaa

SEQ ID NO: 151208 - DNA, 79 bp, Homo sapiens
ataccaagaagatgtacgcaatgaagtacatgaataaacaaaagtgcgtggagcgcaatgaagtgagaaatgtcttcaa

SEQ ID NO: 151209 - DNA, 78 bp, Homo sapiens
aagatgtacgcaatgaagtacatgaataaacaaaagtgcgtggagcgcaatgaagtgagaaatgtcttcaaggaactc

SEQ ID NO: 151210 - DNA, 80 bp, Homo sapiens
aatgaagtacatgaataaacaaaagtgcgtggagcgcaatgaagtgagaaatgtcttcaaggaactccagatcatgcagg

SEQ ID NO: 151211 - DNA, 79 bp, Homo sapiens
aataaacaaaagtgcgtggagcgcaatgaagtgagaaatgtcttcaaggaactccagatcatgcagggtctggagcacc

SEQ ID NO: 151212 - DNA, 79 bp, Homo sapiens
acaaaagtgcgtggagcgcaatgaagtgagaaatgtcttcaaggaactccagatcatgcagggtctggagcaccctttc

SEQ ID NO: 151213 - DNA, 77 bp, Homo sapiens
agcgcaatgaagtgagaaatgtcttcaaggaactccagatcatgcagggtctggagcaccctttcctggttaatttg

SEQ ID NO: 151214 - DNA, 76 bp, Homo sapiens
gtgagaaatgtcttcaaggaactccagatcatgcagggtctggagcaccctttcctggttaatttgtggtgagtaa

SEQ ID NO: 151215 - DNA, 74 bp, Homo sapiens
atgtcttcaaggaactccagatcatgcagggtctggagcaccctttcctggttaatttgtggtgagtaatttta

SEQ ID NO: 151216 - DNA, 72 bp, Homo sapiens
aaggaactccagatcatgcagggtctggagcaccctttcctggttaatttgtggtgagtaattttactggac

SEQ ID NO: 151217 - DNA, 75 bp, Homo sapiens
atcatgcagggtctggagcaccctttcctggttaatttgtggtgagtaattttactggacctctgaatagagaca

SEQ ID NO: 151218 - DNA, 74 bp, Homo sapiens
atgtgtaaatatatttgataagttttctcttctaatgtaattccaggtattccttccaagatgaggaagacatg

SEQ ID NO: 151219 - DNA, 75 bp, Homo sapiens
tatatttgataagttttctcttctaatgtaattccaggtattccttccaagatgaggaagacatgttcatggtgg

SEQ ID NO: 151220 - DNA, 73 bp, Homo sapiens
ataagttttctcttctaatgtaattccaggtattccttccaagatgaggaagacatgttcatggtggtggacc

SEQ ID NO: 151221 - DNA, 77 bp, Homo sapiens
tcttctaatgtaattccaggtattccttccaagatgaggaagacatgttcatggtggtggacctcctgctgggtgga

SEQ ID NO: 151222 - DNA, 76 bp, Homo sapiens
attccaggtattccttccaagatgaggaagacatgttcatggtggtggacctcctgctgggtggagacctgcgtta

SEQ ID NO: 151223 - DNA, 80 bp, Homo sapiens
tattccttccaagatgaggaagacatgttcatggtggtggacctcctgctgggtggagacctgcgttatcacctgcaaca

SEQ ID NO: 151224 - DNA, 78 bp, Homo sapiens
atgaggaagacatgttcatggtggtggacctcctgctgggtggagacctgcgttatcacctgcaacagaacgtccact

SEQ ID NO: 151225 - DNA, 77 bp, Homo sapiens
acatgttcatggtggtggacctcctgctgggtggagacctgcgttatcacctgcaacagaacgtccacttcaaggaa

SEQ ID NO: 151226 - DNA, 75 bp, Homo sapiens
atggtggtggacctcctgctgggtggagacctgcgttatcacctgcaacagaacgtccacttcaaggaagaaaca

SEQ ID NO: 151227 - DNA, 79 bp, Homo sapiens
tcctgctgggtggagacctgcgttatcacctgcaacagaacgtccacttcaaggaagaaacagtgaagctcttcatctg

SEQ ID NO: 151228 - DNA, 82 bp, Homo sapiens
tggagacctgcgttatcacctgcaacagaacgtccacttcaaggaagaaacagtgaagctcttcatctgtgagctggtcatg

SEQ ID NO: 151229 - DNA, 80 bp, Homo sapiens
acctgcgttatcacctgcaacagaacgtccacttcaaggaagaaacagtgaagctcttcatctgtgagctggtcatggcc

SEQ ID NO: 151230 - DNA, 82 bp, Homo sapiens
tgcaacagaacgtccacttcaaggaagaaacagtgaagctcttcatctgtgagctggtcatggccctggactacctgcagaa

SEQ ID NO: 151231 - DNA, 79 bp, Homo sapiens
agaacgtccacttcaaggaagaaacagtgaagctcttcatctgtgagctggtcatggccctggactacctgcagaacca

SEQ ID NO: 151232 - DNA, 84 bp, Homo sapiens
aaggaagaaacagtgaagctcttcatctgtgagctggtcatggccctggactacctgcagaaccagcgcatcattcacaggtca

SEQ ID NO: 151233 - DNA, 85 bp, Homo sapiens
aaacagtgaagctcttcatctgtgagctggtcatggccctggactacctgcagaaccagcgcatcattcacaggtcagtcaagtc

SEQ ID NO: 151234 - DNA, 85 bp, Homo sapiens
aagctcttcatctgtgagctggtcatggccctggactacctgcagaaccagcgcatcattcacaggtcagtcaagtccaaggaga

SEQ ID NO: 151235 - DNA, 85 bp, Homo sapiens
tgagctggtcatggccctggactacctgcagaaccagcgcatcattcacaggtcagtcaagtccaaggagatggccatgaacgta

SEQ ID NO: 151236 - DNA, 64 bp, Homo sapiens
tttcttaagcctttttgcccctaccccttagttctgttcgttttattgtgagcaactttctttt

SEQ ID NO: 151237 - DNA, 72 bp, Homo sapiens
ttttttctttttactcctctagggatatgaagcctgacaatattttacttgacgaacatggtaagtgagtga

SEQ ID NO: 151238 - DNA, 72 bp, Homo sapiens
ctttttactcctctagggatatgaagcctgacaatattttacttgacgaacatggtaagtgagtgatttgtt

SEQ ID NO: 151239 - DNA, 80 bp, Homo sapiens
tctagggatatgaagcctgacaatattttacttgacgaacatggtaagtgagtgatttgtttgcaatcaagtacatgaca

SEQ ID NO: 151240 - DNA, 80 bp, Homo sapiens
aagcctgacaatattttacttgacgaacatggtaagtgagtgatttgtttgcaatcaagtacatgacatgcatgtagaaa

SEQ ID NO: 151241 - DNA, 79 bp, Homo sapiens
atattttacttgacgaacatggtaagtgagtgatttgtttgcaatcaagtacatgacatgcatgtagaaaagttgattg

SEQ ID NO: 151242 - DNA, 82 bp, Homo sapiens
tacttgacgaacatggtaagtgagtgatttgtttgcaatcaagtacatgacatgcatgtagaaaagttgattgttcccagca

SEQ ID NO: 151243 - DNA, 78 bp, Homo sapiens
tggctgctcatctgaatcacctgtggaatttgttgtttttaatacagatacctggctctcctacaagtcccactgaat

SEQ ID NO: 151244 - DNA, 74 bp, Homo sapiens
tctgaatcacctgtggaatttgttgtttttaatacagatacctggctctcctacaagtcccactgaattggagt

SEQ ID NO: 151245 - DNA, 71 bp, Homo sapiens
acctgtggaatttgttgtttttaatacagatacctggctctcctacaagtcccactgaattggagtttcag

SEQ ID NO: 151246 - DNA, 71 bp, Homo sapiens
atttgttgtttttaatacagatacctggctctcctacaagtcccactgaattggagtttcaggagaccgaa

SEQ ID NO: 151247 - DNA, 76 bp, Homo sapiens
taatacagatacctggctctcctacaagtcccactgaattggagtttcaggagaccgaagcccaggcacatgtatt

SEQ ID NO: 151248 - DNA, 75 bp, Homo sapiens
atacctggctctcctacaagtcccactgaattggagtttcaggagaccgaagcccaggcacatgtattttgcaaa

SEQ ID NO: 151249 - DNA, 74 bp, Homo sapiens
tacaagtcccactgaattggagtttcaggagaccgaagcccaggcacatgtattttgcaaaactacactgaagt

SEQ ID NO: 151250 - DNA, 76 bp, Homo sapiens
actgaattggagtttcaggagaccgaagcccaggcacatgtattttgcaaaactacactgaagtttctgataatga

SEQ ID NO: 151251 - DNA, 76 bp, Homo sapiens
agtttcaggagaccgaagcccaggcacatgtattttgcaaaactacactgaagtttctgataatgacggatatcaa

SEQ ID NO: 151252 - DNA, 75 bp, Homo sapiens
agaccgaagcccaggcacatgtattttgcaaaactacactgaagtttctgataatgacggatatcaacaattaaa

SEQ ID NO: 151253 - DNA, 75 bp, Homo sapiens
caggcacatgtattttgcaaaactacactgaagtttctgataatgacggatatcaacaattaaacgcttacttct

SEQ ID NO: 151254 - DNA, 75 bp, Homo sapiens
tattttgcaaaactacactgaagtttctgataatgacggatatcaacaattaaacgcttacttcttgccaaatgc

SEQ ID NO: 151255 - DNA, 75 bp, Homo sapiens
aaaactacactgaagtttctgataatgacggatatcaacaattaaacgcttacttcttgccaaatgctgtgctaa

SEQ ID NO: 151256 - DNA, 77 bp, Homo sapiens
aagtttctgataatgacggatatcaacaattaaacgcttacttcttgccaaatgctgtgctaagtctcctgtaatca

SEQ ID NO: 151257 - DNA, 77 bp, Homo sapiens
ataatgacggatatcaacaattaaacgcttacttcttgccaaatgctgtgctaagtctcctgtaatcattctttcat

SEQ ID NO: 151258 - DNA, 79 bp, Homo sapiens
cactgggttgaatgggacttaactttctgtgtggttcttctctctctgcagggcacgtgcacatcacagatttcaacat

SEQ ID NO: 151259 - DNA, 82 bp, Homo sapiens
ggttgaatgggacttaactttctgtgtggttcttctctctctgcagggcacgtgcacatcacagatttcaacattgctgcga

SEQ ID NO: 151260 - DNA, 84 bp, Homo sapiens
acttaactttctgtgtggttcttctctctctgcagggcacgtgcacatcacagatttcaacattgctgcgatgctgcccaggga

SEQ ID NO: 151261 - DNA, 89 bp, Homo sapiens
tctgtgtggttcttctctctctgcagggcacgtgcacatcacagatttcaacattgctgcgatgctgcccagggagacacagattacca

SEQ ID NO: 151262 - DNA, 90 bp, Homo sapiens
tctctctgcagggcacgtgcacatcacagatttcaacattgctgcgatgctgcccagggagacacagattaccaccatggctggcaccaa

SEQ ID NO: 151263 - DNA, 86 bp, Homo sapiens
gggcacgtgcacatcacagatttcaacattgctgcgatgctgcccagggagacacagattaccaccatggctggcaccaagcctta

SEQ ID NO: 151264 - DNA, 84 bp, Homo sapiens
acatcacagatttcaacattgctgcgatgctgcccagggagacacagattaccaccatggctggcaccaagccttacatgggta

SEQ ID NO: 151265 - DNA, 80 bp, Homo sapiens
tttcaacattgctgcgatgctgcccagggagacacagattaccaccatggctggcaccaagccttacatgggtatgggtt

SEQ ID NO: 151266 - DNA, 82 bp, Homo sapiens
acattgctgcgatgctgcccagggagacacagattaccaccatggctggcaccaagccttacatgggtatgggtttcatgag

SEQ ID NO: 151267 - DNA, 76 bp, Homo sapiens
tgcccagggagacacagattaccaccatggctggcaccaagccttacatgggtatgggtttcatgagtgtcttttt

SEQ ID NO: 151268 - DNA, 73 bp, Homo sapiens
agggagacacagattaccaccatggctggcaccaagccttacatgggtatgggtttcatgagtgtcttttttt

SEQ ID NO: 151269 - DNA, 75 bp, Homo sapiens
taatactaatgtctcagggaatcaaactggtttaatttttcgtgtttttcagcacctgagatgttcagctccaga

SEQ ID NO: 151270 - DNA, 74 bp, Homo sapiens
gtctcagggaatcaaactggtttaatttttcgtgtttttcagcacctgagatgttcagctccagaaaaggagca

SEQ ID NO: 151271 - DNA, 71 bp, Homo sapiens
aactggtttaatttttcgtgtttttcagcacctgagatgttcagctccagaaaaggagcaggctattcctt

SEQ ID NO: 151272 - DNA, 75 bp, Homo sapiens
tttaatttttcgtgtttttcagcacctgagatgttcagctccagaaaaggagcaggctattcctttgctgttgac

SEQ ID NO: 151273 - DNA, 78 bp, Homo sapiens
tgtttttcagcacctgagatgttcagctccagaaaaggagcaggctattcctttgctgttgactggtggtccctggga

SEQ ID NO: 151274 - DNA, 80 bp, Homo sapiens
ctgagatgttcagctccagaaaaggagcaggctattcctttgctgttgactggtggtccctgggagtgacggcatatgaa

SEQ ID NO: 151275 - DNA, 81 bp, Homo sapiens
ttcagctccagaaaaggagcaggctattcctttgctgttgactggtggtccctgggagtgacggcatatgaactgctgaga

SEQ ID NO: 151276 - DNA, 76 bp, Homo sapiens
aaaaggagcaggctattcctttgctgttgactggtggtccctgggagtgacggcatatgaactgctgagaggccgg

SEQ ID NO: 151277 - DNA, 79 bp, Homo sapiens
gctattcctttgctgttgactggtggtccctgggagtgacggcatatgaactgctgagaggccgggtactgtagtagca

SEQ ID NO: 151278 - DNA, 78 bp, Homo sapiens
tttgctgttgactggtggtccctgggagtgacggcatatgaactgctgagaggccgggtactgtagtagcatttcctc

SEQ ID NO: 151279 - DNA, 75 bp, Homo sapiens
tggtggtccctgggagtgacggcatatgaactgctgagaggccgggtactgtagtagcatttcctctttggttat

SEQ ID NO: 151280 - DNA, 73 bp, Homo sapiens
gtccctgggagtgacggcatatgaactgctgagaggccgggtactgtagtagcatttcctctttggttatttt

SEQ ID NO: 151281 - DNA, 71 bp, Homo sapiens
ttttgtcctatacaaatgaagacttttacttcttttctcccttaagagaccgtatcatattcgctccagta

SEQ ID NO: 151282 - DNA, 73 bp, Homo sapiens
tatacaaatgaagacttttacttcttttctcccttaagagaccgtatcatattcgctccagtacttccagcaa

SEQ ID NO: 151283 - DNA, 69 bp, Homo sapiens
aagacttttacttcttttctcccttaagagaccgtatcatattcgctccagtacttccagcaaggaaat

SEQ ID NO: 151284 - DNA, 73 bp, Homo sapiens
ttcttttctcccttaagagaccgtatcatattcgctccagtacttccagcaaggaaattgtacacacgtttga

SEQ ID NO: 151285 - DNA, 75 bp, Homo sapiens
cttaagagaccgtatcatattcgctccagtacttccagcaaggaaattgtacacacgtttgagacgactgttgta

SEQ ID NO: 151286 - DNA, 74 bp, Homo sapiens
agaccgtatcatattcgctccagtacttccagcaaggaaattgtacacacgtttgagacgactgttgtaactta

SEQ ID NO: 151287 - DNA, 73 bp, Homo sapiens
atattcgctccagtacttccagcaaggaaattgtacacacgtttgagacgactgttgtaacttacccttctgc

SEQ ID NO: 151288 - DNA, 72 bp, Homo sapiens
agtacttccagcaaggaaattgtacacacgtttgagacgactgttgtaacttacccttctgcctggtcacag

SEQ ID NO: 151289 - DNA, 72 bp, Homo sapiens
aaggaaattgtacacacgtttgagacgactgttgtaacttacccttctgcctggtcacaggaaatggtgtca

SEQ ID NO: 151290 - DNA, 72 bp, Homo sapiens
tacacacgtttgagacgactgttgtaacttacccttctgcctggtcacaggaaatggtgtcacttcttaaaa

SEQ ID NO: 151291 - DNA, 70 bp, Homo sapiens
tttgagacgactgttgtaacttacccttctgcctggtcacaggaaatggtgtcacttcttaaaaaggtaa

SEQ ID NO: 151292 - DNA, 68 bp, Homo sapiens
actgttgtaacttacccttctgcctggtcacaggaaatggtgtcacttcttaaaaaggtaagaaggaa

SEQ ID NO: 151293 - DNA, 72 bp, Homo sapiens
ttacccttctgcctggtcacaggaaatggtgtcacttcttaaaaaggtaagaaggaagactgcatgtccaaa

SEQ ID NO: 151294 - DNA, 75 bp, Homo sapiens
tttgtccttctatcctttcttatggccttgatgtttgcattttattggcagctactcgaacctaatccagaccaa

SEQ ID NO: 151295 - DNA, 75 bp, Homo sapiens
tttcttatggccttgatgtttgcattttattggcagctactcgaacctaatccagaccaacgattttctcagtta

SEQ ID NO: 151296 - DNA, 79 bp, Homo sapiens
tatggccttgatgtttgcattttattggcagctactcgaacctaatccagaccaacgattttctcagttatctgatgtc

SEQ ID NO: 151297 - DNA, 76 bp, Homo sapiens
tttgcattttattggcagctactcgaacctaatccagaccaacgattttctcagttatctgatgtccagaacttcc

SEQ ID NO: 151298 - DNA, 75 bp, Homo sapiens
tttattggcagctactcgaacctaatccagaccaacgattttctcagttatctgatgtccagaacttcccgtata

SEQ ID NO: 151299 - DNA, 76 bp, Homo sapiens
tactcgaacctaatccagaccaacgattttctcagttatctgatgtccagaacttcccgtatatgaatgatataaa

SEQ ID NO: 151300 - DNA, 78 bp, Homo sapiens
taatccagaccaacgattttctcagttatctgatgtccagaacttcccgtatatgaatgatataaactgggatgcagt

SEQ ID NO: 151301 - DNA, 76 bp, Homo sapiens
aacgattttctcagttatctgatgtccagaacttcccgtatatgaatgatataaactgggatgcagtttttcagaa

SEQ ID NO: 151302 - DNA, 80 bp, Homo sapiens
ttctcagttatctgatgtccagaacttcccgtatatgaatgatataaactgggatgcagtttttcagaagaggctcattc

SEQ ID NO: 151303 - DNA, 76 bp, Homo sapiens
atgtccagaacttcccgtatatgaatgatataaactgggatgcagtttttcagaagaggctcattccaggtttcat

SEQ ID NO: 151304 - DNA, 74 bp, Homo sapiens
aacttcccgtatatgaatgatataaactgggatgcagtttttcagaagaggctcattccaggtttcattcctaa

SEQ ID NO: 151305 - DNA, 78 bp, Homo sapiens
atgaatgatataaactgggatgcagtttttcagaagaggctcattccaggtttcattcctaatgtgagtcaatcctaa

SEQ ID NO: 151306 - DNA, 75 bp, Homo sapiens
atataaactgggatgcagtttttcagaagaggctcattccaggtttcattcctaatgtgagtcaatcctaacaaa

SEQ ID NO: 151307 - DNA, 75 bp, Homo sapiens
atgcagtttttcagaagaggctcattccaggtttcattcctaatgtgagtcaatcctaacaaagccaaataactc

SEQ ID NO: 151308 - DNA, 80 bp, Homo sapiens
agaatgatacagtaatctgaggattgagccaactgtcttccttgcagaaaggcaggctgaattgtgatcctacctttgaa

SEQ ID NO: 151309 - DNA, 79 bp, Homo sapiens
atacagtaatctgaggattgagccaactgtcttccttgcagaaaggcaggctgaattgtgatcctacctttgaacttga

SEQ ID NO: 151310 - DNA, 76 bp, Homo sapiens
aggattgagccaactgtcttccttgcagaaaggcaggctgaattgtgatcctacctttgaacttgaggaaatgatt

SEQ ID NO: 151311 - DNA, 75 bp, Homo sapiens
actgtcttccttgcagaaaggcaggctgaattgtgatcctacctttgaacttgaggaaatgattttggagtccaa

SEQ ID NO: 151312 - DNA, 76 bp, Homo sapiens
ttgcagaaaggcaggctgaattgtgatcctacctttgaacttgaggaaatgattttggagtccaaacctctacata

SEQ ID NO: 151313 - DNA, 73 bp, Homo sapiens
gcaggctgaattgtgatcctacctttgaacttgaggaaatgattttggagtccaaacctctacataagaaaaa

SEQ ID NO: 151314 - DNA, 70 bp, Homo sapiens
ctgaattgtgatcctacctttgaacttgaggaaatgattttggagtccaaacctctacataagaaaaaaa

SEQ ID NO: 151315 - DNA, 69 bp, Homo sapiens
tacctttgaacttgaggaaatgattttggagtccaaacctctacataagaaaaaaaagcgtctggcaaa

SEQ ID NO: 151316 - DNA, 69 bp, Homo sapiens
aacttgaggaaatgattttggagtccaaacctctacataagaaaaaaaagcgtctggcaaagaaggaga

SEQ ID NO: 151317 - DNA, 70 bp, Homo sapiens
aaatgattttggagtccaaacctctacataagaaaaaaaagcgtctggcaaagaaggagaaggatatgag

SEQ ID NO: 151318 - DNA, 71 bp, Homo sapiens
agtccaaacctctacataagaaaaaaaagcgtctggcaaagaaggagaaggatatgaggaaatgcgattct

SEQ ID NO: 151319 - DNA, 73 bp, Homo sapiens
acctctacataagaaaaaaaagcgtctggcaaagaaggagaaggatatgaggaaatgcgattcttctcaggta

SEQ ID NO: 151320 - DNA, 72 bp, Homo sapiens
aagaaaaaaaagcgtctggcaaagaaggagaaggatatgaggaaatgcgattcttctcaggtaagcaggtcc

SEQ ID NO: 151321 - DNA, 75 bp, Homo sapiens
agcgtctggcaaagaaggagaaggatatgaggaaatgcgattcttctcaggtaagcaggtccccaccaaactcag

SEQ ID NO: 151322 - DNA, 74 bp, Homo sapiens
aaggagaaggatatgaggaaatgcgattcttctcaggtaagcaggtccccaccaaactcagggtcatgggtatc

SEQ ID NO: 151323 - DNA, 75 bp, Homo sapiens
aaggatatgaggaaatgcgattcttctcaggtaagcaggtccccaccaaactcagggtcatgggtatccccatga

SEQ ID NO: 151324 - DNA, 77 bp, Homo sapiens
aaatgcgattcttctcaggtaagcaggtccccaccaaactcagggtcatgggtatccccatgatggctgcaatatct

SEQ ID NO: 151325 - DNA, 79 bp, Homo sapiens
ttctcaggtaagcaggtccccaccaaactcagggtcatgggtatccccatgatggctgcaatatcttcgagagcttcta

SEQ ID NO: 151326 - DNA, 78 bp, Homo sapiens
gtaagcaggtccccaccaaactcagggtcatgggtatccccatgatggctgcaatatcttcgagagcttctactggga

SEQ ID NO: 151327 - DNA, 79 bp, Homo sapiens
accaaactcagggtcatgggtatccccatgatggctgcaatatcttcgagagcttctactgggaggtcatttcagcttc

SEQ ID NO: 151328 - DNA, 80 bp, Homo sapiens
ctcagggtcatgggtatccccatgatggctgcaatatcttcgagagcttctactgggaggtcatttcagcttcctgcttt

SEQ ID NO: 151329 - DNA, 83 bp, Homo sapiens
tatccccatgatggctgcaatatcttcgagagcttctactgggaggtcatttcagcttcctgcttttgctgcttagtgaaata

SEQ ID NO: 151330 - DNA, 82 bp, Homo sapiens
atgatggctgcaatatcttcgagagcttctactgggaggtcatttcagcttcctgcttttgctgcttagtgaaataggagaa

SEQ ID NO: 151331 - DNA, 79 bp, Homo sapiens
aatatcttcgagagcttctactgggaggtcatttcagcttcctgcttttgctgcttagtgaaataggagaagtagatca

SEQ ID NO: 151332 - DNA, 75 bp, Homo sapiens
agcttctactgggaggtcatttcagcttcctgcttttgctgcttagtgaaataggagaagtagatcagccgggtt

SEQ ID NO: 151333 - DNA, 74 bp, Homo sapiens
atttcagcttcctgcttttgctgcttagtgaaataggagaagtagatcagccgggtttctaaaagggcagacca

SEQ ID NO: 151334 - DNA, 77 bp, Homo sapiens
tgcttttgctgcttagtgaaataggagaagtagatcagccgggtttctaaaagggcagaccagagctcctctgagga

SEQ ID NO: 151335 - DNA, 77 bp, Homo sapiens
cttagtgaaataggagaagtagatcagccgggtttctaaaagggcagaccagagctcctctgaggatcctagcagca

SEQ ID NO: 151336 - DNA, 76 bp, Homo sapiens
ataggagaagtagatcagccgggtttctaaaagggcagaccagagctcctctgaggatcctagcagcaacatttta

SEQ ID NO: 151337 - DNA, 75 bp, Homo sapiens
aagtagatcagccgggtttctaaaagggcagaccagagctcctctgaggatcctagcagcaacattttacttgta

SEQ ID NO: 151338 - DNA, 74 bp, Homo sapiens
ggtttctaaaagggcagaccagagctcctctgaggatcctagcagcaacattttacttgtaggctttccgtcta

SEQ ID NO: 151339 - DNA, 75 bp, Homo sapiens
ctaaaagggcagaccagagctcctctgaggatcctagcagcaacattttacttgtaggctttccgtctagagttc

SEQ ID NO: 151340 - DNA, 78 bp, Homo sapiens
agagctcctctgaggatcctagcagcaacattttacttgtaggctttccgtctagagttctgccattaacttgactca

SEQ ID NO: 151341 - DNA, 76 bp, Homo sapiens
tctgaggatcctagcagcaacattttacttgtaggctttccgtctagagttctgccattaacttgactcagttatt

SEQ ID NO: 151342 - DNA, 75 bp, Homo sapiens
atcctagcagcaacattttacttgtaggctttccgtctagagttctgccattaacttgactcagttatttctctc

SEQ ID NO: 151343 - DNA, 71 bp, Homo sapiens
aacattttacttgtaggctttccgtctagagttctgccattaacttgactcagttatttctctcttccagt

SEQ ID NO: 151344 - DNA, 73 bp, Homo sapiens
taggctttccgtctagagttctgccattaacttgactcagttatttctctcttccagttctcaattcaaaatt

SEQ ID NO: 151345 - DNA, 70 bp, Homo sapiens
aacttgactcagttatttctctcttccagttctcaattcaaaatttacaaatttcctgggagaggaactg

SEQ ID NO: 151346 - DNA, 73 bp, Homo sapiens
tatttctctcttccagttctcaattcaaaatttacaaatttcctgggagaggaactgtcattggccaagctta

SEQ ID NO: 151347 - DNA, 73 bp, Homo sapiens
tctcttccagttctcaattcaaaatttacaaatttcctgggagaggaactgtcattggccaagcttaggtcag

SEQ ID NO: 151348 - DNA, 74 bp, Homo sapiens
tcaattcaaaatttacaaatttcctgggagaggaactgtcattggccaagcttaggtcaggggatgattcataa

SEQ ID NO: 151349 - DNA, 71 bp, Homo sapiens
aaatttacaaatttcctgggagaggaactgtcattggccaagcttaggtcaggggatgattcataaaatta

SEQ ID NO: 151350 - DNA, 72 bp, Homo sapiens
attggccaagcttaggtcaggggatgattcataaaattatggtaaaggggcaggtttcaaagtacacacatg

SEQ ID NO: 151351 - DNA, 70 bp, Homo sapiens
ttaggtcaggggatgattcataaaattatggtaaaggggcaggtttcaaagtacacacatggttgttttg

SEQ ID NO: 151352 - DNA, 71 bp, Homo sapiens
gggatgattcataaaattatggtaaaggggcaggtttcaaagtacacacatggttgttttggacctcactc

SEQ ID NO: 151353 - DNA, 70 bp, Homo sapiens
ttcataaaattatggtaaaggggcaggtttcaaagtacacacatggttgttttggacctcactcctgctt

SEQ ID NO: 151354 - DNA, 70 bp, Homo sapiens
ttatggtaaaggggcaggtttcaaagtacacacatggttgttttggacctcactcctgctttgaggagtt

SEQ ID NO: 151355 - DNA, 72 bp, Homo sapiens
aggtttcaaagtacacacatggttgttttggacctcactcctgctttgaggagtttctgggagcagccaacc

SEQ ID NO: 151356 - DNA, 75 bp, Homo sapiens
aaagtacacacatggttgttttggacctcactcctgctttgaggagtttctgggagcagccaaccctagagatga

SEQ ID NO: 151357 - DNA, 75 bp, Homo sapiens
atggttgttttggacctcactcctgctttgaggagtttctgggagcagccaaccctagagatgatgtctgttctt

SEQ ID NO: 151358 - DNA, 79 bp, Homo sapiens
ttttggacctcactcctgctttgaggagtttctgggagcagccaaccctagagatgatgtctgttctttgccacaagca

SEQ ID NO: 151359 - DNA, 81 bp, Homo sapiens
ctgctttgaggagtttctgggagcagccaaccctagagatgatgtctgttctttgccacaagcagaattttatgatatcaa

SEQ ID NO: 151360 - DNA, 82 bp, Homo sapiens
gagtttctgggagcagccaaccctagagatgatgtctgttctttgccacaagcagaattttatgatatcaagcctcacagaa

SEQ ID NO: 151361 - DNA, 85 bp, Homo sapiens
gagcagccaaccctagagatgatgtctgttctttgccacaagcagaattttatgatatcaagcctcacagaagagtgtctgttca

SEQ ID NO: 151362 - DNA, 82 bp, Homo sapiens
aaccctagagatgatgtctgttctttgccacaagcagaattttatgatatcaagcctcacagaagagtgtctgttcacagga

SEQ ID NO: 151363 - DNA, 82 bp, Homo sapiens
atgatgtctgttctttgccacaagcagaattttatgatatcaagcctcacagaagagtgtctgttcacaggaatgacggaat

SEQ ID NO: 151364 - DNA, 81 bp, Homo sapiens
ttctttgccacaagcagaattttatgatatcaagcctcacagaagagtgtctgttcacaggaatgacggaattctaacatg

SEQ ID NO: 151365 - DNA, 81 bp, Homo sapiens
agcagaattttatgatatcaagcctcacagaagagtgtctgttcacaggaatgacggaattctaacatggtggagcactat

SEQ ID NO: 151366 - DNA, 81 bp, Homo sapiens
aattttatgatatcaagcctcacagaagagtgtctgttcacaggaatgacggaattctaacatggtggagcactattgctg

SEQ ID NO: 151367 - DNA, 84 bp, Homo sapiens
tatcaagcctcacagaagagtgtctgttcacaggaatgacggaattctaacatggtggagcactattgctggatttcaggctga

SEQ ID NO: 151368 - DNA, 78 bp, Homo sapiens
aagagtgtctgttcacaggaatgacggaattctaacatggtggagcactattgctggatttcaggctgagttaaatta

SEQ ID NO: 151369 - DNA, 77 bp, Homo sapiens
tgtctgttcacaggaatgacggaattctaacatggtggagcactattgctggatttcaggctgagttaaattaactt

SEQ ID NO: 151370 - DNA, 76 bp, Homo sapiens
tctaacatggtggagcactattgctggatttcaggctgagttaaattaactttgtaactaagtatattattctctg

SEQ ID NO: 151371 - DNA, 76 bp, Homo sapiens
atggtggagcactattgctggatttcaggctgagttaaattaactttgtaactaagtatattattctctgtcagag

SEQ ID NO: 151372 - DNA, 78 bp, Homo sapiens
tattgctggatttcaggctgagttaaattaactttgtaactaagtatattattctctgtcagagtcagagctcagatt

SEQ ID NO: 151373 - DNA, 78 bp, Homo sapiens
gatttcaggctgagttaaattaactttgtaactaagtatattattctctgtcagagtcagagctcagatttcagtgaa

SEQ ID NO: 151374 - DNA, 77 bp, Homo sapiens
gagttaaattaactttgtaactaagtatattattctctgtcagagtcagagctcagatttcagtgaagtaacttgca

SEQ ID NO: 151375 - DNA, 79 bp, Homo sapiens
taactttgtaactaagtatattattctctgtcagagtcagagctcagatttcagtgaagtaacttgcaaacactcagta

SEQ ID NO: 151376 - DNA, 79 bp, Homo sapiens
actaagtatattattctctgtcagagtcagagctcagatttcagtgaagtaacttgcaaacactcagtaggattttata

SEQ ID NO: 151377 - DNA, 82 bp, Homo sapiens
attattctctgtcagagtcagagctcagatttcagtgaagtaacttgcaaacactcagtaggattttatactcacatgtggc

SEQ ID NO: 151378 - DNA, 81 bp, Homo sapiens
agtcagagctcagatttcagtgaagtaacttgcaaacactcagtaggattttatactcacatgtggctctatgaattataa

SEQ ID NO: 151379 - DNA, 81 bp, Homo sapiens
cagtgaagtaacttgcaaacactcagtaggattttatactcacatgtggctctatgaattataatgatgatgaagtaataa

SEQ ID NO: 151380 - DNA, 79 bp, Homo sapiens
acactcagtaggattttatactcacatgtggctctatgaattataatgatgatgaagtaataaagttactttgcctcta

SEQ ID NO: 151381 - DNA, 81 bp, Homo sapiens
ttatactcacatgtggctctatgaattataatgatgatgaagtaataaagttactttgcctctaaaggtcatctatctatc

SEQ ID NO: 151382 - DNA, 80 bp, Homo sapiens
acatgtggctctatgaattataatgatgatgaagtaataaagttactttgcctctaaaggtcatctatctatccacacga

SEQ ID NO: 151383 - DNA, 78 bp, Homo sapiens
gctctatgaattataatgatgatgaagtaataaagttactttgcctctaaaggtcatctatctatccacacgaccatt

SEQ ID NO: 151384 - DNA, 76 bp, Homo sapiens
ttataatgatgatgaagtaataaagttactttgcctctaaaggtcatctatctatccacacgaccatttccattcc

SEQ ID NO: 151385 - DNA, 74 bp, Homo sapiens
tgtttgaagattctcatttgtctgctaactatacctctattttttttctacgttcacctggaagacatgtcttc

SEQ ID NO: 151386 - DNA, 74 bp, Homo sapiens
gaagattctcatttgtctgctaactatacctctattttttttctacgttcacctggaagacatgtcttcttcaa

SEQ ID NO: 151387 - DNA, 72 bp, Homo sapiens
atttgtctgctaactatacctctattttttttctacgttcacctggaagacatgtcttcttcaagagcacct

SEQ ID NO: 151388 - DNA, 74 bp, Homo sapiens
taactatacctctattttttttctacgttcacctggaagacatgtcttcttcaagagcaccttgactctgtcca

SEQ ID NO: 151389 - DNA, 74 bp, Homo sapiens
tttttttctacgttcacctggaagacatgtcttcttcaagagcaccttgactctgtccagaaggagttcataat

SEQ ID NO: 151390 - DNA, 77 bp, Homo sapiens
ttctacgttcacctggaagacatgtcttcttcaagagcaccttgactctgtccagaaggagttcataattttcaaca

SEQ ID NO: 151391 - DNA, 76 bp, Homo sapiens
gaagacatgtcttcttcaagagcaccttgactctgtccagaaggagttcataattttcaacagagaaaagtaagta

SEQ ID NO: 151392 - DNA, 74 bp, Homo sapiens
atgtcttcttcaagagcaccttgactctgtccagaaggagttcataattttcaacagagaaaagtaagtaattc

SEQ ID NO: 151393 - DNA, 72 bp, Homo sapiens
aagagcaccttgactctgtccagaaggagttcataattttcaacagagaaaagtaagtaattcctgggagaa

SEQ ID NO: 151394 - DNA, 72 bp, Homo sapiens
ttgactctgtccagaaggagttcataattttcaacagagaaaagtaagtaattcctgggagaacaacagccc

SEQ ID NO: 151395 - DNA, 69 bp, Homo sapiens
aaggagttcataattttcaacagagaaaagtaagtaattcctgggagaacaacagccccagaaatggtg

SEQ ID NO: 151396 - DNA, 73 bp, Homo sapiens
ttcataattttcaacagagaaaagtaagtaattcctgggagaacaacagccccagaaatggtggcatgtttca

SEQ ID NO: 151397 - DNA, 65 bp, Homo sapiens
ttcttttctttttaagagtaaacagggactttaacaaaagacaaccaaatctagccttggaacaa

SEQ ID NO: 151398 - DNA, 65 bp, Homo sapiens
tttaagagtaaacagggactttaacaaaagacaaccaaatctagccttggaacaaaccaaagacc

SEQ ID NO: 151399 - DNA, 65 bp, Homo sapiens
agtaaacagggactttaacaaaagacaaccaaatctagccttggaacaaaccaaagacccacaag

SEQ ID NO: 151400 - DNA, 70 bp, Homo sapiens
ttaacaaaagacaaccaaatctagccttggaacaaaccaaagacccacaaggtgaggatggtcagaataa

SEQ ID NO: 151401 - DNA, 70 bp, Homo sapiens
acaaccaaatctagccttggaacaaaccaaagacccacaaggtgaggatggtcagaataacaacttgtaa

SEQ ID NO: 151402 - DNA, 71 bp, Homo sapiens
aacaaaccaaagacccacaaggtgaggatggtcagaataacaacttgtaaaggcctcatgtcttcttcttg

SEQ ID NO: 151403 - DNA, 74 bp, Homo sapiens
aaagacccacaaggtgaggatggtcagaataacaacttgtaaaggcctcatgtcttcttcttgggacaatctca

SEQ ID NO: 151404 - DNA, 75 bp, Homo sapiens
aaggtgaggatggtcagaataacaacttgtaaaggcctcatgtcttcttcttgggacaatctcatgccagaaact

SEQ ID NO: 151405 - DNA, 76 bp, Homo sapiens
atggtcagaataacaacttgtaaaggcctcatgtcttcttcttgggacaatctcatgccagaaacttctaattaca

SEQ ID NO: 151406 - DNA, 76 bp, Homo sapiens
aataacaacttgtaaaggcctcatgtcttcttcttgggacaatctcatgccagaaacttctaattacatatgtcaa

SEQ ID NO: 151407 - DNA, 79 bp, Homo sapiens
taaaggcctcatgtcttcttcttgggacaatctcatgccagaaacttctaattacatatgtcaagaaaagctgacagta

SEQ ID NO: 151408 - DNA, 79 bp, Homo sapiens
atgtcttcttcttgggacaatctcatgccagaaacttctaattacatatgtcaagaaaagctgacagtagttcttgcca

SEQ ID NO: 151409 - DNA, 80 bp, Homo sapiens
ttcttgggacaatctcatgccagaaacttctaattacatatgtcaagaaaagctgacagtagttcttgccactccacaca

SEQ ID NO: 151410 - DNA, 76 bp, Homo sapiens
agaaacttctaattacatatgtcaagaaaagctgacagtagttcttgccactccacacaccatgacttagaaaatg

SEQ ID NO: 151411 - DNA, 80 bp, Homo sapiens
taattacatatgtcaagaaaagctgacagtagttcttgccactccacacaccatgacttagaaaatgtgaatgaatatat

SEQ ID NO: 151412 - DNA, 78 bp, Homo sapiens
tgtcaagaaaagctgacagtagttcttgccactccacacaccatgacttagaaaatgtgaatgaatatatttcaaaaa

SEQ ID NO: 151413 - DNA, 78 bp, Homo sapiens
acagtagttcttgccactccacacaccatgacttagaaaatgtgaatgaatatatttcaaaaaaggcagcacaacaca

SEQ ID NO: 151414 - DNA, 78 bp, Homo sapiens
agttcttgccactccacacaccatgacttagaaaatgtgaatgaatatatttcaaaaaaggcagcacaacacagtgaa

SEQ ID NO: 151415 - DNA, 76 bp, Homo sapiens
actccacacaccatgacttagaaaatgtgaatgaatatatttcaaaaaaggcagcacaacacagtgaagggtcctg

SEQ ID NO: 151416 - DNA, 76 bp, Homo sapiens
atgacttagaaaatgtgaatgaatatatttcaaaaaaggcagcacaacacagtgaagggtcctgggcctgagctcc

SEQ ID NO: 151417 - DNA, 77 bp, Homo sapiens
aatgtgaatgaatatatttcaaaaaaggcagcacaacacagtgaagggtcctgggcctgagctcctgggatgtcatt

SEQ ID NO: 151418 - DNA, 79 bp, Homo sapiens
atatatttcaaaaaaggcagcacaacacagtgaagggtcctgggcctgagctcctgggatgtcatttcacatcaatcaa

SEQ ID NO: 151419 - DNA, 81 bp, Homo sapiens
aaaaaggcagcacaacacagtgaagggtcctgggcctgagctcctgggatgtcatttcacatcaatcaactgtgtgatcta

SEQ ID NO: 151420 - DNA, 82 bp, Homo sapiens
acaacacagtgaagggtcctgggcctgagctcctgggatgtcatttcacatcaatcaactgtgtgatctagagcaagtcact

SEQ ID NO: 151421 - DNA, 82 bp, Homo sapiens
tgaagggtcctgggcctgagctcctgggatgtcatttcacatcaatcaactgtgtgatctagagcaagtcacttagccactt

SEQ ID NO: 151422 - DNA, 84 bp, Homo sapiens
tgggcctgagctcctgggatgtcatttcacatcaatcaactgtgtgatctagagcaagtcacttagccactttctgtgctttac

SEQ ID NO: 151423 - DNA, 81 bp, Homo sapiens
tcctgggatgtcatttcacatcaatcaactgtgtgatctagagcaagtcacttagccactttctgtgctttactttattta

SEQ ID NO: 151424 - DNA, 80 bp, Homo sapiens
atgtcatttcacatcaatcaactgtgtgatctagagcaagtcacttagccactttctgtgctttactttatttatctaaa

SEQ ID NO: 151425 - DNA, 77 bp, Homo sapiens
aatatatgaatatagatttatttttccactccttctaattatgcagtgacaaatggacaaatggacacaggactcag

SEQ ID NO: 151426 - DNA, 76 bp, Homo sapiens
tatagatttatttttccactccttctaattatgcagtgacaaatggacaaatggacacaggactcagtgagacttt

SEQ ID NO: 151427 - DNA, 76 bp, Homo sapiens
atttatttttccactccttctaattatgcagtgacaaatggacaaatggacacaggactcagtgagacttttcaga

SEQ ID NO: 151428 - DNA, 78 bp, Homo sapiens
tccttctaattatgcagtgacaaatggacaaatggacacaggactcagtgagacttttcagacctcgaaagtttcata

SEQ ID NO: 151429 - DNA, 77 bp, Homo sapiens
taattatgcagtgacaaatggacaaatggacacaggactcagtgagacttttcagacctcgaaagtttcataaagtg

SEQ ID NO: 151430 - DNA, 74 bp, Homo sapiens
aaatggacaaatggacacaggactcagtgagacttttcagacctcgaaagtttcataaagtggtcagaatgccc

SEQ ID NO: 151431 - DNA, 74 bp, Homo sapiens
aatggacacaggactcagtgagacttttcagacctcgaaagtttcataaagtggtcagaatgccccaggctact

SEQ ID NO: 151432 - DNA, 75 bp, Homo sapiens
gactcagtgagacttttcagacctcgaaagtttcataaagtggtcagaatgccccaggctacttggataaagata

SEQ ID NO: 151433 - DNA, 71 bp, Homo sapiens
agacttttcagacctcgaaagtttcataaagtggtcagaatgccccaggctacttggataaagataaggaa

SEQ ID NO: 151434 - DNA, 74 bp, Homo sapiens
ttcagacctcgaaagtttcataaagtggtcagaatgccccaggctacttggataaagataaggaattctatcag

SEQ ID NO: 151435 - DNA, 74 bp, Homo sapiens
aaagtttcataaagtggtcagaatgccccaggctacttggataaagataaggaattctatcagggaggcatgaa

SEQ ID NO: 151436 - DNA, 78 bp, Homo sapiens
taaagtggtcagaatgccccaggctacttggataaagataaggaattctatcagggaggcatgaatggaatcagatta

SEQ ID NO: 151437 - DNA, 75 bp, Homo sapiens
agaatgccccaggctacttggataaagataaggaattctatcagggaggcatgaatggaatcagattaaaagtaa

SEQ ID NO: 151438 - DNA, 78 bp, Homo sapiens
aggctacttggataaagataaggaattctatcagggaggcatgaatggaatcagattaaaagtaacagagatggatga

SEQ ID NO: 151439 - DNA, 77 bp, Homo sapiens
ataaagataaggaattctatcagggaggcatgaatggaatcagattaaaagtaacagagatggatgagggccttcca

SEQ ID NO: 151440 - DNA, 82 bp, Homo sapiens
aattctatcagggaggcatgaatggaatcagattaaaagtaacagagatggatgagggccttccagtgatatgcgtgaatca

SEQ ID NO: 151441 - DNA, 83 bp, Homo sapiens
agggaggcatgaatggaatcagattaaaagtaacagagatggatgagggccttccagtgatatgcgtgaatcagcattagatc

SEQ ID NO: 151442 - DNA, 83 bp, Homo sapiens
aatggaatcagattaaaagtaacagagatggatgagggccttccagtgatatgcgtgaatcagcattagatccgcttatctca

SEQ ID NO: 151443 - DNA, 84 bp, Homo sapiens
agattaaaagtaacagagatggatgagggccttccagtgatatgcgtgaatcagcattagatccgcttatctcagctggcagga

SEQ ID NO: 151444 - DNA, 90 bp, Homo sapiens
agtaacagagatggatgagggccttccagtgatatgcgtgaatcagcattagatccgcttatctcagctggcaggagcctgctgtgcaca

SEQ ID NO: 151445 - DNA, 88 bp, Homo sapiens
atggatgagggccttccagtgatatgcgtgaatcagcattagatccgcttatctcagctggcaggagcctgctgtgcacaccacttcc

SEQ ID NO: 151446 - DNA, 89 bp, Homo sapiens
ttccagtgatatgcgtgaatcagcattagatccgcttatctcagctggcaggagcctgctgtgcacaccacttcccagctccctcttca

SEQ ID NO: 151447 - DNA, 87 bp, Homo sapiens
atatgcgtgaatcagcattagatccgcttatctcagctggcaggagcctgctgtgcacaccacttcccagctccctcttcaacaatg

SEQ ID NO: 151448 - DNA, 84 bp, Homo sapiens
aatcagcattagatccgcttatctcagctggcaggagcctgctgtgcacaccacttcccagctccctcttcaacaatgtgaaag

SEQ ID NO: 151449 - DNA, 78 bp, Homo sapiens
agctggcaggagcctgctgtgcacaccacttcccagctccctcttcaacaatgtgaaagtggtaacttgaaattggta

SEQ ID NO: 151450 - DNA, 75 bp, Homo sapiens
agcctgctgtgcacaccacttcccagctccctcttcaacaatgtgaaagtggtaacttgaaattggtaataatgg

SEQ ID NO: 151451 - DNA, 75 bp, Homo sapiens
tgcacaccacttcccagctccctcttcaacaatgtgaaagtggtaacttgaaattggtaataatgggagcattta

SEQ ID NO: 151452 - DNA, 72 bp, Homo sapiens
acttcccagctccctcttcaacaatgtgaaagtggtaacttgaaattggtaataatgggagcatttacacca

SEQ ID NO: 151453 - DNA, 71 bp, Homo sapiens
ctcttcaacaatgtgaaagtggtaacttgaaattggtaataatgggagcatttacaccacggaaactggta

SEQ ID NO: 151454 - DNA, 70 bp, Homo sapiens
aacaatgtgaaagtggtaacttgaaattggtaataatgggagcatttacaccacggaaactggtaaatgc

SEQ ID NO: 151455 - DNA, 67 bp, Homo sapiens
agtggtaacttgaaattggtaataatgggagcatttacaccacggaaactggtaaatgctcgttttt

SEQ ID NO: 151456 - DNA, 68 bp, Homo sapiens
ttgaaattggtaataatgggagcatttacaccacggaaactggtaaatgctcgttttttccctcctaa

SEQ ID NO: 151457 - DNA, 77 bp, Homo sapiens
agacgttccagggaatttgcaggtactcatgtggcacaaagaaccagaggctgactgcattaatgctgttagtttaa

SEQ ID NO: 151458 - DNA, 81 bp, Homo sapiens
aatttgcaggtactcatgtggcacaaagaaccagaggctgactgcattaatgctgttagtttaatgtggacagagacatcc

SEQ ID NO: 151459 - DNA, 80 bp, Homo sapiens
aggtactcatgtggcacaaagaaccagaggctgactgcattaatgctgttagtttaatgtggacagagacatcccacggc

SEQ ID NO: 151460 - DNA, 77 bp, Homo sapiens
acaaagaaccagaggctgactgcattaatgctgttagtttaatgtggacagagacatcccacggcgtgactgttagt

SEQ ID NO: 151461 - DNA, 79 bp, Homo sapiens
aaccagaggctgactgcattaatgctgttagtttaatgtggacagagacatcccacggcgtgactgttagttaggatga

SEQ ID NO: 151462 - DNA, 78 bp, Homo sapiens
actgcattaatgctgttagtttaatgtggacagagacatcccacggcgtgactgttagttaggatgagtcagcttggg

SEQ ID NO: 151463 - DNA, 74 bp, Homo sapiens
ctgttagtttaatgtggacagagacatcccacggcgtgactgttagttaggatgagtcagcttgggggagtttg

SEQ ID NO: 151464 - DNA, 75 bp, Homo sapiens
agtttaatgtggacagagacatcccacggcgtgactgttagttaggatgagtcagcttgggggagtttgtgcttc

SEQ ID NO: 151465 - DNA, 77 bp, Homo sapiens
ggacagagacatcccacggcgtgactgttagttaggatgagtcagcttgggggagtttgtgcttcctgcttggtgtg

SEQ ID NO: 151466 - DNA, 77 bp, Homo sapiens
atcccacggcgtgactgttagttaggatgagtcagcttgggggagtttgtgcttcctgcttggtgtggccagccaca

SEQ ID NO: 151467 - DNA, 78 bp, Homo sapiens
gtgactgttagttaggatgagtcagcttgggggagtttgtgcttcctgcttggtgtggccagccacatgccaaggtcc

SEQ ID NO: 151468 - DNA, 78 bp, Homo sapiens
ttaggatgagtcagcttgggggagtttgtgcttcctgcttggtgtggccagccacatgccaaggtcccctgccttcta

SEQ ID NO: 151469 - DNA, 77 bp, Homo sapiens
agcttgggggagtttgtgcttcctgcttggtgtggccagccacatgccaaggtcccctgccttctagcccagaatga

SEQ ID NO: 151470 - DNA, 76 bp, Homo sapiens
agtttgtgcttcctgcttggtgtggccagccacatgccaaggtcccctgccttctagcccagaatgacgggactgg

SEQ ID NO: 151471 - DNA, 77 bp, Homo sapiens
ttcctgcttggtgtggccagccacatgccaaggtcccctgccttctagcccagaatgacgggactgggcagaacacc

SEQ ID NO: 151472 - DNA, 73 bp, Homo sapiens
tggccagccacatgccaaggtcccctgccttctagcccagaatgacgggactgggcagaacacccccaacttt

SEQ ID NO: 151473 - DNA, 73 bp, Homo sapiens
acatgccaaggtcccctgccttctagcccagaatgacgggactgggcagaacacccccaacttttagctgcca

SEQ ID NO: 151474 - DNA, 74 bp, Homo sapiens
tcccctgccttctagcccagaatgacgggactgggcagaacacccccaacttttagctgccacttggctcatta

SEQ ID NO: 151475 - DNA, 76 bp, Homo sapiens
ttctagcccagaatgacgggactgggcagaacacccccaacttttagctgccacttggctcattacagcagtacca

SEQ ID NO: 151476 - DNA, 74 bp, Homo sapiens
agaatgacgggactgggcagaacacccccaacttttagctgccacttggctcattacagcagtaccagtatggg

SEQ ID NO: 151477 - DNA, 72 bp, Homo sapiens
actgggcagaacacccccaacttttagctgccacttggctcattacagcagtaccagtatgggggtgggagg

SEQ ID NO: 151478 - DNA, 71 bp, Homo sapiens
agaacacccccaacttttagctgccacttggctcattacagcagtaccagtatgggggtgggaggggtgag

SEQ ID NO: 151479 - DNA, 74 bp, Homo sapiens
aacttttagctgccacttggctcattacagcagtaccagtatgggggtgggaggggtgaggctgtggagtgaag

SEQ ID NO: 151480 - DNA, 76 bp, Homo sapiens
cacttggctcattacagcagtaccagtatgggggtgggaggggtgaggctgtggagtgaaggcggcgtatagggca

SEQ ID NO: 151481 - DNA, 76 bp, Homo sapiens
tcattacagcagtaccagtatgggggtgggaggggtgaggctgtggagtgaaggcggcgtatagggcagagactaa

SEQ ID NO: 151482 - DNA, 72 bp, Homo sapiens
agtaccagtatgggggtgggaggggtgaggctgtggagtgaaggcggcgtatagggcagagactaagaggtc

SEQ ID NO: 151483 - DNA, 74 bp, Homo sapiens
ggggtgggaggggtgaggctgtggagtgaaggcggcgtatagggcagagactaagaggtcctgtgagattctta

SEQ ID NO: 151484 - DNA, 79 bp, Homo sapiens
gggtgaggctgtggagtgaaggcggcgtatagggcagagactaagaggtcctgtgagattcttagaggagccatcctgc

SEQ ID NO: 151485 - DNA, 78 bp, Homo sapiens
gtgaaggcggcgtatagggcagagactaagaggtcctgtgagattcttagaggagccatcctgctccaaggggcctga

SEQ ID NO: 151486 - DNA, 84 bp, Homo sapiens
agagactaagaggtcctgtgagattcttagaggagccatcctgctccaaggggcctgagctgagtgtggtctgtgagcatctgc

SEQ ID NO: 151487 - DNA, 88 bp, Homo sapiens
gtcctgtgagattcttagaggagccatcctgctccaaggggcctgagctgagtgtggtctgtgagcatctgctgctcctctcagagag

SEQ ID NO: 151488 - DNA, 88 bp, Homo sapiens
attcttagaggagccatcctgctccaaggggcctgagctgagtgtggtctgtgagcatctgctgctcctctcagagagggagatctca

SEQ ID NO: 151489 - DNA, 90 bp, Homo sapiens
aggagccatcctgctccaaggggcctgagctgagtgtggtctgtgagcatctgctgctcctctcagagagggagatctcactctctgcca

SEQ ID NO: 151490 - DNA, 89 bp, Homo sapiens
tccaaggggcctgagctgagtgtggtctgtgagcatctgctgctcctctcagagagggagatctcactctctgccagtctgtctagccc

SEQ ID NO: 151491 - DNA, 90 bp, Homo sapiens
tgagctgagtgtggtctgtgagcatctgctgctcctctcagagagggagatctcactctctgccagtctgtctagccccaaagagcctgg

SEQ ID NO: 151492 - DNA, 86 bp, Homo sapiens
tgtggtctgtgagcatctgctgctcctctcagagagggagatctcactctctgccagtctgtctagccccaaagagcctggttttc

SEQ ID NO: 151493 - DNA, 88 bp, Homo sapiens
tgtgagcatctgctgctcctctcagagagggagatctcactctctgccagtctgtctagccccaaagagcctggttttctcagtatca

SEQ ID NO: 151494 - DNA, 84 bp, Homo sapiens
tgctcctctcagagagggagatctcactctctgccagtctgtctagccccaaagagcctggttttctcagtatcagtgtagctc

SEQ ID NO: 151495 - DNA, 79 bp, Homo sapiens
agagagggagatctcactctctgccagtctgtctagccccaaagagcctggttttctcagtatcagtgtagctcctggg

SEQ ID NO: 151496 - DNA, 80 bp, Homo sapiens
agatctcactctctgccagtctgtctagccccaaagagcctggttttctcagtatcagtgtagctcctggggacttcata

SEQ ID NO: 151497 - DNA, 79 bp, Homo sapiens
tgccagtctgtctagccccaaagagcctggttttctcagtatcagtgtagctcctggggacttcataggcataaagtca

SEQ ID NO: 151498 - DNA, 76 bp, Homo sapiens
tctagccccaaagagcctggttttctcagtatcagtgtagctcctggggacttcataggcataaagtcagtccatt

SEQ ID NO: 151499 - DNA, 76 bp, Homo sapiens
ctggttttctcagtatcagtgtagctcctggggacttcataggcataaagtcagtccatttccatgaagataaggg

SEQ ID NO: 151500 - DNA, 75 bp, Homo sapiens
agtatcagtgtagctcctggggacttcataggcataaagtcagtccatttccatgaagataaggggattaggaaa

SEQ ID NO: 151501 - DNA, 72 bp, Homo sapiens
ctcctggggacttcataggcataaagtcagtccatttccatgaagataaggggattaggaaagaaggttcta

SEQ ID NO: 151502 - DNA, 74 bp, Homo sapiens
cttcataggcataaagtcagtccatttccatgaagataaggggattaggaaagaaggttctactagttggcata

SEQ ID NO: 151503 - DNA, 72 bp, Homo sapiens
agtccatttccatgaagataaggggattaggaaagaaggttctactagttggcatagcaaacacgaggccaa

SEQ ID NO: 151504 - DNA, 74 bp, Homo sapiens
atgaagataaggggattaggaaagaaggttctactagttggcatagcaaacacgaggccaacaccatgagaaca

SEQ ID NO: 151505 - DNA, 72 bp, Homo sapiens
ataaggggattaggaaagaaggttctactagttggcatagcaaacacgaggccaacaccatgagaacagtag

SEQ ID NO: 151506 - DNA, 71 bp, Homo sapiens
taggaaagaaggttctactagttggcatagcaaacacgaggccaacaccatgagaacagtaggggaggggg

SEQ ID NO: 151507 - DNA, 73 bp, Homo sapiens
gttctactagttggcatagcaaacacgaggccaacaccatgagaacagtaggggaggggggggtgagggctca

SEQ ID NO: 151508 - DNA, 73 bp, Homo sapiens
gttggcatagcaaacacgaggccaacaccatgagaacagtaggggaggggggggtgagggctcagcccccagc

SEQ ID NO: 151509 - DNA, 69 bp, Homo sapiens
aaacacgaggccaacaccatgagaacagtaggggaggggggggtgagggctcagcccccagcccctgac

SEQ ID NO: 151510 - DNA, 74 bp, Homo sapiens
agaacagtaggggaggggggggtgagggctcagcccccagcccctgactggcagtgatggcccatgctcaggaa

SEQ ID NO: 151511 - DNA, 76 bp, Homo sapiens
aggggggggtgagggctcagcccccagcccctgactggcagtgatggcccatgctcaggaagtgggatcctctgac

SEQ ID NO: 151512 - DNA, 80 bp, Homo sapiens
tgagggctcagcccccagcccctgactggcagtgatggcccatgctcaggaagtgggatcctctgacctcccctgaatcc

SEQ ID NO: 151513 - DNA, 76 bp, Homo sapiens
cccccagcccctgactggcagtgatggcccatgctcaggaagtgggatcctctgacctcccctgaatccctcacct

SEQ ID NO: 151514 - DNA, 78 bp, Homo sapiens
ctgactggcagtgatggcccatgctcaggaagtgggatcctctgacctcccctgaatccctcaccttcccaagtttca

SEQ ID NO: 151515 - DNA, 75 bp, Homo sapiens
atgctcaggaagtgggatcctctgacctcccctgaatccctcaccttcccaagtttcagagctgggccgagctgt

SEQ ID NO: 151516 - DNA, 75 bp, Homo sapiens
tcctctgacctcccctgaatccctcaccttcccaagtttcagagctgggccgagctgttgagtgaaatgaccgaa

SEQ ID NO: 151517 - DNA, 75 bp, Homo sapiens
cctgaatccctcaccttcccaagtttcagagctgggccgagctgttgagtgaaatgaccgaaggcagagtttgta

SEQ ID NO: 151518 - DNA, 75 bp, Homo sapiens
ctcaccttcccaagtttcagagctgggccgagctgttgagtgaaatgaccgaaggcagagtttgtatgttctccc

SEQ ID NO: 151519 - DNA, 75 bp, Homo sapiens
ttcccaagtttcagagctgggccgagctgttgagtgaaatgaccgaaggcagagtttgtatgttctccccgtgtc

SEQ ID NO: 151520 - DNA, 77 bp, Homo sapiens
agagctgggccgagctgttgagtgaaatgaccgaaggcagagtttgtatgttctccccgtgtcgccccatccatgga

SEQ ID NO: 151521 - DNA, 75 bp, Homo sapiens
gctgttgagtgaaatgaccgaaggcagagtttgtatgttctccccgtgtcgccccatccatggaggagttgaagt

SEQ ID NO: 151522 - DNA, 73 bp, Homo sapiens
agtgaaatgaccgaaggcagagtttgtatgttctccccgtgtcgccccatccatggaggagttgaagtttgtg

SEQ ID NO: 151523 - DNA, 70 bp, Homo sapiens
accgaaggcagagtttgtatgttctccccgtgtcgccccatccatggaggagttgaagtttgtgggaggg

SEQ ID NO: 151524 - DNA, 71 bp, Homo sapiens
agagtttgtatgttctccccgtgtcgccccatccatggaggagttgaagtttgtgggaggggagagtggta

SEQ ID NO: 151525 - DNA, 72 bp, Homo sapiens
ttctccccgtgtcgccccatccatggaggagttgaagtttgtgggaggggagagtggtactccctgtcgtca

SEQ ID NO: 151526 - DNA, 75 bp, Homo sapiens
tcgccccatccatggaggagttgaagtttgtgggaggggagagtggtactccctgtcgtcaactcctcagcagaa

SEQ ID NO: 151527 - DNA, 74 bp, Homo sapiens
tggaggagttgaagtttgtgggaggggagagtggtactccctgtcgtcaactcctcagcagaactgatagttgt

SEQ ID NO: 151528 - DNA, 78 bp, Homo sapiens
ggaggggagagtggtactccctgtcgtcaactcctcagcagaactgatagttgttgggctgcagcaagggctgggcga

SEQ ID NO: 151529 - DNA, 84 bp, Homo sapiens
actcctcagcagaactgatagttgttgggctgcagcaagggctgggcgatatccccttgctcgcagcaggtcaggtgctcacta

SEQ ID NO: 151530 - DNA, 83 bp, Homo sapiens
atagttgttgggctgcagcaagggctgggcgatatccccttgctcgcagcaggtcaggtgctcactagagctctcctcctcca

SEQ ID NO: 151531 - DNA, 91 bp, Homo sapiens
atatccccttgctcgcagcaggtcaggtgctcactagagctctcctcctccagctcactgctgctgctgccgctgccaccgcttctgctgc

SEQ ID NO: 151532 - DNA, 91 bp, Homo sapiens
aggtcaggtgctcactagagctctcctcctccagctcactgctgctgctgccgctgccaccgcttctgctgctgctcggcagattggtata

SEQ ID NO: 151533 - DNA, 88 bp, Homo sapiens
actagagctctcctcctccagctcactgctgctgctgccgctgccaccgcttctgctgctgctcggcagattggtatagtcctgaggg

SEQ ID NO: 151534 - DNA, 87 bp, Homo sapiens
tcctcctccagctcactgctgctgctgccgctgccaccgcttctgctgctgctcggcagattggtatagtcctgagggtgggaggga

SEQ ID NO: 151535 - DNA, 85 bp, Homo sapiens
agctcactgctgctgctgccgctgccaccgcttctgctgctgctcggcagattggtatagtcctgagggtgggagggaccagaaa

SEQ ID NO: 151536 - DNA, 82 bp, Homo sapiens
ctgctgccgctgccaccgcttctgctgctgctcggcagattggtatagtcctgagggtgggagggaccagaaactgtcagtc

SEQ ID NO: 151537 - DNA, 70 bp, Homo sapiens
agcccaacgtgctttaccggccacccaccccaagcctcaccccactcacccgctctctcctgtcctcttg

SEQ ID NO: 151538 - DNA, 72 bp, Homo sapiens
tttaccggccacccaccccaagcctcaccccactcacccgctctctcctgtcctcttgggcctgctcctgaa

SEQ ID NO: 151539 - DNA, 74 bp, Homo sapiens
acccaccccaagcctcaccccactcacccgctctctcctgtcctcttgggcctgctcctgaaggaaggagcaga

SEQ ID NO: 151540 - DNA, 77 bp, Homo sapiens
aagcctcaccccactcacccgctctctcctgtcctcttgggcctgctcctgaaggaaggagcagatctgctggaagg

SEQ ID NO: 151541 - DNA, 77 bp, Homo sapiens
actcacccgctctctcctgtcctcttgggcctgctcctgaaggaaggagcagatctgctggaaggtgggtctgtggg

SEQ ID NO: 151542 - DNA, 78 bp, Homo sapiens
tctctcctgtcctcttgggcctgctcctgaaggaaggagcagatctgctggaaggtgggtctgtgggtgggctccaag

SEQ ID NO: 151543 - DNA, 79 bp, Homo sapiens
tgtcctcttgggcctgctcctgaaggaaggagcagatctgctggaaggtgggtctgtgggtgggctccaaggcccagca

SEQ ID NO: 151544 - DNA, 84 bp, Homo sapiens
ctgctcctgaaggaaggagcagatctgctggaaggtgggtctgtgggtgggctccaaggcccagcaggcctgcatgatgctgta

SEQ ID NO: 151545 - DNA, 82 bp, Homo sapiens
aaggaaggagcagatctgctggaaggtgggtctgtgggtgggctccaaggcccagcaggcctgcatgatgctgtatctggga

SEQ ID NO: 151546 - DNA, 83 bp, Homo sapiens
agatctgctggaaggtgggtctgtgggtgggctccaaggcccagcaggcctgcatgatgctgtatctgggagataggacagag

SEQ ID NO: 151547 - DNA, 83 bp, Homo sapiens
gaaggtgggtctgtgggtgggctccaaggcccagcaggcctgcatgatgctgtatctgggagataggacagaggatgcccatg

SEQ ID NO: 151548 - DNA, 86 bp, Homo sapiens
tctgtgggtgggctccaaggcccagcaggcctgcatgatgctgtatctgggagataggacagaggatgcccatgggcagctcccta

SEQ ID NO: 151549 - DNA, 70 bp, Homo sapiens
agcgaaagcctggggtgtccttttccctccctgggatcccttcgcttacatattctttggggcaaatgca

SEQ ID NO: 151550 - DNA, 71 bp, Homo sapiens
ggtgtccttttccctccctgggatcccttcgcttacatattctttggggcaaatgcaggctgggccatttg

SEQ ID NO: 151551 - DNA, 73 bp, Homo sapiens
ttttccctccctgggatcccttcgcttacatattctttggggcaaatgcaggctgggccatttggtatccatc

SEQ ID NO: 151552 - DNA, 75 bp, Homo sapiens
ggatcccttcgcttacatattctttggggcaaatgcaggctgggccatttggtatccatccttcaccagtttata

SEQ ID NO: 151553 - DNA, 74 bp, Homo sapiens
cttcgcttacatattctttggggcaaatgcaggctgggccatttggtatccatccttcaccagtttatagaact

SEQ ID NO: 151554 - DNA, 76 bp, Homo sapiens
atattctttggggcaaatgcaggctgggccatttggtatccatccttcaccagtttatagaacttgctgttcacca

SEQ ID NO: 151555 - DNA, 76 bp, Homo sapiens
aaatgcaggctgggccatttggtatccatccttcaccagtttatagaacttgctgttcaccaggatgccagggtag

SEQ ID NO: 151556 - DNA, 74 bp, Homo sapiens
aggctgggccatttggtatccatccttcaccagtttatagaacttgctgttcaccaggatgccagggtagggat

SEQ ID NO: 151557 - DNA, 76 bp, Homo sapiens
atttggtatccatccttcaccagtttatagaacttgctgttcaccaggatgccagggtagggattcagccctgcaa

SEQ ID NO: 151558 - DNA, 77 bp, Homo sapiens
atccttcaccagtttatagaacttgctgttcaccaggatgccagggtagggattcagccctgcaaaggccaagatca

SEQ ID NO: 151559 - DNA, 75 bp, Homo sapiens
agtttatagaacttgctgttcaccaggatgccagggtagggattcagccctgcaaaggccaagatcaggtaagag

SEQ ID NO: 151560 - DNA, 81 bp, Homo sapiens
agaggagccagccccaggctctgcctggagtgggcccagtggctcaccaagtgagaagatctcccagaggaggatgccata

SEQ ID NO: 151561 - DNA, 80 bp, Homo sapiens
agccccaggctctgcctggagtgggcccagtggctcaccaagtgagaagatctcccagaggaggatgccataggaccaga

SEQ ID NO: 151562 - DNA, 82 bp, Homo sapiens
tctgcctggagtgggcccagtggctcaccaagtgagaagatctcccagaggaggatgccataggaccagacgtcgctctgaa

SEQ ID NO: 151563 - DNA, 79 bp, Homo sapiens
gggcccagtggctcaccaagtgagaagatctcccagaggaggatgccataggaccagacgtcgctctgaaccgtgtaga

SEQ ID NO: 151564 - DNA, 81 bp, Homo sapiens
tggctcaccaagtgagaagatctcccagaggaggatgccataggaccagacgtcgctctgaaccgtgtagacacagtcaaa

SEQ ID NO: 151565 - DNA, 81 bp, Homo sapiens
aagtgagaagatctcccagaggaggatgccataggaccagacgtcgctctgaaccgtgtagacacagtcaaagatgctctc

SEQ ID NO: 151566 - DNA, 81 bp, Homo sapiens
agatctcccagaggaggatgccataggaccagacgtcgctctgaaccgtgtagacacagtcaaagatgctctctggggcca

SEQ ID NO: 151567 - DNA, 81 bp, Homo sapiens
aggaggatgccataggaccagacgtcgctctgaaccgtgtagacacagtcaaagatgctctctggggccatccacttcaca

SEQ ID NO: 151568 - DNA, 79 bp, Homo sapiens
ataggaccagacgtcgctctgaaccgtgtagacacagtcaaagatgctctctggggccatccacttcacaggcaggcgg

SEQ ID NO: 151569 - DNA, 80 bp, Homo sapiens
acgtcgctctgaaccgtgtagacacagtcaaagatgctctctggggccatccacttcacaggcaggcgggcctgggatga

SEQ ID NO: 151570 - DNA, 79 bp, Homo sapiens
ctgaaccgtgtagacacagtcaaagatgctctctggggccatccacttcacaggcaggcgggcctgggatgacagtccc

SEQ ID NO: 151571 - DNA, 78 bp, Homo sapiens
tagacacagtcaaagatgctctctggggccatccacttcacaggcaggcgggcctgggatgacagtccccagttattt

SEQ ID NO: 151572 - DNA, 74 bp, Homo sapiens
aaagatgctctctggggccatccacttcacaggcaggcgggcctgggatgacagtccccagttattttgggccc

SEQ ID NO: 151573 - DNA, 68 bp, Homo sapiens
cctgggatgacagtccccagttattttgggccccgactcttcaccccctccccagcctggcccaagcc

SEQ ID NO: 151574 - DNA, 72 bp, Homo sapiens
actcttcaccccctccccagcctggcccaagccctcccagcacttacattgcccttgacaatgtagttggag

SEQ ID NO: 151575 - DNA, 77 bp, Homo sapiens
cctccccagcctggcccaagccctcccagcacttacattgcccttgacaatgtagttggagtcattcatgatgtccc

SEQ ID NO: 151576 - DNA, 79 bp, Homo sapiens
ctggcccaagccctcccagcacttacattgcccttgacaatgtagttggagtcattcatgatgtccctagccagcccga

SEQ ID NO: 151577 - DNA, 77 bp, Homo sapiens
aagccctcccagcacttacattgcccttgacaatgtagttggagtcattcatgatgtccctagccagcccgaagtcc

SEQ ID NO: 151578 - DNA, 77 bp, Homo sapiens
acttacattgcccttgacaatgtagttggagtcattcatgatgtccctagccagcccgaagtccccaatcttggcca

SEQ ID NO: 151579 - DNA, 79 bp, Homo sapiens
attgcccttgacaatgtagttggagtcattcatgatgtccctagccagcccgaagtccccaatcttggccacatgacca

SEQ ID NO: 151580 - DNA, 79 bp, Homo sapiens
acaatgtagttggagtcattcatgatgtccctagccagcccgaagtccccaatcttggccacatgaccattggtcaaca

SEQ ID NO: 151581 - DNA, 79 bp, Homo sapiens
ttggagtcattcatgatgtccctagccagcccgaagtccccaatcttggccacatgaccattggtcaacagcacgttac

SEQ ID NO: 151582 - DNA, 78 bp, Homo sapiens
atgatgtccctagccagcccgaagtccccaatcttggccacatgaccattggtcaacagcacgttacgcgctgccacg

SEQ ID NO: 151583 - DNA, 76 bp, Homo sapiens
tagccagcccgaagtccccaatcttggccacatgaccattggtcaacagcacgttacgcgctgccacgtcccggtg

SEQ ID NO: 151584 - DNA, 77 bp, Homo sapiens
aagtccccaatcttggccacatgaccattggtcaacagcacgttacgcgctgccacgtcccggtggatgcactgagg

SEQ ID NO: 151585 - DNA, 81 bp, Homo sapiens
aatcttggccacatgaccattggtcaacagcacgttacgcgctgccacgtcccggtggatgcactgagggaaagcactgca

SEQ ID NO: 151586 - DNA, 78 bp, Homo sapiens
tgaccattggtcaacagcacgttacgcgctgccacgtcccggtggatgcactgagggaaagcactgcagggttagtct

SEQ ID NO: 151587 - DNA, 77 bp, Homo sapiens
ttggtcaacagcacgttacgcgctgccacgtcccggtggatgcactgagggaaagcactgcagggttagtcttgggc

SEQ ID NO: 151588 - DNA, 78 bp, Homo sapiens
gagcacagacctgggtggctatgagccagggccaggttcctactcacattcttggaagcgaggaaggccatgccctgg

SEQ ID NO: 151589 - DNA, 76 bp, Homo sapiens
agacctgggtggctatgagccagggccaggttcctactcacattcttggaagcgaggaaggccatgccctgggcta

SEQ ID NO: 151590 - DNA, 77 bp, Homo sapiens
ctatgagccagggccaggttcctactcacattcttggaagcgaggaaggccatgccctgggctacttggctggagaa

SEQ ID NO: 151591 - DNA, 76 bp, Homo sapiens
agggccaggttcctactcacattcttggaagcgaggaaggccatgccctgggctacttggctggagaagtgaagca

SEQ ID NO: 151592 - DNA, 76 bp, Homo sapiens
ttcctactcacattcttggaagcgaggaaggccatgccctgggctacttggctggagaagtgaagcaggtcccgga

SEQ ID NO: 151593 - DNA, 75 bp, Homo sapiens
acattcttggaagcgaggaaggccatgccctgggctacttggctggagaagtgaagcaggtcccggagctccagg

SEQ ID NO: 151594 - DNA, 74 bp, Homo sapiens
aggaaggccatgccctgggctacttggctggagaagtgaagcaggtcccggagctccaggggccgtccatcctc

SEQ ID NO: 151595 - DNA, 74 bp, Homo sapiens
atgccctgggctacttggctggagaagtgaagcaggtcccggagctccaggggccgtccatcctccttgtccag

SEQ ID NO: 151596 - DNA, 73 bp, Homo sapiens
tacttggctggagaagtgaagcaggtcccggagctccaggggccgtccatcctccttgtccaggtctagggtg

SEQ ID NO: 151597 - DNA, 72 bp, Homo sapiens
tggagaagtgaagcaggtcccggagctccaggggccgtccatcctccttgtccaggtctagggtgggaagag

SEQ ID NO: 151598 - DNA, 72 bp, Homo sapiens
tgaagcaggtcccggagctccaggggccgtccatcctccttgtccaggtctagggtgggaagaggcgtcagg

SEQ ID NO: 151599 - DNA, 73 bp, Homo sapiens
tcccggagctccaggggccgtccatcctccttgtccaggtctagggtgggaagaggcgtcagggcagccctgc

SEQ ID NO: 151600 - DNA, 73 bp, Homo sapiens
tccttttcccttgttatcaagcaaatggggcctggccctgggacctcctcaccttgctcagagaaggagtcat

SEQ ID NO: 151601 - DNA, 76 bp, Homo sapiens
ttgttatcaagcaaatggggcctggccctgggacctcctcaccttgctcagagaaggagtcatttgaagaagtgga

SEQ ID NO: 151602 - DNA, 76 bp, Homo sapiens
atcaagcaaatggggcctggccctgggacctcctcaccttgctcagagaaggagtcatttgaagaagtggagacag

SEQ ID NO: 151603 - DNA, 78 bp, Homo sapiens
cctggccctgggacctcctcaccttgctcagagaaggagtcatttgaagaagtggagacaggcctcatctccacatag

SEQ ID NO: 151604 - DNA, 80 bp, Homo sapiens
tgggacctcctcaccttgctcagagaaggagtcatttgaagaagtggagacaggcctcatctccacataggtgtccacac

SEQ ID NO: 151605 - DNA, 80 bp, Homo sapiens
accttgctcagagaaggagtcatttgaagaagtggagacaggcctcatctccacataggtgtccacaccctggctggaga

SEQ ID NO: 151606 - DNA, 79 bp, Homo sapiens
agagaaggagtcatttgaagaagtggagacaggcctcatctccacataggtgtccacaccctggctggagaagccactg

SEQ ID NO: 151607 - DNA, 80 bp, Homo sapiens
tcatttgaagaagtggagacaggcctcatctccacataggtgtccacaccctggctggagaagccactgtccctacatag

SEQ ID NO: 151608 - DNA, 79 bp, Homo sapiens
aagaagtggagacaggcctcatctccacataggtgtccacaccctggctggagaagccactgtccctacataggagaga

SEQ ID NO: 151609 - DNA, 77 bp, Homo sapiens
agacaggcctcatctccacataggtgtccacaccctggctggagaagccactgtccctacataggagagagggttgg

SEQ ID NO: 151610 - DNA, 75 bp, Homo sapiens
atctccacataggtgtccacaccctggctggagaagccactgtccctacataggagagagggttggggggcagag

SEQ ID NO: 151611 - DNA, 77 bp, Homo sapiens
taggtgtccacaccctggctggagaagccactgtccctacataggagagagggttggggggcagaggtcactcatca

SEQ ID NO: 151612 - DNA, 72 bp, Homo sapiens
atcctgcctcccagacctggcctttttcttgtcctttgccaggggctacctgcggacatatttcttctcgag

SEQ ID NO: 151613 - DNA, 72 bp, Homo sapiens
gacctggcctttttcttgtcctttgccaggggctacctgcggacatatttcttctcgaggtggatgttctta

SEQ ID NO: 151614 - DNA, 73 bp, Homo sapiens
ttttcttgtcctttgccaggggctacctgcggacatatttcttctcgaggtggatgttcttatagtcgacgcc

SEQ ID NO: 151615 - DNA, 74 bp, Homo sapiens
ttgtcctttgccaggggctacctgcggacatatttcttctcgaggtggatgttcttatagtcgacgcctccctc

SEQ ID NO: 151616 - DNA, 72 bp, Homo sapiens
gggctacctgcggacatatttcttctcgaggtggatgttcttatagtcgacgcctccctcggggtcctggcc

SEQ ID NO: 151617 - DNA, 73 bp, Homo sapiens
ctgcggacatatttcttctcgaggtggatgttcttatagtcgacgcctccctcggggtcctggccggggctca

SEQ ID NO: 151618 - DNA, 71 bp, Homo sapiens
tatttcttctcgaggtggatgttcttatagtcgacgcctccctcggggtcctggccggggctcaggctggg

SEQ ID NO: 151619 - DNA, 72 bp, Homo sapiens
aggtggatgttcttatagtcgacgcctccctcggggtcctggccggggctcaggctgggtcccagcatggcc

SEQ ID NO: 151620 - DNA, 73 bp, Homo sapiens
gttcttatagtcgacgcctccctcggggtcctggccggggctcaggctgggtcccagcatggcctcagccttc

SEQ ID NO: 151621 - DNA, 74 bp, Homo sapiens
gcctccctcggggtcctggccggggctcaggctgggtcccagcatggcctcagccttccttcgcagaaagttga

SEQ ID NO: 151622 - DNA, 77 bp, Homo sapiens
gggtcctggccggggctcaggctgggtcccagcatggcctcagccttccttcgcagaaagttgagcaggtcgccata

SEQ ID NO: 151623 - DNA, 79 bp, Homo sapiens
cggggctcaggctgggtcccagcatggcctcagccttccttcgcagaaagttgagcaggtcgccatagcaacagtactc

SEQ ID NO: 151624 - DNA, 81 bp, Homo sapiens
gctgggtcccagcatggcctcagccttccttcgcagaaagttgagcaggtcgccatagcaacagtactccgtgatgaccag

SEQ ID NO: 151625 - DNA, 80 bp, Homo sapiens
agcatggcctcagccttccttcgcagaaagttgagcaggtcgccatagcaacagtactccgtgatgaccagtacagggcc

SEQ ID NO: 151626 - DNA, 80 bp, Homo sapiens
cctcagccttccttcgcagaaagttgagcaggtcgccatagcaacagtactccgtgatgaccagtacagggcctagagca

SEQ ID NO: 151627 - DNA, 79 bp, Homo sapiens
ttccttcgcagaaagttgagcaggtcgccatagcaacagtactccgtgatgaccagtacagggcctagagcagccaagg

SEQ ID NO: 151628 - DNA, 76 bp, Homo sapiens
aaagttgagcaggtcgccatagcaacagtactccgtgatgaccagtacagggcctagagcagccaagggtgtgggg

SEQ ID NO: 151629 - DNA, 75 bp, Homo sapiens
aggtcgccatagcaacagtactccgtgatgaccagtacagggcctagagcagccaagggtgtggggtgagggagg

SEQ ID NO: 151630 - DNA, 67 bp, Homo sapiens
cccagaggccccaagaccttggccccaggaaccccaaggcccttacctccatgggtacaggctccca

SEQ ID NO: 151631 - DNA, 67 bp, Homo sapiens
ccaagaccttggccccaggaaccccaaggcccttacctccatgggtacaggctcccagaaggttgac

SEQ ID NO: 151632 - DNA, 69 bp, Homo sapiens
ttggccccaggaaccccaaggcccttacctccatgggtacaggctcccagaaggttgacgatgttctcg

SEQ ID NO: 151633 - DNA, 71 bp, Homo sapiens
aggaaccccaaggcccttacctccatgggtacaggctcccagaaggttgacgatgttctcgtgctggccca

SEQ ID NO: 151634 - DNA, 76 bp, Homo sapiens
aaggcccttacctccatgggtacaggctcccagaaggttgacgatgttctcgtgctggcccaggtggctcatgatc

SEQ ID NO: 151635 - DNA, 82 bp, Homo sapiens
tccatgggtacaggctcccagaaggttgacgatgttctcgtgctggcccaggtggctcatgatcttcagctcggacatgagg

SEQ ID NO: 151636 - DNA, 81 bp, Homo sapiens
tacaggctcccagaaggttgacgatgttctcgtgctggcccaggtggctcatgatcttcagctcggacatgagggcctcct

SEQ ID NO: 151637 - DNA, 84 bp, Homo sapiens
agaaggttgacgatgttctcgtgctggcccaggtggctcatgatcttcagctcggacatgagggcctccttctcatcagcatgg

SEQ ID NO: 151638 - DNA, 85 bp, Homo sapiens
acgatgttctcgtgctggcccaggtggctcatgatcttcagctcggacatgagggcctccttctcatcagcatgggccgtggctg

SEQ ID NO: 151639 - DNA, 83 bp, Homo sapiens
tggcccaggtggctcatgatcttcagctcggacatgagggcctccttctcatcagcatgggccgtggctgggaggaagaacca

SEQ ID NO: 151640 - DNA, 83 bp, Homo sapiens
tggctcatgatcttcagctcggacatgagggcctccttctcatcagcatgggccgtggctgggaggaagaaccacagtcccaa

SEQ ID NO: 151641 - DNA, 80 bp, Homo sapiens
atgatcttcagctcggacatgagggcctccttctcatcagcatgggccgtggctgggaggaagaaccacagtcccaaaga

SEQ ID NO: 151642 - DNA, 77 bp, Homo sapiens
ctcggacatgagggcctccttctcatcagcatgggccgtggctgggaggaagaaccacagtcccaaagacagggaga

SEQ ID NO: 151643 - DNA, 76 bp, Homo sapiens
agcatctaccaccccccatcccttccctcatcccctcccctcactcacacttcagcatcttcacagccaccttcag

SEQ ID NO: 151644 - DNA, 77 bp, Homo sapiens
cccccatcccttccctcatcccctcccctcactcacacttcagcatcttcacagccaccttcaggacagcatcctcc

SEQ ID NO: 151645 - DNA, 80 bp, Homo sapiens
ttccctcatcccctcccctcactcacacttcagcatcttcacagccaccttcaggacagcatcctccttgcccagaccaa

SEQ ID NO: 151646 - DNA, 78 bp, Homo sapiens
ccctcccctcactcacacttcagcatcttcacagccaccttcaggacagcatcctccttgcccagaccaaaggccgtg

SEQ ID NO: 151647 - DNA, 79 bp, Homo sapiens
actcacacttcagcatcttcacagccaccttcaggacagcatcctccttgcccagaccaaaggccgtggcctccaccac

SEQ ID NO: 151648 - DNA, 77 bp, Homo sapiens
acttcagcatcttcacagccaccttcaggacagcatcctccttgcccagaccaaaggccgtggcctccaccaccttc

SEQ ID NO: 151649 - DNA, 74 bp, Homo sapiens
tcttcacagccaccttcaggacagcatcctccttgcccagaccaaaggccgtggcctccaccaccttcccaaag

SEQ ID NO: 151650 - DNA, 73 bp, Homo sapiens
accttcaggacagcatcctccttgcccagaccaaaggccgtggcctccaccaccttcccaaaggctccagctc

SEQ ID NO: 151651 - DNA, 70 bp, Homo sapiens
atcctccttgcccagaccaaaggccgtggcctccaccaccttcccaaaggctccagctccgagggtctta

SEQ ID NO: 151652 - DNA, 71 bp, Homo sapiens
ttgcccagaccaaaggccgtggcctccaccaccttcccaaaggctccagctccgagggtcttacctgccac

SEQ ID NO: 151653 - DNA, 71 bp, Homo sapiens
accaaaggccgtggcctccaccaccttcccaaaggctccagctccgagggtcttacctgccacgcacacag

SEQ ID NO: 151654 - DNA, 70 bp, Homo sapiens
ctccaccaccttcccaaaggctccagctccgagggtcttacctgccacgcacacaggtcccttaagtccc

SEQ ID NO: 151655 - DNA, 78 bp, Homo sapiens
acaggccctgtgataggaagctgtggagtgatgagctgccatctcaccaaactgcaggttgttccgggggaactccca

SEQ ID NO: 151656 - DNA, 78 bp, Homo sapiens
tgataggaagctgtggagtgatgagctgccatctcaccaaactgcaggttgttccgggggaactcccacttctcgttg

SEQ ID NO: 151657 - DNA, 75 bp, Homo sapiens
aagctgtggagtgatgagctgccatctcaccaaactgcaggttgttccgggggaactcccacttctcgttgtaag

SEQ ID NO: 151658 - DNA, 77 bp, Homo sapiens
agtgatgagctgccatctcaccaaactgcaggttgttccgggggaactcccacttctcgttgtaaggcagctgcgtg

SEQ ID NO: 151659 - DNA, 73 bp, Homo sapiens
tctcaccaaactgcaggttgttccgggggaactcccacttctcgttgtaaggcagctgcgtggggtcgatgaa

SEQ ID NO: 151660 - DNA, 71 bp, Homo sapiens
actgcaggttgttccgggggaactcccacttctcgttgtaaggcagctgcgtggggtcgatgaaagtataa

SEQ ID NO: 151661 - DNA, 69 bp, Homo sapiens
ggttgttccgggggaactcccacttctcgttgtaaggcagctgcgtggggtcgatgaaagtataactgt

SEQ ID NO: 151662 - DNA, 78 bp, Homo sapiens
aactcccacttctcgttgtaaggcagctgcgtggggtcgatgaaagtataactgttgccctcatagctctcgatgatc

SEQ ID NO: 151663 - DNA, 79 bp, Homo sapiens
acttctcgttgtaaggcagctgcgtggggtcgatgaaagtataactgttgccctcatagctctcgatgatcttccagcg

SEQ ID NO: 151664 - DNA, 79 bp, Homo sapiens
taaggcagctgcgtggggtcgatgaaagtataactgttgccctcatagctctcgatgatcttccagcggacctggtact

SEQ ID NO: 151665 - DNA, 76 bp, Homo sapiens
cgtggggtcgatgaaagtataactgttgccctcatagctctcgatgatcttccagcggacctggtacttgggcttc

SEQ ID NO: 151666 - DNA, 79 bp, Homo sapiens
atgaaagtataactgttgccctcatagctctcgatgatcttccagcggacctggtacttgggcttctgcagaagaggaa

SEQ ID NO: 151667 - DNA, 80 bp, Homo sapiens
tataactgttgccctcatagctctcgatgatcttccagcggacctggtacttgggcttctgcagaagaggaagggagcac

SEQ ID NO: 151668 - DNA, 79 bp, Homo sapiens
ccctcatagctctcgatgatcttccagcggacctggtacttgggcttctgcagaagaggaagggagcacgtggcagtcg

SEQ ID NO: 151669 - DNA, 83 bp, Homo sapiens
ccaaatctggctcactcaggcacctggcagccccactccgctccggctcacctgcttatacttgtacaatagcagcaggagca

SEQ ID NO: 151670 - DNA, 87 bp, Homo sapiens
gcagcagcagcagcaaggccatgatggacatgcaggcgaccaccactggtgtgaagaggaactcatccgggggatgcgtgtgggctc

SEQ ID NO: 151671 - DNA, 82 bp, Homo sapiens
cagcaaggccatgatggacatgcaggcgaccaccactggtgtgaagaggaactcatccgggggatgcgtgtgggctcctgga

SEQ ID NO: 151672 - DNA, 81 bp, Homo sapiens
atgatggacatgcaggcgaccaccactggtgtgaagaggaactcatccgggggatgcgtgtgggctcctggaaggcatgaa

SEQ ID NO: 151673 - DNA, 79 bp, Homo sapiens
acatgcaggcgaccaccactggtgtgaagaggaactcatccgggggatgcgtgtgggctcctggaaggcatgaagcaaa

SEQ ID NO: 151674 - DNA, 79 bp, Homo sapiens
accaccactggtgtgaagaggaactcatccgggggatgcgtgtgggctcctggaaggcatgaagcaaagcagtgagcag

SEQ ID NO: 151675 - DNA, 79 bp, Homo sapiens
ctggtgtgaagaggaactcatccgggggatgcgtgtgggctcctggaaggcatgaagcaaagcagtgagcaggcagggg

SEQ ID NO: 151676 - DNA, 71 bp, Homo sapiens
ggggggcgggcgggggggcggtgcgggtgcgaaggctccctctcacctgcagagatgggtatgaaggccca

SEQ ID NO: 151677 - DNA, 73 bp, Homo sapiens
cgggggggcggtgcgggtgcgaaggctccctctcacctgcagagatgggtatgaaggcccaggagccactccc

SEQ ID NO: 151678 - DNA, 77 bp, Homo sapiens
cggtgcgggtgcgaaggctccctctcacctgcagagatgggtatgaaggcccaggagccactccccacgctgttgtg

SEQ ID NO: 151679 - DNA, 80 bp, Homo sapiens
tgcgaaggctccctctcacctgcagagatgggtatgaaggcccaggagccactccccacgctgttgtgggccctgcactc

SEQ ID NO: 151680 - DNA, 77 bp, Homo sapiens
tctcacctgcagagatgggtatgaaggcccaggagccactccccacgctgttgtgggccctgcactcgtaggtttgg

SEQ ID NO: 151681 - DNA, 75 bp, Homo sapiens
agagatgggtatgaaggcccaggagccactccccacgctgttgtgggccctgcactcgtaggtttggttgtgctc

SEQ ID NO: 151682 - DNA, 76 bp, Homo sapiens
tatgaaggcccaggagccactccccacgctgttgtgggccctgcactcgtaggtttggttgtgctctaaggtctca

SEQ ID NO: 151683 - DNA, 76 bp, Homo sapiens
aggagccactccccacgctgttgtgggccctgcactcgtaggtttggttgtgctctaaggtctcaacagtcagcag

SEQ ID NO: 151684 - DNA, 78 bp, Homo sapiens
actccccacgctgttgtgggccctgcactcgtaggtttggttgtgctctaaggtctcaacagtcagcaggctctgcac

SEQ ID NO: 151685 - DNA, 79 bp, Homo sapiens
ttgtgggccctgcactcgtaggtttggttgtgctctaaggtctcaacagtcagcaggctctgcaccgtcaccttgtgga

SEQ ID NO: 151686 - DNA, 79 bp, Homo sapiens
tgcactcgtaggtttggttgtgctctaaggtctcaacagtcagcaggctctgcaccgtcaccttgtggaagggctcctg

SEQ ID NO: 151687 - DNA, 79 bp, Homo sapiens
tcgtaggtttggttgtgctctaaggtctcaacagtcagcaggctctgcaccgtcaccttgtggaagggctcctggctca

SEQ ID NO: 151688 - DNA, 80 bp, Homo sapiens
ttgtgctctaaggtctcaacagtcagcaggctctgcaccgtcaccttgtggaagggctcctggctcaggacctcagggta

SEQ ID NO: 151689 - DNA, 79 bp, Homo sapiens
taaggtctcaacagtcagcaggctctgcaccgtcaccttgtggaagggctcctggctcaggacctcagggtatgggtca

SEQ ID NO: 151690 - DNA, 78 bp, Homo sapiens
acagtcagcaggctctgcaccgtcaccttgtggaagggctcctggctcaggacctcagggtatgggtcatcccagacc

SEQ ID NO: 151691 - DNA, 78 bp, Homo sapiens
ctctgcaccgtcaccttgtggaagggctcctggctcaggacctcagggtatgggtcatcccagacctgcagcacttgg

SEQ ID NO: 151692 - DNA, 78 bp, Homo sapiens
accttgtggaagggctcctggctcaggacctcagggtatgggtcatcccagacctgcagcacttgggcctcatcacac

SEQ ID NO: 151693 - DNA, 78 bp, Homo sapiens
aagggctcctggctcaggacctcagggtatgggtcatcccagacctgcagcacttgggcctcatcacacctggcaaaa

SEQ ID NO: 151694 - DNA, 83 bp, Homo sapiens
ctcaggacctcagggtatgggtcatcccagacctgcagcacttgggcctcatcacacctggcaaaagcagaatgtggctcaga

SEQ ID NO: 151695 - DNA, 83 bp, Homo sapiens
acctcagggtatgggtcatcccagacctgcagcacttgggcctcatcacacctggcaaaagcagaatgtggctcagagcttca

SEQ ID NO: 151696 - DNA, 83 bp, Homo sapiens
tatgggtcatcccagacctgcagcacttgggcctcatcacacctggcaaaagcagaatgtggctcagagcttcagggttccca

SEQ ID NO: 151697 - DNA, 80 bp, Homo sapiens
actgcactgcagccatgtcacgttgggctgggggtacccagaggcagcacacaaaagggtgccagagccgttgatgaatg

SEQ ID NO: 151698 - DNA, 79 bp, Homo sapiens
agccatgtcacgttgggctgggggtacccagaggcagcacacaaaagggtgccagagccgttgatgaatgtccatatga

SEQ ID NO: 151699 - DNA, 76 bp, Homo sapiens
acgttgggctgggggtacccagaggcagcacacaaaagggtgccagagccgttgatgaatgtccatatgacgctta

SEQ ID NO: 151700 - DNA, 76 bp, Homo sapiens
ctgggggtacccagaggcagcacacaaaagggtgccagagccgttgatgaatgtccatatgacgcttacctctggg

SEQ ID NO: 151701 - DNA, 78 bp, Homo sapiens
agaggcagcacacaaaagggtgccagagccgttgatgaatgtccatatgacgcttacctctggggggtctgaggaaga

SEQ ID NO: 151702 - DNA, 75 bp, Homo sapiens
agcacacaaaagggtgccagagccgttgatgaatgtccatatgacgcttacctctggggggtctgaggaagaaag

SEQ ID NO: 151703 - DNA, 74 bp, Homo sapiens
agggtgccagagccgttgatgaatgtccatatgacgcttacctctggggggtctgaggaagaaaggaggaggcc

SEQ ID NO: 151704 - DNA, 74 bp, Homo sapiens
ttgatgaatgtccatatgacgcttacctctggggggtctgaggaagaaaggaggaggccccaagtcacactttc

SEQ ID NO: 151705 - DNA, 76 bp, Homo sapiens
agtcccagggcctccgccccaggtggcgctcggccccagcactcacatcgaagggtgagctcaaacgtcagagctc

SEQ ID NO: 151706 - DNA, 77 bp, Homo sapiens
agggcctccgccccaggtggcgctcggccccagcactcacatcgaagggtgagctcaaacgtcagagctctccagcc

SEQ ID NO: 151707 - DNA, 77 bp, Homo sapiens
cccaggtggcgctcggccccagcactcacatcgaagggtgagctcaaacgtcagagctctccagcctcctgggtttc

SEQ ID NO: 151708 - DNA, 78 bp, Homo sapiens
tcggccccagcactcacatcgaagggtgagctcaaacgtcagagctctccagcctcctgggtttctggccaggaagga

SEQ ID NO: 151709 - DNA, 77 bp, Homo sapiens
actcacatcgaagggtgagctcaaacgtcagagctctccagcctcctgggtttctggccaggaaggagtagcggcca

SEQ ID NO: 151710 - DNA, 77 bp, Homo sapiens
atcgaagggtgagctcaaacgtcagagctctccagcctcctgggtttctggccaggaaggagtagcggccagcctca

SEQ ID NO: 151711 - DNA, 77 bp, Homo sapiens
agctcaaacgtcagagctctccagcctcctgggtttctggccaggaaggagtagcggccagcctcagagggcttcag

SEQ ID NO: 151712 - DNA, 77 bp, Homo sapiens
agagctctccagcctcctgggtttctggccaggaaggagtagcggccagcctcagagggcttcaggcggggcagaga

SEQ ID NO: 151713 - DNA, 75 bp, Homo sapiens
agcctcctgggtttctggccaggaaggagtagcggccagcctcagagggcttcaggcggggcagagagagggtga

SEQ ID NO: 151714 - DNA, 78 bp, Homo sapiens
tttctggccaggaaggagtagcggccagcctcagagggcttcaggcggggcagagagagggtgaaggtgtgcctgcag

SEQ ID NO: 151715 - DNA, 79 bp, Homo sapiens
aggaaggagtagcggccagcctcagagggcttcaggcggggcagagagagggtgaaggtgtgcctgcaggagagaatca

SEQ ID NO: 151716 - DNA, 80 bp, Homo sapiens
tagcggccagcctcagagggcttcaggcggggcagagagagggtgaaggtgtgcctgcaggagagaatcaggtggtgttg

SEQ ID NO: 151717 - DNA, 79 bp, Homo sapiens
agcctcagagggcttcaggcggggcagagagagggtgaaggtgtgcctgcaggagagaatcaggtggtgttggtgagcc

SEQ ID NO: 151718 - DNA, 77 bp, Homo sapiens
cccatctggttgtcgggctgtgtagacgggagctgataagtggtacctgtatgtgtccttggtggtagcattagcaa

SEQ ID NO: 151719 - DNA, 77 bp, Homo sapiens
ctggttgtcgggctgtgtagacgggagctgataagtggtacctgtatgtgtccttggtggtagcattagcaagcttg

SEQ ID NO: 151720 - DNA, 79 bp, Homo sapiens
ctgtgtagacgggagctgataagtggtacctgtatgtgtccttggtggtagcattagcaagcttgggctcaggctggtg

SEQ ID NO: 151721 - DNA, 78 bp, Homo sapiens
gggagctgataagtggtacctgtatgtgtccttggtggtagcattagcaagcttgggctcaggctggtggtcagaaaa

SEQ ID NO: 151722 - DNA, 75 bp, Homo sapiens
ataagtggtacctgtatgtgtccttggtggtagcattagcaagcttgggctcaggctggtggtcagaaaagggtc

SEQ ID NO: 151723 - DNA, 76 bp, Homo sapiens
tgtatgtgtccttggtggtagcattagcaagcttgggctcaggctggtggtcagaaaagggtcccaggtaggtcca

SEQ ID NO: 151724 - DNA, 72 bp, Homo sapiens
ttggtggtagcattagcaagcttgggctcaggctggtggtcagaaaagggtcccaggtaggtccagttaaaa

SEQ ID NO: 151725 - DNA, 73 bp, Homo sapiens
tagcattagcaagcttgggctcaggctggtggtcagaaaagggtcccaggtaggtccagttaaaaccttgcag

SEQ ID NO: 151726 - DNA, 69 bp, Homo sapiens
ttgggctcaggctggtggtcagaaaagggtcccaggtaggtccagttaaaaccttgcaggcctgggtag

SEQ ID NO: 151727 - DNA, 68 bp, Homo sapiens
ctggtggtcagaaaagggtcccaggtaggtccagttaaaaccttgcaggcctgggtaggcctccacca

SEQ ID NO: 151728 - DNA, 68 bp, Homo sapiens
agaaaagggtcccaggtaggtccagttaaaaccttgcaggcctgggtaggcctccaccatgactttga

SEQ ID NO: 151729 - DNA, 70 bp, Homo sapiens
ggtcccaggtaggtccagttaaaaccttgcaggcctgggtaggcctccaccatgactttgaggttgagcc

SEQ ID NO: 151730 - DNA, 70 bp, Homo sapiens
taggtccagttaaaaccttgcaggcctgggtaggcctccaccatgactttgaggttgagcccctccccca

SEQ ID NO: 151731 - DNA, 70 bp, Homo sapiens
taaaaccttgcaggcctgggtaggcctccaccatgactttgaggttgagcccctcccccacggtcacctc

SEQ ID NO: 151732 - DNA, 74 bp, Homo sapiens
ctgggtaggcctccaccatgactttgaggttgagcccctcccccacggtcacctcctggatgaggttctgctca

SEQ ID NO: 151733 - DNA, 77 bp, Homo sapiens
ctccaccatgactttgaggttgagcccctcccccacggtcacctcctggatgaggttctgctcagagctcaagttca

SEQ ID NO: 151734 - DNA, 75 bp, Homo sapiens
atgactttgaggttgagcccctcccccacggtcacctcctggatgaggttctgctcagagctcaagttcaagtag

SEQ ID NO: 151735 - DNA, 77 bp, Homo sapiens
ttgagcccctcccccacggtcacctcctggatgaggttctgctcagagctcaagttcaagtaggcactctctggaaa

SEQ ID NO: 151736 - DNA, 79 bp, Homo sapiens
ccccacggtcacctcctggatgaggttctgctcagagctcaagttcaagtaggcactctctggaaagcagaacacacaa

SEQ ID NO: 151737 - DNA, 83 bp, Homo sapiens
acctcctggatgaggttctgctcagagctcaagttcaagtaggcactctctggaaagcagaacacacaagcatctggcattag

SEQ ID NO: 151738 - DNA, 70 bp, Homo sapiens
accttctcgaagcctgggttggggggactcttcagtgttcccaggacaccttgtgcttcccccataatca

SEQ ID NO: 151739 - DNA, 73 bp, Homo sapiens
tgggttggggggactcttcagtgttcccaggacaccttgtgcttcccccataatcactgggtgatcattgtct

SEQ ID NO: 151740 - DNA, 76 bp, Homo sapiens
ggactcttcagtgttcccaggacaccttgtgcttcccccataatcactgggtgatcattgtcttttcatgtttcca

SEQ ID NO: 151741 - DNA, 75 bp, Homo sapiens
cttcagtgttcccaggacaccttgtgcttcccccataatcactgggtgatcattgtcttttcatgtttccataaa

SEQ ID NO: 151742 - DNA, 77 bp, Homo sapiens
aggacaccttgtgcttcccccataatcactgggtgatcattgtcttttcatgtttccataaaggaatgcatgaaaga

SEQ ID NO: 151743 - DNA, 78 bp, Homo sapiens
ttgtgcttcccccataatcactgggtgatcattgtcttttcatgtttccataaaggaatgcatgaaagaatgaacaaa

SEQ ID NO: 151744 - DNA, 78 bp, Homo sapiens
ataatcactgggtgatcattgtcttttcatgtttccataaaggaatgcatgaaagaatgaacaaatgaagtccagtag

SEQ ID NO: 151745 - DNA, 79 bp, Homo sapiens
gtgatcattgtcttttcatgtttccataaaggaatgcatgaaagaatgaacaaatgaagtccagtagggagctactgga

SEQ ID NO: 151746 - DNA, 75 bp, Homo sapiens
attgtcttttcatgtttccataaaggaatgcatgaaagaatgaacaaatgaagtccagtagggagctactggacc

SEQ ID NO: 151747 - DNA, 73 bp, Homo sapiens
tttccataaaggaatgcatgaaagaatgaacaaatgaagtccagtagggagctactggaccccaatccccaaa

SEQ ID NO: 151748 - DNA, 72 bp, Homo sapiens
ataaaggaatgcatgaaagaatgaacaaatgaagtccagtagggagctactggaccccaatccccaaataaa

SEQ ID NO: 151749 - DNA, 69 bp, Homo sapiens
atgaaagaatgaacaaatgaagtccagtagggagctactggaccccaatccccaaataaacaaaaaatg

SEQ ID NO: 151750 - DNA, 68 bp, Homo sapiens
aagtccagtagggagctactggaccccaatccccaaataaacaaaaaatggcactaaggtgcacccaa

SEQ ID NO: 151751 - DNA, 75 bp, Homo sapiens
agctactggaccccaatccccaaataaacaaaaaatggcactaaggtgcacccaatgcagccatgcactgtaaga

SEQ ID NO: 151752 - DNA, 76 bp, Homo sapiens
cccaatccccaaataaacaaaaaatggcactaaggtgcacccaatgcagccatgcactgtaagagctccaagatgg

SEQ ID NO: 151753 - DNA, 79 bp, Homo sapiens
aaataaacaaaaaatggcactaaggtgcacccaatgcagccatgcactgtaagagctccaagatgggagagagatccca

SEQ ID NO: 151754 - DNA, 80 bp, Homo sapiens
aaaatggcactaaggtgcacccaatgcagccatgcactgtaagagctccaagatgggagagagatcccaggagagggtaa

SEQ ID NO: 151755 - DNA, 78 bp, Homo sapiens
actaaggtgcacccaatgcagccatgcactgtaagagctccaagatgggagagagatcccaggagagggtaagggaaa

SEQ ID NO: 151756 - DNA, 79 bp, Homo sapiens
acccaatgcagccatgcactgtaagagctccaagatgggagagagatcccaggagagggtaagggaaagctcctggaga

SEQ ID NO: 151757 - DNA, 78 bp, Homo sapiens
catgcactgtaagagctccaagatgggagagagatcccaggagagggtaagggaaagctcctggagagtggctcctta

SEQ ID NO: 151758 - DNA, 75 bp, Homo sapiens
actgtaagagctccaagatgggagagagatcccaggagagggtaagggaaagctcctggagagtggctccttagc

SEQ ID NO: 151759 - DNA, 74 bp, Homo sapiens
agatgggagagagatcccaggagagggtaagggaaagctcctggagagtggctccttagccaggccttggataa

SEQ ID NO: 151760 - DNA, 72 bp, Homo sapiens
agagagatcccaggagagggtaagggaaagctcctggagagtggctccttagccaggccttggataaacaaa

SEQ ID NO: 151761 - DNA, 75 bp, Homo sapiens
gagagggtaagggaaagctcctggagagtggctccttagccaggccttggataaacaaactccagcagagatatc

SEQ ID NO: 151762 - DNA, 77 bp, Homo sapiens
ggtaagggaaagctcctggagagtggctccttagccaggccttggataaacaaactccagcagagatatcctcagca

SEQ ID NO: 151763 - DNA, 79 bp, Homo sapiens
tcctggagagtggctccttagccaggccttggataaacaaactccagcagagatatcctcagcaggtctccttccctga

SEQ ID NO: 151764 - DNA, 79 bp, Homo sapiens
agtggctccttagccaggccttggataaacaaactccagcagagatatcctcagcaggtctccttccctgacatcagct

SEQ ID NO: 151765 - DNA, 78 bp, Homo sapiens
ccaggccttggataaacaaactccagcagagatatcctcagcaggtctccttccctgacatcagcttcctcctcaaaa

SEQ ID NO: 151766 - DNA, 77 bp, Homo sapiens
ttggataaacaaactccagcagagatatcctcagcaggtctccttccctgacatcagcttcctcctcaaaacccttc

SEQ ID NO: 151767 - DNA, 79 bp, Homo sapiens
aaactccagcagagatatcctcagcaggtctccttccctgacatcagcttcctcctcaaaacccttctgctcacactcc

SEQ ID NO: 151768 - DNA, 80 bp, Homo sapiens
agatatcctcagcaggtctccttccctgacatcagcttcctcctcaaaacccttctgctcacactcctgcaggatcccta

SEQ ID NO: 151769 - DNA, 77 bp, Homo sapiens
caggtctccttccctgacatcagcttcctcctcaaaacccttctgctcacactcctgcaggatccctaccgactgtc

SEQ ID NO: 151770 - DNA, 77 bp, Homo sapiens
ttccctgacatcagcttcctcctcaaaacccttctgctcacactcctgcaggatccctaccgactgtccaccaccac

SEQ ID NO: 151771 - DNA, 78 bp, Homo sapiens
tcagcttcctcctcaaaacccttctgctcacactcctgcaggatccctaccgactgtccaccaccaccctgatgctta

SEQ ID NO: 151772 - DNA, 76 bp, Homo sapiens
tcctcaaaacccttctgctcacactcctgcaggatccctaccgactgtccaccaccaccctgatgcttacctacca

SEQ ID NO: 151773 - DNA, 76 bp, Homo sapiens
ttctgctcacactcctgcaggatccctaccgactgtccaccaccaccctgatgcttacctaccacccggaagaaca

SEQ ID NO: 151774 - DNA, 73 bp, Homo sapiens
acactcctgcaggatccctaccgactgtccaccaccaccctgatgcttacctaccacccggaagaacatggag

SEQ ID NO: 151775 - DNA, 72 bp, Homo sapiens
aggatccctaccgactgtccaccaccaccctgatgcttacctaccacccggaagaacatggaggtggagtgc

SEQ ID NO: 151776 - DNA, 75 bp, Homo sapiens
ctaccgactgtccaccaccaccctgatgcttacctaccacccggaagaacatggaggtggagtgcttgccctgca

SEQ ID NO: 151777 - DNA, 75 bp, Homo sapiens
accaccaccctgatgcttacctaccacccggaagaacatggaggtggagtgcttgccctgcacgttgctggccac

SEQ ID NO: 151778 - DNA, 77 bp, Homo sapiens
atgcttacctaccacccggaagaacatggaggtggagtgcttgccctgcacgttgctggccacgcaggagtagttgc

SEQ ID NO: 151779 - DNA, 78 bp, Homo sapiens
taccacccggaagaacatggaggtggagtgcttgccctgcacgttgctggccacgcaggagtagttgccggcatgttg

SEQ ID NO: 151780 - DNA, 78 bp, Homo sapiens
aggtggagtgcttgccctgcacgttgctggccacgcaggagtagttgccggcatgttggaaatctacttgatcgaggt

SEQ ID NO: 151781 - DNA, 72 bp, Homo sapiens
ccacgcaggagtagttgccggcatgttggaaatctacttgatcgaggttgagggtcaggactttttggtaac

SEQ ID NO: 151782 - DNA, 72 bp, Homo sapiens
tagttgccggcatgttggaaatctacttgatcgaggttgagggtcaggactttttggtaacggttattatga

SEQ ID NO: 151783 - DNA, 71 bp, Homo sapiens
catgttggaaatctacttgatcgaggttgagggtcaggactttttggtaacggttattatgaaagtcagat

SEQ ID NO: 151784 - DNA, 72 bp, Homo sapiens
cttgatcgaggttgagggtcaggactttttggtaacggttattatgaaagtcagattgttgagggattgcga

SEQ ID NO: 151785 - DNA, 75 bp, Homo sapiens
gttgagggtcaggactttttggtaacggttattatgaaagtcagattgttgagggattgcgagctgcagccagaa

SEQ ID NO: 151786 - DNA, 78 bp, Homo sapiens
taacggttattatgaaagtcagattgttgagggattgcgagctgcagccagaaggaatggagatgttataccaaggta

SEQ ID NO: 151787 - DNA, 80 bp, Homo sapiens
tgctgggaggatggccagacttcaccttgtgatctgcagggactgaccttggtgttgttgtgttggaggaagacatcaaa

SEQ ID NO: 151788 - DNA, 77 bp, Homo sapiens
atggccagacttcaccttgtgatctgcagggactgaccttggtgttgttgtgttggaggaagacatcaaagttaaca

SEQ ID NO: 151789 - DNA, 79 bp, Homo sapiens
ttcaccttgtgatctgcagggactgaccttggtgttgttgtgttggaggaagacatcaaagttaacatcaacgctgctg

SEQ ID NO: 151790 - DNA, 83 bp, Homo sapiens
ttgtgatctgcagggactgaccttggtgttgttgtgttggaggaagacatcaaagttaacatcaacgctgctggctgagcaca

SEQ ID NO: 151791 - DNA, 79 bp, Homo sapiens
agggactgaccttggtgttgttgtgttggaggaagacatcaaagttaacatcaacgctgctggctgagcacacgatctg

SEQ ID NO: 151792 - DNA, 80 bp, Homo sapiens
ccttggtgttgttgtgttggaggaagacatcaaagttaacatcaacgctgctggctgagcacacgatctgggcagcctcc

SEQ ID NO: 151793 - DNA, 80 bp, Homo sapiens
gttgtgttggaggaagacatcaaagttaacatcaacgctgctggctgagcacacgatctgggcagcctcccctcgaatcc

SEQ ID NO: 151794 - DNA, 84 bp, Homo sapiens
aggaagacatcaaagttaacatcaacgctgctggctgagcacacgatctgggcagcctcccctcgaatccgcaccagctctgca

SEQ ID NO: 151795 - DNA, 83 bp, Homo sapiens
aaagttaacatcaacgctgctggctgagcacacgatctgggcagcctcccctcgaatccgcaccagctctgcaggcaccagtg

SEQ ID NO: 151796 - DNA, 85 bp, Homo sapiens
atcaacgctgctggctgagcacacgatctgggcagcctcccctcgaatccgcaccagctctgcaggcaccagtgtcaaggctggg

SEQ ID NO: 151797 - DNA, 82 bp, Homo sapiens
ctggctgagcacacgatctgggcagcctcccctcgaatccgcaccagctctgcaggcaccagtgtcaaggctgggggccctg

SEQ ID NO: 151798 - DNA, 80 bp, Homo sapiens
acgatctgggcagcctcccctcgaatccgcaccagctctgcaggcaccagtgtcaaggctgggggccctgggatgactga

SEQ ID NO: 151799 - DNA, 76 bp, Homo sapiens
agcctcccctcgaatccgcaccagctctgcaggcaccagtgtcaaggctgggggccctgggatgactgagaccggg

SEQ ID NO: 151800 - DNA, 77 bp, Homo sapiens
cctcgaatccgcaccagctctgcaggcaccagtgtcaaggctgggggccctgggatgactgagaccgggggagagac

SEQ ID NO: 151801 - DNA, 75 bp, Homo sapiens
agctctgcaggcaccagtgtcaaggctgggggccctgggatgactgagaccgggggagagacccctgaacaccca

SEQ ID NO: 151802 - DNA, 80 bp, Homo sapiens
tgtccccactcttcaggcctggctgccggtccccatgccccacgcacctttctgcactttcagccggatgctgatggaca

SEQ ID NO: 151803 - DNA, 79 bp, Homo sapiens
actcttcaggcctggctgccggtccccatgccccacgcacctttctgcactttcagccggatgctgatggacatcacct

SEQ ID NO: 151804 - DNA, 82 bp, Homo sapiens
tggctgccggtccccatgccccacgcacctttctgcactttcagccggatgctgatggacatcaccttcctgccacccatca

SEQ ID NO: 151805 - DNA, 84 bp, Homo sapiens
cccatgccccacgcacctttctgcactttcagccggatgctgatggacatcaccttcctgccacccatcagggcactgcattga

SEQ ID NO: 151806 - DNA, 84 bp, Homo sapiens
ccacgcacctttctgcactttcagccggatgctgatggacatcaccttcctgccacccatcagggcactgcattgatagtcctg

SEQ ID NO: 151807 - DNA, 87 bp, Homo sapiens
tttctgcactttcagccggatgctgatggacatcaccttcctgccacccatcagggcactgcattgatagtcctggctctgaatgaa

SEQ ID NO: 151808 - DNA, 85 bp, Homo sapiens
ctttcagccggatgctgatggacatcaccttcctgccacccatcagggcactgcattgatagtcctggctctgaatgaacttggc

SEQ ID NO: 151809 - DNA, 85 bp, Homo sapiens
tgatggacatcaccttcctgccacccatcagggcactgcattgatagtcctggctctgaatgaacttggccctgtggatggtgaa

SEQ ID NO: 151810 - DNA, 83 bp, Homo sapiens
acatcaccttcctgccacccatcagggcactgcattgatagtcctggctctgaatgaacttggccctgtggatggtgaagcca

SEQ ID NO: 151811 - DNA, 83 bp, Homo sapiens
ccacccatcagggcactgcattgatagtcctggctctgaatgaacttggccctgtggatggtgaagccatgccagggcgagaa

SEQ ID NO: 151812 - DNA, 83 bp, Homo sapiens
atcagggcactgcattgatagtcctggctctgaatgaacttggccctgtggatggtgaagccatgccagggcgagaaggagta

SEQ ID NO: 151813 - DNA, 79 bp, Homo sapiens
attgatagtcctggctctgaatgaacttggccctgtggatggtgaagccatgccagggcgagaaggagtagttggtgtg

SEQ ID NO: 151814 - DNA, 81 bp, Homo sapiens
agtcctggctctgaatgaacttggccctgtggatggtgaagccatgccagggcgagaaggagtagttggtgtggcgcatga

SEQ ID NO: 151815 - DNA, 77 bp, Homo sapiens
aatgaacttggccctgtggatggtgaagccatgccagggcgagaaggagtagttggtgtggcgcatgaggggccggc

SEQ ID NO: 151816 - DNA, 80 bp, Homo sapiens
cctgtggatggtgaagccatgccagggcgagaaggagtagttggtgtggcgcatgaggggccggccacgcacacgcacca

SEQ ID NO: 151817 - DNA, 80 bp, Homo sapiens
atggtgaagccatgccagggcgagaaggagtagttggtgtggcgcatgaggggccggccacgcacacgcaccagcgagac

SEQ ID NO: 151818 - DNA, 80 bp, Homo sapiens
atgccagggcgagaaggagtagttggtgtggcgcatgaggggccggccacgcacacgcaccagcgagacgcctgcttcca

SEQ ID NO: 151819 - DNA, 77 bp, Homo sapiens
agaaggagtagttggtgtggcgcatgaggggccggccacgcacacgcaccagcgagacgcctgcttccagcaccggg

SEQ ID NO: 151820 - DNA, 81 bp, Homo sapiens
agtagttggtgtggcgcatgaggggccggccacgcacacgcaccagcgagacgcctgcttccagcaccgggtctgtgagca

SEQ ID NO: 151821 - DNA, 83 bp, Homo sapiens
gtggcgcatgaggggccggccacgcacacgcaccagcgagacgcctgcttccagcaccgggtctgtgagcagacagggcagta

SEQ ID NO: 151822 - DNA, 81 bp, Homo sapiens
ccggccacgcacacgcaccagcgagacgcctgcttccagcaccgggtctgtgagcagacagggcagtagtgcgtcctggtc

SEQ ID NO: 151823 - DNA, 80 bp, Homo sapiens
acacgcaccagcgagacgcctgcttccagcaccgggtctgtgagcagacagggcagtagtgcgtcctggtcctcgaacac

SEQ ID NO: 151824 - DNA, 79 bp, Homo sapiens
accagcgagacgcctgcttccagcaccgggtctgtgagcagacagggcagtagtgcgtcctggtcctcgaacacgacca

SEQ ID NO: 151825 - DNA, 81 bp, Homo sapiens
ctgcttccagcaccgggtctgtgagcagacagggcagtagtgcgtcctggtcctcgaacacgaccacctcctgtgctagca

SEQ ID NO: 151826 - DNA, 77 bp, Homo sapiens
accgggtctgtgagcagacagggcagtagtgcgtcctggtcctcgaacacgaccacctcctgtgctagcacgttcca

SEQ ID NO: 151827 - DNA, 78 bp, Homo sapiens
tctgtgagcagacagggcagtagtgcgtcctggtcctcgaacacgaccacctcctgtgctagcacgttccagggccgg

SEQ ID NO: 151828 - DNA, 74 bp, Homo sapiens
agacagggcagtagtgcgtcctggtcctcgaacacgaccacctcctgtgctagcacgttccagggccgggcagg

SEQ ID NO: 151829 - DNA, 74 bp, Homo sapiens
gtagtgcgtcctggtcctcgaacacgaccacctcctgtgctagcacgttccagggccgggcagggtctagagta

SEQ ID NO: 151830 - DNA, 75 bp, Homo sapiens
tggtcctcgaacacgaccacctcctgtgctagcacgttccagggccgggcagggtctagagtagaggagggcaca

SEQ ID NO: 151831 - DNA, 72 bp, Homo sapiens
aacacgaccacctcctgtgctagcacgttccagggccgggcagggtctagagtagaggagggcacagggtta

SEQ ID NO: 151832 - DNA, 77 bp, Homo sapiens
gggcctgccgggtcaggcctcttgggaggaggctcagactcctcacctttgacatagaggtggatggcggcgctgcc

SEQ ID NO: 151833 - DNA, 76 bp, Homo sapiens
ccgggtcaggcctcttgggaggaggctcagactcctcacctttgacatagaggtggatggcggcgctgcctcccag

SEQ ID NO: 151834 - DNA, 76 bp, Homo sapiens
ctcttgggaggaggctcagactcctcacctttgacatagaggtggatggcggcgctgcctcccagggggtctccag

SEQ ID NO: 151835 - DNA, 81 bp, Homo sapiens
aggctcagactcctcacctttgacatagaggtggatggcggcgctgcctcccagggggtctccaggctcagtgcagcgata

SEQ ID NO: 151836 - DNA, 79 bp, Homo sapiens
agactcctcacctttgacatagaggtggatggcggcgctgcctcccagggggtctccaggctcagtgcagcgataggtc

SEQ ID NO: 151837 - DNA, 76 bp, Homo sapiens
tttgacatagaggtggatggcggcgctgcctcccagggggtctccaggctcagtgcagcgataggtccccgtgttt

SEQ ID NO: 151838 - DNA, 74 bp, Homo sapiens
ggtggatggcggcgctgcctcccagggggtctccaggctcagtgcagcgataggtccccgtgttttggaaggta

SEQ ID NO: 151839 - DNA, 72 bp, Homo sapiens
cgctgcctcccagggggtctccaggctcagtgcagcgataggtccccgtgttttggaaggtagcgttgttgg

SEQ ID NO: 151840 - DNA, 74 bp, Homo sapiens
tcccagggggtctccaggctcagtgcagcgataggtccccgtgttttggaaggtagcgttgttggtgctgagga

SEQ ID NO: 151841 - DNA, 83 bp, Homo sapiens
tctccaggctcagtgcagcgataggtccccgtgttttggaaggtagcgttgttggtgctgaggatgctgctggagccatcaga

SEQ ID NO: 151842 - DNA, 79 bp, Homo sapiens
agtgcagcgataggtccccgtgttttggaaggtagcgttgttggtgctgaggatgctgctggagccatcagagtacagg

SEQ ID NO: 151843 - DNA, 76 bp, Homo sapiens
ataggtccccgtgttttggaaggtagcgttgttggtgctgaggatgctgctggagccatcagagtacagggtccag

SEQ ID NO: 151844 - DNA, 79 bp, Homo sapiens
ccgtgttttggaaggtagcgttgttggtgctgaggatgctgctggagccatcagagtacagggtccagtgaggtgatgg

SEQ ID NO: 151845 - DNA, 80 bp, Homo sapiens
aaggtagcgttgttggtgctgaggatgctgctggagccatcagagtacagggtccagtgaggtgatggggggccatccca

SEQ ID NO: 151846 - DNA, 84 bp, Homo sapiens
tgttggtgctgaggatgctgctggagccatcagagtacagggtccagtgaggtgatggggggccatcccattccacgctgccat

SEQ ID NO: 151847 - DNA, 85 bp, Homo sapiens
atgctgctggagccatcagagtacagggtccagtgaggtgatggggggccatcccattccacgctgccattgcccacacatcgca

SEQ ID NO: 151848 - DNA, 81 bp, Homo sapiens
agccatcagagtacagggtccagtgaggtgatggggggccatcccattccacgctgccattgcccacacatcgcaaggtca

SEQ ID NO: 151849 - DNA, 76 bp, Homo sapiens
agtacagggtccagtgaggtgatggggggccatcccattccacgctgccattgcccacacatcgcaaggtcaccgt

SEQ ID NO: 151850 - DNA, 81 bp, Homo sapiens
tccagtgaggtgatggggggccatcccattccacgctgccattgcccacacatcgcaaggtcaccgttgctcctggcttca

SEQ ID NO: 151851 - DNA, 80 bp, Homo sapiens
atggggggccatcccattccacgctgccattgcccacacatcgcaaggtcaccgttgctcctggcttcacgaccagctca

SEQ ID NO: 151852 - DNA, 80 bp, Homo sapiens
atcccattccacgctgccattgcccacacatcgcaaggtcaccgttgctcctggcttcacgaccagctcagggacactgg

SEQ ID NO: 151853 - DNA, 81 bp, Homo sapiens
attccacgctgccattgcccacacatcgcaaggtcaccgttgctcctggcttcacgaccagctcagggacactgggctcta

SEQ ID NO: 151854 - DNA, 80 bp, Homo sapiens
attgcccacacatcgcaaggtcaccgttgctcctggcttcacgaccagctcagggacactgggctctatcactgggattc

SEQ ID NO: 151855 - DNA, 79 bp, Homo sapiens
acacatcgcaaggtcaccgttgctcctggcttcacgaccagctcagggacactgggctctatcactgggattccctgac

SEQ ID NO: 151856 - DNA, 76 bp, Homo sapiens
aggtcaccgttgctcctggcttcacgaccagctcagggacactgggctctatcactgggattccctgacctggtgg

SEQ ID NO: 151857 - DNA, 80 bp, Homo sapiens
tcctggcttcacgaccagctcagggacactgggctctatcactgggattccctgacctggtgggagagagggacagcaga

SEQ ID NO: 151858 - DNA, 79 bp, Homo sapiens
ttcacgaccagctcagggacactgggctctatcactgggattccctgacctggtgggagagagggacagcagacagaag

SEQ ID NO: 151859 - DNA, 75 bp, Homo sapiens
tcttctccatcacaccccaacaaagtcccccaccccccgttctgctcttaccatgccaagctgtggccaccagca

SEQ ID NO: 151860 - DNA, 75 bp, Homo sapiens
cccaacaaagtcccccaccccccgttctgctcttaccatgccaagctgtggccaccagcaggagcagcagaactc

SEQ ID NO: 151861 - DNA, 75 bp, Homo sapiens
aaagtcccccaccccccgttctgctcttaccatgccaagctgtggccaccagcaggagcagcagaactcctgggc

SEQ ID NO: 151862 - DNA, 79 bp, Homo sapiens
cccgttctgctcttaccatgccaagctgtggccaccagcaggagcagcagaactcctgggcccatggcctcggtgggga

SEQ ID NO: 151863 - DNA, 82 bp, Homo sapiens
tctgctcttaccatgccaagctgtggccaccagcaggagcagcagaactcctgggcccatggcctcggtggggaagtggcag

SEQ ID NO: 151864 - DNA, 81 bp, Homo sapiens
atgccaagctgtggccaccagcaggagcagcagaactcctgggcccatggcctcggtggggaagtggcaggcaggtgcagg

SEQ ID NO: 151865 - DNA, 81 bp, Homo sapiens
tgtggccaccagcaggagcagcagaactcctgggcccatggcctcggtggggaagtggcaggcaggtgcagggctgcaagg

SEQ ID NO: 151866 - DNA, 79 bp, Homo sapiens
aggagcagcagaactcctgggcccatggcctcggtggggaagtggcaggcaggtgcagggctgcaaggtgcccagggca

SEQ ID NO: 151867 - DNA, 79 bp, Homo sapiens
aactcctgggcccatggcctcggtggggaagtggcaggcaggtgcagggctgcaaggtgcccagggcacagagctctca

SEQ ID NO: 151868 - DNA, 81 bp, Homo sapiens
cccatggcctcggtggggaagtggcaggcaggtgcagggctgcaaggtgcccagggcacagagctctcagctactagctcc

SEQ ID NO: 151869 - DNA, 82 bp, Homo sapiens
tcggtggggaagtggcaggcaggtgcagggctgcaaggtgcccagggcacagagctctcagctactagctccgcagggatcg

SEQ ID NO: 151870 - DNA, 83 bp, Homo sapiens
aagtggcaggcaggtgcagggctgcaaggtgcccagggcacagagctctcagctactagctccgcagggatcgggacactgga

SEQ ID NO: 151871 - DNA, 81 bp, Homo sapiens
aggtgcagggctgcaaggtgcccagggcacagagctctcagctactagctccgcagggatcgggacactggacacacgttc

SEQ ID NO: 151872 - DNA, 83 bp, Homo sapiens
ctgcaaggtgcccagggcacagagctctcagctactagctccgcagggatcgggacactggacacacgttcctctcctctgca

SEQ ID NO: 151873 - DNA, 81 bp, Homo sapiens
ccagggcacagagctctcagctactagctccgcagggatcgggacactggacacacgttcctctcctctgcactggctgtt

SEQ ID NO: 151874 - DNA, 80 bp, Homo sapiens
agagctctcagctactagctccgcagggatcgggacactggacacacgttcctctcctctgcactggctgtttgtcttgt

SEQ ID NO: 151875 - DNA, 78 bp, Homo sapiens
ctcagctactagctccgcagggatcgggacactggacacacgttcctctcctctgcactggctgtttgtcttgttttc

SEQ ID NO: 151876 - DNA, 75 bp, Homo sapiens
agctccgcagggatcgggacactggacacacgttcctctcctctgcactggctgtttgtcttgttttcctcttcc

SEQ ID NO: 151877 - DNA, 71 bp, Homo sapiens
cttcctcctccttgggctgatcctcttcttccccttttagctaggcaaggcaaccacagagtttggaaatc

SEQ ID NO: 151878 - DNA, 70 bp, Homo sapiens
cttgggctgatcctcttcttccccttttagctaggcaaggcaaccacagagtttggaaatcttgggtctt

SEQ ID NO: 151879 - DNA, 69 bp, Homo sapiens
tcctcttcttccccttttagctaggcaaggcaaccacagagtttggaaatcttgggtctttaagaagaa

SEQ ID NO: 151880 - DNA, 71 bp, Homo sapiens
tcaaagccacagcctggtcgccaccctattccctcccctgtccttaccctggccgcagttccctccgcttc

SEQ ID NO: 151881 - DNA, 69 bp, Homo sapiens
acagcctggtcgccaccctattccctcccctgtccttaccctggccgcagttccctccgcttcctctct

SEQ ID NO: 151882 - DNA, 69 bp, Homo sapiens
gtcgccaccctattccctcccctgtccttaccctggccgcagttccctccgcttcctctcttcctcttc

SEQ ID NO: 151883 - DNA, 78 bp, Homo sapiens
tcttcctcttctctcttctccaccttctcctcacttcgtgctctcacgcttttggacactctgtctgcccttctccta

SEQ ID NO: 151884 - DNA, 76 bp, Homo sapiens
ttctctcttctccaccttctcctcacttcgtgctctcacgcttttggacactctgtctgcccttctcctacctggg

SEQ ID NO: 151885 - DNA, 80 bp, Homo sapiens
caccttctcctcacttcgtgctctcacgcttttggacactctgtctgcccttctcctacctggggcctgatcatgactca

SEQ ID NO: 151886 - DNA, 81 bp, Homo sapiens
tctcctcacttcgtgctctcacgcttttggacactctgtctgcccttctcctacctggggcctgatcatgactcacctgga

SEQ ID NO: 151887 - DNA, 73 bp, Homo sapiens
cactccctatgggcaggaacccaaacccgagagagaccacaaagtctgtgagtgagaagcaccaggtttaata

SEQ ID NO: 151888 - DNA, 72 bp, Homo sapiens
tatgggcaggaacccaaacccgagagagaccacaaagtctgtgagtgagaagcaccaggtttaatattaaaa

SEQ ID NO: 151889 - DNA, 69 bp, Homo sapiens
aacccaaacccgagagagaccacaaagtctgtgagtgagaagcaccaggtttaatattaaaatctttcc

SEQ ID NO: 151890 - DNA, 69 bp, Homo sapiens
cccgagagagaccacaaagtctgtgagtgagaagcaccaggtttaatattaaaatctttcccttaaaaa

SEQ ID NO: 151891 - DNA, 68 bp, Homo sapiens
ccacaaagtctgtgagtgagaagcaccaggtttaatattaaaatctttcccttaaaaaaaagtacaca

SEQ ID NO: 151892 - DNA, 68 bp, Homo sapiens
ctgtgagtgagaagcaccaggtttaatattaaaatctttcccttaaaaaaaagtacacagatagaaaa

SEQ ID NO: 151893 - DNA, 67 bp, Homo sapiens
agcaccaggtttaatattaaaatctttcccttaaaaaaaagtacacagatagaaaaactcaacagca

SEQ ID NO: 151894 - DNA, 68 bp, Homo sapiens
atattaaaatctttcccttaaaaaaaagtacacagatagaaaaactcaacagcatacaaaatagcatt

SEQ ID NO: 151895 - DNA, 73 bp, Homo sapiens
aaaaaaagtacacagatagaaaaactcaacagcatacaaaatagcatttctgctgtataaatgtgagttaacg

SEQ ID NO: 151896 - DNA, 77 bp, Homo sapiens
gtacacagatagaaaaactcaacagcatacaaaatagcatttctgctgtataaatgtgagttaacgtgagtcctaaa

SEQ ID NO: 151897 - DNA, 74 bp, Homo sapiens
gaaaaactcaacagcatacaaaatagcatttctgctgtataaatgtgagttaacgtgagtcctaaaaatatttg

SEQ ID NO: 151898 - DNA, 73 bp, Homo sapiens
cagcatacaaaatagcatttctgctgtataaatgtgagttaacgtgagtcctaaaaatatttgtaaacctagg

SEQ ID NO: 151899 - DNA, 73 bp, Homo sapiens
atagcatttctgctgtataaatgtgagttaacgtgagtcctaaaaatatttgtaaacctaggtgattatatct

SEQ ID NO: 151900 - DNA, 72 bp, Homo sapiens
tctgctgtataaatgtgagttaacgtgagtcctaaaaatatttgtaaacctaggtgattatatctttggtac

SEQ ID NO: 151901 - DNA, 70 bp, Homo sapiens
atgtgagttaacgtgagtcctaaaaatatttgtaaacctaggtgattatatctttggtaccgtattgaga

SEQ ID NO: 151902 - DNA, 68 bp, Homo sapiens
acgtgagtcctaaaaatatttgtaaacctaggtgattatatctttggtaccgtattgagaacccactc

SEQ ID NO: 151903 - DNA, 68 bp, Homo sapiens
taaaaatatttgtaaacctaggtgattatatctttggtaccgtattgagaacccactctccctccttg

SEQ ID NO: 151904 - DNA, 69 bp, Homo sapiens
atatttgtaaacctaggtgattatatctttggtaccgtattgagaacccactctccctccttggaccaa

SEQ ID NO: 151905 - DNA, 70 bp, Homo sapiens
acctaggtgattatatctttggtaccgtattgagaacccactctccctccttggaccaactctggggatc

SEQ ID NO: 151906 - DNA, 70 bp, Homo sapiens
tatatctttggtaccgtattgagaacccactctccctccttggaccaactctggggatcccagggaagta

SEQ ID NO: 151907 - DNA, 69 bp, Homo sapiens
gtaccgtattgagaacccactctccctccttggaccaactctggggatcccagggaagtaaggtgccaa

SEQ ID NO: 151908 - DNA, 71 bp, Homo sapiens
agaacccactctccctccttggaccaactctggggatcccagggaagtaaggtgccaacctgcaatgcagg

SEQ ID NO: 151909 - DNA, 73 bp, Homo sapiens
tccctccttggaccaactctggggatcccagggaagtaaggtgccaacctgcaatgcagggttggtgcccaga

SEQ ID NO: 151910 - DNA, 71 bp, Homo sapiens
ttggaccaactctggggatcccagggaagtaaggtgccaacctgcaatgcagggttggtgcccagaggggt

SEQ ID NO: 151911 - DNA, 73 bp, Homo sapiens
gggatcccagggaagtaaggtgccaacctgcaatgcagggttggtgcccagaggggttgagcttcctgcaccc

SEQ ID NO: 151912 - DNA, 71 bp, Homo sapiens
agggaagtaaggtgccaacctgcaatgcagggttggtgcccagaggggttgagcttcctgcacccccttcc

SEQ ID NO: 151913 - DNA, 71 bp, Homo sapiens
aaggtgccaacctgcaatgcagggttggtgcccagaggggttgagcttcctgcacccccttcccaaccctc

SEQ ID NO: 151914 - DNA, 70 bp, Homo sapiens
ctgcaatgcagggttggtgcccagaggggttgagcttcctgcacccccttcccaaccctccccgtgcggg

SEQ ID NO: 151915 - DNA, 69 bp, Homo sapiens
tggtgcccagaggggttgagcttcctgcacccccttcccaaccctccccgtgcgggggcgtcttggcta

SEQ ID NO: 151916 - DNA, 66 bp, Homo sapiens
agaggggttgagcttcctgcacccccttcccaaccctccccgtgcgggggcgtcttggctacaacc

SEQ ID NO: 151917 - DNA, 68 bp, Homo sapiens
ttgagcttcctgcacccccttcccaaccctccccgtgcgggggcgtcttggctacaaccctgactccc

SEQ ID NO: 151918 - DNA, 66 bp, Homo sapiens
ccccttcccaaccctccccgtgcgggggcgtcttggctacaaccctgactcccctggcacctccaa

SEQ ID NO: 151919 - DNA, 79 bp, Homo sapiens
tcttggctacaaccctgactcccctggcacctccaatgcccactgggctggggacaatgagatgtcactgctaggtctg

SEQ ID NO: 151920 - DNA, 80 bp, Homo sapiens
tacaaccctgactcccctggcacctccaatgcccactgggctggggacaatgagatgtcactgctaggtctgggcagtga

SEQ ID NO: 151921 - DNA, 79 bp, Homo sapiens
tcccctggcacctccaatgcccactgggctggggacaatgagatgtcactgctaggtctgggcagtgacaaaaccatac

SEQ ID NO: 151922 - DNA, 80 bp, Homo sapiens
cactgggctggggacaatgagatgtcactgctaggtctgggcagtgacaaaaccatacccccatggagcgctgcctcagg

SEQ ID NO: 151923 - DNA, 79 bp, Homo sapiens
ctggggacaatgagatgtcactgctaggtctgggcagtgacaaaaccatacccccatggagcgctgcctcagggatggg

SEQ ID NO: 151924 - DNA, 81 bp, Homo sapiens
aatgagatgtcactgctaggtctgggcagtgacaaaaccatacccccatggagcgctgcctcagggatggggcagctggtg

SEQ ID NO: 151925 - DNA, 77 bp, Homo sapiens
actgctaggtctgggcagtgacaaaaccatacccccatggagcgctgcctcagggatggggcagctggtgggtgagg

SEQ ID NO: 151926 - DNA, 76 bp, Homo sapiens
gcagtgacaaaaccatacccccatggagcgctgcctcagggatggggcagctggtgggtgaggggcaaacctccaa

SEQ ID NO: 151927 - DNA, 73 bp, Homo sapiens
acaaaaccatacccccatggagcgctgcctcagggatggggcagctggtgggtgaggggcaaacctccaaagc

SEQ ID NO: 151928 - DNA, 77 bp, Homo sapiens
ccatggagcgctgcctcagggatggggcagctggtgggtgaggggcaaacctccaaagcgcccacctctcacatcct

SEQ ID NO: 151929 - DNA, 74 bp, Homo sapiens
ctgcctcagggatggggcagctggtgggtgaggggcaaacctccaaagcgcccacctctcacatccttcttggg

SEQ ID NO: 151930 - DNA, 73 bp, Homo sapiens
gatggggcagctggtgggtgaggggcaaacctccaaagcgcccacctctcacatccttcttggggtacccatc

SEQ ID NO: 151931 - DNA, 72 bp, Homo sapiens
ctggtgggtgaggggcaaacctccaaagcgcccacctctcacatccttcttggggtacccatctgaagcttc

SEQ ID NO: 151932 - DNA, 70 bp, Homo sapiens
aggggcaaacctccaaagcgcccacctctcacatccttcttggggtacccatctgaagcttcttgtcttt

SEQ ID NO: 151933 - DNA, 74 bp, Homo sapiens
cccacctctcacatccttcttggggtacccatctgaagcttcttgtcttttacaagacataactgtcctcactg

SEQ ID NO: 151934 - DNA, 75 bp, Homo sapiens
ttcttggggtacccatctgaagcttcttgtcttttacaagacataactgtcctcactgtccattctgtcttcgac

SEQ ID NO: 151935 - DNA, 79 bp, Homo sapiens
tacccatctgaagcttcttgtcttttacaagacataactgtcctcactgtccattctgtcttcgacgcagacctcggca

SEQ ID NO: 151936 - DNA, 78 bp, Homo sapiens
aagcttcttgtcttttacaagacataactgtcctcactgtccattctgtcttcgacgcagacctcggcacaggtgctg

SEQ ID NO: 151937 - DNA, 79 bp, Homo sapiens
tcttttacaagacataactgtcctcactgtccattctgtcttcgacgcagacctcggcacaggtgctggagtggtgggc

SEQ ID NO: 151938 - DNA, 81 bp, Homo sapiens
actgtccattctgtcttcgacgcagacctcggcacaggtgctggagtggtgggctgcaggaggtgatctcatttgccctct

SEQ ID NO: 151939 - DNA, 80 bp, Homo sapiens
attctgtcttcgacgcagacctcggcacaggtgctggagtggtgggctgcaggaggtgatctcatttgccctctttgtcc

SEQ ID NO: 151940 - DNA, 79 bp, Homo sapiens
ttcgacgcagacctcggcacaggtgctggagtggtgggctgcaggaggtgatctcatttgccctctttgtcccttttgc

SEQ ID NO: 151941 - DNA, 77 bp, Homo sapiens
acctcggcacaggtgctggagtggtgggctgcaggaggtgatctcatttgccctctttgtcccttttgcccaggata

SEQ ID NO: 151942 - DNA, 72 bp, Homo sapiens
ctggagtggtgggctgcaggaggtgatctcatttgccctctttgtcccttttgcccaggatacccccggagg

SEQ ID NO: 151943 - DNA, 74 bp, Homo sapiens
tggtgggctgcaggaggtgatctcatttgccctctttgtcccttttgcccaggatacccccggaggtcatcgtg

SEQ ID NO: 151944 - DNA, 70 bp, Homo sapiens
aggtgatctcatttgccctctttgtcccttttgcccaggatacccccggaggtcatcgtgggtagtgaaa

SEQ ID NO: 151945 - DNA, 67 bp, Homo sapiens
atttgccctctttgtcccttttgcccaggatacccccggaggtcatcgtgggtagtgaaagaggtcc

SEQ ID NO: 151946 - DNA, 67 bp, Homo sapiens
tttgtcccttttgcccaggatacccccggaggtcatcgtgggtagtgaaagaggtcccgtggtcttc

SEQ ID NO: 151947 - DNA, 68 bp, Homo sapiens
cttttgcccaggatacccccggaggtcatcgtgggtagtgaaagaggtcccgtggtcttcccatgtcc

SEQ ID NO: 151948 - DNA, 69 bp, Homo sapiens
aggatacccccggaggtcatcgtgggtagtgaaagaggtcccgtggtcttcccatgtccctggggcagc

SEQ ID NO: 151949 - DNA, 72 bp, Homo sapiens
aggtcatcgtgggtagtgaaagaggtcccgtggtcttcccatgtccctggggcagctgctgggggctttcca

SEQ ID NO: 151950 - DNA, 72 bp, Homo sapiens
tcgtgggtagtgaaagaggtcccgtggtcttcccatgtccctggggcagctgctgggggctttccaggacac

SEQ ID NO: 151951 - DNA, 73 bp, Homo sapiens
aagaggtcccgtggtcttcccatgtccctggggcagctgctgggggctttccaggacaccggctgtcactcta

SEQ ID NO: 151952 - DNA, 78 bp, Homo sapiens
tggtcttcccatgtccctggggcagctgctgggggctttccaggacaccggctgtcactctaagtcaaggcctgtgca

SEQ ID NO: 151953 - DNA, 81 bp, Homo sapiens
gcagctgctgggggctttccaggacaccggctgtcactctaagtcaaggcctgtgcagctgtgttcttgagacttgctggg

SEQ ID NO: 151954 - DNA, 77 bp, Homo sapiens
ggggctttccaggacaccggctgtcactctaagtcaaggcctgtgcagctgtgttcttgagacttgctgggggcctg

SEQ ID NO: 151955 - DNA, 77 bp, Homo sapiens
tttccaggacaccggctgtcactctaagtcaaggcctgtgcagctgtgttcttgagacttgctgggggcctggggaa

SEQ ID NO: 151956 - DNA, 78 bp, Homo sapiens
ctgtcactctaagtcaaggcctgtgcagctgtgttcttgagacttgctgggggcctggggaaggggcatggttcctga

SEQ ID NO: 151957 - DNA, 76 bp, Homo sapiens
actctaagtcaaggcctgtgcagctgtgttcttgagacttgctgggggcctggggaaggggcatggttcctgagtc

SEQ ID NO: 151958 - DNA, 75 bp, Homo sapiens
aaggcctgtgcagctgtgttcttgagacttgctgggggcctggggaaggggcatggttcctgagtccccagagtg

SEQ ID NO: 151959 - DNA, 78 bp, Homo sapiens
gagtgtgatgtgtgatctggaatctcccaggagcccagctgacccccaggatggaagtttagggtatatggccttgct

SEQ ID NO: 151960 - DNA, 78 bp, Homo sapiens
atgtgtgatctggaatctcccaggagcccagctgacccccaggatggaagtttagggtatatggccttgcttcatctg

SEQ ID NO: 151961 - DNA, 77 bp, Homo sapiens
aatctcccaggagcccagctgacccccaggatggaagtttagggtatatggccttgcttcatctggacaaatgtgca

SEQ ID NO: 151962 - DNA, 77 bp, Homo sapiens
gagcccagctgacccccaggatggaagtttagggtatatggccttgcttcatctggacaaatgtgcaaccacctgga

SEQ ID NO: 151963 - DNA, 76 bp, Homo sapiens
tgacccccaggatggaagtttagggtatatggccttgcttcatctggacaaatgtgcaaccacctggaatactcta

SEQ ID NO: 151964 - DNA, 76 bp, Homo sapiens
aggatggaagtttagggtatatggccttgcttcatctggacaaatgtgcaaccacctggaatactctagaatgtta

SEQ ID NO: 151965 - DNA, 78 bp, Homo sapiens
agtttagggtatatggccttgcttcatctggacaaatgtgcaaccacctggaatactctagaatgttagtgctggcaa

SEQ ID NO: 151966 - DNA, 80 bp, Homo sapiens
ttcatctggacaaatgtgcaaccacctggaatactctagaatgttagtgctggcaaggcactcagagttaataagtccga

SEQ ID NO: 151967 - DNA, 77 bp, Homo sapiens
atgtgcaaccacctggaatactctagaatgttagtgctggcaaggcactcagagttaataagtccgacttattcatt

SEQ ID NO: 151968 - DNA, 73 bp, Homo sapiens
aaccacctggaatactctagaatgttagtgctggcaaggcactcagagttaataagtccgacttattcatttt

SEQ ID NO: 151969 - DNA, 73 bp, Homo sapiens
aatactctagaatgttagtgctggcaaggcactcagagttaataagtccgacttattcattttttgaagggga

SEQ ID NO: 151970 - DNA, 72 bp, Homo sapiens
aatgttagtgctggcaaggcactcagagttaataagtccgacttattcattttttgaaggggaaactgaggc

SEQ ID NO: 151971 - DNA, 81 bp, Homo sapiens
actgaggcccagagagggtgagggattcctccaaagcctcatagcaggtccaatgcagagccagggccatatactggcaca

SEQ ID NO: 151972 - DNA, 81 bp, Homo sapiens
ccagagagggtgagggattcctccaaagcctcatagcaggtccaatgcagagccagggccatatactggcacacacacgtg

SEQ ID NO: 151973 - DNA, 81 bp, Homo sapiens
agagagggtgagggattcctccaaagcctcatagcaggtccaatgcagagccagggccatatactggcacacacacgtggc

SEQ ID NO: 151974 - DNA, 81 bp, Homo sapiens
agggattcctccaaagcctcatagcaggtccaatgcagagccagggccatatactggcacacacacgtggccactccacac

SEQ ID NO: 151975 - DNA, 85 bp, Homo sapiens
tccaaagcctcatagcaggtccaatgcagagccagggccatatactggcacacacacgtggccactccacactggcacatttaca

SEQ ID NO: 151976 - DNA, 87 bp, Homo sapiens
atagcaggtccaatgcagagccagggccatatactggcacacacacgtggccactccacactggcacatttacattctcatcacaga

SEQ ID NO: 151977 - DNA, 86 bp, Homo sapiens
aggtccaatgcagagccagggccatatactggcacacacacgtggccactccacactggcacatttacattctcatcacagatgcg

SEQ ID NO: 151978 - DNA, 82 bp, Homo sapiens
ccagggccatatactggcacacacacgtggccactccacactggcacatttacattctcatcacagatgcggggcccgtctg

SEQ ID NO: 151979 - DNA, 82 bp, Homo sapiens
atatactggcacacacacgtggccactccacactggcacatttacattctcatcacagatgcggggcccgtctggccttcta

SEQ ID NO: 151980 - DNA, 80 bp, Homo sapiens
acacacgtggccactccacactggcacatttacattctcatcacagatgcggggcccgtctggccttctagactctggtg

SEQ ID NO: 151981 - DNA, 80 bp, Homo sapiens
ccactccacactggcacatttacattctcatcacagatgcggggcccgtctggccttctagactctggtggatggattaa

SEQ ID NO: 151982 - DNA, 80 bp, Homo sapiens
acactggcacatttacattctcatcacagatgcggggcccgtctggccttctagactctggtggatggattaagactgag

SEQ ID NO: 151983 - DNA, 79 bp, Homo sapiens
tacattctcatcacagatgcggggcccgtctggccttctagactctggtggatggattaagactgagggtgataaagaa

SEQ ID NO: 151984 - DNA, 77 bp, Homo sapiens
tctcatcacagatgcggggcccgtctggccttctagactctggtggatggattaagactgagggtgataaagaaaaa

SEQ ID NO: 151985 - DNA, 72 bp, Homo sapiens
atgcggggcccgtctggccttctagactctggtggatggattaagactgagggtgataaagaaaaagcccca

SEQ ID NO: 151986 - DNA, 75 bp, Homo sapiens
tggccttctagactctggtggatggattaagactgagggtgataaagaaaaagccccaggactgatgggcctgaa

SEQ ID NO: 151987 - DNA, 75 bp, Homo sapiens
ttctagactctggtggatggattaagactgagggtgataaagaaaaagccccaggactgatgggcctgaaggaca

SEQ ID NO: 151988 - DNA, 74 bp, Homo sapiens
tggtggatggattaagactgagggtgataaagaaaaagccccaggactgatgggcctgaaggacagggacacag

SEQ ID NO: 151989 - DNA, 74 bp, Homo sapiens
attaagactgagggtgataaagaaaaagccccaggactgatgggcctgaaggacagggacacaggcacttgcta

SEQ ID NO: 151990 - DNA, 76 bp, Homo sapiens
actgagggtgataaagaaaaagccccaggactgatgggcctgaaggacagggacacaggcacttgctatggctgcg

SEQ ID NO: 151991 - DNA, 79 bp, Homo sapiens
tgataaagaaaaagccccaggactgatgggcctgaaggacagggacacaggcacttgctatggctgcgtgtgctccaag

SEQ ID NO: 151992 - DNA, 77 bp, Homo sapiens
ataaagaaaaagccccaggactgatgggcctgaaggacagggacacaggcacttgctatggctgcgtgtgctccaag

SEQ ID NO: 151993 - DNA, 83 bp, Homo sapiens
ccaggactgatgggcctgaaggacagggacacaggcacttgctatggctgcgtgtgctccaagtgccctgggcaagggctgca

SEQ ID NO: 151994 - DNA, 82 bp, Homo sapiens
aggactgatgggcctgaaggacagggacacaggcacttgctatggctgcgtgtgctccaagtgccctgggcaagggctgcag

SEQ ID NO: 151995 - DNA, 81 bp, Homo sapiens
tgggcctgaaggacagggacacaggcacttgctatggctgcgtgtgctccaagtgccctgggcaagggctgcaggctgggg

SEQ ID NO: 151996 - DNA, 81 bp, Homo sapiens
ggacagggacacaggcacttgctatggctgcgtgtgctccaagtgccctgggcaagggctgcaggctgggggtgtcctgta

SEQ ID NO: 151997 - DNA, 81 bp, Homo sapiens
acttgctatggctgcgtgtgctccaagtgccctgggcaagggctgcaggctgggggtgtcctgtacttggctcagcctcca

SEQ ID NO: 151998 - DNA, 80 bp, Homo sapiens
ctgcgtgtgctccaagtgccctgggcaagggctgcaggctgggggtgtcctgtacttggctcagcctccagcattaatta

SEQ ID NO: 151999 - DNA, 77 bp, Homo sapiens
aagtgccctgggcaagggctgcaggctgggggtgtcctgtacttggctcagcctccagcattaattaggctgcctaa

SEQ ID NO: 152000 - DNA, 78 bp, Homo sapiens
ctgcaggctgggggtgtcctgtacttggctcagcctccagcattaattaggctgcctaatggccccagaccagctcgg

SEQ ID NO: 152001 - DNA, 76 bp, Homo sapiens
ggtgtcctgtacttggctcagcctccagcattaattaggctgcctaatggccccagaccagctcgggccagggaac

SEQ ID NO: 152002 - DNA, 77 bp, Homo sapiens
agcctccagcattaattaggctgcctaatggccccagaccagctcgggccagggaacgcagggactggcatcatagg

SEQ ID NO: 152003 - DNA, 77 bp, Homo sapiens
tgcctaatggccccagaccagctcgggccagggaacgcagggactggcatcatagggaggagactggctttcttctg

SEQ ID NO: 152004 - DNA, 77 bp, Homo sapiens
aatggccccagaccagctcgggccagggaacgcagggactggcatcatagggaggagactggctttcttctggatga

SEQ ID NO: 152005 - DNA, 79 bp, Homo sapiens
agctcgggccagggaacgcagggactggcatcatagggaggagactggctttcttctggatgaggcaacactgctcaag

SEQ ID NO: 152006 - DNA, 79 bp, Homo sapiens
gggaacgcagggactggcatcatagggaggagactggctttcttctggatgaggcaacactgctcaaggctaggcccta

SEQ ID NO: 152007 - DNA, 83 bp, Homo sapiens
agggactggcatcatagggaggagactggctttcttctggatgaggcaacactgctcaaggctaggccctagctcagccagca

SEQ ID NO: 152008 - DNA, 82 bp, Homo sapiens
atcatagggaggagactggctttcttctggatgaggcaacactgctcaaggctaggccctagctcagccagcagccagggag

SEQ ID NO: 152009 - DNA, 81 bp, Homo sapiens
agactggctttcttctggatgaggcaacactgctcaaggctaggccctagctcagccagcagccagggaggctagggtctc

SEQ ID NO: 152010 - DNA, 80 bp, Homo sapiens
tttcttctggatgaggcaacactgctcaaggctaggccctagctcagccagcagccagggaggctagggtctcttcccta

SEQ ID NO: 152011 - DNA, 79 bp, Homo sapiens
atgaggcaacactgctcaaggctaggccctagctcagccagcagccagggaggctagggtctcttccctagctcctggg

SEQ ID NO: 152012 - DNA, 77 bp, Homo sapiens
actgctcaaggctaggccctagctcagccagcagccagggaggctagggtctcttccctagctcctgggtggataaa

SEQ ID NO: 152013 - DNA, 77 bp, Homo sapiens
taggccctagctcagccagcagccagggaggctagggtctcttccctagctcctgggtggataaaagtgcgaggaga

SEQ ID NO: 152014 - DNA, 74 bp, Homo sapiens
ggaggctagggtctcttccctagctcctgggtggataaaagtgcgaggagagagctatgattccttgaggggta

SEQ ID NO: 152015 - DNA, 77 bp, Homo sapiens
tcttccctagctcctgggtggataaaagtgcgaggagagagctatgattccttgaggggtagctggctgaacagaaa

SEQ ID NO: 152016 - DNA, 73 bp, Homo sapiens
gaggagagagctatgattccttgaggggtagctggctgaacagaaaaaagttaatttaccacctcagtaactc

SEQ ID NO: 152017 - DNA, 71 bp, Homo sapiens
ctatgattccttgaggggtagctggctgaacagaaaaaagttaatttaccacctcagtaactccaagaatc

SEQ ID NO: 152018 - DNA, 69 bp, Homo sapiens
attccttgaggggtagctggctgaacagaaaaaagttaatttaccacctcagtaactccaagaatcttc

SEQ ID NO: 152019 - DNA, 70 bp, Homo sapiens
tagctggctgaacagaaaaaagttaatttaccacctcagtaactccaagaatcttcccagggagggattc

SEQ ID NO: 152020 - DNA, 66 bp, Homo sapiens
aacagaaaaaagttaatttaccacctcagtaactccaagaatcttcccagggagggattcggtctc

SEQ ID NO: 152021 - DNA, 65 bp, Homo sapiens
aaaagttaatttaccacctcagtaactccaagaatcttcccagggagggattcggtctccccacc

SEQ ID NO: 152022 - DNA, 72 bp, Homo sapiens
ttaccacctcagtaactccaagaatcttcccagggagggattcggtctccccacctgtcagccagggagaga

SEQ ID NO: 152023 - DNA, 71 bp, Homo sapiens
agtaactccaagaatcttcccagggagggattcggtctccccacctgtcagccagggagagaatcctagat

SEQ ID NO: 152024 - DNA, 74 bp, Homo sapiens
agaatcttcccagggagggattcggtctccccacctgtcagccagggagagaatcctagattctgggtcatcaa

SEQ ID NO: 152025 - DNA, 73 bp, Homo sapiens
agggattcggtctccccacctgtcagccagggagagaatcctagattctgggtcatcaagcctaactttccca

SEQ ID NO: 152026 - DNA, 73 bp, Homo sapiens
ttcggtctccccacctgtcagccagggagagaatcctagattctgggtcatcaagcctaactttcccatttta

SEQ ID NO: 152027 - DNA, 73 bp, Homo sapiens
acctgtcagccagggagagaatcctagattctgggtcatcaagcctaactttcccattttacatatgggaaaa

SEQ ID NO: 152028 - DNA, 71 bp, Homo sapiens
agggagagaatcctagattctgggtcatcaagcctaactttcccattttacatatgggaaaactgagttcc

SEQ ID NO: 152029 - DNA, 69 bp, Homo sapiens
aatcctagattctgggtcatcaagcctaactttcccattttacatatgggaaaactgagttccctgggg

SEQ ID NO: 152030 - DNA, 68 bp, Homo sapiens
ttctgggtcatcaagcctaactttcccattttacatatgggaaaactgagttccctgggggaaccctg

SEQ ID NO: 152031 - DNA, 68 bp, Homo sapiens
cctaactttcccattttacatatgggaaaactgagttccctgggggaaccctggctcagagtcagttg

SEQ ID NO: 152032 - DNA, 70 bp, Homo sapiens
ccattttacatatgggaaaactgagttccctgggggaaccctggctcagagtcagttggcctccctggag

SEQ ID NO: 152033 - DNA, 71 bp, Homo sapiens
aaaactgagttccctgggggaaccctggctcagagtcagttggcctccctggaggcagagggctggtcacg

SEQ ID NO: 152034 - DNA, 73 bp, Homo sapiens
tgggggaaccctggctcagagtcagttggcctccctggaggcagagggctggtcacggcccctgcagttttct

SEQ ID NO: 152035 - DNA, 77 bp, Homo sapiens
ctggctcagagtcagttggcctccctggaggcagagggctggtcacggcccctgcagttttcttgcctcctaagcca

SEQ ID NO: 152036 - DNA, 71 bp, Homo sapiens
ctccctggaggcagagggctggtcacggcccctgcagttttcttgcctcctaagccagccccagggtttgg

SEQ ID NO: 152037 - DNA, 72 bp, Homo sapiens
aggcagagggctggtcacggcccctgcagttttcttgcctcctaagccagccccagggtttggggcacaaca

SEQ ID NO: 152038 - DNA, 74 bp, Homo sapiens
tggtcacggcccctgcagttttcttgcctcctaagccagccccagggtttggggcacaacacgtcaggagcaga

SEQ ID NO: 152039 - DNA, 74 bp, Homo sapiens
cctgcagttttcttgcctcctaagccagccccagggtttggggcacaacacgtcaggagcagaaagcttccaga

SEQ ID NO: 152040 - DNA, 71 bp, Homo sapiens
agttttcttgcctcctaagccagccccagggtttggggcacaacacgtcaggagcagaaagcttccagaag

SEQ ID NO: 152041 - DNA, 74 bp, Homo sapiens
tcctaagccagccccagggtttggggcacaacacgtcaggagcagaaagcttccagaaggggacagctgataag

SEQ ID NO: 152042 - DNA, 76 bp, Homo sapiens
cccagggtttggggcacaacacgtcaggagcagaaagcttccagaaggggacagctgataagggcagcctggctga

SEQ ID NO: 152043 - DNA, 77 bp, Homo sapiens
gggcacaacacgtcaggagcagaaagcttccagaaggggacagctgataagggcagcctggctgacaggaagcccgg

SEQ ID NO: 152044 - DNA, 77 bp, Homo sapiens
aacacgtcaggagcagaaagcttccagaaggggacagctgataagggcagcctggctgacaggaagcccggtcaggc

SEQ ID NO: 152045 - DNA, 78 bp, Homo sapiens
agcagaaagcttccagaaggggacagctgataagggcagcctggctgacaggaagcccggtcaggccaggccaggaga

SEQ ID NO: 152046 - DNA, 80 bp, Homo sapiens
ttccagaaggggacagctgataagggcagcctggctgacaggaagcccggtcaggccaggccaggagatgctgggtgctg

SEQ ID NO: 152047 - DNA, 79 bp, Homo sapiens
gggacagctgataagggcagcctggctgacaggaagcccggtcaggccaggccaggagatgctgggtgctggcaggggg

SEQ ID NO: 152048 - DNA, 78 bp, Homo sapiens
ataagggcagcctggctgacaggaagcccggtcaggccaggccaggagatgctgggtgctggcagggggggagcttca

SEQ ID NO: 152049 - DNA, 78 bp, Homo sapiens
gctgacaggaagcccggtcaggccaggccaggagatgctgggtgctggcagggggggagcttcaggcagggcagggta

SEQ ID NO: 152050 - DNA, 74 bp, Homo sapiens
aggaagcccggtcaggccaggccaggagatgctgggtgctggcagggggggagcttcaggcagggcagggtagg

SEQ ID NO: 152051 - DNA, 75 bp, Homo sapiens
ggtcaggccaggccaggagatgctgggtgctggcagggggggagcttcaggcagggcagggtaggggccagcccc

SEQ ID NO: 152052 - DNA, 74 bp, Homo sapiens
aggagatgctgggtgctggcagggggggagcttcaggcagggcagggtaggggccagccccctacaggaagcta

SEQ ID NO: 152053 - DNA, 74 bp, Homo sapiens
ggtgctggcagggggggagcttcaggcagggcagggtaggggccagccccctacaggaagctatcctctgcttc

SEQ ID NO: 152054 - DNA, 70 bp, Homo sapiens
agggggggagcttcaggcagggcagggtaggggccagccccctacaggaagctatcctctgcttccgccc

SEQ ID NO: 152055 - DNA, 75 bp, Homo sapiens
agcttcaggcagggcagggtaggggccagccccctacaggaagctatcctctgcttccgcccgaggcgcagggca

SEQ ID NO: 152056 - DNA, 72 bp, Homo sapiens
gcagggtaggggccagccccctacaggaagctatcctctgcttccgcccgaggcgcagggcaccccgaatcc

SEQ ID NO: 152057 - DNA, 73 bp, Homo sapiens
ggccagccccctacaggaagctatcctctgcttccgcccgaggcgcagggcaccccgaatccggcaactgttc

SEQ ID NO: 152058 - DNA, 75 bp, Homo sapiens
ccctacaggaagctatcctctgcttccgcccgaggcgcagggcaccccgaatccggcaactgttccagctctggc

SEQ ID NO: 152059 - DNA, 76 bp, Homo sapiens
aagctatcctctgcttccgcccgaggcgcagggcaccccgaatccggcaactgttccagctctggctccggctcca

SEQ ID NO: 152060 - DNA, 77 bp, Homo sapiens
tgcttccgcccgaggcgcagggcaccccgaatccggcaactgttccagctctggctccggctccacctggagctcaa

SEQ ID NO: 152061 - DNA, 75 bp, Homo sapiens
cccgaggcgcagggcaccccgaatccggcaactgttccagctctggctccggctccacctggagctcaagctggg

SEQ ID NO: 152062 - DNA, 77 bp, Homo sapiens
agggcaccccgaatccggcaactgttccagctctggctccggctccacctggagctcaagctggggctctggctctg

SEQ ID NO: 152063 - DNA, 77 bp, Homo sapiens
aatccggcaactgttccagctctggctccggctccacctggagctcaagctggggctctggctctggttcgtcctgg

SEQ ID NO: 152064 - DNA, 77 bp, Homo sapiens
aactgttccagctctggctccggctccacctggagctcaagctggggctctggctctggttcgtcctggggctccag

SEQ ID NO: 152065 - DNA, 78 bp, Homo sapiens
tggctccggctccacctggagctcaagctggggctctggctctggttcgtcctggggctccagggggctgtcacagga

SEQ ID NO: 152066 - DNA, 77 bp, Homo sapiens
ctcaagctggggctctggctctggttcgtcctggggctccagggggctgtcacaggagatggttgaggaggtgttga

SEQ ID NO: 152067 - DNA, 77 bp, Homo sapiens
ggctctggctctggttcgtcctggggctccagggggctgtcacaggagatggttgaggaggtgttgacttcattcag

SEQ ID NO: 152068 - DNA, 76 bp, Homo sapiens
ctggggctccagggggctgtcacaggagatggttgaggaggtgttgacttcattcagggtggagctagaggaaaga

SEQ ID NO: 152069 - DNA, 78 bp, Homo sapiens
agggggctgtcacaggagatggttgaggaggtgttgacttcattcagggtggagctagaggaaagaggcagtgagtga

SEQ ID NO: 152070 - DNA, 79 bp, Homo sapiens
tgtcacaggagatggttgaggaggtgttgacttcattcagggtggagctagaggaaagaggcagtgagtgaggggctag

SEQ ID NO: 152071 - DNA, 76 bp, Homo sapiens
agatggttgaggaggtgttgacttcattcagggtggagctagaggaaagaggcagtgagtgaggggctaggaagga

SEQ ID NO: 152072 - DNA, 71 bp, Homo sapiens
acacacactgtgcacaatttccttggccccaggccagggtggttacctggctaggctgggggaaccctcca

SEQ ID NO: 152073 - DNA, 69 bp, Homo sapiens
actgtgcacaatttccttggccccaggccagggtggttacctggctaggctgggggaaccctccagtgg

SEQ ID NO: 152074 - DNA, 66 bp, Homo sapiens
aatttccttggccccaggccagggtggttacctggctaggctgggggaaccctccagtgggccctc

SEQ ID NO: 152075 - DNA, 67 bp, Homo sapiens
aggccagggtggttacctggctaggctgggggaaccctccagtgggccctcgtcagcaacctcgggt

SEQ ID NO: 152076 - DNA, 66 bp, Homo sapiens
agggtggttacctggctaggctgggggaaccctccagtgggccctcgtcagcaacctcgggtttgg

SEQ ID NO: 152077 - DNA, 68 bp, Homo sapiens
cctggctaggctgggggaaccctccagtgggccctcgtcagcaacctcgggtttggggtcaggcaggg

SEQ ID NO: 152078 - DNA, 70 bp, Homo sapiens
ggaaccctccagtgggccctcgtcagcaacctcgggtttggggtcaggcagggggatgatatagtcgttg

SEQ ID NO: 152079 - DNA, 74 bp, Homo sapiens
ccctcgtcagcaacctcgggtttggggtcaggcagggggatgatatagtcgttgtcaccctcattgggctgcac

SEQ ID NO: 152080 - DNA, 74 bp, Homo sapiens
aacctcgggtttggggtcaggcagggggatgatatagtcgttgtcaccctcattgggctgcacggcagtataga

SEQ ID NO: 152081 - DNA, 79 bp, Homo sapiens
gggtcaggcagggggatgatatagtcgttgtcaccctcattgggctgcacggcagtatagaggacggagctggtgtcca

SEQ ID NO: 152082 - DNA, 77 bp, Homo sapiens
aggcagggggatgatatagtcgttgtcaccctcattgggctgcacggcagtatagaggacggagctggtgtccaggg

SEQ ID NO: 152083 - DNA, 79 bp, Homo sapiens
atgatatagtcgttgtcaccctcattgggctgcacggcagtatagaggacggagctggtgtccaggggagatcggaggc

SEQ ID NO: 152084 - DNA, 78 bp, Homo sapiens
ttgtcaccctcattgggctgcacggcagtatagaggacggagctggtgtccaggggagatcggaggccatggaaccca

SEQ ID NO: 152085 - DNA, 76 bp, Homo sapiens
attgggctgcacggcagtatagaggacggagctggtgtccaggggagatcggaggccatggaacccaggcaagcgg

SEQ ID NO: 152086 - DNA, 74 bp, Homo sapiens
acggcagtatagaggacggagctggtgtccaggggagatcggaggccatggaacccaggcaagcgggcctggga

SEQ ID NO: 152087 - DNA, 73 bp, Homo sapiens
tatagaggacggagctggtgtccaggggagatcggaggccatggaacccaggcaagcgggcctgggaccgaag

SEQ ID NO: 152088 - DNA, 74 bp, Homo sapiens
tggtgtccaggggagatcggaggccatggaacccaggcaagcgggcctgggaccgaaggatggctgggtggtca

SEQ ID NO: 152089 - DNA, 74 bp, Homo sapiens
gggagatcggaggccatggaacccaggcaagcgggcctgggaccgaaggatggctgggtggtcactcctcagaa

SEQ ID NO: 152090 - DNA, 73 bp, Homo sapiens
atcggaggccatggaacccaggcaagcgggcctgggaccgaaggatggctgggtggtcactcctcagaaactc

SEQ ID NO: 152091 - DNA, 73 bp, Homo sapiens
atggaacccaggcaagcgggcctgggaccgaaggatggctgggtggtcactcctcagaaactcctcatccacc

SEQ ID NO: 152092 - DNA, 75 bp, Homo sapiens
aagcgggcctgggaccgaaggatggctgggtggtcactcctcagaaactcctcatccacctgctggtacttctgc

SEQ ID NO: 152093 - DNA, 74 bp, Homo sapiens
cctgggaccgaaggatggctgggtggtcactcctcagaaactcctcatccacctgctggtacttctgctcccgg

SEQ ID NO: 152094 - DNA, 75 bp, Homo sapiens
atggctgggtggtcactcctcagaaactcctcatccacctgctggtacttctgctcccggggcagggagaaccaa

SEQ ID NO: 152095 - DNA, 73 bp, Homo sapiens
ggtggtcactcctcagaaactcctcatccacctgctggtacttctgctcccggggcagggagaaccaaagaaa

SEQ ID NO: 152096 - DNA, 72 bp, Homo sapiens
acttctgcaccagagctctccgtgctccacccctaccctgcctcaacatacctttttgtaaccttcgcccaa

SEQ ID NO: 152097 - DNA, 71 bp, Homo sapiens
ctctccgtgctccacccctaccctgcctcaacatacctttttgtaaccttcgcccaacagtctctcgagaa

SEQ ID NO: 152098 - DNA, 74 bp, Homo sapiens
tccacccctaccctgcctcaacatacctttttgtaaccttcgcccaacagtctctcgagaagcagcaccagctg

SEQ ID NO: 152099 - DNA, 74 bp, Homo sapiens
cctaccctgcctcaacatacctttttgtaaccttcgcccaacagtctctcgagaagcagcaccagctgggagaa

SEQ ID NO: 152100 - DNA, 71 bp, Homo sapiens
acatacctttttgtaaccttcgcccaacagtctctcgagaagcagcaccagctgggagaaggggggccgaa

SEQ ID NO: 152101 - DNA, 72 bp, Homo sapiens
ttttgtaaccttcgcccaacagtctctcgagaagcagcaccagctgggagaaggggggccgaatctcaaact

SEQ ID NO: 152102 - DNA, 73 bp, Homo sapiens
accttcgcccaacagtctctcgagaagcagcaccagctgggagaaggggggccgaatctcaaacttctcttcc

SEQ ID NO: 152103 - DNA, 79 bp, Homo sapiens
aacagtctctcgagaagcagcaccagctgggagaaggggggccgaatctcaaacttctcttcccagcacttctgcatga

SEQ ID NO: 152104 - DNA, 80 bp, Homo sapiens
agaagcagcaccagctgggagaaggggggccgaatctcaaacttctcttcccagcacttctgcatgatctcatagctggg

SEQ ID NO: 152105 - DNA, 78 bp, Homo sapiens
gctgggagaaggggggccgaatctcaaacttctcttcccagcacttctgcatgatctcatagctggggatagggagaa

SEQ ID NO: 152106 - DNA, 76 bp, Homo sapiens
aaggggggccgaatctcaaacttctcttcccagcacttctgcatgatctcatagctggggatagggagaagggtca

SEQ ID NO: 152107 - DNA, 79 bp, Homo sapiens
aatctcaaacttctcttcccagcacttctgcatgatctcatagctggggatagggagaagggtcagggcctctggccca

SEQ ID NO: 152108 - DNA, 85 bp, Homo sapiens
atctattgtttgcagcacaaaatcctcccaaatgcatgagactccactcacatctcgtcggaggcatgggcaggctgggccatgc

SEQ ID NO: 152109 - DNA, 80 bp, Homo sapiens
agcacaaaatcctcccaaatgcatgagactccactcacatctcgtcggaggcatgggcaggctgggccatgcggtaaccc

SEQ ID NO: 152110 - DNA, 81 bp, Homo sapiens
tcccaaatgcatgagactccactcacatctcgtcggaggcatgggcaggctgggccatgcggtaaccccgtttgatggcat

SEQ ID NO: 152111 - DNA, 82 bp, Homo sapiens
aatgcatgagactccactcacatctcgtcggaggcatgggcaggctgggccatgcggtaaccccgtttgatggcattgtaga

SEQ ID NO: 152112 - DNA, 79 bp, Homo sapiens
actcacatctcgtcggaggcatgggcaggctgggccatgcggtaaccccgtttgatggcattgtagaactgctcgttca

SEQ ID NO: 152113 - DNA, 79 bp, Homo sapiens
atctcgtcggaggcatgggcaggctgggccatgcggtaaccccgtttgatggcattgtagaactgctcgttcatgggca

SEQ ID NO: 152114 - DNA, 77 bp, Homo sapiens
atgggcaggctgggccatgcggtaaccccgtttgatggcattgtagaactgctcgttcatgggcagctctgggtaag

SEQ ID NO: 152115 - DNA, 76 bp, Homo sapiens
ctgggccatgcggtaaccccgtttgatggcattgtagaactgctcgttcatgggcagctctgggtaaggggtgcca

SEQ ID NO: 152116 - DNA, 74 bp, Homo sapiens
atgcggtaaccccgtttgatggcattgtagaactgctcgttcatgggcagctctgggtaaggggtgccacctgt

SEQ ID NO: 152117 - DNA, 78 bp, Homo sapiens
cgtttgatggcattgtagaactgctcgttcatgggcagctctgggtaaggggtgccacctgttggggagcagagacaa

SEQ ID NO: 152118 - DNA, 78 bp, Homo sapiens
attgtagaactgctcgttcatgggcagctctgggtaaggggtgccacctgttggggagcagagacaagagatacacag

SEQ ID NO: 152119 - DNA, 78 bp, Homo sapiens
aactgctcgttcatgggcagctctgggtaaggggtgccacctgttggggagcagagacaagagatacacaggctcagg

SEQ ID NO: 152120 - DNA, 80 bp, Homo sapiens
aggtagacaccaggccaggatgctgagggctggaggaggaagcaagcatacccaaggtgaagatctcccagagcaggatc

SEQ ID NO: 152121 - DNA, 79 bp, Homo sapiens
caggatgctgagggctggaggaggaagcaagcatacccaaggtgaagatctcccagagcaggatcccgaaggaccacac

SEQ ID NO: 152122 - DNA, 77 bp, Homo sapiens
agggctggaggaggaagcaagcatacccaaggtgaagatctcccagagcaggatcccgaaggaccacacgtcgctca

SEQ ID NO: 152123 - DNA, 77 bp, Homo sapiens
gaggaagcaagcatacccaaggtgaagatctcccagagcaggatcccgaaggaccacacgtcgctcagggtggtgta

SEQ ID NO: 152124 - DNA, 76 bp, Homo sapiens
aagcatacccaaggtgaagatctcccagagcaggatcccgaaggaccacacgtcgctcagggtggtgtagaggctg

SEQ ID NO: 152125 - DNA, 78 bp, Homo sapiens
aaggtgaagatctcccagagcaggatcccgaaggaccacacgtcgctcagggtggtgtagaggctgttgaagatgctc

SEQ ID NO: 152126 - DNA, 80 bp, Homo sapiens
tcccagagcaggatcccgaaggaccacacgtcgctcagggtggtgtagaggctgttgaagatgctctccggagccatcca

SEQ ID NO: 152127 - DNA, 76 bp, Homo sapiens
ggatcccgaaggaccacacgtcgctcagggtggtgtagaggctgttgaagatgctctccggagccatccactttaa

SEQ ID NO: 152128 - DNA, 75 bp, Homo sapiens
aaggaccacacgtcgctcagggtggtgtagaggctgttgaagatgctctccggagccatccactttaaaggcaaa

SEQ ID NO: 152129 - DNA, 74 bp, Homo sapiens
acacgtcgctcagggtggtgtagaggctgttgaagatgctctccggagccatccactttaaaggcaaaaaggtc

SEQ ID NO: 152130 - DNA, 72 bp, Homo sapiens
agggtggtgtagaggctgttgaagatgctctccggagccatccactttaaaggcaaaaaggtctgtagggag

SEQ ID NO: 152131 - DNA, 74 bp, Homo sapiens
tagaggctgttgaagatgctctccggagccatccactttaaaggcaaaaaggtctgtagggaggtcaggacagg

SEQ ID NO: 152132 - DNA, 75 bp, Homo sapiens
aagatgctctccggagccatccactttaaaggcaaaaaggtctgtagggaggtcaggacaggtgctgagtgcaag

SEQ ID NO: 152133 - DNA, 81 bp, Homo sapiens
tcacaggcactgtgactgccctgcaggggccagggaaggtactcacgctgcctttggagatgtaattcgagtcccgcatga

SEQ ID NO: 152134 - DNA, 79 bp, Homo sapiens
actgtgactgccctgcaggggccagggaaggtactcacgctgcctttggagatgtaattcgagtcccgcatgatgtctc

SEQ ID NO: 152135 - DNA, 79 bp, Homo sapiens
ctgcaggggccagggaaggtactcacgctgcctttggagatgtaattcgagtcccgcatgatgtctcgagccaggccaa

SEQ ID NO: 152136 - DNA, 80 bp, Homo sapiens
cagggaaggtactcacgctgcctttggagatgtaattcgagtcccgcatgatgtctcgagccaggccaaagtcacagatc

SEQ ID NO: 152137 - DNA, 80 bp, Homo sapiens
aaggtactcacgctgcctttggagatgtaattcgagtcccgcatgatgtctcgagccaggccaaagtcacagatcttgac

SEQ ID NO: 152138 - DNA, 82 bp, Homo sapiens
cctttggagatgtaattcgagtcccgcatgatgtctcgagccaggccaaagtcacagatcttgaccagcttgccttcacaga

SEQ ID NO: 152139 - DNA, 84 bp, Homo sapiens
agatgtaattcgagtcccgcatgatgtctcgagccaggccaaagtcacagatcttgaccagcttgccttcacagatgagcacgt

SEQ ID NO: 152140 - DNA, 84 bp, Homo sapiens
ttcgagtcccgcatgatgtctcgagccaggccaaagtcacagatcttgaccagcttgccttcacagatgagcacgttcctagcc

SEQ ID NO: 152141 - DNA, 84 bp, Homo sapiens
atgatgtctcgagccaggccaaagtcacagatcttgaccagcttgccttcacagatgagcacgttcctagccgccaggtctctg

SEQ ID NO: 152142 - DNA, 82 bp, Homo sapiens
ccaggccaaagtcacagatcttgaccagcttgccttcacagatgagcacgttcctagccgccaggtctctgtggacgcactg

SEQ ID NO: 152143 - DNA, 79 bp, Homo sapiens
aaagtcacagatcttgaccagcttgccttcacagatgagcacgttcctagccgccaggtctctgtggacgcactgggtt

SEQ ID NO: 152144 - DNA, 79 bp, Homo sapiens
agatcttgaccagcttgccttcacagatgagcacgttcctagccgccaggtctctgtggacgcactgggtttggggaga

SEQ ID NO: 152145 - DNA, 78 bp, Homo sapiens
agcttgccttcacagatgagcacgttcctagccgccaggtctctgtggacgcactgggtttggggagaggggagctga

SEQ ID NO: 152146 - DNA, 75 bp, Homo sapiens
acagatgagcacgttcctagccgccaggtctctgtggacgcactgggtttggggagaggggagctgaggccttgg

SEQ ID NO: 152147 - DNA, 69 bp, Homo sapiens
acccacctccccacagcccccactctgccccaccaacaccacacgtacgttcttggaggccagaaactc

SEQ ID NO: 152148 - DNA, 73 bp, Homo sapiens
acagcccccactctgccccaccaacaccacacgtacgttcttggaggccagaaactccatgccattggccacc

SEQ ID NO: 152149 - DNA, 75 bp, Homo sapiens
actctgccccaccaacaccacacgtacgttcttggaggccagaaactccatgccattggccacctggtagctgaa

SEQ ID NO: 152150 - DNA, 74 bp, Homo sapiens
accaacaccacacgtacgttcttggaggccagaaactccatgccattggccacctggtagctgaagcccacgag

SEQ ID NO: 152151 - DNA, 75 bp, Homo sapiens
acgtacgttcttggaggccagaaactccatgccattggccacctggtagctgaagcccacgaggtccatgtagct

SEQ ID NO: 152152 - DNA, 80 bp, Homo sapiens
ttcttggaggccagaaactccatgccattggccacctggtagctgaagcccacgaggtccatgtagcttagcactggaga

SEQ ID NO: 152153 - DNA, 80 bp, Homo sapiens
gaaactccatgccattggccacctggtagctgaagcccacgaggtccatgtagcttagcactggagactcgttgatcaaa

SEQ ID NO: 152154 - DNA, 80 bp, Homo sapiens
atgccattggccacctggtagctgaagcccacgaggtccatgtagcttagcactggagactcgttgatcaaagttgctcg

SEQ ID NO: 152155 - DNA, 78 bp, Homo sapiens
acctggtagctgaagcccacgaggtccatgtagcttagcactggagactcgttgatcaaagttgctcggcaggtcctc

SEQ ID NO: 152156 - DNA, 79 bp, Homo sapiens
gtagctgaagcccacgaggtccatgtagcttagcactggagactcgttgatcaaagttgctcggcaggtcctctcaggg

SEQ ID NO: 152157 - DNA, 78 bp, Homo sapiens
acgaggtccatgtagcttagcactggagactcgttgatcaaagttgctcggcaggtcctctcaggggctagaggagaa

SEQ ID NO: 152158 - DNA, 80 bp, Homo sapiens
atgtagcttagcactggagactcgttgatcaaagttgctcggcaggtcctctcaggggctagaggagaagcagagggtca

SEQ ID NO: 152159 - DNA, 79 bp, Homo sapiens
ctggagactcgttgatcaaagttgctcggcaggtcctctcaggggctagaggagaagcagagggtcacctgctatctta

SEQ ID NO: 152160 - DNA, 72 bp, Homo sapiens
atcagcctgtttggatgtggggtactatgtcactatgtccacccaccagagggaacgtagttatcgtaaggg

SEQ ID NO: 152161 - DNA, 72 bp, Homo sapiens
ttggatgtggggtactatgtcactatgtccacccaccagagggaacgtagttatcgtaaggggccatgtagt

SEQ ID NO: 152162 - DNA, 72 bp, Homo sapiens
ggtactatgtcactatgtccacccaccagagggaacgtagttatcgtaaggggccatgtagttggaggactc

SEQ ID NO: 152163 - DNA, 76 bp, Homo sapiens
tcactatgtccacccaccagagggaacgtagttatcgtaaggggccatgtagttggaggactcgatgtctgcatat

SEQ ID NO: 152164 - DNA, 73 bp, Homo sapiens
acccaccagagggaacgtagttatcgtaaggggccatgtagttggaggactcgatgtctgcatatttgacgtc

SEQ ID NO: 152165 - DNA, 74 bp, Homo sapiens
agagggaacgtagttatcgtaaggggccatgtagttggaggactcgatgtctgcatatttgacgtctcctttca

SEQ ID NO: 152166 - DNA, 78 bp, Homo sapiens
cgtagttatcgtaaggggccatgtagttggaggactcgatgtctgcatatttgacgtctcctttcatgtccagcatgg

SEQ ID NO: 152167 - DNA, 82 bp, Homo sapiens
gggccatgtagttggaggactcgatgtctgcatatttgacgtctcctttcatgtccagcatgggcacatagtccaccgactc

SEQ ID NO: 152168 - DNA, 81 bp, Homo sapiens
tgtagttggaggactcgatgtctgcatatttgacgtctcctttcatgtccagcatgggcacatagtccaccgactcgtcct

SEQ ID NO: 152169 - DNA, 85 bp, Homo sapiens
actcgatgtctgcatatttgacgtctcctttcatgtccagcatgggcacatagtccaccgactcgtccttgctcatgtccatgta

SEQ ID NO: 152170 - DNA, 82 bp, Homo sapiens
catatttgacgtctcctttcatgtccagcatgggcacatagtccaccgactcgtccttgctcatgtccatgtagccaccgtc

SEQ ID NO: 152171 - DNA, 83 bp, Homo sapiens
ttgacgtctcctttcatgtccagcatgggcacatagtccaccgactcgtccttgctcatgtccatgtagccaccgtcgctctc

SEQ ID NO: 152172 - DNA, 81 bp, Homo sapiens
tttcatgtccagcatgggcacatagtccaccgactcgtccttgctcatgtccatgtagccaccgtcgctctccccggtcaa

SEQ ID NO: 152173 - DNA, 80 bp, Homo sapiens
agcatgggcacatagtccaccgactcgtccttgctcatgtccatgtagccaccgtcgctctccccggtcaaggacacatg

SEQ ID NO: 152174 - DNA, 77 bp, Homo sapiens
acatagtccaccgactcgtccttgctcatgtccatgtagccaccgtcgctctccccggtcaaggacacatggctggg

SEQ ID NO: 152175 - DNA, 75 bp, Homo sapiens
cgactcgtccttgctcatgtccatgtagccaccgtcgctctccccggtcaaggacacatggctgggggtaaagga

SEQ ID NO: 152176 - DNA, 79 bp, Homo sapiens
cttgctcatgtccatgtagccaccgtcgctctccccggtcaaggacacatggctgggggtaaaggagcatcacaggaga

SEQ ID NO: 152177 - DNA, 77 bp, Homo sapiens
atgtagccaccgtcgctctccccggtcaaggacacatggctgggggtaaaggagcatcacaggagagcctgcaggct

SEQ ID NO: 152178 - DNA, 71 bp, Homo sapiens
tcctcaggtatcccaaagattcagtccctggcctccctcctggtacctgggcagggggagcccaacgggca

SEQ ID NO: 152179 - DNA, 74 bp, Homo sapiens
tcccaaagattcagtccctggcctccctcctggtacctgggcagggggagcccaacgggcagagcattgctgta

SEQ ID NO: 152180 - DNA, 75 bp, Homo sapiens
aagattcagtccctggcctccctcctggtacctgggcagggggagcccaacgggcagagcattgctgtagagctc

SEQ ID NO: 152181 - DNA, 75 bp, Homo sapiens
gcctccctcctggtacctgggcagggggagcccaacgggcagagcattgctgtagagctccgcgctgggcgggcg

SEQ ID NO: 152182 - DNA, 77 bp, Homo sapiens
tcctggtacctgggcagggggagcccaacgggcagagcattgctgtagagctccgcgctgggcgggcggcgcttgtc

SEQ ID NO: 152183 - DNA, 81 bp, Homo sapiens
gcagggggagcccaacgggcagagcattgctgtagagctccgcgctgggcgggcggcgcttgtcggagtggtgctgcagga

SEQ ID NO: 152184 - DNA, 79 bp, Homo sapiens
cccaacgggcagagcattgctgtagagctccgcgctgggcgggcggcgcttgtcggagtggtgctgcaggaaggtgtgt

SEQ ID NO: 152185 - DNA, 82 bp, Homo sapiens
agagcattgctgtagagctccgcgctgggcgggcggcgcttgtcggagtggtgctgcaggaaggtgtgtttgttgcggtgca

SEQ ID NO: 152186 - DNA, 80 bp, Homo sapiens
ttgctgtagagctccgcgctgggcgggcggcgcttgtcggagtggtgctgcaggaaggtgtgtttgttgcggtgcaggta

SEQ ID NO: 152187 - DNA, 77 bp, Homo sapiens
agctccgcgctgggcgggcggcgcttgtcggagtggtgctgcaggaaggtgtgtttgttgcggtgcaggtagtccac

SEQ ID NO: 152188 - DNA, 75 bp, Homo sapiens
cgggcggcgcttgtcggagtggtgctgcaggaaggtgtgtttgttgcggtgcaggtagtccaccaggtctccgta

SEQ ID NO: 152189 - DNA, 78 bp, Homo sapiens
ttgtcggagtggtgctgcaggaaggtgtgtttgttgcggtgcaggtagtccaccaggtctccgtagcggcagtactca

SEQ ID NO: 152190 - DNA, 82 bp, Homo sapiens
gtgctgcaggaaggtgtgtttgttgcggtgcaggtagtccaccaggtctccgtagcggcagtactcagtgatgatatagatg

SEQ ID NO: 152191 - DNA, 77 bp, Homo sapiens
aaggtgtgtttgttgcggtgcaggtagtccaccaggtctccgtagcggcagtactcagtgatgatatagatgggtcc

SEQ ID NO: 152192 - DNA, 80 bp, Homo sapiens
gtgtttgttgcggtgcaggtagtccaccaggtctccgtagcggcagtactcagtgatgatatagatgggtcctgcagagg

SEQ ID NO: 152193 - DNA, 81 bp, Homo sapiens
cggtgcaggtagtccaccaggtctccgtagcggcagtactcagtgatgatatagatgggtcctgcagagggacaggctcag

SEQ ID NO: 152194 - DNA, 80 bp, Homo sapiens
accaggtctccgtagcggcagtactcagtgatgatatagatgggtcctgcagagggacaggctcagggacagtccctatg

SEQ ID NO: 152195 - DNA, 70 bp, Homo sapiens
ccttggtggtgggcactttccctgaggcctctggggcagtgggctcggtacctcctttggtgcaggcccc

SEQ ID NO: 152196 - DNA, 70 bp, Homo sapiens
actttccctgaggcctctggggcagtgggctcggtacctcctttggtgcaggcccccaacaggttgacca

SEQ ID NO: 152197 - DNA, 70 bp, Homo sapiens
aggcctctggggcagtgggctcggtacctcctttggtgcaggcccccaacaggttgaccacgttcaggtg

SEQ ID NO: 152198 - DNA, 69 bp, Homo sapiens
gggcagtgggctcggtacctcctttggtgcaggcccccaacaggttgaccacgttcaggtggggcccaa

SEQ ID NO: 152199 - DNA, 72 bp, Homo sapiens
tcggtacctcctttggtgcaggcccccaacaggttgaccacgttcaggtggggcccaaggtgactcatgatc

SEQ ID NO: 152200 - DNA, 76 bp, Homo sapiens
tttggtgcaggcccccaacaggttgaccacgttcaggtggggcccaaggtgactcatgatcttcagctccgacata

SEQ ID NO: 152201 - DNA, 73 bp, Homo sapiens
ggcccccaacaggttgaccacgttcaggtggggcccaaggtgactcatgatcttcagctccgacataagggct

SEQ ID NO: 152202 - DNA, 76 bp, Homo sapiens
aacaggttgaccacgttcaggtggggcccaaggtgactcatgatcttcagctccgacataagggcttgcttctcac

SEQ ID NO: 152203 - DNA, 79 bp, Homo sapiens
accacgttcaggtggggcccaaggtgactcatgatcttcagctccgacataagggcttgcttctcactgctgcgggctg

SEQ ID NO: 152204 - DNA, 81 bp, Homo sapiens
gggcccaaggtgactcatgatcttcagctccgacataagggcttgcttctcactgctgcgggctgtggctgaggaaaatgg

SEQ ID NO: 152205 - DNA, 80 bp, Homo sapiens
aaggtgactcatgatcttcagctccgacataagggcttgcttctcactgctgcgggctgtggctgaggaaaatgggggcc

SEQ ID NO: 152206 - DNA, 79 bp, Homo sapiens
atgatcttcagctccgacataagggcttgcttctcactgctgcgggctgtggctgaggaaaatgggggccccaggccag

SEQ ID NO: 152207 - DNA, 78 bp, Homo sapiens
tccgacataagggcttgcttctcactgctgcgggctgtggctgaggaaaatgggggccccaggccaggcccagtcatg

SEQ ID NO: 152208 - DNA, 76 bp, Homo sapiens
agggagaggtgaaggcccagatgtggagggctccaaggactactcacatttaagcatcttgacggccactttcatc

SEQ ID NO: 152209 - DNA, 77 bp, Homo sapiens
aaggcccagatgtggagggctccaaggactactcacatttaagcatcttgacggccactttcatcgtggcctgagaa

SEQ ID NO: 152210 - DNA, 80 bp, Homo sapiens
atgtggagggctccaaggactactcacatttaagcatcttgacggccactttcatcgtggcctgagaatggctcaggcca

SEQ ID NO: 152211 - DNA, 80 bp, Homo sapiens
agggctccaaggactactcacatttaagcatcttgacggccactttcatcgtggcctgagaatggctcaggccatgagcc

SEQ ID NO: 152212 - DNA, 81 bp, Homo sapiens
actactcacatttaagcatcttgacggccactttcatcgtggcctgagaatggctcaggccatgagccgtggcctccacca

SEQ ID NO: 152213 - DNA, 80 bp, Homo sapiens
tttaagcatcttgacggccactttcatcgtggcctgagaatggctcaggccatgagccgtggcctccaccacctgcccaa

SEQ ID NO: 152214 - DNA, 78 bp, Homo sapiens
tcttgacggccactttcatcgtggcctgagaatggctcaggccatgagccgtggcctccaccacctgcccaaaggccc

SEQ ID NO: 152215 - DNA, 77 bp, Homo sapiens
actttcatcgtggcctgagaatggctcaggccatgagccgtggcctccaccacctgcccaaaggccccagagccgag

SEQ ID NO: 152216 - DNA, 79 bp, Homo sapiens
ctgagaatggctcaggccatgagccgtggcctccaccacctgcccaaaggccccagagccgagggtgcgtcctggtgca

SEQ ID NO: 152217 - DNA, 78 bp, Homo sapiens
aatggctcaggccatgagccgtggcctccaccacctgcccaaaggccccagagccgagggtgcgtcctggtgcagaga

SEQ ID NO: 152218 - DNA, 79 bp, Homo sapiens
atgagccgtggcctccaccacctgcccaaaggccccagagccgagggtgcgtcctggtgcagagatgatccattagctc

SEQ ID NO: 152219 - DNA, 78 bp, Homo sapiens
ctccaccacctgcccaaaggccccagagccgagggtgcgtcctggtgcagagatgatccattagctcctggcctacca

SEQ ID NO: 152220 - DNA, 79 bp, Homo sapiens
acccaacttgagtccccacactgccacatgaggcctctcaggactgacccagcacaagctggtcccgcggcagctccca

SEQ ID NO: 152221 - DNA, 81 bp, Homo sapiens
agtccccacactgccacatgaggcctctcaggactgacccagcacaagctggtcccgcggcagctcccacgtggagtcata

SEQ ID NO: 152222 - DNA, 85 bp, Homo sapiens
actgccacatgaggcctctcaggactgacccagcacaagctggtcccgcggcagctcccacgtggagtcatagggcagctgcatg

SEQ ID NO: 152223 - DNA, 82 bp, Homo sapiens
atgaggcctctcaggactgacccagcacaagctggtcccgcggcagctcccacgtggagtcatagggcagctgcatggggtc

SEQ ID NO: 152224 - DNA, 80 bp, Homo sapiens
actgacccagcacaagctggtcccgcggcagctcccacgtggagtcatagggcagctgcatggggtccacgtagatgtac

SEQ ID NO: 152225 - DNA, 82 bp, Homo sapiens
cacaagctggtcccgcggcagctcccacgtggagtcatagggcagctgcatggggtccacgtagatgtactcatggccgtca

SEQ ID NO: 152226 - DNA, 84 bp, Homo sapiens
tggtcccgcggcagctcccacgtggagtcatagggcagctgcatggggtccacgtagatgtactcatggccgtcagagctcaca

SEQ ID NO: 152227 - DNA, 84 bp, Homo sapiens
gctcccacgtggagtcatagggcagctgcatggggtccacgtagatgtactcatggccgtcagagctcacagactcaatcacct

SEQ ID NO: 152228 - DNA, 84 bp, Homo sapiens
acgtggagtcatagggcagctgcatggggtccacgtagatgtactcatggccgtcagagctcacagactcaatcaccttccatc

SEQ ID NO: 152229 - DNA, 84 bp, Homo sapiens
tagggcagctgcatggggtccacgtagatgtactcatggccgtcagagctcacagactcaatcaccttccatcggatctcgtaa

SEQ ID NO: 152230 - DNA, 79 bp, Homo sapiens
atggggtccacgtagatgtactcatggccgtcagagctcacagactcaatcaccttccatcggatctcgtaacgtggct

SEQ ID NO: 152231 - DNA, 81 bp, Homo sapiens
gtagatgtactcatggccgtcagagctcacagactcaatcaccttccatcggatctcgtaacgtggcttctggaggaccaa

SEQ ID NO: 152232 - DNA, 79 bp, Homo sapiens
tgtactcatggccgtcagagctcacagactcaatcaccttccatcggatctcgtaacgtggcttctggaggaccaaccc

SEQ ID NO: 152233 - DNA, 76 bp, Homo sapiens
tcagagctcacagactcaatcaccttccatcggatctcgtaacgtggcttctggaggaccaaccccaggaattagt

SEQ ID NO: 152234 - DNA, 74 bp, Homo sapiens
acagactcaatcaccttccatcggatctcgtaacgtggcttctggaggaccaaccccaggaattagttatcaga

SEQ ID NO: 152235 - DNA, 78 bp, Homo sapiens
aaaataatgatgtgccagtcttcacccactgggccagggaggggcttaccttctgccaaagcatgatgaggatgataa

SEQ ID NO: 152236 - DNA, 79 bp, Homo sapiens
aatgatgtgccagtcttcacccactgggccagggaggggcttaccttctgccaaagcatgatgaggatgataagggaga

SEQ ID NO: 152237 - DNA, 80 bp, Homo sapiens
agtcttcacccactgggccagggaggggcttaccttctgccaaagcatgatgaggatgataagggagatgatggtgagca

SEQ ID NO: 152238 - DNA, 79 bp, Homo sapiens
actgggccagggaggggcttaccttctgccaaagcatgatgaggatgataagggagatgatggtgagcaccaccagggc

SEQ ID NO: 152239 - DNA, 84 bp, Homo sapiens
aggggcttaccttctgccaaagcatgatgaggatgataagggagatgatggtgagcaccaccagggccaggatggctgagatca

SEQ ID NO: 152240 - DNA, 85 bp, Homo sapiens
ttctgccaaagcatgatgaggatgataagggagatgatggtgagcaccaccagggccaggatggctgagatcaccaccaccttaa

SEQ ID NO: 152241 - DNA, 81 bp, Homo sapiens
aaagcatgatgaggatgataagggagatgatggtgagcaccaccagggccaggatggctgagatcaccaccaccttaaagg

SEQ ID NO: 152242 - DNA, 80 bp, Homo sapiens
atgaggatgataagggagatgatggtgagcaccaccagggccaggatggctgagatcaccaccaccttaaagggcaaggc

SEQ ID NO: 152243 - DNA, 80 bp, Homo sapiens
taagggagatgatggtgagcaccaccagggccaggatggctgagatcaccaccaccttaaagggcaaggctggaggcaga

SEQ ID NO: 152244 - DNA, 86 bp, Homo sapiens
tgagcaccaccagggccaggatggctgagatcaccaccaccttaaagggcaaggctggaggcagagatgagagcaggccatgagca

SEQ ID NO: 152245 - DNA, 81 bp, Homo sapiens
accagggccaggatggctgagatcaccaccaccttaaagggcaaggctggaggcagagatgagagcaggccatgagcaaac

SEQ ID NO: 152246 - DNA, 76 bp, Homo sapiens
attaaggtagggattgggatcgtcaggggccactgaggctggggactcacagtgtggcaccacgatgacctcctgc

SEQ ID NO: 152247 - DNA, 79 bp, Homo sapiens
attgggatcgtcaggggccactgaggctggggactcacagtgtggcaccacgatgacctcctgcgtgtcctggcccaca

SEQ ID NO: 152248 - DNA, 82 bp, Homo sapiens
tcgtcaggggccactgaggctggggactcacagtgtggcaccacgatgacctcctgcgtgtcctggcccacagcgttgcgca

SEQ ID NO: 152249 - DNA, 86 bp, Homo sapiens
tgaggctggggactcacagtgtggcaccacgatgacctcctgcgtgtcctggcccacagcgttgcgcagcgtgcagcgcaccgaca

SEQ ID NO: 152250 - DNA, 85 bp, Homo sapiens
actcacagtgtggcaccacgatgacctcctgcgtgtcctggcccacagcgttgcgcagcgtgcagcgcaccgacagtggccgatc

SEQ ID NO: 152251 - DNA, 83 bp, Homo sapiens
agtgtggcaccacgatgacctcctgcgtgtcctggcccacagcgttgcgcagcgtgcagcgcaccgacagtggccgatccacg

SEQ ID NO: 152252 - DNA, 88 bp, Homo sapiens
atgacctcctgcgtgtcctggcccacagcgttgcgcagcgtgcagcgcaccgacagtggccgatccacgtgctgcagacgcagtgtgc

SEQ ID NO: 152253 - DNA, 89 bp, Homo sapiens
tcctgcgtgtcctggcccacagcgttgcgcagcgtgcagcgcaccgacagtggccgatccacgtgctgcagacgcagtgtgctcaccac

SEQ ID NO: 152254 - DNA, 87 bp, Homo sapiens
tcctggcccacagcgttgcgcagcgtgcagcgcaccgacagtggccgatccacgtgctgcagacgcagtgtgctcaccacctcaaac

SEQ ID NO: 152255 - DNA, 87 bp, Homo sapiens
agcgttgcgcagcgtgcagcgcaccgacagtggccgatccacgtgctgcagacgcagtgtgctcaccacctcaaactcctgctcctc

SEQ ID NO: 152256 - DNA, 84 bp, Homo sapiens
cgtgcagcgcaccgacagtggccgatccacgtgctgcagacgcagtgtgctcaccacctcaaactcctgctcctcctcccagta

SEQ ID NO: 152257 - DNA, 80 bp, Homo sapiens
accgacagtggccgatccacgtgctgcagacgcagtgtgctcaccacctcaaactcctgctcctcctcccagtacgtcac

SEQ ID NO: 152258 - DNA, 80 bp, Homo sapiens
ccgatccacgtgctgcagacgcagtgtgctcaccacctcaaactcctgctcctcctcccagtacgtcacgttagtctcca

SEQ ID NO: 152259 - DNA, 81 bp, Homo sapiens
acgtgctgcagacgcagtgtgctcaccacctcaaactcctgctcctcctcccagtacgtcacgttagtctccagctggctc

SEQ ID NO: 152260 - DNA, 78 bp, Homo sapiens
agacgcagtgtgctcaccacctcaaactcctgctcctcctcccagtacgtcacgttagtctccagctggctctcctct

SEQ ID NO: 152261 - DNA, 73 bp, Homo sapiens
accacctcaaactcctgctcctcctcccagtacgtcacgttagtctccagctggctctcctcttcggaactgt

SEQ ID NO: 152262 - DNA, 74 bp, Homo sapiens
aaactcctgctcctcctcccagtacgtcacgttagtctccagctggctctcctcttcggaactgttccccagca

SEQ ID NO: 152263 - DNA, 76 bp, Homo sapiens
tcctcctcccagtacgtcacgttagtctccagctggctctcctcttcggaactgttccccagcagcgtgggcggca

SEQ ID NO: 152264 - DNA, 77 bp, Homo sapiens
agtacgtcacgttagtctccagctggctctcctcttcggaactgttccccagcagcgtgggcggcagctcacgtgga

SEQ ID NO: 152265 - DNA, 78 bp, Homo sapiens
acgttagtctccagctggctctcctcttcggaactgttccccagcagcgtgggcggcagctcacgtggacacctgcca

SEQ ID NO: 152266 - DNA, 78 bp, Homo sapiens
agctggctctcctcttcggaactgttccccagcagcgtgggcggcagctcacgtggacacctgccaggagagccggta

SEQ ID NO: 152267 - DNA, 75 bp, Homo sapiens
tcctcttcggaactgttccccagcagcgtgggcggcagctcacgtggacacctgccaggagagccggtagggttg

SEQ ID NO: 152268 - DNA, 76 bp, Homo sapiens
aactgttccccagcagcgtgggcggcagctcacgtggacacctgccaggagagccggtagggttggctgccagccc

SEQ ID NO: 152269 - DNA, 79 bp, Homo sapiens
tttttctagccagctggggacactgggagactgaggcccaggtctgctcaccttttgaggtctctgcaggcagaccaga

SEQ ID NO: 152270 - DNA, 81 bp, Homo sapiens
agctggggacactgggagactgaggcccaggtctgctcaccttttgaggtctctgcaggcagaccagatgatgttcggctg

SEQ ID NO: 152271 - DNA, 81 bp, Homo sapiens
actgggagactgaggcccaggtctgctcaccttttgaggtctctgcaggcagaccagatgatgttcggctggggcatgccc

SEQ ID NO: 152272 - DNA, 80 bp, Homo sapiens
aggcccaggtctgctcaccttttgaggtctctgcaggcagaccagatgatgttcggctggggcatgccccggccacgaca

SEQ ID NO: 152273 - DNA, 82 bp, Homo sapiens
tgctcaccttttgaggtctctgcaggcagaccagatgatgttcggctggggcatgccccggccacgacagcggactgtctgt

SEQ ID NO: 152274 - DNA, 79 bp, Homo sapiens
ccttttgaggtctctgcaggcagaccagatgatgttcggctggggcatgccccggccacgacagcggactgtctgttcc

SEQ ID NO: 152275 - DNA, 81 bp, Homo sapiens
tctgcaggcagaccagatgatgttcggctggggcatgccccggccacgacagcggactgtctgttccccactgtcagggtg

SEQ ID NO: 152276 - DNA, 79 bp, Homo sapiens
cagatgatgttcggctggggcatgccccggccacgacagcggactgtctgttccccactgtcagggtggctctcactta

SEQ ID NO: 152277 - DNA, 77 bp, Homo sapiens
atgttcggctggggcatgccccggccacgacagcggactgtctgttccccactgtcagggtggctctcacttagctc

SEQ ID NO: 152278 - DNA, 78 bp, Homo sapiens
catgccccggccacgacagcggactgtctgttccccactgtcagggtggctctcacttagctccagcactcggacagg

SEQ ID NO: 152279 - DNA, 81 bp, Homo sapiens
ccacgacagcggactgtctgttccccactgtcagggtggctctcacttagctccagcactcggacagggactgcatggaga

SEQ ID NO: 152280 - DNA, 82 bp, Homo sapiens
ggactgtctgttccccactgtcagggtggctctcacttagctccagcactcggacagggactgcatggagagagcactgagt

SEQ ID NO: 152281 - DNA, 82 bp, Homo sapiens
gtctgttccccactgtcagggtggctctcacttagctccagcactcggacagggactgcatggagagagcactgagttagga

SEQ ID NO: 152282 - DNA, 80 bp, Homo sapiens
actgtcagggtggctctcacttagctccagcactcggacagggactgcatggagagagcactgagttaggaggcgggagg

SEQ ID NO: 152283 - DNA, 81 bp, Homo sapiens
cagggaggggaaggagcagggacatggcgaggggcgtgctcatcaccattgatctgtagctggaaggagagctggacctca

SEQ ID NO: 152284 - DNA, 85 bp, Homo sapiens
aaggagcagggacatggcgaggggcgtgctcatcaccattgatctgtagctggaaggagagctggacctcagcatcctcatggaa

SEQ ID NO: 152285 - DNA, 83 bp, Homo sapiens
agggacatggcgaggggcgtgctcatcaccattgatctgtagctggaaggagagctggacctcagcatcctcatggaaggccc

SEQ ID NO: 152286 - DNA, 84 bp, Homo sapiens
aggggcgtgctcatcaccattgatctgtagctggaaggagagctggacctcagcatcctcatggaaggcccgcatggtgtagtg

SEQ ID NO: 152287 - DNA, 88 bp, Homo sapiens
tcatcaccattgatctgtagctggaaggagagctggacctcagcatcctcatggaaggcccgcatggtgtagtggccagcctctgcca

SEQ ID NO: 152288 - DNA, 83 bp, Homo sapiens
attgatctgtagctggaaggagagctggacctcagcatcctcatggaaggcccgcatggtgtagtggccagcctctgccacct

SEQ ID NO: 152289 - DNA, 82 bp, Homo sapiens
tggaaggagagctggacctcagcatcctcatggaaggcccgcatggtgtagtggccagcctctgccaccttcacgcgaacca

SEQ ID NO: 152290 - DNA, 83 bp, Homo sapiens
agctggacctcagcatcctcatggaaggcccgcatggtgtagtggccagcctctgccaccttcacgcgaaccagtgtcagctc

SEQ ID NO: 152291 - DNA, 83 bp, Homo sapiens
agcatcctcatggaaggcccgcatggtgtagtggccagcctctgccaccttcacgcgaaccagtgtcagctctgacacatacc

SEQ ID NO: 152292 - DNA, 81 bp, Homo sapiens
ctcatggaaggcccgcatggtgtagtggccagcctctgccaccttcacgcgaaccagtgtcagctctgacacatacctggg

SEQ ID NO: 152293 - DNA, 80 bp, Homo sapiens
cccgcatggtgtagtggccagcctctgccaccttcacgcgaaccagtgtcagctctgacacatacctggggagcaggaaa

SEQ ID NO: 152294 - DNA, 84 bp, Homo sapiens
tgtagtggccagcctctgccaccttcacgcgaaccagtgtcagctctgacacatacctggggagcaggaaaggcagctgtcaga

SEQ ID NO: 152295 - DNA, 81 bp, Homo sapiens
tctgccaccttcacgcgaaccagtgtcagctctgacacatacctggggagcaggaaaggcagctgtcagagtcggaaggac

SEQ ID NO: 152296 - DNA, 74 bp, Homo sapiens
aaagaaaaataacttcaagaatgggatgggagagcgagctgctcaccgggtctccgacacgttgcgcgtggaca

SEQ ID NO: 152297 - DNA, 75 bp, Homo sapiens
aataacttcaagaatgggatgggagagcgagctgctcaccgggtctccgacacgttgcgcgtggacagggcgatt

SEQ ID NO: 152298 - DNA, 79 bp, Homo sapiens
atgggatgggagagcgagctgctcaccgggtctccgacacgttgcgcgtggacagggcgatttcgccagcgctggagtc

SEQ ID NO: 152299 - DNA, 79 bp, Homo sapiens
atgggagagcgagctgctcaccgggtctccgacacgttgcgcgtggacagggcgatttcgccagcgctggagtcgccca

SEQ ID NO: 152300 - DNA, 76 bp, Homo sapiens
tgctcaccgggtctccgacacgttgcgcgtggacagggcgatttcgccagcgctggagtcgcccagggtgcggttg

SEQ ID NO: 152301 - DNA, 76 bp, Homo sapiens
tctccgacacgttgcgcgtggacagggcgatttcgccagcgctggagtcgcccagggtgcggttgtctttgaacca

SEQ ID NO: 152302 - DNA, 75 bp, Homo sapiens
acacgttgcgcgtggacagggcgatttcgccagcgctggagtcgcccagggtgcggttgtctttgaaccacagga

SEQ ID NO: 152303 - DNA, 75 bp, Homo sapiens
tggacagggcgatttcgccagcgctggagtcgcccagggtgcggttgtctttgaaccacaggacagtgggcggtg

SEQ ID NO: 152304 - DNA, 72 bp, Homo sapiens
atttcgccagcgctggagtcgcccagggtgcggttgtctttgaaccacaggacagtgggcggtgggtaggcc

SEQ ID NO: 152305 - DNA, 72 bp, Homo sapiens
gctggagtcgcccagggtgcggttgtctttgaaccacaggacagtgggcggtgggtaggcctcgaacactac

SEQ ID NO: 152306 - DNA, 72 bp, Homo sapiens
agtcgcccagggtgcggttgtctttgaaccacaggacagtgggcggtgggtaggcctcgaacactacctgca

SEQ ID NO: 152307 - DNA, 75 bp, Homo sapiens
ggttgtctttgaaccacaggacagtgggcggtgggtaggcctcgaacactacctgcagtgtccggctccgatgca

SEQ ID NO: 152308 - DNA, 78 bp, Homo sapiens
tttgaaccacaggacagtgggcggtgggtaggcctcgaacactacctgcagtgtccggctccgatgcagctcagcaaa

SEQ ID NO: 152309 - DNA, 78 bp, Homo sapiens
acaggacagtgggcggtgggtaggcctcgaacactacctgcagtgtccggctccgatgcagctcagcaaattgtagtg

SEQ ID NO: 152310 - DNA, 78 bp, Homo sapiens
gggcggtgggtaggcctcgaacactacctgcagtgtccggctccgatgcagctcagcaaattgtagtgtgcccacctc

SEQ ID NO: 152311 - DNA, 81 bp, Homo sapiens
ctcgaacactacctgcagtgtccggctccgatgcagctcagcaaattgtagtgtgcccacctctcccaggagccgcacgta

SEQ ID NO: 152312 - DNA, 85 bp, Homo sapiens
tacctgcagtgtccggctccgatgcagctcagcaaattgtagtgtgcccacctctcccaggagccgcacgtagccgctctctgca

SEQ ID NO: 152313 - DNA, 81 bp, Homo sapiens
agtgtccggctccgatgcagctcagcaaattgtagtgtgcccacctctcccaggagccgcacgtagccgctctctgcaagg

SEQ ID NO: 152314 - DNA, 80 bp, Homo sapiens
atgcagctcagcaaattgtagtgtgcccacctctcccaggagccgcacgtagccgctctctgcaaggggtgaccgtcagg

SEQ ID NO: 152315 - DNA, 75 bp, Homo sapiens
agcaaattgtagtgtgcccacctctcccaggagccgcacgtagccgctctctgcaaggggtgaccgtcaggggcg

SEQ ID NO: 152316 - DNA, 74 bp, Homo sapiens
ttgtagtgtgcccacctctcccaggagccgcacgtagccgctctctgcaaggggtgaccgtcaggggcggggcc

SEQ ID NO: 152317 - DNA, 75 bp, Homo sapiens
ggagcgttgaaggaattggggattgggctgagcccaaggcacacaccaaccacggtgatgttgatggccttttca

SEQ ID NO: 152318 - DNA, 77 bp, Homo sapiens
ttgaaggaattggggattgggctgagcccaaggcacacaccaaccacggtgatgttgatggccttttcatcctgatg

SEQ ID NO: 152319 - DNA, 80 bp, Homo sapiens
gattgggctgagcccaaggcacacaccaaccacggtgatgttgatggccttttcatcctgatggtcattcacactctccg

SEQ ID NO: 152320 - DNA, 81 bp, Homo sapiens
agcccaaggcacacaccaaccacggtgatgttgatggccttttcatcctgatggtcattcacactctccgtcacattgcag

SEQ ID NO: 152321 - DNA, 81 bp, Homo sapiens
aaggcacacaccaaccacggtgatgttgatggccttttcatcctgatggtcattcacactctccgtcacattgcaggtgta

SEQ ID NO: 152322 - DNA, 78 bp, Homo sapiens
aaccacggtgatgttgatggccttttcatcctgatggtcattcacactctccgtcacattgcaggtgtaggtccccga

SEQ ID NO: 152323 - DNA, 78 bp, Homo sapiens
atgttgatggccttttcatcctgatggtcattcacactctccgtcacattgcaggtgtaggtccccgagtcttctaac

SEQ ID NO: 152324 - DNA, 77 bp, Homo sapiens
ttttcatcctgatggtcattcacactctccgtcacattgcaggtgtaggtccccgagtcttctaactcggcactggg

SEQ ID NO: 152325 - DNA, 80 bp, Homo sapiens
tcctgatggtcattcacactctccgtcacattgcaggtgtaggtccccgagtcttctaactcggcactggggatgtgcag

SEQ ID NO: 152326 - DNA, 78 bp, Homo sapiens
attcacactctccgtcacattgcaggtgtaggtccccgagtcttctaactcggcactggggatgtgcaggatggagcg

SEQ ID NO: 152327 - DNA, 80 bp, Homo sapiens
tcacattgcaggtgtaggtccccgagtcttctaactcggcactggggatgtgcaggatggagcggatgtggtaaggcata

SEQ ID NO: 152328 - DNA, 76 bp, Homo sapiens
aggtgtaggtccccgagtcttctaactcggcactggggatgtgcaggatggagcggatgtggtaaggcatatccaa

SEQ ID NO: 152329 - DNA, 79 bp, Homo sapiens
cccgagtcttctaactcggcactggggatgtgcaggatggagcggatgtggtaaggcatatccaagaggaagtcagtca

SEQ ID NO: 152330 - DNA, 79 bp, Homo sapiens
actggggatgtgcaggatggagcggatgtggtaaggcatatccaagaggaagtcagtcaccggctccaccagccgccca

SEQ ID NO: 152331 - DNA, 83 bp, Homo sapiens
atgtgcaggatggagcggatgtggtaaggcatatccaagaggaagtcagtcaccggctccaccagccgcccactctgcagcaa

SEQ ID NO: 152332 - DNA, 79 bp, Homo sapiens
atggagcggatgtggtaaggcatatccaagaggaagtcagtcaccggctccaccagccgcccactctgcagcaacaggt

SEQ ID NO: 152333 - DNA, 79 bp, Homo sapiens
atgtggtaaggcatatccaagaggaagtcagtcaccggctccaccagccgcccactctgcagcaacaggttgggcaggc

SEQ ID NO: 152334 - DNA, 75 bp, Homo sapiens
atatccaagaggaagtcagtcaccggctccaccagccgcccactctgcagcaacaggttgggcaggccccccaaa

SEQ ID NO: 152335 - DNA, 68 bp, Homo sapiens
tatccacccgttcctggcccctcctccgacccctgcctggccccacattacttctttgcgggggtatg

SEQ ID NO: 152336 - DNA, 70 bp, Homo sapiens
tggcccctcctccgacccctgcctggccccacattacttctttgcgggggtatgtccactcgaagttgac

SEQ ID NO: 152337 - DNA, 71 bp, Homo sapiens
ctccgacccctgcctggccccacattacttctttgcgggggtatgtccactcgaagttgaccacctcattc

SEQ ID NO: 152338 - DNA, 75 bp, Homo sapiens
cctggccccacattacttctttgcgggggtatgtccactcgaagttgaccacctcattcccgatcacaatgcaca

SEQ ID NO: 152339 - DNA, 77 bp, Homo sapiens
acattacttctttgcgggggtatgtccactcgaagttgaccacctcattcccgatcacaatgcacatgagggtgatg

SEQ ID NO: 152340 - DNA, 78 bp, Homo sapiens
ttctttgcgggggtatgtccactcgaagttgaccacctcattcccgatcacaatgcacatgagggtgatgttctcacc

SEQ ID NO: 152341 - DNA, 81 bp, Homo sapiens
tatgtccactcgaagttgaccacctcattcccgatcacaatgcacatgagggtgatgttctcaccctggcggaccacagtc

SEQ ID NO: 152342 - DNA, 83 bp, Homo sapiens
gaagttgaccacctcattcccgatcacaatgcacatgagggtgatgttctcaccctggcggaccacagtctgcactgcgttca

SEQ ID NO: 152343 - DNA, 82 bp, Homo sapiens
acctcattcccgatcacaatgcacatgagggtgatgttctcaccctggcggaccacagtctgcactgcgttcacagagacgt

SEQ ID NO: 152344 - DNA, 84 bp, Homo sapiens
attcccgatcacaatgcacatgagggtgatgttctcaccctggcggaccacagtctgcactgcgttcacagagacgttgatgga

SEQ ID NO: 152345 - DNA, 85 bp, Homo sapiens
acaatgcacatgagggtgatgttctcaccctggcggaccacagtctgcactgcgttcacagagacgttgatggatgacactggta

SEQ ID NO: 152346 - DNA, 82 bp, Homo sapiens
agggtgatgttctcaccctggcggaccacagtctgcactgcgttcacagagacgttgatggatgacactggtagagagagat

SEQ ID NO: 152347 - DNA, 82 bp, Homo sapiens
gttctcaccctggcggaccacagtctgcactgcgttcacagagacgttgatggatgacactggtagagagagattggcttag

SEQ ID NO: 152348 - DNA, 82 bp, Homo sapiens
ggaccacagtctgcactgcgttcacagagacgttgatggatgacactggtagagagagattggcttaggtctggggaagtca

SEQ ID NO: 152349 - DNA, 75 bp, Homo sapiens
acactttgtaaactgtaaagggctattcctctgtggagggttatacttgcctctgctgagcatcaggccagaaag

SEQ ID NO: 152350 - DNA, 80 bp, Homo sapiens
tattcctctgtggagggttatacttgcctctgctgagcatcaggccagaaagggggctcaccctggagtctgtagacata

SEQ ID NO: 152351 - DNA, 82 bp, Homo sapiens
tgtggagggttatacttgcctctgctgagcatcaggccagaaagggggctcaccctggagtctgtagacatagtaggcatca

SEQ ID NO: 152352 - DNA, 82 bp, Homo sapiens
ttatacttgcctctgctgagcatcaggccagaaagggggctcaccctggagtctgtagacatagtaggcatcagaatccacc

SEQ ID NO: 152353 - DNA, 81 bp, Homo sapiens
cctctgctgagcatcaggccagaaagggggctcaccctggagtctgtagacatagtaggcatcagaatccacctccctgtc

SEQ ID NO: 152354 - DNA, 76 bp, Homo sapiens
atcaggccagaaagggggctcaccctggagtctgtagacatagtaggcatcagaatccacctccctgtccccaatg

SEQ ID NO: 152355 - DNA, 72 bp, Homo sapiens
aaagggggctcaccctggagtctgtagacatagtaggcatcagaatccacctccctgtccccaatggtggtt

SEQ ID NO: 152356 - DNA, 77 bp, Homo sapiens
accctggagtctgtagacatagtaggcatcagaatccacctccctgtccccaatggtggttttgcagatgtagcttc

SEQ ID NO: 152357 - DNA, 80 bp, Homo sapiens
tgtagacatagtaggcatcagaatccacctccctgtccccaatggtggttttgcagatgtagcttctgtcctcaaagata

SEQ ID NO: 152358 - DNA, 77 bp, Homo sapiens
taggcatcagaatccacctccctgtccccaatggtggttttgcagatgtagcttctgtcctcaaagataccagaaaa

SEQ ID NO: 152359 - DNA, 76 bp, Homo sapiens
atcagaatccacctccctgtccccaatggtggttttgcagatgtagcttctgtcctcaaagataccagaaaagcca

SEQ ID NO: 152360 - DNA, 77 bp, Homo sapiens
tccctgtccccaatggtggttttgcagatgtagcttctgtcctcaaagataccagaaaagccacgttggtgatcata

SEQ ID NO: 152361 - DNA, 77 bp, Homo sapiens
aatggtggttttgcagatgtagcttctgtcctcaaagataccagaaaagccacgttggtgatcataggggacaggca

SEQ ID NO: 152362 - DNA, 79 bp, Homo sapiens
ttttgcagatgtagcttctgtcctcaaagataccagaaaagccacgttggtgatcataggggacaggcagtgcaacgtc

SEQ ID NO: 152363 - DNA, 75 bp, Homo sapiens
tagcttctgtcctcaaagataccagaaaagccacgttggtgatcataggggacaggcagtgcaacgtcccctttc

SEQ ID NO: 152364 - DNA, 76 bp, Homo sapiens
tcaaagataccagaaaagccacgttggtgatcataggggacaggcagtgcaacgtcccctttcttctcgtgcagtg

SEQ ID NO: 152365 - DNA, 76 bp, Homo sapiens
ataccagaaaagccacgttggtgatcataggggacaggcagtgcaacgtcccctttcttctcgtgcagtgtcacca

SEQ ID NO: 152366 - DNA, 77 bp, Homo sapiens
aagccacgttggtgatcataggggacaggcagtgcaacgtcccctttcttctcgtgcagtgtcaccaccagctgtgg

SEQ ID NO: 152367 - DNA, 78 bp, Homo sapiens
atcataggggacaggcagtgcaacgtcccctttcttctcgtgcagtgtcaccaccagctgtgggtctgttactcggca

SEQ ID NO: 152368 - DNA, 79 bp, Homo sapiens
acaggcagtgcaacgtcccctttcttctcgtgcagtgtcaccaccagctgtgggtctgttactcggcatggaatggtga

SEQ ID NO: 152369 - DNA, 77 bp, Homo sapiens
aacgtcccctttcttctcgtgcagtgtcaccaccagctgtgggtctgttactcggcatggaatggtgatctcagtta

SEQ ID NO: 152370 - DNA, 80 bp, Homo sapiens
tttcttctcgtgcagtgtcaccaccagctgtgggtctgttactcggcatggaatggtgatctcagttatttccgtgagaa

SEQ ID NO: 152371 - DNA, 81 bp, Homo sapiens
tgcagtgtcaccaccagctgtgggtctgttactcggcatggaatggtgatctcagttatttccgtgagaaagatgaatagt

SEQ ID NO: 152372 - DNA, 77 bp, Homo sapiens
accaccagctgtgggtctgttactcggcatggaatggtgatctcagttatttccgtgagaaagatgaatagttcctc

SEQ ID NO: 152373 - DNA, 79 bp, Homo sapiens
tgtgggtctgttactcggcatggaatggtgatctcagttatttccgtgagaaagatgaatagttcctcggcatcattag

SEQ ID NO: 152374 - DNA, 78 bp, Homo sapiens
tgttactcggcatggaatggtgatctcagttatttccgtgagaaagatgaatagttcctcggcatcattagggaggaa

SEQ ID NO: 152375 - DNA, 76 bp, Homo sapiens
atctcagttatttccgtgagaaagatgaatagttcctcggcatcattagggaggaagcccacggtgggatctgcca

SEQ ID NO: 152376 - DNA, 76 bp, Homo sapiens
tatttccgtgagaaagatgaatagttcctcggcatcattagggaggaagcccacggtgggatctgccaggagtgga

SEQ ID NO: 152377 - DNA, 75 bp, Homo sapiens
aagatgaatagttcctcggcatcattagggaggaagcccacggtgggatctgccaggagtggagccgtgaataaa

SEQ ID NO: 152378 - DNA, 74 bp, Homo sapiens
atagttcctcggcatcattagggaggaagcccacggtgggatctgccaggagtggagccgtgaataaatcaggg

SEQ ID NO: 152379 - DNA, 72 bp, Homo sapiens
agttgacaagaggggtaaggagtgggcacacaggctgggagcccttacctggcacaaagatgtagagccgtt

SEQ ID NO: 152380 - DNA, 74 bp, Homo sapiens
gggtaaggagtgggcacacaggctgggagcccttacctggcacaaagatgtagagccgtttccgctcatcggtc

SEQ ID NO: 152381 - DNA, 76 bp, Homo sapiens
agtgggcacacaggctgggagcccttacctggcacaaagatgtagagccgtttccgctcatcggtctccagtccac

SEQ ID NO: 152382 - DNA, 74 bp, Homo sapiens
aggctgggagcccttacctggcacaaagatgtagagccgtttccgctcatcggtctccagtccacgggagtcat

SEQ ID NO: 152383 - DNA, 75 bp, Homo sapiens
ccttacctggcacaaagatgtagagccgtttccgctcatcggtctccagtccacgggagtcattgtgggtgcaaa

SEQ ID NO: 152384 - DNA, 75 bp, Homo sapiens
cacaaagatgtagagccgtttccgctcatcggtctccagtccacgggagtcattgtgggtgcaaaagtattctcc

SEQ ID NO: 152385 - DNA, 75 bp, Homo sapiens
tgtagagccgtttccgctcatcggtctccagtccacgggagtcattgtgggtgcaaaagtattctcccgtgtcta

SEQ ID NO: 152386 - DNA, 75 bp, Homo sapiens
gtttccgctcatcggtctccagtccacgggagtcattgtgggtgcaaaagtattctcccgtgtctagcccagtga

SEQ ID NO: 152387 - DNA, 74 bp, Homo sapiens
atcggtctccagtccacgggagtcattgtgggtgcaaaagtattctcccgtgtctagcccagtgaggttggtca

SEQ ID NO: 152388 - DNA, 76 bp, Homo sapiens
agtccacgggagtcattgtgggtgcaaaagtattctcccgtgtctagcccagtgaggttggtcagtgtgagcacgc

SEQ ID NO: 152389 - DNA, 78 bp, Homo sapiens
agtcattgtgggtgcaaaagtattctcccgtgtctagcccagtgaggttggtcagtgtgagcacgctggagaaggtgc

SEQ ID NO: 152390 - DNA, 78 bp, Homo sapiens
tgggtgcaaaagtattctcccgtgtctagcccagtgaggttggtcagtgtgagcacgctggagaaggtgccatcctgg

SEQ ID NO: 152391 - DNA, 78 bp, Homo sapiens
tattctcccgtgtctagcccagtgaggttggtcagtgtgagcacgctggagaaggtgccatcctgggccttggccatt

SEQ ID NO: 152392 - DNA, 78 bp, Homo sapiens
cgtgtctagcccagtgaggttggtcagtgtgagcacgctggagaaggtgccatcctgggccttggccatttcctgtgg

SEQ ID NO: 152393 - DNA, 76 bp, Homo sapiens
agtgaggttggtcagtgtgagcacgctggagaaggtgccatcctgggccttggccatttcctgtgggggctcctgg

SEQ ID NO: 152394 - DNA, 75 bp, Homo sapiens
agtgtgagcacgctggagaaggtgccatcctgggccttggccatttcctgtgggggctcctgggacatccgttcc

SEQ ID NO: 152395 - DNA, 73 bp, Homo sapiens
acgctggagaaggtgccatcctgggccttggccatttcctgtgggggctcctgggacatccgttcccacacca

SEQ ID NO: 152396 - DNA, 71 bp, Homo sapiens
agaaggtgccatcctgggccttggccatttcctgtgggggctcctgggacatccgttcccacaccaccgga

SEQ ID NO: 152397 - DNA, 70 bp, Homo sapiens
atcctgggccttggccatttcctgtgggggctcctgggacatccgttcccacaccaccggagctgaaccc

SEQ ID NO: 152398 - DNA, 72 bp, Homo sapiens
ccatttcctgtgggggctcctgggacatccgttcccacaccaccggagctgaacccgagcaggtcagaacga

SEQ ID NO: 152399 - DNA, 74 bp, Homo sapiens
tgggggctcctgggacatccgttcccacaccaccggagctgaacccgagcaggtcagaacgaaggtgctggaga

SEQ ID NO: 152400 - DNA, 75 bp, Homo sapiens
ctcctgggacatccgttcccacaccaccggagctgaacccgagcaggtcagaacgaaggtgctggagacattgag

SEQ ID NO: 152401 - DNA, 76 bp, Homo sapiens
atccgttcccacaccaccggagctgaacccgagcaggtcagaacgaaggtgctggagacattgaggacaagctctg

SEQ ID NO: 152402 - DNA, 74 bp, Homo sapiens
acaccaccggagctgaacccgagcaggtcagaacgaaggtgctggagacattgaggacaagctctggccccggg

SEQ ID NO: 152403 - DNA, 75 bp, Homo sapiens
tgaacccgagcaggtcagaacgaaggtgctggagacattgaggacaagctctggccccgggggtgtgacgaccag

SEQ ID NO: 152404 - DNA, 75 bp, Homo sapiens
aggtcagaacgaaggtgctggagacattgaggacaagctctggccccgggggtgtgacgaccaggccctgagaga

SEQ ID NO: 152405 - DNA, 76 bp, Homo sapiens
agaacgaaggtgctggagacattgaggacaagctctggccccgggggtgtgacgaccaggccctgagagatctgtg

SEQ ID NO: 152406 - DNA, 76 bp, Homo sapiens
gagacattgaggacaagctctggccccgggggtgtgacgaccaggccctgagagatctgtggttccagaagtaaca

SEQ ID NO: 152407 - DNA, 74 bp, Homo sapiens
attgaggacaagctctggccccgggggtgtgacgaccaggccctgagagatctgtggttccagaagtaacagga

SEQ ID NO: 152408 - DNA, 76 bp, Homo sapiens
agctctggccccgggggtgtgacgaccaggccctgagagatctgtggttccagaagtaacaggagagacagcaaca

SEQ ID NO: 152409 - DNA, 80 bp, Homo sapiens
ggtgtgacgaccaggccctgagagatctgtggttccagaagtaacaggagagacagcaacagcagctcgcctttgggaga

SEQ ID NO: 152410 - DNA, 78 bp, Homo sapiens
accaggccctgagagatctgtggttccagaagtaacaggagagacagcaacagcagctcgcctttgggagaggaggta

SEQ ID NO: 152411 - DNA, 81 bp, Homo sapiens
agagatctgtggttccagaagtaacaggagagacagcaacagcagctcgcctttgggagaggaggtatcagacatcaggaa

SEQ ID NO: 152412 - DNA, 71 bp, Homo sapiens
acacatcacccctgccagctccagggttccactccgcagccccccgggtcccctaccttatctcccatcta

SEQ ID NO: 152413 - DNA, 70 bp, Homo sapiens
tgccagctccagggttccactccgcagccccccgggtcccctaccttatctcccatctacccacctttga

SEQ ID NO: 152414 - DNA, 66 bp, Homo sapiens
agggttccactccgcagccccccgggtcccctaccttatctcccatctacccacctttgagggcca

SEQ ID NO: 152415 - DNA, 72 bp, Homo sapiens
actccgcagccccccgggtcccctaccttatctcccatctacccacctttgagggccagagctggcatcgca

SEQ ID NO: 152416 - DNA, 70 bp, Homo sapiens
cccgggtcccctaccttatctcccatctacccacctttgagggccagagctggcatcgcacccggaagcc

SEQ ID NO: 152417 - DNA, 78 bp, Homo sapiens
taccttatctcccatctacccacctttgagggccagagctggcatcgcacccggaagccgcatggtgtcctgcagagt

SEQ ID NO: 152418 - DNA, 79 bp, Homo sapiens
tatctcccatctacccacctttgagggccagagctggcatcgcacccggaagccgcatggtgtcctgcagagttaaaca

SEQ ID NO: 152419 - DNA, 77 bp, Homo sapiens
ctacccacctttgagggccagagctggcatcgcacccggaagccgcatggtgtcctgcagagttaaacaggagtcag

SEQ ID NO: 152420 - DNA, 79 bp, Homo sapiens
ttgagggccagagctggcatcgcacccggaagccgcatggtgtcctgcagagttaaacaggagtcagggcccagggcag

SEQ ID NO: 152421 - DNA, 80 bp, Homo sapiens
tggcatcgcacccggaagccgcatggtgtcctgcagagttaaacaggagtcagggcccagggcaggtggaggcagcgaca

SEQ ID NO: 152422 - DNA, 74 bp, Homo sapiens
acccggaagccgcatggtgtcctgcagagttaaacaggagtcagggcccagggcaggtggaggcagcgacaggg

SEQ ID NO: 152423 - DNA, 73 bp, Homo sapiens
aaagggacagggcatggggctggggttcccactttttccagcacttaccttgctgctgatggcttctggtgtg

SEQ ID NO: 152424 - DNA, 76 bp, Homo sapiens
catggggctggggttcccactttttccagcacttaccttgctgctgatggcttctggtgtgggcacagttccaggc

SEQ ID NO: 152425 - DNA, 78 bp, Homo sapiens
gggttcccactttttccagcacttaccttgctgctgatggcttctggtgtgggcacagttccaggctctggacagtca

SEQ ID NO: 152426 - DNA, 77 bp, Homo sapiens
cccactttttccagcacttaccttgctgctgatggcttctggtgtgggcacagttccaggctctggacagtcacccc

SEQ ID NO: 152427 - DNA, 78 bp, Homo sapiens
agcacttaccttgctgctgatggcttctggtgtgggcacagttccaggctctggacagtcaccccctccaggaagtcc

SEQ ID NO: 152428 - DNA, 79 bp, Homo sapiens
ttgctgctgatggcttctggtgtgggcacagttccaggctctggacagtcaccccctccaggaagtcctccttactgcc

SEQ ID NO: 152429 - DNA, 75 bp, Homo sapiens
atggcttctggtgtgggcacagttccaggctctggacagtcaccccctccaggaagtcctccttactgccctctc

SEQ ID NO: 152430 - DNA, 75 bp, Homo sapiens
tgggcacagttccaggctctggacagtcaccccctccaggaagtcctccttactgccctctcccagttatcagaa

SEQ ID NO: 152431 - DNA, 72 bp, Homo sapiens
agttccaggctctggacagtcaccccctccaggaagtcctccttactgccctctcccagttatcagaaagac

SEQ ID NO: 152432 - DNA, 74 bp, Homo sapiens
ctctggacagtcaccccctccaggaagtcctccttactgccctctcccagttatcagaaagactgctggtccca

SEQ ID NO: 152433 - DNA, 73 bp, Homo sapiens
ccctccaggaagtcctccttactgccctctcccagttatcagaaagactgctggtcccagagtgggtaacagc

SEQ ID NO: 152434 - DNA, 74 bp, Homo sapiens
aagtcctccttactgccctctcccagttatcagaaagactgctggtcccagagtgggtaacagctgagtagaag

SEQ ID NO: 152435 - DNA, 77 bp, Homo sapiens
tccttactgccctctcccagttatcagaaagactgctggtcccagagtgggtaacagctgagtagaaggacaggcag

SEQ ID NO: 152436 - DNA, 78 bp, Homo sapiens
cctctcccagttatcagaaagactgctggtcccagagtgggtaacagctgagtagaaggacaggcaggactggtgcag

SEQ ID NO: 152437 - DNA, 80 bp, Homo sapiens
ttatcagaaagactgctggtcccagagtgggtaacagctgagtagaaggacaggcaggactggtgcaggctcctgaaggc

SEQ ID NO: 152438 - DNA, 80 bp, Homo sapiens
actgctggtcccagagtgggtaacagctgagtagaaggacaggcaggactggtgcaggctcctgaaggctcaggagaaca

SEQ ID NO: 152439 - DNA, 79 bp, Homo sapiens
agagtgggtaacagctgagtagaaggacaggcaggactggtgcaggctcctgaaggctcaggagaacagagggatggag

SEQ ID NO: 152440 - DNA, 78 bp, Homo sapiens
gtaacagctgagtagaaggacaggcaggactggtgcaggctcctgaaggctcaggagaacagagggatggaggaaggg

SEQ ID NO: 152441 - DNA, 78 bp, Homo sapiens
agtagaaggacaggcaggactggtgcaggctcctgaaggctcaggagaacagagggatggaggaagggggctgctgta

SEQ ID NO: 152442 - DNA, 77 bp, Homo sapiens
aggcaggactggtgcaggctcctgaaggctcaggagaacagagggatggaggaagggggctgctgtaggggagagga

SEQ ID NO: 152443 - DNA, 76 bp, Homo sapiens
caggctcctgaaggctcaggagaacagagggatggaggaagggggctgctgtaggggagaggagcggcccagcttc

SEQ ID NO: 152444 - DNA, 75 bp, Homo sapiens
aaggctcaggagaacagagggatggaggaagggggctgctgtaggggagaggagcggcccagcttcgcctcactc

SEQ ID NO: 152445 - DNA, 75 bp, Homo sapiens
agaacagagggatggaggaagggggctgctgtaggggagaggagcggcccagcttcgcctcactccccaagcatc

SEQ ID NO: 152446 - DNA, 74 bp, Homo sapiens
gatggaggaagggggctgctgtaggggagaggagcggcccagcttcgcctcactccccaagcatccttcgggag

SEQ ID NO: 152447 - DNA, 75 bp, Homo sapiens
aagggggctgctgtaggggagaggagcggcccagcttcgcctcactccccaagcatccttcgggaggagcagagc

SEQ ID NO: 152448 - DNA, 75 bp, Homo sapiens
ctgtaggggagaggagcggcccagcttcgcctcactccccaagcatccttcgggaggagcagagccgccagaggg

SEQ ID NO: 152449 - DNA, 75 bp, Homo sapiens
agaggagcggcccagcttcgcctcactccccaagcatccttcgggaggagcagagccgccagaggggccgccctg

SEQ ID NO: 152450 - DNA, 77 bp, Homo sapiens
agcttcgcctcactccccaagcatccttcgggaggagcagagccgccagaggggccgccctgggtctggctgtctgc

SEQ ID NO: 152451 - DNA, 77 bp, Homo sapiens
tcactccccaagcatccttcgggaggagcagagccgccagaggggccgccctgggtctggctgtctgcgttgggcag

SEQ ID NO: 152452 - DNA, 78 bp, Homo sapiens
aagcatccttcgggaggagcagagccgccagaggggccgccctgggtctggctgtctgcgttgggcagggcgagcaca

SEQ ID NO: 152453 - DNA, 80 bp, Homo sapiens
cttcgggaggagcagagccgccagaggggccgccctgggtctggctgtctgcgttgggcagggcgagcacaggctgctgc

SEQ ID NO: 152454 - DNA, 83 bp, Homo sapiens
agagccgccagaggggccgccctgggtctggctgtctgcgttgggcagggcgagcacaggctgctgctgggcagcagggctga

SEQ ID NO: 152455 - DNA, 80 bp, Homo sapiens
agaggggccgccctgggtctggctgtctgcgttgggcagggcgagcacaggctgctgctgggcagcagggctgaggggcc

SEQ ID NO: 152456 - DNA, 83 bp, Homo sapiens
ctgggtctggctgtctgcgttgggcagggcgagcacaggctgctgctgggcagcagggctgaggggccggctctctcctcctc

SEQ ID NO: 152457 - DNA, 84 bp, Homo sapiens
tgtctgcgttgggcagggcgagcacaggctgctgctgggcagcagggctgaggggccggctctctcctcctccttgttgatctc

SEQ ID NO: 152458 - DNA, 83 bp, Homo sapiens
ttgggcagggcgagcacaggctgctgctgggcagcagggctgaggggccggctctctcctcctccttgttgatctcctctctg

SEQ ID NO: 152459 - DNA, 83 bp, Homo sapiens
agcacaggctgctgctgggcagcagggctgaggggccggctctctcctcctccttgttgatctcctctctggctccaagttgc

SEQ ID NO: 152460 - DNA, 85 bp, Homo sapiens
tgctgctgggcagcagggctgaggggccggctctctcctcctccttgttgatctcctctctggctccaagttgctcacagagcga

SEQ ID NO: 152461 - DNA, 80 bp, Homo sapiens
agcagggctgaggggccggctctctcctcctccttgttgatctcctctctggctccaagttgctcacagagcgatcctgg

SEQ ID NO: 152462 - DNA, 80 bp, Homo sapiens
tctctcctcctccttgttgatctcctctctggctccaagttgctcacagagcgatcctgggtcccagatagggcgggcag

SEQ ID NO: 152463 - DNA, 82 bp, Homo sapiens
tcctccttgttgatctcctctctggctccaagttgctcacagagcgatcctgggtcccagatagggcgggcagtcactgctg

SEQ ID NO: 152464 - DNA, 86 bp, Homo sapiens
gttgatctcctctctggctccaagttgctcacagagcgatcctgggtcccagatagggcgggcagtcactgctggctgctggcagc

SEQ ID NO: 152465 - DNA, 88 bp, Homo sapiens
tctggctccaagttgctcacagagcgatcctgggtcccagatagggcgggcagtcactgctggctgctggcagcctcaggagctcaca

SEQ ID NO: 152466 - DNA, 84 bp, Homo sapiens
acagagcgatcctgggtcccagatagggcgggcagtcactgctggctgctggcagcctcaggagctcacaccactatgggcttc

SEQ ID NO: 152467 - DNA, 82 bp, Homo sapiens
cctgggtcccagatagggcgggcagtcactgctggctgctggcagcctcaggagctcacaccactatgggcttccatgcccc

SEQ ID NO: 152468 - DNA, 81 bp, Homo sapiens
agatagggcgggcagtcactgctggctgctggcagcctcaggagctcacaccactatgggcttccatgcccccccacttcc

SEQ ID NO: 152469 - DNA, 68 bp, Homo sapiens
tgctcggtgggagcccgcggagtacctggaaggaggtgggggcgaggtagaaaggagtggggttgaaa

SEQ ID NO: 152470 - DNA, 67 bp, Homo sapiens
tgggagcccgcggagtacctggaaggaggtgggggcgaggtagaaaggagtggggttgaaaagcgct

SEQ ID NO: 152471 - DNA, 69 bp, Homo sapiens
agtacctggaaggaggtgggggcgaggtagaaaggagtggggttgaaaagcgcttgcgcaggacggcta

SEQ ID NO: 152472 - DNA, 67 bp, Homo sapiens
aaggaggtgggggcgaggtagaaaggagtggggttgaaaagcgcttgcgcaggacggctacggtacg

SEQ ID NO: 152473 - DNA, 67 bp, Homo sapiens
gggcgaggtagaaaggagtggggttgaaaagcgcttgcgcaggacggctacggtacgggggtgggag

SEQ ID NO: 152474 - DNA, 68 bp, Homo sapiens
tagaaaggagtggggttgaaaagcgcttgcgcaggacggctacggtacgggggtgggagggcttcgga

SEQ ID NO: 152475 - DNA, 70 bp, Homo sapiens
gggttgaaaagcgcttgcgcaggacggctacggtacgggggtgggagggcttcggagcacgcgcgcggag

SEQ ID NO: 152476 - DNA, 70 bp, Homo sapiens
aagcgcttgcgcaggacggctacggtacgggggtgggagggcttcggagcacgcgcgcggaggcgggact

SEQ ID NO: 152477 - DNA, 68 bp, Homo sapiens
aggacggctacggtacgggggtgggagggcttcggagcacgcgcgcggaggcgggacttgggaagcgc

SEQ ID NO: 152478 - DNA, 71 bp, Homo sapiens
tacggtacgggggtgggagggcttcggagcacgcgcgcggaggcgggacttgggaagcgctcgcgagatct

SEQ ID NO: 152479 - DNA, 76 bp, Homo sapiens
gtgggagggcttcggagcacgcgcgcggaggcgggacttgggaagcgctcgcgagatcttcagggtctatatataa

SEQ ID NO: 152480 - DNA, 76 bp, Homo sapiens
cttcggagcacgcgcgcggaggcgggacttgggaagcgctcgcgagatcttcagggtctatatataagcgcgggga

SEQ ID NO: 152481 - DNA, 74 bp, Homo sapiens
cgcggaggcgggacttgggaagcgctcgcgagatcttcagggtctatatataagcgcggggagcctgcgtcctt

SEQ ID NO: 152482 - DNA, 73 bp, Homo sapiens
aggcgggacttgggaagcgctcgcgagatcttcagggtctatatataagcgcggggagcctgcgtcctttccc

SEQ ID NO: 152483 - DNA, 76 bp, Homo sapiens
tgggaagcgctcgcgagatcttcagggtctatatataagcgcggggagcctgcgtcctttccctggtgtgattccg

SEQ ID NO: 152484 - DNA, 74 bp, Homo sapiens
agatcttcagggtctatatataagcgcggggagcctgcgtcctttccctggtgtgattccgtcctgcgcggttg

SEQ ID NO: 152485 - DNA, 74 bp, Homo sapiens
ttcagggtctatatataagcgcggggagcctgcgtcctttccctggtgtgattccgtcctgcgcggttgttctc

SEQ ID NO: 152486 - DNA, 75 bp, Homo sapiens
atatataagcgcggggagcctgcgtcctttccctggtgtgattccgtcctgcgcggttgttctctggagcagcgt

SEQ ID NO: 152487 - DNA, 75 bp, Homo sapiens
gagcctgcgtcctttccctggtgtgattccgtcctgcgcggttgttctctggagcagcgttcttttatctccgtc

SEQ ID NO: 152488 - DNA, 73 bp, Homo sapiens
tcctttccctggtgtgattccgtcctgcgcggttgttctctggagcagcgttcttttatctccgtccgccttc

SEQ ID NO: 152489 - DNA, 74 bp, Homo sapiens
gtgtgattccgtcctgcgcggttgttctctggagcagcgttcttttatctccgtccgccttctctcctacctaa

SEQ ID NO: 152490 - DNA, 73 bp, Homo sapiens
attccgtcctgcgcggttgttctctggagcagcgttcttttatctccgtccgccttctctcctacctaagtgc

SEQ ID NO: 152491 - DNA, 74 bp, Homo sapiens
gttgttctctggagcagcgttcttttatctccgtccgccttctctcctacctaagtgcgtgccgccacccgatg

SEQ ID NO: 152492 - DNA, 75 bp, Homo sapiens
tctctggagcagcgttcttttatctccgtccgccttctctcctacctaagtgcgtgccgccacccgatggaagat

SEQ ID NO: 152493 - DNA, 69 bp, Homo sapiens
cacacttaagtttcagtgttatttttctccttgttagagttgcttttttcttcatttacaggttgtgaa

SEQ ID NO: 152494 - DNA, 70 bp, Homo sapiens
tcagtgttatttttctccttgttagagttgcttttttcttcatttacaggttgtgaactaaaggccgaca

SEQ ID NO: 152495 - DNA, 70 bp, Homo sapiens
ttctccttgttagagttgcttttttcttcatttacaggttgtgaactaaaggccgacaaagattatcact

SEQ ID NO: 152496 - DNA, 69 bp, Homo sapiens
ttgttagagttgcttttttcttcatttacaggttgtgaactaaaggccgacaaagattatcactttaag

SEQ ID NO: 152497 - DNA, 67 bp, Homo sapiens
aatgatgaaaatgagcaccagttatctttaagaacggtacttaaactttcaaaataaactacttaac

SEQ ID NO: 152498 - DNA, 66 bp, Homo sapiens
atgagcaccagttatctttaagaacggtacttaaactttcaaaataaactacttaaccctacttga

SEQ ID NO: 152499 - DNA, 65 bp, Homo sapiens
aataggtggaactcaaaagttgaagtagtattttttttttgttcacaggtcagtttaggggctgg

SEQ ID NO: 152500 - DNA, 68 bp, Homo sapiens
aactcaaaagttgaagtagtattttttttttgttcacaggtcagtttaggggctggtgcaaaggatga

SEQ ID NO: 152501 - DNA, 71 bp, Homo sapiens
agttgaagtagtattttttttttgttcacaggtcagtttaggggctggtgcaaaggatgagttgcacattg

SEQ ID NO: 152502 - DNA, 67 bp, Homo sapiens
gtttattgttcattttcttcacatgtttagtgatgaaaaatttctcccttctaggtttcccttgggg

SEQ ID NO: 152503 - DNA, 68 bp, Homo sapiens
tttcttcacatgtttagtgatgaaaaatttctcccttctaggtttcccttgggggctttgaaataaca

SEQ ID NO: 152504 - DNA, 67 bp, Homo sapiens
acatgtttagtgatgaaaaatttctcccttctaggtttcccttgggggctttgaaataacaccacca

SEQ ID NO: 152505 - DNA, 75 bp, Homo sapiens
tcagggccagtgcatattagtggacagcacttagtaggtatgttatttttatatattatactacttagtttgtcc

SEQ ID NO: 152506 - DNA, 79 bp, Homo sapiens
acttcttgctgcttgagttttataatgtctaataaattgtattttagctgtggaggaagatgcagagtcagaagatgaa

SEQ ID NO: 152507 - DNA, 71 bp, Homo sapiens
agcggtctgcccctggaggtggtagcaaggttccacaggtagagatggcaattttattataggttttgtat

SEQ ID NO: 152508 - DNA, 74 bp, Homo sapiens
caggtagagatggcaattttattataggttttgtattatagcttttagtttggtgatagaacagctcttgttca

SEQ ID NO: 152509 - DNA, 71 bp, Homo sapiens
gtattatagcttttagtttggtgatagaacagctcttgttcatgagtacgtatcttttcttttaaaagaaa

SEQ ID NO: 152510 - DNA, 68 bp, Homo sapiens
cttttagtttggtgatagaacagctcttgttcatgagtacgtatcttttcttttaaaagaaaaaagta

SEQ ID NO: 152511 - DNA, 83 bp, Homo sapiens
aaaaagtaaaacttgctgctgatgaagatgatgacgatgatgatgaagaggatgatgatgaagagtaagtatgattttagaaa

SEQ ID NO: 152512 - DNA, 86 bp, Homo sapiens
aaacttgctgctgatgaagatgatgacgatgatgatgaagaggatgatgatgaagagtaagtatgattttagaaacttgatatact

SEQ ID NO: 152513 - DNA, 84 bp, Homo sapiens
gatgaagatgatgacgatgatgatgaagaggatgatgatgaagagtaagtatgattttagaaacttgatatacttccggaatct

SEQ ID NO: 152514 - DNA, 81 bp, Homo sapiens
atgacgatgatgatgaagaggatgatgatgaagagtaagtatgattttagaaacttgatatacttccggaatcttgacaaa

SEQ ID NO: 152515 - DNA, 79 bp, Homo sapiens
gatgatgatgaagaggatgatgatgaagagtaagtatgattttagaaacttgatatacttccggaatcttgacaaaaaa

SEQ ID NO: 152516 - DNA, 80 bp, Homo sapiens
ctgctttcaattcttgtgtctactcccaaattttgaaagtgcttaatgtcttgacatttcatttgtagtgatgatgatga

SEQ ID NO: 152517 - DNA, 74 bp, Homo sapiens
atgaggaagctgaagaaaaagcgccagtgaagaaagtgagtagatacaatgctacaaggttgttaaactaacaa

SEQ ID NO: 152518 - DNA, 73 bp, Homo sapiens
ctgaagaaaaagcgccagtgaagaaagtgagtagatacaatgctacaaggttgttaaactaacaatagaaatg

SEQ ID NO: 152519 - DNA, 72 bp, Homo sapiens
aaaaagcgccagtgaagaaagtgagtagatacaatgctacaaggttgttaaactaacaatagaaatggtgat

SEQ ID NO: 152520 - DNA, 76 bp, Homo sapiens
tttgtttgcactgttgttggggtcagggacagtgattaagataaatttctaattgcagtctatacgagatactcca

SEQ ID NO: 152521 - DNA, 74 bp, Homo sapiens
ctgttgttggggtcagggacagtgattaagataaatttctaattgcagtctatacgagatactccagccaaaaa

SEQ ID NO: 152522 - DNA, 77 bp, Homo sapiens
gtcagggacagtgattaagataaatttctaattgcagtctatacgagatactccagccaaaaatgcacaaaagtcaa

SEQ ID NO: 152523 - DNA, 75 bp, Homo sapiens
aagactcaaaaccatcatcaacaccaagatcaaaagtaagtggctacatttacacgtgggtctcattgatctagt

SEQ ID NO: 152524 - DNA, 69 bp, Homo sapiens
ggaattgtatttattcttatgaccttttggaaattcatttctttttcagggacaagaatccttcaagaa

SEQ ID NO: 152525 - DNA, 68 bp, Homo sapiens
atttattcttatgaccttttggaaattcatttctttttcagggacaagaatccttcaagaaacaggaa

SEQ ID NO: 152526 - DNA, 66 bp, Homo sapiens
atgaccttttggaaattcatttctttttcagggacaagaatccttcaagaaacaggaaaaaactcc

SEQ ID NO: 152527 - DNA, 68 bp, Homo sapiens
cattaaagcaaaaatgcaagcaagtatagaaaaagtgagtaaagttatcttaaaaaaactttgtctcc

SEQ ID NO: 152528 - DNA, 75 bp, Homo sapiens
ctcccctccattttaatatggtcctatctccttggtttaattgcaggcgcattgaacagtcctgggcactacatg

SEQ ID NO: 152529 - DNA, 74 bp, Homo sapiens
attttaatatggtcctatctccttggtttaattgcaggcgcattgaacagtcctgggcactacatgtaaattaa

SEQ ID NO: 152530 - DNA, 75 bp, Homo sapiens
atatggtcctatctccttggtttaattgcaggcgcattgaacagtcctgggcactacatgtaaattaagcccaaa

SEQ ID NO: 152531 - DNA, 75 bp, Homo sapiens
atctccttggtttaattgcaggcgcattgaacagtcctgggcactacatgtaaattaagcccaaagatggggaga

SEQ ID NO: 152532 - DNA, 73 bp, Homo sapiens
tttaattgcaggcgcattgaacagtcctgggcactacatgtaaattaagcccaaagatggggagaaaggaaaa

SEQ ID NO: 152533 - DNA, 75 bp, Homo sapiens
aatccagactgaagtcttctattttaatctcaatccccttttctgatttgccacccatgcctcttcaggctggaa

SEQ ID NO: 152534 - DNA, 75 bp, Homo sapiens
tgaagtcttctattttaatctcaatccccttttctgatttgccacccatgcctcttcaggctggaaacaatctct

SEQ ID NO: 152535 - DNA, 74 bp, Homo sapiens
ttctattttaatctcaatccccttttctgatttgccacccatgcctcttcaggctggaaacaatctcttggttc

SEQ ID NO: 152536 - DNA, 74 bp, Homo sapiens
aatctcaatccccttttctgatttgccacccatgcctcttcaggctggaaacaatctcttggttccctaaagca

SEQ ID NO: 152537 - DNA, 77 bp, Homo sapiens
tttctgatttgccacccatgcctcttcaggctggaaacaatctcttggttccctaaagcactttcttctgactgctg

SEQ ID NO: 152538 - DNA, 78 bp, Homo sapiens
tttgccacccatgcctcttcaggctggaaacaatctcttggttccctaaagcactttcttctgactgctgtgattcag

SEQ ID NO: 152539 - DNA, 78 bp, Homo sapiens
atgcctcttcaggctggaaacaatctcttggttccctaaagcactttcttctgactgctgtgattcagtgaaccttgc

SEQ ID NO: 152540 - DNA, 74 bp, Homo sapiens
ctggaaacaatctcttggttccctaaagcactttcttctgactgctgtgattcagtgaaccttgccctttgctt

SEQ ID NO: 152541 - DNA, 74 bp, Homo sapiens
cttgccctttgctttctattacttgtgcatttgcctcacctgacaatgttttaaatcgcctttgtatctcctta

SEQ ID NO: 152542 - DNA, 78 bp, Homo sapiens
ttgctttctattacttgtgcatttgcctcacctgacaatgttttaaatcgcctttgtatctccttagctgctcaataa

SEQ ID NO: 152543 - DNA, 70 bp, Homo sapiens
ttctaaaggtatctctctcggtgtatttctctacttacctgtaataatgcttttgtcttaatagggtggt

SEQ ID NO: 152544 - DNA, 71 bp, Homo sapiens
atctctctcggtgtatttctctacttacctgtaataatgcttttgtcttaatagggtggttctcttcccaa

SEQ ID NO: 152545 - DNA, 70 bp, Homo sapiens
tatttctctacttacctgtaataatgcttttgtcttaatagggtggttctcttcccaaagtggaagccaa

SEQ ID NO: 152546 - DNA, 71 bp, Homo sapiens
ctacttacctgtaataatgcttttgtcttaatagggtggttctcttcccaaagtggaagccaaattcatca

SEQ ID NO: 152547 - DNA, 78 bp, Homo sapiens
tcatcaattatgtgaagaattgcttccggatgactgaccaagaggtaactggattttctggggacatgattaaatcca

SEQ ID NO: 152548 - DNA, 73 bp, Homo sapiens
tgtgaagaattgcttccggatgactgaccaagaggtaactggattttctggggacatgattaaatccaagttt

SEQ ID NO: 152549 - DNA, 70 bp, Homo sapiens
agaattgcttccggatgactgaccaagaggtaactggattttctggggacatgattaaatccaagttttt

SEQ ID NO: 152550 - DNA, 66 bp, Homo sapiens
gaaaatagtttaaacaatttgttaaaaaattttccgtcttatttcatttctgtaacagttgatatc

SEQ ID NO: 152551 - DNA, 68 bp, Homo sapiens
tggtggtggtggtgtgggtttggggtgcggccgggtagggggttcgcctgcggccgcgtctgctcggg

SEQ ID NO: 152552 - DNA, 69 bp, Homo sapiens
tggtggtgtgggtttggggtgcggccgggtagggggttcgcctgcggccgcgtctgctcggggcctgag

SEQ ID NO: 152553 - DNA, 69 bp, Homo sapiens
ggtttggggtgcggccgggtagggggttcgcctgcggccgcgtctgctcggggcctgaggcctcgaaga

SEQ ID NO: 152554 - DNA, 71 bp, Homo sapiens
tgcggccgggtagggggttcgcctgcggccgcgtctgctcggggcctgaggcctcgaagaccccagcccaa

SEQ ID NO: 152555 - DNA, 72 bp, Homo sapiens
gggttcgcctgcggccgcgtctgctcggggcctgaggcctcgaagaccccagcccaagcccccaggtgagcc

SEQ ID NO: 152556 - DNA, 75 bp, Homo sapiens
ctgcggccgcgtctgctcggggcctgaggcctcgaagaccccagcccaagcccccaggtgagccctgcggcagga

SEQ ID NO: 152557 - DNA, 71 bp, Homo sapiens
cgtctgctcggggcctgaggcctcgaagaccccagcccaagcccccaggtgagccctgcggcaggaggggg

SEQ ID NO: 152558 - DNA, 71 bp, Homo sapiens
ctgaggcctcgaagaccccagcccaagcccccaggtgagccctgcggcaggaggggggttgccttggcctc

SEQ ID NO: 152559 - DNA, 69 bp, Homo sapiens
gaagaccccagcccaagcccccaggtgagccctgcggcaggaggggggttgccttggcctcgggccgaa

SEQ ID NO: 152560 - DNA, 69 bp, Homo sapiens
ggcggaataggccggggcaggtcgcgctcgctgccttctcccctgaagagagacgcggggggagggggg

SEQ ID NO: 152561 - DNA, 71 bp, Homo sapiens
ggggcaggtcgcgctcgctgccttctcccctgaagagagacgcggggggaggggggtgcggcgagcggccc

SEQ ID NO: 152562 - DNA, 73 bp, Homo sapiens
gtcgcgctcgctgccttctcccctgaagagagacgcggggggaggggggtgcggcgagcggccccgctctctc

SEQ ID NO: 152563 - DNA, 69 bp, Homo sapiens
ttctcccctgaagagagacgcggggggaggggggtgcggcgagcggccccgctctctccccaccgctcc

SEQ ID NO: 152564 - DNA, 71 bp, Homo sapiens
cctgaagagagacgcggggggaggggggtgcggcgagcggccccgctctctccccaccgctccgctcgcac

SEQ ID NO: 152565 - DNA, 70 bp, Homo sapiens
cggggggaggggggtgcggcgagcggccccgctctctccccaccgctccgctcgcaccccagtgtaatga

SEQ ID NO: 152566 - DNA, 71 bp, Homo sapiens
aggggggtgcggcgagcggccccgctctctccccaccgctccgctcgcaccccagtgtaatgagggtcacc

SEQ ID NO: 152567 - DNA, 70 bp, Homo sapiens
cggcgagcggccccgctctctccccaccgctccgctcgcaccccagtgtaatgagggtcaccccctcccc

SEQ ID NO: 152568 - DNA, 71 bp, Homo sapiens
gctctctccccaccgctccgctcgcaccccagtgtaatgagggtcaccccctccccccagctggcccggga

SEQ ID NO: 152569 - DNA, 68 bp, Homo sapiens
ctccccaccgctccgctcgcaccccagtgtaatgagggtcaccccctccccccagctggcccgggagg

SEQ ID NO: 152570 - DNA, 67 bp, Homo sapiens
ctccgctcgcaccccagtgtaatgagggtcaccccctccccccagctggcccgggagggggcgcggg

SEQ ID NO: 152571 - DNA, 65 bp, Homo sapiens
agtgtaatgagggtcaccccctccccccagctggcccgggagggggcgcggggcacggtaactag

SEQ ID NO: 152572 - DNA, 67 bp, Homo sapiens
aatgagggtcaccccctccccccagctggcccgggagggggcgcggggcacggtaactagtgcgctg

SEQ ID NO: 152573 - DNA, 66 bp, Homo sapiens
cctccccccagctggcccgggagggggcgcggggcacggtaactagtgcgctggggtgggcggcgg

SEQ ID NO: 152574 - DNA, 80 bp, Homo sapiens
agatggcctattaactcagattaattgctgtgcttttggattccaggttgatgccggcccaggatggatcagacctgtga

SEQ ID NO: 152575 - DNA, 78 bp, Homo sapiens
tattaactcagattaattgctgtgcttttggattccaggttgatgccggcccaggatggatcagacctgtgaactacc

SEQ ID NO: 152576 - DNA, 76 bp, Homo sapiens
attaattgctgtgcttttggattccaggttgatgccggcccaggatggatcagacctgtgaactacccagaagaaa

SEQ ID NO: 152577 - DNA, 79 bp, Homo sapiens
tgtgcttttggattccaggttgatgccggcccaggatggatcagacctgtgaactacccagaagaaattgtctgctgcc

SEQ ID NO: 152578 - DNA, 76 bp, Homo sapiens
ttggattccaggttgatgccggcccaggatggatcagacctgtgaactacccagaagaaattgtctgctgcccttt

SEQ ID NO: 152579 - DNA, 76 bp, Homo sapiens
atgccggcccaggatggatcagacctgtgaactacccagaagaaattgtctgctgcccttttccaatccagtgaat

SEQ ID NO: 152580 - DNA, 76 bp, Homo sapiens
aggatggatcagacctgtgaactacccagaagaaattgtctgctgcccttttccaatccagtgaatttagatgccc

SEQ ID NO: 152581 - DNA, 76 bp, Homo sapiens
atcagacctgtgaactacccagaagaaattgtctgctgcccttttccaatccagtgaatttagatgcccctgaaga

SEQ ID NO: 152582 - DNA, 76 bp, Homo sapiens
tgtgaactacccagaagaaattgtctgctgcccttttccaatccagtgaatttagatgcccctgaagacaaggaca

SEQ ID NO: 152583 - DNA, 73 bp, Homo sapiens
agaaattgtctgctgcccttttccaatccagtgaatttagatgcccctgaagacaaggacagccctttcggta

SEQ ID NO: 152584 - DNA, 75 bp, Homo sapiens
tgctgcccttttccaatccagtgaatttagatgcccctgaagacaaggacagccctttcggtaatggtcaatcca

SEQ ID NO: 152585 - DNA, 71 bp, Homo sapiens
tttccaatccagtgaatttagatgcccctgaagacaaggacagccctttcggtaatggtcaatccaatttt

SEQ ID NO: 152586 - DNA, 72 bp, Homo sapiens
agtgaatttagatgcccctgaagacaaggacagccctttcggtaatggtcaatccaatttttctgagccact

SEQ ID NO: 152587 - DNA, 72 bp, Homo sapiens
tttagatgcccctgaagacaaggacagccctttcggtaatggtcaatccaatttttctgagccacttaatgg

SEQ ID NO: 152588 - DNA, 73 bp, Homo sapiens
agacaaggacagccctttcggtaatggtcaatccaatttttctgagccacttaatgggtgtactatgcagtta

SEQ ID NO: 152589 - DNA, 75 bp, Homo sapiens
acagccctttcggtaatggtcaatccaatttttctgagccacttaatgggtgtactatgcagttatcgactgtca

SEQ ID NO: 152590 - DNA, 76 bp, Homo sapiens
tttcggtaatggtcaatccaatttttctgagccacttaatgggtgtactatgcagttatcgactgtcagtggaaca

SEQ ID NO: 152591 - DNA, 76 bp, Homo sapiens
aatccaatttttctgagccacttaatgggtgtactatgcagttatcgactgtcagtggaacatcccaaaatgctta

SEQ ID NO: 152592 - DNA, 77 bp, Homo sapiens
atttttctgagccacttaatgggtgtactatgcagttatcgactgtcagtggaacatcccaaaatgcttatggacaa

SEQ ID NO: 152593 - DNA, 79 bp, Homo sapiens
ttaatgggtgtactatgcagttatcgactgtcagtggaacatcccaaaatgcttatggacaagattctccatcttgtta

SEQ ID NO: 152594 - DNA, 80 bp, Homo sapiens
gtgtactatgcagttatcgactgtcagtggaacatcccaaaatgcttatggacaagattctccatcttgttacattccac

SEQ ID NO: 152595 - DNA, 80 bp, Homo sapiens
ttatcgactgtcagtggaacatcccaaaatgcttatggacaagattctccatcttgttacattccactgcggagactaca

SEQ ID NO: 152596 - DNA, 79 bp, Homo sapiens
tgtcagtggaacatcccaaaatgcttatggacaagattctccatcttgttacattccactgcggagactacaggatttg

SEQ ID NO: 152597 - DNA, 77 bp, Homo sapiens
aacatcccaaaatgcttatggacaagattctccatcttgttacattccactgcggagactacaggatttggcctcca

SEQ ID NO: 152598 - DNA, 80 bp, Homo sapiens
aaaatgcttatggacaagattctccatcttgttacattccactgcggagactacaggatttggcctccatgatcaatgta

SEQ ID NO: 152599 - DNA, 78 bp, Homo sapiens
acaagattctccatcttgttacattccactgcggagactacaggatttggcctccatgatcaatgtagagtatttaaa

SEQ ID NO: 152600 - DNA, 82 bp, Homo sapiens
ttacattccactgcggagactacaggatttggcctccatgatcaatgtagagtatttaaatgggtctgctgatggatcagaa

SEQ ID NO: 152601 - DNA, 80 bp, Homo sapiens
cggagactacaggatttggcctccatgatcaatgtagagtatttaaatgggtctgctgatggatcagaatcctttcaaga

SEQ ID NO: 152602 - DNA, 78 bp, Homo sapiens
aggatttggcctccatgatcaatgtagagtatttaaatgggtctgctgatggatcagaatcctttcaagaccctgaaa

SEQ ID NO: 152603 - DNA, 79 bp, Homo sapiens
tccatgatcaatgtagagtatttaaatgggtctgctgatggatcagaatcctttcaagaccctgaaaaaagtgattcaa

SEQ ID NO: 152604 - DNA, 77 bp, Homo sapiens
atcaatgtagagtatttaaatgggtctgctgatggatcagaatcctttcaagaccctgaaaaaagtgattcaagagc

SEQ ID NO: 152605 - DNA, 77 bp, Homo sapiens
tatttaaatgggtctgctgatggatcagaatcctttcaagaccctgaaaaaagtgattcaagagctcagacgccaat

SEQ ID NO: 152606 - DNA, 79 bp, Homo sapiens
tctgctgatggatcagaatcctttcaagaccctgaaaaaagtgattcaagagctcagacgccaattgtttgcacttcct

SEQ ID NO: 152607 - DNA, 73 bp, Homo sapiens
aatcctttcaagaccctgaaaaaagtgattcaagagctcagacgccaattgtttgcacttccttgagtcctgg

SEQ ID NO: 152608 - DNA, 78 bp, Homo sapiens
aaaagtgattcaagagctcagacgccaattgtttgcacttccttgagtcctggtggtcctacagcacttgctatgaaa

SEQ ID NO: 152609 - DNA, 76 bp, Homo sapiens
aagagctcagacgccaattgtttgcacttccttgagtcctggtggtcctacagcacttgctatgaaacaggaaccc

SEQ ID NO: 152610 - DNA, 74 bp, Homo sapiens
ccaattgtttgcacttccttgagtcctggtggtcctacagcacttgctatgaaacaggaaccctcttgtaataa

SEQ ID NO: 152611 - DNA, 74 bp, Homo sapiens
tgtttgcacttccttgagtcctggtggtcctacagcacttgctatgaaacaggaaccctcttgtaataactccc

SEQ ID NO: 152612 - DNA, 74 bp, Homo sapiens
tccttgagtcctggtggtcctacagcacttgctatgaaacaggaaccctcttgtaataactcccctgaactcca

SEQ ID NO: 152613 - DNA, 71 bp, Homo sapiens
tggtcctacagcacttgctatgaaacaggaaccctcttgtaataactcccctgaactccaggtaaaagtaa

SEQ ID NO: 152614 - DNA, 69 bp, Homo sapiens
cacttgctatgaaacaggaaccctcttgtaataactcccctgaactccaggtaaaagtaacaaagacta

SEQ ID NO: 152615 - DNA, 69 bp, Homo sapiens
tatgaaacaggaaccctcttgtaataactcccctgaactccaggtaaaagtaacaaagactatcaagaa

SEQ ID NO: 152616 - DNA, 67 bp, Homo sapiens
aggaaccctcttgtaataactcccctgaactccaggtaaaagtaacaaagactatcaagaatggctt

SEQ ID NO: 152617 - DNA, 71 bp, Homo sapiens
taataactcccctgaactccaggtaaaagtaacaaagactatcaagaatggctttctgcactttgagaatt

SEQ ID NO: 152618 - DNA, 73 bp, Homo sapiens
tgaactccaggtaaaagtaacaaagactatcaagaatggctttctgcactttgagaattttacttgtgtggac

SEQ ID NO: 152619 - DNA, 77 bp, Homo sapiens
gtaaaagtaacaaagactatcaagaatggctttctgcactttgagaattttacttgtgtggacgatgcagatgtaga

SEQ ID NO: 152620 - DNA, 79 bp, Homo sapiens
agtaacaaagactatcaagaatggctttctgcactttgagaattttacttgtgtggacgatgcagatgtagattctgaa

SEQ ID NO: 152621 - DNA, 81 bp, Homo sapiens
tatcaagaatggctttctgcactttgagaattttacttgtgtggacgatgcagatgtagattctgaaatggacccagaaca

SEQ ID NO: 152622 - DNA, 83 bp, Homo sapiens
ttgagaattttacttgtgtggacgatgcagatgtagattctgaaatggacccagaacagccagtcacagaggatgagagtata

SEQ ID NO: 152623 - DNA, 81 bp, Homo sapiens
aattttacttgtgtggacgatgcagatgtagattctgaaatggacccagaacagccagtcacagaggatgagagtatagag

SEQ ID NO: 152624 - DNA, 81 bp, Homo sapiens
attctgaaatggacccagaacagccagtcacagaggatgagagtatagaggagatctttgaggaaactcagaccaatgcca

SEQ ID NO: 152625 - DNA, 82 bp, Homo sapiens
acccagaacagccagtcacagaggatgagagtatagaggagatctttgaggaaactcagaccaatgccacctgcaattatga

SEQ ID NO: 152626 - DNA, 82 bp, Homo sapiens
acagaggatgagagtatagaggagatctttgaggaaactcagaccaatgccacctgcaattatgagactaaatcagagaatg

SEQ ID NO: 152627 - DNA, 78 bp, Homo sapiens
agtatagaggagatctttgaggaaactcagaccaatgccacctgcaattatgagactaaatcagagaatggtgtaaaa

SEQ ID NO: 152628 - DNA, 78 bp, Homo sapiens
tctttgaggaaactcagaccaatgccacctgcaattatgagactaaatcagagaatggtgtaaaagtggccatgggaa

SEQ ID NO: 152629 - DNA, 77 bp, Homo sapiens
aaactcagaccaatgccacctgcaattatgagactaaatcagagaatggtgtaaaagtggccatgggaagtgaacaa

SEQ ID NO: 152630 - DNA, 80 bp, Homo sapiens
aatgccacctgcaattatgagactaaatcagagaatggtgtaaaagtggccatgggaagtgaacaagacagcacaccaga

SEQ ID NO: 152631 - DNA, 79 bp, Homo sapiens
acctgcaattatgagactaaatcagagaatggtgtaaaagtggccatgggaagtgaacaagacagcacaccagagagta

SEQ ID NO: 152632 - DNA, 81 bp, Homo sapiens
tatgagactaaatcagagaatggtgtaaaagtggccatgggaagtgaacaagacagcacaccagagagtagacacggtgca

SEQ ID NO: 152633 - DNA, 79 bp, Homo sapiens
aatcagagaatggtgtaaaagtggccatgggaagtgaacaagacagcacaccagagagtagacacggtgcagtcaaatc

SEQ ID NO: 152634 - DNA, 84 bp, Homo sapiens
catgggaagtgaacaagacagcacaccagagagtagacacggtgcagtcaaatcgccattcttgccattagctcctcagactga

SEQ ID NO: 152635 - DNA, 81 bp, Homo sapiens
agacagcacaccagagagtagacacggtgcagtcaaatcgccattcttgccattagctcctcagactgaaacacagaaaaa

SEQ ID NO: 152636 - DNA, 79 bp, Homo sapiens
agagagtagacacggtgcagtcaaatcgccattcttgccattagctcctcagactgaaacacagaaaaataagcaaaga

SEQ ID NO: 152637 - DNA, 77 bp, Homo sapiens
acacggtgcagtcaaatcgccattcttgccattagctcctcagactgaaacacagaaaaataagcaaagaaatgaag

SEQ ID NO: 152638 - DNA, 77 bp, Homo sapiens
agtcaaatcgccattcttgccattagctcctcagactgaaacacagaaaaataagcaaagaaatgaagtggacggca

SEQ ID NO: 152639 - DNA, 75 bp, Homo sapiens
attagctcctcagactgaaacacagaaaaataagcaaagaaatgaagtggacggcagcaatgaaaaagcagccct

SEQ ID NO: 152640 - DNA, 74 bp, Homo sapiens
agactgaaacacagaaaaataagcaaagaaatgaagtggacggcagcaatgaaaaagcagcccttctcccagcc

SEQ ID NO: 152641 - DNA, 71 bp, Homo sapiens
agaaaaataagcaaagaaatgaagtggacggcagcaatgaaaaagcagcccttctcccagcccccttttca

SEQ ID NO: 152642 - DNA, 73 bp, Homo sapiens
caaagaaatgaagtggacggcagcaatgaaaaagcagcccttctcccagcccccttttcactaggagacacaa

SEQ ID NO: 152643 - DNA, 72 bp, Homo sapiens
aaatgaagtggacggcagcaatgaaaaagcagcccttctcccagcccccttttcactaggagacacaaacat

SEQ ID NO: 152644 - DNA, 74 bp, Homo sapiens
cagcaatgaaaaagcagcccttctcccagcccccttttcactaggagacacaaacattacaatagaagagcaat

SEQ ID NO: 152645 - DNA, 70 bp, Homo sapiens
aaaaagcagcccttctcccagcccccttttcactaggagacacaaacattacaatagaagagcaattaaa

SEQ ID NO: 152646 - DNA, 71 bp, Homo sapiens
ttctcccagcccccttttcactaggagacacaaacattacaatagaagagcaattaaactcaataaattta

SEQ ID NO: 152647 - DNA, 70 bp, Homo sapiens
ccccttttcactaggagacacaaacattacaatagaagagcaattaaactcaataaatttatcttttcag

SEQ ID NO: 152648 - DNA, 77 bp, Homo sapiens
tcactaggagacacaaacattacaatagaagagcaattaaactcaataaatttatcttttcaggatgatccagattc

SEQ ID NO: 152649 - DNA, 75 bp, Homo sapiens
cacaaacattacaatagaagagcaattaaactcaataaatttatcttttcaggatgatccagattccagtaccag

SEQ ID NO: 152650 - DNA, 75 bp, Homo sapiens
caatagaagagcaattaaactcaataaatttatcttttcaggatgatccagattccagtaccagtacattaggaa

SEQ ID NO: 152651 - DNA, 77 bp, Homo sapiens
gagcaattaaactcaataaatttatcttttcaggatgatccagattccagtaccagtacattaggaaacatgctaga

SEQ ID NO: 152652 - DNA, 76 bp, Homo sapiens
tcaataaatttatcttttcaggatgatccagattccagtaccagtacattaggaaacatgctagaattacctggaa

SEQ ID NO: 152653 - DNA, 82 bp, Homo sapiens
ttcaggatgatccagattccagtaccagtacattaggaaacatgctagaattacctggaacttcatcatcatctacttcaca

SEQ ID NO: 152654 - DNA, 78 bp, Homo sapiens
attccagtaccagtacattaggaaacatgctagaattacctggaacttcatcatcatctacttcacaggaattgccat

SEQ ID NO: 152655 - DNA, 78 bp, Homo sapiens
agtaccagtacattaggaaacatgctagaattacctggaacttcatcatcatctacttcacaggaattgccatttgta

SEQ ID NO: 152656 - DNA, 75 bp, Homo sapiens
tagaattacctggaacttcatcatcatctacttcacaggaattgccatttgtaagcagtttttggtacaacttaa

SEQ ID NO: 152657 - DNA, 75 bp, Homo sapiens
ttacctggaacttcatcatcatctacttcacaggaattgccatttgtaagcagtttttggtacaacttaaatata

SEQ ID NO: 152658 - DNA, 72 bp, Homo sapiens
gtatatatacaggccacttaaagggaaacttgtaacaaatttgtttttggttgcttatcagttcacagctga

SEQ ID NO: 152659 - DNA, 70 bp, Homo sapiens
atacaggccacttaaagggaaacttgtaacaaatttgtttttggttgcttatcagttcacagctgaaatc

SEQ ID NO: 152660 - DNA, 73 bp, Homo sapiens
agggaaacttgtaacaaatttgtttttggttgcttatcagttcacagctgaaatcctattgctaatcataagc

SEQ ID NO: 152661 - DNA, 75 bp, Homo sapiens
cttgtaacaaatttgtttttggttgcttatcagttcacagctgaaatcctattgctaatcataagctttgggcaa

SEQ ID NO: 152662 - DNA, 73 bp, Homo sapiens
ttgtttttggttgcttatcagttcacagctgaaatcctattgctaatcataagctttgggcaaaattttactt

SEQ ID NO: 152663 - DNA, 74 bp, Homo sapiens
ttggttgcttatcagttcacagctgaaatcctattgctaatcataagctttgggcaaaattttactttgatttt

SEQ ID NO: 152664 - DNA, 73 bp, Homo sapiens
tcagttcacagctgaaatcctattgctaatcataagctttgggcaaaattttactttgatttttaaatttatc

SEQ ID NO: 152665 - DNA, 72 bp, Homo sapiens
gctgaaatcctattgctaatcataagctttgggcaaaattttactttgatttttaaatttatctctgttgta

SEQ ID NO: 152666 - DNA, 70 bp, Homo sapiens
gctaatcataagctttgggcaaaattttactttgatttttaaatttatctctgttgtatgaatttggttg

SEQ ID NO: 152667 - DNA, 65 bp, Homo sapiens
gggcaaaattttactttgatttttaaatttatctctgttgtatgaatttggttgttttaagcttt

SEQ ID NO: 152668 - DNA, 68 bp, Homo sapiens
tttgatttttaaatttatctctgttgtatgaatttggttgttttaagctttttccaaataactcttca

SEQ ID NO: 152669 - DNA, 70 bp, Homo sapiens
aaatttatctctgttgtatgaatttggttgttttaagctttttccaaataactcttcattgagagtaggc

SEQ ID NO: 152670 - DNA, 72 bp, Homo sapiens
tctctgttgtatgaatttggttgttttaagctttttccaaataactcttcattgagagtaggctaatgcttt

SEQ ID NO: 152671 - DNA, 71 bp, Homo sapiens
tatgaatttggttgttttaagctttttccaaataactcttcattgagagtaggctaatgcttttaaaggca

SEQ ID NO: 152672 - DNA, 72 bp, Homo sapiens
ttttaagctttttccaaataactcttcattgagagtaggctaatgcttttaaaggcatttgattgagttcag

SEQ ID NO: 152673 - DNA, 72 bp, Homo sapiens
gctttttccaaataactcttcattgagagtaggctaatgcttttaaaggcatttgattgagttcaggtttaa

SEQ ID NO: 152674 - DNA, 73 bp, Homo sapiens
aactcttcattgagagtaggctaatgcttttaaaggcatttgattgagttcaggtttaatttctcaagttgga

SEQ ID NO: 152675 - DNA, 75 bp, Homo sapiens
tcattgagagtaggctaatgcttttaaaggcatttgattgagttcaggtttaatttctcaagttggaggtataca

SEQ ID NO: 152676 - DNA, 75 bp, Homo sapiens
taggctaatgcttttaaaggcatttgattgagttcaggtttaatttctcaagttggaggtatacatatatgatta

SEQ ID NO: 152677 - DNA, 75 bp, Homo sapiens
cctcagtttctttatctgcaaaatcgagataatgctgtcttgtaaggttgtgaggggtaagcaaaataatgtatg

SEQ ID NO: 152678 - DNA, 75 bp, Homo sapiens
ctttatctgcaaaatcgagataatgctgtcttgtaaggttgtgaggggtaagcaaaataatgtatgtgtattagt

SEQ ID NO: 152679 - DNA, 71 bp, Homo sapiens
aaaatcgagataatgctgtcttgtaaggttgtgaggggtaagcaaaataatgtatgtgtattagttttggg

SEQ ID NO: 152680 - DNA, 71 bp, Homo sapiens
aaatattttgattcttattgatgccccatgttttgtctgtctaaagtgtcaacctaagaaaaagtctacgc

SEQ ID NO: 152681 - DNA, 73 bp, Homo sapiens
ttttgattcttattgatgccccatgttttgtctgtctaaagtgtcaacctaagaaaaagtctacgccactgaa

SEQ ID NO: 152682 - DNA, 74 bp, Homo sapiens
tattgatgccccatgttttgtctgtctaaagtgtcaacctaagaaaaagtctacgccactgaagtatgaagttg

SEQ ID NO: 152683 - DNA, 75 bp, Homo sapiens
atgttttgtctgtctaaagtgtcaacctaagaaaaagtctacgccactgaagtatgaagttggagatctcatctg

SEQ ID NO: 152684 - DNA, 75 bp, Homo sapiens
tctaaagtgtcaacctaagaaaaagtctacgccactgaagtatgaagttggagatctcatctgggcaaaattcaa

SEQ ID NO: 152685 - DNA, 74 bp, Homo sapiens
aacctaagaaaaagtctacgccactgaagtatgaagttggagatctcatctgggcaaaattcaagagacgccca

SEQ ID NO: 152686 - DNA, 76 bp, Homo sapiens
aagaaaaagtctacgccactgaagtatgaagttggagatctcatctgggcaaaattcaagagacgcccatggtggc

SEQ ID NO: 152687 - DNA, 79 bp, Homo sapiens
tacgccactgaagtatgaagttggagatctcatctgggcaaaattcaagagacgcccatggtggccctgcaggatttgt

SEQ ID NO: 152688 - DNA, 80 bp, Homo sapiens
tatgaagttggagatctcatctgggcaaaattcaagagacgcccatggtggccctgcaggatttgttctgatccgttgat

SEQ ID NO: 152689 - DNA, 79 bp, Homo sapiens
agatctcatctgggcaaaattcaagagacgcccatggtggccctgcaggatttgttctgatccgttgattaacacacat

SEQ ID NO: 152690 - DNA, 76 bp, Homo sapiens
tgggcaaaattcaagagacgcccatggtggccctgcaggatttgttctgatccgttgattaacacacattcaaaaa

SEQ ID NO: 152691 - DNA, 75 bp, Homo sapiens
aaaattcaagagacgcccatggtggccctgcaggatttgttctgatccgttgattaacacacattcaaaaatgaa

SEQ ID NO: 152692 - DNA, 73 bp, Homo sapiens
acgcccatggtggccctgcaggatttgttctgatccgttgattaacacacattcaaaaatgaaaggtaatact

SEQ ID NO: 152693 - DNA, 77 bp, Homo sapiens
ccctgcaggatttgttctgatccgttgattaacacacattcaaaaatgaaaggtaatacttgcagtgattatacatg

SEQ ID NO: 152694 - DNA, 76 bp, Homo sapiens
caggatttgttctgatccgttgattaacacacattcaaaaatgaaaggtaatacttgcagtgattatacatgttaa

SEQ ID NO: 152695 - DNA, 67 bp, Homo sapiens
aagtaatttctttgatctaatgattctggttctcttacccttacctagtttccaaccggaggcccta

SEQ ID NO: 152696 - DNA, 71 bp, Homo sapiens
tctttgatctaatgattctggttctcttacccttacctagtttccaaccggaggccctatcggcagtacta

SEQ ID NO: 152697 - DNA, 69 bp, Homo sapiens
taatgattctggttctcttacccttacctagtttccaaccggaggccctatcggcagtactacgtggag

SEQ ID NO: 152698 - DNA, 67 bp, Homo sapiens
gttctcttacccttacctagtttccaaccggaggccctatcggcagtactacgtggaggcttttgga

SEQ ID NO: 152699 - DNA, 70 bp, Homo sapiens
ccttacctagtttccaaccggaggccctatcggcagtactacgtggaggcttttggagatccttctgaga

SEQ ID NO: 152700 - DNA, 72 bp, Homo sapiens
gtttccaaccggaggccctatcggcagtactacgtggaggcttttggagatccttctgagagagcctgggtg

SEQ ID NO: 152701 - DNA, 76 bp, Homo sapiens
ccctatcggcagtactacgtggaggcttttggagatccttctgagagagcctgggtggctggaaaagcaatcgtca

SEQ ID NO: 152702 - DNA, 75 bp, Homo sapiens
agtactacgtggaggcttttggagatccttctgagagagcctgggtggctggaaaagcaatcgtcatgtttgaag

SEQ ID NO: 152703 - DNA, 80 bp, Homo sapiens
tggaggcttttggagatccttctgagagagcctgggtggctggaaaagcaatcgtcatgtttgaaggcagacatcaattc

SEQ ID NO: 152704 - DNA, 81 bp, Homo sapiens
tttggagatccttctgagagagcctgggtggctggaaaagcaatcgtcatgtttgaaggcagacatcaattcgaagagcta

SEQ ID NO: 152705 - DNA, 80 bp, Homo sapiens
ttctgagagagcctgggtggctggaaaagcaatcgtcatgtttgaaggcagacatcaattcgaagagctacctgtcctta

SEQ ID NO: 152706 - DNA, 77 bp, Homo sapiens
ctgggtggctggaaaagcaatcgtcatgtttgaaggcagacatcaattcgaagagctacctgtccttaggagaagag

SEQ ID NO: 152707 - DNA, 76 bp, Homo sapiens
ctggaaaagcaatcgtcatgtttgaaggcagacatcaattcgaagagctacctgtccttaggagaagagggaaaca

SEQ ID NO: 152708 - DNA, 74 bp, Homo sapiens
aatcgtcatgtttgaaggcagacatcaattcgaagagctacctgtccttaggagaagagggaaacagaaagaaa

SEQ ID NO: 152709 - DNA, 73 bp, Homo sapiens
tttgaaggcagacatcaattcgaagagctacctgtccttaggagaagagggaaacagaaagaaaaaggatata

SEQ ID NO: 152710 - DNA, 72 bp, Homo sapiens
agacatcaattcgaagagctacctgtccttaggagaagagggaaacagaaagaaaaaggatataggcataag

SEQ ID NO: 152711 - DNA, 68 bp, Homo sapiens
aagagctacctgtccttaggagaagagggaaacagaaagaaaaaggatataggcataaggtaggaaac

SEQ ID NO: 152712 - DNA, 67 bp, Homo sapiens
tacctgtccttaggagaagagggaaacagaaagaaaaaggatataggcataaggtaggaaacgaaaa

SEQ ID NO: 152713 - DNA, 65 bp, Homo sapiens
ggagaagagggaaacagaaagaaaaaggatataggcataaggtaggaaacgaaaaaggcttttta

SEQ ID NO: 152714 - DNA, 65 bp, Homo sapiens
ccacccatttctttgataagtgataattctttttctcctttaaatttaaggttcctcagaaaatt

SEQ ID NO: 152715 - DNA, 67 bp, Homo sapiens
tgataagtgataattctttttctcctttaaatttaaggttcctcagaaaattttgagtaaatgggaa

SEQ ID NO: 152716 - DNA, 65 bp, Homo sapiens
attctttttctcctttaaatttaaggttcctcagaaaattttgagtaaatgggaagccagtgttg

SEQ ID NO: 152717 - DNA, 69 bp, Homo sapiens
tcctttaaatttaaggttcctcagaaaattttgagtaaatgggaagccagtgttggacttgcagaacag

SEQ ID NO: 152718 - DNA, 72 bp, Homo sapiens
taaatttaaggttcctcagaaaattttgagtaaatgggaagccagtgttggacttgcagaacagtatgatgt

SEQ ID NO: 152719 - DNA, 74 bp, Homo sapiens
tcagaaaattttgagtaaatgggaagccagtgttggacttgcagaacagtatgatgttcccaaggggtcaaaga

SEQ ID NO: 152720 - DNA, 71 bp, Homo sapiens
aaattttgagtaaatgggaagccagtgttggacttgcagaacagtatgatgttcccaaggggtcaaagaac

SEQ ID NO: 152721 - DNA, 72 bp, Homo sapiens
taaatgggaagccagtgttggacttgcagaacagtatgatgttcccaaggggtcaaagaaccgaaaatgtat

SEQ ID NO: 152722 - DNA, 73 bp, Homo sapiens
agtgttggacttgcagaacagtatgatgttcccaaggggtcaaagaaccgaaaatgtattcctggttcaatca

SEQ ID NO: 152723 - DNA, 72 bp, Homo sapiens
acttgcagaacagtatgatgttcccaaggggtcaaagaaccgaaaatgtattcctggttcaatcaagttgga

SEQ ID NO: 152724 - DNA, 71 bp, Homo sapiens
agtatgatgttcccaaggggtcaaagaaccgaaaatgtattcctggttcaatcaagttggacagtgaagaa

SEQ ID NO: 152725 - DNA, 73 bp, Homo sapiens
caaggggtcaaagaaccgaaaatgtattcctggttcaatcaagttggacagtgaagaagatatgccatttgaa

SEQ ID NO: 152726 - DNA, 75 bp, Homo sapiens
aaagaaccgaaaatgtattcctggttcaatcaagttggacagtgaagaagatatgccatttgaagactgcacaaa

SEQ ID NO: 152727 - DNA, 81 bp, Homo sapiens
aaatgtattcctggttcaatcaagttggacagtgaagaagatatgccatttgaagactgcacaaatgatcctgagtcagaa

SEQ ID NO: 152728 - DNA, 84 bp, Homo sapiens
tggttcaatcaagttggacagtgaagaagatatgccatttgaagactgcacaaatgatcctgagtcagaacatgacctgttgct

SEQ ID NO: 152729 - DNA, 84 bp, Homo sapiens
agtgaagaagatatgccatttgaagactgcacaaatgatcctgagtcagaacatgacctgttgcttaatggctgtttgaaatca

SEQ ID NO: 152730 - DNA, 82 bp, Homo sapiens
atatgccatttgaagactgcacaaatgatcctgagtcagaacatgacctgttgcttaatggctgtttgaaatcactggcttt

SEQ ID NO: 152731 - DNA, 81 bp, Homo sapiens
atttgaagactgcacaaatgatcctgagtcagaacatgacctgttgcttaatggctgtttgaaatcactggcttttgattc

SEQ ID NO: 152732 - DNA, 83 bp, Homo sapiens
acaaatgatcctgagtcagaacatgacctgttgcttaatggctgtttgaaatcactggcttttgattctgaacattctgcaga

SEQ ID NO: 152733 - DNA, 83 bp, Homo sapiens
tgagtcagaacatgacctgttgcttaatggctgtttgaaatcactggcttttgattctgaacattctgcagatgagaaggaaa

SEQ ID NO: 152734 - DNA, 80 bp, Homo sapiens
agaacatgacctgttgcttaatggctgtttgaaatcactggcttttgattctgaacattctgcagatgagaaggaaaagc

SEQ ID NO: 152735 - DNA, 80 bp, Homo sapiens
ttgcttaatggctgtttgaaatcactggcttttgattctgaacattctgcagatgagaaggaaaagccttgcgctaaatc

SEQ ID NO: 152736 - DNA, 80 bp, Homo sapiens
ctgtttgaaatcactggcttttgattctgaacattctgcagatgagaaggaaaagccttgcgctaaatctcgagccagaa

SEQ ID NO: 152737 - DNA, 81 bp, Homo sapiens
ttgattctgaacattctgcagatgagaaggaaaagccttgcgctaaatctcgagccagaaagagctctgataatccaaaaa

SEQ ID NO: 152738 - DNA, 78 bp, Homo sapiens
aacattctgcagatgagaaggaaaagccttgcgctaaatctcgagccagaaagagctctgataatccaaaaaggacta

SEQ ID NO: 152739 - DNA, 76 bp, Homo sapiens
gatgagaaggaaaagccttgcgctaaatctcgagccagaaagagctctgataatccaaaaaggactagtgtgaaaa

SEQ ID NO: 152740 - DNA, 75 bp, Homo sapiens
ttgcgctaaatctcgagccagaaagagctctgataatccaaaaaggactagtgtgaaaaagggccacatacaatt

SEQ ID NO: 152741 - DNA, 76 bp, Homo sapiens
tcgagccagaaagagctctgataatccaaaaaggactagtgtgaaaaagggccacatacaatttgaagcacataaa

SEQ ID NO: 152742 - DNA, 74 bp, Homo sapiens
aaagagctctgataatccaaaaaggactagtgtgaaaaagggccacatacaatttgaagcacataaagatgaac

SEQ ID NO: 152743 - DNA, 73 bp, Homo sapiens
tctgataatccaaaaaggactagtgtgaaaaagggccacatacaatttgaagcacataaagatgaacggaggg

SEQ ID NO: 152744 - DNA, 69 bp, Homo sapiens
aaaaaggactagtgtgaaaaagggccacatacaatttgaagcacataaagatgaacggaggggaaagat

SEQ ID NO: 152745 - DNA, 72 bp, Homo sapiens
tagtgtgaaaaagggccacatacaatttgaagcacataaagatgaacggaggggaaagattccagagaacct

SEQ ID NO: 152746 - DNA, 71 bp, Homo sapiens
ccacatacaatttgaagcacataaagatgaacggaggggaaagattccagagaaccttggcctaaacttta

SEQ ID NO: 152747 - DNA, 72 bp, Homo sapiens
tacaatttgaagcacataaagatgaacggaggggaaagattccagagaaccttggcctaaactttatctctg

SEQ ID NO: 152748 - DNA, 72 bp, Homo sapiens
ataaagatgaacggaggggaaagattccagagaaccttggcctaaactttatctctggggatatatctgata

SEQ ID NO: 152749 - DNA, 73 bp, Homo sapiens
atgaacggaggggaaagattccagagaaccttggcctaaactttatctctggggatatatctgatacgcaggc

SEQ ID NO: 152750 - DNA, 73 bp, Homo sapiens
aaagattccagagaaccttggcctaaactttatctctggggatatatctgatacgcaggcctctaatgaactt

SEQ ID NO: 152751 - DNA, 75 bp, Homo sapiens
agaaccttggcctaaactttatctctggggatatatctgatacgcaggcctctaatgaactttccaggatagcaa

SEQ ID NO: 152752 - DNA, 78 bp, Homo sapiens
ttggcctaaactttatctctggggatatatctgatacgcaggcctctaatgaactttccaggatagcaaatagcctca

SEQ ID NO: 152753 - DNA, 79 bp, Homo sapiens
tttatctctggggatatatctgatacgcaggcctctaatgaactttccaggatagcaaatagcctcacagggtccaaca

SEQ ID NO: 152754 - DNA, 78 bp, Homo sapiens
atatatctgatacgcaggcctctaatgaactttccaggatagcaaatagcctcacagggtccaacactgccccaggaa

SEQ ID NO: 152755 - DNA, 73 bp, Homo sapiens
atacgcaggcctctaatgaactttccaggatagcaaatagcctcacagggtccaacactgccccaggaagttt

SEQ ID NO: 152756 - DNA, 71 bp, Homo sapiens
cctctaatgaactttccaggatagcaaatagcctcacagggtccaacactgccccaggaagttttctgttt

SEQ ID NO: 152757 - DNA, 70 bp, Homo sapiens
aactttccaggatagcaaatagcctcacagggtccaacactgccccaggaagttttctgttttcttcctg

SEQ ID NO: 152758 - DNA, 70 bp, Homo sapiens
aggatagcaaatagcctcacagggtccaacactgccccaggaagttttctgttttcttcctgtggaaaaa

SEQ ID NO: 152759 - DNA, 69 bp, Homo sapiens
gtccaacactgccccaggaagttttctgttttcttcctgtggaaaaaacactgcaaagaaagaatttga

SEQ ID NO: 152760 - DNA, 68 bp, Homo sapiens
cccaggaagttttctgttttcttcctgtggaaaaaacactgcaaagaaagaatttgagacttcaaatg

SEQ ID NO: 152761 - DNA, 70 bp, Homo sapiens
tttctgttttcttcctgtggaaaaaacactgcaaagaaagaatttgagacttcaaatggtgactctttat

SEQ ID NO: 152762 - DNA, 70 bp, Homo sapiens
ttttcttcctgtggaaaaaacactgcaaagaaagaatttgagacttcaaatggtgactctttattgggct

SEQ ID NO: 152763 - DNA, 71 bp, Homo sapiens
aaaaaacactgcaaagaaagaatttgagacttcaaatggtgactctttattgggcttgcctgagggtgctt

SEQ ID NO: 152764 - DNA, 76 bp, Homo sapiens
tgcaaagaaagaatttgagacttcaaatggtgactctttattgggcttgcctgagggtgctttgatctcaaagtgt

SEQ ID NO: 152765 - DNA, 74 bp, Homo sapiens
tgactctttattgggcttgcctgagggtgctttgatctcaaagtgttctcgagagaagaataaaccccaacgaa

SEQ ID NO: 152766 - DNA, 73 bp, Homo sapiens
tttattgggcttgcctgagggtgctttgatctcaaagtgttctcgagagaagaataaaccccaacgaagcctg

SEQ ID NO: 152767 - DNA, 73 bp, Homo sapiens
tgagggtgctttgatctcaaagtgttctcgagagaagaataaaccccaacgaagcctggtgtgtggttcaaaa

SEQ ID NO: 152768 - DNA, 73 bp, Homo sapiens
gtgctttgatctcaaagtgttctcgagagaagaataaaccccaacgaagcctggtgtgtggttcaaaagtgaa

SEQ ID NO: 152769 - DNA, 72 bp, Homo sapiens
aaagtgttctcgagagaagaataaaccccaacgaagcctggtgtgtggttcaaaagtgaagctctgctatat

SEQ ID NO: 152770 - DNA, 76 bp, Homo sapiens
agagaagaataaaccccaacgaagcctggtgtgtggttcaaaagtgaagctctgctatattggagcaggtgatgag

SEQ ID NO: 152771 - DNA, 74 bp, Homo sapiens
aataaaccccaacgaagcctggtgtgtggttcaaaagtgaagctctgctatattggagcaggtgatgaggaaaa

SEQ ID NO: 152772 - DNA, 79 bp, Homo sapiens
cgaagcctggtgtgtggttcaaaagtgaagctctgctatattggagcaggtgatgaggaaaagcgaagtgattccatta

SEQ ID NO: 152773 - DNA, 81 bp, Homo sapiens
tgtgtggttcaaaagtgaagctctgctatattggagcaggtgatgaggaaaagcgaagtgattccattagtatctgtacca

SEQ ID NO: 152774 - DNA, 83 bp, Homo sapiens
aagctctgctatattggagcaggtgatgaggaaaagcgaagtgattccattagtatctgtaccacttctgatgatggaagcag

SEQ ID NO: 152775 - DNA, 83 bp, Homo sapiens
tatattggagcaggtgatgaggaaaagcgaagtgattccattagtatctgtaccacttctgatgatggaagcagtgacctgga

SEQ ID NO: 152776 - DNA, 85 bp, Homo sapiens
agtgattccattagtatctgtaccacttctgatgatggaagcagtgacctggatcccatagaacacagctcagagtctgataaca

SEQ ID NO: 152777 - DNA, 84 bp, Homo sapiens
tatctgtaccacttctgatgatggaagcagtgacctggatcccatagaacacagctcagagtctgataacagtgtccttgaaat

SEQ ID NO: 152778 - DNA, 84 bp, Homo sapiens
taccacttctgatgatggaagcagtgacctggatcccatagaacacagctcagagtctgataacagtgtccttgaaattccaga

SEQ ID NO: 152779 - DNA, 83 bp, Homo sapiens
tggaagcagtgacctggatcccatagaacacagctcagagtctgataacagtgtccttgaaattccagatgctttcgatagaa

SEQ ID NO: 152780 - DNA, 83 bp, Homo sapiens
tcccatagaacacagctcagagtctgataacagtgtccttgaaattccagatgctttcgatagaacagagaacatgttatcta

SEQ ID NO: 152781 - DNA, 82 bp, Homo sapiens
acagctcagagtctgataacagtgtccttgaaattccagatgctttcgatagaacagagaacatgttatctatgcagaaaaa

SEQ ID NO: 152782 - DNA, 79 bp, Homo sapiens
agtctgataacagtgtccttgaaattccagatgctttcgatagaacagagaacatgttatctatgcagaaaaatgaaaa

SEQ ID NO: 152783 - DNA, 77 bp, Homo sapiens
acagtgtccttgaaattccagatgctttcgatagaacagagaacatgttatctatgcagaaaaatgaaaagataaag

SEQ ID NO: 152784 - DNA, 77 bp, Homo sapiens
tgaaattccagatgctttcgatagaacagagaacatgttatctatgcagaaaaatgaaaagataaagtattctaggt

SEQ ID NO: 152785 - DNA, 78 bp, Homo sapiens
atgctttcgatagaacagagaacatgttatctatgcagaaaaatgaaaagataaagtattctaggtttgctgccacaa

SEQ ID NO: 152786 - DNA, 76 bp, Homo sapiens
tagaacagagaacatgttatctatgcagaaaaatgaaaagataaagtattctaggtttgctgccacaaacactagg

SEQ ID NO: 152787 - DNA, 74 bp, Homo sapiens
acatgttatctatgcagaaaaatgaaaagataaagtattctaggtttgctgccacaaacactagggtaaaagca

SEQ ID NO: 152788 - DNA, 72 bp, Homo sapiens
atgaaaagataaagtattctaggtttgctgccacaaacactagggtaaaagcaaaacagaagcctctcatta

SEQ ID NO: 152789 - DNA, 71 bp, Homo sapiens
aagataaagtattctaggtttgctgccacaaacactagggtaaaagcaaaacagaagcctctcattagtaa

SEQ ID NO: 152790 - DNA, 74 bp, Homo sapiens
attctaggtttgctgccacaaacactagggtaaaagcaaaacagaagcctctcattagtaactcacatacagac

SEQ ID NO: 152791 - DNA, 71 bp, Homo sapiens
ccacaaacactagggtaaaagcaaaacagaagcctctcattagtaactcacatacagaccacttaatgggt

SEQ ID NO: 152792 - DNA, 76 bp, Homo sapiens
aaagcaaaacagaagcctctcattagtaactcacatacagaccacttaatgggttgtactaagagtgcagagcctg

SEQ ID NO: 152793 - DNA, 77 bp, Homo sapiens
acagaagcctctcattagtaactcacatacagaccacttaatgggttgtactaagagtgcagagcctggaaccgaga

SEQ ID NO: 152794 - DNA, 75 bp, Homo sapiens
tagtaactcacatacagaccacttaatgggttgtactaagagtgcagagcctggaaccgagacgtctcaggttaa

SEQ ID NO: 152795 - DNA, 76 bp, Homo sapiens
actcacatacagaccacttaatgggttgtactaagagtgcagagcctggaaccgagacgtctcaggttaatctctc

SEQ ID NO: 152796 - DNA, 78 bp, Homo sapiens
acttaatgggttgtactaagagtgcagagcctggaaccgagacgtctcaggttaatctctctgatctgaaggcatcta

SEQ ID NO: 152797 - DNA, 81 bp, Homo sapiens
ttgtactaagagtgcagagcctggaaccgagacgtctcaggttaatctctctgatctgaaggcatctactcttgttcacaa

SEQ ID NO: 152798 - DNA, 79 bp, Homo sapiens
ctaagagtgcagagcctggaaccgagacgtctcaggttaatctctctgatctgaaggcatctactcttgttcacaaacc

SEQ ID NO: 152799 - DNA, 76 bp, Homo sapiens
ctggaaccgagacgtctcaggttaatctctctgatctgaaggcatctactcttgttcacaaaccccagtcagattt

SEQ ID NO: 152800 - DNA, 76 bp, Homo sapiens
accgagacgtctcaggttaatctctctgatctgaaggcatctactcttgttcacaaaccccagtcagattttacaa

SEQ ID NO: 152801 - DNA, 80 bp, Homo sapiens
gttaatctctctgatctgaaggcatctactcttgttcacaaaccccagtcagattttacaaatgatgctctctctccaaa

SEQ ID NO: 152802 - DNA, 81 bp, Homo sapiens
tctctctgatctgaaggcatctactcttgttcacaaaccccagtcagattttacaaatgatgctctctctccaaaattcaa

SEQ ID NO: 152803 - DNA, 80 bp, Homo sapiens
tactcttgttcacaaaccccagtcagattttacaaatgatgctctctctccaaaattcaacctgtcatcaagcatatcca

SEQ ID NO: 152804 - DNA, 79 bp, Homo sapiens
acaaaccccagtcagattttacaaatgatgctctctctccaaaattcaacctgtcatcaagcatatccagtgagaactc

SEQ ID NO: 152805 - DNA, 77 bp, Homo sapiens
agattttacaaatgatgctctctctccaaaattcaacctgtcatcaagcatatccagtgagaactcgttaataaagg

SEQ ID NO: 152806 - DNA, 77 bp, Homo sapiens
ttacaaatgatgctctctctccaaaattcaacctgtcatcaagcatatccagtgagaactcgttaataaagggtggg

SEQ ID NO: 152807 - DNA, 78 bp, Homo sapiens
tctctccaaaattcaacctgtcatcaagcatatccagtgagaactcgttaataaagggtggggcagcaaatcaagctc

SEQ ID NO: 152808 - DNA, 78 bp, Homo sapiens
tcatcaagcatatccagtgagaactcgttaataaagggtggggcagcaaatcaagctctattacattcgaaaagcaaa

SEQ ID NO: 152809 - DNA, 75 bp, Homo sapiens
aagcatatccagtgagaactcgttaataaagggtggggcagcaaatcaagctctattacattcgaaaagcaaaca

SEQ ID NO: 152810 - DNA, 71 bp, Homo sapiens
agaactcgttaataaagggtggggcagcaaatcaagctctattacattcgaaaagcaaacagcccaagttc

SEQ ID NO: 152811 - DNA, 72 bp, Homo sapiens
taataaagggtggggcagcaaatcaagctctattacattcgaaaagcaaacagcccaagttccgaagtataa

SEQ ID NO: 152812 - DNA, 74 bp, Homo sapiens
gggcagcaaatcaagctctattacattcgaaaagcaaacagcccaagttccgaagtataaagtgcaaacacaaa

SEQ ID NO: 152813 - DNA, 71 bp, Homo sapiens
aaatcaagctctattacattcgaaaagcaaacagcccaagttccgaagtataaagtgcaaacacaaagaaa

SEQ ID NO: 152814 - DNA, 71 bp, Homo sapiens
ttcgaaaagcaaacagcccaagttccgaagtataaagtgcaaacacaaagaaaatccagttatggcagaac

SEQ ID NO: 152815 - DNA, 70 bp, Homo sapiens
agttccgaagtataaagtgcaaacacaaagaaaatccagttatggcagaacccccagttataaatgagga

SEQ ID NO: 152816 - DNA, 73 bp, Homo sapiens
tataaagtgcaaacacaaagaaaatccagttatggcagaacccccagttataaatgaggagtgcagtttgaaa

SEQ ID NO: 152817 - DNA, 76 bp, Homo sapiens
acaaagaaaatccagttatggcagaacccccagttataaatgaggagtgcagtttgaaatgctgctcttctgatac

SEQ ID NO: 152818 - DNA, 75 bp, Homo sapiens
aaaatccagttatggcagaacccccagttataaatgaggagtgcagtttgaaatgctgctcttctgataccaaag

SEQ ID NO: 152819 - DNA, 78 bp, Homo sapiens
tatggcagaacccccagttataaatgaggagtgcagtttgaaatgctgctcttctgataccaaaggctctcctttggc

SEQ ID NO: 152820 - DNA, 77 bp, Homo sapiens
agttataaatgaggagtgcagtttgaaatgctgctcttctgataccaaaggctctcctttggccagcatttctaaaa

SEQ ID NO: 152821 - DNA, 78 bp, Homo sapiens
taaatgaggagtgcagtttgaaatgctgctcttctgataccaaaggctctcctttggccagcatttctaaaagtggga

SEQ ID NO: 152822 - DNA, 74 bp, Homo sapiens
agtttgaaatgctgctcttctgataccaaaggctctcctttggccagcatttctaaaagtgggaaagtggatgg

SEQ ID NO: 152823 - DNA, 74 bp, Homo sapiens
aatgctgctcttctgataccaaaggctctcctttggccagcatttctaaaagtgggaaagtggatggtctaaaa

SEQ ID NO: 152824 - DNA, 72 bp, Homo sapiens
tgataccaaaggctctcctttggccagcatttctaaaagtgggaaagtggatggtctaaaactactgaacaa

SEQ ID NO: 152825 - DNA, 71 bp, Homo sapiens
atttctaaaagtgggaaagtggatggtctaaaactactgaacaatatgcatgagaaaaccagggattcaag

SEQ ID NO: 152826 - DNA, 74 bp, Homo sapiens
aagtgggaaagtggatggtctaaaactactgaacaatatgcatgagaaaaccagggattcaagtgacatagaaa

SEQ ID NO: 152827 - DNA, 77 bp, Homo sapiens
aacaatatgcatgagaaaaccagggattcaagtgacatagaaacagcagtggtgaaacatgttttatccgagttgaa

SEQ ID NO: 152828 - DNA, 73 bp, Homo sapiens
gaaaaccagggattcaagtgacatagaaacagcagtggtgaaacatgttttatccgagttgaaggaactctct

SEQ ID NO: 152829 - DNA, 75 bp, Homo sapiens
aagtgacatagaaacagcagtggtgaaacatgttttatccgagttgaaggaactctcttacagatccttaggtga

SEQ ID NO: 152830 - DNA, 76 bp, Homo sapiens
aaacagcagtggtgaaacatgttttatccgagttgaaggaactctcttacagatccttaggtgaggatgtcagtga

SEQ ID NO: 152831 - DNA, 76 bp, Homo sapiens
aaacatgttttatccgagttgaaggaactctcttacagatccttaggtgaggatgtcagtgactctggaacatcaa

SEQ ID NO: 152832 - DNA, 78 bp, Homo sapiens
ttttatccgagttgaaggaactctcttacagatccttaggtgaggatgtcagtgactctggaacatcaaagccatcaa

SEQ ID NO: 152833 - DNA, 77 bp, Homo sapiens
agttgaaggaactctcttacagatccttaggtgaggatgtcagtgactctggaacatcaaagccatcaaaaccatta

SEQ ID NO: 152834 - DNA, 76 bp, Homo sapiens
aactctcttacagatccttaggtgaggatgtcagtgactctggaacatcaaagccatcaaaaccattacttttctc

SEQ ID NO: 152835 - DNA, 78 bp, Homo sapiens
atccttaggtgaggatgtcagtgactctggaacatcaaagccatcaaaaccattacttttctcttctgcttctagtca

SEQ ID NO: 152836 - DNA, 80 bp, Homo sapiens
ggatgtcagtgactctggaacatcaaagccatcaaaaccattacttttctcttctgcttctagtcagaatcacataccta

SEQ ID NO: 152837 - DNA, 78 bp, Homo sapiens
agtgactctggaacatcaaagccatcaaaaccattacttttctcttctgcttctagtcagaatcacatacctattgaa

SEQ ID NO: 152838 - DNA, 77 bp, Homo sapiens
catcaaagccatcaaaaccattacttttctcttctgcttctagtcagaatcacatacctattgaaccagactacaaa

SEQ ID NO: 152839 - DNA, 76 bp, Homo sapiens
atcaaaaccattacttttctcttctgcttctagtcagaatcacatacctattgaaccagactacaaattcagtaca

SEQ ID NO: 152840 - DNA, 79 bp, Homo sapiens
ttacttttctcttctgcttctagtcagaatcacatacctattgaaccagactacaaattcagtacattgctaatgatgt

SEQ ID NO: 152841 - DNA, 82 bp, Homo sapiens
ttctcttctgcttctagtcagaatcacatacctattgaaccagactacaaattcagtacattgctaatgatgttgaaagata

SEQ ID NO: 152842 - DNA, 84 bp, Homo sapiens
ttctagtcagaatcacatacctattgaaccagactacaaattcagtacattgctaatgatgttgaaagatatgcatgatagtaa

SEQ ID NO: 152843 - DNA, 82 bp, Homo sapiens
agaatcacatacctattgaaccagactacaaattcagtacattgctaatgatgttgaaagatatgcatgatagtaagacgaa

SEQ ID NO: 152844 - DNA, 83 bp, Homo sapiens
tattgaaccagactacaaattcagtacattgctaatgatgttgaaagatatgcatgatagtaagacgaaggagcagcggttga

SEQ ID NO: 152845 - DNA, 83 bp, Homo sapiens
aattcagtacattgctaatgatgttgaaagatatgcatgatagtaagacgaaggagcagcggttgatgactgctcaaaacctg

SEQ ID NO: 152846 - DNA, 81 bp, Homo sapiens
taatgatgttgaaagatatgcatgatagtaagacgaaggagcagcggttgatgactgctcaaaacctggtctcttaccgga

SEQ ID NO: 152847 - DNA, 79 bp, Homo sapiens
atgttgaaagatatgcatgatagtaagacgaaggagcagcggttgatgactgctcaaaacctggtctcttaccggagtc

SEQ ID NO: 152848 - DNA, 78 bp, Homo sapiens
atatgcatgatagtaagacgaaggagcagcggttgatgactgctcaaaacctggtctcttaccggagtcctggtcgtg

SEQ ID NO: 152849 - DNA, 73 bp, Homo sapiens
agcagcggttgatgactgctcaaaacctggtctcttaccggagtcctggtcgtggggactgttctactaatag

SEQ ID NO: 152850 - DNA, 73 bp, Homo sapiens
ttgatgactgctcaaaacctggtctcttaccggagtcctggtcgtggggactgttctactaatagtcctgtag

SEQ ID NO: 152851 - DNA, 69 bp, Homo sapiens
tggtctcttaccggagtcctggtcgtggggactgttctactaatagtcctgtaggagtctctaaggttt

SEQ ID NO: 152852 - DNA, 71 bp, Homo sapiens
gtggggactgttctactaatagtcctgtaggagtctctaaggttttggtttcaggaggctccacacacaat

SEQ ID NO: 152853 - DNA, 72 bp, Homo sapiens
ttctactaatagtcctgtaggagtctctaaggttttggtttcaggaggctccacacacaattcagagaaaaa

SEQ ID NO: 152854 - DNA, 71 bp, Homo sapiens
ctaatagtcctgtaggagtctctaaggttttggtttcaggaggctccacacacaattcagagaaaaaggga

SEQ ID NO: 152855 - DNA, 74 bp, Homo sapiens
taaggttttggtttcaggaggctccacacacaattcagagaaaaagggagatggcactcagaactccgccaatc

SEQ ID NO: 152856 - DNA, 76 bp, Homo sapiens
aattcagagaaaaagggagatggcactcagaactccgccaatcctagccctagtgggggtgactctgcattatctg

SEQ ID NO: 152857 - DNA, 75 bp, Homo sapiens
aaaaagggagatggcactcagaactccgccaatcctagccctagtgggggtgactctgcattatctggcgagttg

SEQ ID NO: 152858 - DNA, 79 bp, Homo sapiens
agatggcactcagaactccgccaatcctagccctagtgggggtgactctgcattatctggcgagttgtctgcttcccta

SEQ ID NO: 152859 - DNA, 75 bp, Homo sapiens
aactccgccaatcctagccctagtgggggtgactctgcattatctggcgagttgtctgcttccctacctggctta

SEQ ID NO: 152860 - DNA, 76 bp, Homo sapiens
atcctagccctagtgggggtgactctgcattatctggcgagttgtctgcttccctacctggcttactgtccgacaa

SEQ ID NO: 152861 - DNA, 78 bp, Homo sapiens
actctgcattatctggcgagttgtctgcttccctacctggcttactgtccgacaagagagacctccctgcttctggta

SEQ ID NO: 152862 - DNA, 74 bp, Homo sapiens
attatctggcgagttgtctgcttccctacctggcttactgtccgacaagagagacctccctgcttctggtaaaa

SEQ ID NO: 152863 - DNA, 73 bp, Homo sapiens
agttgtctgcttccctacctggcttactgtccgacaagagagacctccctgcttctggtaaaagtcgttcaga

SEQ ID NO: 152864 - DNA, 73 bp, Homo sapiens
tccctacctggcttactgtccgacaagagagacctccctgcttctggtaaaagtcgttcagactgtgttacta

SEQ ID NO: 152865 - DNA, 75 bp, Homo sapiens
ttactgtccgacaagagagacctccctgcttctggtaaaagtcgttcagactgtgttactaggcgcaactgtgga

SEQ ID NO: 152866 - DNA, 75 bp, Homo sapiens
acaagagagacctccctgcttctggtaaaagtcgttcagactgtgttactaggcgcaactgtggacgatcaaagc

SEQ ID NO: 152867 - DNA, 75 bp, Homo sapiens
cctccctgcttctggtaaaagtcgttcagactgtgttactaggcgcaactgtggacgatcaaagccttcatccaa

SEQ ID NO: 152868 - DNA, 76 bp, Homo sapiens
cttctggtaaaagtcgttcagactgtgttactaggcgcaactgtggacgatcaaagccttcatccaaattgcgaga

SEQ ID NO: 152869 - DNA, 76 bp, Homo sapiens
taaaagtcgttcagactgtgttactaggcgcaactgtggacgatcaaagccttcatccaaattgcgagatgctttt

SEQ ID NO: 152870 - DNA, 77 bp, Homo sapiens
actgtgttactaggcgcaactgtggacgatcaaagccttcatccaaattgcgagatgctttttcagcccaaatggta

SEQ ID NO: 152871 - DNA, 76 bp, Homo sapiens
ttactaggcgcaactgtggacgatcaaagccttcatccaaattgcgagatgctttttcagcccaaatggtaaagaa

SEQ ID NO: 152872 - DNA, 75 bp, Homo sapiens
aactgtggacgatcaaagccttcatccaaattgcgagatgctttttcagcccaaatggtaaagaacacagtgaac

SEQ ID NO: 152873 - DNA, 71 bp, Homo sapiens
gagatgctttttcagcccaaatggtaaagaacacagtgaaccgtaaagccttaaagaccgagcgcaaaaga

SEQ ID NO: 152874 - DNA, 67 bp, Homo sapiens
tttttcagcccaaatggtaaagaacacagtgaaccgtaaagccttaaagaccgagcgcaaaagaaaa

SEQ ID NO: 152875 - DNA, 69 bp, Homo sapiens
aaatggtaaagaacacagtgaaccgtaaagccttaaagaccgagcgcaaaagaaaactgaatcagcttc

SEQ ID NO: 152876 - DNA, 71 bp, Homo sapiens
aaagaacacagtgaaccgtaaagccttaaagaccgagcgcaaaagaaaactgaatcagcttccaagtgtga

SEQ ID NO: 152877 - DNA, 78 bp, Homo sapiens
ttaaagaccgagcgcaaaagaaaactgaatcagcttccaagtgtgactcttgatgctgtactgcagggagaccgagaa

SEQ ID NO: 152878 - DNA, 77 bp, Homo sapiens
agcgcaaaagaaaactgaatcagcttccaagtgtgactcttgatgctgtactgcagggagaccgagaacgtggaggt

SEQ ID NO: 152879 - DNA, 78 bp, Homo sapiens
aaagaaaactgaatcagcttccaagtgtgactcttgatgctgtactgcagggagaccgagaacgtggaggttcattga

SEQ ID NO: 152880 - DNA, 80 bp, Homo sapiens
aatcagcttccaagtgtgactcttgatgctgtactgcagggagaccgagaacgtggaggttcattgagaggtggggcaga

SEQ ID NO: 152881 - DNA, 79 bp, Homo sapiens
gtgtgactcttgatgctgtactgcagggagaccgagaacgtggaggttcattgagaggtggggcagaagatcctagtaa

SEQ ID NO: 152882 - DNA, 77 bp, Homo sapiens
actcttgatgctgtactgcagggagaccgagaacgtggaggttcattgagaggtggggcagaagatcctagtaaaga

SEQ ID NO: 152883 - DNA, 74 bp, Homo sapiens
ctgtactgcagggagaccgagaacgtggaggttcattgagaggtggggcagaagatcctagtaaagaggatccc

SEQ ID NO: 152884 - DNA, 73 bp, Homo sapiens
agaccgagaacgtggaggttcattgagaggtggggcagaagatcctagtaaagaggatccccttcagataatg

SEQ ID NO: 152885 - DNA, 74 bp, Homo sapiens
tggaggttcattgagaggtggggcagaagatcctagtaaagaggatccccttcagataatgggccacttaacaa

SEQ ID NO: 152886 - DNA, 74 bp, Homo sapiens
ttgagaggtggggcagaagatcctagtaaagaggatccccttcagataatgggccacttaacaagtgaagatgg

SEQ ID NO: 152887 - DNA, 73 bp, Homo sapiens
gggcagaagatcctagtaaagaggatccccttcagataatgggccacttaacaagtgaagatggtgaccattt

SEQ ID NO: 152888 - DNA, 77 bp, Homo sapiens
taaagaggatccccttcagataatgggccacttaacaagtgaagatggtgaccatttttctgatgtgcatttcgata

SEQ ID NO: 152889 - DNA, 79 bp, Homo sapiens
ttcagataatgggccacttaacaagtgaagatggtgaccatttttctgatgtgcatttcgatagcaaggttaagcaatc

SEQ ID NO: 152890 - DNA, 79 bp, Homo sapiens
ataatgggccacttaacaagtgaagatggtgaccatttttctgatgtgcatttcgatagcaaggttaagcaatctgatc

SEQ ID NO: 152891 - DNA, 77 bp, Homo sapiens
taacaagtgaagatggtgaccatttttctgatgtgcatttcgatagcaaggttaagcaatctgatcctggtaaaatt

SEQ ID NO: 152892 - DNA, 76 bp, Homo sapiens
aagatggtgaccatttttctgatgtgcatttcgatagcaaggttaagcaatctgatcctggtaaaatttctgaaaa

SEQ ID NO: 152893 - DNA, 74 bp, Homo sapiens
tttttctgatgtgcatttcgatagcaaggttaagcaatctgatcctggtaaaatttctgaaaaaggactctctt

SEQ ID NO: 152894 - DNA, 75 bp, Homo sapiens
tgatgtgcatttcgatagcaaggttaagcaatctgatcctggtaaaatttctgaaaaaggactctcttttgaaaa

SEQ ID NO: 152895 - DNA, 70 bp, Homo sapiens
tttcgatagcaaggttaagcaatctgatcctggtaaaatttctgaaaaaggactctcttttgaaaacgga

SEQ ID NO: 152896 - DNA, 68 bp, Homo sapiens
aatctgatcctggtaaaatttctgaaaaaggactctcttttgaaaacggaaaaggcccagagctggac

SEQ ID NO: 152897 - DNA, 70 bp, Homo sapiens
aaatttctgaaaaaggactctcttttgaaaacggaaaaggcccagagctggactctgtaatgaacagtga

SEQ ID NO: 152898 - DNA, 72 bp, Homo sapiens
aaaaaggactctcttttgaaaacggaaaaggcccagagctggactctgtaatgaacagtgagaatgatgaac

SEQ ID NO: 152899 - DNA, 77 bp, Homo sapiens
tcttttgaaaacggaaaaggcccagagctggactctgtaatgaacagtgagaatgatgaactcaatggtgtaaatca

SEQ ID NO: 152900 - DNA, 75 bp, Homo sapiens
aaaacggaaaaggcccagagctggactctgtaatgaacagtgagaatgatgaactcaatggtgtaaatcaagtgg

SEQ ID NO: 152901 - DNA, 77 bp, Homo sapiens
aaaggcccagagctggactctgtaatgaacagtgagaatgatgaactcaatggtgtaaatcaagtggtgcctaaaaa

SEQ ID NO: 152902 - DNA, 78 bp, Homo sapiens
gactctgtaatgaacagtgagaatgatgaactcaatggtgtaaatcaagtggtgcctaaaaagcggtggcagcgttta

SEQ ID NO: 152903 - DNA, 75 bp, Homo sapiens
tgaacagtgagaatgatgaactcaatggtgtaaatcaagtggtgcctaaaaagcggtggcagcgtttaaaccaaa

SEQ ID NO: 152904 - DNA, 74 bp, Homo sapiens
gaatgatgaactcaatggtgtaaatcaagtggtgcctaaaaagcggtggcagcgtttaaaccaaaggcgcacta

SEQ ID NO: 152905 - DNA, 72 bp, Homo sapiens
taaatcaagtggtgcctaaaaagcggtggcagcgtttaaaccaaaggcgcactaaacctcgtaagcgcatga

SEQ ID NO: 152906 - DNA, 70 bp, Homo sapiens
agcgtttaaaccaaaggcgcactaaacctcgtaagcgcatgaacagatttaaagagaaagaaaactctga

SEQ ID NO: 152907 - DNA, 72 bp, Homo sapiens
ttaaaccaaaggcgcactaaacctcgtaagcgcatgaacagatttaaagagaaagaaaactctgagtgtgcc

SEQ ID NO: 152908 - DNA, 70 bp, Homo sapiens
actaaacctcgtaagcgcatgaacagatttaaagagaaagaaaactctgagtgtgcctttagggtcttac

SEQ ID NO: 152909 - DNA, 69 bp, Homo sapiens
atttaaagagaaagaaaactctgagtgtgcctttagggtcttacttcctagtgaccctgtgcaggaggg

SEQ ID NO: 152910 - DNA, 71 bp, Homo sapiens
aaaactctgagtgtgcctttagggtcttacttcctagtgaccctgtgcaggaggggcgggatgagtttcca

SEQ ID NO: 152911 - DNA, 76 bp, Homo sapiens
tctgagtgtgcctttagggtcttacttcctagtgaccctgtgcaggaggggcgggatgagtttccagagcatagaa

SEQ ID NO: 152912 - DNA, 78 bp, Homo sapiens
ttacttcctagtgaccctgtgcaggaggggcgggatgagtttccagagcatagaactccttcagcaagcatacttgag

SEQ ID NO: 152913 - DNA, 79 bp, Homo sapiens
accctgtgcaggaggggcgggatgagtttccagagcatagaactccttcagcaagcatacttgaggaaccactgacaga

SEQ ID NO: 152914 - DNA, 79 bp, Homo sapiens
aggaggggcgggatgagtttccagagcatagaactccttcagcaagcatacttgaggaaccactgacagagcaaaatca

SEQ ID NO: 152915 - DNA, 86 bp, Homo sapiens
atgagtttccagagcatagaactccttcagcaagcatacttgaggaaccactgacagagcaaaatcatgctgactgcttagattca

SEQ ID NO: 152916 - DNA, 86 bp, Homo sapiens
tttccagagcatagaactccttcagcaagcatacttgaggaaccactgacagagcaaaatcatgctgactgcttagattcagctgg

SEQ ID NO: 152917 - DNA, 82 bp, Homo sapiens
actccttcagcaagcatacttgaggaaccactgacagagcaaaatcatgctgactgcttagattcagctgggccacggttaa

SEQ ID NO: 152918 - DNA, 82 bp, Homo sapiens
ttcagcaagcatacttgaggaaccactgacagagcaaaatcatgctgactgcttagattcagctgggccacggttaaatgtt

SEQ ID NO: 152919 - DNA, 80 bp, Homo sapiens
atacttgaggaaccactgacagagcaaaatcatgctgactgcttagattcagctgggccacggttaaatgtttgtgataa

SEQ ID NO: 152920 - DNA, 81 bp, Homo sapiens
aaccactgacagagcaaaatcatgctgactgcttagattcagctgggccacggttaaatgtttgtgataaatccagtgcca

SEQ ID NO: 152921 - DNA, 82 bp, Homo sapiens
aaaatcatgctgactgcttagattcagctgggccacggttaaatgtttgtgataaatccagtgccagcattggtgacatgga

SEQ ID NO: 152922 - DNA, 80 bp, Homo sapiens
atgctgactgcttagattcagctgggccacggttaaatgtttgtgataaatccagtgccagcattggtgacatggaaaag

SEQ ID NO: 152923 - DNA, 80 bp, Homo sapiens
tttgtgataaatccagtgccagcattggtgacatggaaaaggagccaggaattcccagtttgacaccacaggctgagctc

SEQ ID NO: 152924 - DNA, 79 bp, Homo sapiens
atccagtgccagcattggtgacatggaaaaggagccaggaattcccagtttgacaccacaggctgagctccctgaacca

SEQ ID NO: 152925 - DNA, 73 bp, Homo sapiens
atggaaaaggagccaggaattcccagtttgacaccacaggctgagctccctgaaccaggtaaggacatctaaa

SEQ ID NO: 152926 - DNA, 74 bp, Homo sapiens
agccaggaattcccagtttgacaccacaggctgagctccctgaaccaggtaaggacatctaaatgtgataaaaa

SEQ ID NO: 152927 - DNA, 71 bp, Homo sapiens
attcccagtttgacaccacaggctgagctccctgaaccaggtaaggacatctaaatgtgataaaaaaaaaa

SEQ ID NO: 152928 - DNA, 70 bp, Homo sapiens
aaaaaaaaattggagaaagtgctgataaacattgtccttctgaaattggtctgttgtaatggtaaagtga

SEQ ID NO: 152929 - DNA, 74 bp, Homo sapiens
ttggagaaagtgctgataaacattgtccttctgaaattggtctgttgtaatggtaaagtgaagtataaactagc

SEQ ID NO: 152930 - DNA, 71 bp, Homo sapiens
aaagtgctgataaacattgtccttctgaaattggtctgttgtaatggtaaagtgaagtataaactagcggg

SEQ ID NO: 152931 - DNA, 73 bp, Homo sapiens
taaacattgtccttctgaaattggtctgttgtaatggtaaagtgaagtataaactagcggggaagaatcatca

SEQ ID NO: 152932 - DNA, 74 bp, Homo sapiens
ttctgaaattggtctgttgtaatggtaaagtgaagtataaactagcggggaagaatcatcacttcaatgaagaa

SEQ ID NO: 152933 - DNA, 73 bp, Homo sapiens
tctgttgtaatggtaaagtgaagtataaactagcggggaagaatcatcacttcaatgaagaaggagttttatg

SEQ ID NO: 152934 - DNA, 72 bp, Homo sapiens
gtaatggtaaagtgaagtataaactagcggggaagaatcatcacttcaatgaagaaggagttttatgtagaa

SEQ ID NO: 152935 - DNA, 71 bp, Homo sapiens
gaagtataaactagcggggaagaatcatcacttcaatgaagaaggagttttatgtagaaaggtctgaattt

SEQ ID NO: 152936 - DNA, 73 bp, Homo sapiens
aaactagcggggaagaatcatcacttcaatgaagaaggagttttatgtagaaaggtctgaattttgaagatga

SEQ ID NO: 152937 - DNA, 77 bp, Homo sapiens
ggaagaatcatcacttcaatgaagaaggagttttatgtagaaaggtctgaattttgaagatgagatttccatatata

SEQ ID NO: 152938 - DNA, 71 bp, Homo sapiens
gaagaaggagttttatgtagaaaggtctgaattttgaagatgagatttccatatatattcaaaagttaaac

SEQ ID NO: 152939 - DNA, 69 bp, Homo sapiens
tgaagatgagatttccatatatattcaaaagttaaactttaccagaagcccttttccccaaccttttca

SEQ ID NO: 152940 - DNA, 66 bp, Homo sapiens
gagatttccatatatattcaaaagttaaactttaccagaagcccttttccccaaccttttcaagta

SEQ ID NO: 152941 - DNA, 65 bp, Homo sapiens
tattcaaaagttaaactttaccagaagcccttttccccaaccttttcaagtaaatctctataaca

SEQ ID NO: 152942 - DNA, 64 bp, Homo sapiens
aagttaaactttaccagaagcccttttccccaaccttttcaagtaaatctctataacatctttc

SEQ ID NO: 152943 - DNA, 66 bp, Homo sapiens
ctttaccagaagcccttttccccaaccttttcaagtaaatctctataacatctttctttctcactt

SEQ ID NO: 152944 - DNA, 66 bp, Homo sapiens
tgctgggattactcttgcctgacctgttccccgtttcttaccttttaaaatccccaagctttttgg

SEQ ID NO: 152945 - DNA, 66 bp, Homo sapiens
tactcttgcctgacctgttccccgtttcttaccttttaaaatccccaagctttttgggactcaata

SEQ ID NO: 152946 - DNA, 67 bp, Homo sapiens
tgacctgttccccgtttcttaccttttaaaatccccaagctttttgggactcaatatgtaactgcaa

SEQ ID NO: 152947 - DNA, 67 bp, Homo sapiens
cccgtttcttaccttttaaaatccccaagctttttgggactcaatatgtaactgcaagtaattgaga

SEQ ID NO: 152948 - DNA, 71 bp, Homo sapiens
taccttttaaaatccccaagctttttgggactcaatatgtaactgcaagtaattgagaggctccgatccta

SEQ ID NO: 152949 - DNA, 72 bp, Homo sapiens
taaaatccccaagctttttgggactcaatatgtaactgcaagtaattgagaggctccgatcctaggatttaa

SEQ ID NO: 152950 - DNA, 73 bp, Homo sapiens
agctttttgggactcaatatgtaactgcaagtaattgagaggctccgatcctaggatttaaatccagttgtta

SEQ ID NO: 152951 - DNA, 73 bp, Homo sapiens
taactgcaagtaattgagaggctccgatcctaggatttaaatccagttgttaggttatagaaagcaaatagat

SEQ ID NO: 152952 - DNA, 74 bp, Homo sapiens
taattgagaggctccgatcctaggatttaaatccagttgttaggttatagaaagcaaatagattctattggatg

SEQ ID NO: 152953 - DNA, 75 bp, Homo sapiens
gagccactgcatctggctggatgttaggttttctttgaccattacttaagataggtccttctgttttgtggacaa

SEQ ID NO: 152954 - DNA, 73 bp, Homo sapiens
atctggctggatgttaggttttctttgaccattacttaagataggtccttctgttttgtggacaatttgatga

SEQ ID NO: 152955 - DNA, 72 bp, Homo sapiens
atgttaggttttctttgaccattacttaagataggtccttctgttttgtggacaatttgatgaaccacatgc

SEQ ID NO: 152956 - DNA, 73 bp, Homo sapiens
ttctttgaccattacttaagataggtccttctgttttgtggacaatttgatgaaccacatgcgcttttgaaaa

SEQ ID NO: 152957 - DNA, 72 bp, Homo sapiens
attacttaagataggtccttctgttttgtggacaatttgatgaaccacatgcgcttttgaaaaaactgcaag

SEQ ID NO: 152958 - DNA, 75 bp, Homo sapiens
taagataggtccttctgttttgtggacaatttgatgaaccacatgcgcttttgaaaaaactgcaagtattctgta

SEQ ID NO: 152959 - DNA, 74 bp, Homo sapiens
ctgttttgtggacaatttgatgaaccacatgcgcttttgaaaaaactgcaagtattctgtagtacttatttgaa

SEQ ID NO: 152960 - DNA, 75 bp, Homo sapiens
tgtggacaatttgatgaaccacatgcgcttttgaaaaaactgcaagtattctgtagtacttatttgaaggtctta

SEQ ID NO: 152961 - DNA, 74 bp, Homo sapiens
tgatgaaccacatgcgcttttgaaaaaactgcaagtattctgtagtacttatttgaaggtcttaggtgtcttaa

SEQ ID NO: 152962 - DNA, 71 bp, Homo sapiens
cacatgcgcttttgaaaaaactgcaagtattctgtagtacttatttgaaggtcttaggtgtcttaaattcc

SEQ ID NO: 152963 - DNA, 70 bp, Homo sapiens
aaaaactgcaagtattctgtagtacttatttgaaggtcttaggtgtcttaaattcctactggaatgagga

SEQ ID NO: 152964 - DNA, 74 bp, Homo sapiens
ctgcaagtattctgtagtacttatttgaaggtcttaggtgtcttaaattcctactggaatgaggattatgaaca

SEQ ID NO: 152965 - DNA, 71 bp, Homo sapiens
tctgtagtacttatttgaaggtcttaggtgtcttaaattcctactggaatgaggattatgaacaaataaaa

SEQ ID NO: 152966 - DNA, 70 bp, Homo sapiens
tgaaggtcttaggtgtcttaaattcctactggaatgaggattatgaacaaataaaaataccagaagtacc

SEQ ID NO: 152967 - DNA, 69 bp, Homo sapiens
aggtgtcttaaattcctactggaatgaggattatgaacaaataaaaataccagaagtacccaagtgttg

SEQ ID NO: 152968 - DNA, 73 bp, Homo sapiens
taaattcctactggaatgaggattatgaacaaataaaaataccagaagtacccaagtgttgtacctagcagca

SEQ ID NO: 152969 - DNA, 74 bp, Homo sapiens
tactggaatgaggattatgaacaaataaaaataccagaagtacccaagtgttgtacctagcagcagatggaaaa

SEQ ID NO: 152970 - DNA, 72 bp, Homo sapiens
gattatgaacaaataaaaataccagaagtacccaagtgttgtacctagcagcagatggaaaacagaaatctt

SEQ ID NO: 152971 - DNA, 72 bp, Homo sapiens
ataaaaataccagaagtacccaagtgttgtacctagcagcagatggaaaacagaaatctttcaagatactaa

SEQ ID NO: 152972 - DNA, 74 bp, Homo sapiens
aataccagaagtacccaagtgttgtacctagcagcagatggaaaacagaaatctttcaagatactaacattaca

SEQ ID NO: 152973 - DNA, 78 bp, Homo sapiens
caagtgttgtacctagcagcagatggaaaacagaaatctttcaagatactaacattacacagtatacagttgaggata

SEQ ID NO: 152974 - DNA, 78 bp, Homo sapiens
gttgtacctagcagcagatggaaaacagaaatctttcaagatactaacattacacagtatacagttgaggataaagca

SEQ ID NO: 152975 - DNA, 79 bp, Homo sapiens
agcagatggaaaacagaaatctttcaagatactaacattacacagtatacagttgaggataaagcagtgtgtgtataca

SEQ ID NO: 152976 - DNA, 73 bp, Homo sapiens
tttttcttttttacagcaatatccattaacataagattctcaaaactgtgtatcatagtagatttttctctaa

SEQ ID NO: 152977 - DNA, 75 bp, Homo sapiens
tttttacagcaatatccattaacataagattctcaaaactgtgtatcatagtagatttttctctaacagctttat

SEQ ID NO: 152978 - DNA, 78 bp, Homo sapiens
gcaatatccattaacataagattctcaaaactgtgtatcatagtagatttttctctaacagctttattgaaaatgcag

SEQ ID NO: 152979 - DNA, 80 bp, Homo sapiens
taacataagattctcaaaactgtgtatcatagtagatttttctctaacagctttattgaaaatgcagttatcatatcata

SEQ ID NO: 152980 - DNA, 77 bp, Homo sapiens
tgtgtatcatagtagatttttctctaacagctttattgaaaatgcagttatcatatcataaaattcagcttttaacg

SEQ ID NO: 152981 - DNA, 72 bp, Homo sapiens
gtagatttttctctaacagctttattgaaaatgcagttatcatatcataaaattcagcttttaacgttttta

SEQ ID NO: 152982 - DNA, 74 bp, Homo sapiens
atgcagttatcatatcataaaattcagcttttaacgtttttaattgagtggtttgtagtatagtcacagagttg

SEQ ID NO: 152983 - DNA, 73 bp, Homo sapiens
atcataaaattcagcttttaacgtttttaattgagtggtttgtagtatagtcacagagttgtgcaacaatcag

SEQ ID NO: 152984 - DNA, 75 bp, Homo sapiens
attcagcttttaacgtttttaattgagtggtttgtagtatagtcacagagttgtgcaacaatcagtgcgatcaat

SEQ ID NO: 152985 - DNA, 83 bp, Homo sapiens
tttaattgagtggtttgtagtatagtcacagagttgtgcaacaatcagtgcgatcaattgtggaatatttgcatcatcccaga

SEQ ID NO: 152986 - DNA, 84 bp, Homo sapiens
gtttgtagtatagtcacagagttgtgcaacaatcagtgcgatcaattgtggaatatttgcatcatcccagacagaaacacagaa

SEQ ID NO: 152987 - DNA, 86 bp, Homo sapiens
tatagtcacagagttgtgcaacaatcagtgcgatcaattgtggaatatttgcatcatcccagacagaaacacagaactcttgtcaa

SEQ ID NO: 152988 - DNA, 85 bp, Homo sapiens
agttgtgcaacaatcagtgcgatcaattgtggaatatttgcatcatcccagacagaaacacagaactcttgtcaatctgccttca

SEQ ID NO: 152989 - DNA, 80 bp, Homo sapiens
aatcagtgcgatcaattgtggaatatttgcatcatcccagacagaaacacagaactcttgtcaatctgccttcaggtttt

SEQ ID NO: 152990 - DNA, 76 bp, Homo sapiens
cgatcaattgtggaatatttgcatcatcccagacagaaacacagaactcttgtcaatctgccttcaggtttttttt

SEQ ID NO: 152991 - DNA, 78 bp, Homo sapiens
ctgtgcccagccctgccttcagtttttaccaatctgtagatttgtctattgtgtacatttcatagaaatggaatcata

SEQ ID NO: 152992 - DNA, 70 bp, Homo sapiens
atcatacaatatatggtccttttgggtctggtttcccttacttagtttaatgttttctggttcatgcctc

SEQ ID NO: 152993 - DNA, 68 bp, Homo sapiens
aatatatggtccttttgggtctggtttcccttacttagtttaatgttttctggttcatgcctcttgta

SEQ ID NO: 152994 - DNA, 70 bp, Homo sapiens
tttgggtctggtttcccttacttagtttaatgttttctggttcatgcctcttgtagtatgtatcagttct

SEQ ID NO: 152995 - DNA, 72 bp, Homo sapiens
tggtttcccttacttagtttaatgttttctggttcatgcctcttgtagtatgtatcagttcttctgtcttct

SEQ ID NO: 152996 - DNA, 72 bp, Homo sapiens
ccttacttagtttaatgttttctggttcatgcctcttgtagtatgtatcagttcttctgtcttcttctaaaa

SEQ ID NO: 152997 - DNA, 75 bp, Homo sapiens
tgttttctggttcatgcctcttgtagtatgtatcagttcttctgtcttcttctaaaattatggttaaaaagcatg

SEQ ID NO: 152998 - DNA, 75 bp, Homo sapiens
tctggttcatgcctcttgtagtatgtatcagttcttctgtcttcttctaaaattatggttaaaaagcatgtaacc

SEQ ID NO: 152999 - DNA, 73 bp, Homo sapiens
gcctcttgtagtatgtatcagttcttctgtcttcttctaaaattatggttaaaaagcatgtaacctaaatgta

SEQ ID NO: 153000 - DNA, 69 bp, Homo sapiens
gtatgtatcagttcttctgtcttcttctaaaattatggttaaaaagcatgtaacctaaatgtacctttt

SEQ ID NO: 153001 - DNA, 65 bp, Homo sapiens
gttcttctgtcttcttctaaaattatggttaaaaagcatgtaacctaaatgtaccttttttggtt

SEQ ID NO: 153002 - DNA, 79 bp, Homo sapiens
caaacaaaaaaacagtatttaagtgtgtattatagtgtcatgaatcatgtacatgtacaacagcagatctccaggacat

SEQ ID NO: 153003 - DNA, 78 bp, Homo sapiens
aaacagtatttaagtgtgtattatagtgtcatgaatcatgtacatgtacaacagcagatctccaggacattttcgttt

SEQ ID NO: 153004 - DNA, 83 bp, Homo sapiens
tatttaagtgtgtattatagtgtcatgaatcatgtacatgtacaacagcagatctccaggacattttcgttttgcttgactga

SEQ ID NO: 153005 - DNA, 84 bp, Homo sapiens
tgtattatagtgtcatgaatcatgtacatgtacaacagcagatctccaggacattttcgttttgcttgactgagactctatacc

SEQ ID NO: 153006 - DNA, 85 bp, Homo sapiens
tatagtgtcatgaatcatgtacatgtacaacagcagatctccaggacattttcgttttgcttgactgagactctatacccattga

SEQ ID NO: 153007 - DNA, 84 bp, Homo sapiens
tgtcatgaatcatgtacatgtacaacagcagatctccaggacattttcgttttgcttgactgagactctatacccattgaacaa

SEQ ID NO: 153008 - DNA, 80 bp, Homo sapiens
aatcatgtacatgtacaacagcagatctccaggacattttcgttttgcttgactgagactctatacccattgaacaacaa

SEQ ID NO: 153009 - DNA, 79 bp, Homo sapiens
atgtacatgtacaacagcagatctccaggacattttcgttttgcttgactgagactctatacccattgaacaacaactc

SEQ ID NO: 153010 - DNA, 77 bp, Homo sapiens
tacaacagcagatctccaggacattttcgttttgcttgactgagactctatacccattgaacaacaactcctgattt

SEQ ID NO: 153011 - DNA, 74 bp, Homo sapiens
agatctccaggacattttcgttttgcttgactgagactctatacccattgaacaacaactcctgattttctcct

SEQ ID NO: 153012 - DNA, 73 bp, Homo sapiens
atctccaggacattttcgttttgcttgactgagactctatacccattgaacaacaactcctgattttctcctt

SEQ ID NO: 153013 - DNA, 73 bp, Homo sapiens
acattttcgttttgcttgactgagactctatacccattgaacaacaactcctgattttctcctttgttcaatc

SEQ ID NO: 153014 - DNA, 73 bp, Homo sapiens
attttcgttttgcttgactgagactctatacccattgaacaacaactcctgattttctcctttgttcaatcca

SEQ ID NO: 153015 - DNA, 76 bp, Homo sapiens
ttttgcttgactgagactctatacccattgaacaacaactcctgattttctcctttgttcaatccatgacaactaa

SEQ ID NO: 153016 - DNA, 74 bp, Homo sapiens
actgagactctatacccattgaacaacaactcctgattttctcctttgttcaatccatgacaactaacattctt

SEQ ID NO: 153017 - DNA, 75 bp, Homo sapiens
ctctatacccattgaacaacaactcctgattttctcctttgttcaatccatgacaactaacattctttctgcttc

SEQ ID NO: 153018 - DNA, 76 bp, Homo sapiens
ttgaacaacaactcctgattttctcctttgttcaatccatgacaactaacattctttctgcttctgtgaatttgat

SEQ ID NO: 153019 - DNA, 78 bp, Homo sapiens
ctgattttctcctttgttcaatccatgacaactaacattctttctgcttctgtgaatttgattactttagacatctca

SEQ ID NO: 153020 - DNA, 78 bp, Homo sapiens
ttctcctttgttcaatccatgacaactaacattctttctgcttctgtgaatttgattactttagacatctcatgtaag

SEQ ID NO: 153021 - DNA, 82 bp, Homo sapiens
gttcaatccatgacaactaacattctttctgcttctgtgaatttgattactttagacatctcatgtaagtggaatcatgcag

SEQ ID NO: 153022 - DNA, 73 bp, Homo sapiens
gaataatattccaacatactttttcttttccatactaaagcatcttttctttatcagttcattggttgatgga

SEQ ID NO: 153023 - DNA, 72 bp, Homo sapiens
atattccaacatactttttcttttccatactaaagcatcttttctttatcagttcattggttgatggacatt

SEQ ID NO: 153024 - DNA, 78 bp, Homo sapiens
tcttttccatactaaagcatcttttctttatcagttcattggttgatggacatttagattgcttccacatcttgacta

SEQ ID NO: 153025 - DNA, 89 bp, Homo sapiens
ttgatggacatttagattgcttccacatcttgactattgtgagtaatgctacagtgaacatggatatgcagatatctctgagatctggt

SEQ ID NO: 153026 - DNA, 86 bp, Homo sapiens
tttagattgcttccacatcttgactattgtgagtaatgctacagtgaacatggatatgcagatatctctgagatctggttttcaat

SEQ ID NO: 153027 - DNA, 84 bp, Homo sapiens
attgcttccacatcttgactattgtgagtaatgctacagtgaacatggatatgcagatatctctgagatctggttttcaatttt

SEQ ID NO: 153028 - DNA, 79 bp, Homo sapiens
caggcatgagcaactgcacccagtgatgttcatttcttttggataaatacctagaatggcattggtggaacatagggta

SEQ ID NO: 153029 - DNA, 75 bp, Homo sapiens
caactgcacccagtgatgttcatttcttttggataaatacctagaatggcattggtggaacatagggtaattcta

SEQ ID NO: 153030 - DNA, 72 bp, Homo sapiens
ccagtgatgttcatttcttttggataaatacctagaatggcattggtggaacatagggtaattctactttta

SEQ ID NO: 153031 - DNA, 69 bp, Homo sapiens
atgttcatttcttttggataaatacctagaatggcattggtggaacatagggtaattctacttttattt

SEQ ID NO: 153032 - DNA, 74 bp, Homo sapiens
ccgcacccggcctacttttaatttgatgaacctctatagtgttttgcataattgctgcatcattttataagtcc

SEQ ID NO: 153033 - DNA, 75 bp, Homo sapiens
cggcctacttttaatttgatgaacctctatagtgttttgcataattgctgcatcattttataagtcctttgtcca

SEQ ID NO: 153034 - DNA, 78 bp, Homo sapiens
tttaatttgatgaacctctatagtgttttgcataattgctgcatcattttataagtcctttgtccatatacatatgtt

SEQ ID NO: 153035 - DNA, 78 bp, Homo sapiens
cctctatagtgttttgcataattgctgcatcattttataagtcctttgtccatatacatatgtttttaatgatactgg

SEQ ID NO: 153036 - DNA, 77 bp, Homo sapiens
gttttgcataattgctgcatcattttataagtcctttgtccatatacatatgtttttaatgatactgggcctctttg

SEQ ID NO: 153037 - DNA, 76 bp, Homo sapiens
aattgctgcatcattttataagtcctttgtccatatacatatgtttttaatgatactgggcctctttgtcacctag

SEQ ID NO: 153038 - DNA, 73 bp, Homo sapiens
tcattttataagtcctttgtccatatacatatgtttttaatgatactgggcctctttgtcacctagggtggaa

SEQ ID NO: 153039 - DNA, 74 bp, Homo sapiens
tataagtcctttgtccatatacatatgtttttaatgatactgggcctctttgtcacctagggtggaatacagtg

SEQ ID NO: 153040 - DNA, 77 bp, Homo sapiens
ttgtccatatacatatgtttttaatgatactgggcctctttgtcacctagggtggaatacagtggtgcagttatagc

SEQ ID NO: 153041 - DNA, 74 bp, Homo sapiens
aaaatgctgggattccagacatgagctactgtgcatatccctttgcatatttttaaatcttgttatttttaaaa

SEQ ID NO: 153042 - DNA, 76 bp, Homo sapiens
tatttttaaaaaatgaggtataagagttattcatatatcctggatattaaccaattatctgatgtatgatttgcaa

SEQ ID NO: 153043 - DNA, 76 bp, Homo sapiens
tttaaaaaatgaggtataagagttattcatatatcctggatattaaccaattatctgatgtatgatttgcaagtat

SEQ ID NO: 153044 - DNA, 76 bp, Homo sapiens
aaaaatgaggtataagagttattcatatatcctggatattaaccaattatctgatgtatgatttgcaagtattttc

SEQ ID NO: 153045 - DNA, 77 bp, Homo sapiens
aaatgaggtataagagttattcatatatcctggatattaaccaattatctgatgtatgatttgcaagtattttctcc

SEQ ID NO: 153046 - DNA, 70 bp, Homo sapiens
ttttaaaaaatttttacttgtgctttgggtctcatagccaggaaattcttgttccttccaatatcatgaa

SEQ ID NO: 153047 - DNA, 69 bp, Homo sapiens
aaatttttacttgtgctttgggtctcatagccaggaaattcttgttccttccaatatcatgaagttttt

SEQ ID NO: 153048 - DNA, 72 bp, Homo sapiens
ttgtgctttgggtctcatagccaggaaattcttgttccttccaatatcatgaagttttttcgtctgttttct

SEQ ID NO: 153049 - DNA, 72 bp, Homo sapiens
tgggtctcatagccaggaaattcttgttccttccaatatcatgaagttttttcgtctgttttcttctaggag

SEQ ID NO: 153050 - DNA, 70 bp, Homo sapiens
agccaggaaattcttgttccttccaatatcatgaagttttttcgtctgttttcttctaggagtttcatag

SEQ ID NO: 153051 - DNA, 70 bp, Homo sapiens
attcttgttccttccaatatcatgaagttttttcgtctgttttcttctaggagtttcatagttggaggtc

SEQ ID NO: 153052 - DNA, 70 bp, Homo sapiens
ttcttgttccttccaatatcatgaagttttttcgtctgttttcttctaggagtttcatagttggaggtct

SEQ ID NO: 153053 - DNA, 70 bp, Homo sapiens
gttccttccaatatcatgaagttttttcgtctgttttcttctaggagtttcatagttggaggtcttatgt

SEQ ID NO: 153054 - DNA, 70 bp, Homo sapiens
ccaatatcatgaagttttttcgtctgttttcttctaggagtttcatagttggaggtcttatgtttaggtc

SEQ ID NO: 153055 - DNA, 72 bp, Homo sapiens
ttcttctaggagtttcatagttggaggtcttatgtttaggtctttgatctattttatgataatttttatgta

SEQ ID NO: 153056 - DNA, 71 bp, Homo sapiens
ggagtttcatagttggaggtcttatgtttaggtctttgatctattttatgataatttttatgtaaggtgta

SEQ ID NO: 153057 - DNA, 72 bp, Homo sapiens
tatgtttaggtctttgatctattttatgataatttttatgtaaggtgtaaaatgagagttcatcttcgttct

SEQ ID NO: 153058 - DNA, 80 bp, Homo sapiens
tctttgatctattttatgataatttttatgtaaggtgtaaaatgagagttcatcttcgttcttcagcatgtgcatatcca

SEQ ID NO: 153059 - DNA, 78 bp, Homo sapiens
gatctattttatgataatttttatgtaaggtgtaaaatgagagttcatcttcgttcttcagcatgtgcatatccagtt

SEQ ID NO: 153060 - DNA, 77 bp, Homo sapiens
aatttttatgtaaggtgtaaaatgagagttcatcttcgttcttcagcatgtgcatatccagttttcacaataccatc

SEQ ID NO: 153061 - DNA, 79 bp, Homo sapiens
ttatgtaaggtgtaaaatgagagttcatcttcgttcttcagcatgtgcatatccagttttcacaataccatctgttaaa

SEQ ID NO: 153062 - DNA, 79 bp, Homo sapiens
taaaatgagagttcatcttcgttcttcagcatgtgcatatccagttttcacaataccatctgttaaagagactatcttt

SEQ ID NO: 153063 - DNA, 77 bp, Homo sapiens
agttcatcttcgttcttcagcatgtgcatatccagttttcacaataccatctgttaaagagactatcttttccccat

SEQ ID NO: 153064 - DNA, 78 bp, Homo sapiens
tcgttcttcagcatgtgcatatccagttttcacaataccatctgttaaagagactatcttttccccattgtgtagtct

SEQ ID NO: 153065 - DNA, 77 bp, Homo sapiens
atgtgcatatccagttttcacaataccatctgttaaagagactatcttttccccattgtgtagtcttggcactgttg

SEQ ID NO: 153066 - DNA, 74 bp, Homo sapiens
atccagttttcacaataccatctgttaaagagactatcttttccccattgtgtagtcttggcactgttgtcgaa

SEQ ID NO: 153067 - DNA, 74 bp, Homo sapiens
aataccatctgttaaagagactatcttttccccattgtgtagtcttggcactgttgtcgaaggtcatttgacca

SEQ ID NO: 153068 - DNA, 76 bp, Homo sapiens
taaagagactatcttttccccattgtgtagtcttggcactgttgtcgaaggtcatttgaccatgtatgtgatttat

SEQ ID NO: 153069 - DNA, 75 bp, Homo sapiens
actatcttttccccattgtgtagtcttggcactgttgtcgaaggtcatttgaccatgtatgtgatttatttcagg

SEQ ID NO: 153070 - DNA, 76 bp, Homo sapiens
ccattgtgtagtcttggcactgttgtcgaaggtcatttgaccatgtatgtgatttatttcagggatctctgttttt

SEQ ID NO: 153071 - DNA, 74 bp, Homo sapiens
tgtagtcttggcactgttgtcgaaggtcatttgaccatgtatgtgatttatttcagggatctctgttttttttt

SEQ ID NO: 153072 - DNA, 79 bp, Homo sapiens
attctgttccattgacttacatgtctatatttttatgccagtacaatattgttttgattaccatagcctcatgatatgt

SEQ ID NO: 153073 - DNA, 79 bp, Homo sapiens
gttccattgacttacatgtctatatttttatgccagtacaatattgttttgattaccatagcctcatgatatgttttga

SEQ ID NO: 153074 - DNA, 78 bp, Homo sapiens
cttacatgtctatatttttatgccagtacaatattgttttgattaccatagcctcatgatatgttttgaaatcaagaa

SEQ ID NO: 153075 - DNA, 77 bp, Homo sapiens
ttttatgccagtacaatattgttttgattaccatagcctcatgatatgttttgaaatcaagaaatgtaaggccttca

SEQ ID NO: 153076 - DNA, 75 bp, Homo sapiens
gccagtacaatattgttttgattaccatagcctcatgatatgttttgaaatcaagaaatgtaaggccttcagttt

SEQ ID NO: 153077 - DNA, 71 bp, Homo sapiens
atattgttttgattaccatagcctcatgatatgttttgaaatcaagaaatgtaaggccttcagtttttttt

SEQ ID NO: 153078 - DNA, 65 bp, Homo sapiens
tttttttcttctcaagattgttttgtttatttgggggttctttgaaattacacactaatttagga

SEQ ID NO: 153079 - DNA, 65 bp, Homo sapiens
cttctcaagattgttttgtttatttgggggttctttgaaattacacactaatttaggatagtttt

SEQ ID NO: 153080 - DNA, 65 bp, Homo sapiens
gttttgtttatttgggggttctttgaaattacacactaatttaggatagtttttttatttctgca

SEQ ID NO: 153081 - DNA, 64 bp, Homo sapiens
tttatttgggggttctttgaaattacacactaatttaggatagtttttttatttctgcaaaaaa

SEQ ID NO: 153082 - DNA, 64 bp, Homo sapiens
gggttctttgaaattacacactaatttaggatagtttttttatttctgcaaaaaaaaatggctt

SEQ ID NO: 153083 - DNA, 68 bp, Homo sapiens
tctttgaaattacacactaatttaggatagtttttttatttctgcaaaaaaaaatggcttttgagatg

SEQ ID NO: 153084 - DNA, 70 bp, Homo sapiens
tgaaattacacactaatttaggatagtttttttatttctgcaaaaaaaaatggcttttgagatgttgata

SEQ ID NO: 153085 - DNA, 71 bp, Homo sapiens
cacactaatttaggatagtttttttatttctgcaaaaaaaaatggcttttgagatgttgatagggatggca

SEQ ID NO: 153086 - DNA, 71 bp, Homo sapiens
taggatagtttttttatttctgcaaaaaaaaatggcttttgagatgttgatagggatggcattgactttag

SEQ ID NO: 153087 - DNA, 70 bp, Homo sapiens
ggatagtttttttatttctgcaaaaaaaaatggcttttgagatgttgatagggatggcattgactttagt

SEQ ID NO: 153088 - DNA, 70 bp, Homo sapiens
tttttatttctgcaaaaaaaaatggcttttgagatgttgatagggatggcattgactttagtttcctttg

SEQ ID NO: 153089 - DNA, 70 bp, Homo sapiens
atttctgcaaaaaaaaatggcttttgagatgttgatagggatggcattgactttagtttcctttgggtag

SEQ ID NO: 153090 - DNA, 71 bp, Homo sapiens
tttctgcaaaaaaaaatggcttttgagatgttgatagggatggcattgactttagtttcctttgggtagta

SEQ ID NO: 153091 - DNA, 70 bp, Homo sapiens
aaaaaaatggcttttgagatgttgatagggatggcattgactttagtttcctttgggtagtagggatatc

SEQ ID NO: 153092 - DNA, 72 bp, Homo sapiens
aatggcttttgagatgttgatagggatggcattgactttagtttcctttgggtagtagggatatcttaacaa

SEQ ID NO: 153093 - DNA, 71 bp, Homo sapiens
gagatgttgatagggatggcattgactttagtttcctttgggtagtagggatatcttaacaatattaagtt

SEQ ID NO: 153094 - DNA, 70 bp, Homo sapiens
tttgggtagtagggatatcttaacaatattaagttttccaatccatgaaaacaggctatctttccattta

SEQ ID NO: 153095 - DNA, 70 bp, Homo sapiens
tatttatatcttccgtaatttcatccaacagtgttttggagtgtacaaccatttctcctccttggttaag

SEQ ID NO: 153096 - DNA, 69 bp, Homo sapiens
tatcttccgtaatttcatccaacagtgttttggagtgtacaaccatttctcctccttggttaagtttat

SEQ ID NO: 153097 - DNA, 69 bp, Homo sapiens
tttcatccaacagtgttttggagtgtacaaccatttctcctccttggttaagtttattcttaagtattc

SEQ ID NO: 153098 - DNA, 67 bp, Homo sapiens
aacagtgttttggagtgtacaaccatttctcctccttggttaagtttattcttaagtattctattct

SEQ ID NO: 153099 - DNA, 71 bp, Homo sapiens
gagtgtacaaccatttctcctccttggttaagtttattcttaagtattctattcttttttatgctattgca

SEQ ID NO: 153100 - DNA, 69 bp, Homo sapiens
ctccttggttaagtttattcttaagtattctattcttttttatgctattgcaaatgtgattgttttaat

SEQ ID NO: 153101 - DNA, 70 bp, Homo sapiens
ttattcttaagtattctattcttttttatgctattgcaaatgtgattgttttaatttccttttatattgt

SEQ ID NO: 153102 - DNA, 74 bp, Homo sapiens
gtattctattcttttttatgctattgcaaatgtgattgttttaatttccttttatattgttcattatgagtata

SEQ ID NO: 153103 - DNA, 74 bp, Homo sapiens
ttcttttttatgctattgcaaatgtgattgttttaatttccttttatattgttcattatgagtatatagaaatg

SEQ ID NO: 153104 - DNA, 70 bp, Homo sapiens
ttaatttccttttatattgttcattatgagtatatagaaatgttcaggtttaattttgtatcttggaact

SEQ ID NO: 153105 - DNA, 73 bp, Homo sapiens
tttatattgttcattatgagtatatagaaatgttcaggtttaattttgtatcttggaactttgccgaatttgc

SEQ ID NO: 153106 - DNA, 72 bp, Homo sapiens
gttcattatgagtatatagaaatgttcaggtttaattttgtatcttggaactttgccgaatttgcttctttg

SEQ ID NO: 153107 - DNA, 71 bp, Homo sapiens
tatatagaaatgttcaggtttaattttgtatcttggaactttgccgaatttgcttctttgttctaatagcg

SEQ ID NO: 153108 - DNA, 71 bp, Homo sapiens
tgttcaggtttaattttgtatcttggaactttgccgaatttgcttctttgttctaatagcgtgtggaatct

SEQ ID NO: 153109 - DNA, 71 bp, Homo sapiens
tatcttggaactttgccgaatttgcttctttgttctaatagcgtgtggaatctttagggtttcctacataa

SEQ ID NO: 153110 - DNA, 77 bp, Homo sapiens
atgtcatctgcaaagagataatttggctccttgcttccctatttattgcctaattactctgctaggacttcaaataa

SEQ ID NO: 153111 - DNA, 75 bp, Homo sapiens
caaagagataatttggctccttgcttccctatttattgcctaattactctgctaggacttcaaataatgtgttga

SEQ ID NO: 153112 - DNA, 74 bp, Homo sapiens
agataatttggctccttgcttccctatttattgcctaattactctgctaggacttcaaataatgtgttgaatag

SEQ ID NO: 153113 - DNA, 76 bp, Homo sapiens
ttgcttccctatttattgcctaattactctgctaggacttcaaataatgtgttgaataggttgctacagtggtata

SEQ ID NO: 153114 - DNA, 75 bp, Homo sapiens
tccctatttattgcctaattactctgctaggacttcaaataatgtgttgaataggttgctacagtggtatatttc

SEQ ID NO: 153115 - DNA, 75 bp, Homo sapiens
tgctaggacttcaaataatgtgttgaataggttgctacagtggtatatttcccttgctctttatcttagaggaaa

SEQ ID NO: 153116 - DNA, 72 bp, Homo sapiens
acttcaaataatgtgttgaataggttgctacagtggtatatttcccttgctctttatcttagaggaaaagct

SEQ ID NO: 153117 - DNA, 72 bp, Homo sapiens
aatgtgttgaataggttgctacagtggtatatttcccttgctctttatcttagaggaaaagctttcagtgtt

SEQ ID NO: 153118 - DNA, 76 bp, Homo sapiens
tggtatatttcccttgctctttatcttagaggaaaagctttcagtgtttcactgtcaagcatattagctgtggtct

SEQ ID NO: 153119 - DNA, 76 bp, Homo sapiens
ccttgctctttatcttagaggaaaagctttcagtgtttcactgtcaagcatattagctgtggtctttttatatata

SEQ ID NO: 153120 - DNA, 75 bp, Homo sapiens
ctctttatcttagaggaaaagctttcagtgtttcactgtcaagcatattagctgtggtctttttatatatagtct

SEQ ID NO: 153121 - DNA, 75 bp, Homo sapiens
ggaaaagctttcagtgtttcactgtcaagcatattagctgtggtctttttatatatagtctttattatatttatg

SEQ ID NO: 153122 - DNA, 76 bp, Homo sapiens
gctttcagtgtttcactgtcaagcatattagctgtggtctttttatatatagtctttattatatttatgtaattac

SEQ ID NO: 153123 - DNA, 73 bp, Homo sapiens
tttcactgtcaagcatattagctgtggtctttttatatatagtctttattatatttatgtaattacttttttg

SEQ ID NO: 153124 - DNA, 70 bp, Homo sapiens
aagcatattagctgtggtctttttatatatagtctttattatatttatgtaattacttttttgtttgtgt

SEQ ID NO: 153125 - DNA, 73 bp, Homo sapiens
ctgtgactacagccatgcaccaccatactccgctgatttttaacctttttgtacaggtcaggttttactatgt

SEQ ID NO: 153126 - DNA, 72 bp, Homo sapiens
acagccatgcaccaccatactccgctgatttttaacctttttgtacaggtcaggttttactatgttgcctag

SEQ ID NO: 153127 - DNA, 68 bp, Homo sapiens
accatactccgctgatttttaacctttttgtacaggtcaggttttactatgttgcctaggtgggtcta

SEQ ID NO: 153128 - DNA, 71 bp, Homo sapiens
accatacctggcatgtaatttctttttattcctagtttgttgagtgctttcttttcagtcatgaaaggtag

SEQ ID NO: 153129 - DNA, 71 bp, Homo sapiens
cctggcatgtaatttctttttattcctagtttgttgagtgctttcttttcagtcatgaaaggtagttgaat

SEQ ID NO: 153130 - DNA, 71 bp, Homo sapiens
tctttttattcctagtttgttgagtgctttcttttcagtcatgaaaggtagttgaattttgtcagatgttt

SEQ ID NO: 153131 - DNA, 72 bp, Homo sapiens
cctagtttgttgagtgctttcttttcagtcatgaaaggtagttgaattttgtcagatgttttttctacctca

SEQ ID NO: 153132 - DNA, 74 bp, Homo sapiens
tgttgagtgctttcttttcagtcatgaaaggtagttgaattttgtcagatgttttttctacctcaagtgtgaag

SEQ ID NO: 153133 - DNA, 72 bp, Homo sapiens
cttttcagtcatgaaaggtagttgaattttgtcagatgttttttctacctcaagtgtgaaggtcatgtagtt

SEQ ID NO: 153134 - DNA, 71 bp, Homo sapiens
cagtcatgaaaggtagttgaattttgtcagatgttttttctacctcaagtgtgaaggtcatgtagtttttt

SEQ ID NO: 153135 - DNA, 69 bp, Homo sapiens
tgaaaggtagttgaattttgtcagatgttttttctacctcaagtgtgaaggtcatgtagtttttttggg

SEQ ID NO: 153136 - DNA, 68 bp, Homo sapiens
gtagttgaattttgtcagatgttttttctacctcaagtgtgaaggtcatgtagtttttttggggtcct

SEQ ID NO: 153137 - DNA, 68 bp, Homo sapiens
attttgtcagatgttttttctacctcaagtgtgaaggtcatgtagtttttttggggtcctttattctg

SEQ ID NO: 153138 - DNA, 68 bp, Homo sapiens
ttttgtcagatgttttttctacctcaagtgtgaaggtcatgtagtttttttggggtcctttattctgt

SEQ ID NO: 153139 - DNA, 69 bp, Homo sapiens
gtcagatgttttttctacctcaagtgtgaaggtcatgtagtttttttggggtcctttattctgttaatg

SEQ ID NO: 153140 - DNA, 70 bp, Homo sapiens
tttttctacctcaagtgtgaaggtcatgtagtttttttggggtcctttattctgttaatgtgctgtattc

SEQ ID NO: 153141 - DNA, 71 bp, Homo sapiens
ttttctacctcaagtgtgaaggtcatgtagtttttttggggtcctttattctgttaatgtgctgtattctg

SEQ ID NO: 153142 - DNA, 72 bp, Homo sapiens
tacctcaagtgtgaaggtcatgtagtttttttggggtcctttattctgttaatgtgctgtattctgttgatt

SEQ ID NO: 153143 - DNA, 70 bp, Homo sapiens
caagtgtgaaggtcatgtagtttttttggggtcctttattctgttaatgtgctgtattctgttgattttt

SEQ ID NO: 153144 - DNA, 71 bp, Homo sapiens
tttttctatttttgaaccatcgttgcattccaagattaaattccacttggtcatgatgtatatttcttttt

SEQ ID NO: 153145 - DNA, 65 bp, Homo sapiens
cccttttttttttctccagctggccctaacgggagccgtatgtttcttttaatgtgctatttaat

SEQ ID NO: 153146 - DNA, 71 bp, Homo sapiens
tttctccagctggccctaacgggagccgtatgtttcttttaatgtgctatttaatttgatatactagtatt

SEQ ID NO: 153147 - DNA, 70 bp, Homo sapiens
ccagctggccctaacgggagccgtatgtttcttttaatgtgctatttaatttgatatactagtattttgt

SEQ ID NO: 153148 - DNA, 76 bp, Homo sapiens
ggatttttgcatcagtatttataaaagatgttgctctgtagtttatcttttcatttctatatgctctagtctttgt

SEQ ID NO: 153149 - DNA, 76 bp, Homo sapiens
gcatcagtatttataaaagatgttgctctgtagtttatcttttcatttctatatgctctagtctttgtttctttcc

SEQ ID NO: 153150 - DNA, 72 bp, Homo sapiens
aaaagatgttgctctgtagtttatcttttcatttctatatgctctagtctttgtttctttccttctaccaac

SEQ ID NO: 153151 - DNA, 72 bp, Homo sapiens
gctctgtagtttatcttttcatttctatatgctctagtctttgtttctttccttctaccaactttgggctta

SEQ ID NO: 153152 - DNA, 70 bp, Homo sapiens
gtagtttatcttttcatttctatatgctctagtctttgtttctttccttctaccaactttgggcttagat

SEQ ID NO: 153153 - DNA, 71 bp, Homo sapiens
ttcatttctatatgctctagtctttgtttctttccttctaccaactttgggcttagatttatttttctgtc

SEQ ID NO: 153154 - DNA, 70 bp, Homo sapiens
atatgctctagtctttgtttctttccttctaccaactttgggcttagatttatttttctgtcttctcgag

SEQ ID NO: 153155 - DNA, 67 bp, Homo sapiens
gtctttgtttctttccttctaccaactttgggcttagatttatttttctgtcttctcgaggtgtaaa

SEQ ID NO: 153156 - DNA, 68 bp, Homo sapiens
tccttctaccaactttgggcttagatttatttttctgtcttctcgaggtgtaaatttaggttgttgag

SEQ ID NO: 153157 - DNA, 67 bp, Homo sapiens
accaactttgggcttagatttatttttctgtcttctcgaggtgtaaatttaggttgttgagttgaaa

SEQ ID NO: 153158 - DNA, 66 bp, Homo sapiens
gggcttagatttatttttctgtcttctcgaggtgtaaatttaggttgttgagttgaaaactttgtt

SEQ ID NO: 153159 - DNA, 68 bp, Homo sapiens
ttttctgtcttctcgaggtgtaaatttaggttgttgagttgaaaactttgtttttcaatgttggcatt

SEQ ID NO: 153160 - DNA, 70 bp, Homo sapiens
ctcgaggtgtaaatttaggttgttgagttgaaaactttgtttttcaatgttggcatttactgatacagac

SEQ ID NO: 153161 - DNA, 70 bp, Homo sapiens
ggtgtaaatttaggttgttgagttgaaaactttgtttttcaatgttggcatttactgatacagacttctc

SEQ ID NO: 153162 - DNA, 71 bp, Homo sapiens
aggttgttgagttgaaaactttgtttttcaatgttggcatttactgatacagacttctctcttagtagtgt

SEQ ID NO: 153163 - DNA, 74 bp, Homo sapiens
tttgtttttcaatgttggcatttactgatacagacttctctcttagtagtgtttttgctgcatcccataagttt

SEQ ID NO: 153164 - DNA, 73 bp, Homo sapiens
aatgttggcatttactgatacagacttctctcttagtagtgtttttgctgcatcccataagttttgtgttttt

SEQ ID NO: 153165 - DNA, 69 bp, Homo sapiens
agatattttcaaatttcccttgtgatttcttctttcttccattgattgttcaagagtttgttgtttaat

SEQ ID NO: 153166 - DNA, 69 bp, Homo sapiens
tcttctttcttccattgattgttcaagagtttgttgtttaatttccacctattggtggatttttcagtt

SEQ ID NO: 153167 - DNA, 69 bp, Homo sapiens
tcttccattgattgttcaagagtttgttgtttaatttccacctattggtggatttttcagtttttgtac

SEQ ID NO: 153168 - DNA, 70 bp, Homo sapiens
gattgttcaagagtttgttgtttaatttccacctattggtggatttttcagtttttgtactgatactgat

SEQ ID NO: 153169 - DNA, 72 bp, Homo sapiens
tttaatttccacctattggtggatttttcagtttttgtactgatactgatttctagtttcacttgattgtga

SEQ ID NO: 153170 - DNA, 75 bp, Homo sapiens
cacctattggtggatttttcagtttttgtactgatactgatttctagtttcacttgattgtgactggaacagata

SEQ ID NO: 153171 - DNA, 76 bp, Homo sapiens
gtggatttttcagtttttgtactgatactgatttctagtttcacttgattgtgactggaacagatacttggtatga

SEQ ID NO: 153172 - DNA, 77 bp, Homo sapiens
tttcagtttttgtactgatactgatttctagtttcacttgattgtgactggaacagatacttggtatgatttcagtc

SEQ ID NO: 153173 - DNA, 78 bp, Homo sapiens
gtttttgtactgatactgatttctagtttcacttgattgtgactggaacagatacttggtatgatttcagtcttcata

SEQ ID NO: 153174 - DNA, 78 bp, Homo sapiens
gtactgatactgatttctagtttcacttgattgtgactggaacagatacttggtatgatttcagtcttcataaatttg

SEQ ID NO: 153175 - DNA, 76 bp, Homo sapiens
ctgatttctagtttcacttgattgtgactggaacagatacttggtatgatttcagtcttcataaatttgttaagac

SEQ ID NO: 153176 - DNA, 76 bp, Homo sapiens
ctagtttcacttgattgtgactggaacagatacttggtatgatttcagtcttcataaatttgttaagacttgtgtg

SEQ ID NO: 153177 - DNA, 77 bp, Homo sapiens
tttcacttgattgtgactggaacagatacttggtatgatttcagtcttcataaatttgttaagacttgtgtggctgg

SEQ ID NO: 153178 - DNA, 78 bp, Homo sapiens
acttgattgtgactggaacagatacttggtatgatttcagtcttcataaatttgttaagacttgtgtggctgggcatg

SEQ ID NO: 153179 - DNA, 80 bp, Homo sapiens
ttgtgactggaacagatacttggtatgatttcagtcttcataaatttgttaagacttgtgtggctgggcatggcagctta

SEQ ID NO: 153180 - DNA, 79 bp, Homo sapiens
gaacagatacttggtatgatttcagtcttcataaatttgttaagacttgtgtggctgggcatggcagcttacgcctgta

SEQ ID NO: 153181 - DNA, 78 bp, Homo sapiens
aacagatacttggtatgatttcagtcttcataaatttgttaagacttgtgtggctgggcatggcagcttacgcctgta

SEQ ID NO: 153182 - DNA, 77 bp, Homo sapiens
tgtgtattctgctgctgtttggtattggtgttttatatatgtttgttatatgcaattgttcaagtcctctgtttctt

SEQ ID NO: 153183 - DNA, 77 bp, Homo sapiens
ctgctgctgtttggtattggtgttttatatatgtttgttatatgcaattgttcaagtcctctgtttctttattgatc

SEQ ID NO: 153184 - DNA, 75 bp, Homo sapiens
ggtattggtgttttatatatgtttgttatatgcaattgttcaagtcctctgtttctttattgatcttcattgtgg

SEQ ID NO: 153185 - DNA, 77 bp, Homo sapiens
gtgttttatatatgtttgttatatgcaattgttcaagtcctctgtttctttattgatcttcattgtggttctctcca

SEQ ID NO: 153186 - DNA, 75 bp, Homo sapiens
tgtttgttatatgcaattgttcaagtcctctgtttctttattgatcttcattgtggttctctccattattttaac

SEQ ID NO: 153187 - DNA, 75 bp, Homo sapiens
tgcaattgttcaagtcctctgtttctttattgatcttcattgtggttctctccattattttaacgtggagtatta

SEQ ID NO: 153188 - DNA, 72 bp, Homo sapiens
caagtcctctgtttctttattgatcttcattgtggttctctccattattttaacgtggagtattaaaatctc

SEQ ID NO: 153189 - DNA, 72 bp, Homo sapiens
ctctgtttctttattgatcttcattgtggttctctccattattttaacgtggagtattaaaatctccttgtg

SEQ ID NO: 153190 - DNA, 73 bp, Homo sapiens
tgatcttcattgtggttctctccattattttaacgtggagtattaaaatctccttgtgttactctatttctcc

SEQ ID NO: 153191 - DNA, 70 bp, Homo sapiens
ttcattgtggttctctccattattttaacgtggagtattaaaatctccttgtgttactctatttctcctt

SEQ ID NO: 153192 - DNA, 71 bp, Homo sapiens
ctctccattattttaacgtggagtattaaaatctccttgtgttactctatttctcctttcaattctgtcat

SEQ ID NO: 153193 - DNA, 71 bp, Homo sapiens
tattttaacgtggagtattaaaatctccttgtgttactctatttctcctttcaattctgtcattatttgct

SEQ ID NO: 153194 - DNA, 73 bp, Homo sapiens
tccttgtgttactctatttctcctttcaattctgtcattatttgctttttatatttgggtggtctgatgttag

SEQ ID NO: 153195 - DNA, 73 bp, Homo sapiens
gtgttactctatttctcctttcaattctgtcattatttgctttttatatttgggtggtctgatgttaggtgaa

SEQ ID NO: 153196 - DNA, 73 bp, Homo sapiens
tcctttcaattctgtcattatttgctttttatatttgggtggtctgatgttaggtgaattacgtatttgcaag

SEQ ID NO: 153197 - DNA, 75 bp, Homo sapiens
tctgtcattatttgctttttatatttgggtggtctgatgttaggtgaattacgtatttgcaagtgttatagcttc

SEQ ID NO: 153198 - DNA, 74 bp, Homo sapiens
tttgctttttatatttgggtggtctgatgttaggtgaattacgtatttgcaagtgttatagcttcctgatgaat

SEQ ID NO: 153199 - DNA, 75 bp, Homo sapiens
tttatatttgggtggtctgatgttaggtgaattacgtatttgcaagtgttatagcttcctgatgaattgactgtt

SEQ ID NO: 153200 - DNA, 78 bp, Homo sapiens
tgggtggtctgatgttaggtgaattacgtatttgcaagtgttatagcttcctgatgaattgactgttttattatcata

SEQ ID NO: 153201 - DNA, 79 bp, Homo sapiens
gatgttaggtgaattacgtatttgcaagtgttatagcttcctgatgaattgactgttttattatcatatcatgtgttcc

SEQ ID NO: 153202 - DNA, 78 bp, Homo sapiens
gaattacgtatttgcaagtgttatagcttcctgatgaattgactgttttattatcatatcatgtgttcctttgtctct

SEQ ID NO: 153203 - DNA, 76 bp, Homo sapiens
agcttcctgatgaattgactgttttattatcatatcatgtgttcctttgtctcttgtgacagtgttttacctaaag

SEQ ID NO: 153204 - DNA, 76 bp, Homo sapiens
ctgatgaattgactgttttattatcatatcatgtgttcctttgtctcttgtgacagtgttttacctaaagtgtatt

SEQ ID NO: 153205 - DNA, 72 bp, Homo sapiens
gactgttttattatcatatcatgtgttcctttgtctcttgtgacagtgttttacctaaagtgtattttgttt

SEQ ID NO: 153206 - DNA, 74 bp, Homo sapiens
catatcatgtgttcctttgtctcttgtgacagtgttttacctaaagtgtattttgttttatataagtatggcca

SEQ ID NO: 153207 - DNA, 68 bp, Homo sapiens
ttcctttgtctcttgtgacagtgttttacctaaagtgtattttgttttatataagtatggccaaaacc

SEQ ID NO: 153208 - DNA, 70 bp, Homo sapiens
gtctcttgtgacagtgttttacctaaagtgtattttgttttatataagtatggccaaaacctctgctttc

SEQ ID NO: 153209 - DNA, 67 bp, Homo sapiens
gacagtgttttacctaaagtgtattttgttttatataagtatggccaaaacctctgctttcttttgt

SEQ ID NO: 153210 - DNA, 69 bp, Homo sapiens
cctaaagtgtattttgttttatataagtatggccaaaacctctgctttcttttgtttaccactggcata

SEQ ID NO: 153211 - DNA, 72 bp, Homo sapiens
tttgttttatataagtatggccaaaacctctgctttcttttgtttaccactggcatagaatatctttttgca

SEQ ID NO: 153212 - DNA, 76 bp, Homo sapiens
ccaaaacctctgctttcttttgtttaccactggcatagaatatctttttgcagccattcacgttcagcctctgtga

SEQ ID NO: 153213 - DNA, 78 bp, Homo sapiens
tgctttcttttgtttaccactggcatagaatatctttttgcagccattcacgttcagcctctgtgaagtgagatttaa

SEQ ID NO: 153214 - DNA, 79 bp, Homo sapiens
ttgtttaccactggcatagaatatctttttgcagccattcacgttcagcctctgtgaagtgagatttaaggctcactta

SEQ ID NO: 153215 - DNA, 78 bp, Homo sapiens
actggcatagaatatctttttgcagccattcacgttcagcctctgtgaagtgagatttaaggctcacttaaatcttag

SEQ ID NO: 153216 - DNA, 76 bp, Homo sapiens
tatctttttgcagccattcacgttcagcctctgtgaagtgagatttaaggctcacttaaatcttaggtgagccttt

SEQ ID NO: 153217 - DNA, 78 bp, Homo sapiens
tttgcagccattcacgttcagcctctgtgaagtgagatttaaggctcacttaaatcttaggtgagccttttatagata

SEQ ID NO: 153218 - DNA, 73 bp, Homo sapiens
acgttcagcctctgtgaagtgagatttaaggctcacttaaatcttaggtgagccttttatagatagtacctaa

SEQ ID NO: 153219 - DNA, 73 bp, Homo sapiens
ctgtgaagtgagatttaaggctcacttaaatcttaggtgagccttttatagatagtacctaattgtataatgg

SEQ ID NO: 153220 - DNA, 72 bp, Homo sapiens
gtgagatttaaggctcacttaaatcttaggtgagccttttatagatagtacctaattgtataatggttttca

SEQ ID NO: 153221 - DNA, 73 bp, Homo sapiens
ggctcacttaaatcttaggtgagccttttatagatagtacctaattgtataatggttttcattcactcaacca

SEQ ID NO: 153222 - DNA, 74 bp, Homo sapiens
tcttaggtgagccttttatagatagtacctaattgtataatggttttcattcactcaaccactctatctttaga

SEQ ID NO: 153223 - DNA, 73 bp, Homo sapiens
gtgagccttttatagatagtacctaattgtataatggttttcattcactcaaccactctatctttagattggg

SEQ ID NO: 153224 - DNA, 73 bp, Homo sapiens
tagatagtacctaattgtataatggttttcattcactcaaccactctatctttagattggggagtttaatcca

SEQ ID NO: 153225 - DNA, 69 bp, Homo sapiens
acctaattgtataatggttttcattcactcaaccactctatctttagattggggagtttaatccatttt

SEQ ID NO: 153226 - DNA, 69 bp, Homo sapiens
taatggttttcattcactcaaccactctatctttagattggggagtttaatccattttttttcttatag

SEQ ID NO: 153227 - DNA, 69 bp, Homo sapiens
cattcactcaaccactctatctttagattggggagtttaatccattttttttcttatagtaattgcttt

SEQ ID NO: 153228 - DNA, 65 bp, Homo sapiens
caaccactctatctttagattggggagtttaatccattttttttcttatagtaattgcttttttt

SEQ ID NO: 153229 - DNA, 66 bp, Homo sapiens
tggggctacaggtgccttccaccacccccggttaattttgtgtggtttttcatttttaatagatac

SEQ ID NO: 153230 - DNA, 64 bp, Homo sapiens
ctacaggtgccttccaccacccccggttaattttgtgtggtttttcatttttaatagatacggg

SEQ ID NO: 153231 - DNA, 71 bp, Homo sapiens
gagccactgtggcctgtatttggcctcattttttgttaaagtaattacagacaaagatttgttattaccat

SEQ ID NO: 153232 - DNA, 70 bp, Homo sapiens
ctgtggcctgtatttggcctcattttttgttaaagtaattacagacaaagatttgttattaccattttgc

SEQ ID NO: 153233 - DNA, 69 bp, Homo sapiens
tggcctcattttttgttaaagtaattacagacaaagatttgttattaccattttgctaattgtttctcg

SEQ ID NO: 153234 - DNA, 69 bp, Homo sapiens
tttgttaaagtaattacagacaaagatttgttattaccattttgctaattgtttctcgtctggtttgta

SEQ ID NO: 153235 - DNA, 71 bp, Homo sapiens
tgttaaagtaattacagacaaagatttgttattaccattttgctaattgtttctcgtctggtttgtagctg

SEQ ID NO: 153236 - DNA, 71 bp, Homo sapiens
taattacagacaaagatttgttattaccattttgctaattgtttctcgtctggtttgtagctgttttgtcc

SEQ ID NO: 153237 - DNA, 70 bp, Homo sapiens
attacagacaaagatttgttattaccattttgctaattgtttctcgtctggtttgtagctgttttgtccc

SEQ ID NO: 153238 - DNA, 68 bp, Homo sapiens
aagatttgttattaccattttgctaattgtttctcgtctggtttgtagctgttttgtcccccttttgc

SEQ ID NO: 153239 - DNA, 69 bp, Homo sapiens
ttgttattaccattttgctaattgtttctcgtctggtttgtagctgttttgtcccccttttgctgtctt

SEQ ID NO: 153240 - DNA, 71 bp, Homo sapiens
ttattaccattttgctaattgtttctcgtctggtttgtagctgttttgtcccccttttgctgtctttctgc

SEQ ID NO: 153241 - DNA, 69 bp, Homo sapiens
attttgctaattgtttctcgtctggtttgtagctgttttgtcccccttttgctgtctttctgccttcct

SEQ ID NO: 153242 - DNA, 68 bp, Homo sapiens
taattgtttctcgtctggtttgtagctgttttgtcccccttttgctgtctttctgccttccttgtttt

SEQ ID NO: 153243 - DNA, 67 bp, Homo sapiens
tttctcgtctggtttgtagctgttttgtcccccttttgctgtctttctgccttccttgttttttgtt

SEQ ID NO: 153244 - DNA, 71 bp, Homo sapiens
tttttttaattgacatactttgttttctttatcatttcattttatgtatcttcaataggcattttccatgt

SEQ ID NO: 153245 - DNA, 72 bp, Homo sapiens
ctttgttttctttatcatttcattttatgtatcttcaataggcattttccatgttgttaccatggggcttaa

SEQ ID NO: 153246 - DNA, 74 bp, Homo sapiens
atcatttcattttatgtatcttcaataggcattttccatgttgttaccatggggcttaaataaaacatcttaca

SEQ ID NO: 153247 - DNA, 73 bp, Homo sapiens
tttatgtatcttcaataggcattttccatgttgttaccatggggcttaaataaaacatcttacaggtacagta

SEQ ID NO: 153248 - DNA, 73 bp, Homo sapiens
gtatcttcaataggcattttccatgttgttaccatggggcttaaataaaacatcttacaggtacagtaatcta

SEQ ID NO: 153249 - DNA, 71 bp, Homo sapiens
ggcattttccatgttgttaccatggggcttaaataaaacatcttacaggtacagtaatctattttaagctg

SEQ ID NO: 153250 - DNA, 70 bp, Homo sapiens
ccatgttgttaccatggggcttaaataaaacatcttacaggtacagtaatctattttaagctgttaacaa

SEQ ID NO: 153251 - DNA, 69 bp, Homo sapiens
ccatggggcttaaataaaacatcttacaggtacagtaatctattttaagctgttaacaacttaagttga

SEQ ID NO: 153252 - DNA, 69 bp, Homo sapiens
gggcttaaataaaacatcttacaggtacagtaatctattttaagctgttaacaacttaagttgaatgta

SEQ ID NO: 153253 - DNA, 70 bp, Homo sapiens
taaaacatcttacaggtacagtaatctattttaagctgttaacaacttaagttgaatgtatataaaactc

SEQ ID NO: 153254 - DNA, 69 bp, Homo sapiens
aaaacatcttacaggtacagtaatctattttaagctgttaacaacttaagttgaatgtatataaaactc

SEQ ID NO: 153255 - DNA, 69 bp, Homo sapiens
catcttacaggtacagtaatctattttaagctgttaacaacttaagttgaatgtatataaaactctttt

SEQ ID NO: 153256 - DNA, 67 bp, Homo sapiens
caggtacagtaatctattttaagctgttaacaacttaagttgaatgtatataaaactctttttttcc

SEQ ID NO: 153257 - DNA, 66 bp, Homo sapiens
gtacagtaatctattttaagctgttaacaacttaagttgaatgtatataaaactctttttttcccc

SEQ ID NO: 153258 - DNA, 65 bp, Homo sapiens
gtaatctattttaagctgttaacaacttaagttgaatgtatataaaactctttttttccccccaa

SEQ ID NO: 153259 - DNA, 63 bp, Homo sapiens
ctattttaagctgttaacaacttaagttgaatgtatataaaactctttttttccccccaattt

SEQ ID NO: 153260 - DNA, 62 bp, Homo sapiens
ttaagctgttaacaacttaagttgaatgtatataaaactctttttttccccccaattttttt

SEQ ID NO: 153261 - DNA, 63 bp, Homo sapiens
taacaacttaagttgaatgtatataaaactctttttttccccccaattttttttcaaggcgga

SEQ ID NO: 153262 - DNA, 64 bp, Homo sapiens
cttaagttgaatgtatataaaactctttttttccccccaattttttttcaaggcggagtcttgc

SEQ ID NO: 153263 - DNA, 70 bp, Homo sapiens
attacaagcattagccactgcgcctgccctgtaaaactcatatttccccttccccactttgttgttgttt

SEQ ID NO: 153264 - DNA, 67 bp, Homo sapiens
accatgttgaccagtttttatttcttttggttatatccctaggagtagaattcctgggtcatttggt

SEQ ID NO: 153265 - DNA, 67 bp, Homo sapiens
gttgaccagtttttatttcttttggttatatccctaggagtagaattcctgggtcatttggttattc

SEQ ID NO: 153266 - DNA, 69 bp, Homo sapiens
tttcttttggttatatccctaggagtagaattcctgggtcatttggttattctatattcaaccctttga

SEQ ID NO: 153267 - DNA, 69 bp, Homo sapiens
tttggttatatccctaggagtagaattcctgggtcatttggttattctatattcaaccctttgagtaac

SEQ ID NO: 153268 - DNA, 73 bp, Homo sapiens
taggagtagaattcctgggtcatttggttattctatattcaaccctttgagtaactgccaggatgttttgcaa

SEQ ID NO: 153269 - DNA, 72 bp, Homo sapiens
aattcctgggtcatttggttattctatattcaaccctttgagtaactgccaggatgttttgcaaggctgctt

SEQ ID NO: 153270 - DNA, 74 bp, Homo sapiens
atttggttattctatattcaaccctttgagtaactgccaggatgttttgcaaggctgctttaccataatatatc

SEQ ID NO: 153271 - DNA, 75 bp, Homo sapiens
ttattctatattcaaccctttgagtaactgccaggatgttttgcaaggctgctttaccataatatatccctccta

SEQ ID NO: 153272 - DNA, 77 bp, Homo sapiens
attcaaccctttgagtaactgccaggatgttttgcaaggctgctttaccataatatatccctcctagcaatgtatga

SEQ ID NO: 153273 - DNA, 75 bp, Homo sapiens
accctttgagtaactgccaggatgttttgcaaggctgctttaccataatatatccctcctagcaatgtatgaggg

SEQ ID NO: 153274 - DNA, 77 bp, Homo sapiens
ttgagtaactgccaggatgttttgcaaggctgctttaccataatatatccctcctagcaatgtatgagggttccact

SEQ ID NO: 153275 - DNA, 77 bp, Homo sapiens
taactgccaggatgttttgcaaggctgctttaccataatatatccctcctagcaatgtatgagggttccacttcctc

SEQ ID NO: 153276 - DNA, 77 bp, Homo sapiens
aggatgttttgcaaggctgctttaccataatatatccctcctagcaatgtatgagggttccacttcctccatatgct

SEQ ID NO: 153277 - DNA, 80 bp, Homo sapiens
atgttttgcaaggctgctttaccataatatatccctcctagcaatgtatgagggttccacttcctccatatgcttgctga

SEQ ID NO: 153278 - DNA, 79 bp, Homo sapiens
caaggctgctttaccataatatatccctcctagcaatgtatgagggttccacttcctccatatgcttgctgacacttta

SEQ ID NO: 153279 - DNA, 78 bp, Homo sapiens
ctgctttaccataatatatccctcctagcaatgtatgagggttccacttcctccatatgcttgctgacactttatttg

SEQ ID NO: 153280 - DNA, 78 bp, Homo sapiens
taccataatatatccctcctagcaatgtatgagggttccacttcctccatatgcttgctgacactttatttggttata

SEQ ID NO: 153281 - DNA, 76 bp, Homo sapiens
tgtatgagggttccacttcctccatatgcttgctgacactttatttggttatagccgtccttttgggtgtggagca

SEQ ID NO: 153282 - DNA, 77 bp, Homo sapiens
ttccacttcctccatatgcttgctgacactttatttggttatagccgtccttttgggtgtggagcagtggtatctca

SEQ ID NO: 153283 - DNA, 77 bp, Homo sapiens
ctccatatgcttgctgacactttatttggttatagccgtccttttgggtgtggagcagtggtatctcattatgattt

SEQ ID NO: 153284 - DNA, 76 bp, Homo sapiens
atgcttgctgacactttatttggttatagccgtccttttgggtgtggagcagtggtatctcattatgattttcatt

SEQ ID NO: 153285 - DNA, 74 bp, Homo sapiens
acactttatttggttatagccgtccttttgggtgtggagcagtggtatctcattatgattttcatttgcattcc

SEQ ID NO: 153286 - DNA, 84 bp, Homo sapiens
tgtggagcagtggtatctcattatgattttcatttgcattcctctgctggctaatgatgttcaatatattttcatatacttttg

SEQ ID NO: 153287 - DNA, 80 bp, Homo sapiens
ggtatctcattatgattttcatttgcattcctctgctggctaatgatgttcaatatattttcatatacttttgggtcatt

SEQ ID NO: 153288 - DNA, 80 bp, Homo sapiens
cattatgattttcatttgcattcctctgctggctaatgatgttcaatatattttcatatacttttgggtcatttatgtat

SEQ ID NO: 153289 - DNA, 78 bp, Homo sapiens
tttgcattcctctgctggctaatgatgttcaatatattttcatatacttttgggtcatttatgtattttatttggaca

SEQ ID NO: 153290 - DNA, 76 bp, Homo sapiens
cctctgctggctaatgatgttcaatatattttcatatacttttgggtcatttatgtattttatttggacaattaca

SEQ ID NO: 153291 - DNA, 76 bp, Homo sapiens
gctaatgatgttcaatatattttcatatacttttgggtcatttatgtattttatttggacaattacatatctagag

SEQ ID NO: 153292 - DNA, 74 bp, Homo sapiens
caatatattttcatatacttttgggtcatttatgtattttatttggacaattacatatctagagtctttgacta

SEQ ID NO: 153293 - DNA, 73 bp, Homo sapiens
tttcatatacttttgggtcatttatgtattttatttggacaattacatatctagagtctttgactatatttta

SEQ ID NO: 153294 - DNA, 70 bp, Homo sapiens
cttttgggtcatttatgtattttatttggacaattacatatctagagtctttgactatattttaattggg

SEQ ID NO: 153295 - DNA, 69 bp, Homo sapiens
tgtattttatttggacaattacatatctagagtctttgactatattttaattggggcttttttgccttt

SEQ ID NO: 153296 - DNA, 68 bp, Homo sapiens
caattacatatctagagtctttgactatattttaattggggcttttttgccttttggttattaagtaa

SEQ ID NO: 153297 - DNA, 66 bp, Homo sapiens
ctagagtctttgactatattttaattggggcttttttgccttttggttattaagtaataagaggtc

SEQ ID NO: 153298 - DNA, 67 bp, Homo sapiens
ttggggcttttttgccttttggttattaagtaataagaggtctttatatattttacatataagtcca

SEQ ID NO: 153299 - DNA, 74 bp, Homo sapiens
tttgccttttggttattaagtaataagaggtctttatatattttacatataagtccattattatatatgatgca

SEQ ID NO: 153300 - DNA, 74 bp, Homo sapiens
ttaagtaataagaggtctttatatattttacatataagtccattattatatatgatgcaagtattttctcctat

SEQ ID NO: 153301 - DNA, 76 bp, Homo sapiens
ttttacatataagtccattattatatatgatgcaagtattttctcctattctttgggtttatttgatacacacata

SEQ ID NO: 153302 - DNA, 75 bp, Homo sapiens
taagtccattattatatatgatgcaagtattttctcctattctttgggtttatttgatacacacatattttctcc

SEQ ID NO: 153303 - DNA, 74 bp, Homo sapiens
ttatatatgatgcaagtattttctcctattctttgggtttatttgatacacacatattttctcctcttatttgg

SEQ ID NO: 153304 - DNA, 73 bp, Homo sapiens
tgatgcaagtattttctcctattctttgggtttatttgatacacacatattttctcctcttatttgggttgtc

SEQ ID NO: 153305 - DNA, 68 bp, Homo sapiens
ttttctcctattctttgggtttatttgatacacacatattttctcctcttatttgggttgtcttttta

SEQ ID NO: 153306 - DNA, 70 bp, Homo sapiens
ctttgggtttatttgatacacacatattttctcctcttatttgggttgtctttttattagtttgatcata

SEQ ID NO: 153307 - DNA, 72 bp, Homo sapiens
gtttatttgatacacacatattttctcctcttatttgggttgtctttttattagtttgatcatataccttga

SEQ ID NO: 153308 - DNA, 71 bp, Homo sapiens
cacacatattttctcctcttatttgggttgtctttttattagtttgatcatataccttgaattacaagaat

SEQ ID NO: 153309 - DNA, 71 bp, Homo sapiens
tctcctcttatttgggttgtctttttattagtttgatcatataccttgaattacaagaatttaaatcctga

SEQ ID NO: 153310 - DNA, 71 bp, Homo sapiens
ttgggttgtctttttattagtttgatcatataccttgaattacaagaatttaaatcctgatacattctgtt

SEQ ID NO: 153311 - DNA, 73 bp, Homo sapiens
ttgtctttttattagtttgatcatataccttgaattacaagaatttaaatcctgatacattctgtttgtttgc

SEQ ID NO: 153312 - DNA, 74 bp, Homo sapiens
attagtttgatcatataccttgaattacaagaatttaaatcctgatacattctgtttgtttgctattgttggtg

SEQ ID NO: 153313 - DNA, 74 bp, Homo sapiens
tataccttgaattacaagaatttaaatcctgatacattctgtttgtttgctattgttggtgtatgttagaacca

SEQ ID NO: 153314 - DNA, 74 bp, Homo sapiens
tacaagaatttaaatcctgatacattctgtttgtttgctattgttggtgtatgttagaaccattgtgtaattct

SEQ ID NO: 153315 - DNA, 76 bp, Homo sapiens
taaatcctgatacattctgtttgtttgctattgttggtgtatgttagaaccattgtgtaattcttggttatgagga

SEQ ID NO: 153316 - DNA, 73 bp, Homo sapiens
tacattctgtttgtttgctattgttggtgtatgttagaaccattgtgtaattcttggttatgaggatttaccc

SEQ ID NO: 153317 - DNA, 72 bp, Homo sapiens
ctgtttgtttgctattgttggtgtatgttagaaccattgtgtaattcttggttatgaggatttaccctatgt

SEQ ID NO: 153318 - DNA, 75 bp, Homo sapiens
ttgtatatggtgtgagtgaggggtccaattttattttgctgcatgtgggtgtccacttgttgaaaagaatattct

SEQ ID NO: 153319 - DNA, 73 bp, Homo sapiens
tatggtgtgagtgaggggtccaattttattttgctgcatgtgggtgtccacttgttgaaaagaatattctttt

SEQ ID NO: 153320 - DNA, 69 bp, Homo sapiens
gtgaggggtccaattttattttgctgcatgtgggtgtccacttgttgaaaagaatattctttttctttt

SEQ ID NO: 153321 - DNA, 74 bp, Homo sapiens
cgcccagcctgaaaagaatattctttacctatttaatggtctttgcatccttattgatagtcagttggtcataa

SEQ ID NO: 153322 - DNA, 73 bp, Homo sapiens
gcctgaaaagaatattctttacctatttaatggtctttgcatccttattgatagtcagttggtcataactacg

SEQ ID NO: 153323 - DNA, 71 bp, Homo sapiens
ttctttacctatttaatggtctttgcatccttattgatagtcagttggtcataactacgtaagaggttggt

SEQ ID NO: 153324 - DNA, 77 bp, Homo sapiens
atttaatggtctttgcatccttattgatagtcagttggtcataactacgtaagaggttggttctgtgctctcaatga

SEQ ID NO: 153325 - DNA, 77 bp, Homo sapiens
atggtctttgcatccttattgatagtcagttggtcataactacgtaagaggttggttctgtgctctcaatgaggtgg

SEQ ID NO: 153326 - DNA, 65 bp, Homo sapiens
aaataaaaattgtaagtgttagttacagtatttttgtagtaattaattacagtatttttgtagta

SEQ ID NO: 153327 - DNA, 66 bp, Homo sapiens
tgtaagtgttagttacagtatttttgtagtaattaattacagtatttttgtagtaattaattttac

SEQ ID NO: 153328 - DNA, 66 bp, Homo sapiens
gtgttagttacagtatttttgtagtaattaattacagtatttttgtagtaattaattttactgtgt

SEQ ID NO: 153329 - DNA, 67 bp, Homo sapiens
gtatttttgtagtaattaattacagtatttttgtagtaattaattttactgtgtttctgaaattgga

SEQ ID NO: 153330 - DNA, 67 bp, Homo sapiens
tagtaattaattacagtatttttgtagtaattaattttactgtgtttctgaaattggaaagtataag

SEQ ID NO: 153331 - DNA, 64 bp, Homo sapiens
cagtatttttgtagtaattaattttactgtgtttctgaaattggaaagtataagttttttaact

SEQ ID NO: 153332 - DNA, 63 bp, Homo sapiens
tgtagtaattaattttactgtgtttctgaaattggaaagtataagttttttaactttaccctt

SEQ ID NO: 153333 - DNA, 64 bp, Homo sapiens
attttactgtgtttctgaaattggaaagtataagttttttaactttaccctttttcaagatcat

SEQ ID NO: 153334 - DNA, 66 bp, Homo sapiens
ctgtgtttctgaaattggaaagtataagttttttaactttaccctttttcaagatcattttggctc

SEQ ID NO: 153335 - DNA, 67 bp, Homo sapiens
tggaaagtataagttttttaactttaccctttttcaagatcattttggctcttttgcatctttggtg

SEQ ID NO: 153336 - DNA, 67 bp, Homo sapiens
agtataagttttttaactttaccctttttcaagatcattttggctcttttgcatctttggtgtttca

SEQ ID NO: 153337 - DNA, 71 bp, Homo sapiens
cctttttcaagatcattttggctcttttgcatctttggtgtttcatattaatgttagaacaaggttgtaag

SEQ ID NO: 153338 - DNA, 73 bp, Homo sapiens
agatcattttggctcttttgcatctttggtgtttcatattaatgttagaacaaggttgtaagtttctgcaaaa

SEQ ID NO: 153339 - DNA, 71 bp, Homo sapiens
ggctcttttgcatctttggtgtttcatattaatgttagaacaaggttgtaagtttctgcaaaaaagccagt

SEQ ID NO: 153340 - DNA, 73 bp, Homo sapiens
gcatctttggtgtttcatattaatgttagaacaaggttgtaagtttctgcaaaaaagccagttatgattttga

SEQ ID NO: 153341 - DNA, 71 bp, Homo sapiens
gtttcatattaatgttagaacaaggttgtaagtttctgcaaaaaagccagttatgattttgatagggattg

SEQ ID NO: 153342 - DNA, 76 bp, Homo sapiens
tgtaagtttctgcaaaaaagccagttatgattttgatagggattgtgctgaatctgtggggtagtttgcatagtgt

SEQ ID NO: 153343 - DNA, 79 bp, Homo sapiens
ttctgcaaaaaagccagttatgattttgatagggattgtgctgaatctgtggggtagtttgcatagtgttgccatctta

SEQ ID NO: 153344 - DNA, 77 bp, Homo sapiens
aaaaaagccagttatgattttgatagggattgtgctgaatctgtggggtagtttgcatagtgttgccatcttagcaa

SEQ ID NO: 153345 - DNA, 79 bp, Homo sapiens
aaagccagttatgattttgatagggattgtgctgaatctgtggggtagtttgcatagtgttgccatcttagcaatatta

SEQ ID NO: 153346 - DNA, 78 bp, Homo sapiens
agttatgattttgatagggattgtgctgaatctgtggggtagtttgcatagtgttgccatcttagcaatattaagtct

SEQ ID NO: 153347 - DNA, 79 bp, Homo sapiens
ttttgatagggattgtgctgaatctgtggggtagtttgcatagtgttgccatcttagcaatattaagtcttccaatcca

SEQ ID NO: 153348 - DNA, 75 bp, Homo sapiens
ccatgaataatagatgacttttcatccaattagattcgtctttcacttctttccatgatactttgtaattttcag

SEQ ID NO: 153349 - DNA, 74 bp, Homo sapiens
gatgacttttcatccaattagattcgtctttcacttctttccatgatactttgtaattttcagtgtataaattc

SEQ ID NO: 153350 - DNA, 74 bp, Homo sapiens
cttttcatccaattagattcgtctttcacttctttccatgatactttgtaattttcagtgtataaattctgcac

SEQ ID NO: 153351 - DNA, 71 bp, Homo sapiens
aattagattcgtctttcacttctttccatgatactttgtaattttcagtgtataaattctgcacttaaaaa

SEQ ID NO: 153352 - DNA, 69 bp, Homo sapiens
ctttcacttctttccatgatactttgtaattttcagtgtataaattctgcacttaaaaaaatttattcc

SEQ ID NO: 153353 - DNA, 68 bp, Homo sapiens
ctaagtattttagtctttctttgtccttttataaatgaatttgtttttgatttcattctcaaattatc

SEQ ID NO: 153354 - DNA, 72 bp, Homo sapiens
tagtctttctttgtccttttataaatgaatttgtttttgatttcattctcaaattatctcatgtttatgaaa

SEQ ID NO: 153355 - DNA, 70 bp, Homo sapiens
ctttgtccttttataaatgaatttgtttttgatttcattctcaaattatctcatgtttatgaaaattttg

SEQ ID NO: 153356 - DNA, 71 bp, Homo sapiens
cttttataaatgaatttgtttttgatttcattctcaaattatctcatgtttatgaaaattttgtatattat

SEQ ID NO: 153357 - DNA, 72 bp, Homo sapiens
tgaatttgtttttgatttcattctcaaattatctcatgtttatgaaaattttgtatattattttaatattta

SEQ ID NO: 153358 - DNA, 73 bp, Homo sapiens
ttttaatatttaatattaatacaaacattttgtatattattttatcgtgcaactttgctgaactcatctctgt

SEQ ID NO: 153359 - DNA, 75 bp, Homo sapiens
taatattaatacaaacattttgtatattattttatcgtgcaactttgctgaactcatctctgttaattaatagaa

SEQ ID NO: 153360 - DNA, 76 bp, Homo sapiens
tacaaacattttgtatattattttatcgtgcaactttgctgaactcatctctgttaattaatagaattgattactg

SEQ ID NO: 153361 - DNA, 76 bp, Homo sapiens
tgtatattattttatcgtgcaactttgctgaactcatctctgttaattaatagaattgattactgtttgttagtaa

SEQ ID NO: 153362 - DNA, 74 bp, Homo sapiens
attattttatcgtgcaactttgctgaactcatctctgttaattaatagaattgattactgtttgttagtaatag

SEQ ID NO: 153363 - DNA, 72 bp, Homo sapiens
cgtgcaactttgctgaactcatctctgttaattaatagaattgattactgtttgttagtaatagtatttttt

SEQ ID NO: 153364 - DNA, 73 bp, Homo sapiens
tgctgaactcatctctgttaattaatagaattgattactgtttgttagtaatagtatttttttatgaattatt

SEQ ID NO: 153365 - DNA, 69 bp, Homo sapiens
atctctgttaattaatagaattgattactgtttgttagtaatagtatttttttatgaattattttggat

SEQ ID NO: 153366 - DNA, 72 bp, Homo sapiens
tagaattgattactgtttgttagtaatagtatttttttatgaattattttggattttctgtgtacatgacca

SEQ ID NO: 153367 - DNA, 77 bp, Homo sapiens
tgattactgtttgttagtaatagtatttttttatgaattattttggattttctgtgtacatgaccatgcaatctgca

SEQ ID NO: 153368 - DNA, 75 bp, Homo sapiens
tttgttagtaatagtatttttttatgaattattttggattttctgtgtacatgaccatgcaatctgcatgttttc

SEQ ID NO: 153369 - DNA, 76 bp, Homo sapiens
gtatttttttatgaattattttggattttctgtgtacatgaccatgcaatctgcatgttttctaatctagttgccc

SEQ ID NO: 153370 - DNA, 76 bp, Homo sapiens
tttatgaattattttggattttctgtgtacatgaccatgcaatctgcatgttttctaatctagttgcccttttccc

SEQ ID NO: 153371 - DNA, 74 bp, Homo sapiens
attttggattttctgtgtacatgaccatgcaatctgcatgttttctaatctagttgcccttttccccctttgct

SEQ ID NO: 153372 - DNA, 75 bp, Homo sapiens
ttctgtgtacatgaccatgcaatctgcatgttttctaatctagttgcccttttccccctttgcttacttaccctg

SEQ ID NO: 153373 - DNA, 74 bp, Homo sapiens
atgaccatgcaatctgcatgttttctaatctagttgcccttttccccctttgcttacttaccctggctagagcc

SEQ ID NO: 153374 - DNA, 72 bp, Homo sapiens
tttctaatctagttgcccttttccccctttgcttacttaccctggctagagcctccagtgtgatgcggaata

SEQ ID NO: 153375 - DNA, 71 bp, Homo sapiens
ttgcccttttccccctttgcttacttaccctggctagagcctccagtgtgatgcggaatactagtggaaaa

SEQ ID NO: 153376 - DNA, 75 bp, Homo sapiens
ccctttgcttacttaccctggctagagcctccagtgtgatgcggaatactagtggaaaaagcagacatccttgtc

SEQ ID NO: 153377 - DNA, 74 bp, Homo sapiens
catccttgtcttgtttttgatgttaggaggaaataattgagtctttttcattaactatgatgtcagctgtggtt

SEQ ID NO: 153378 - DNA, 73 bp, Homo sapiens
gtcttgtttttgatgttaggaggaaataattgagtctttttcattaactatgatgtcagctgtggttttgtta

SEQ ID NO: 153379 - DNA, 75 bp, Homo sapiens
tgatgttaggaggaaataattgagtctttttcattaactatgatgtcagctgtggttttgttatattacctttca

SEQ ID NO: 153380 - DNA, 73 bp, Homo sapiens
ggaggaaataattgagtctttttcattaactatgatgtcagctgtggttttgttatattacctttcatattta

SEQ ID NO: 153381 - DNA, 73 bp, Homo sapiens
gagtctttttcattaactatgatgtcagctgtggttttgttatattacctttcatatttagaatgttctcttt

SEQ ID NO: 153382 - DNA, 73 bp, Homo sapiens
gtctttttcattaactatgatgtcagctgtggttttgttatattacctttcatatttagaatgttctctttta

SEQ ID NO: 153383 - DNA, 74 bp, Homo sapiens
ttcattaactatgatgtcagctgtggttttgttatattacctttcatatttagaatgttctcttttatacctat

SEQ ID NO: 153384 - DNA, 75 bp, Homo sapiens
ctatgatgtcagctgtggttttgttatattacctttcatatttagaatgttctcttttatacctattttgtcaca

SEQ ID NO: 153385 - DNA, 73 bp, Homo sapiens
gatgtcagctgtggttttgttatattacctttcatatttagaatgttctcttttatacctattttgtcacatt

SEQ ID NO: 153386 - DNA, 73 bp, Homo sapiens
tgtcagctgtggttttgttatattacctttcatatttagaatgttctcttttatacctattttgtcacatttg

SEQ ID NO: 153387 - DNA, 71 bp, Homo sapiens
gctgtggttttgttatattacctttcatatttagaatgttctcttttatacctattttgtcacatttgtaa

SEQ ID NO: 153388 - DNA, 70 bp, Homo sapiens
tgttatattacctttcatatttagaatgttctcttttatacctattttgtcacatttgtaagatcttttt

SEQ ID NO: 153389 - DNA, 74 bp, Homo sapiens
catatttagaatgttctcttttatacctattttgtcacatttgtaagatcttttttgtgtctattgagaagaca

SEQ ID NO: 153390 - DNA, 71 bp, Homo sapiens
ctcttttatacctattttgtcacatttgtaagatcttttttgtgtctattgagaagacaattttgcgtttc

SEQ ID NO: 153391 - DNA, 69 bp, Homo sapiens
cctattttgtcacatttgtaagatcttttttgtgtctattgagaagacaattttgcgtttcccccttta

SEQ ID NO: 153392 - DNA, 73 bp, Homo sapiens
cacatttgtaagatcttttttgtgtctattgagaagacaattttgcgtttccccctttattctatccatatga

SEQ ID NO: 153393 - DNA, 73 bp, Homo sapiens
gtaagatcttttttgtgtctattgagaagacaattttgcgtttccccctttattctatccatatgatgtatta

SEQ ID NO: 153394 - DNA, 74 bp, Homo sapiens
ctattgagaagacaattttgcgtttccccctttattctatccatatgatgtattatattgattgatttttgtaa

SEQ ID NO: 153395 - DNA, 73 bp, Homo sapiens
gacaattttgcgtttccccctttattctatccatatgatgtattatattgattgatttttgtaatttgaacca

SEQ ID NO: 153396 - DNA, 72 bp, Homo sapiens
ccccctttattctatccatatgatgtattatattgattgatttttgtaatttgaaccaactttgaagtcctg

SEQ ID NO: 153397 - DNA, 74 bp, Homo sapiens
tctatccatatgatgtattatattgattgatttttgtaatttgaaccaactttgaagtcctggggtaaatccta

SEQ ID NO: 153398 - DNA, 71 bp, Homo sapiens
tattgattgatttttgtaatttgaaccaactttgaagtcctggggtaaatcctacttggtcatgttgtgta

SEQ ID NO: 153399 - DNA, 69 bp, Homo sapiens
gatttttgtaatttgaaccaactttgaagtcctggggtaaatcctacttggtcatgttgtgtaatgttg

SEQ ID NO: 153400 - DNA, 71 bp, Homo sapiens
taatttgaaccaactttgaagtcctggggtaaatcctacttggtcatgttgtgtaatgttgttggatgtgt

SEQ ID NO: 153401 - DNA, 71 bp, Homo sapiens
aactttgaagtcctggggtaaatcctacttggtcatgttgtgtaatgttgttggatgtgttttgcttgtat

SEQ ID NO: 153402 - DNA, 74 bp, Homo sapiens
tggggtaaatcctacttggtcatgttgtgtaatgttgttggatgtgttttgcttgtattttgctgaagatttaa

SEQ ID NO: 153403 - DNA, 74 bp, Homo sapiens
cctacttggtcatgttgtgtaatgttgttggatgtgttttgcttgtattttgctgaagatttaaaaatctatac

SEQ ID NO: 153404 - DNA, 75 bp, Homo sapiens
ggtcatgttgtgtaatgttgttggatgtgttttgcttgtattttgctgaagatttaaaaatctatactcaaagga

SEQ ID NO: 153405 - DNA, 75 bp, Homo sapiens
tgtgtaatgttgttggatgtgttttgcttgtattttgctgaagatttaaaaatctatactcaaaggatattggtc

SEQ ID NO: 153406 - DNA, 69 bp, Homo sapiens
aggatattggtctacagttttcctatttgtgtgataccttttgtctagttctttttgttgttgatgttt

SEQ ID NO: 153407 - DNA, 67 bp, Homo sapiens
ggtctacagttttcctatttgtgtgataccttttgtctagttctttttgttgttgatgttttttgtt

SEQ ID NO: 153408 - DNA, 72 bp, Homo sapiens
gcctcatagaatgaacgtgacaggtagtttcttaagtagtgctttgttataacccaattgtggcctttctta

SEQ ID NO: 153409 - DNA, 69 bp, Homo sapiens
atagaatgaacgtgacaggtagtttcttaagtagtgctttgttataacccaattgtggcctttcttatt

SEQ ID NO: 153410 - DNA, 68 bp, Homo sapiens
cgtgacaggtagtttcttaagtagtgctttgttataacccaattgtggcctttcttatttattttctc

SEQ ID NO: 153411 - DNA, 66 bp, Homo sapiens
cttaagtagtgctttgttataacccaattgtggcctttcttatttattttctcccctttttcctga

SEQ ID NO: 153412 - DNA, 67 bp, Homo sapiens
gtagtgctttgttataacccaattgtggcctttcttatttattttctcccctttttcctgacatcct

SEQ ID NO: 153413 - DNA, 65 bp, Homo sapiens
ataacccaattgtggcctttcttatttattttctcccctttttcctgacatcctttactttcacc

SEQ ID NO: 153414 - DNA, 68 bp, Homo sapiens
tggcctttcttatttattttctcccctttttcctgacatcctttactttcaccgcctttatatagatc

SEQ ID NO: 153415 - DNA, 69 bp, Homo sapiens
tatttattttctcccctttttcctgacatcctttactttcaccgcctttatatagatctacctttgcta

SEQ ID NO: 153416 - DNA, 69 bp, Homo sapiens
tttctcccctttttcctgacatcctttactttcaccgcctttatatagatctacctttgctagtaaata

SEQ ID NO: 153417 - DNA, 71 bp, Homo sapiens
tttttcctgacatcctttactttcaccgcctttatatagatctacctttgctagtaaatagggtcatatgg

SEQ ID NO: 153418 - DNA, 72 bp, Homo sapiens
atcctttactttcaccgcctttatatagatctacctttgctagtaaatagggtcatatgggtgctggaaata

SEQ ID NO: 153419 - DNA, 73 bp, Homo sapiens
ctttcaccgcctttatatagatctacctttgctagtaaatagggtcatatgggtgctggaaataatccattcc

SEQ ID NO: 153420 - DNA, 74 bp, Homo sapiens
cctttatatagatctacctttgctagtaaatagggtcatatgggtgctggaaataatccattcctgtgaattat

SEQ ID NO: 153421 - DNA, 75 bp, Homo sapiens
ctttatatagatctacctttgctagtaaatagggtcatatgggtgctggaaataatccattcctgtgaattatta

SEQ ID NO: 153422 - DNA, 75 bp, Homo sapiens
atagatctacctttgctagtaaatagggtcatatgggtgctggaaataatccattcctgtgaattattattaatg

SEQ ID NO: 153423 - DNA, 76 bp, Homo sapiens
tctacctttgctagtaaatagggtcatatgggtgctggaaataatccattcctgtgaattattattaatgtacatg

SEQ ID NO: 153424 - DNA, 76 bp, Homo sapiens
cctttgctagtaaatagggtcatatgggtgctggaaataatccattcctgtgaattattattaatgtacatgtgaa

SEQ ID NO: 153425 - DNA, 77 bp, Homo sapiens
gctagtaaatagggtcatatgggtgctggaaataatccattcctgtgaattattattaatgtacatgtgaatattac

SEQ ID NO: 153426 - DNA, 77 bp, Homo sapiens
agggtcatatgggtgctggaaataatccattcctgtgaattattattaatgtacatgtgaatattactgttaaagca

SEQ ID NO: 153427 - DNA, 78 bp, Homo sapiens
gggtcatatgggtgctggaaataatccattcctgtgaattattattaatgtacatgtgaatattactgttaaagcaga

SEQ ID NO: 153428 - DNA, 77 bp, Homo sapiens
ctggaaataatccattcctgtgaattattattaatgtacatgtgaatattactgttaaagcagatgatgtcttttcc

SEQ ID NO: 153429 - DNA, 78 bp, Homo sapiens
tcctgtgaattattattaatgtacatgtgaatattactgttaaagcagatgatgtcttttccttaagaatagttcaca

SEQ ID NO: 153430 - DNA, 75 bp, Homo sapiens
tattattaatgtacatgtgaatattactgttaaagcagatgatgtcttttccttaagaatagttcacaattttcg

SEQ ID NO: 153431 - DNA, 75 bp, Homo sapiens
gtacatgtgaatattactgttaaagcagatgatgtcttttccttaagaatagttcacaattttcgttcattatat

SEQ ID NO: 153432 - DNA, 74 bp, Homo sapiens
gtgaatattactgttaaagcagatgatgtcttttccttaagaatagttcacaattttcgttcattatatttcaa

SEQ ID NO: 153433 - DNA, 67 bp, Homo sapiens
cttttccttaagaatagttcacaattttcgttcattatatttcaaatattttcatataattttattt

SEQ ID NO: 153434 - DNA, 70 bp, Homo sapiens
ttttacttcagttttgaattttttggttttgagtatgtattgaaaagatgagagaagctattcagtaaaa

SEQ ID NO: 153435 - DNA, 69 bp, Homo sapiens
gttttgaattttttggttttgagtatgtattgaaaagatgagagaagctattcagtaaaaattttcctc

SEQ ID NO: 153436 - DNA, 70 bp, Homo sapiens
ttttggttttgagtatgtattgaaaagatgagagaagctattcagtaaaaattttcctcccaaccctgta

SEQ ID NO: 153437 - DNA, 72 bp, Homo sapiens
ttttgagtatgtattgaaaagatgagagaagctattcagtaaaaattttcctcccaaccctgtacctcagtg

SEQ ID NO: 153438 - DNA, 75 bp, Homo sapiens
tattgaaaagatgagagaagctattcagtaaaaattttcctcccaaccctgtacctcagtggcttagatctgctc

SEQ ID NO: 153439 - DNA, 77 bp, Homo sapiens
agatgagagaagctattcagtaaaaattttcctcccaaccctgtacctcagtggcttagatctgctctccagagata

SEQ ID NO: 153440 - DNA, 76 bp, Homo sapiens
ttcagtaaaaattttcctcccaaccctgtacctcagtggcttagatctgctctccagagatactcagtgtatgaat

SEQ ID NO: 153441 - DNA, 75 bp, Homo sapiens
aaaattttcctcccaaccctgtacctcagtggcttagatctgctctccagagatactcagtgtatgaattaccaa

SEQ ID NO: 153442 - DNA, 78 bp, Homo sapiens
ttagatctgctctccagagatactcagtgtatgaattaccaagaaaaaggtagatgtgtgtttgttacacaaattcaa

SEQ ID NO: 153443 - DNA, 76 bp, Homo sapiens
ctctccagagatactcagtgtatgaattaccaagaaaaaggtagatgtgtgtttgttacacaaattcaacagtata

SEQ ID NO: 153444 - DNA, 75 bp, Homo sapiens
gagatactcagtgtatgaattaccaagaaaaaggtagatgtgtgtttgttacacaaattcaacagtatatatacg

SEQ ID NO: 153445 - DNA, 72 bp, Homo sapiens
gtgtatgaattaccaagaaaaaggtagatgtgtgtttgttacacaaattcaacagtatatatacgttgtttg

SEQ ID NO: 153446 - DNA, 70 bp, Homo sapiens
ccaagaaaaaggtagatgtgtgtttgttacacaaattcaacagtatatatacgttgtttgtaccttgatt

SEQ ID NO: 153447 - DNA, 69 bp, Homo sapiens
aaaggtagatgtgtgtttgttacacaaattcaacagtatatatacgttgtttgtaccttgatttttttg

SEQ ID NO: 153448 - DNA, 75 bp, Homo sapiens
tttgttacacaaattcaacagtatatatacgttgtttgtaccttgatttttttgtttcactctcatatccatgca

SEQ ID NO: 153449 - DNA, 77 bp, Homo sapiens
tacacaaattcaacagtatatatacgttgtttgtaccttgatttttttgtttcactctcatatccatgcataatgag

SEQ ID NO: 153450 - DNA, 76 bp, Homo sapiens
caacagtatatatacgttgtttgtaccttgatttttttgtttcactctcatatccatgcataatgagtttctcatt

SEQ ID NO: 153451 - DNA, 76 bp, Homo sapiens
cgttgtttgtaccttgatttttttgtttcactctcatatccatgcataatgagtttctcattttttaagcagcaga

SEQ ID NO: 153452 - DNA, 78 bp, Homo sapiens
ccttgatttttttgtttcactctcatatccatgcataatgagtttctcattttttaagcagcagagtgtgccatagtt

SEQ ID NO: 153453 - DNA, 77 bp, Homo sapiens
tttgtttcactctcatatccatgcataatgagtttctcattttttaagcagcagagtgtgccatagtttttcgtttt

SEQ ID NO: 153454 - DNA, 77 bp, Homo sapiens
ttcactctcatatccatgcataatgagtttctcattttttaagcagcagagtgtgccatagtttttcgtttttgttt

SEQ ID NO: 153455 - DNA, 73 bp, Homo sapiens
atgcgtgagccaccgggcccggccagtagtgtgccataatttgttaaacctgttctcaattaatggacattta

SEQ ID NO: 153456 - DNA, 69 bp, Homo sapiens
caccgggcccggccagtagtgtgccataatttgttaaacctgttctcaattaatggacatttagtttgt

SEQ ID NO: 153457 - DNA, 69 bp, Homo sapiens
cggccagtagtgtgccataatttgttaaacctgttctcaattaatggacatttagtttgttttccagtt

SEQ ID NO: 153458 - DNA, 68 bp, Homo sapiens
gtagtgtgccataatttgttaaacctgttctcaattaatggacatttagtttgttttccagttttaag

SEQ ID NO: 153459 - DNA, 65 bp, Homo sapiens
ataatttgttaaacctgttctcaattaatggacatttagtttgttttccagttttaagtaattta

SEQ ID NO: 153460 - DNA, 66 bp, Homo sapiens
acctgttctcaattaatggacatttagtttgttttccagttttaagtaatttaaaatttagcatag

SEQ ID NO: 153461 - DNA, 65 bp, Homo sapiens
taatggacatttagtttgttttccagttttaagtaatttaaaatttagcatagttaaaaatctta

SEQ ID NO: 153462 - DNA, 65 bp, Homo sapiens
gacatttagtttgttttccagttttaagtaatttaaaatttagcatagttaaaaatcttaagtca

SEQ ID NO: 153463 - DNA, 69 bp, Homo sapiens
ttccagttttaagtaatttaaaatttagcatagttaaaaatcttaagtcatttggtatgtgtgagagaa

SEQ ID NO: 153464 - DNA, 70 bp, Homo sapiens
aagtaatttaaaatttagcatagttaaaaatcttaagtcatttggtatgtgtgagagaacctgaaagata

SEQ ID NO: 153465 - DNA, 73 bp, Homo sapiens
aaatttagcatagttaaaaatcttaagtcatttggtatgtgtgagagaacctgaaagataaattgctatcgag

SEQ ID NO: 153466 - DNA, 73 bp, Homo sapiens
gcatagttaaaaatcttaagtcatttggtatgtgtgagagaacctgaaagataaattgctatcgaggtttatt

SEQ ID NO: 153467 - DNA, 71 bp, Homo sapiens
aaaaatcttaagtcatttggtatgtgtgagagaacctgaaagataaattgctatcgaggtttatttattta

SEQ ID NO: 153468 - DNA, 77 bp, Homo sapiens
ctgggaccacagccgtgtactaccatgcccagcttaggtcatttggtttgtctttggcgatatctcatagtattcca

SEQ ID NO: 153469 - DNA, 75 bp, Homo sapiens
accacagccgtgtactaccatgcccagcttaggtcatttggtttgtctttggcgatatctcatagtattccaatt

SEQ ID NO: 153470 - DNA, 75 bp, Homo sapiens
agccgtgtactaccatgcccagcttaggtcatttggtttgtctttggcgatatctcatagtattccaatttgaaa

SEQ ID NO: 153471 - DNA, 77 bp, Homo sapiens
taccatgcccagcttaggtcatttggtttgtctttggcgatatctcatagtattccaatttgaaatttcacttcata

SEQ ID NO: 153472 - DNA, 75 bp, Homo sapiens
atgcccagcttaggtcatttggtttgtctttggcgatatctcatagtattccaatttgaaatttcacttcatagt

SEQ ID NO: 153473 - DNA, 74 bp, Homo sapiens
ccagcttaggtcatttggtttgtctttggcgatatctcatagtattccaatttgaaatttcacttcatagttgt

SEQ ID NO: 153474 - DNA, 74 bp, Homo sapiens
agcttaggtcatttggtttgtctttggcgatatctcatagtattccaatttgaaatttcacttcatagttgtta

SEQ ID NO: 153475 - DNA, 75 bp, Homo sapiens
aggtcatttggtttgtctttggcgatatctcatagtattccaatttgaaatttcacttcatagttgttatactga

SEQ ID NO: 153476 - DNA, 77 bp, Homo sapiens
tggtttgtctttggcgatatctcatagtattccaatttgaaatttcacttcatagttgttatactgatatgttccta

SEQ ID NO: 153477 - DNA, 76 bp, Homo sapiens
gtttgtctttggcgatatctcatagtattccaatttgaaatttcacttcatagttgttatactgatatgttcctac

SEQ ID NO: 153478 - DNA, 79 bp, Homo sapiens
tggcgatatctcatagtattccaatttgaaatttcacttcatagttgttatactgatatgttcctactaacagtacaga

SEQ ID NO: 153479 - DNA, 74 bp, Homo sapiens
ctcatagtattccaatttgaaatttcacttcatagttgttatactgatatgttcctactaacagtacagaaaag

SEQ ID NO: 153480 - DNA, 75 bp, Homo sapiens
ccaatttgaaatttcacttcatagttgttatactgatatgttcctactaacagtacagaaaagtacagattggca

SEQ ID NO: 153481 - DNA, 76 bp, Homo sapiens
gaaatttcacttcatagttgttatactgatatgttcctactaacagtacagaaaagtacagattggcattctgtta

SEQ ID NO: 153482 - DNA, 73 bp, Homo sapiens
cttcatagttgttatactgatatgttcctactaacagtacagaaaagtacagattggcattctgttaattttt

SEQ ID NO: 153483 - DNA, 72 bp, Homo sapiens
actgatatgttcctactaacagtacagaaaagtacagattggcattctgttaattttttttaacatccagtc

SEQ ID NO: 153484 - DNA, 70 bp, Homo sapiens
tcctactaacagtacagaaaagtacagattggcattctgttaattttttttaacatccagtctaaccacc

SEQ ID NO: 153485 - DNA, 68 bp, Homo sapiens
ctaacagtacagaaaagtacagattggcattctgttaattttttttaacatccagtctaaccaccccc

SEQ ID NO: 153486 - DNA, 68 bp, Homo sapiens
agtacagattggcattctgttaattttttttaacatccagtctaaccacccccttttccaagtctgta

SEQ ID NO: 153487 - DNA, 67 bp, Homo sapiens
agattggcattctgttaattttttttaacatccagtctaaccacccccttttccaagtctgtattcc

SEQ ID NO: 153488 - DNA, 68 bp, Homo sapiens
taattttttttaacatccagtctaaccacccccttttccaagtctgtattcccactcacaatctagta

SEQ ID NO: 153489 - DNA, 68 bp, Homo sapiens
tttttaacatccagtctaaccacccccttttccaagtctgtattcccactcacaatctagtaattaaa

SEQ ID NO: 153490 - DNA, 65 bp, Homo sapiens
ccagtctaaccacccccttttccaagtctgtattcccactcacaatctagtaattaaaaaaaaat

SEQ ID NO: 153491 - DNA, 70 bp, Homo sapiens
taaaaaaaaattttgagtaaagtatgaaattttgttaaggggctgcatgtatagttttgatatgaatgaa

SEQ ID NO: 153492 - DNA, 76 bp, Homo sapiens
ttttgagtaaagtatgaaattttgttaaggggctgcatgtatagttttgatatgaatgaagctatgtttcagatgg

SEQ ID NO: 153493 - DNA, 74 bp, Homo sapiens
ttttgttaaggggctgcatgtatagttttgatatgaatgaagctatgtttcagatggttaatttactttggttg

SEQ ID NO: 153494 - DNA, 75 bp, Homo sapiens
gggctgcatgtatagttttgatatgaatgaagctatgtttcagatggttaatttactttggttgtttggaatttc

SEQ ID NO: 153495 - DNA, 72 bp, Homo sapiens
gtatagttttgatatgaatgaagctatgtttcagatggttaatttactttggttgtttggaatttccaatgg

SEQ ID NO: 153496 - DNA, 70 bp, Homo sapiens
tttgatatgaatgaagctatgtttcagatggttaatttactttggttgtttggaatttccaatggttttt

SEQ ID NO: 153497 - DNA, 67 bp, Homo sapiens
atgaagctatgtttcagatggttaatttactttggttgtttggaatttccaatggttttttatttta

SEQ ID NO: 153498 - DNA, 66 bp, Homo sapiens
tttactttggttgtttggaatttccaatggttttttattttacagagtcctgccaaatttataaca

SEQ ID NO: 153499 - DNA, 68 bp, Homo sapiens
ttgtttggaatttccaatggttttttattttacagagtcctgccaaatttataacaactgtagggcag

SEQ ID NO: 153500 - DNA, 68 bp, Homo sapiens
ttttttattttacagagtcctgccaaatttataacaactgtagggcagggtgtggatagggatatttt

SEQ ID NO: 153501 - DNA, 72 bp, Homo sapiens
tattttacagagtcctgccaaatttataacaactgtagggcagggtgtggatagggatatttttactgagta

SEQ ID NO: 153502 - DNA, 73 bp, Homo sapiens
tataacaactgtagggcagggtgtggatagggatatttttactgagtaaatactattacatgtactagaggta

SEQ ID NO: 153503 - DNA, 73 bp, Homo sapiens
tagggcagggtgtggatagggatatttttactgagtaaatactattacatgtactagaggtattctgttatgt

SEQ ID NO: 153504 - DNA, 72 bp, Homo sapiens
cagggtgtggatagggatatttttactgagtaaatactattacatgtactagaggtattctgttatgttaaa

SEQ ID NO: 153505 - DNA, 72 bp, Homo sapiens
gatatttttactgagtaaatactattacatgtactagaggtattctgttatgttaaaatatcccgttagaga

SEQ ID NO: 153506 - DNA, 76 bp, Homo sapiens
ctgagtaaatactattacatgtactagaggtattctgttatgttaaaatatcccgttagagatacatgatgaaaca

SEQ ID NO: 153507 - DNA, 79 bp, Homo sapiens
atactattacatgtactagaggtattctgttatgttaaaatatcccgttagagatacatgatgaaacacatatggatga

SEQ ID NO: 153508 - DNA, 79 bp, Homo sapiens
catgtactagaggtattctgttatgttaaaatatcccgttagagatacatgatgaaacacatatggatgaaatattatg

SEQ ID NO: 153509 - DNA, 80 bp, Homo sapiens
gaggtattctgttatgttaaaatatcccgttagagatacatgatgaaacacatatggatgaaatattatggagtatgaga

SEQ ID NO: 153510 - DNA, 82 bp, Homo sapiens
tcccgttagagatacatgatgaaacacatatggatgaaatattatggagtatgagatattgcaaaataacatggaaagatgg

SEQ ID NO: 153511 - DNA, 81 bp, Homo sapiens
tggatgaaatattatggagtatgagatattgcaaaataacatggaaagatggggatacagataaaaatagattggccatga

SEQ ID NO: 153512 - DNA, 78 bp, Homo sapiens
ggagtatgagatattgcaaaataacatggaaagatggggatacagataaaaatagattggccatgaatttgtaatcag

SEQ ID NO: 153513 - DNA, 76 bp, Homo sapiens
acatggaaagatggggatacagataaaaatagattggccatgaatttgtaatcagtgagtctaggtgtttactata

SEQ ID NO: 153514 - DNA, 74 bp, Homo sapiens
tggggatacagataaaaatagattggccatgaatttgtaatcagtgagtctaggtgtttactatactggttttg

SEQ ID NO: 153515 - DNA, 76 bp, Homo sapiens
gataaaaatagattggccatgaatttgtaatcagtgagtctaggtgtttactatactggttttgtagatgtttgca

SEQ ID NO: 153516 - DNA, 76 bp, Homo sapiens
tagattggccatgaatttgtaatcagtgagtctaggtgtttactatactggttttgtagatgtttgcaattttctg

SEQ ID NO: 153517 - DNA, 77 bp, Homo sapiens
ccatgaatttgtaatcagtgagtctaggtgtttactatactggttttgtagatgtttgcaattttctgtgatacatc

SEQ ID NO: 153518 - DNA, 75 bp, Homo sapiens
tcagtgagtctaggtgtttactatactggttttgtagatgtttgcaattttctgtgatacatcctttttcagtag

SEQ ID NO: 153519 - DNA, 72 bp, Homo sapiens
agtctaggtgtttactatactggttttgtagatgtttgcaattttctgtgatacatcctttttcagtaggaa

SEQ ID NO: 153520 - DNA, 74 bp, Homo sapiens
ttactatactggttttgtagatgtttgcaattttctgtgatacatcctttttcagtaggaattcagaataaaga

SEQ ID NO: 153521 - DNA, 73 bp, Homo sapiens
ggttttgtagatgtttgcaattttctgtgatacatcctttttcagtaggaattcagaataaagaaagtgctaa

SEQ ID NO: 153522 - DNA, 75 bp, Homo sapiens
gatgtttgcaattttctgtgatacatcctttttcagtaggaattcagaataaagaaagtgctaaatatttgagta

SEQ ID NO: 153523 - DNA, 77 bp, Homo sapiens
tctgtgatacatcctttttcagtaggaattcagaataaagaaagtgctaaatatttgagtaaatcagttgactatga

SEQ ID NO: 153524 - DNA, 72 bp, Homo sapiens
acatcctttttcagtaggaattcagaataaagaaagtgctaaatatttgagtaaatcagttgactatgaaaa

SEQ ID NO: 153525 - DNA, 74 bp, Homo sapiens
tttcagtaggaattcagaataaagaaagtgctaaatatttgagtaaatcagttgactatgaaaataataatgcc

SEQ ID NO: 153526 - DNA, 76 bp, Homo sapiens
tatttgagtaaatcagttgactatgaaaataataatgccttatggtcttaaatacatatggcattaaaatatacca

SEQ ID NO: 153527 - DNA, 76 bp, Homo sapiens
gagtaaatcagttgactatgaaaataataatgccttatggtcttaaatacatatggcattaaaatataccacaaca

SEQ ID NO: 153528 - DNA, 74 bp, Homo sapiens
gttgactatgaaaataataatgccttatggtcttaaatacatatggcattaaaatataccacaacaataaaata

SEQ ID NO: 153529 - DNA, 74 bp, Homo sapiens
taataatgccttatggtcttaaatacatatggcattaaaatataccacaacaataaaatataagttgataagga

SEQ ID NO: 153530 - DNA, 71 bp, Homo sapiens
ataccacaacaataaaatataagttgataaggaggcagatggaagttagtttcctttactttctggcagga

SEQ ID NO: 153531 - DNA, 73 bp, Homo sapiens
caataaaatataagttgataaggaggcagatggaagttagtttcctttactttctggcaggatgataacaata

SEQ ID NO: 153532 - DNA, 72 bp, Homo sapiens
aagttgataaggaggcagatggaagttagtttcctttactttctggcaggatgataacaatattcattaact

SEQ ID NO: 153533 - DNA, 71 bp, Homo sapiens
aggaggcagatggaagttagtttcctttactttctggcaggatgataacaatattcattaactttggattt

SEQ ID NO: 153534 - DNA, 72 bp, Homo sapiens
cagatggaagttagtttcctttactttctggcaggatgataacaatattcattaactttggatttttatgag

SEQ ID NO: 153535 - DNA, 70 bp, Homo sapiens
ttagtttcctttactttctggcaggatgataacaatattcattaactttggatttttatgagttaaatat

SEQ ID NO: 153536 - DNA, 77 bp, Homo sapiens
tttttgtaatttatttttttttggaagattcatcctgtagattttctcaggctgcattgcgctgtatgcagctctgt

SEQ ID NO: 153537 - DNA, 79 bp, Homo sapiens
ttatttttttttggaagattcatcctgtagattttctcaggctgcattgcgctgtatgcagctctgttatatggtttta

SEQ ID NO: 153538 - DNA, 82 bp, Homo sapiens
tttttggaagattcatcctgtagattttctcaggctgcattgcgctgtatgcagctctgttatatggttttacatatttctc

SEQ ID NO: 153539 - DNA, 84 bp, Homo sapiens
agattcatcctgtagattttctcaggctgcattgcgctgtatgcagctctgttatatggttttacatatttctcttactctgta

SEQ ID NO: 153540 - DNA, 84 bp, Homo sapiens
tgtagattttctcaggctgcattgcgctgtatgcagctctgttatatggttttacatatttctcttactctgtacagtagtctc

SEQ ID NO: 153541 - DNA, 82 bp, Homo sapiens
gctgcattgcgctgtatgcagctctgttatatggttttacatatttctcttactctgtacagtagtctccctttatctagaa

SEQ ID NO: 153542 - DNA, 78 bp, Homo sapiens
attgcgctgtatgcagctctgttatatggttttacatatttctcttactctgtacagtagtctccctttatctagaaa

SEQ ID NO: 153543 - DNA, 75 bp, Homo sapiens
atgcagctctgttatatggttttacatatttctcttactctgtacagtagtctccctttatctagaaactcattt

SEQ ID NO: 153544 - DNA, 73 bp, Homo sapiens
atggttttacatatttctcttactctgtacagtagtctccctttatctagaaactcatttttcacagtgtcaa

SEQ ID NO: 153545 - DNA, 74 bp, Homo sapiens
catatttctcttactctgtacagtagtctccctttatctagaaactcatttttcacagtgtcaattacctgtag

SEQ ID NO: 153546 - DNA, 76 bp, Homo sapiens
tctcttactctgtacagtagtctccctttatctagaaactcatttttcacagtgtcaattacctgtagtcaactga

SEQ ID NO: 153547 - DNA, 71 bp, Homo sapiens
agtagtctccctttatctagaaactcatttttcacagtgtcaattacctgtagtcaactgaggtccaaaaa

SEQ ID NO: 153548 - DNA, 73 bp, Homo sapiens
tctccctttatctagaaactcatttttcacagtgtcaattacctgtagtcaactgaggtccaaaaataggtga

SEQ ID NO: 153549 - DNA, 75 bp, Homo sapiens
aaactcatttttcacagtgtcaattacctgtagtcaactgaggtccaaaaataggtgagtatagtgcaatgcagt

SEQ ID NO: 153550 - DNA, 74 bp, Homo sapiens
atttttcacagtgtcaattacctgtagtcaactgaggtccaaaaataggtgagtatagtgcaatgcagttattt

SEQ ID NO: 153551 - DNA, 76 bp, Homo sapiens
agtgtcaattacctgtagtcaactgaggtccaaaaataggtgagtatagtgcaatgcagttattttggggcagaga

SEQ ID NO: 153552 - DNA, 76 bp, Homo sapiens
acctgtagtcaactgaggtccaaaaataggtgagtatagtgcaatgcagttattttggggcagagagggagagaga

SEQ ID NO: 153553 - DNA, 70 bp, Homo sapiens
agagggagagagagcacattcacgtaagttttattatagtatattgataacattggcctttttttctttt

SEQ ID NO: 153554 - DNA, 75 bp, Homo sapiens
ggattacaggcgcgagtcaccagccccggcctaggctgaatgatctagattgccactattaggaatggttttggg

SEQ ID NO: 153555 - DNA, 72 bp, Homo sapiens
aggcgcgagtcaccagccccggcctaggctgaatgatctagattgccactattaggaatggttttggggttt

SEQ ID NO: 153556 - DNA, 69 bp, Homo sapiens
cagccccggcctaggctgaatgatctagattgccactattaggaatggttttggggtttttgccttttt

SEQ ID NO: 153557 - DNA, 67 bp, Homo sapiens
ccggcctaggctgaatgatctagattgccactattaggaatggttttggggtttttgcctttttttt

SEQ ID NO: 153558 - DNA, 65 bp, Homo sapiens
ttttttttgtttctttaaacttttttctctgaggctccagaactaggaaagtcgaggtataaata

SEQ ID NO: 153559 - DNA, 68 bp, Homo sapiens
ttctttaaacttttttctctgaggctccagaactaggaaagtcgaggtataaatagggtctaataatc

SEQ ID NO: 153560 - DNA, 69 bp, Homo sapiens
aaacttttttctctgaggctccagaactaggaaagtcgaggtataaatagggtctaataatctgtattg

SEQ ID NO: 153561 - DNA, 75 bp, Homo sapiens
gaggctccagaactaggaaagtcgaggtataaatagggtctaataatctgtattggaagagtgatgttgctacta

SEQ ID NO: 153562 - DNA, 74 bp, Homo sapiens
gaactaggaaagtcgaggtataaatagggtctaataatctgtattggaagagtgatgttgctactagtattcta

SEQ ID NO: 153563 - DNA, 72 bp, Homo sapiens
aaagtcgaggtataaatagggtctaataatctgtattggaagagtgatgttgctactagtattctagtcctt

SEQ ID NO: 153564 - DNA, 72 bp, Homo sapiens
ggtataaatagggtctaataatctgtattggaagagtgatgttgctactagtattctagtcctttggaaaaa

SEQ ID NO: 153565 - DNA, 72 bp, Homo sapiens
gggtctaataatctgtattggaagagtgatgttgctactagtattctagtcctttggaaaaattcaccattt

SEQ ID NO: 153566 - DNA, 73 bp, Homo sapiens
tctgtattggaagagtgatgttgctactagtattctagtcctttggaaaaattcaccattttaatgaaaagga

SEQ ID NO: 153567 - DNA, 70 bp, Homo sapiens
gaagagtgatgttgctactagtattctagtcctttggaaaaattcaccattttaatgaaaaggagaaaac

SEQ ID NO: 153568 - DNA, 69 bp, Homo sapiens
gttgctactagtattctagtcctttggaaaaattcaccattttaatgaaaaggagaaaactgtatgtag

SEQ ID NO: 153569 - DNA, 71 bp, Homo sapiens
attctagtcctttggaaaaattcaccattttaatgaaaaggagaaaactgtatgtagttcagtcttgatga

SEQ ID NO: 153570 - DNA, 70 bp, Homo sapiens
cctttggaaaaattcaccattttaatgaaaaggagaaaactgtatgtagttcagtcttgatgaaagagat

SEQ ID NO: 153571 - DNA, 70 bp, Homo sapiens
attcaccattttaatgaaaaggagaaaactgtatgtagttcagtcttgatgaaagagattttacttttta

SEQ ID NO: 153572 - DNA, 68 bp, Homo sapiens
ctttttaaaattaactttatccaaggtataatttacatactgtgaaattcgtacattttatgtataca

SEQ ID NO: 153573 - DNA, 74 bp, Homo sapiens
taactttatccaaggtataatttacatactgtgaaattcgtacattttatgtatacaatcgaatactatttgca

SEQ ID NO: 153574 - DNA, 74 bp, Homo sapiens
tatccaaggtataatttacatactgtgaaattcgtacattttatgtatacaatcgaatactatttgcaaattta

SEQ ID NO: 153575 - DNA, 76 bp, Homo sapiens
tttacatactgtgaaattcgtacattttatgtatacaatcgaatactatttgcaaatttaatgtgttatgcaacca

SEQ ID NO: 153576 - DNA, 78 bp, Homo sapiens
tactgtgaaattcgtacattttatgtatacaatcgaatactatttgcaaatttaatgtgttatgcaaccatctctgta

SEQ ID NO: 153577 - DNA, 77 bp, Homo sapiens
tacattttatgtatacaatcgaatactatttgcaaatttaatgtgttatgcaaccatctctgtaaatccatttcgga

SEQ ID NO: 153578 - DNA, 77 bp, Homo sapiens
gtatacaatcgaatactatttgcaaatttaatgtgttatgcaaccatctctgtaaatccatttcggagcatttctac

SEQ ID NO: 153579 - DNA, 76 bp, Homo sapiens
aatcgaatactatttgcaaatttaatgtgttatgcaaccatctctgtaaatccatttcggagcatttctaccatcc

SEQ ID NO: 153580 - DNA, 76 bp, Homo sapiens
atttgcaaatttaatgtgttatgcaaccatctctgtaaatccatttcggagcatttctaccatcccagtaaagatc

SEQ ID NO: 153581 - DNA, 75 bp, Homo sapiens
atttaatgtgttatgcaaccatctctgtaaatccatttcggagcatttctaccatcccagtaaagatccttctaa

SEQ ID NO: 153582 - DNA, 75 bp, Homo sapiens
caaccatctctgtaaatccatttcggagcatttctaccatcccagtaaagatccttctaatctgtatatagttaa

SEQ ID NO: 153583 - DNA, 74 bp, Homo sapiens
tgtaaatccatttcggagcatttctaccatcccagtaaagatccttctaatctgtatatagttaatccctcttc

SEQ ID NO: 153584 - DNA, 73 bp, Homo sapiens
atccatttcggagcatttctaccatcccagtaaagatccttctaatctgtatatagttaatccctcttcctac

SEQ ID NO: 153585 - DNA, 72 bp, Homo sapiens
atttctaccatcccagtaaagatccttctaatctgtatatagttaatccctcttcctaccactagtcctaga

SEQ ID NO: 153586 - DNA, 72 bp, Homo sapiens
atcccagtaaagatccttctaatctgtatatagttaatccctcttcctaccactagtcctagagaaccaata

SEQ ID NO: 153587 - DNA, 73 bp, Homo sapiens
taaagatccttctaatctgtatatagttaatccctcttcctaccactagtcctagagaaccaatagttgactg

SEQ ID NO: 153588 - DNA, 75 bp, Homo sapiens
tctaatctgtatatagttaatccctcttcctaccactagtcctagagaaccaatagttgactgtctctgtagatt

SEQ ID NO: 153589 - DNA, 73 bp, Homo sapiens
tcttcctaccactagtcctagagaaccaatagttgactgtctctgtagatttgccttttccctggacatttaa

SEQ ID NO: 153590 - DNA, 73 bp, Homo sapiens
taccactagtcctagagaaccaatagttgactgtctctgtagatttgccttttccctggacatttaatattaa

SEQ ID NO: 153591 - DNA, 78 bp, Homo sapiens
caatagttgactgtctctgtagatttgccttttccctggacatttaatattaatggaatcatgcaatatgtgatcttt

SEQ ID NO: 153592 - DNA, 78 bp, Homo sapiens
tctgtagatttgccttttccctggacatttaatattaatggaatcatgcaatatgtgatcttttgtgtcttgttcttc

SEQ ID NO: 153593 - DNA, 78 bp, Homo sapiens
tgccttttccctggacatttaatattaatggaatcatgcaatatgtgatcttttgtgtcttgttcttctcatttggta

SEQ ID NO: 153594 - DNA, 77 bp, Homo sapiens
tttccctggacatttaatattaatggaatcatgcaatatgtgatcttttgtgtcttgttcttctcatttggtatatt

SEQ ID NO: 153595 - DNA, 78 bp, Homo sapiens
catttaatattaatggaatcatgcaatatgtgatcttttgtgtcttgttcttctcatttggtatatttttctgattta

SEQ ID NO: 153596 - DNA, 75 bp, Homo sapiens
taatggaatcatgcaatatgtgatcttttgtgtcttgttcttctcatttggtatatttttctgatttaaaaaaaa

SEQ ID NO: 153597 - DNA, 68 bp, Homo sapiens
aaaaaaaacttaccatctgtaatttgtccccttttttgctaaatagtattccaccatagatgtatgcc

SEQ ID NO: 153598 - DNA, 69 bp, Homo sapiens
aaacttaccatctgtaatttgtccccttttttgctaaatagtattccaccatagatgtatgcctaattt

SEQ ID NO: 153599 - DNA, 73 bp, Homo sapiens
ttcattcattcattgattaacatttgggctgtttcaactttttggctgttttatcattttagttggtagtgta

SEQ ID NO: 153600 - DNA, 73 bp, Homo sapiens
tcattgattaacatttgggctgtttcaactttttggctgttttatcattttagttggtagtgtatactctgag

SEQ ID NO: 153601 - DNA, 70 bp, Homo sapiens
aacatttgggctgtttcaactttttggctgttttatcattttagttggtagtgtatactctgaggtctac

SEQ ID NO: 153602 - DNA, 71 bp, Homo sapiens
ttgggctgtttcaactttttggctgttttatcattttagttggtagtgtatactctgaggtctacggctat

SEQ ID NO: 153603 - DNA, 72 bp, Homo sapiens
gtttcaactttttggctgttttatcattttagttggtagtgtatactctgaggtctacggctattgctatac

SEQ ID NO: 153604 - DNA, 74 bp, Homo sapiens
tttcaactttttggctgttttatcattttagttggtagtgtatactctgaggtctacggctattgctatactca

SEQ ID NO: 153605 - DNA, 75 bp, Homo sapiens
ttttggctgttttatcattttagttggtagtgtatactctgaggtctacggctattgctatactcatccagtatt

SEQ ID NO: 153606 - DNA, 76 bp, Homo sapiens
ctgttttatcattttagttggtagtgtatactctgaggtctacggctattgctatactcatccagtatttgtcatt

SEQ ID NO: 153607 - DNA, 76 bp, Homo sapiens
gttttatcattttagttggtagtgtatactctgaggtctacggctattgctatactcatccagtatttgtcattta

SEQ ID NO: 153608 - DNA, 78 bp, Homo sapiens
ttatcattttagttggtagtgtatactctgaggtctacggctattgctatactcatccagtatttgtcatttatctct

SEQ ID NO: 153609 - DNA, 76 bp, Homo sapiens
attttagttggtagtgtatactctgaggtctacggctattgctatactcatccagtatttgtcatttatctctttc

SEQ ID NO: 153610 - DNA, 80 bp, Homo sapiens
ttggtagtgtatactctgaggtctacggctattgctatactcatccagtatttgtcatttatctctttcttcacaataca

SEQ ID NO: 153611 - DNA, 81 bp, Homo sapiens
tgtatactctgaggtctacggctattgctatactcatccagtatttgtcatttatctctttcttcacaatacagtgacatt

SEQ ID NO: 153612 - DNA, 80 bp, Homo sapiens
tatactctgaggtctacggctattgctatactcatccagtatttgtcatttatctctttcttcacaatacagtgacattt

SEQ ID NO: 153613 - DNA, 81 bp, Homo sapiens
ttgctatactcatccagtatttgtcatttatctctttcttcacaatacagtgacattttgtagttgtatagtaggcatgac

SEQ ID NO: 153614 - DNA, 77 bp, Homo sapiens
tatctctttcttcacaatacagtgacattttgtagttgtatagtaggcatgacgtactggttgtgtggtaggaatta

SEQ ID NO: 153615 - DNA, 76 bp, Homo sapiens
ttcacaatacagtgacattttgtagttgtatagtaggcatgacgtactggttgtgtggtaggaattagggcatatt

SEQ ID NO: 153616 - DNA, 74 bp, Homo sapiens
acattttgtagttgtatagtaggcatgacgtactggttgtgtggtaggaattagggcatatttgctgagaacct

SEQ ID NO: 153617 - DNA, 74 bp, Homo sapiens
ttgtagttgtatagtaggcatgacgtactggttgtgtggtaggaattagggcatatttgctgagaaccttaggg

SEQ ID NO: 153618 - DNA, 74 bp, Homo sapiens
atagtaggcatgacgtactggttgtgtggtaggaattagggcatatttgctgagaaccttaggggtagtgtgat

SEQ ID NO: 153619 - DNA, 74 bp, Homo sapiens
tgtggtaggaattagggcatatttgctgagaaccttaggggtagtgtgatttggctcttgctttgtttgatatt

SEQ ID NO: 153620 - DNA, 76 bp, Homo sapiens
atatttgctgagaaccttaggggtagtgtgatttggctcttgctttgtttgatatttgctacatatcctgtattaa

SEQ ID NO: 153621 - DNA, 74 bp, Homo sapiens
aaccttaggggtagtgtgatttggctcttgctttgtttgatatttgctacatatcctgtattaaggtttgcata

SEQ ID NO: 153622 - DNA, 76 bp, Homo sapiens
gtagtgtgatttggctcttgctttgtttgatatttgctacatatcctgtattaaggtttgcataattactcctctt

SEQ ID NO: 153623 - DNA, 76 bp, Homo sapiens
ttggctcttgctttgtttgatatttgctacatatcctgtattaaggtttgcataattactcctctttccattgact

SEQ ID NO: 153624 - DNA, 76 bp, Homo sapiens
gctttgtttgatatttgctacatatcctgtattaaggtttgcataattactcctctttccattgacttgtgcagtt

SEQ ID NO: 153625 - DNA, 76 bp, Homo sapiens
gatatttgctacatatcctgtattaaggtttgcataattactcctctttccattgacttgtgcagttttatggatt

SEQ ID NO: 153626 - DNA, 75 bp, Homo sapiens
ctacatatcctgtattaaggtttgcataattactcctctttccattgacttgtgcagttttatggattttgatat

SEQ ID NO: 153627 - DNA, 73 bp, Homo sapiens
gtattaaggtttgcataattactcctctttccattgacttgtgcagttttatggattttgatattttcttcca

SEQ ID NO: 153628 - DNA, 73 bp, Homo sapiens
gcataattactcctctttccattgacttgtgcagttttatggattttgatattttcttccagtatccaaaagg

SEQ ID NO: 153629 - DNA, 74 bp, Homo sapiens
tcctctttccattgacttgtgcagttttatggattttgatattttcttccagtatccaaaaggtcatattcctc

SEQ ID NO: 153630 - DNA, 73 bp, Homo sapiens
gtgcagttttatggattttgatattttcttccagtatccaaaaggtcatattcctcctttgttcctgatatat

SEQ ID NO: 153631 - DNA, 73 bp, Homo sapiens
gattttgatattttcttccagtatccaaaaggtcatattcctcctttgttcctgatatattctttatcttagc

SEQ ID NO: 153632 - DNA, 74 bp, Homo sapiens
tccagtatccaaaaggtcatattcctcctttgttcctgatatattctttatcttagcttggcaaatcacttact

SEQ ID NO: 153633 - DNA, 73 bp, Homo sapiens
attcctcctttgttcctgatatattctttatcttagcttggcaaatcacttacttttttgcctcactttgctc

SEQ ID NO: 153634 - DNA, 74 bp, Homo sapiens
tattctttatcttagcttggcaaatcacttacttttttgcctcactttgctcctctgtagtaagagtaggtgaa

SEQ ID NO: 153635 - DNA, 75 bp, Homo sapiens
ttagcttggcaaatcacttacttttttgcctcactttgctcctctgtagtaagagtaggtgaattctccatgctt

SEQ ID NO: 153636 - DNA, 72 bp, Homo sapiens
aaatcacttacttttttgcctcactttgctcctctgtagtaagagtaggtgaattctccatgcttttctaac

SEQ ID NO: 153637 - DNA, 75 bp, Homo sapiens
tttttgcctcactttgctcctctgtagtaagagtaggtgaattctccatgcttttctaactgaaaagtgctgtaa

SEQ ID NO: 153638 - DNA, 75 bp, Homo sapiens
ctttgctcctctgtagtaagagtaggtgaattctccatgcttttctaactgaaaagtgctgtaactgggagagaa

SEQ ID NO: 153639 - DNA, 75 bp, Homo sapiens
tctgtagtaagagtaggtgaattctccatgcttttctaactgaaaagtgctgtaactgggagagaacataggtag

SEQ ID NO: 153640 - DNA, 73 bp, Homo sapiens
taagagtaggtgaattctccatgcttttctaactgaaaagtgctgtaactgggagagaacataggtagggagt

SEQ ID NO: 153641 - DNA, 70 bp, Homo sapiens
aattctccatgcttttctaactgaaaagtgctgtaactgggagagaacataggtagggagttggggtagt

SEQ ID NO: 153642 - DNA, 70 bp, Homo sapiens
ttttctaactgaaaagtgctgtaactgggagagaacataggtagggagttggggtagttgaggcaaggaa

SEQ ID NO: 153643 - DNA, 71 bp, Homo sapiens
taactgaaaagtgctgtaactgggagagaacataggtagggagttggggtagttgaggcaaggaagaaaga

SEQ ID NO: 153644 - DNA, 69 bp, Homo sapiens
ctgtaactgggagagaacataggtagggagttggggtagttgaggcaaggaagaaagaggggaagccta

SEQ ID NO: 153645 - DNA, 71 bp, Homo sapiens
agagaacataggtagggagttggggtagttgaggcaaggaagaaagaggggaagcctagcaacagccagga

SEQ ID NO: 153646 - DNA, 70 bp, Homo sapiens
gtagggagttggggtagttgaggcaaggaagaaagaggggaagcctagcaacagccaggaagcatctttt

SEQ ID NO: 153647 - DNA, 71 bp, Homo sapiens
ttggggtagttgaggcaaggaagaaagaggggaagcctagcaacagccaggaagcatctttttatgtattt

SEQ ID NO: 153648 - DNA, 70 bp, Homo sapiens
agttgaggcaaggaagaaagaggggaagcctagcaacagccaggaagcatctttttatgtatttttttat

SEQ ID NO: 153649 - DNA, 77 bp, Homo sapiens
gagccactgcatcccacccaggaaacatctttttaaaaatcattcagttgtcaccatgctgtttcacttacaatatg

SEQ ID NO: 153650 - DNA, 75 bp, Homo sapiens
actgcatcccacccaggaaacatctttttaaaaatcattcagttgtcaccatgctgtttcacttacaatatgtta

SEQ ID NO: 153651 - DNA, 73 bp, Homo sapiens
atcccacccaggaaacatctttttaaaaatcattcagttgtcaccatgctgtttcacttacaatatgttactc

SEQ ID NO: 153652 - DNA, 73 bp, Homo sapiens
cccaggaaacatctttttaaaaatcattcagttgtcaccatgctgtttcacttacaatatgttactctatttg

SEQ ID NO: 153653 - DNA, 71 bp, Homo sapiens
ctttttaaaaatcattcagttgtcaccatgctgtttcacttacaatatgttactctatttgtgttttattt

SEQ ID NO: 153654 - DNA, 66 bp, Homo sapiens
ttattttttatttagggaaagagttggtagacgtttctaccaaagtagaaaagtgccagatagtaa

SEQ ID NO: 153655 - DNA, 66 bp, Homo sapiens
ttttatttagggaaagagttggtagacgtttctaccaaagtagaaaagtgccagatagtaaatatt

SEQ ID NO: 153656 - DNA, 75 bp, Homo sapiens
tagtaaatattttaggttttatgagccataagttctctgtcacctaatagatgtatccagtacagaatttctcac

SEQ ID NO: 153657 - DNA, 74 bp, Homo sapiens
tttaggttttatgagccataagttctctgtcacctaatagatgtatccagtacagaatttctcactttaatttc

SEQ ID NO: 153658 - DNA, 75 bp, Homo sapiens
gttttatgagccataagttctctgtcacctaatagatgtatccagtacagaatttctcactttaatttccagtct

SEQ ID NO: 153659 - DNA, 77 bp, Homo sapiens
ataagttctctgtcacctaatagatgtatccagtacagaatttctcactttaatttccagtcttttgtgctatctgc

SEQ ID NO: 153660 - DNA, 78 bp, Homo sapiens
tctgtcacctaatagatgtatccagtacagaatttctcactttaatttccagtcttttgtgctatctgctggtttcat

SEQ ID NO: 153661 - DNA, 80 bp, Homo sapiens
aatagatgtatccagtacagaatttctcactttaatttccagtcttttgtgctatctgctggtttcattgtgagctgcaa

SEQ ID NO: 153662 - DNA, 78 bp, Homo sapiens
agtacagaatttctcactttaatttccagtcttttgtgctatctgctggtttcattgtgagctgcaaggaaatagaga

SEQ ID NO: 153663 - DNA, 81 bp, Homo sapiens
tctcactttaatttccagtcttttgtgctatctgctggtttcattgtgagctgcaaggaaatagagagctggagtattgaa

SEQ ID NO: 153664 - DNA, 80 bp, Homo sapiens
tttaatttccagtcttttgtgctatctgctggtttcattgtgagctgcaaggaaatagagagctggagtattgaagccta

SEQ ID NO: 153665 - DNA, 81 bp, Homo sapiens
agtcttttgtgctatctgctggtttcattgtgagctgcaaggaaatagagagctggagtattgaagcctagtctgagaagt

SEQ ID NO: 153666 - DNA, 83 bp, Homo sapiens
tttgtgctatctgctggtttcattgtgagctgcaaggaaatagagagctggagtattgaagcctagtctgagaagttactcta

SEQ ID NO: 153667 - DNA, 84 bp, Homo sapiens
tatctgctggtttcattgtgagctgcaaggaaatagagagctggagtattgaagcctagtctgagaagttactctatgagagaa

SEQ ID NO: 153668 - DNA, 82 bp, Homo sapiens
tggtttcattgtgagctgcaaggaaatagagagctggagtattgaagcctagtctgagaagttactctatgagagaagcaaa

SEQ ID NO: 153669 - DNA, 81 bp, Homo sapiens
ggtttcattgtgagctgcaaggaaatagagagctggagtattgaagcctagtctgagaagttactctatgagagaagcaaa

SEQ ID NO: 153670 - DNA, 80 bp, Homo sapiens
attgtgagctgcaaggaaatagagagctggagtattgaagcctagtctgagaagttactctatgagagaagcaaacccca

SEQ ID NO: 153671 - DNA, 77 bp, Homo sapiens
agctgcaaggaaatagagagctggagtattgaagcctagtctgagaagttactctatgagagaagcaaaccccaaag

SEQ ID NO: 153672 - DNA, 74 bp, Homo sapiens
aaggaaatagagagctggagtattgaagcctagtctgagaagttactctatgagagaagcaaaccccaaaggta

SEQ ID NO: 153673 - DNA, 76 bp, Homo sapiens
tagagagctggagtattgaagcctagtctgagaagttactctatgagagaagcaaaccccaaaggtagagtggaaa

SEQ ID NO: 153674 - DNA, 75 bp, Homo sapiens
tattgaagcctagtctgagaagttactctatgagagaagcaaaccccaaaggtagagtggaaacagcaattataa

SEQ ID NO: 153675 - DNA, 73 bp, Homo sapiens
ctagtctgagaagttactctatgagagaagcaaaccccaaaggtagagtggaaacagcaattataagaggaaa

SEQ ID NO: 153676 - DNA, 71 bp, Homo sapiens
aagttactctatgagagaagcaaaccccaaaggtagagtggaaacagcaattataagaggaaacgtggcca

SEQ ID NO: 153677 - DNA, 72 bp, Homo sapiens
ctatgagagaagcaaaccccaaaggtagagtggaaacagcaattataagaggaaacgtggccaggcgtggtg

SEQ ID NO: 153678 - DNA, 69 bp, Homo sapiens
aaaaaaaagaggaaatgcaacaagacttagcctatggaacctgccaagaagaagacaaaggaaggagac

SEQ ID NO: 153679 - DNA, 75 bp, Homo sapiens
aggaaatgcaacaagacttagcctatggaacctgccaagaagaagacaaaggaaggagactgtctaggattgaga

SEQ ID NO: 153680 - DNA, 73 bp, Homo sapiens
aacaagacttagcctatggaacctgccaagaagaagacaaaggaaggagactgtctaggattgagatccaatt

SEQ ID NO: 153681 - DNA, 75 bp, Homo sapiens
cttagcctatggaacctgccaagaagaagacaaaggaaggagactgtctaggattgagatccaatttgtgtgagg

SEQ ID NO: 153682 - DNA, 73 bp, Homo sapiens
aacctgccaagaagaagacaaaggaaggagactgtctaggattgagatccaatttgtgtgagggggttagtga

SEQ ID NO: 153683 - DNA, 73 bp, Homo sapiens
aagaagaagacaaaggaaggagactgtctaggattgagatccaatttgtgtgagggggttagtgatggatggg

SEQ ID NO: 153684 - DNA, 71 bp, Homo sapiens
aaaggaaggagactgtctaggattgagatccaatttgtgtgagggggttagtgatggatggggataaaggg

SEQ ID NO: 153685 - DNA, 80 bp, Homo sapiens
agactgtctaggattgagatccaatttgtgtgagggggttagtgatggatggggataaaggggcatgatgtgatagcata

SEQ ID NO: 153686 - DNA, 79 bp, Homo sapiens
tgagatccaatttgtgtgagggggttagtgatggatggggataaaggggcatgatgtgatagcatagggatctgtttta

SEQ ID NO: 153687 - DNA, 76 bp, Homo sapiens
aatttgtgtgagggggttagtgatggatggggataaaggggcatgatgtgatagcatagggatctgttttaatgaa

SEQ ID NO: 153688 - DNA, 76 bp, Homo sapiens
atggatggggataaaggggcatgatgtgatagcatagggatctgttttaatgaaaaatgttcatggggagttttga

SEQ ID NO: 153689 - DNA, 75 bp, Homo sapiens
ataaaggggcatgatgtgatagcatagggatctgttttaatgaaaaatgttcatggggagttttgagagactttg

SEQ ID NO: 153690 - DNA, 76 bp, Homo sapiens
atgatgtgatagcatagggatctgttttaatgaaaaatgttcatggggagttttgagagactttgggatggaatta

SEQ ID NO: 153691 - DNA, 73 bp, Homo sapiens
atagcatagggatctgttttaatgaaaaatgttcatggggagttttgagagactttgggatggaattatgacc

SEQ ID NO: 153692 - DNA, 73 bp, Homo sapiens
tctgttttaatgaaaaatgttcatggggagttttgagagactttgggatggaattatgaccttgccacctcaa

SEQ ID NO: 153693 - DNA, 72 bp, Homo sapiens
gaaaaatgttcatggggagttttgagagactttgggatggaattatgaccttgccacctcaataattaacta

SEQ ID NO: 153694 - DNA, 73 bp, Homo sapiens
atgttcatggggagttttgagagactttgggatggaattatgaccttgccacctcaataattaactaataaga

SEQ ID NO: 153695 - DNA, 72 bp, Homo sapiens
ttttgagagactttgggatggaattatgaccttgccacctcaataattaactaataagatgggtttgtgtaa

SEQ ID NO: 153696 - DNA, 72 bp, Homo sapiens
agactttgggatggaattatgaccttgccacctcaataattaactaataagatgggtttgtgtaagtcacca

SEQ ID NO: 153697 - DNA, 71 bp, Homo sapiens
atggaattatgaccttgccacctcaataattaactaataagatgggtttgtgtaagtcaccaccctgcccc

SEQ ID NO: 153698 - DNA, 70 bp, Homo sapiens
accttgccacctcaataattaactaataagatgggtttgtgtaagtcaccaccctgcccccactttgaga

SEQ ID NO: 153699 - DNA, 68 bp, Homo sapiens
acctcaataattaactaataagatgggtttgtgtaagtcaccaccctgcccccactttgagacagggt

SEQ ID NO: 153700 - DNA, 70 bp, Homo sapiens
aggcgtgggccactttgcctagctgttttcaccattactttgaagaaaaatgtatactttaatattttga

SEQ ID NO: 153701 - DNA, 71 bp, Homo sapiens
gggccactttgcctagctgttttcaccattactttgaagaaaaatgtatactttaatattttgatcataaa

SEQ ID NO: 153702 - DNA, 73 bp, Homo sapiens
tgcctagctgttttcaccattactttgaagaaaaatgtatactttaatattttgatcataaaacatgacaagg

SEQ ID NO: 153703 - DNA, 71 bp, Homo sapiens
ttcaccattactttgaagaaaaatgtatactttaatattttgatcataaaacatgacaaggttattattat

SEQ ID NO: 153704 - DNA, 67 bp, Homo sapiens
aagcatgagtcactgcgcccaaaccgtgacaagatttttttaaaggacgtacccaaaattccatttt

SEQ ID NO: 153705 - DNA, 64 bp, Homo sapiens
cactgcgcccaaaccgtgacaagatttttttaaaggacgtacccaaaattccatttttaatctt

SEQ ID NO: 153706 - DNA, 63 bp, Homo sapiens
cgcccaaaccgtgacaagatttttttaaaggacgtacccaaaattccatttttaatctttcaa

SEQ ID NO: 153707 - DNA, 62 bp, Homo sapiens
gtgacaagatttttttaaaggacgtacccaaaattccatttttaatctttcaattttttctt

SEQ ID NO: 153708 - DNA, 79 bp, Homo sapiens
ttttcttttcttttgatccataaagcaattgcatatatattaaatcttattctcctgccttttgcatacatgacataca

SEQ ID NO: 153709 - DNA, 79 bp, Homo sapiens
cttttgatccataaagcaattgcatatatattaaatcttattctcctgccttttgcatacatgacatacacttttatgt

SEQ ID NO: 153710 - DNA, 80 bp, Homo sapiens
gatccataaagcaattgcatatatattaaatcttattctcctgccttttgcatacatgacatacacttttatgttattgg

SEQ ID NO: 153711 - DNA, 79 bp, Homo sapiens
ccataaagcaattgcatatatattaaatcttattctcctgccttttgcatacatgacatacacttttatgttattggga

SEQ ID NO: 153712 - DNA, 82 bp, Homo sapiens
gcaattgcatatatattaaatcttattctcctgccttttgcatacatgacatacacttttatgttattgggataatgacata

SEQ ID NO: 153713 - DNA, 82 bp, Homo sapiens
gcatatatattaaatcttattctcctgccttttgcatacatgacatacacttttatgttattgggataatgacatataatca

SEQ ID NO: 153714 - DNA, 78 bp, Homo sapiens
attaaatcttattctcctgccttttgcatacatgacatacacttttatgttattgggataatgacatataatcagtta

SEQ ID NO: 153715 - DNA, 80 bp, Homo sapiens
taaatcttattctcctgccttttgcatacatgacatacacttttatgttattgggataatgacatataatcagttatata

SEQ ID NO: 153716 - DNA, 80 bp, Homo sapiens
cttattctcctgccttttgcatacatgacatacacttttatgttattgggataatgacatataatcagttatatatatta

SEQ ID NO: 153717 - DNA, 80 bp, Homo sapiens
ctcctgccttttgcatacatgacatacacttttatgttattgggataatgacatataatcagttatatatattattatta

SEQ ID NO: 153718 - DNA, 78 bp, Homo sapiens
gccttttgcatacatgacatacacttttatgttattgggataatgacatataatcagttatatatattattattattt

SEQ ID NO: 153719 - DNA, 71 bp, Homo sapiens
accttggcctcccatgccttttatgttttttgataattctgtttagatgtatagttctctgttttttagca

SEQ ID NO: 153720 - DNA, 74 bp, Homo sapiens
ggcctcccatgccttttatgttttttgataattctgtttagatgtatagttctctgttttttagcatgagacag

SEQ ID NO: 153721 - DNA, 77 bp, Homo sapiens
ttatgttttttgataattctgtttagatgtatagttctctgttttttagcatgagacagtaatacaaccatatgata

SEQ ID NO: 153722 - DNA, 80 bp, Homo sapiens
tgataattctgtttagatgtatagttctctgttttttagcatgagacagtaatacaaccatatgatactaaatcgatgaa

SEQ ID NO: 153723 - DNA, 77 bp, Homo sapiens
gtttagatgtatagttctctgttttttagcatgagacagtaatacaaccatatgatactaaatcgatgaagtgtttg

SEQ ID NO: 153724 - DNA, 77 bp, Homo sapiens
gatgtatagttctctgttttttagcatgagacagtaatacaaccatatgatactaaatcgatgaagtgtttgtaaag

SEQ ID NO: 153725 - DNA, 74 bp, Homo sapiens
gttctctgttttttagcatgagacagtaatacaaccatatgatactaaatcgatgaagtgtttgtaaagtggtt

SEQ ID NO: 153726 - DNA, 77 bp, Homo sapiens
ttagcatgagacagtaatacaaccatatgatactaaatcgatgaagtgtttgtaaagtggttttgaaattcatgtgg

SEQ ID NO: 153727 - DNA, 77 bp, Homo sapiens
gcatgagacagtaatacaaccatatgatactaaatcgatgaagtgtttgtaaagtggttttgaaattcatgtggtag

SEQ ID NO: 153728 - DNA, 76 bp, Homo sapiens
gagacagtaatacaaccatatgatactaaatcgatgaagtgtttgtaaagtggttttgaaattcatgtggtagtgc

SEQ ID NO: 153729 - DNA, 75 bp, Homo sapiens
cagtaatacaaccatatgatactaaatcgatgaagtgtttgtaaagtggttttgaaattcatgtggtagtgccga

SEQ ID NO: 153730 - DNA, 75 bp, Homo sapiens
caaccatatgatactaaatcgatgaagtgtttgtaaagtggttttgaaattcatgtggtagtgccgattatataa

SEQ ID NO: 153731 - DNA, 75 bp, Homo sapiens
atgatactaaatcgatgaagtgtttgtaaagtggttttgaaattcatgtggtagtgccgattatataatattctg

SEQ ID NO: 153732 - DNA, 75 bp, Homo sapiens
cgatgaagtgtttgtaaagtggttttgaaattcatgtggtagtgccgattatataatattctgttgaaatgtcat

SEQ ID NO: 153733 - DNA, 77 bp, Homo sapiens
ggttttgaaattcatgtggtagtgccgattatataatattctgttgaaatgtcattcctgatattctacaaaatcca

SEQ ID NO: 153734 - DNA, 80 bp, Homo sapiens
ttcatgtggtagtgccgattatataatattctgttgaaatgtcattcctgatattctacaaaatccatagagatgttgtt

SEQ ID NO: 153735 - DNA, 77 bp, Homo sapiens
ggtagtgccgattatataatattctgttgaaatgtcattcctgatattctacaaaatccatagagatgttgtttaaa

SEQ ID NO: 153736 - DNA, 79 bp, Homo sapiens
ataatattctgttgaaatgtcattcctgatattctacaaaatccatagagatgttgtttaaaatgcaggttgagcattc

SEQ ID NO: 153737 - DNA, 79 bp, Homo sapiens
gttgaaatgtcattcctgatattctacaaaatccatagagatgttgtttaaaatgcaggttgagcattcctaatcagaa

SEQ ID NO: 153738 - DNA, 79 bp, Homo sapiens
ctgatattctacaaaatccatagagatgttgtttaaaatgcaggttgagcattcctaatcagaaatccaaaatgctcca

SEQ ID NO: 153739 - DNA, 77 bp, Homo sapiens
aatgctccaaaatcgaaatctttttgaatattgacataataccacaagtggaaaattccacagttgacatcatgcaa

SEQ ID NO: 153740 - DNA, 78 bp, Homo sapiens
ccaaaatcgaaatctttttgaatattgacataataccacaagtggaaaattccacagttgacatcatgcaatgtgtca

SEQ ID NO: 153741 - DNA, 80 bp, Homo sapiens
aaatctttttgaatattgacataataccacaagtggaaaattccacagttgacatcatgcaatgtgtcagtcagaacaca

SEQ ID NO: 153742 - DNA, 83 bp, Homo sapiens
tattgacataataccacaagtggaaaattccacagttgacatcatgcaatgtgtcagtcagaacacaggaacacagcagagtt

SEQ ID NO: 153743 - DNA, 82 bp, Homo sapiens
ataataccacaagtggaaaattccacagttgacatcatgcaatgtgtcagtcagaacacaggaacacagcagagtttattca

SEQ ID NO: 153744 - DNA, 78 bp, Homo sapiens
cagttgacatcatgcaatgtgtcagtcagaacacaggaacacagcagagtttattcaacgtcccccagggaaaaacta

SEQ ID NO: 153745 - DNA, 76 bp, Homo sapiens
acatcatgcaatgtgtcagtcagaacacaggaacacagcagagtttattcaacgtcccccagggaaaaactatcct

SEQ ID NO: 153746 - DNA, 74 bp, Homo sapiens
aatgtgtcagtcagaacacaggaacacagcagagtttattcaacgtcccccagggaaaaactatccttccatca

SEQ ID NO: 153747 - DNA, 71 bp, Homo sapiens
acagcagagtttattcaacgtcccccagggaaaaactatccttccatcacccttcagcttagatgtatctt

SEQ ID NO: 153748 - DNA, 71 bp, Homo sapiens
agagtttattcaacgtcccccagggaaaaactatccttccatcacccttcagcttagatgtatcttttgca

SEQ ID NO: 153749 - DNA, 74 bp, Homo sapiens
tcccccagggaaaaactatccttccatcacccttcagcttagatgtatcttttgcatgcacagccggattttcc

SEQ ID NO: 153750 - DNA, 77 bp, Homo sapiens
aaaaactatccttccatcacccttcagcttagatgtatcttttgcatgcacagccggattttcccatgcaattatac

SEQ ID NO: 153751 - DNA, 79 bp, Homo sapiens
tatccttccatcacccttcagcttagatgtatcttttgcatgcacagccggattttcccatgcaattatacccataaaa

SEQ ID NO: 153752 - DNA, 78 bp, Homo sapiens
agcttagatgtatcttttgcatgcacagccggattttcccatgcaattatacccataaaaggtgataaaatggcacac

SEQ ID NO: 153753 - DNA, 80 bp, Homo sapiens
tatcttttgcatgcacagccggattttcccatgcaattatacccataaaaggtgataaaatggcacacgtgcaggctgga

SEQ ID NO: 153754 - DNA, 78 bp, Homo sapiens
acagccggattttcccatgcaattatacccataaaaggtgataaaatggcacacgtgcaggctggatgcaccaacaga

SEQ ID NO: 153755 - DNA, 75 bp, Homo sapiens
ttttcccatgcaattatacccataaaaggtgataaaatggcacacgtgcaggctggatgcaccaacagaaagttt

SEQ ID NO: 153756 - DNA, 75 bp, Homo sapiens
atgcaattatacccataaaaggtgataaaatggcacacgtgcaggctggatgcaccaacagaaagttttccaaaa

SEQ ID NO: 153757 - DNA, 73 bp, Homo sapiens
aattatacccataaaaggtgataaaatggcacacgtgcaggctggatgcaccaacagaaagttttccaaaata

SEQ ID NO: 153758 - DNA, 73 bp, Homo sapiens
attatacccataaaaggtgataaaatggcacacgtgcaggctggatgcaccaacagaaagttttccaaaataa

SEQ ID NO: 153759 - DNA, 73 bp, Homo sapiens
ataaaaggtgataaaatggcacacgtgcaggctggatgcaccaacagaaagttttccaaaataacccacatgg

SEQ ID NO: 153760 - DNA, 73 bp, Homo sapiens
taaaaggtgataaaatggcacacgtgcaggctggatgcaccaacagaaagttttccaaaataacccacatggg

SEQ ID NO: 153761 - DNA, 74 bp, Homo sapiens
ggtgataaaatggcacacgtgcaggctggatgcaccaacagaaagttttccaaaataacccacatggggcaaaa

SEQ ID NO: 153762 - DNA, 74 bp, Homo sapiens
taaaatggcacacgtgcaggctggatgcaccaacagaaagttttccaaaataacccacatggggcaaaagcctc

SEQ ID NO: 153763 - DNA, 74 bp, Homo sapiens
acacgtgcaggctggatgcaccaacagaaagttttccaaaataacccacatggggcaaaagcctccttgcatta

SEQ ID NO: 153764 - DNA, 76 bp, Homo sapiens
tgcaggctggatgcaccaacagaaagttttccaaaataacccacatggggcaaaagcctccttgcattattcattg

SEQ ID NO: 153765 - DNA, 74 bp, Homo sapiens
gctggatgcaccaacagaaagttttccaaaataacccacatggggcaaaagcctccttgcattattcattgtgt

SEQ ID NO: 153766 - DNA, 71 bp, Homo sapiens
atgcaccaacagaaagttttccaaaataacccacatggggcaaaagcctccttgcattattcattgtgttt

SEQ ID NO: 153767 - DNA, 69 bp, Homo sapiens
caacagaaagttttccaaaataacccacatggggcaaaagcctccttgcattattcattgtgtttttaa

SEQ ID NO: 153768 - DNA, 68 bp, Homo sapiens
ttaaattaaaaagaattttttcctgctttgtggtataaagattttgttgaacttctcagaaagcctga

SEQ ID NO: 153769 - DNA, 72 bp, Homo sapiens
aaagattttgttgaacttctcagaaagcctgaagatatccccatagattagagtaataagaaaggaggaaga

SEQ ID NO: 153770 - DNA, 71 bp, Homo sapiens
aacttctcagaaagcctgaagatatccccatagattagagtaataagaaaggaggaagaatttaggtatag

SEQ ID NO: 153771 - DNA, 72 bp, Homo sapiens
aagcctgaagatatccccatagattagagtaataagaaaggaggaagaatttaggtatagtgcagaaagtaa

SEQ ID NO: 153772 - DNA, 72 bp, Homo sapiens
aagatatccccatagattagagtaataagaaaggaggaagaatttaggtatagtgcagaaagtaagtcaggc

SEQ ID NO: 153773 - DNA, 72 bp, Homo sapiens
atagattagagtaataagaaaggaggaagaatttaggtatagtgcagaaagtaagtcaggctcttggagaaa

SEQ ID NO: 153774 - DNA, 72 bp, Homo sapiens
agagtaataagaaaggaggaagaatttaggtatagtgcagaaagtaagtcaggctcttggagaaactagaca

SEQ ID NO: 153775 - DNA, 74 bp, Homo sapiens
gaggaagaatttaggtatagtgcagaaagtaagtcaggctcttggagaaactagacagtggtgtaagtgtgaaa

SEQ ID NO: 153776 - DNA, 74 bp, Homo sapiens
agaatttaggtatagtgcagaaagtaagtcaggctcttggagaaactagacagtggtgtaagtgtgaaacatct

SEQ ID NO: 153777 - DNA, 78 bp, Homo sapiens
tatagtgcagaaagtaagtcaggctcttggagaaactagacagtggtgtaagtgtgaaacatctttcagaagagtatg

SEQ ID NO: 153778 - DNA, 80 bp, Homo sapiens
agaaactagacagtggtgtaagtgtgaaacatctttcagaagagtatggtattagactgaccaccatgtatgatgagaca

SEQ ID NO: 153779 - DNA, 82 bp, Homo sapiens
tgaaacatctttcagaagagtatggtattagactgaccaccatgtatgatgagacaggccctacaggaattcaggatgacta

SEQ ID NO: 153780 - DNA, 81 bp, Homo sapiens
atctttcagaagagtatggtattagactgaccaccatgtatgatgagacaggccctacaggaattcaggatgactaggaca

SEQ ID NO: 153781 - DNA, 80 bp, Homo sapiens
agagtatggtattagactgaccaccatgtatgatgagacaggccctacaggaattcaggatgactaggacagagtaactg

SEQ ID NO: 153782 - DNA, 83 bp, Homo sapiens
attagactgaccaccatgtatgatgagacaggccctacaggaattcaggatgactaggacagagtaactgtgctgggatgtgc

SEQ ID NO: 153783 - DNA, 82 bp, Homo sapiens
accatgtatgatgagacaggccctacaggaattcaggatgactaggacagagtaactgtgctgggatgtgctaattaagcag

SEQ ID NO: 153784 - DNA, 82 bp, Homo sapiens
atgagacaggccctacaggaattcaggatgactaggacagagtaactgtgctgggatgtgctaattaagcaggcatgtgtaa

SEQ ID NO: 153785 - DNA, 82 bp, Homo sapiens
aattcaggatgactaggacagagtaactgtgctgggatgtgctaattaagcaggcatgtgtaagtgtaaacttgctatgata

SEQ ID NO: 153786 - DNA, 80 bp, Homo sapiens
actaggacagagtaactgtgctgggatgtgctaattaagcaggcatgtgtaagtgtaaacttgctatgataggcaaaagc

SEQ ID NO: 153787 - DNA, 81 bp, Homo sapiens
agtaactgtgctgggatgtgctaattaagcaggcatgtgtaagtgtaaacttgctatgataggcaaaagcttgtgttctca

SEQ ID NO: 153788 - DNA, 80 bp, Homo sapiens
ggatgtgctaattaagcaggcatgtgtaagtgtaaacttgctatgataggcaaaagcttgtgttctcactgttagtgatt

SEQ ID NO: 153789 - DNA, 78 bp, Homo sapiens
ctaattaagcaggcatgtgtaagtgtaaacttgctatgataggcaaaagcttgtgttctcactgttagtgatttcaag

SEQ ID NO: 153790 - DNA, 78 bp, Homo sapiens
catgtgtaagtgtaaacttgctatgataggcaaaagcttgtgttctcactgttagtgatttcaaggcatgaatttctt

SEQ ID NO: 153791 - DNA, 76 bp, Homo sapiens
taagtgtaaacttgctatgataggcaaaagcttgtgttctcactgttagtgatttcaaggcatgaatttcttttct

SEQ ID NO: 153792 - DNA, 75 bp, Homo sapiens
caccgcacctgccccaaaggcatgaatttcttaccagttcgttattatgctaacagaaaggcatggatatctagg

SEQ ID NO: 153793 - DNA, 75 bp, Homo sapiens
ctgccccaaaggcatgaatttcttaccagttcgttattatgctaacagaaaggcatggatatctagggacatctt

SEQ ID NO: 153794 - DNA, 76 bp, Homo sapiens
aaggcatggatatctagggacatcttttctgattggtttcacaaacattttatagcagtagttggtgcttatttca

SEQ ID NO: 153795 - DNA, 74 bp, Homo sapiens
atatctagggacatcttttctgattggtttcacaaacattttatagcagtagttggtgcttatttcagggaagc

SEQ ID NO: 153796 - DNA, 77 bp, Homo sapiens
atcttttctgattggtttcacaaacattttatagcagtagttggtgcttatttcagggaagctggacaggatgatga

SEQ ID NO: 153797 - DNA, 76 bp, Homo sapiens
attggtttcacaaacattttatagcagtagttggtgcttatttcagggaagctggacaggatgatgactgttcctc

SEQ ID NO: 153798 - DNA, 75 bp, Homo sapiens
acaaacattttatagcagtagttggtgcttatttcagggaagctggacaggatgatgactgttcctccttgaaaa

SEQ ID NO: 153799 - DNA, 76 bp, Homo sapiens
tttatagcagtagttggtgcttatttcagggaagctggacaggatgatgactgttcctccttgaaaactcttcggc

SEQ ID NO: 153800 - DNA, 81 bp, Homo sapiens
ttggtgcttatttcagggaagctggacaggatgatgactgttcctccttgaaaactcttcggctcatcctgcagctgcaat

SEQ ID NO: 153801 - DNA, 81 bp, Homo sapiens
tatttcagggaagctggacaggatgatgactgttcctccttgaaaactcttcggctcatcctgcagctgcaattttatcaa

SEQ ID NO: 153802 - DNA, 79 bp, Homo sapiens
tggacaggatgatgactgttcctccttgaaaactcttcggctcatcctgcagctgcaattttatcaaaaataatgttta

SEQ ID NO: 153803 - DNA, 79 bp, Homo sapiens
aggatgatgactgttcctccttgaaaactcttcggctcatcctgcagctgcaattttatcaaaaataatgtttatgcca

SEQ ID NO: 153804 - DNA, 78 bp, Homo sapiens
ctgttcctccttgaaaactcttcggctcatcctgcagctgcaattttatcaaaaataatgtttatgccatgtgctttc

SEQ ID NO: 153805 - DNA, 80 bp, Homo sapiens
ttgaaaactcttcggctcatcctgcagctgcaattttatcaaaaataatgtttatgccatgtgctttccctgaagtgtga

SEQ ID NO: 153806 - DNA, 84 bp, Homo sapiens
ctcatcctgcagctgcaattttatcaaaaataatgtttatgccatgtgctttccctgaagtgtgacttcactgccatatgacca

SEQ ID NO: 153807 - DNA, 79 bp, Homo sapiens
agctgcaattttatcaaaaataatgtttatgccatgtgctttccctgaagtgtgacttcactgccatatgaccagggaa

SEQ ID NO: 153808 - DNA, 78 bp, Homo sapiens
ttatcaaaaataatgtttatgccatgtgctttccctgaagtgtgacttcactgccatatgaccagggaatccctagat

SEQ ID NO: 153809 - DNA, 81 bp, Homo sapiens
taatgtttatgccatgtgctttccctgaagtgtgacttcactgccatatgaccagggaatccctagattgatgaagagtaa

SEQ ID NO: 153810 - DNA, 81 bp, Homo sapiens
tttatgccatgtgctttccctgaagtgtgacttcactgccatatgaccagggaatccctagattgatgaagagtaaatata

SEQ ID NO: 153811 - DNA, 76 bp, Homo sapiens
tttccctgaagtgtgacttcactgccatatgaccagggaatccctagattgatgaagagtaaatataaaaatgctt

SEQ ID NO: 153812 - DNA, 82 bp, Homo sapiens
tatgaccagggaatccctagattgatgaagagtaaatataaaaatgctttcttgaatatgctggcagctgtgaatagatgta

SEQ ID NO: 153813 - DNA, 78 bp, Homo sapiens
atgaagagtaaatataaaaatgctttcttgaatatgctggcagctgtgaatagatgtatgggtgtgaaagggtttcaa

SEQ ID NO: 153814 - DNA, 76 bp, Homo sapiens
aaaaatgctttcttgaatatgctggcagctgtgaatagatgtatgggtgtgaaagggtttcaaaaggagtgaagga

SEQ ID NO: 153815 - DNA, 84 bp, Homo sapiens
ttgaatatgctggcagctgtgaatagatgtatgggtgtgaaagggtttcaaaaggagtgaaggatgccatatatgctgttgtca

SEQ ID NO: 153816 - DNA, 78 bp, Homo sapiens
aatagatgtatgggtgtgaaagggtttcaaaaggagtgaaggatgccatatatgctgttgtcagtgtctggaacacag

SEQ ID NO: 153817 - DNA, 78 bp, Homo sapiens
tatgggtgtgaaagggtttcaaaaggagtgaaggatgccatatatgctgttgtcagtgtctggaacacagtgactaaa

SEQ ID NO: 153818 - DNA, 76 bp, Homo sapiens
aaagggtttcaaaaggagtgaaggatgccatatatgctgttgtcagtgtctggaacacagtgactaaaggtacagc

SEQ ID NO: 153819 - DNA, 84 bp, Homo sapiens
aaaaggagtgaaggatgccatatatgctgttgtcagtgtctggaacacagtgactaaaggtacagctgtgcatgcctggcacca

SEQ ID NO: 153820 - DNA, 86 bp, Homo sapiens
aggatgccatatatgctgttgtcagtgtctggaacacagtgactaaaggtacagctgtgcatgcctggcaccacttgtgaccttca

SEQ ID NO: 153821 - DNA, 85 bp, Homo sapiens
atatatgctgttgtcagtgtctggaacacagtgactaaaggtacagctgtgcatgcctggcaccacttgtgaccttcagctgtgt

SEQ ID NO: 153822 - DNA, 86 bp, Homo sapiens
agtgtctggaacacagtgactaaaggtacagctgtgcatgcctggcaccacttgtgaccttcagctgtgttcactgatgataatga

SEQ ID NO: 153823 - DNA, 83 bp, Homo sapiens
aacacagtgactaaaggtacagctgtgcatgcctggcaccacttgtgaccttcagctgtgttcactgatgataatgaacaagg

SEQ ID NO: 153824 - DNA, 84 bp, Homo sapiens
taaaggtacagctgtgcatgcctggcaccacttgtgaccttcagctgtgttcactgatgataatgaacaaggtggtgattttga

SEQ ID NO: 153825 - DNA, 86 bp, Homo sapiens
tacagctgtgcatgcctggcaccacttgtgaccttcagctgtgttcactgatgataatgaacaaggtggtgattttgatggcttct

SEQ ID NO: 153826 - DNA, 80 bp, Homo sapiens
cctggcaccacttgtgaccttcagctgtgttcactgatgataatgaacaaggtggtgattttgatggcttcttcagtaaa

SEQ ID NO: 153827 - DNA, 79 bp, Homo sapiens
acttgtgaccttcagctgtgttcactgatgataatgaacaaggtggtgattttgatggcttcttcagtaaagtgagaaa

SEQ ID NO: 153828 - DNA, 80 bp, Homo sapiens
ttcagctgtgttcactgatgataatgaacaaggtggtgattttgatggcttcttcagtaaagtgagaaaaatgtgtaaca

SEQ ID NO: 153829 - DNA, 79 bp, Homo sapiens
tcactgatgataatgaacaaggtggtgattttgatggcttcttcagtaaagtgagaaaaatgtgtaacatccttacata

SEQ ID NO: 153830 - DNA, 78 bp, Homo sapiens
atgataatgaacaaggtggtgattttgatggcttcttcagtaaagtgagaaaaatgtgtaacatccttacatatgcaa

SEQ ID NO: 153831 - DNA, 74 bp, Homo sapiens
ggtggtgattttgatggcttcttcagtaaagtgagaaaaatgtgtaacatccttacatatgcaaaaagtatacc

SEQ ID NO: 153832 - DNA, 75 bp, Homo sapiens
tcttcagtaaagtgagaaaaatgtgtaacatccttacatatgcaaaaagtataccttccatttgtcagtaagctg

SEQ ID NO: 153833 - DNA, 74 bp, Homo sapiens
agtgagaaaaatgtgtaacatccttacatatgcaaaaagtataccttccatttgtcagtaagctggaagaagtg

SEQ ID NO: 153834 - DNA, 72 bp, Homo sapiens
atccttacatatgcaaaaagtataccttccatttgtcagtaagctggaagaagtggataacaagaaagcttt

SEQ ID NO: 153835 - DNA, 72 bp, Homo sapiens
gcaaaaagtataccttccatttgtcagtaagctggaagaagtggataacaagaaagcttttaatatcgacaa

SEQ ID NO: 153836 - DNA, 71 bp, Homo sapiens
aagtataccttccatttgtcagtaagctggaagaagtggataacaagaaagcttttaatatcgacaaagag

SEQ ID NO: 153837 - DNA, 71 bp, Homo sapiens
taagctggaagaagtggataacaagaaagcttttaatatcgacaaagaggctcccgtttctttgttcaaca

SEQ ID NO: 153838 - DNA, 71 bp, Homo sapiens
aagaagtggataacaagaaagcttttaatatcgacaaagaggctcccgtttctttgttcaacatggtgata

SEQ ID NO: 153839 - DNA, 78 bp, Homo sapiens
agaaagcttttaatatcgacaaagaggctcccgtttctttgttcaacatggtgatagagctgacatcgatctgaatca

SEQ ID NO: 153840 - DNA, 80 bp, Homo sapiens
ttttaatatcgacaaagaggctcccgtttctttgttcaacatggtgatagagctgacatcgatctgaatcagagtgattg

SEQ ID NO: 153841 - DNA, 84 bp, Homo sapiens
tcgacaaagaggctcccgtttctttgttcaacatggtgatagagctgacatcgatctgaatcagagtgattgtgataatgaaga

SEQ ID NO: 153842 - DNA, 84 bp, Homo sapiens
ctcccgtttctttgttcaacatggtgatagagctgacatcgatctgaatcagagtgattgtgataatgaagatgacattaacac

SEQ ID NO: 153843 - DNA, 87 bp, Homo sapiens
tttgttcaacatggtgatagagctgacatcgatctgaatcagagtgattgtgataatgaagatgacattaacactgcagaaaaagta

SEQ ID NO: 153844 - DNA, 88 bp, Homo sapiens
atggtgatagagctgacatcgatctgaatcagagtgattgtgataatgaagatgacattaacactgcagaaaaagtacctatagatga

SEQ ID NO: 153845 - DNA, 86 bp, Homo sapiens
tgacatcgatctgaatcagagtgattgtgataatgaagatgacattaacactgcagaaaaagtacctatagatgacatggttaatg

SEQ ID NO: 153846 - DNA, 85 bp, Homo sapiens
atctgaatcagagtgattgtgataatgaagatgacattaacactgcagaaaaagtacctatagatgacatggttaatgtatgtga

SEQ ID NO: 153847 - DNA, 82 bp, Homo sapiens
gtgattgtgataatgaagatgacattaacactgcagaaaaagtacctatagatgacatggttaatgtatgtgatgggcttat

SEQ ID NO: 153848 - DNA, 80 bp, Homo sapiens
ataatgaagatgacattaacactgcagaaaaagtacctatagatgacatggttaatgtatgtgatgggcttattgaagga

SEQ ID NO: 153849 - DNA, 79 bp, Homo sapiens
aagatgacattaacactgcagaaaaagtacctatagatgacatggttaatgtatgtgatgggcttattgaaggaccaga

SEQ ID NO: 153850 - DNA, 81 bp, Homo sapiens
actgcagaaaaagtacctatagatgacatggttaatgtatgtgatgggcttattgaaggaccagagcagtgttcattcata

SEQ ID NO: 153851 - DNA, 79 bp, Homo sapiens
aaaaagtacctatagatgacatggttaatgtatgtgatgggcttattgaaggaccagagcagtgttcattcataacaga

SEQ ID NO: 153852 - DNA, 81 bp, Homo sapiens
ctatagatgacatggttaatgtatgtgatgggcttattgaaggaccagagcagtgttcattcataacagaaaaagaaatca

SEQ ID NO: 153853 - DNA, 79 bp, Homo sapiens
ttaatgtatgtgatgggcttattgaaggaccagagcagtgttcattcataacagaaaaagaaatcatgtcagtttataa

SEQ ID NO: 153854 - DNA, 74 bp, Homo sapiens
caaaaaataaagaaatgaataaaatgagatccttctagacaatactcgttgttaatgagacagatgactttaga

SEQ ID NO: 153855 - DNA, 75 bp, Homo sapiens
gaaatgaataaaatgagatccttctagacaatactcgttgttaatgagacagatgactttagaggaaacatttta

SEQ ID NO: 153856 - DNA, 73 bp, Homo sapiens
gaataaaatgagatccttctagacaatactcgttgttaatgagacagatgactttagaggaaacattttaaaa

SEQ ID NO: 153857 - DNA, 74 bp, Homo sapiens
gatccttctagacaatactcgttgttaatgagacagatgactttagaggaaacattttaaaaagctatcccaca

SEQ ID NO: 153858 - DNA, 74 bp, Homo sapiens
aatactcgttgttaatgagacagatgactttagaggaaacattttaaaaagctatcccacagaatgcctcttca

SEQ ID NO: 153859 - DNA, 75 bp, Homo sapiens
gttgttaatgagacagatgactttagaggaaacattttaaaaagctatcccacagaatgcctcttcattcctaga

SEQ ID NO: 153860 - DNA, 73 bp, Homo sapiens
acagatgactttagaggaaacattttaaaaagctatcccacagaatgcctcttcattcctagaggacttcctg

SEQ ID NO: 153861 - DNA, 71 bp, Homo sapiens
tagaggaaacattttaaaaagctatcccacagaatgcctcttcattcctagaggacttcctggttcctaat

SEQ ID NO: 153862 - DNA, 71 bp, Homo sapiens
aaacattttaaaaagctatcccacagaatgcctcttcattcctagaggacttcctggttcctaattgcttc

SEQ ID NO: 153863 - DNA, 75 bp, Homo sapiens
ttttaaaaagctatcccacagaatgcctcttcattcctagaggacttcctggttcctaattgcttctgatgatgt

SEQ ID NO: 153864 - DNA, 75 bp, Homo sapiens
tttaaaaagctatcccacagaatgcctcttcattcctagaggacttcctggttcctaattgcttctgatgatgtt

SEQ ID NO: 153865 - DNA, 76 bp, Homo sapiens
aaaagctatcccacagaatgcctcttcattcctagaggacttcctggttcctaattgcttctgatgatgtttcttc

SEQ ID NO: 153866 - DNA, 76 bp, Homo sapiens
ccacagaatgcctcttcattcctagaggacttcctggttcctaattgcttctgatgatgtttcttcttaccttata

SEQ ID NO: 153867 - DNA, 72 bp, Homo sapiens
cctcttcattcctagaggacttcctggttcctaattgcttctgatgatgtttcttcttaccttataaaataa

SEQ ID NO: 153868 - DNA, 72 bp, Homo sapiens
ctcttcattcctagaggacttcctggttcctaattgcttctgatgatgtttcttcttaccttataaaataaa

SEQ ID NO: 153869 - DNA, 71 bp, Homo sapiens
cattcctagaggacttcctggttcctaattgcttctgatgatgtttcttcttaccttataaaataaaacag

SEQ ID NO: 153870 - DNA, 70 bp, Homo sapiens
cttcctggttcctaattgcttctgatgatgtttcttcttaccttataaaataaaacagtatacagtaacc

SEQ ID NO: 153871 - DNA, 73 bp, Homo sapiens
tgcttctgatgatgtttcttcttaccttataaaataaaacagtatacagtaaccttttaatcaaaacacagca

SEQ ID NO: 153872 - DNA, 73 bp, Homo sapiens
ttcttcttaccttataaaataaaacagtatacagtaaccttttaatcaaaacacagcatcatagatggagaca

SEQ ID NO: 153873 - DNA, 73 bp, Homo sapiens
cttataaaataaaacagtatacagtaaccttttaatcaaaacacagcatcatagatggagacacaaagcccga

SEQ ID NO: 153874 - DNA, 75 bp, Homo sapiens
taaaacagtatacagtaaccttttaatcaaaacacagcatcatagatggagacacaaagcccgacattgttatta

SEQ ID NO: 153875 - DNA, 74 bp, Homo sapiens
agtatacagtaaccttttaatcaaaacacagcatcatagatggagacacaaagcccgacattgttattactgtt

SEQ ID NO: 153876 - DNA, 78 bp, Homo sapiens
ttttaatcaaaacacagcatcatagatggagacacaaagcccgacattgttattactgtttttttatcagctgataca

SEQ ID NO: 153877 - DNA, 79 bp, Homo sapiens
aaaacacagcatcatagatggagacacaaagcccgacattgttattactgtttttttatcagctgatacatgtattctc

SEQ ID NO: 153878 - DNA, 79 bp, Homo sapiens
atcatagatggagacacaaagcccgacattgttattactgtttttttatcagctgatacatgtattctcgtgatactac

SEQ ID NO: 153879 - DNA, 79 bp, Homo sapiens
agacacaaagcccgacattgttattactgtttttttatcagctgatacatgtattctcgtgatactactgtgctgctta

SEQ ID NO: 153880 - DNA, 80 bp, Homo sapiens
cgacattgttattactgtttttttatcagctgatacatgtattctcgtgatactactgtgctgcttagctaccctgaaca

SEQ ID NO: 153881 - DNA, 79 bp, Homo sapiens
attactgtttttttatcagctgatacatgtattctcgtgatactactgtgctgcttagctaccctgaacacacattact

SEQ ID NO: 153882 - DNA, 81 bp, Homo sapiens
tttttatcagctgatacatgtattctcgtgatactactgtgctgcttagctaccctgaacacacattactttttcactgta

SEQ ID NO: 153883 - DNA, 79 bp, Homo sapiens
tattctcgtgatactactgtgctgcttagctaccctgaacacacattactttttcactgtattaatggtatgtcatatt

SEQ ID NO: 153884 - DNA, 76 bp, Homo sapiens
atactactgtgctgcttagctaccctgaacacacattactttttcactgtattaatggtatgtcatatttttactg

SEQ ID NO: 153885 - DNA, 77 bp, Homo sapiens
tactgttaagtacttatgtgtgaataagtataagaaaatgtttgcctgtcagtagcacataaattcagagacaggaa

SEQ ID NO: 153886 - DNA, 78 bp, Homo sapiens
agtacttatgtgtgaataagtataagaaaatgtttgcctgtcagtagcacataaattcagagacaggaatgatggtaa

SEQ ID NO: 153887 - DNA, 80 bp, Homo sapiens
tgtgtgaataagtataagaaaatgtttgcctgtcagtagcacataaattcagagacaggaatgatggtaatgccaaacaa

SEQ ID NO: 153888 - DNA, 80 bp, Homo sapiens
agagacaggaatgatggtaatgccaaacaaccacagatattccacatggtggctgagataatgacacttttgctttctta

SEQ ID NO: 153889 - DNA, 76 bp, Homo sapiens
aaacaaccacagatattccacatggtggctgagataatgacacttttgctttcttatggttcactgtacacaaact

SEQ ID NO: 153890 - DNA, 77 bp, Homo sapiens
cacatggtggctgagataatgacacttttgctttcttatggttcactgtacacaaactttgtataatgtagaaaata

SEQ ID NO: 153891 - DNA, 74 bp, Homo sapiens
ggctgagataatgacacttttgctttcttatggttcactgtacacaaactttgtataatgtagaaaataaatat

SEQ ID NO: 153892 - DNA, 71 bp, Homo sapiens
aatgacacttttgctttcttatggttcactgtacacaaactttgtataatgtagaaaataaatattttgta

SEQ ID NO: 153893 - DNA, 69 bp, Homo sapiens
ttgctttcttatggttcactgtacacaaactttgtataatgtagaaaataaatattttgtaaaattacc

SEQ ID NO: 153894 - DNA, 74 bp, Homo sapiens
aatattttgtaaaattaccttcaggctatgtgtatagaagatgtgtgtaatacataaatgagtttggtatttca

SEQ ID NO: 153895 - DNA, 73 bp, Homo sapiens
aaaattaccttcaggctatgtgtatagaagatgtgtgtaatacataaatgagtttggtatttcaatttgggtc

SEQ ID NO: 153896 - DNA, 74 bp, Homo sapiens
accttcaggctatgtgtatagaagatgtgtgtaatacataaatgagtttggtatttcaatttgggtcccatccc

SEQ ID NO: 153897 - DNA, 74 bp, Homo sapiens
ctatgtgtatagaagatgtgtgtaatacataaatgagtttggtatttcaatttgggtcccatccccaagataac

SEQ ID NO: 153898 - DNA, 72 bp, Homo sapiens
agaagatgtgtgtaatacataaatgagtttggtatttcaatttgggtcccatccccaagataacttattata

SEQ ID NO: 153899 - DNA, 73 bp, Homo sapiens
gtaatacataaatgagtttggtatttcaatttgggtcccatccccaagataacttattatatatatatgcaaa

SEQ ID NO: 153900 - DNA, 77 bp, Homo sapiens
tatatatatgcaaatattacaaaatatgaaaaattctaaatcacttctgatcccaagcgtttcagataaggcatact

SEQ ID NO: 153901 - DNA, 75 bp, Homo sapiens
gcaaatattacaaaatatgaaaaattctaaatcacttctgatcccaagcgtttcagataaggcatacttagcctg

SEQ ID NO: 153902 - DNA, 75 bp, Homo sapiens
caaaatatgaaaaattctaaatcacttctgatcccaagcgtttcagataaggcatacttagcctgtaactcaaga

SEQ ID NO: 153903 - DNA, 74 bp, Homo sapiens
aaattctaaatcacttctgatcccaagcgtttcagataaggcatacttagcctgtaactcaagatgtattttac

SEQ ID NO: 153904 - DNA, 75 bp, Homo sapiens
taaatcacttctgatcccaagcgtttcagataaggcatacttagcctgtaactcaagatgtattttacctattta

SEQ ID NO: 153905 - DNA, 77 bp, Homo sapiens
tctgatcccaagcgtttcagataaggcatacttagcctgtaactcaagatgtattttacctatttacctgatctaga

SEQ ID NO: 153906 - DNA, 75 bp, Homo sapiens
cgtttcagataaggcatacttagcctgtaactcaagatgtattttacctatttacctgatctagatgctacattt

SEQ ID NO: 153907 - DNA, 73 bp, Homo sapiens
aaggcatacttagcctgtaactcaagatgtattttacctatttacctgatctagatgctacatttttgttagg

SEQ ID NO: 153908 - DNA, 75 bp, Homo sapiens
ttagcctgtaactcaagatgtattttacctatttacctgatctagatgctacatttttgttaggtatatattagc

SEQ ID NO: 153909 - DNA, 77 bp, Homo sapiens
ttacctatttacctgatctagatgctacatttttgttaggtatatattagctttatatgtacaggtgtcagtgacta

SEQ ID NO: 153910 - DNA, 78 bp, Homo sapiens
ttacctgatctagatgctacatttttgttaggtatatattagctttatatgtacaggtgtcagtgactataagacctg

SEQ ID NO: 153911 - DNA, 76 bp, Homo sapiens
ctagatgctacatttttgttaggtatatattagctttatatgtacaggtgtcagtgactataagacctggctttaa

SEQ ID NO: 153912 - DNA, 71 bp, Homo sapiens
ttttgttaggtatatattagctttatatgtacaggtgtcagtgactataagacctggctttaaatttaacc

SEQ ID NO: 153913 - DNA, 70 bp, Homo sapiens
aggtatatattagctttatatgtacaggtgtcagtgactataagacctggctttaaatttaaccttttcc

SEQ ID NO: 153914 - DNA, 70 bp, Homo sapiens
gtcagtgactataagacctggctttaaatttaaccttttccttaattttggatgggccacatatattcta

SEQ ID NO: 153915 - DNA, 67 bp, Homo sapiens
aagacctggctttaaatttaaccttttccttaattttggatgggccacatatattctattatttgtg

SEQ ID NO: 153916 - DNA, 68 bp, Homo sapiens
ggctttaaatttaaccttttccttaattttggatgggccacatatattctattatttgtgtatataag

SEQ ID NO: 153917 - DNA, 69 bp, Homo sapiens
ccttttccttaattttggatgggccacatatattctattatttgtgtatataaggtaacacaagtcctt

SEQ ID NO: 153918 - DNA, 71 bp, Homo sapiens
ccttaattttggatgggccacatatattctattatttgtgtatataaggtaacacaagtccttttgtctcc

SEQ ID NO: 153919 - DNA, 71 bp, Homo sapiens
tgggccacatatattctattatttgtgtatataaggtaacacaagtccttttgtctccccccagctccttt

SEQ ID NO: 153920 - DNA, 72 bp, Homo sapiens
ttatttgtgtatataaggtaacacaagtccttttgtctccccccagctccttttgcatatgagaaaacataa

SEQ ID NO: 153921 - DNA, 72 bp, Homo sapiens
tatataaggtaacacaagtccttttgtctccccccagctccttttgcatatgagaaaacataagccattttg

SEQ ID NO: 153922 - DNA, 74 bp, Homo sapiens
aagtccttttgtctccccccagctccttttgcatatgagaaaacataagccattttgtgcctcttgcatcttaa

SEQ ID NO: 153923 - DNA, 78 bp, Homo sapiens
ttgtctccccccagctccttttgcatatgagaaaacataagccattttgtgcctcttgcatcttaagccatagtctat

SEQ ID NO: 153924 - DNA, 78 bp, Homo sapiens
agctccttttgcatatgagaaaacataagccattttgtgcctcttgcatcttaagccatagtctattttactatgtgg

SEQ ID NO: 153925 - DNA, 77 bp, Homo sapiens
ttttgcatatgagaaaacataagccattttgtgcctcttgcatcttaagccatagtctattttactatgtggtttcc

SEQ ID NO: 153926 - DNA, 74 bp, Homo sapiens
taagccattttgtgcctcttgcatcttaagccatagtctattttactatgtggtttcccatctggttacttttg

SEQ ID NO: 153927 - DNA, 75 bp, Homo sapiens
ctcttgcatcttaagccatagtctattttactatgtggtttcccatctggttacttttgggagtatcagatggtc

SEQ ID NO: 153928 - DNA, 69 bp, Homo sapiens
tttcccatctggttacttttgggagtatcagatggtctcataaaaacagtgggttttcctgaagctttt

SEQ ID NO: 153929 - DNA, 71 bp, Homo sapiens
tttgggagtatcagatggtctcataaaaacagtgggttttcctgaagctttttgattaatgttgaatttgt

SEQ ID NO: 153930 - DNA, 71 bp, Homo sapiens
cagatggtctcataaaaacagtgggttttcctgaagctttttgattaatgttgaatttgtttatcatcttt

SEQ ID NO: 153931 - DNA, 71 bp, Homo sapiens
aaaacagtgggttttcctgaagctttttgattaatgttgaatttgtttatcatcttttagctgtgcggtca

SEQ ID NO: 153932 - DNA, 72 bp, Homo sapiens
gggttttcctgaagctttttgattaatgttgaatttgtttatcatcttttagctgtgcggtcagagaagaaa

SEQ ID NO: 153933 - DNA, 75 bp, Homo sapiens
tttgattaatgttgaatttgtttatcatcttttagctgtgcggtcagagaagaaacgccttaggaagccaagcaa

SEQ ID NO: 153934 - DNA, 73 bp, Homo sapiens
aatttgtttatcatcttttagctgtgcggtcagagaagaaacgccttaggaagccaagcaagtggcttttgga

SEQ ID NO: 153935 - DNA, 76 bp, Homo sapiens
tttatcatcttttagctgtgcggtcagagaagaaacgccttaggaagccaagcaagtggcttttggaatatacaga

SEQ ID NO: 153936 - DNA, 78 bp, Homo sapiens
tttagctgtgcggtcagagaagaaacgccttaggaagccaagcaagtggcttttggaatatacagaagaatatgatca

SEQ ID NO: 153937 - DNA, 77 bp, Homo sapiens
agagaagaaacgccttaggaagccaagcaagtggcttttggaatatacagaagaatatgatcagatatttgctccta

SEQ ID NO: 153938 - DNA, 75 bp, Homo sapiens
aaacgccttaggaagccaagcaagtggcttttggaatatacagaagaatatgatcagatatttgctcctaagaaa

SEQ ID NO: 153939 - DNA, 75 bp, Homo sapiens
gtggcttttggaatatacagaagaatatgatcagatatttgctcctaagaaaaaacaaaagaaggtacaggagca

SEQ ID NO: 153940 - DNA, 76 bp, Homo sapiens
ttttggaatatacagaagaatatgatcagatatttgctcctaagaaaaaacaaaagaaggtacaggagcaggtgca

SEQ ID NO: 153941 - DNA, 76 bp, Homo sapiens
aagaatatgatcagatatttgctcctaagaaaaaacaaaagaaggtacaggagcaggtgcacaaggtatgttgcaa

SEQ ID NO: 153942 - DNA, 75 bp, Homo sapiens
tatgatcagatatttgctcctaagaaaaaacaaaagaaggtacaggagcaggtgcacaaggtatgttgcaaaatt

SEQ ID NO: 153943 - DNA, 73 bp, Homo sapiens
tatttgctcctaagaaaaaacaaaagaaggtacaggagcaggtgcacaaggtatgttgcaaaatttcagcaaa

SEQ ID NO: 153944 - DNA, 71 bp, Homo sapiens
aaaaacaaaagaaggtacaggagcaggtgcacaaggtatgttgcaaaatttcagcaaactttcactggtcc

SEQ ID NO: 153945 - DNA, 72 bp, Homo sapiens
aaagaaggtacaggagcaggtgcacaaggtatgttgcaaaatttcagcaaactttcactggtccttaggaaa

SEQ ID NO: 153946 - DNA, 73 bp, Homo sapiens
gttgcaaaatttcagcaaactttcactggtccttaggaaactgcaattttatcttcaatgtcatactttatct

SEQ ID NO: 153947 - DNA, 76 bp, Homo sapiens
tcagcaaactttcactggtccttaggaaactgcaattttatcttcaatgtcatactttatcttcatgaaacaataa

SEQ ID NO: 153948 - DNA, 73 bp, Homo sapiens
ctttcactggtccttaggaaactgcaattttatcttcaatgtcatactttatcttcatgaaacaataatttcc

SEQ ID NO: 153949 - DNA, 74 bp, Homo sapiens
tggtccttaggaaactgcaattttatcttcaatgtcatactttatcttcatgaaacaataatttccttaactga

SEQ ID NO: 153950 - DNA, 74 bp, Homo sapiens
gaaactgcaattttatcttcaatgtcatactttatcttcatgaaacaataatttccttaactgagatcttgttt

SEQ ID NO: 153951 - DNA, 75 bp, Homo sapiens
atcttcaatgtcatactttatcttcatgaaacaataatttccttaactgagatcttgttttttattctcagcttc

SEQ ID NO: 153952 - DNA, 75 bp, Homo sapiens
catactttatcttcatgaaacaataatttccttaactgagatcttgttttttattctcagcttctagcacagtac

SEQ ID NO: 153953 - DNA, 73 bp, Homo sapiens
cttcatgaaacaataatttccttaactgagatcttgttttttattctcagcttctagcacagtacttaggatt

SEQ ID NO: 153954 - DNA, 72 bp, Homo sapiens
caataatttccttaactgagatcttgttttttattctcagcttctagcacagtacttaggatttagtggtta

SEQ ID NO: 153955 - DNA, 72 bp, Homo sapiens
ccttaactgagatcttgttttttattctcagcttctagcacagtacttaggatttagtggttattcaggaaa

SEQ ID NO: 153956 - DNA, 74 bp, Homo sapiens
ctgagatcttgttttttattctcagcttctagcacagtacttaggatttagtggttattcaggaaatatataaa

SEQ ID NO: 153957 - DNA, 77 bp, Homo sapiens
ttattctcagcttctagcacagtacttaggatttagtggttattcaggaaatatataaatgaatctacatattgtat

SEQ ID NO: 153958 - DNA, 76 bp, Homo sapiens
ctcagcttctagcacagtacttaggatttagtggttattcaggaaatatataaatgaatctacatattgtatttat

SEQ ID NO: 153959 - DNA, 71 bp, Homo sapiens
atttatttatgtatatatttttccctctttgccttcaaagagtaatgacttaggaatattgttatgattta

SEQ ID NO: 153960 - DNA, 71 bp, Homo sapiens
gtatatatttttccctctttgccttcaaagagtaatgacttaggaatattgttatgatttaatcttaagta

SEQ ID NO: 153961 - DNA, 70 bp, Homo sapiens
ttccctctttgccttcaaagagtaatgacttaggaatattgttatgatttaatcttaagtaaaaatatag

SEQ ID NO: 153962 - DNA, 71 bp, Homo sapiens
caaagagtaatgacttaggaatattgttatgatttaatcttaagtaaaaatataggctataaagtgaaata

SEQ ID NO: 153963 - DNA, 73 bp, Homo sapiens
taggaatattgttatgatttaatcttaagtaaaaatataggctataaagtgaaatatatatagtctgacccta

SEQ ID NO: 153964 - DNA, 71 bp, Homo sapiens
tatgatttaatcttaagtaaaaatataggctataaagtgaaatatatatagtctgaccctaatttcaaaag

SEQ ID NO: 153965 - DNA, 70 bp, Homo sapiens
gatttaatcttaagtaaaaatataggctataaagtgaaatatatatagtctgaccctaatttcaaaagta

SEQ ID NO: 153966 - DNA, 70 bp, Homo sapiens
cttaagtaaaaatataggctataaagtgaaatatatatagtctgaccctaatttcaaaagtaaatatatc

SEQ ID NO: 153967 - DNA, 70 bp, Homo sapiens
agtaaaaatataggctataaagtgaaatatatatagtctgaccctaatttcaaaagtaaatatatcttat

SEQ ID NO: 153968 - DNA, 72 bp, Homo sapiens
tataggctataaagtgaaatatatatagtctgaccctaatttcaaaagtaaatatatcttatttgtcttatt

SEQ ID NO: 153969 - DNA, 72 bp, Homo sapiens
gctataaagtgaaatatatatagtctgaccctaatttcaaaagtaaatatatcttatttgtcttatttttca

SEQ ID NO: 153970 - DNA, 71 bp, Homo sapiens
gtgaaatatatatagtctgaccctaatttcaaaagtaaatatatcttatttgtcttatttttcaactcagt

SEQ ID NO: 153971 - DNA, 70 bp, Homo sapiens
gaaatatatatagtctgaccctaatttcaaaagtaaatatatcttatttgtcttatttttcaactcagtt

SEQ ID NO: 153972 - DNA, 67 bp, Homo sapiens
tagtctgaccctaatttcaaaagtaaatatatcttatttgtcttatttttcaactcagttttttaaa

SEQ ID NO: 153973 - DNA, 69 bp, Homo sapiens
ttcaaaagtaaatatatcttatttgtcttatttttcaactcagttttttaaaatgaaatagagacatct

SEQ ID NO: 153974 - DNA, 70 bp, Homo sapiens
atttttcaactcagttttttaaaatgaaatagagacatcttgacattctacccctacatagtttaatatg

SEQ ID NO: 153975 - DNA, 71 bp, Homo sapiens
caactcagttttttaaaatgaaatagagacatcttgacattctacccctacatagtttaatatgtagttaa

SEQ ID NO: 153976 - DNA, 70 bp, Homo sapiens
aaatgaaatagagacatcttgacattctacccctacatagtttaatatgtagttaaaaaatggaacattt

SEQ ID NO: 153977 - DNA, 69 bp, Homo sapiens
aaatagagacatcttgacattctacccctacatagtttaatatgtagttaaaaaatggaacattttcct

SEQ ID NO: 153978 - DNA, 69 bp, Homo sapiens
atcttgacattctacccctacatagtttaatatgtagttaaaaaatggaacattttcctttataatcaa

SEQ ID NO: 153979 - DNA, 70 bp, Homo sapiens
tgtagttaaaaaatggaacattttcctttataatcaatttaacatatttacatcttatataagatctgtt

SEQ ID NO: 153980 - DNA, 76 bp, Homo sapiens
tggaacattttcctttataatcaatttaacatatttacatcttatataagatctgtttatctgacatcaactgtct

SEQ ID NO: 153981 - DNA, 77 bp, Homo sapiens
tcctttataatcaatttaacatatttacatcttatataagatctgtttatctgacatcaactgtctttcaaatttca

SEQ ID NO: 153982 - DNA, 78 bp, Homo sapiens
tcaatttaacatatttacatcttatataagatctgtttatctgacatcaactgtctttcaaatttcatcaattatccc

SEQ ID NO: 153983 - DNA, 76 bp, Homo sapiens
catatttacatcttatataagatctgtttatctgacatcaactgtctttcaaatttcatcaattatcccctaacct

SEQ ID NO: 153984 - DNA, 74 bp, Homo sapiens
catcttatataagatctgtttatctgacatcaactgtctttcaaatttcatcaattatcccctaacctttacct

SEQ ID NO: 153985 - DNA, 74 bp, Homo sapiens
gatctgtttatctgacatcaactgtctttcaaatttcatcaattatcccctaacctttacctttggattattca

SEQ ID NO: 153986 - DNA, 73 bp, Homo sapiens
tctgacatcaactgtctttcaaatttcatcaattatcccctaacctttacctttggattattcataccaggac

SEQ ID NO: 153987 - DNA, 73 bp, Homo sapiens
atcaattatcccctaacctttacctttggattattcataccaggactcaatctaggactgctcattgtaactg

SEQ ID NO: 153988 - DNA, 73 bp, Homo sapiens
taacctttacctttggattattcataccaggactcaatctaggactgctcattgtaactggttgttatggttc

SEQ ID NO: 153989 - DNA, 77 bp, Homo sapiens
tttggattattcataccaggactcaatctaggactgctcattgtaactggttgttatggttctcaaatcactttgaa

SEQ ID NO: 153990 - DNA, 78 bp, Homo sapiens
attattcataccaggactcaatctaggactgctcattgtaactggttgttatggttctcaaatcactttgaattcaga

SEQ ID NO: 153991 - DNA, 74 bp, Homo sapiens
atctaggactgctcattgtaactggttgttatggttctcaaatcactttgaattcagaacaatcccttttttca

SEQ ID NO: 153992 - DNA, 79 bp, Homo sapiens
cattgtaactggttgttatggttctcaaatcactttgaattcagaacaatcccttttttcatgatcatgatcatgtcta

SEQ ID NO: 153993 - DNA, 81 bp, Homo sapiens
gttgttatggttctcaaatcactttgaattcagaacaatcccttttttcatgatcatgatcatgtctataagagagtgaca

SEQ ID NO: 153994 - DNA, 81 bp, Homo sapiens
ctttgaattcagaacaatcccttttttcatgatcatgatcatgtctataagagagtgacatataaagtcatctactttctg

SEQ ID NO: 153995 - DNA, 82 bp, Homo sapiens
ttcagaacaatcccttttttcatgatcatgatcatgtctataagagagtgacatataaagtcatctactttctgtatttgtg

SEQ ID NO: 153996 - DNA, 81 bp, Homo sapiens
ccttttttcatgatcatgatcatgtctataagagagtgacatataaagtcatctactttctgtatttgtgtaattgcttcc

SEQ ID NO: 153997 - DNA, 85 bp, Homo sapiens
tgatcatgatcatgtctataagagagtgacatataaagtcatctactttctgtatttgtgtaattgcttcctcataggtgtcact

SEQ ID NO: 153998 - DNA, 81 bp, Homo sapiens
tcatgtctataagagagtgacatataaagtcatctactttctgtatttgtgtaattgcttcctcataggtgtcacttagat

SEQ ID NO: 153999 - DNA, 77 bp, Homo sapiens
agagagtgacatataaagtcatctactttctgtatttgtgtaattgcttcctcataggtgtcacttagattgttttc

SEQ ID NO: 154000 - DNA, 78 bp, Homo sapiens
gacatataaagtcatctactttctgtatttgtgtaattgcttcctcataggtgtcacttagattgttttctctatctc

SEQ ID NO: 154001 - DNA, 78 bp, Homo sapiens
tctactttctgtatttgtgtaattgcttcctcataggtgtcacttagattgttttctctatctcctgttctctgtcaa

SEQ ID NO: 154002 - DNA, 78 bp, Homo sapiens
gtatttgtgtaattgcttcctcataggtgtcacttagattgttttctctatctcctgttctctgtcaaatggaagata

SEQ ID NO: 154003 - DNA, 79 bp, Homo sapiens
taattgcttcctcataggtgtcacttagattgttttctctatctcctgttctctgtcaaatggaagatagaacctatca

SEQ ID NO: 154004 - DNA, 76 bp, Homo sapiens
atctcctgttctctgtcaaatggaagatagaacctatcagtttgatagattgaaagttgaacatttttagctagac

SEQ ID NO: 154005 - DNA, 80 bp, Homo sapiens
ctctgtcaaatggaagatagaacctatcagtttgatagattgaaagttgaacatttttagctagactatatcagagatga

SEQ ID NO: 154006 - DNA, 79 bp, Homo sapiens
ttgatagattgaaagttgaacatttttagctagactatatcagagatgataatgtggaatatattgtacattagagggt

SEQ ID NO: 154007 - DNA, 77 bp, Homo sapiens
gattgaaagttgaacatttttagctagactatatcagagatgataatgtggaatatattgtacattagagggttaaa

SEQ ID NO: 154008 - DNA, 78 bp, Homo sapiens
gctagactatatcagagatgataatgtggaatatattgtacattagagggttaaaaaatgttttattcccatcagcca

SEQ ID NO: 154009 - DNA, 76 bp, Homo sapiens
cagagatgataatgtggaatatattgtacattagagggttaaaaaatgttttattcccatcagccattccctgaca

SEQ ID NO: 154010 - DNA, 71 bp, Homo sapiens
aatgtggaatatattgtacattagagggttaaaaaatgttttattcccatcagccattccctgacagtttg

SEQ ID NO: 154011 - DNA, 70 bp, Homo sapiens
ggaatatattgtacattagagggttaaaaaatgttttattcccatcagccattccctgacagtttgttct

SEQ ID NO: 154012 - DNA, 67 bp, Homo sapiens
gtacattagagggttaaaaaatgttttattcccatcagccattccctgacagtttgttctttctttt

SEQ ID NO: 154013 - DNA, 70 bp, Homo sapiens
ccatgcccagcttccctgatggttttttgaaaaccccagttgaagatctttacctatatcaataatttta

SEQ ID NO: 154014 - DNA, 68 bp, Homo sapiens
cccagcttccctgatggttttttgaaaaccccagttgaagatctttacctatatcaataattttatta

SEQ ID NO: 154015 - DNA, 68 bp, Homo sapiens
ctgatggttttttgaaaaccccagttgaagatctttacctatatcaataattttattagaggttacaa

SEQ ID NO: 154016 - DNA, 69 bp, Homo sapiens
gaaaaccccagttgaagatctttacctatatcaataattttattagaggttacaaaatgaagactttca

SEQ ID NO: 154017 - DNA, 70 bp, Homo sapiens
ccagttgaagatctttacctatatcaataattttattagaggttacaaaatgaagactttcagattttat

SEQ ID NO: 154018 - DNA, 69 bp, Homo sapiens
atctttacctatatcaataattttattagaggttacaaaatgaagactttcagattttattattttctc

SEQ ID NO: 154019 - DNA, 68 bp, Homo sapiens
atatcaataattttattagaggttacaaaatgaagactttcagattttattattttctctatttttat

SEQ ID NO: 154020 - DNA, 70 bp, Homo sapiens
ttattagaggttacaaaatgaagactttcagattttattattttctctatttttattaactgatagtctc

SEQ ID NO: 154021 - DNA, 72 bp, Homo sapiens
tgaagactttcagattttattattttctctatttttattaactgatagtctctttcattaattggactctgt

SEQ ID NO: 154022 - DNA, 75 bp, Homo sapiens
tctctatttttattaactgatagtctctttcattaattggactctgttattgtcctgaaatacttgaaaggcaga

SEQ ID NO: 154023 - DNA, 76 bp, Homo sapiens
tattaactgatagtctctttcattaattggactctgttattgtcctgaaatacttgaaaggcagaataagtgcttc

SEQ ID NO: 154024 - DNA, 75 bp, Homo sapiens
actgatagtctctttcattaattggactctgttattgtcctgaaatacttgaaaggcagaataagtgcttctttc

SEQ ID NO: 154025 - DNA, 72 bp, Homo sapiens
ctttcattaattggactctgttattgtcctgaaatacttgaaaggcagaataagtgcttctttctttcccat

SEQ ID NO: 154026 - DNA, 71 bp, Homo sapiens
ggactctgttattgtcctgaaatacttgaaaggcagaataagtgcttctttctttcccattaattaccaat

SEQ ID NO: 154027 - DNA, 71 bp, Homo sapiens
tgtcctgaaatacttgaaaggcagaataagtgcttctttctttcccattaattaccaattgtaacattaag

SEQ ID NO: 154028 - DNA, 71 bp, Homo sapiens
tacttgaaaggcagaataagtgcttctttctttcccattaattaccaattgtaacattaaggagttcatta

SEQ ID NO: 154029 - DNA, 70 bp, Homo sapiens
aggcagaataagtgcttctttctttcccattaattaccaattgtaacattaaggagttcattagtagttg

SEQ ID NO: 154030 - DNA, 69 bp, Homo sapiens
tgcttctttctttcccattaattaccaattgtaacattaaggagttcattagtagttgttttaattgga

SEQ ID NO: 154031 - DNA, 71 bp, Homo sapiens
tttcccattaattaccaattgtaacattaaggagttcattagtagttgttttaattggagacattagagca

SEQ ID NO: 154032 - DNA, 71 bp, Homo sapiens
attaccaattgtaacattaaggagttcattagtagttgttttaattggagacattagagcagtctctttcc

SEQ ID NO: 154033 - DNA, 71 bp, Homo sapiens
aattgtaacattaaggagttcattagtagttgttttaattggagacattagagcagtctctttcccctgct

SEQ ID NO: 154034 - DNA, 71 bp, Homo sapiens
aaggagttcattagtagttgttttaattggagacattagagcagtctctttcccctgcttttgaattattg

SEQ ID NO: 154035 - DNA, 74 bp, Homo sapiens
tagtagttgttttaattggagacattagagcagtctctttcccctgcttttgaattattgttgtggacttatca

SEQ ID NO: 154036 - DNA, 77 bp, Homo sapiens
ttaattggagacattagagcagtctctttcccctgcttttgaattattgttgtggacttatcaatattatagcttca

SEQ ID NO: 154037 - DNA, 79 bp, Homo sapiens
agacattagagcagtctctttcccctgcttttgaattattgttgtggacttatcaatattatagcttcagtgtatctca

SEQ ID NO: 154038 - DNA, 77 bp, Homo sapiens
agtctctttcccctgcttttgaattattgttgtggacttatcaatattatagcttcagtgtatctcagtcaacttca

SEQ ID NO: 154039 - DNA, 75 bp, Homo sapiens
ccctgcttttgaattattgttgtggacttatcaatattatagcttcagtgtatctcagtcaacttcatttaattt

SEQ ID NO: 154040 - DNA, 74 bp, Homo sapiens
cttttgaattattgttgtggacttatcaatattatagcttcagtgtatctcagtcaacttcatttaattttggt

SEQ ID NO: 154041 - DNA, 72 bp, Homo sapiens
attgttgtggacttatcaatattatagcttcagtgtatctcagtcaacttcatttaattttggttaaaaaaa

SEQ ID NO: 154042 - DNA, 80 bp, Homo sapiens
aagtgtacagttcagtagcatgaagcacagttagattgttgtgcaaccatctccaccatccatctcgataatttttttca

SEQ ID NO: 154043 - DNA, 80 bp, Homo sapiens
ttcagtagcatgaagcacagttagattgttgtgcaaccatctccaccatccatctcgataatttttttcatctttccaaa

SEQ ID NO: 154044 - DNA, 76 bp, Homo sapiens
atgaagcacagttagattgttgtgcaaccatctccaccatccatctcgataatttttttcatctttccaaattaaa

SEQ ID NO: 154045 - DNA, 74 bp, Homo sapiens
cagttagattgttgtgcaaccatctccaccatccatctcgataatttttttcatctttccaaattaaaaatcaa

SEQ ID NO: 154046 - DNA, 73 bp, Homo sapiens
tgcaaccatctccaccatccatctcgataatttttttcatctttccaaattaaaaatcaatacccattaacca

SEQ ID NO: 154047 - DNA, 69 bp, Homo sapiens
ccaccatccatctcgataatttttttcatctttccaaattaaaaatcaatacccattaaccaataactc

SEQ ID NO: 154048 - DNA, 67 bp, Homo sapiens
atccatctcgataatttttttcatctttccaaattaaaaatcaatacccattaaccaataactccct

SEQ ID NO: 154049 - DNA, 67 bp, Homo sapiens
tttttttcatctttccaaattaaaaatcaatacccattaaccaataactcccttttctgctcagccc

SEQ ID NO: 154050 - DNA, 70 bp, Homo sapiens
tttccaaattaaaaatcaatacccattaaccaataactcccttttctgctcagcccctggcaattgccat

SEQ ID NO: 154051 - DNA, 70 bp, Homo sapiens
attaaaaatcaatacccattaaccaataactcccttttctgctcagcccctggcaattgccattctattt

SEQ ID NO: 154052 - DNA, 73 bp, Homo sapiens
tacccattaaccaataactcccttttctgctcagcccctggcaattgccattctattttctgtctcaagaatt

SEQ ID NO: 154053 - DNA, 73 bp, Homo sapiens
ttaaccaataactcccttttctgctcagcccctggcaattgccattctattttctgtctcaagaattttctta

SEQ ID NO: 154054 - DNA, 77 bp, Homo sapiens
ccttttctgctcagcccctggcaattgccattctattttctgtctcaagaattttcttattctagatacctcatata

SEQ ID NO: 154055 - DNA, 79 bp, Homo sapiens
tcagcccctggcaattgccattctattttctgtctcaagaattttcttattctagatacctcatatacttgaaatcata

SEQ ID NO: 154056 - DNA, 78 bp, Homo sapiens
cctggcaattgccattctattttctgtctcaagaattttcttattctagatacctcatatacttgaaatcatacgata

SEQ ID NO: 154057 - DNA, 76 bp, Homo sapiens
tctattttctgtctcaagaattttcttattctagatacctcatatacttgaaatcatacgatatttgttctttgtg

SEQ ID NO: 154058 - DNA, 76 bp, Homo sapiens
tctgtctcaagaattttcttattctagatacctcatatacttgaaatcatacgatatttgttctttgtgtcttaag

SEQ ID NO: 154059 - DNA, 72 bp, Homo sapiens
ttttcttattctagatacctcatatacttgaaatcatacgatatttgttctttgtgtcttaagtaatttccc

SEQ ID NO: 154060 - DNA, 75 bp, Homo sapiens
ctagatacctcatatacttgaaatcatacgatatttgttctttgtgtcttaagtaatttcccttagcatacataa

SEQ ID NO: 154061 - DNA, 76 bp, Homo sapiens
cctcatatacttgaaatcatacgatatttgttctttgtgtcttaagtaatttcccttagcatacataatgtcttca

SEQ ID NO: 154062 - DNA, 72 bp, Homo sapiens
acttgaaatcatacgatatttgttctttgtgtcttaagtaatttcccttagcatacataatgtcttcaaggt

SEQ ID NO: 154063 - DNA, 70 bp, Homo sapiens
tcaaggttcatccactttttgtagcctttgtcagaatttcattccttttaaagtgtgttattctttttga

SEQ ID NO: 154064 - DNA, 69 bp, Homo sapiens
gttcatccactttttgtagcctttgtcagaatttcattccttttaaagtgtgttattctttttgacact

SEQ ID NO: 154065 - DNA, 69 bp, Homo sapiens
tttgtagcctttgtcagaatttcattccttttaaagtgtgttattctttttgacacttaaattacaaca

SEQ ID NO: 154066 - DNA, 69 bp, Homo sapiens
tcagaatttcattccttttaaagtgtgttattctttttgacacttaaattacaacaattttggcctgtg

SEQ ID NO: 154067 - DNA, 68 bp, Homo sapiens
cattccttttaaagtgtgttattctttttgacacttaaattacaacaattttggcctgtggactctat

SEQ ID NO: 154068 - DNA, 67 bp, Homo sapiens
tttaaagtgtgttattctttttgacacttaaattacaacaattttggcctgtggactctatttttat

SEQ ID NO: 154069 - DNA, 72 bp, Homo sapiens
tattttttgttcttaggtaagttcccgctgtgaagaggaaagccttctagcccgaggtcgatctagtgctca

SEQ ID NO: 154070 - DNA, 73 bp, Homo sapiens
tttgttcttaggtaagttcccgctgtgaagaggaaagccttctagcccgaggtcgatctagtgctcagaacaa

SEQ ID NO: 154071 - DNA, 76 bp, Homo sapiens
taagttcccgctgtgaagaggaaagccttctagcccgaggtcgatctagtgctcagaacaagcaggtggacgagaa

SEQ ID NO: 154072 - DNA, 77 bp, Homo sapiens
tgaagaggaaagccttctagcccgaggtcgatctagtgctcagaacaagcaggtggacgagaattctttgatttcaa

SEQ ID NO: 154073 - DNA, 74 bp, Homo sapiens
aaagccttctagcccgaggtcgatctagtgctcagaacaagcaggtggacgagaattctttgatttcaaccaaa

SEQ ID NO: 154074 - DNA, 77 bp, Homo sapiens
tctagcccgaggtcgatctagtgctcagaacaagcaggtggacgagaattctttgatttcaaccaaagaagagcctc

SEQ ID NO: 154075 - DNA, 75 bp, Homo sapiens
atctagtgctcagaacaagcaggtggacgagaattctttgatttcaaccaaagaagagcctccagttcttgaaag

SEQ ID NO: 154076 - DNA, 74 bp, Homo sapiens
gtgctcagaacaagcaggtggacgagaattctttgatttcaaccaaagaagagcctccagttcttgaaagggag

SEQ ID NO: 154077 - DNA, 68 bp, Homo sapiens
aggtggacgagaattctttgatttcaaccaaagaagagcctccagttcttgaaagggaggctccgttt

SEQ ID NO: 154078 - DNA, 68 bp, Homo sapiens
acgagaattctttgatttcaaccaaagaagagcctccagttcttgaaagggaggctccgtttttggag

SEQ ID NO: 154079 - DNA, 67 bp, Homo sapiens
tttgatttcaaccaaagaagagcctccagttcttgaaagggaggctccgtttttggagggccccttg

SEQ ID NO: 154080 - DNA, 68 bp, Homo sapiens
aaagaagagcctccagttcttgaaagggaggctccgtttttggagggccccttggctcagtcagaact

SEQ ID NO: 154081 - DNA, 70 bp, Homo sapiens
ctccagttcttgaaagggaggctccgtttttggagggccccttggctcagtcagaacttggaggtggaca

SEQ ID NO: 154082 - DNA, 72 bp, Homo sapiens
ttcttgaaagggaggctccgtttttggagggccccttggctcagtcagaacttggaggtggacatgctgagt

SEQ ID NO: 154083 - DNA, 79 bp, Homo sapiens
tttttggagggccccttggctcagtcagaacttggaggtggacatgctgagttgccgcagctgaccttgtctgtgcctg

SEQ ID NO: 154084 - DNA, 84 bp, Homo sapiens
ttggctcagtcagaacttggaggtggacatgctgagttgccgcagctgaccttgtctgtgcctgtggctccggaagtctctcca

SEQ ID NO: 154085 - DNA, 82 bp, Homo sapiens
ttggaggtggacatgctgagttgccgcagctgaccttgtctgtgcctgtggctccggaagtctctccacggcctgcccttga

SEQ ID NO: 154086 - DNA, 81 bp, Homo sapiens
atgctgagttgccgcagctgaccttgtctgtgcctgtggctccggaagtctctccacggcctgcccttgagtctgaggaat

SEQ ID NO: 154087 - DNA, 79 bp, Homo sapiens
cgcagctgaccttgtctgtgcctgtggctccggaagtctctccacggcctgcccttgagtctgaggaattgctagttaa

SEQ ID NO: 154088 - DNA, 74 bp, Homo sapiens
accttgtctgtgcctgtggctccggaagtctctccacggcctgcccttgagtctgaggaattgctagttaaaac

SEQ ID NO: 154089 - DNA, 72 bp, Homo sapiens
cctgtggctccggaagtctctccacggcctgcccttgagtctgaggaattgctagttaaaacgccaggtaag

SEQ ID NO: 154090 - DNA, 73 bp, Homo sapiens
tgcccttgagtctgaggaattgctagttaaaacgccaggtaaggtggggttggggtctcagtatttgagcaga

SEQ ID NO: 154091 - DNA, 75 bp, Homo sapiens
cttgtgcccagtttctaaatcatctaatgtaaagatacatgcatttcaggaaattatgaaagtaaacgtcaaaga

SEQ ID NO: 154092 - DNA, 73 bp, Homo sapiens
cagtttctaaatcatctaatgtaaagatacatgcatttcaggaaattatgaaagtaaacgtcaaagaaaacca

SEQ ID NO: 154093 - DNA, 71 bp, Homo sapiens
catctaatgtaaagatacatgcatttcaggaaattatgaaagtaaacgtcaaagaaaaccaactaagaaac

SEQ ID NO: 154094 - DNA, 71 bp, Homo sapiens
gatacatgcatttcaggaaattatgaaagtaaacgtcaaagaaaaccaactaagaaacttcttgaatccaa

SEQ ID NO: 154095 - DNA, 69 bp, Homo sapiens
gcatttcaggaaattatgaaagtaaacgtcaaagaaaaccaactaagaaacttcttgaatccaatgatt

SEQ ID NO: 154096 - DNA, 68 bp, Homo sapiens
ttatgaaagtaaacgtcaaagaaaaccaactaagaaacttcttgaatccaatgatttagaccctggat

SEQ ID NO: 154097 - DNA, 69 bp, Homo sapiens
gtaaacgtcaaagaaaaccaactaagaaacttcttgaatccaatgatttagaccctggatttatgccca

SEQ ID NO: 154098 - DNA, 67 bp, Homo sapiens
aaagaaaaccaactaagaaacttcttgaatccaatgatttagaccctggatttatgcccaagaaggg

SEQ ID NO: 154099 - DNA, 69 bp, Homo sapiens
taagaaacttcttgaatccaatgatttagaccctggatttatgcccaagaagggggaccttggcctttc

SEQ ID NO: 154100 - DNA, 68 bp, Homo sapiens
acttcttgaatccaatgatttagaccctggatttatgcccaagaagggggaccttggcctttctaaaa

SEQ ID NO: 154101 - DNA, 66 bp, Homo sapiens
aatgatttagaccctggatttatgcccaagaagggggaccttggcctttctaaaaaggtatgttat

SEQ ID NO: 154102 - DNA, 65 bp, Homo sapiens
ttagaccctggatttatgcccaagaagggggaccttggcctttctaaaaaggtatgttatttttg

SEQ ID NO: 154103 - DNA, 65 bp, Homo sapiens
gatttatgcccaagaagggggaccttggcctttctaaaaaggtatgttatttttgtaagttctaa

SEQ ID NO: 154104 - DNA, 69 bp, Homo sapiens
agtaaagggtttattttttcattcctctgtaaatggtgttgttttcacttatttatagtgctatgaagc

SEQ ID NO: 154105 - DNA, 74 bp, Homo sapiens
ttattttttcattcctctgtaaatggtgttgttttcacttatttatagtgctatgaagctggtcacctggagaa

SEQ ID NO: 154106 - DNA, 77 bp, Homo sapiens
ttttcattcctctgtaaatggtgttgttttcacttatttatagtgctatgaagctggtcacctggagaatggcataa

SEQ ID NO: 154107 - DNA, 80 bp, Homo sapiens
taaatggtgttgttttcacttatttatagtgctatgaagctggtcacctggagaatggcataactgaatcttgtgccaca

SEQ ID NO: 154108 - DNA, 80 bp, Homo sapiens
gttttcacttatttatagtgctatgaagctggtcacctggagaatggcataactgaatcttgtgccacatcttattcaaa

SEQ ID NO: 154109 - DNA, 79 bp, Homo sapiens
acttatttatagtgctatgaagctggtcacctggagaatggcataactgaatcttgtgccacatcttattcaaaagatt

SEQ ID NO: 154110 - DNA, 80 bp, Homo sapiens
tagtgctatgaagctggtcacctggagaatggcataactgaatcttgtgccacatcttattcaaaagattttggtggagg

SEQ ID NO: 154111 - DNA, 76 bp, Homo sapiens
tggtcacctggagaatggcataactgaatcttgtgccacatcttattcaaaagattttggtggaggtgagtatttt

SEQ ID NO: 154112 - DNA, 76 bp, Homo sapiens
gagaatggcataactgaatcttgtgccacatcttattcaaaagattttggtggaggtgagtatttttgagatttaa

SEQ ID NO: 154113 - DNA, 73 bp, Homo sapiens
ggcataactgaatcttgtgccacatcttattcaaaagattttggtggaggtgagtatttttgagatttaaaaa

SEQ ID NO: 154114 - DNA, 71 bp, Homo sapiens
cttgtgccacatcttattcaaaagattttggtggaggtgagtatttttgagatttaaaaaacgtaatgcag

SEQ ID NO: 154115 - DNA, 69 bp, Homo sapiens
catcttattcaaaagattttggtggaggtgagtatttttgagatttaaaaaacgtaatgcagtagtaag

SEQ ID NO: 154116 - DNA, 78 bp, Homo sapiens
ttggacatgtgtgttagtagccagcagttaacacctattttcctgtcataggcactaccaagatatttgacaagccaa

SEQ ID NO: 154117 - DNA, 75 bp, Homo sapiens
tagtagccagcagttaacacctattttcctgtcataggcactaccaagatatttgacaagccaaggaagcgaaaa

SEQ ID NO: 154118 - DNA, 72 bp, Homo sapiens
agttaacacctattttcctgtcataggcactaccaagatatttgacaagccaaggaagcgaaaacgacagag

SEQ ID NO: 154119 - DNA, 80 bp, Homo sapiens
ctattttcctgtcataggcactaccaagatatttgacaagccaaggaagcgaaaacgacagaggcatgctgcagccaaga

SEQ ID NO: 154120 - DNA, 82 bp, Homo sapiens
tcataggcactaccaagatatttgacaagccaaggaagcgaaaacgacagaggcatgctgcagccaagatgcagtgtaaaaa

SEQ ID NO: 154121 - DNA, 79 bp, Homo sapiens
taccaagatatttgacaagccaaggaagcgaaaacgacagaggcatgctgcagccaagatgcagtgtaaaaaagtgaaa

SEQ ID NO: 154122 - DNA, 79 bp, Homo sapiens
agatatttgacaagccaaggaagcgaaaacgacagaggcatgctgcagccaagatgcagtgtaaaaaagtgaaaaatga

SEQ ID NO: 154123 - DNA, 79 bp, Homo sapiens
caaggaagcgaaaacgacagaggcatgctgcagccaagatgcagtgtaaaaaagtgaaaaatgatgactcgtcaaaaga

SEQ ID NO: 154124 - DNA, 79 bp, Homo sapiens
aagcgaaaacgacagaggcatgctgcagccaagatgcagtgtaaaaaagtgaaaaatgatgactcgtcaaaagagattc

SEQ ID NO: 154125 - DNA, 81 bp, Homo sapiens
aggcatgctgcagccaagatgcagtgtaaaaaagtgaaaaatgatgactcgtcaaaagagattccaggctcagaggtatta

SEQ ID NO: 154126 - DNA, 77 bp, Homo sapiens
cagccaagatgcagtgtaaaaaagtgaaaaatgatgactcgtcaaaagagattccaggctcagaggtattactcagt

SEQ ID NO: 154127 - DNA, 75 bp, Homo sapiens
aagatgcagtgtaaaaaagtgaaaaatgatgactcgtcaaaagagattccaggctcagaggtattactcagttcc

SEQ ID NO: 154128 - DNA, 74 bp, Homo sapiens
aaagtgaaaaatgatgactcgtcaaaagagattccaggctcagaggtattactcagttcctgatcttttcacct

SEQ ID NO: 154129 - DNA, 74 bp, Homo sapiens
aaaaatgatgactcgtcaaaagagattccaggctcagaggtattactcagttcctgatcttttcaccttctaaa

SEQ ID NO: 154130 - DNA, 76 bp, Homo sapiens
aagagacatcaataatacagatgtgggacattattttttctttgcaagggagaactaatgcctcacaggacggcca

SEQ ID NO: 154131 - DNA, 75 bp, Homo sapiens
atcaataatacagatgtgggacattattttttctttgcaagggagaactaatgcctcacaggacggccacaagcc

SEQ ID NO: 154132 - DNA, 73 bp, Homo sapiens
agatgtgggacattattttttctttgcaagggagaactaatgcctcacaggacggccacaagccccaaggaga

SEQ ID NO: 154133 - DNA, 71 bp, Homo sapiens
attttttctttgcaagggagaactaatgcctcacaggacggccacaagccccaaggagactgttgaggaag

SEQ ID NO: 154134 - DNA, 74 bp, Homo sapiens
ttctttgcaagggagaactaatgcctcacaggacggccacaagccccaaggagactgttgaggaaggtgtagaa

SEQ ID NO: 154135 - DNA, 72 bp, Homo sapiens
aactaatgcctcacaggacggccacaagccccaaggagactgttgaggaaggtgtagaacacgatcccggga

SEQ ID NO: 154136 - DNA, 75 bp, Homo sapiens
tcacaggacggccacaagccccaaggagactgttgaggaaggtgtagaacacgatcccgggatgcctgcctctaa

SEQ ID NO: 154137 - DNA, 71 bp, Homo sapiens
acggccacaagccccaaggagactgttgaggaaggtgtagaacacgatcccgggatgcctgcctctaaaaa

SEQ ID NO: 154138 - DNA, 72 bp, Homo sapiens
cccaaggagactgttgaggaaggtgtagaacacgatcccgggatgcctgcctctaaaaaaatgcagggtgaa

SEQ ID NO: 154139 - DNA, 72 bp, Homo sapiens
actgttgaggaaggtgtagaacacgatcccgggatgcctgcctctaaaaaaatgcagggtgaacgcggtgga

SEQ ID NO: 154140 - DNA, 75 bp, Homo sapiens
aaggtgtagaacacgatcccgggatgcctgcctctaaaaaaatgcagggtgaacgcggtggaggagctgcactca

SEQ ID NO: 154141 - DNA, 75 bp, Homo sapiens
agaacacgatcccgggatgcctgcctctaaaaaaatgcagggtgaacgcggtggaggagctgcactcaaggagaa

SEQ ID NO: 154142 - DNA, 79 bp, Homo sapiens
gatgcctgcctctaaaaaaatgcagggtgaacgcggtggaggagctgcactcaaggagaatgtctgtcaggtagagaaa

SEQ ID NO: 154143 - DNA, 75 bp, Homo sapiens
cctctaaaaaaatgcagggtgaacgcggtggaggagctgcactcaaggagaatgtctgtcaggtagagaaatgtt

SEQ ID NO: 154144 - DNA, 76 bp, Homo sapiens
aaaaatgcagggtgaacgcggtggaggagctgcactcaaggagaatgtctgtcaggtagagaaatgtttgcccact

SEQ ID NO: 154145 - DNA, 77 bp, Homo sapiens
ggtgaacgcggtggaggagctgcactcaaggagaatgtctgtcaggtagagaaatgtttgcccacttgtgttttcat

SEQ ID NO: 154146 - DNA, 76 bp, Homo sapiens
tgattctcaaacatggaaaaacagatagatgttttctttctcttaacagaattgtgaaaaattgggtgagctgctg

SEQ ID NO: 154147 - DNA, 75 bp, Homo sapiens
acatggaaaaacagatagatgttttctttctcttaacagaattgtgaaaaattgggtgagctgctgttatgtgag

SEQ ID NO: 154148 - DNA, 78 bp, Homo sapiens
aaacagatagatgttttctttctcttaacagaattgtgaaaaattgggtgagctgctgttatgtgaggctcagtgctg

SEQ ID NO: 154149 - DNA, 77 bp, Homo sapiens
ttttctttctcttaacagaattgtgaaaaattgggtgagctgctgttatgtgaggctcagtgctgtggggctttcca

SEQ ID NO: 154150 - DNA, 78 bp, Homo sapiens
ttaacagaattgtgaaaaattgggtgagctgctgttatgtgaggctcagtgctgtggggctttccacctggagtgcct

SEQ ID NO: 154151 - DNA, 79 bp, Homo sapiens
aattgtgaaaaattgggtgagctgctgttatgtgaggctcagtgctgtggggctttccacctggagtgccttggattga

SEQ ID NO: 154152 - DNA, 82 bp, Homo sapiens
aaattgggtgagctgctgttatgtgaggctcagtgctgtggggctttccacctggagtgccttggattgactgagatgccaa

SEQ ID NO: 154153 - DNA, 79 bp, Homo sapiens
ctgttatgtgaggctcagtgctgtggggctttccacctggagtgccttggattgactgagatgccaagaggaaaattta

SEQ ID NO: 154154 - DNA, 80 bp, Homo sapiens
aggctcagtgctgtggggctttccacctggagtgccttggattgactgagatgccaagaggaaaatttatctgcaatgaa

SEQ ID NO: 154155 - DNA, 81 bp, Homo sapiens
agtgctgtggggctttccacctggagtgccttggattgactgagatgccaagaggaaaatttatctgcaatgaatgtcgca

SEQ ID NO: 154156 - DNA, 79 bp, Homo sapiens
tttccacctggagtgccttggattgactgagatgccaagaggaaaatttatctgcaatgaatgtcgcacaggtaaagta

SEQ ID NO: 154157 - DNA, 79 bp, Homo sapiens
agtgccttggattgactgagatgccaagaggaaaatttatctgcaatgaatgtcgcacaggtaaagtagatatcgaacg

SEQ ID NO: 154158 - DNA, 79 bp, Homo sapiens
ttggattgactgagatgccaagaggaaaatttatctgcaatgaatgtcgcacaggtaaagtagatatcgaacggtcttc

SEQ ID NO: 154159 - DNA, 75 bp, Homo sapiens
atgccaagaggaaaatttatctgcaatgaatgtcgcacaggtaaagtagatatcgaacggtcttcctccaaagaa

SEQ ID NO: 154160 - DNA, 74 bp, Homo sapiens
gtagattcttgaattcttactaatttatcttcttttggcttctcaggaatccatacctgttttgtatgtaagca

SEQ ID NO: 154161 - DNA, 74 bp, Homo sapiens
tcttgaattcttactaatttatcttcttttggcttctcaggaatccatacctgttttgtatgtaagcagagtgg

SEQ ID NO: 154162 - DNA, 73 bp, Homo sapiens
taatttatcttcttttggcttctcaggaatccatacctgttttgtatgtaagcagagtggggaagatgttaaa

SEQ ID NO: 154163 - DNA, 72 bp, Homo sapiens
ttcttttggcttctcaggaatccatacctgttttgtatgtaagcagagtggggaagatgttaaaaggtgcct

SEQ ID NO: 154164 - DNA, 72 bp, Homo sapiens
ttctcaggaatccatacctgttttgtatgtaagcagagtggggaagatgttaaaaggtgccttctacccttg

SEQ ID NO: 154165 - DNA, 71 bp, Homo sapiens
aatccatacctgttttgtatgtaagcagagtggggaagatgttaaaaggtgccttctacccttgtgtggaa

SEQ ID NO: 154166 - DNA, 69 bp, Homo sapiens
ctgttttgtatgtaagcagagtggggaagatgttaaaaggtgccttctacccttgtgtggaaagtttta

SEQ ID NO: 154167 - DNA, 70 bp, Homo sapiens
atgtaagcagagtggggaagatgttaaaaggtgccttctacccttgtgtggaaagttttaccatgaagag

SEQ ID NO: 154168 - DNA, 70 bp, Homo sapiens
ggaagatgttaaaaggtgccttctacccttgtgtggaaagttttaccatgaagagtgtgtccagaagtac

SEQ ID NO: 154169 - DNA, 69 bp, Homo sapiens
atgttaaaaggtgccttctacccttgtgtggaaagttttaccatgaagagtgtgtccagaagtacccac

SEQ ID NO: 154170 - DNA, 73 bp, Homo sapiens
ttctacccttgtgtggaaagttttaccatgaagagtgtgtccagaagtacccacccactgttatgcagaacaa

SEQ ID NO: 154171 - DNA, 73 bp, Homo sapiens
cttgtgtggaaagttttaccatgaagagtgtgtccagaagtacccacccactgttatgcagaacaagggcttc

SEQ ID NO: 154172 - DNA, 72 bp, Homo sapiens
aaagttttaccatgaagagtgtgtccagaagtacccacccactgttatgcagaacaagggcttccggtgctc

SEQ ID NO: 154173 - DNA, 75 bp, Homo sapiens
aagagtgtgtccagaagtacccacccactgttatgcagaacaagggcttccggtgctccctccacatctgtataa

SEQ ID NO: 154174 - DNA, 77 bp, Homo sapiens
tgtgtccagaagtacccacccactgttatgcagaacaagggcttccggtgctccctccacatctgtataacctgtca

SEQ ID NO: 154175 - DNA, 78 bp, Homo sapiens
agtacccacccactgttatgcagaacaagggcttccggtgctccctccacatctgtataacctgtcatgctgctaatc

SEQ ID NO: 154176 - DNA, 80 bp, Homo sapiens
actgttatgcagaacaagggcttccggtgctccctccacatctgtataacctgtcatgctgctaatccagccaatgtttc

SEQ ID NO: 154177 - DNA, 80 bp, Homo sapiens
agaacaagggcttccggtgctccctccacatctgtataacctgtcatgctgctaatccagccaatgtttctgcatctaaa

SEQ ID NO: 154178 - DNA, 81 bp, Homo sapiens
cggtgctccctccacatctgtataacctgtcatgctgctaatccagccaatgtttctgcatctaaaggtatggatttctta

SEQ ID NO: 154179 - DNA, 83 bp, Homo sapiens
tccacatctgtataacctgtcatgctgctaatccagccaatgtttctgcatctaaaggtatggatttcttatgtggaccagtc

SEQ ID NO: 154180 - DNA, 73 bp, Homo sapiens
ttttgtttttcttttgcttgtccctgattttcctgctttaggtcggttgatgcgctgtgtccgctgtcctgtg

SEQ ID NO: 154181 - DNA, 76 bp, Homo sapiens
ttttcttttgcttgtccctgattttcctgctttaggtcggttgatgcgctgtgtccgctgtcctgtggcataccac

SEQ ID NO: 154182 - DNA, 77 bp, Homo sapiens
ttgtccctgattttcctgctttaggtcggttgatgcgctgtgtccgctgtcctgtggcataccacgccaatgacttt

SEQ ID NO: 154183 - DNA, 80 bp, Homo sapiens
ttttcctgctttaggtcggttgatgcgctgtgtccgctgtcctgtggcataccacgccaatgacttttgcctggctgctg

SEQ ID NO: 154184 - DNA, 80 bp, Homo sapiens
tttaggtcggttgatgcgctgtgtccgctgtcctgtggcataccacgccaatgacttttgcctggctgctgggtcaaaga

SEQ ID NO: 154185 - DNA, 85 bp, Homo sapiens
ttgatgcgctgtgtccgctgtcctgtggcataccacgccaatgacttttgcctggctgctgggtcaaagatccttgcatctaata

SEQ ID NO: 154186 - DNA, 84 bp, Homo sapiens
tgtgtccgctgtcctgtggcataccacgccaatgacttttgcctggctgctgggtcaaagatccttgcatctaatagtatcatc

SEQ ID NO: 154187 - DNA, 83 bp, Homo sapiens
tgtggcataccacgccaatgacttttgcctggctgctgggtcaaagatccttgcatctaatagtatcatctgccctaatcact

SEQ ID NO: 154188 - DNA, 80 bp, Homo sapiens
ataccacgccaatgacttttgcctggctgctgggtcaaagatccttgcatctaatagtatcatctgccctaatcacttta

SEQ ID NO: 154189 - DNA, 77 bp, Homo sapiens
aatgacttttgcctggctgctgggtcaaagatccttgcatctaatagtatcatctgccctaatcactttacccctag

SEQ ID NO: 154190 - DNA, 77 bp, Homo sapiens
gctgctgggtcaaagatccttgcatctaatagtatcatctgccctaatcactttacccctaggcggggctgccgaaa

SEQ ID NO: 154191 - DNA, 80 bp, Homo sapiens
tcaaagatccttgcatctaatagtatcatctgccctaatcactttacccctaggcggggctgccgaaatcatgagcatgt

SEQ ID NO: 154192 - DNA, 79 bp, Homo sapiens
cttgcatctaatagtatcatctgccctaatcactttacccctaggcggggctgccgaaatcatgagcatgttaatgtta

SEQ ID NO: 154193 - DNA, 77 bp, Homo sapiens
ctaatagtatcatctgccctaatcactttacccctaggcggggctgccgaaatcatgagcatgttaatgttagctgg

SEQ ID NO: 154194 - DNA, 78 bp, Homo sapiens
atctgccctaatcactttacccctaggcggggctgccgaaatcatgagcatgttaatgttagctggtgctttgtgtgc

SEQ ID NO: 154195 - DNA, 76 bp, Homo sapiens
actttacccctaggcggggctgccgaaatcatgagcatgttaatgttagctggtgctttgtgtgctcagaaggtaa

SEQ ID NO: 154196 - DNA, 79 bp, Homo sapiens
ctaggcggggctgccgaaatcatgagcatgttaatgttagctggtgctttgtgtgctcagaaggtaagaaatcatttct

SEQ ID NO: 154197 - DNA, 81 bp, Homo sapiens
tgccgaaatcatgagcatgttaatgttagctggtgctttgtgtgctcagaaggtaagaaatcatttcttcctctatttgta

SEQ ID NO: 154198 - DNA, 78 bp, Homo sapiens
atgagcatgttaatgttagctggtgctttgtgtgctcagaaggtaagaaatcatttcttcctctatttgtagtctaaa

SEQ ID NO: 154199 - DNA, 82 bp, Homo sapiens
acatgacttgcagtcttgtgatctgaatgccacatttttttattcccacaggaggcagccttctgtgctgtgattcttgccc

SEQ ID NO: 154200 - DNA, 80 bp, Homo sapiens
agtcttgtgatctgaatgccacatttttttattcccacaggaggcagccttctgtgctgtgattcttgccctgctgcttt

SEQ ID NO: 154201 - DNA, 81 bp, Homo sapiens
atctgaatgccacatttttttattcccacaggaggcagccttctgtgctgtgattcttgccctgctgcttttcatcgtgaa

SEQ ID NO: 154202 - DNA, 82 bp, Homo sapiens
ttttttattcccacaggaggcagccttctgtgctgtgattcttgccctgctgcttttcatcgtgaatgcctgaacattgata

SEQ ID NO: 154203 - DNA, 85 bp, Homo sapiens
tattcccacaggaggcagccttctgtgctgtgattcttgccctgctgcttttcatcgtgaatgcctgaacattgatatccctgaa

SEQ ID NO: 154204 - DNA, 82 bp, Homo sapiens
cagccttctgtgctgtgattcttgccctgctgcttttcatcgtgaatgcctgaacattgatatccctgaaggaaactggtat

SEQ ID NO: 154205 - DNA, 85 bp, Homo sapiens
tgctgtgattcttgccctgctgcttttcatcgtgaatgcctgaacattgatatccctgaaggaaactggtattgcaatgactgta

SEQ ID NO: 154206 - DNA, 80 bp, Homo sapiens
attcttgccctgctgcttttcatcgtgaatgcctgaacattgatatccctgaaggaaactggtattgcaatgactgtaaa

SEQ ID NO: 154207 - DNA, 79 bp, Homo sapiens
ctgcttttcatcgtgaatgcctgaacattgatatccctgaaggaaactggtattgcaatgactgtaaagcaggcaaaaa

SEQ ID NO: 154208 - DNA, 79 bp, Homo sapiens
atcgtgaatgcctgaacattgatatccctgaaggaaactggtattgcaatgactgtaaagcaggcaaaaagccacacta

SEQ ID NO: 154209 - DNA, 78 bp, Homo sapiens
tgaacattgatatccctgaaggaaactggtattgcaatgactgtaaagcaggcaaaaagccacactacagggagattg

SEQ ID NO: 154210 - DNA, 77 bp, Homo sapiens
attgatatccctgaaggaaactggtattgcaatgactgtaaagcaggcaaaaagccacactacagggagattgtctg

SEQ ID NO: 154211 - DNA, 72 bp, Homo sapiens
aggaaactggtattgcaatgactgtaaagcaggcaaaaagccacactacagggagattgtctgggtaaaagt

SEQ ID NO: 154212 - DNA, 76 bp, Homo sapiens
tggtattgcaatgactgtaaagcaggcaaaaagccacactacagggagattgtctgggtaaaagttggacgataca

SEQ ID NO: 154213 - DNA, 72 bp, Homo sapiens
aatgactgtaaagcaggcaaaaagccacactacagggagattgtctgggtaaaagttggacgatacaggtaa

SEQ ID NO: 154214 - DNA, 73 bp, Homo sapiens
aggcaaaaagccacactacagggagattgtctgggtaaaagttggacgatacaggtaagcctgaagaatagca

SEQ ID NO: 154215 - DNA, 75 bp, Homo sapiens
cacactacagggagattgtctgggtaaaagttggacgatacaggtaagcctgaagaatagcactcatctctttta

SEQ ID NO: 154216 - DNA, 75 bp, Homo sapiens
tacagggagattgtctgggtaaaagttggacgatacaggtaagcctgaagaatagcactcatctcttttaccatc

SEQ ID NO: 154217 - DNA, 75 bp, Homo sapiens
aatgccttgcagccttctagaggttttccttctccttttcacctttcccaggtggtggccagctgagatctgcca

SEQ ID NO: 154218 - DNA, 75 bp, Homo sapiens
ttctagaggttttccttctccttttcacctttcccaggtggtggccagctgagatctgccatcctcgagctgttc

SEQ ID NO: 154219 - DNA, 77 bp, Homo sapiens
ttccttctccttttcacctttcccaggtggtggccagctgagatctgccatcctcgagctgttccttccaacattga

SEQ ID NO: 154220 - DNA, 82 bp, Homo sapiens
ttttcacctttcccaggtggtggccagctgagatctgccatcctcgagctgttccttccaacattgataagatgagacatga

SEQ ID NO: 154221 - DNA, 84 bp, Homo sapiens
ttcccaggtggtggccagctgagatctgccatcctcgagctgttccttccaacattgataagatgagacatgatgtgggagagt

SEQ ID NO: 154222 - DNA, 85 bp, Homo sapiens
tggccagctgagatctgccatcctcgagctgttccttccaacattgataagatgagacatgatgtgggagagttcccagtcctct

SEQ ID NO: 154223 - DNA, 79 bp, Homo sapiens
agatctgccatcctcgagctgttccttccaacattgataagatgagacatgatgtgggagagttcccagtcctcttttt

SEQ ID NO: 154224 - DNA, 78 bp, Homo sapiens
atcctcgagctgttccttccaacattgataagatgagacatgatgtgggagagttcccagtcctcttttttggatcta

SEQ ID NO: 154225 - DNA, 77 bp, Homo sapiens
tgttccttccaacattgataagatgagacatgatgtgggagagttcccagtcctcttttttggatctaatgactatt

SEQ ID NO: 154226 - DNA, 78 bp, Homo sapiens
ttccaacattgataagatgagacatgatgtgggagagttcccagtcctcttttttggatctaatgactatttgtggac

SEQ ID NO: 154227 - DNA, 77 bp, Homo sapiens
ataagatgagacatgatgtgggagagttcccagtcctcttttttggatctaatgactatttgtggactcaccaggcc

SEQ ID NO: 154228 - DNA, 74 bp, Homo sapiens
atgatgtgggagagttcccagtcctcttttttggatctaatgactatttgtggactcaccaggcccgagtcttc

SEQ ID NO: 154229 - DNA, 71 bp, Homo sapiens
agagttcccagtcctcttttttggatctaatgactatttgtggactcaccaggcccgagtcttcccttaca

SEQ ID NO: 154230 - DNA, 72 bp, Homo sapiens
agtcctcttttttggatctaatgactatttgtggactcaccaggcccgagtcttcccttacatggagggtga

SEQ ID NO: 154231 - DNA, 76 bp, Homo sapiens
tttttggatctaatgactatttgtggactcaccaggcccgagtcttcccttacatggagggtgacgtgagcagcaa

SEQ ID NO: 154232 - DNA, 77 bp, Homo sapiens
taatgactatttgtggactcaccaggcccgagtcttcccttacatggagggtgacgtgagcagcaaggataagatgg

SEQ ID NO: 154233 - DNA, 76 bp, Homo sapiens
ttgtggactcaccaggcccgagtcttcccttacatggagggtgacgtgagcagcaaggataagatgggcaaaggag

SEQ ID NO: 154234 - DNA, 77 bp, Homo sapiens
gcccgagtcttcccttacatggagggtgacgtgagcagcaaggataagatgggcaaaggagtggatgggacatataa

SEQ ID NO: 154235 - DNA, 75 bp, Homo sapiens
agtcttcccttacatggagggtgacgtgagcagcaaggataagatgggcaaaggagtggatgggacatataaaaa

SEQ ID NO: 154236 - DNA, 74 bp, Homo sapiens
tacatggagggtgacgtgagcagcaaggataagatgggcaaaggagtggatgggacatataaaaaaggtaactt

SEQ ID NO: 154237 - DNA, 70 bp, Homo sapiens
acgtgagcagcaaggataagatgggcaaaggagtggatgggacatataaaaaaggtaactttatcctttt

SEQ ID NO: 154238 - DNA, 68 bp, Homo sapiens
agcaaggataagatgggcaaaggagtggatgggacatataaaaaaggtaactttatcctttttgtttc

SEQ ID NO: 154239 - DNA, 68 bp, Homo sapiens
aagatgggcaaaggagtggatgggacatataaaaaaggtaactttatcctttttgtttctcaggcaaa

SEQ ID NO: 154240 - DNA, 79 bp, Homo sapiens
agtaattccacccagagattttgaagtgacttgtgctgtctgttttcatagctcttcaggaagctgcagcaaggtttga

SEQ ID NO: 154241 - DNA, 78 bp, Homo sapiens
agagattttgaagtgacttgtgctgtctgttttcatagctcttcaggaagctgcagcaaggtttgaggaattaaaggc

SEQ ID NO: 154242 - DNA, 75 bp, Homo sapiens
aagtgacttgtgctgtctgttttcatagctcttcaggaagctgcagcaaggtttgaggaattaaaggcccaaaaa

SEQ ID NO: 154243 - DNA, 77 bp, Homo sapiens
ttgtgctgtctgttttcatagctcttcaggaagctgcagcaaggtttgaggaattaaaggcccaaaaagagctaaga

SEQ ID NO: 154244 - DNA, 77 bp, Homo sapiens
ttttcatagctcttcaggaagctgcagcaaggtttgaggaattaaaggcccaaaaagagctaagacagctgcaggaa

SEQ ID NO: 154245 - DNA, 75 bp, Homo sapiens
tcaggaagctgcagcaaggtttgaggaattaaaggcccaaaaagagctaagacagctgcaggaagaccgaaagaa

SEQ ID NO: 154246 - DNA, 75 bp, Homo sapiens
tgcagcaaggtttgaggaattaaaggcccaaaaagagctaagacagctgcaggaagaccgaaagaatgacaagaa

SEQ ID NO: 154247 - DNA, 71 bp, Homo sapiens
aaggtttgaggaattaaaggcccaaaaagagctaagacagctgcaggaagaccgaaagaatgacaagaagc

SEQ ID NO: 154248 - DNA, 72 bp, Homo sapiens
attaaaggcccaaaaagagctaagacagctgcaggaagaccgaaagaatgacaagaagccaccaccttataa

SEQ ID NO: 154249 - DNA, 72 bp, Homo sapiens
aaaaagagctaagacagctgcaggaagaccgaaagaatgacaagaagccaccaccttataaacatataaagg

SEQ ID NO: 154250 - DNA, 74 bp, Homo sapiens
taagacagctgcaggaagaccgaaagaatgacaagaagccaccaccttataaacatataaaggtgaggagaaaa

SEQ ID NO: 154251 - DNA, 69 bp, Homo sapiens
aggaagaccgaaagaatgacaagaagccaccaccttataaacatataaaggtgaggagaaaatcttggg

SEQ ID NO: 154252 - DNA, 70 bp, Homo sapiens
aagaatgacaagaagccaccaccttataaacatataaaggtgaggagaaaatcttgggggaccttctcta

SEQ ID NO: 154253 - DNA, 70 bp, Homo sapiens
ttctgctgacttgttttatgcggtgtactttgtgttacttttccaggtaaaccgtcctattggcagggta

SEQ ID NO: 154254 - DNA, 70 bp, Homo sapiens
ttgttttatgcggtgtactttgtgttacttttccaggtaaaccgtcctattggcagggtacagatcttca

SEQ ID NO: 154255 - DNA, 73 bp, Homo sapiens
ttatgcggtgtactttgtgttacttttccaggtaaaccgtcctattggcagggtacagatcttcactgcagac

SEQ ID NO: 154256 - DNA, 73 bp, Homo sapiens
tttgtgttacttttccaggtaaaccgtcctattggcagggtacagatcttcactgcagacttatctgaaatac

SEQ ID NO: 154257 - DNA, 73 bp, Homo sapiens
ttttccaggtaaaccgtcctattggcagggtacagatcttcactgcagacttatctgaaataccccgttgcaa

SEQ ID NO: 154258 - DNA, 75 bp, Homo sapiens
taaaccgtcctattggcagggtacagatcttcactgcagacttatctgaaataccccgttgcaactgtaaagcta

SEQ ID NO: 154259 - DNA, 78 bp, Homo sapiens
cctattggcagggtacagatcttcactgcagacttatctgaaataccccgttgcaactgtaaagctactgatgagaac

SEQ ID NO: 154260 - DNA, 79 bp, Homo sapiens
tacagatcttcactgcagacttatctgaaataccccgttgcaactgtaaagctactgatgagaacccctgtgggataga

SEQ ID NO: 154261 - DNA, 78 bp, Homo sapiens
ttcactgcagacttatctgaaataccccgttgcaactgtaaagctactgatgagaacccctgtgggatagactctgaa

SEQ ID NO: 154262 - DNA, 77 bp, Homo sapiens
acttatctgaaataccccgttgcaactgtaaagctactgatgagaacccctgtgggatagactctgaatgcatcaac

SEQ ID NO: 154263 - DNA, 81 bp, Homo sapiens
aataccccgttgcaactgtaaagctactgatgagaacccctgtgggatagactctgaatgcatcaaccgcatgctgctcta

SEQ ID NO: 154264 - DNA, 84 bp, Homo sapiens
aactgtaaagctactgatgagaacccctgtgggatagactctgaatgcatcaaccgcatgctgctctatgagtgccaccccaca

SEQ ID NO: 154265 - DNA, 85 bp, Homo sapiens
aaagctactgatgagaacccctgtgggatagactctgaatgcatcaaccgcatgctgctctatgagtgccaccccacagtgtgtc

SEQ ID NO: 154266 - DNA, 84 bp, Homo sapiens
atgagaacccctgtgggatagactctgaatgcatcaaccgcatgctgctctatgagtgccaccccacagtgtgtcctgccggag

SEQ ID NO: 154267 - DNA, 86 bp, Homo sapiens
tgtgggatagactctgaatgcatcaaccgcatgctgctctatgagtgccaccccacagtgtgtcctgccggagggcgctgtcaaaa

SEQ ID NO: 154268 - DNA, 84 bp, Homo sapiens
tctgaatgcatcaaccgcatgctgctctatgagtgccaccccacagtgtgtcctgccggagggcgctgtcaaaaccagtgcttt

SEQ ID NO: 154269 - DNA, 80 bp, Homo sapiens
atcaaccgcatgctgctctatgagtgccaccccacagtgtgtcctgccggagggcgctgtcaaaaccagtgcttttccaa

SEQ ID NO: 154270 - DNA, 80 bp, Homo sapiens
tgctctatgagtgccaccccacagtgtgtcctgccggagggcgctgtcaaaaccagtgcttttccaagcgccaatatcca

SEQ ID NO: 154271 - DNA, 78 bp, Homo sapiens
tatgagtgccaccccacagtgtgtcctgccggagggcgctgtcaaaaccagtgcttttccaagcgccaatatccagag

SEQ ID NO: 154272 - DNA, 73 bp, Homo sapiens
acagtgtgtcctgccggagggcgctgtcaaaaccagtgcttttccaagcgccaatatccagaggttgaaattt

SEQ ID NO: 154273 - DNA, 74 bp, Homo sapiens
ctgccggagggcgctgtcaaaaccagtgcttttccaagcgccaatatccagaggttgaaattttccgcacatta

SEQ ID NO: 154274 - DNA, 73 bp, Homo sapiens
agggcgctgtcaaaaccagtgcttttccaagcgccaatatccagaggttgaaattttccgcacattacagcgg

SEQ ID NO: 154275 - DNA, 69 bp, Homo sapiens
aaaaccagtgcttttccaagcgccaatatccagaggttgaaattttccgcacattacagcggggttggg

SEQ ID NO: 154276 - DNA, 70 bp, Homo sapiens
tttccaagcgccaatatccagaggttgaaattttccgcacattacagcggggttggggtctacggacaaa

SEQ ID NO: 154277 - DNA, 69 bp, Homo sapiens
ccaatatccagaggttgaaattttccgcacattacagcggggttggggtctacggacaaaaacagatat

SEQ ID NO: 154278 - DNA, 66 bp, Homo sapiens
agaggttgaaattttccgcacattacagcggggttggggtctacggacaaaaacagatattaaaaa

SEQ ID NO: 154279 - DNA, 65 bp, Homo sapiens
aaattttccgcacattacagcggggttggggtctacggacaaaaacagatattaaaaaggttaga

SEQ ID NO: 154280 - DNA, 64 bp, Homo sapiens
acattacagcggggttggggtctacggacaaaaacagatattaaaaaggttagaaaaagctaaa

SEQ ID NO: 154281 - DNA, 64 bp, Homo sapiens
gggttggggtctacggacaaaaacagatattaaaaaggttagaaaaagctaaattaccatatac

SEQ ID NO: 154282 - DNA, 72 bp, Homo sapiens
ataccagtgtccttttttgccattaagtcaggaggtatttcttgttctagggtgaatttgtgaatgagtatg

SEQ ID NO: 154283 - DNA, 75 bp, Homo sapiens
tttttgccattaagtcaggaggtatttcttgttctagggtgaatttgtgaatgagtatgtgggtgagcttataga

SEQ ID NO: 154284 - DNA, 76 bp, Homo sapiens
attaagtcaggaggtatttcttgttctagggtgaatttgtgaatgagtatgtgggtgagcttatagatgaagaaga

SEQ ID NO: 154285 - DNA, 80 bp, Homo sapiens
gtatttcttgttctagggtgaatttgtgaatgagtatgtgggtgagcttatagatgaagaagaatgcagagctcgaattc

SEQ ID NO: 154286 - DNA, 84 bp, Homo sapiens
ttctagggtgaatttgtgaatgagtatgtgggtgagcttatagatgaagaagaatgcagagctcgaattcgctatgctcaagaa

SEQ ID NO: 154287 - DNA, 87 bp, Homo sapiens
aatttgtgaatgagtatgtgggtgagcttatagatgaagaagaatgcagagctcgaattcgctatgctcaagaacatgatatcacta

SEQ ID NO: 154288 - DNA, 87 bp, Homo sapiens
atgagtatgtgggtgagcttatagatgaagaagaatgcagagctcgaattcgctatgctcaagaacatgatatcactaatttctata

SEQ ID NO: 154289 - DNA, 88 bp, Homo sapiens
atgtgggtgagcttatagatgaagaagaatgcagagctcgaattcgctatgctcaagaacatgatatcactaatttctatatgctcac

SEQ ID NO: 154290 - DNA, 86 bp, Homo sapiens
tagatgaagaagaatgcagagctcgaattcgctatgctcaagaacatgatatcactaatttctatatgctcaccctagacaaagta

SEQ ID NO: 154291 - DNA, 82 bp, Homo sapiens
aagaatgcagagctcgaattcgctatgctcaagaacatgatatcactaatttctatatgctcaccctagacaaagtaagtaa

SEQ ID NO: 154292 - DNA, 79 bp, Homo sapiens
agctcgaattcgctatgctcaagaacatgatatcactaatttctatatgctcaccctagacaaagtaagtaatgggaaa

SEQ ID NO: 154293 - DNA, 79 bp, Homo sapiens
aattcgctatgctcaagaacatgatatcactaatttctatatgctcaccctagacaaagtaagtaatgggaaatgctgt

SEQ ID NO: 154294 - DNA, 78 bp, Homo sapiens
tcaagaacatgatatcactaatttctatatgctcaccctagacaaagtaagtaatgggaaatgctgttttcactgtta

SEQ ID NO: 154295 - DNA, 77 bp, Homo sapiens
cagaggtctcaggaagtctgatgtgtagcttcttttggaattctaggaccgaatcattgatgctggtcccaaaggaa

SEQ ID NO: 154296 - DNA, 76 bp, Homo sapiens
aggaagtctgatgtgtagcttcttttggaattctaggaccgaatcattgatgctggtcccaaaggaaactatgctc

SEQ ID NO: 154297 - DNA, 76 bp, Homo sapiens
atgtgtagcttcttttggaattctaggaccgaatcattgatgctggtcccaaaggaaactatgctcggttcatgaa

SEQ ID NO: 154298 - DNA, 79 bp, Homo sapiens
ttcttttggaattctaggaccgaatcattgatgctggtcccaaaggaaactatgctcggttcatgaatcattgctgcca

SEQ ID NO: 154299 - DNA, 79 bp, Homo sapiens
aattctaggaccgaatcattgatgctggtcccaaaggaaactatgctcggttcatgaatcattgctgccagcccaactg

SEQ ID NO: 154300 - DNA, 81 bp, Homo sapiens
accgaatcattgatgctggtcccaaaggaaactatgctcggttcatgaatcattgctgccagcccaactgtgaaacacaga

SEQ ID NO: 154301 - DNA, 80 bp, Homo sapiens
attgatgctggtcccaaaggaaactatgctcggttcatgaatcattgctgccagcccaactgtgaaacacagaagtggtc

SEQ ID NO: 154302 - DNA, 80 bp, Homo sapiens
aaaggaaactatgctcggttcatgaatcattgctgccagcccaactgtgaaacacagaagtggtctgtgaatggagatac

SEQ ID NO: 154303 - DNA, 81 bp, Homo sapiens
aactatgctcggttcatgaatcattgctgccagcccaactgtgaaacacagaagtggtctgtgaatggagatacccgtgta

SEQ ID NO: 154304 - DNA, 81 bp, Homo sapiens
ttcatgaatcattgctgccagcccaactgtgaaacacagaagtggtctgtgaatggagatacccgtgtaggcctttttgca

SEQ ID NO: 154305 - DNA, 78 bp, Homo sapiens
atcattgctgccagcccaactgtgaaacacagaagtggtctgtgaatggagatacccgtgtaggcctttttgcactaa

SEQ ID NO: 154306 - DNA, 74 bp, Homo sapiens
ccaactgtgaaacacagaagtggtctgtgaatggagatacccgtgtaggcctttttgcactaagtgacattaaa

SEQ ID NO: 154307 - DNA, 73 bp, Homo sapiens
aaacacagaagtggtctgtgaatggagatacccgtgtaggcctttttgcactaagtgacattaaagcaggtaa

SEQ ID NO: 154308 - DNA, 73 bp, Homo sapiens
aagtggtctgtgaatggagatacccgtgtaggcctttttgcactaagtgacattaaagcaggtaagaatcatt

SEQ ID NO: 154309 - DNA, 78 bp, Homo sapiens
tgtgaatggagatacccgtgtaggcctttttgcactaagtgacattaaagcaggtaagaatcatttcaggattctgca

SEQ ID NO: 154310 - DNA, 74 bp, Homo sapiens
cagaaataatgtaattaaaaccatagatattaatattttcacggtctcttatgcaggcactgaacttaccttca

SEQ ID NO: 154311 - DNA, 71 bp, Homo sapiens
aattaaaaccatagatattaatattttcacggtctcttatgcaggcactgaacttaccttcaactacaacc

SEQ ID NO: 154312 - DNA, 73 bp, Homo sapiens
aaaccatagatattaatattttcacggtctcttatgcaggcactgaacttaccttcaactacaacctagaatg

SEQ ID NO: 154313 - DNA, 73 bp, Homo sapiens
attaatattttcacggtctcttatgcaggcactgaacttaccttcaactacaacctagaatgtcttgggaatg

SEQ ID NO: 154314 - DNA, 72 bp, Homo sapiens
acggtctcttatgcaggcactgaacttaccttcaactacaacctagaatgtcttgggaatggaaagactgtt

SEQ ID NO: 154315 - DNA, 76 bp, Homo sapiens
ttatgcaggcactgaacttaccttcaactacaacctagaatgtcttgggaatggaaagactgtttgcaaatgtgga

SEQ ID NO: 154316 - DNA, 70 bp, Homo sapiens
aacttaccttcaactacaacctagaatgtcttgggaatggaaagactgtttgcaaatgtggagccccgaa

SEQ ID NO: 154317 - DNA, 73 bp, Homo sapiens
accttcaactacaacctagaatgtcttgggaatggaaagactgtttgcaaatgtggagccccgaactgcagtg

SEQ ID NO: 154318 - DNA, 74 bp, Homo sapiens
ctagaatgtcttgggaatggaaagactgtttgcaaatgtggagccccgaactgcagtggcttcttgggtgtaag

SEQ ID NO: 154319 - DNA, 74 bp, Homo sapiens
tgtcttgggaatggaaagactgtttgcaaatgtggagccccgaactgcagtggcttcttgggtgtaaggccaaa

SEQ ID NO: 154320 - DNA, 72 bp, Homo sapiens
aatggaaagactgtttgcaaatgtggagccccgaactgcagtggcttcttgggtgtaaggccaaaggtacca

SEQ ID NO: 154321 - DNA, 71 bp, Homo sapiens
tttgcaaatgtggagccccgaactgcagtggcttcttgggtgtaaggccaaaggtaccacccttctagact

SEQ ID NO: 154322 - DNA, 71 bp, Homo sapiens
atgtggagccccgaactgcagtggcttcttgggtgtaaggccaaaggtaccacccttctagacttctgctt

SEQ ID NO: 154323 - DNA, 79 bp, Homo sapiens
tactaatgtgttcacagaatgctgactgttcaatatctgacctgtagaatcaacccattgccacggaagaaaagtcaaa

SEQ ID NO: 154324 - DNA, 78 bp, Homo sapiens
ttcacagaatgctgactgttcaatatctgacctgtagaatcaacccattgccacggaagaaaagtcaaagaaattcaa

SEQ ID NO: 154325 - DNA, 76 bp, Homo sapiens
aatgctgactgttcaatatctgacctgtagaatcaacccattgccacggaagaaaagtcaaagaaattcaagaaga

SEQ ID NO: 154326 - DNA, 75 bp, Homo sapiens
tgttcaatatctgacctgtagaatcaacccattgccacggaagaaaagtcaaagaaattcaagaagaagcaacag

SEQ ID NO: 154327 - DNA, 72 bp, Homo sapiens
acctgtagaatcaacccattgccacggaagaaaagtcaaagaaattcaagaagaagcaacagggaaagcgca

SEQ ID NO: 154328 - DNA, 71 bp, Homo sapiens
aatcaacccattgccacggaagaaaagtcaaagaaattcaagaagaagcaacagggaaagcgcaggaccca

SEQ ID NO: 154329 - DNA, 71 bp, Homo sapiens
cacggaagaaaagtcaaagaaattcaagaagaagcaacagggaaagcgcaggacccagggtgaaatcacaa

SEQ ID NO: 154330 - DNA, 70 bp, Homo sapiens
aagaaaagtcaaagaaattcaagaagaagcaacagggaaagcgcaggacccagggtgaaatcacaaagga

SEQ ID NO: 154331 - DNA, 73 bp, Homo sapiens
aattcaagaagaagcaacagggaaagcgcaggacccagggtgaaatcacaaaggagcgagaagatgagtgttt

SEQ ID NO: 154332 - DNA, 72 bp, Homo sapiens
aagaagaagcaacagggaaagcgcaggacccagggtgaaatcacaaaggagcgagaagatgagtgttttagt

SEQ ID NO: 154333 - DNA, 73 bp, Homo sapiens
aacagggaaagcgcaggacccagggtgaaatcacaaaggagcgagaagatgagtgttttagttgtggggatgc

SEQ ID NO: 154334 - DNA, 75 bp, Homo sapiens
aggacccagggtgaaatcacaaaggagcgagaagatgagtgttttagttgtggggatgctggccagctcgtctcc

SEQ ID NO: 154335 - DNA, 77 bp, Homo sapiens
agggtgaaatcacaaaggagcgagaagatgagtgttttagttgtggggatgctggccagctcgtctcctgcaagaaa

SEQ ID NO: 154336 - DNA, 77 bp, Homo sapiens
aaggagcgagaagatgagtgttttagttgtggggatgctggccagctcgtctcctgcaagaaaccaggctgcccaaa

SEQ ID NO: 154337 - DNA, 75 bp, Homo sapiens
agaagatgagtgttttagttgtggggatgctggccagctcgtctcctgcaagaaaccaggctgcccaaaagttta

SEQ ID NO: 154338 - DNA, 74 bp, Homo sapiens
agtgttttagttgtggggatgctggccagctcgtctcctgcaagaaaccaggctgcccaaaagtttaccacgca

SEQ ID NO: 154339 - DNA, 80 bp, Homo sapiens
ttgtggggatgctggccagctcgtctcctgcaagaaaccaggctgcccaaaagtttaccacgcagactgtctcaatctga

SEQ ID NO: 154340 - DNA, 79 bp, Homo sapiens
tggccagctcgtctcctgcaagaaaccaggctgcccaaaagtttaccacgcagactgtctcaatctgaccaagcgacca

SEQ ID NO: 154341 - DNA, 77 bp, Homo sapiens
tctcctgcaagaaaccaggctgcccaaaagtttaccacgcagactgtctcaatctgaccaagcgaccagcaggttgg

SEQ ID NO: 154342 - DNA, 74 bp, Homo sapiens
aaaccaggctgcccaaaagtttaccacgcagactgtctcaatctgaccaagcgaccagcaggttggtgccaaaa

SEQ ID NO: 154343 - DNA, 76 bp, Homo sapiens
ctgcccaaaagtttaccacgcagactgtctcaatctgaccaagcgaccagcaggttggtgccaaaatccatttgta

SEQ ID NO: 154344 - DNA, 75 bp, Homo sapiens
aaagtttaccacgcagactgtctcaatctgaccaagcgaccagcaggttggtgccaaaatccatttgtaccgcta

SEQ ID NO: 154345 - DNA, 72 bp, Homo sapiens
tttttcctaaacttttgatttacttctgtgttttcagggaaatgggaatgtccgtggcatcagtgtgacatc

SEQ ID NO: 154346 - DNA, 74 bp, Homo sapiens
taaacttttgatttacttctgtgttttcagggaaatgggaatgtccgtggcatcagtgtgacatctgcgggaag

SEQ ID NO: 154347 - DNA, 76 bp, Homo sapiens
tttacttctgtgttttcagggaaatgggaatgtccgtggcatcagtgtgacatctgcgggaaggaagcagcctcct

SEQ ID NO: 154348 - DNA, 80 bp, Homo sapiens
ttttcagggaaatgggaatgtccgtggcatcagtgtgacatctgcgggaaggaagcagcctccttctgtgagatgtgccc

SEQ ID NO: 154349 - DNA, 80 bp, Homo sapiens
aaatgggaatgtccgtggcatcagtgtgacatctgcgggaaggaagcagcctccttctgtgagatgtgccccagctcctt

SEQ ID NO: 154350 - DNA, 82 bp, Homo sapiens
aatgtccgtggcatcagtgtgacatctgcgggaaggaagcagcctccttctgtgagatgtgccccagctccttttgtaagca

SEQ ID NO: 154351 - DNA, 82 bp, Homo sapiens
atcagtgtgacatctgcgggaaggaagcagcctccttctgtgagatgtgccccagctccttttgtaagcagcatcgagaagg

SEQ ID NO: 154352 - DNA, 79 bp, Homo sapiens
atctgcgggaaggaagcagcctccttctgtgagatgtgccccagctccttttgtaagcagcatcgagaagggatgcttt

SEQ ID NO: 154353 - DNA, 79 bp, Homo sapiens
aaggaagcagcctccttctgtgagatgtgccccagctccttttgtaagcagcatcgagaagggatgcttttcatttcca

SEQ ID NO: 154354 - DNA, 78 bp, Homo sapiens
agcctccttctgtgagatgtgccccagctccttttgtaagcagcatcgagaagggatgcttttcatttccaaactgga

SEQ ID NO: 154355 - DNA, 80 bp, Homo sapiens
agctccttttgtaagcagcatcgagaagggatgcttttcatttccaaactggatgggcgtctgtcttgtactgagcatga

SEQ ID NO: 154356 - DNA, 78 bp, Homo sapiens
cttttgtaagcagcatcgagaagggatgcttttcatttccaaactggatgggcgtctgtcttgtactgagcatgaccc

SEQ ID NO: 154357 - DNA, 76 bp, Homo sapiens
atcgagaagggatgcttttcatttccaaactggatgggcgtctgtcttgtactgagcatgacccctgtgggcccaa

SEQ ID NO: 154358 - DNA, 76 bp, Homo sapiens
atgcttttcatttccaaactggatgggcgtctgtcttgtactgagcatgacccctgtgggcccaatcctctggaac

SEQ ID NO: 154359 - DNA, 75 bp, Homo sapiens
tttcatttccaaactggatgggcgtctgtcttgtactgagcatgacccctgtgggcccaatcctctggaacctgg

SEQ ID NO: 154360 - DNA, 74 bp, Homo sapiens
aaactggatgggcgtctgtcttgtactgagcatgacccctgtgggcccaatcctctggaacctggggagatccg

SEQ ID NO: 154361 - DNA, 77 bp, Homo sapiens
cgtctgtcttgtactgagcatgacccctgtgggcccaatcctctggaacctggggagatccgtgagtatgtgcctcc

SEQ ID NO: 154362 - DNA, 76 bp, Homo sapiens
ttgtactgagcatgacccctgtgggcccaatcctctggaacctggggagatccgtgagtatgtgcctcccccagta

SEQ ID NO: 154363 - DNA, 73 bp, Homo sapiens
atgacccctgtgggcccaatcctctggaacctggggagatccgtgagtatgtgcctcccccagtaccgctgcc

SEQ ID NO: 154364 - DNA, 74 bp, Homo sapiens
tgggcccaatcctctggaacctggggagatccgtgagtatgtgcctcccccagtaccgctgcctccagggccaa

SEQ ID NO: 154365 - DNA, 78 bp, Homo sapiens
tctggaacctggggagatccgtgagtatgtgcctcccccagtaccgctgcctccagggccaagcactcacctggcaga

SEQ ID NO: 154366 - DNA, 80 bp, Homo sapiens
ggagatccgtgagtatgtgcctcccccagtaccgctgcctccagggccaagcactcacctggcagagcaatcaacaggaa

SEQ ID NO: 154367 - DNA, 83 bp, Homo sapiens
cgtgagtatgtgcctcccccagtaccgctgcctccagggccaagcactcacctggcagagcaatcaacaggaatggctgctca

SEQ ID NO: 154368 - DNA, 80 bp, Homo sapiens
ctcccccagtaccgctgcctccagggccaagcactcacctggcagagcaatcaacaggaatggctgctcaggcacccaaa

SEQ ID NO: 154369 - DNA, 83 bp, Homo sapiens
taccgctgcctccagggccaagcactcacctggcagagcaatcaacaggaatggctgctcaggcacccaaaatgtcagataaa

SEQ ID NO: 154370 - DNA, 84 bp, Homo sapiens
tccagggccaagcactcacctggcagagcaatcaacaggaatggctgctcaggcacccaaaatgtcagataaacctcctgctga

SEQ ID NO: 154371 - DNA, 82 bp, Homo sapiens
aagcactcacctggcagagcaatcaacaggaatggctgctcaggcacccaaaatgtcagataaacctcctgctgacaccaac

SEQ ID NO: 154372 - DNA, 83 bp, Homo sapiens
acctggcagagcaatcaacaggaatggctgctcaggcacccaaaatgtcagataaacctcctgctgacaccaaccagatgctg

SEQ ID NO: 154373 - DNA, 82 bp, Homo sapiens
tcaacaggaatggctgctcaggcacccaaaatgtcagataaacctcctgctgacaccaaccagatgctgtcgctctccaaaa

SEQ ID NO: 154374 - DNA, 79 bp, Homo sapiens
aggaatggctgctcaggcacccaaaatgtcagataaacctcctgctgacaccaaccagatgctgtcgctctccaaaaaa

SEQ ID NO: 154375 - DNA, 78 bp, Homo sapiens
aggcacccaaaatgtcagataaacctcctgctgacaccaaccagatgctgtcgctctccaaaaaagctctggcaggga

SEQ ID NO: 154376 - DNA, 80 bp, Homo sapiens
ataaacctcctgctgacaccaaccagatgctgtcgctctccaaaaaagctctggcagggacttgtcagaggccattgcta

SEQ ID NO: 154377 - DNA, 80 bp, Homo sapiens
tgacaccaaccagatgctgtcgctctccaaaaaagctctggcagggacttgtcagaggccattgctacctgaaagacctc

SEQ ID NO: 154378 - DNA, 79 bp, Homo sapiens
aaccagatgctgtcgctctccaaaaaagctctggcagggacttgtcagaggccattgctacctgaaagacctcttgaga

SEQ ID NO: 154379 - DNA, 78 bp, Homo sapiens
ctgtcgctctccaaaaaagctctggcagggacttgtcagaggccattgctacctgaaagacctcttgagagaactgac

SEQ ID NO: 154380 - DNA, 75 bp, Homo sapiens
aaaaaagctctggcagggacttgtcagaggccattgctacctgaaagacctcttgagagaactgactccaggccc

SEQ ID NO: 154381 - DNA, 77 bp, Homo sapiens
gcagggacttgtcagaggccattgctacctgaaagacctcttgagagaactgactccaggccccagcctttagataa

SEQ ID NO: 154382 - DNA, 76 bp, Homo sapiens
acttgtcagaggccattgctacctgaaagacctcttgagagaactgactccaggccccagcctttagataaggtca

SEQ ID NO: 154383 - DNA, 75 bp, Homo sapiens
tacctgaaagacctcttgagagaactgactccaggccccagcctttagataaggtcagagacctcgctgggtcag

SEQ ID NO: 154384 - DNA, 74 bp, Homo sapiens
ttgagagaactgactccaggccccagcctttagataaggtcagagacctcgctgggtcagggaccaaatcccaa

SEQ ID NO: 154385 - DNA, 73 bp, Homo sapiens
aaggtcagagacctcgctgggtcagggaccaaatcccaatccttggtttccagccagaggccactggacaggc

SEQ ID NO: 154386 - DNA, 74 bp, Homo sapiens
acctcgctgggtcagggaccaaatcccaatccttggtttccagccagaggccactggacaggccaccagcagtg

SEQ ID NO: 154387 - DNA, 76 bp, Homo sapiens
gtcagggaccaaatcccaatccttggtttccagccagaggccactggacaggccaccagcagtggcaggaccaaga

SEQ ID NO: 154388 - DNA, 77 bp, Homo sapiens
ccagaggccactggacaggccaccagcagtggcaggaccaagaccccagctaagcgacaaaccctctccagtgacca

SEQ ID NO: 154389 - DNA, 76 bp, Homo sapiens
ccactggacaggccaccagcagtggcaggaccaagaccccagctaagcgacaaaccctctccagtgaccagcccaa

SEQ ID NO: 154390 - DNA, 76 bp, Homo sapiens
accagcagtggcaggaccaagaccccagctaagcgacaaaccctctccagtgaccagcccaagctcctcaccctca

SEQ ID NO: 154391 - DNA, 74 bp, Homo sapiens
caggaccaagaccccagctaagcgacaaaccctctccagtgaccagcccaagctcctcaccctcagtcaggtcc

SEQ ID NO: 154392 - DNA, 73 bp, Homo sapiens
aagaccccagctaagcgacaaaccctctccagtgaccagcccaagctcctcaccctcagtcaggtcccaacca

SEQ ID NO: 154393 - DNA, 71 bp, Homo sapiens
aaaccctctccagtgaccagcccaagctcctcaccctcagtcaggtcccaaccactggaaagacctctggg

SEQ ID NO: 154394 - DNA, 73 bp, Homo sapiens
tgaccagcccaagctcctcaccctcagtcaggtcccaaccactggaaagacctctggggacggctgacccaag

SEQ ID NO: 154395 - DNA, 72 bp, Homo sapiens
agctcctcaccctcagtcaggtcccaaccactggaaagacctctggggacggctgacccaaggctggataaa

SEQ ID NO: 154396 - DNA, 71 bp, Homo sapiens
accctcagtcaggtcccaaccactggaaagacctctggggacggctgacccaaggctggataaatccatag

SEQ ID NO: 154397 - DNA, 73 bp, Homo sapiens
aggtcccaaccactggaaagacctctggggacggctgacccaaggctggataaatccataggtgctgccagcc

SEQ ID NO: 154398 - DNA, 73 bp, Homo sapiens
aaccactggaaagacctctggggacggctgacccaaggctggataaatccataggtgctgccagcccaaggcc

SEQ ID NO: 154399 - DNA, 74 bp, Homo sapiens
acggctgacccaaggctggataaatccataggtgctgccagcccaaggccccagtcactggagaaaacctcagt

SEQ ID NO: 154400 - DNA, 75 bp, Homo sapiens
ataggtgctgccagcccaaggccccagtcactggagaaaacctcagttcccactggcctgagacttccgccgcca

SEQ ID NO: 154401 - DNA, 76 bp, Homo sapiens
ccaaggccccagtcactggagaaaacctcagttcccactggcctgagacttccgccgccagacagactgctcatta

SEQ ID NO: 154402 - DNA, 78 bp, Homo sapiens
agtcactggagaaaacctcagttcccactggcctgagacttccgccgccagacagactgctcattactagcagtccca

SEQ ID NO: 154403 - DNA, 74 bp, Homo sapiens
agaaaacctcagttcccactggcctgagacttccgccgccagacagactgctcattactagcagtcccaaaccc

SEQ ID NO: 154404 - DNA, 77 bp, Homo sapiens
agttcccactggcctgagacttccgccgccagacagactgctcattactagcagtcccaaaccccagacttcagaca

SEQ ID NO: 154405 - DNA, 79 bp, Homo sapiens
gcctgagacttccgccgccagacagactgctcattactagcagtcccaaaccccagacttcagacaggcctactgacaa

SEQ ID NO: 154406 - DNA, 76 bp, Homo sapiens
agacttccgccgccagacagactgctcattactagcagtcccaaaccccagacttcagacaggcctactgacaaac

SEQ ID NO: 154407 - DNA, 76 bp, Homo sapiens
agacagactgctcattactagcagtcccaaaccccagacttcagacaggcctactgacaaaccccatgcctctttg

SEQ ID NO: 154408 - DNA, 73 bp, Homo sapiens
actagcagtcccaaaccccagacttcagacaggcctactgacaaaccccatgcctctttgtcccagagactcc

SEQ ID NO: 154409 - DNA, 73 bp, Homo sapiens
accccagacttcagacaggcctactgacaaaccccatgcctctttgtcccagagactcccacctcctgagaaa

SEQ ID NO: 154410 - DNA, 75 bp, Homo sapiens
aggcctactgacaaaccccatgcctctttgtcccagagactcccacctcctgagaaagtactatcagctgtggtc

SEQ ID NO: 154411 - DNA, 74 bp, Homo sapiens
aaccccatgcctctttgtcccagagactcccacctcctgagaaagtactatcagctgtggtccagacccttgta

SEQ ID NO: 154412 - DNA, 74 bp, Homo sapiens
tctttgtcccagagactcccacctcctgagaaagtactatcagctgtggtccagacccttgtagctaaagaaaa

SEQ ID NO: 154413 - DNA, 76 bp, Homo sapiens
tcccagagactcccacctcctgagaaagtactatcagctgtggtccagacccttgtagctaaagaaaaagcactga

SEQ ID NO: 154414 - DNA, 75 bp, Homo sapiens
acctcctgagaaagtactatcagctgtggtccagacccttgtagctaaagaaaaagcactgaggcctgtggacca

SEQ ID NO: 154415 - DNA, 76 bp, Homo sapiens
ctatcagctgtggtccagacccttgtagctaaagaaaaagcactgaggcctgtggaccagaatactcagtcaaaaa

SEQ ID NO: 154416 - DNA, 75 bp, Homo sapiens
tccagacccttgtagctaaagaaaaagcactgaggcctgtggaccagaatactcagtcaaaaaatagagctgctt

SEQ ID NO: 154417 - DNA, 80 bp, Homo sapiens
tagctaaagaaaaagcactgaggcctgtggaccagaatactcagtcaaaaaatagagctgctttggtgatggatctcata

SEQ ID NO: 154418 - DNA, 78 bp, Homo sapiens
aaaaagcactgaggcctgtggaccagaatactcagtcaaaaaatagagctgctttggtgatggatctcatagacctaa

SEQ ID NO: 154419 - DNA, 79 bp, Homo sapiens
aggcctgtggaccagaatactcagtcaaaaaatagagctgctttggtgatggatctcatagacctaactcctcgccaga

SEQ ID NO: 154420 - DNA, 77 bp, Homo sapiens
accagaatactcagtcaaaaaatagagctgctttggtgatggatctcatagacctaactcctcgccagaaggagcgg

SEQ ID NO: 154421 - DNA, 78 bp, Homo sapiens
aatactcagtcaaaaaatagagctgctttggtgatggatctcatagacctaactcctcgccagaaggagcgggcagct

SEQ ID NO: 154422 - DNA, 82 bp, Homo sapiens
ctttggtgatggatctcatagacctaactcctcgccagaaggagcgggcagcttcacctcatcaggtcacaccacaggctga

SEQ ID NO: 154423 - DNA, 85 bp, Homo sapiens
gtgatggatctcatagacctaactcctcgccagaaggagcgggcagcttcacctcatcaggtcacaccacaggctgatgagaaga

SEQ ID NO: 154424 - DNA, 82 bp, Homo sapiens
atagacctaactcctcgccagaaggagcgggcagcttcacctcatcaggtcacaccacaggctgatgagaagatgccagtgt

SEQ ID NO: 154425 - DNA, 85 bp, Homo sapiens
agaaggagcgggcagcttcacctcatcaggtcacaccacaggctgatgagaagatgccagtgttggagtcaagttcatggcctgc

SEQ ID NO: 154426 - DNA, 85 bp, Homo sapiens
agcttcacctcatcaggtcacaccacaggctgatgagaagatgccagtgttggagtcaagttcatggcctgccagcaaaggtctg

SEQ ID NO: 154427 - DNA, 85 bp, Homo sapiens
cctcatcaggtcacaccacaggctgatgagaagatgccagtgttggagtcaagttcatggcctgccagcaaaggtctggggcata

SEQ ID NO: 154428 - DNA, 84 bp, Homo sapiens
accacaggctgatgagaagatgccagtgttggagtcaagttcatggcctgccagcaaaggtctggggcatatgccgagagctgt

SEQ ID NO: 154429 - DNA, 84 bp, Homo sapiens
ctgatgagaagatgccagtgttggagtcaagttcatggcctgccagcaaaggtctggggcatatgccgagagctgttgagaaag

SEQ ID NO: 154430 - DNA, 82 bp, Homo sapiens
aagatgccagtgttggagtcaagttcatggcctgccagcaaaggtctggggcatatgccgagagctgttgagaaaggctgtg

SEQ ID NO: 154431 - DNA, 83 bp, Homo sapiens
ttggagtcaagttcatggcctgccagcaaaggtctggggcatatgccgagagctgttgagaaaggctgtgtgtcagatcctct

SEQ ID NO: 154432 - DNA, 84 bp, Homo sapiens
aagttcatggcctgccagcaaaggtctggggcatatgccgagagctgttgagaaaggctgtgtgtcagatcctcttcagacatc

SEQ ID NO: 154433 - DNA, 84 bp, Homo sapiens
cctgccagcaaaggtctggggcatatgccgagagctgttgagaaaggctgtgtgtcagatcctcttcagacatctgggaaagca

SEQ ID NO: 154434 - DNA, 82 bp, Homo sapiens
atatgccgagagctgttgagaaaggctgtgtgtcagatcctcttcagacatctgggaaagcagcagccccttcagaggaccc

SEQ ID NO: 154435 - DNA, 81 bp, Homo sapiens
agagctgttgagaaaggctgtgtgtcagatcctcttcagacatctgggaaagcagcagccccttcagaggacccctggcaa

SEQ ID NO: 154436 - DNA, 78 bp, Homo sapiens
aaaggctgtgtgtcagatcctcttcagacatctgggaaagcagcagccccttcagaggacccctggcaagctgttaaa

SEQ ID NO: 154437 - DNA, 81 bp, Homo sapiens
tgtgtcagatcctcttcagacatctgggaaagcagcagccccttcagaggacccctggcaagctgttaaatcactcaccca

SEQ ID NO: 154438 - DNA, 79 bp, Homo sapiens
tcctcttcagacatctgggaaagcagcagccccttcagaggacccctggcaagctgttaaatcactcacccaggccaga

SEQ ID NO: 154439 - DNA, 75 bp, Homo sapiens
atctgggaaagcagcagccccttcagaggacccctggcaagctgttaaatcactcacccaggccagacttctttc

SEQ ID NO: 154440 - DNA, 76 bp, Homo sapiens
aagcagcagccccttcagaggacccctggcaagctgttaaatcactcacccaggccagacttctttctcagcctcc

SEQ ID NO: 154441 - DNA, 75 bp, Homo sapiens
ttcagaggacccctggcaagctgttaaatcactcacccaggccagacttctttctcagcctcctgccaaggcctt

SEQ ID NO: 154442 - DNA, 77 bp, Homo sapiens
ctggcaagctgttaaatcactcacccaggccagacttctttctcagcctcctgccaaggcctttttatatgagccaa

SEQ ID NO: 154443 - DNA, 75 bp, Homo sapiens
aagctgttaaatcactcacccaggccagacttctttctcagcctcctgccaaggcctttttatatgagccaacaa

SEQ ID NO: 154444 - DNA, 77 bp, Homo sapiens
tcacccaggccagacttctttctcagcctcctgccaaggcctttttatatgagccaacaactcaggcctcaggaaga

SEQ ID NO: 154445 - DNA, 76 bp, Homo sapiens
aggccagacttctttctcagcctcctgccaaggcctttttatatgagccaacaactcaggcctcaggaagagcttc

SEQ ID NO: 154446 - DNA, 79 bp, Homo sapiens
ttctttctcagcctcctgccaaggcctttttatatgagccaacaactcaggcctcaggaagagcttctgcaggggctga

SEQ ID NO: 154447 - DNA, 78 bp, Homo sapiens
tcctgccaaggcctttttatatgagccaacaactcaggcctcaggaagagcttctgcaggggctgagcagaccccagg

SEQ ID NO: 154448 - DNA, 78 bp, Homo sapiens
ctttttatatgagccaacaactcaggcctcaggaagagcttctgcaggggctgagcagaccccagggcctcttagcca

SEQ ID NO: 154449 - DNA, 74 bp, Homo sapiens
aacaactcaggcctcaggaagagcttctgcaggggctgagcagaccccagggcctcttagccaatccccgggcc

SEQ ID NO: 154450 - DNA, 75 bp, Homo sapiens
aggaagagcttctgcaggggctgagcagaccccagggcctcttagccaatccccgggcctggtgaagcaggcgaa

SEQ ID NO: 154451 - DNA, 77 bp, Homo sapiens
ttctgcaggggctgagcagaccccagggcctcttagccaatccccgggcctggtgaagcaggcgaagcagatggtcg

SEQ ID NO: 154452 - DNA, 77 bp, Homo sapiens
ctgagcagaccccagggcctcttagccaatccccgggcctggtgaagcaggcgaagcagatggtcggaggccagcaa

SEQ ID NO: 154453 - DNA, 76 bp, Homo sapiens
cccagggcctcttagccaatccccgggcctggtgaagcaggcgaagcagatggtcggaggccagcaactacctgca

SEQ ID NO: 154454 - DNA, 78 bp, Homo sapiens
tcttagccaatccccgggcctggtgaagcaggcgaagcagatggtcggaggccagcaactacctgcacttgccgccaa

SEQ ID NO: 154455 - DNA, 79 bp, Homo sapiens
tggtgaagcaggcgaagcagatggtcggaggccagcaactacctgcacttgccgccaagagtgggcaatcttttaggtc

SEQ ID NO: 154456 - DNA, 74 bp, Homo sapiens
agatggtcggaggccagcaactacctgcacttgccgccaagagtgggcaatcttttaggtctctcgggaaggcc

SEQ ID NO: 154457 - DNA, 73 bp, Homo sapiens
aggccagcaactacctgcacttgccgccaagagtgggcaatcttttaggtctctcgggaaggccccagcctcc

SEQ ID NO: 154458 - DNA, 70 bp, Homo sapiens
aactacctgcacttgccgccaagagtgggcaatcttttaggtctctcgggaaggccccagcctccctccc

SEQ ID NO: 154459 - DNA, 70 bp, Homo sapiens
ttgccgccaagagtgggcaatcttttaggtctctcgggaaggccccagcctccctccccactgaagaaaa

SEQ ID NO: 154460 - DNA, 67 bp, Homo sapiens
aagagtgggcaatcttttaggtctctcgggaaggccccagcctccctccccactgaagaaaagaagt

SEQ ID NO: 154461 - DNA, 66 bp, Homo sapiens
aatcttttaggtctctcgggaaggccccagcctccctccccactgaagaaaagaagttggtaacca

SEQ ID NO: 154462 - DNA, 69 bp, Homo sapiens
gtctctcgggaaggccccagcctccctccccactgaagaaaagaagttggtaaccacagagcaaagtcc

SEQ ID NO: 154463 - DNA, 68 bp, Homo sapiens
cccagcctccctccccactgaagaaaagaagttggtaaccacagagcaaagtccctgggccctgggaa

SEQ ID NO: 154464 - DNA, 70 bp, Homo sapiens
ctccccactgaagaaaagaagttggtaaccacagagcaaagtccctgggccctgggaaaagcctcatcac

SEQ ID NO: 154465 - DNA, 69 bp, Homo sapiens
aagaaaagaagttggtaaccacagagcaaagtccctgggccctgggaaaagcctcatcacgggcagggc

SEQ ID NO: 154466 - DNA, 76 bp, Homo sapiens
taaccacagagcaaagtccctgggccctgggaaaagcctcatcacgggcagggctctggcccatagtggctggaca

SEQ ID NO: 154467 - DNA, 76 bp, Homo sapiens
aaagtccctgggccctgggaaaagcctcatcacgggcagggctctggcccatagtggctggacagacactggcaca

SEQ ID NO: 154468 - DNA, 81 bp, Homo sapiens
cctgggaaaagcctcatcacgggcagggctctggcccatagtggctggacagacactggcacagtcttgctggtctgctgg

SEQ ID NO: 154469 - DNA, 84 bp, Homo sapiens
aaaagcctcatcacgggcagggctctggcccatagtggctggacagacactggcacagtcttgctggtctgctgggagcacaca

SEQ ID NO: 154470 - DNA, 87 bp, Homo sapiens
atcacgggcagggctctggcccatagtggctggacagacactggcacagtcttgctggtctgctgggagcacacagacattggcaca

SEQ ID NO: 154471 - DNA, 87 bp, Homo sapiens
atagtggctggacagacactggcacagtcttgctggtctgctgggagcacacagacattggcacagacttgctggtctcttggaaga

SEQ ID NO: 154472 - DNA, 80 bp, Homo sapiens
acagtcttgctggtctgctgggagcacacagacattggcacagacttgctggtctcttggaagagggcaagaccccaaac

SEQ ID NO: 154473 - DNA, 80 bp, Homo sapiens
tggtctgctgggagcacacagacattggcacagacttgctggtctcttggaagagggcaagaccccaaaccagagcaaaa

SEQ ID NO: 154474 - DNA, 77 bp, Homo sapiens
gacattggcacagacttgctggtctcttggaagagggcaagaccccaaaccagagcaaaatacacttccagctctta

SEQ ID NO: 154475 - DNA, 73 bp, Homo sapiens
acagacttgctggtctcttggaagagggcaagaccccaaaccagagcaaaatacacttccagctcttaaccag

SEQ ID NO: 154476 - DNA, 73 bp, Homo sapiens
ttgctggtctcttggaagagggcaagaccccaaaccagagcaaaatacacttccagctcttaaccaggctcct

SEQ ID NO: 154477 - DNA, 73 bp, Homo sapiens
ttggaagagggcaagaccccaaaccagagcaaaatacacttccagctcttaaccaggctccttccagtcacaa

SEQ ID NO: 154478 - DNA, 76 bp, Homo sapiens
aagaccccaaaccagagcaaaatacacttccagctcttaaccaggctccttccagtcacaagtgtgcagaatcaga

SEQ ID NO: 154479 - DNA, 77 bp, Homo sapiens
aaaccagagcaaaatacacttccagctcttaaccaggctccttccagtcacaagtgtgcagaatcagaacagaagta

SEQ ID NO: 154480 - DNA, 77 bp, Homo sapiens
aaatacacttccagctcttaaccaggctccttccagtcacaagtgtgcagaatcagaacagaagtagtaccaatcaa

SEQ ID NO: 154481 - DNA, 80 bp, Homo sapiens
agctcttaaccaggctccttccagtcacaagtgtgcagaatcagaacagaagtagtaccaatcaatgtcacatgaacaaa

SEQ ID NO: 154482 - DNA, 82 bp, Homo sapiens
taaccaggctccttccagtcacaagtgtgcagaatcagaacagaagtagtaccaatcaatgtcacatgaacaaacaagctgc

SEQ ID NO: 154483 - DNA, 80 bp, Homo sapiens
ttccagtcacaagtgtgcagaatcagaacagaagtagtaccaatcaatgtcacatgaacaaacaagctgcccccagggta

SEQ ID NO: 154484 - DNA, 77 bp, Homo sapiens
aagtgtgcagaatcagaacagaagtagtaccaatcaatgtcacatgaacaaacaagctgcccccagggtaccatttg

SEQ ID NO: 154485 - DNA, 74 bp, Homo sapiens
agaatcagaacagaagtagtaccaatcaatgtcacatgaacaaacaagctgcccccagggtaccatttggggag

SEQ ID NO: 154486 - DNA, 70 bp, Homo sapiens
aagtagtaccaatcaatgtcacatgaacaaacaagctgcccccagggtaccatttggggaggggaaatct

SEQ ID NO: 154487 - DNA, 69 bp, Homo sapiens
accaatcaatgtcacatgaacaaacaagctgcccccagggtaccatttggggaggggaaatcttttctt

SEQ ID NO: 154488 - DNA, 63 bp, Homo sapiens
tttctttctttcccccttaaaaaaaaacacatctgccccgaacactttcccactgttattctt

SEQ ID NO: 154489 - DNA, 73 bp, Homo sapiens
aaaaacacatctgccccgaacactttcccactgttattctttcctcatatcccaacactcagaactcttgtga

SEQ ID NO: 154490 - DNA, 76 bp, Homo sapiens
acatctgccccgaacactttcccactgttattctttcctcatatcccaacactcagaactcttgtgacattagcca

SEQ ID NO: 154491 - DNA, 73 bp, Homo sapiens
ccgaacactttcccactgttattctttcctcatatcccaacactcagaactcttgtgacattagccagtgggg

SEQ ID NO: 154492 - DNA, 76 bp, Homo sapiens
actgttattctttcctcatatcccaacactcagaactcttgtgacattagccagtgggggcttatggttgtgtgaa

SEQ ID NO: 154493 - DNA, 78 bp, Homo sapiens
tttcctcatatcccaacactcagaactcttgtgacattagccagtgggggcttatggttgtgtgaaccatgtatgaaa

SEQ ID NO: 154494 - DNA, 77 bp, Homo sapiens
atatcccaacactcagaactcttgtgacattagccagtgggggcttatggttgtgtgaaccatgtatgaaaatccag

SEQ ID NO: 154495 - DNA, 74 bp, Homo sapiens
agaactcttgtgacattagccagtgggggcttatggttgtgtgaaccatgtatgaaaatccagtgggccccaac

SEQ ID NO: 154496 - DNA, 75 bp, Homo sapiens
tcttgtgacattagccagtgggggcttatggttgtgtgaaccatgtatgaaaatccagtgggccccaaccaagga

SEQ ID NO: 154497 - DNA, 75 bp, Homo sapiens
ttagccagtgggggcttatggttgtgtgaaccatgtatgaaaatccagtgggccccaaccaaggagacagacaga

SEQ ID NO: 154498 - DNA, 69 bp, Homo sapiens
atgtatgaaaatccagtgggccccaaccaaggagacagacagacttgggtctctttcccccaacttttc

SEQ ID NO: 154499 - DNA, 68 bp, Homo sapiens
aaatccagtgggccccaaccaaggagacagacagacttgggtctctttcccccaacttttccacatgg

SEQ ID NO: 154500 - DNA, 71 bp, Homo sapiens
agacagacagacttgggtctctttcccccaacttttccacatggtcatcgtgaaataaaaagtccactctg

SEQ ID NO: 154501 - DNA, 70 bp, Homo sapiens
cttgggtctctttcccccaacttttccacatggtcatcgtgaaataaaaagtccactctggagtcaagta

SEQ ID NO: 154502 - DNA, 71 bp, Homo sapiens
tttcccccaacttttccacatggtcatcgtgaaataaaaagtccactctggagtcaagtatggaattcaat

SEQ ID NO: 154503 - DNA, 74 bp, Homo sapiens
aacttttccacatggtcatcgtgaaataaaaagtccactctggagtcaagtatggaattcaattccgctggtca

SEQ ID NO: 154504 - DNA, 72 bp, Homo sapiens
atcgtgaaataaaaagtccactctggagtcaagtatggaattcaattccgctggtcaggttggaaggtatag

SEQ ID NO: 154505 - DNA, 72 bp, Homo sapiens
aaaagtccactctggagtcaagtatggaattcaattccgctggtcaggttggaaggtataggggctctcaaa

SEQ ID NO: 154506 - DNA, 73 bp, Homo sapiens
ctctggagtcaagtatggaattcaattccgctggtcaggttggaaggtataggggctctcaaagcgatttccc

SEQ ID NO: 154507 - DNA, 71 bp, Homo sapiens
aagtatggaattcaattccgctggtcaggttggaaggtataggggctctcaaagcgatttccccaaccaga

SEQ ID NO: 154508 - DNA, 73 bp, Homo sapiens
tcaggttggaaggtataggggctctcaaagcgatttccccaaccagacagagccccattgagggcacctagga

SEQ ID NO: 154509 - DNA, 69 bp, Homo sapiens
aaggtataggggctctcaaagcgatttccccaaccagacagagccccattgagggcacctaggaaccct

SEQ ID NO: 154510 - DNA, 68 bp, Homo sapiens
aaagcgatttccccaaccagacagagccccattgagggcacctaggaacccttgggaggaaatggtgt

SEQ ID NO: 154511 - DNA, 71 bp, Homo sapiens
ccaaccagacagagccccattgagggcacctaggaacccttgggaggaaatggtgttctttcaaatcagtg

SEQ ID NO: 154512 - DNA, 71 bp, Homo sapiens
agccccattgagggcacctaggaacccttgggaggaaatggtgttctttcaaatcagtggcgatttcctga

SEQ ID NO: 154513 - DNA, 73 bp, Homo sapiens
attgagggcacctaggaacccttgggaggaaatggtgttctttcaaatcagtggcgatttcctgagcattcac

SEQ ID NO: 154514 - DNA, 72 bp, Homo sapiens
cctaggaacccttgggaggaaatggtgttctttcaaatcagtggcgatttcctgagcattcacgtgttctag

SEQ ID NO: 154515 - DNA, 80 bp, Homo sapiens
aatggtgttctttcaaatcagtggcgatttcctgagcattcacgtgttctaggccgggtgctagtcactgatgagagata

SEQ ID NO: 154516 - DNA, 83 bp, Homo sapiens
gatttcctgagcattcacgtgttctaggccgggtgctagtcactgatgagagatacaggcctcatccctgtgagcctggattc

SEQ ID NO: 154517 - DNA, 81 bp, Homo sapiens
agcattcacgtgttctaggccgggtgctagtcactgatgagagatacaggcctcatccctgtgagcctggattccaaggct

SEQ ID NO: 154518 - DNA, 80 bp, Homo sapiens
gtgttctaggccgggtgctagtcactgatgagagatacaggcctcatccctgtgagcctggattccaaggctttcaggaa

SEQ ID NO: 154519 - DNA, 79 bp, Homo sapiens
tcactgatgagagatacaggcctcatccctgtgagcctggattccaaggctttcaggaacctttgaccaggaagtaaca

SEQ ID NO: 154520 - DNA, 74 bp, Homo sapiens
agagatacaggcctcatccctgtgagcctggattccaaggctttcaggaacctttgaccaggaagtaacaggaa

SEQ ID NO: 154521 - DNA, 73 bp, Homo sapiens
aggcctcatccctgtgagcctggattccaaggctttcaggaacctttgaccaggaagtaacaggaagttctga

SEQ ID NO: 154522 - DNA, 71 bp, Homo sapiens
tgtgagcctggattccaaggctttcaggaacctttgaccaggaagtaacaggaagttctgaggggccctgg

SEQ ID NO: 154523 - DNA, 67 bp, Homo sapiens
attccaaggctttcaggaacctttgaccaggaagtaacaggaagttctgaggggccctggggcttta

SEQ ID NO: 154524 - DNA, 69 bp, Homo sapiens
tttcaggaacctttgaccaggaagtaacaggaagttctgaggggccctggggctttagactcattttga

SEQ ID NO: 154525 - DNA, 68 bp, Homo sapiens
aacctttgaccaggaagtaacaggaagttctgaggggccctggggctttagactcattttgaaatgtc

SEQ ID NO: 154526 - DNA, 70 bp, Homo sapiens
aagtaacaggaagttctgaggggccctggggctttagactcattttgaaatgtcctttgtggcaccagaa

SEQ ID NO: 154527 - DNA, 70 bp, Homo sapiens
aagttctgaggggccctggggctttagactcattttgaaatgtcctttgtggcaccagaagtggttgtgt

SEQ ID NO: 154528 - DNA, 72 bp, Homo sapiens
gggccctggggctttagactcattttgaaatgtcctttgtggcaccagaagtggttgtgttgaggaagtgtc

SEQ ID NO: 154529 - DNA, 76 bp, Homo sapiens
gctttagactcattttgaaatgtcctttgtggcaccagaagtggttgtgttgaggaagtgtctcttggctgcggtg

SEQ ID NO: 154530 - DNA, 77 bp, Homo sapiens
actcattttgaaatgtcctttgtggcaccagaagtggttgtgttgaggaagtgtctcttggctgcggtgtgcatggg

SEQ ID NO: 154531 - DNA, 82 bp, Homo sapiens
aaatgtcctttgtggcaccagaagtggttgtgttgaggaagtgtctcttggctgcggtgtgcatgggtgcgtgtgcatgcgc

SEQ ID NO: 154532 - DNA, 87 bp, Homo sapiens
tttgtggcaccagaagtggttgtgttgaggaagtgtctcttggctgcggtgtgcatgggtgcgtgtgcatgcgcgcacactcacaga

SEQ ID NO: 154533 - DNA, 86 bp, Homo sapiens
agtggttgtgttgaggaagtgtctcttggctgcggtgtgcatgggtgcgtgtgcatgcgcgcacactcacagaggtctcctctata

SEQ ID NO: 154534 - DNA, 89 bp, Homo sapiens
tgtgttgaggaagtgtctcttggctgcggtgtgcatgggtgcgtgtgcatgcgcgcacactcacagaggtctcctctatagatgcaagg

SEQ ID NO: 154535 - DNA, 91 bp, Homo sapiens
aagtgtctcttggctgcggtgtgcatgggtgcgtgtgcatgcgcgcacactcacagaggtctcctctatagatgcaagggtgctgcattga

SEQ ID NO: 154536 - DNA, 92 bp, Homo sapiens
tgcggtgtgcatgggtgcgtgtgcatgcgcgcacactcacagaggtctcctctatagatgcaagggtgctgcattgaggccagcaaggctgt

SEQ ID NO: 154537 - DNA, 86 bp, Homo sapiens
cacactcacagaggtctcctctatagatgcaagggtgctgcattgaggccagcaaggctgttggctgtggggtcgccgctgctgct

SEQ ID NO: 154538 - DNA, 83 bp, Homo sapiens
agaggtctcctctatagatgcaagggtgctgcattgaggccagcaaggctgttggctgtggggtcgccgctgctgcttttgtc

SEQ ID NO: 154539 - DNA, 87 bp, Homo sapiens
tcctctatagatgcaagggtgctgcattgaggccagcaaggctgttggctgtggggtcgccgctgctgcttttgtctgggctgtgca

SEQ ID NO: 154540 - DNA, 86 bp, Homo sapiens
atgcaagggtgctgcattgaggccagcaaggctgttggctgtggggtcgccgctgctgcttttgtctgggctgtgcagagtctcaa

SEQ ID NO: 154541 - DNA, 84 bp, Homo sapiens
cattgaggccagcaaggctgttggctgtggggtcgccgctgctgcttttgtctgggctgtgcagagtctcaagatcagtccttg

SEQ ID NO: 154542 - DNA, 83 bp, Homo sapiens
agcaaggctgttggctgtggggtcgccgctgctgcttttgtctgggctgtgcagagtctcaagatcagtccttggaggagcag

SEQ ID NO: 154543 - DNA, 83 bp, Homo sapiens
ctgttggctgtggggtcgccgctgctgcttttgtctgggctgtgcagagtctcaagatcagtccttggaggagcaggtggtca

SEQ ID NO: 154544 - DNA, 81 bp, Homo sapiens
ggtcgccgctgctgcttttgtctgggctgtgcagagtctcaagatcagtccttggaggagcaggtggtcaggggcagtcgg

SEQ ID NO: 154545 - DNA, 84 bp, Homo sapiens
tgctgcttttgtctgggctgtgcagagtctcaagatcagtccttggaggagcaggtggtcaggggcagtcgggctctgtgcgaa

SEQ ID NO: 154546 - DNA, 82 bp, Homo sapiens
ttttgtctgggctgtgcagagtctcaagatcagtccttggaggagcaggtggtcaggggcagtcgggctctgtgcgaatgta

SEQ ID NO: 154547 - DNA, 84 bp, Homo sapiens
tgcagagtctcaagatcagtccttggaggagcaggtggtcaggggcagtcgggctctgtgcgaatgtagatttccagcagtgga

SEQ ID NO: 154548 - DNA, 78 bp, Homo sapiens
caggtggtcaggggcagtcgggctctgtgcgaatgtagatttccagcagtggaagaaggcatttggcaagcttctctt

SEQ ID NO: 154549 - DNA, 77 bp, Homo sapiens
ggtcaggggcagtcgggctctgtgcgaatgtagatttccagcagtggaagaaggcatttggcaagcttctctttctt

SEQ ID NO: 154550 - DNA, 73 bp, Homo sapiens
gaatgtagatttccagcagtggaagaaggcatttggcaagcttctctttctttgcttttgtttctacctattt

SEQ ID NO: 154551 - DNA, 71 bp, Homo sapiens
atttccagcagtggaagaaggcatttggcaagcttctctttctttgcttttgtttctacctatttttctct

SEQ ID NO: 154552 - DNA, 73 bp, Homo sapiens
tggaagaaggcatttggcaagcttctctttctttgcttttgtttctacctatttttctctttgtacatgaatc

SEQ ID NO: 154553 - DNA, 71 bp, Homo sapiens
aaggcatttggcaagcttctctttctttgcttttgtttctacctatttttctctttgtacatgaatccacc

SEQ ID NO: 154554 - DNA, 69 bp, Homo sapiens
cttctctttctttgcttttgtttctacctatttttctctttgtacatgaatccaccccatccctatttc

SEQ ID NO: 154555 - DNA, 72 bp, Homo sapiens
atttttctctttgtacatgaatccaccccatccctatttccctaaaacactcaggtgctttcagatttcaga

SEQ ID NO: 154556 - DNA, 73 bp, Homo sapiens
ctctttgtacatgaatccaccccatccctatttccctaaaacactcaggtgctttcagatttcagagcctcgg

SEQ ID NO: 154557 - DNA, 75 bp, Homo sapiens
atgaatccaccccatccctatttccctaaaacactcaggtgctttcagatttcagagcctcgggcagtggacata

SEQ ID NO: 154558 - DNA, 76 bp, Homo sapiens
tccctatttccctaaaacactcaggtgctttcagatttcagagcctcgggcagtggacatagggaatctctggcaa

SEQ ID NO: 154559 - DNA, 80 bp, Homo sapiens
ttccctaaaacactcaggtgctttcagatttcagagcctcgggcagtggacatagggaatctctggcaagctctgagcta

SEQ ID NO: 154560 - DNA, 84 bp, Homo sapiens
actcaggtgctttcagatttcagagcctcgggcagtggacatagggaatctctggcaagctctgagctagacacaccagcttca

SEQ ID NO: 154561 - DNA, 84 bp, Homo sapiens
tcagatttcagagcctcgggcagtggacatagggaatctctggcaagctctgagctagacacaccagcttcaggaagagtacca

SEQ ID NO: 154562 - DNA, 83 bp, Homo sapiens
agcctcgggcagtggacatagggaatctctggcaagctctgagctagacacaccagcttcaggaagagtaccagatcctgatg

SEQ ID NO: 154563 - DNA, 80 bp, Homo sapiens
agtggacatagggaatctctggcaagctctgagctagacacaccagcttcaggaagagtaccagatcctgatgggaaatt

SEQ ID NO: 154564 - DNA, 74 bp, Homo sapiens
tctgagctagacacaccagcttcaggaagagtaccagatcctgatgggaaatttcttttccccattccttttcc

SEQ ID NO: 154565 - DNA, 70 bp, Homo sapiens
agacacaccagcttcaggaagagtaccagatcctgatgggaaatttcttttccccattccttttccctcc

SEQ ID NO: 154566 - DNA, 70 bp, Homo sapiens
ttcaggaagagtaccagatcctgatgggaaatttcttttccccattccttttccctcctgagtggaggga

SEQ ID NO: 154567 - DNA, 69 bp, Homo sapiens
taccagatcctgatgggaaatttcttttccccattccttttccctcctgagtggagggagtcctcttct

SEQ ID NO: 154568 - DNA, 67 bp, Homo sapiens
aatttcttttccccattccttttccctcctgagtggagggagtcctcttcttcgcctccctgagaat

SEQ ID NO: 154569 - DNA, 77 bp, Homo sapiens
attccttttccctcctgagtggagggagtcctcttcttcgcctccctgagaattgctgtgctctgtattgagagcac

SEQ ID NO: 154570 - DNA, 80 bp, Homo sapiens
ttttccctcctgagtggagggagtcctcttcttcgcctccctgagaattgctgtgctctgtattgagagcacctgcctgc

SEQ ID NO: 154571 - DNA, 82 bp, Homo sapiens
agtggagggagtcctcttcttcgcctccctgagaattgctgtgctctgtattgagagcacctgcctgctgacttagctcaaa

SEQ ID NO: 154572 - DNA, 84 bp, Homo sapiens
agtcctcttcttcgcctccctgagaattgctgtgctctgtattgagagcacctgcctgctgacttagctcaaaggcaagccaga

SEQ ID NO: 154573 - DNA, 82 bp, Homo sapiens
aattgctgtgctctgtattgagagcacctgcctgctgacttagctcaaaggcaagccagaacccttccctgaagactggcaa

SEQ ID NO: 154574 - DNA, 82 bp, Homo sapiens
tgtgctctgtattgagagcacctgcctgctgacttagctcaaaggcaagccagaacccttccctgaagactggcaagaggtg

SEQ ID NO: 154575 - DNA, 75 bp, Homo sapiens
cctgctgacttagctcaaaggcaagccagaacccttccctgaagactggcaagaggtggtgtttagagcaacgtc

SEQ ID NO: 154576 - DNA, 74 bp, Homo sapiens
ttagctcaaaggcaagccagaacccttccctgaagactggcaagaggtggtgtttagagcaacgtccaggctaa

SEQ ID NO: 154577 - DNA, 74 bp, Homo sapiens
aaaggcaagccagaacccttccctgaagactggcaagaggtggtgtttagagcaacgtccaggctaagagatga

SEQ ID NO: 154578 - DNA, 73 bp, Homo sapiens
agaacccttccctgaagactggcaagaggtggtgtttagagcaacgtccaggctaagagatgactcctattaa

SEQ ID NO: 154579 - DNA, 79 bp, Homo sapiens
tgaagactggcaagaggtggtgtttagagcaacgtccaggctaagagatgactcctattaactgctgattatctgttac

SEQ ID NO: 154580 - DNA, 78 bp, Homo sapiens
aacgtccaggctaagagatgactcctattaactgctgattatctgttactgctgccctgagctggggcccaagggctg

SEQ ID NO: 154581 - DNA, 79 bp, Homo sapiens
taagagatgactcctattaactgctgattatctgttactgctgccctgagctggggcccaagggctgggaaatctgttg

SEQ ID NO: 154582 - DNA, 79 bp, Homo sapiens
atgactcctattaactgctgattatctgttactgctgccctgagctggggcccaagggctgggaaatctgttggtgcta

SEQ ID NO: 154583 - DNA, 77 bp, Homo sapiens
attaactgctgattatctgttactgctgccctgagctggggcccaagggctgggaaatctgttggtgctaccctgcc

SEQ ID NO: 154584 - DNA, 76 bp, Homo sapiens
attatctgttactgctgccctgagctggggcccaagggctgggaaatctgttggtgctaccctgccctaccattca

SEQ ID NO: 154585 - DNA, 76 bp, Homo sapiens
agctggggcccaagggctgggaaatctgttggtgctaccctgccctaccattcacccagctcacagactgccaaca

SEQ ID NO: 154586 - DNA, 76 bp, Homo sapiens
agggctgggaaatctgttggtgctaccctgccctaccattcacccagctcacagactgccaacaggaagtgctgtt

SEQ ID NO: 154587 - DNA, 76 bp, Homo sapiens
aaatctgttggtgctaccctgccctaccattcacccagctcacagactgccaacaggaagtgctgtttggctagtt

SEQ ID NO: 154588 - DNA, 74 bp, Homo sapiens
ccctaccattcacccagctcacagactgccaacaggaagtgctgtttggctagtttcctcccacttgtctaccc

SEQ ID NO: 154589 - DNA, 73 bp, Homo sapiens
attcacccagctcacagactgccaacaggaagtgctgtttggctagtttcctcccacttgtctacccctcctt

SEQ ID NO: 154590 - DNA, 71 bp, Homo sapiens
acagactgccaacaggaagtgctgtttggctagtttcctcccacttgtctacccctcctttgtccttagac

SEQ ID NO: 154591 - DNA, 69 bp, Homo sapiens
aacaggaagtgctgtttggctagtttcctcccacttgtctacccctcctttgtccttagaccaacatgt

SEQ ID NO: 154592 - DNA, 71 bp, Homo sapiens
ttggctagtttcctcccacttgtctacccctcctttgtccttagaccaacatgtttacctctctgctttgc

SEQ ID NO: 154593 - DNA, 72 bp, Homo sapiens
tcctcccacttgtctacccctcctttgtccttagaccaacatgtttacctctctgctttgccaacttagcca

SEQ ID NO: 154594 - DNA, 74 bp, Homo sapiens
tgtctacccctcctttgtccttagaccaacatgtttacctctctgctttgccaacttagccagcaggccatccc

SEQ ID NO: 154595 - DNA, 73 bp, Homo sapiens
tcctttgtccttagaccaacatgtttacctctctgctttgccaacttagccagcaggccatccccggccctaa

SEQ ID NO: 154596 - DNA, 74 bp, Homo sapiens
ccaacatgtttacctctctgctttgccaacttagccagcaggccatccccggccctaacgtctcctggccatta

SEQ ID NO: 154597 - DNA, 74 bp, Homo sapiens
ctttgccaacttagccagcaggccatccccggccctaacgtctcctggccattatctcttagttatggctttca

SEQ ID NO: 154598 - DNA, 76 bp, Homo sapiens
ttagccagcaggccatccccggccctaacgtctcctggccattatctcttagttatggctttcacgctctcaatag

SEQ ID NO: 154599 - DNA, 73 bp, Homo sapiens
cccggccctaacgtctcctggccattatctcttagttatggctttcacgctctcaataggattctgtatttgg

SEQ ID NO: 154600 - DNA, 75 bp, Homo sapiens
taacgtctcctggccattatctcttagttatggctttcacgctctcaataggattctgtatttggtcccaatttc

SEQ ID NO: 154601 - DNA, 73 bp, Homo sapiens
attatctcttagttatggctttcacgctctcaataggattctgtatttggtcccaatttcctcaagttcttat

SEQ ID NO: 154602 - DNA, 73 bp, Homo sapiens
ttagttatggctttcacgctctcaataggattctgtatttggtcccaatttcctcaagttcttattgaggtta

SEQ ID NO: 154603 - DNA, 73 bp, Homo sapiens
tttcacgctctcaataggattctgtatttggtcccaatttcctcaagttcttattgaggttactcccatcaat

SEQ ID NO: 154604 - DNA, 73 bp, Homo sapiens
tctcaataggattctgtatttggtcccaatttcctcaagttcttattgaggttactcccatcaattccacgga

SEQ ID NO: 154605 - DNA, 70 bp, Homo sapiens
attctgtatttggtcccaatttcctcaagttcttattgaggttactcccatcaattccacggagggaaca

SEQ ID NO: 154606 - DNA, 71 bp, Homo sapiens
tcccaatttcctcaagttcttattgaggttactcccatcaattccacggagggaacagtagttattataga

SEQ ID NO: 154607 - DNA, 71 bp, Homo sapiens
tttcctcaagttcttattgaggttactcccatcaattccacggagggaacagtagttattatagaagcatt

SEQ ID NO: 154608 - DNA, 73 bp, Homo sapiens
ttattgaggttactcccatcaattccacggagggaacagtagttattatagaagcatttgcgctttatctaaa

SEQ ID NO: 154609 - DNA, 72 bp, Homo sapiens
gttactcccatcaattccacggagggaacagtagttattatagaagcatttgcgctttatctaaagattaaa

SEQ ID NO: 154610 - DNA, 71 bp, Homo sapiens
acggagggaacagtagttattatagaagcatttgcgctttatctaaagattaaaaatagaatctgctttta

SEQ ID NO: 154611 - DNA, 72 bp, Homo sapiens
gttattatagaagcatttgcgctttatctaaagattaaaaatagaatctgcttttatttcccaaagtctgtc

SEQ ID NO: 154612 - DNA, 74 bp, Homo sapiens
gaagcatttgcgctttatctaaagattaaaaatagaatctgcttttatttcccaaagtctgtctctgaggttga

SEQ ID NO: 154613 - DNA, 73 bp, Homo sapiens
atctaaagattaaaaatagaatctgcttttatttcccaaagtctgtctctgaggttgagacacttgaactcag

SEQ ID NO: 154614 - DNA, 75 bp, Homo sapiens
taaaaatagaatctgcttttatttcccaaagtctgtctctgaggttgagacacttgaactcaggcagagggacga

SEQ ID NO: 154615 - DNA, 76 bp, Homo sapiens
atctgcttttatttcccaaagtctgtctctgaggttgagacacttgaactcaggcagagggacgaggctgggcagg

SEQ ID NO: 154616 - DNA, 78 bp, Homo sapiens
tcccaaagtctgtctctgaggttgagacacttgaactcaggcagagggacgaggctgggcagggctgtcctgagttta

SEQ ID NO: 154617 - DNA, 78 bp, Homo sapiens
ttgagacacttgaactcaggcagagggacgaggctgggcagggctgtcctgagtttaggggcctatccctgcatttca

SEQ ID NO: 154618 - DNA, 75 bp, Homo sapiens
agagggacgaggctgggcagggctgtcctgagtttaggggcctatccctgcatttcactgagacctcggaatctc

SEQ ID NO: 154619 - DNA, 76 bp, Homo sapiens
aggctgggcagggctgtcctgagtttaggggcctatccctgcatttcactgagacctcggaatctcctctgtgaat

SEQ ID NO: 154620 - DNA, 77 bp, Homo sapiens
ggctgtcctgagtttaggggcctatccctgcatttcactgagacctcggaatctcctctgtgaattccacctgccta

SEQ ID NO: 154621 - DNA, 74 bp, Homo sapiens
agtttaggggcctatccctgcatttcactgagacctcggaatctcctctgtgaattccacctgcctagttctcc

SEQ ID NO: 154622 - DNA, 76 bp, Homo sapiens
cctatccctgcatttcactgagacctcggaatctcctctgtgaattccacctgcctagttctcccctttcatcctc

SEQ ID NO: 154623 - DNA, 77 bp, Homo sapiens
cctgcatttcactgagacctcggaatctcctctgtgaattccacctgcctagttctcccctttcatcctctctctct

SEQ ID NO: 154624 - DNA, 77 bp, Homo sapiens
agacctcggaatctcctctgtgaattccacctgcctagttctcccctttcatcctctctctcttcccacatcatcaa

SEQ ID NO: 154625 - DNA, 76 bp, Homo sapiens
aatctcctctgtgaattccacctgcctagttctcccctttcatcctctctctcttcccacatcatcaaagaggaaa

SEQ ID NO: 154626 - DNA, 75 bp, Homo sapiens
tgaattccacctgcctagttctcccctttcatcctctctctcttcccacatcatcaaagaggaaaagctctttgt

SEQ ID NO: 154627 - DNA, 73 bp, Homo sapiens
acctgcctagttctcccctttcatcctctctctcttcccacatcatcaaagaggaaaagctctttgttcaaaa

SEQ ID NO: 154628 - DNA, 73 bp, Homo sapiens
ttctcccctttcatcctctctctcttcccacatcatcaaagaggaaaagctctttgttcaaaaggaagagaaa

SEQ ID NO: 154629 - DNA, 72 bp, Homo sapiens
tttcatcctctctctcttcccacatcatcaaagaggaaaagctctttgttcaaaaggaagagaaaacgtaaa

SEQ ID NO: 154630 - DNA, 70 bp, Homo sapiens
ctcttcccacatcatcaaagaggaaaagctctttgttcaaaaggaagagaaaacgtaaagcatcttattt

SEQ ID NO: 154631 - DNA, 69 bp, Homo sapiens
ccacatcatcaaagaggaaaagctctttgttcaaaaggaagagaaaacgtaaagcatcttattttcttt

SEQ ID NO: 154632 - DNA, 65 bp, Homo sapiens
aagaggaaaagctctttgttcaaaaggaagagaaaacgtaaagcatcttattttcttttaaaaga

SEQ ID NO: 154633 - DNA, 64 bp, Homo sapiens
aaaagaattttaaaccatgaaaaagatatttttaaagaaattcaccgagaacattaaagttcat

SEQ ID NO: 154634 - DNA, 67 bp, Homo sapiens
ttaaaccatgaaaaagatatttttaaagaaattcaccgagaacattaaagttcattatattaagtat

SEQ ID NO: 154635 - DNA, 71 bp, Homo sapiens
aaaagatatttttaaagaaattcaccgagaacattaaagttcattatattaagtatttatcatgtgtgaga

SEQ ID NO: 154636 - DNA, 72 bp, Homo sapiens
ttttaaagaaattcaccgagaacattaaagttcattatattaagtatttatcatgtgtgagaataataaata

SEQ ID NO: 154637 - DNA, 73 bp, Homo sapiens
tttaaagaaattcaccgagaacattaaagttcattatattaagtatttatcatgtgtgagaataataaatata

SEQ ID NO: 154638 - DNA, 77 bp, Homo sapiens
gaaattcaccgagaacattaaagttcattatattaagtatttatcatgtgtgagaataataaatatataactgcagc

SEQ ID NO: 154639 - DNA, 77 bp, Homo sapiens
caccgagaacattaaagttcattatattaagtatttatcatgtgtgagaataataaatatataactgcagctagtag

SEQ ID NO: 154640 - DNA, 75 bp, Homo sapiens
taaagttcattatattaagtatttatcatgtgtgagaataataaatatataactgcagctagtaggtccctttcc

SEQ ID NO: 154641 - DNA, 76 bp, Homo sapiens
tcattatattaagtatttatcatgtgtgagaataataaatatataactgcagctagtaggtccctttccctaatct

SEQ ID NO: 154642 - DNA, 72 bp, Homo sapiens
aagtatttatcatgtgtgagaataataaatatataactgcagctagtaggtccctttccctaatcttttagg

SEQ ID NO: 154643 - DNA, 71 bp, Homo sapiens
ataaatatataactgcagctagtaggtccctttccctaatcttttaggtcatatgagtagggtttgcttgg

SEQ ID NO: 154644 - DNA, 73 bp, Homo sapiens
atataactgcagctagtaggtccctttccctaatcttttaggtcatatgagtagggtttgcttggtgccagtc

SEQ ID NO: 154645 - DNA, 70 bp, Homo sapiens
tagtaggtccctttccctaatcttttaggtcatatgagtagggtttgcttggtgccagtcctgtgccctt

SEQ ID NO: 154646 - DNA, 76 bp, Homo sapiens
taatcttttaggtcatatgagtagggtttgcttggtgccagtcctgtgcccttttctctccagtcatctgtagttg

SEQ ID NO: 154647 - DNA, 77 bp, Homo sapiens
tatgagtagggtttgcttggtgccagtcctgtgcccttttctctccagtcatctgtagttgtgatcagaaaaaggta

SEQ ID NO: 154648 - DNA, 83 bp, Homo sapiens
tgccagtcctgtgcccttttctctccagtcatctgtagttgtgatcagaaaaaggtatctgcactgcactgtcagagtctcct

SEQ ID NO: 154649 - DNA, 83 bp, Homo sapiens
tgtgcccttttctctccagtcatctgtagttgtgatcagaaaaaggtatctgcactgcactgtcagagtctcctttcactatg

SEQ ID NO: 154650 - DNA, 84 bp, Homo sapiens
ttctctccagtcatctgtagttgtgatcagaaaaaggtatctgcactgcactgtcagagtctcctttcactatgttgtgtgtta

SEQ ID NO: 154651 - DNA, 81 bp, Homo sapiens
agtcatctgtagttgtgatcagaaaaaggtatctgcactgcactgtcagagtctcctttcactatgttgtgtgttaaatta

SEQ ID NO: 154652 - DNA, 79 bp, Homo sapiens
tgtgatcagaaaaaggtatctgcactgcactgtcagagtctcctttcactatgttgtgtgttaaattaccgtagctctt

SEQ ID NO: 154653 - DNA, 74 bp, Homo sapiens
aaaaaggtatctgcactgcactgtcagagtctcctttcactatgttgtgtgttaaattaccgtagctctttgtt

SEQ ID NO: 154654 - DNA, 79 bp, Homo sapiens
tatctgcactgcactgtcagagtctcctttcactatgttgtgtgttaaattaccgtagctctttgtttcatgaaataaa

SEQ ID NO: 154655 - DNA, 71 bp, Homo sapiens
gtctcctttcactatgttgtgtgttaaattaccgtagctctttgtttcatgaaataaactgtgaatttggg

SEQ ID NO: 154656 - DNA, 68 bp, Homo sapiens
actatgttgtgtgttaaattaccgtagctctttgtttcatgaaataaactgtgaatttggggggggcg

SEQ ID NO: 154657 - DNA, 70 bp, Homo sapiens
tagctctttgtttcatgaaataaactgtgaatttggggggggcggggggagggcgtgcaggccatgtaaa

SEQ ID NO: 154658 - DNA, 67 bp, Homo sapiens
tttcatgaaataaactgtgaatttggggggggcggggggagggcgtgcaggccatgtaaaaattttc

SEQ ID NO: 154659 - DNA, 69 bp, Homo sapiens
ggcggggggagggcgtgcaggccatgtaaaaattttccgtggagaagtttgattctaaagtagcttctc

SEQ ID NO: 154660 - DNA, 70 bp, Homo sapiens
gggagggcgtgcaggccatgtaaaaattttccgtggagaagtttgattctaaagtagcttctctaaagta

SEQ ID NO: 154661 - DNA, 67 bp, Homo sapiens
aaattttccgtggagaagtttgattctaaagtagcttctctaaagtaggctttggtaggtaatcaac

SEQ ID NO: 154662 - DNA, 74 bp, Homo sapiens
ggagaagtttgattctaaagtagcttctctaaagtaggctttggtaggtaatcaacttgacagcagtctagatg

SEQ ID NO: 154663 - DNA, 76 bp, Homo sapiens
agtttgattctaaagtagcttctctaaagtaggctttggtaggtaatcaacttgacagcagtctagatgtctcaca

SEQ ID NO: 154664 - DNA, 76 bp, Homo sapiens
tctaaagtaggctttggtaggtaatcaacttgacagcagtctagatgtctcacaggacaggagggagtgagggaaa

SEQ ID NO: 154665 - DNA, 77 bp, Homo sapiens
tttggtaggtaatcaacttgacagcagtctagatgtctcacaggacaggagggagtgagggaaaggggccatgattg

SEQ ID NO: 154666 - DNA, 78 bp, Homo sapiens
aggtaatcaacttgacagcagtctagatgtctcacaggacaggagggagtgagggaaaggggccatgattggctgctt

SEQ ID NO: 154667 - DNA, 78 bp, Homo sapiens
ttgacagcagtctagatgtctcacaggacaggagggagtgagggaaaggggccatgattggctgctttgtggttttat

SEQ ID NO: 154668 - DNA, 74 bp, Homo sapiens
tctagatgtctcacaggacaggagggagtgagggaaaggggccatgattggctgctttgtggttttattttggt

SEQ ID NO: 154669 - DNA, 69 bp, Homo sapiens
aggacaggagggagtgagggaaaggggccatgattggctgctttgtggttttattttggttctttccat

SEQ ID NO: 154670 - DNA, 72 bp, Homo sapiens
ggagtgagggaaaggggccatgattggctgctttgtggttttattttggttctttccattctccgccattca

SEQ ID NO: 154671 - DNA, 71 bp, Homo sapiens
aaaggggccatgattggctgctttgtggttttattttggttctttccattctccgccattcattggaggct

SEQ ID NO: 154672 - DNA, 73 bp, Homo sapiens
atgattggctgctttgtggttttattttggttctttccattctccgccattcattggaggcttcgttccagac

SEQ ID NO: 154673 - DNA, 70 bp, Homo sapiens
ctttgtggttttattttggttctttccattctccgccattcattggaggcttcgttccagacctgcctgg

SEQ ID NO: 154674 - DNA, 70 bp, Homo sapiens
gttttattttggttctttccattctccgccattcattggaggcttcgttccagacctgcctgggaaaaca

SEQ ID NO: 154675 - DNA, 75 bp, Homo sapiens
ttctttccattctccgccattcattggaggcttcgttccagacctgcctgggaaaacagcttctgagccattttg

SEQ ID NO: 154676 - DNA, 78 bp, Homo sapiens
gaaaacagcttctgagccattttggggagcagttcttcatctgaatggatggacatctgggcttccttcaagggccat

SEQ ID NO: 154677 - DNA, 79 bp, Homo sapiens
ttctgagccattttggggagcagttcttcatctgaatggatggacatctgggcttccttcaagggccattgaatgggaa

SEQ ID NO: 154678 - DNA, 76 bp, Homo sapiens
attttggggagcagttcttcatctgaatggatggacatctgggcttccttcaagggccattgaatgggaactagaa

SEQ ID NO: 154679 - DNA, 75 bp, Homo sapiens
agttcttcatctgaatggatggacatctgggcttccttcaagggccattgaatgggaactagaaaaccactggaa

SEQ ID NO: 154680 - DNA, 73 bp, Homo sapiens
tggacatctgggcttccttcaagggccattgaatgggaactagaaaaccactggaaactagaaatttgagcta

SEQ ID NO: 154681 - DNA, 71 bp, Homo sapiens
tctgggcttccttcaagggccattgaatgggaactagaaaaccactggaaactagaaatttgagctattgg

SEQ ID NO: 154682 - DNA, 71 bp, Homo sapiens
ttcaagggccattgaatgggaactagaaaaccactggaaactagaaatttgagctattgggcccaccagta

SEQ ID NO: 154683 - DNA, 76 bp, Homo sapiens
ttgaatgggaactagaaaaccactggaaactagaaatttgagctattgggcccaccagtagcagcatgtgatacta

SEQ ID NO: 154684 - DNA, 75 bp, Homo sapiens
tagaaaaccactggaaactagaaatttgagctattgggcccaccagtagcagcatgtgatactagatggttaaaa

SEQ ID NO: 154685 - DNA, 77 bp, Homo sapiens
accactggaaactagaaatttgagctattgggcccaccagtagcagcatgtgatactagatggttaaaatcatgaaa

SEQ ID NO: 154686 - DNA, 80 bp, Homo sapiens
aaatttgagctattgggcccaccagtagcagcatgtgatactagatggttaaaatcatgaaagcagtcactatccaatta

SEQ ID NO: 154687 - DNA, 82 bp, Homo sapiens
agctattgggcccaccagtagcagcatgtgatactagatggttaaaatcatgaaagcagtcactatccaattagaagcagag

SEQ ID NO: 154688 - DNA, 82 bp, Homo sapiens
accagtagcagcatgtgatactagatggttaaaatcatgaaagcagtcactatccaattagaagcagagtcacaacaactgt

SEQ ID NO: 154689 - DNA, 80 bp, Homo sapiens
agcatgtgatactagatggttaaaatcatgaaagcagtcactatccaattagaagcagagtcacaacaactgttgggaaa

SEQ ID NO: 154690 - DNA, 78 bp, Homo sapiens
ttaaaatcatgaaagcagtcactatccaattagaagcagagtcacaacaactgttgggaaatgtgactcttggaggaa

SEQ ID NO: 154691 - DNA, 73 bp, Homo sapiens
actatccaattagaagcagagtcacaacaactgttgggaaatgtgactcttggaggaaggtggggagggagtg

SEQ ID NO: 154692 - DNA, 73 bp, Homo sapiens
aattagaagcagagtcacaacaactgttgggaaatgtgactcttggaggaaggtggggagggagtggccttgc

SEQ ID NO: 154693 - DNA, 73 bp, Homo sapiens
agagtcacaacaactgttgggaaatgtgactcttggaggaaggtggggagggagtggccttgccagccctgtg

SEQ ID NO: 154694 - DNA, 71 bp, Homo sapiens
tgtgactcttggaggaaggtggggagggagtggccttgccagccctgtgggacgtcccctgaagtttgtaa

SEQ ID NO: 154695 - DNA, 67 bp, Homo sapiens
gggagggagtggccttgccagccctgtgggacgtcccctgaagtttgtaataagaccccttttccaa

SEQ ID NO: 154696 - DNA, 69 bp, Homo sapiens
tggccttgccagccctgtgggacgtcccctgaagtttgtaataagaccccttttccaaagggatgtgaa

SEQ ID NO: 154697 - DNA, 68 bp, Homo sapiens
agccctgtgggacgtcccctgaagtttgtaataagaccccttttccaaagggatgtgaattggagtga

SEQ ID NO: 154698 - DNA, 65 bp, Homo sapiens
acgtcccctgaagtttgtaataagaccccttttccaaagggatgtgaattggagtgaaaaggaaa

SEQ ID NO: 154699 - DNA, 68 bp, Homo sapiens
taagaccccttttccaaagggatgtgaattggagtgaaaaggaaatctttcatcttagaaaacttctg

SEQ ID NO: 154700 - DNA, 68 bp, Homo sapiens
ccttttccaaagggatgtgaattggagtgaaaaggaaatctttcatcttagaaaacttctggtcctta

SEQ ID NO: 154701 - DNA, 67 bp, Homo sapiens
aattggagtgaaaaggaaatctttcatcttagaaaacttctggtccttaacgcagggtggtatttgg

SEQ ID NO: 154702 - DNA, 69 bp, Homo sapiens
aggaaatctttcatcttagaaaacttctggtccttaacgcagggtggtatttgggtatgtgcttggaaa

SEQ ID NO: 154703 - DNA, 73 bp, Homo sapiens
tttcatcttagaaaacttctggtccttaacgcagggtggtatttgggtatgtgcttggaaattgagatctcaa

SEQ ID NO: 154704 - DNA, 72 bp, Homo sapiens
tagaaaacttctggtccttaacgcagggtggtatttgggtatgtgcttggaaattgagatctcaagagtgtt

SEQ ID NO: 154705 - DNA, 76 bp, Homo sapiens
acgcagggtggtatttgggtatgtgcttggaaattgagatctcaagagtgtttgccttggagccagctccccagga

SEQ ID NO: 154706 - DNA, 76 bp, Homo sapiens
tatttgggtatgtgcttggaaattgagatctcaagagtgtttgccttggagccagctccccaggaggccttttcca

SEQ ID NO: 154707 - DNA, 72 bp, Homo sapiens
aaattgagatctcaagagtgtttgccttggagccagctccccaggaggccttttccagggacaaggcaaaag

SEQ ID NO: 154708 - DNA, 71 bp, Homo sapiens
tttgccttggagccagctccccaggaggccttttccagggacaaggcaaaagttgaaattctccatgggta

SEQ ID NO: 154709 - DNA, 71 bp, Homo sapiens
gctccccaggaggccttttccagggacaaggcaaaagttgaaattctccatgggtagctagaaagccaata

SEQ ID NO: 154710 - DNA, 71 bp, Homo sapiens
aggccttttccagggacaaggcaaaagttgaaattctccatgggtagctagaaagccaatacatctagccc

SEQ ID NO: 154711 - DNA, 76 bp, Homo sapiens
gcaaaagttgaaattctccatgggtagctagaaagccaatacatctagccctgctaagtcagaaaaagattatgaa

SEQ ID NO: 154712 - DNA, 74 bp, Homo sapiens
agttgaaattctccatgggtagctagaaagccaatacatctagccctgctaagtcagaaaaagattatgaaaaa

SEQ ID NO: 154713 - DNA, 75 bp, Homo sapiens
gaaagccaatacatctagccctgctaagtcagaaaaagattatgaaaaatgttgaaatttacattcaaagcctca

SEQ ID NO: 154714 - DNA, 75 bp, Homo sapiens
ccaatacatctagccctgctaagtcagaaaaagattatgaaaaatgttgaaatttacattcaaagcctcatttgc

SEQ ID NO: 154715 - DNA, 76 bp, Homo sapiens
cctgctaagtcagaaaaagattatgaaaaatgttgaaatttacattcaaagcctcatttgcttatcttgctggagc

SEQ ID NO: 154716 - DNA, 75 bp, Homo sapiens
gtcagaaaaagattatgaaaaatgttgaaatttacattcaaagcctcatttgcttatcttgctggagccaaccca

SEQ ID NO: 154717 - DNA, 76 bp, Homo sapiens
tatgaaaaatgttgaaatttacattcaaagcctcatttgcttatcttgctggagccaacccagtctaatagcaaaa

SEQ ID NO: 154718 - DNA, 75 bp, Homo sapiens
aaaatgttgaaatttacattcaaagcctcatttgcttatcttgctggagccaacccagtctaatagcaaaatagc

SEQ ID NO: 154719 - DNA, 80 bp, Homo sapiens
atttacattcaaagcctcatttgcttatcttgctggagccaacccagtctaatagcaaaatagctgtcattgatacagaa

SEQ ID NO: 154720 - DNA, 78 bp, Homo sapiens
tttgcttatcttgctggagccaacccagtctaatagcaaaatagctgtcattgatacagaaacatcctcatttttaaa

SEQ ID NO: 154721 - DNA, 79 bp, Homo sapiens
ttgctggagccaacccagtctaatagcaaaatagctgtcattgatacagaaacatcctcatttttaaatgtctgcttta

SEQ ID NO: 154722 - DNA, 75 bp, Homo sapiens
acccagtctaatagcaaaatagctgtcattgatacagaaacatcctcatttttaaatgtctgctttaccctgtta

SEQ ID NO: 154723 - DNA, 76 bp, Homo sapiens
agctgtcattgatacagaaacatcctcatttttaaatgtctgctttaccctgttactgagtttgagatgacttaaa

SEQ ID NO: 154724 - DNA, 76 bp, Homo sapiens
tgatacagaaacatcctcatttttaaatgtctgctttaccctgttactgagtttgagatgacttaaatcactgtgt

SEQ ID NO: 154725 - DNA, 73 bp, Homo sapiens
atcctcatttttaaatgtctgctttaccctgttactgagtttgagatgacttaaatcactgtgttgaccctct

SEQ ID NO: 154726 - DNA, 75 bp, Homo sapiens
tttaccctgttactgagtttgagatgacttaaatcactgtgttgaccctcttctgaaccaaatctttagcattga

SEQ ID NO: 154727 - DNA, 76 bp, Homo sapiens
ttactgagtttgagatgacttaaatcactgtgttgaccctcttctgaaccaaatctttagcattgatgaaaatagt

SEQ ID NO: 154728 - DNA, 74 bp, Homo sapiens
agtttgagatgacttaaatcactgtgttgaccctcttctgaaccaaatctttagcattgatgaaaatagttatt

SEQ ID NO: 154729 - DNA, 72 bp, Homo sapiens
gacttaaatcactgtgttgaccctcttctgaaccaaatctttagcattgatgaaaatagttattttattctt

SEQ ID NO: 154730 - DNA, 73 bp, Homo sapiens
ctgtgttgaccctcttctgaaccaaatctttagcattgatgaaaatagttattttattctttacatccttcac

SEQ ID NO: 154731 - DNA, 71 bp, Homo sapiens
ccctcttctgaaccaaatctttagcattgatgaaaatagttattttattctttacatccttcaccccacac

SEQ ID NO: 154732 - DNA, 75 bp, Homo sapiens
caaatctttagcattgatgaaaatagttattttattctttacatccttcaccccacactatggtcagggcatgaa

SEQ ID NO: 154733 - DNA, 72 bp, Homo sapiens
attgatgaaaatagttattttattctttacatccttcaccccacactatggtcagggcatgaaacaccctgt

SEQ ID NO: 154734 - DNA, 72 bp, Homo sapiens
attttattctttacatccttcaccccacactatggtcagggcatgaaacaccctgttgatcccttcccaggc

SEQ ID NO: 154735 - DNA, 74 bp, Homo sapiens
accctgttgatcccttcccaggctcggcactgtctgctcactggagccggactcccaggttgtaattctaatgt

SEQ ID NO: 154736 - DNA, 79 bp, Homo sapiens
tgctcactggagccggactcccaggttgtaattctaatgttgcctcatgagaacagaatggcagaaagtttagtcctga

SEQ ID NO: 154737 - DNA, 76 bp, Homo sapiens
agccggactcccaggttgtaattctaatgttgcctcatgagaacagaatggcagaaagtttagtcctgacagattc

SEQ ID NO: 154738 - DNA, 76 bp, Homo sapiens
caggttgtaattctaatgttgcctcatgagaacagaatggcagaaagtttagtcctgacagattcccccataggga

SEQ ID NO: 154739 - DNA, 78 bp, Homo sapiens
tgtaattctaatgttgcctcatgagaacagaatggcagaaagtttagtcctgacagattcccccatagggagtaatga

SEQ ID NO: 154740 - DNA, 76 bp, Homo sapiens
agaacagaatggcagaaagtttagtcctgacagattcccccatagggagtaatgaggacagcatgaaacttggata

SEQ ID NO: 154741 - DNA, 72 bp, Homo sapiens
cagaaagtttagtcctgacagattcccccatagggagtaatgaggacagcatgaaacttggataggttttac

SEQ ID NO: 154742 - DNA, 71 bp, Homo sapiens
gtttagtcctgacagattcccccatagggagtaatgaggacagcatgaaacttggataggttttaccctta

SEQ ID NO: 154743 - DNA, 70 bp, Homo sapiens
acagattcccccatagggagtaatgaggacagcatgaaacttggataggttttacccttagtccctataa

SEQ ID NO: 154744 - DNA, 69 bp, Homo sapiens
atagggagtaatgaggacagcatgaaacttggataggttttacccttagtccctataaggtggatttta

SEQ ID NO: 154745 - DNA, 67 bp, Homo sapiens
tgaggacagcatgaaacttggataggttttacccttagtccctataaggtggattttactaaggttt

SEQ ID NO: 154746 - DNA, 64 bp, Homo sapiens
acagcatgaaacttggataggttttacccttagtccctataaggtggattttactaaggttttt

SEQ ID NO: 154747 - DNA, 63 bp, Homo sapiens
cttggataggttttacccttagtccctataaggtggattttactaaggttttttaaatgatac

SEQ ID NO: 154748 - DNA, 66 bp, Homo sapiens
ttacccttagtccctataaggtggattttactaaggttttttaaatgatactgtcatcctcttggg

SEQ ID NO: 154749 - DNA, 68 bp, Homo sapiens
aaggtggattttactaaggttttttaaatgatactgtcatcctcttggggtttatcagccaggttaga

SEQ ID NO: 154750 - DNA, 70 bp, Homo sapiens
aaggttttttaaatgatactgtcatcctcttggggtttatcagccaggttagaggagcccagtgtcctaa

SEQ ID NO: 154751 - DNA, 80 bp, Homo sapiens
tcttggggtttatcagccaggttagaggagcccagtgtcctaacctctctcagatcatggcagagaaggagctgcctcca

SEQ ID NO: 154752 - DNA, 79 bp, Homo sapiens
tttatcagccaggttagaggagcccagtgtcctaacctctctcagatcatggcagagaaggagctgcctccagcccctt

SEQ ID NO: 154753 - DNA, 81 bp, Homo sapiens
agtgtcctaacctctctcagatcatggcagagaaggagctgcctccagcccctttcttgctgagtttcatttgagcagttc

SEQ ID NO: 154754 - DNA, 84 bp, Homo sapiens
taacctctctcagatcatggcagagaaggagctgcctccagcccctttcttgctgagtttcatttgagcagttccatgtgtaga

SEQ ID NO: 154755 - DNA, 83 bp, Homo sapiens
atcatggcagagaaggagctgcctccagcccctttcttgctgagtttcatttgagcagttccatgtgtagacattccaagtca

SEQ ID NO: 154756 - DNA, 80 bp, Homo sapiens
agaaggagctgcctccagcccctttcttgctgagtttcatttgagcagttccatgtgtagacattccaagtcactgcttg

SEQ ID NO: 154757 - DNA, 81 bp, Homo sapiens
tgcctccagcccctttcttgctgagtttcatttgagcagttccatgtgtagacattccaagtcactgcttggtagttgctg

SEQ ID NO: 154758 - DNA, 80 bp, Homo sapiens
cctttcttgctgagtttcatttgagcagttccatgtgtagacattccaagtcactgcttggtagttgctgtgggagcctg

SEQ ID NO: 154759 - DNA, 81 bp, Homo sapiens
agttccatgtgtagacattccaagtcactgcttggtagttgctgtgggagcctgtcattggctatggccagttagttctca

SEQ ID NO: 154760 - DNA, 83 bp, Homo sapiens
tagacattccaagtcactgcttggtagttgctgtgggagcctgtcattggctatggccagttagttctcagctgagcttccta

SEQ ID NO: 154761 - DNA, 80 bp, Homo sapiens
cttggtagttgctgtgggagcctgtcattggctatggccagttagttctcagctgagcttcctagggccagtgcaacagg

SEQ ID NO: 154762 - DNA, 84 bp, Homo sapiens
tgtgggagcctgtcattggctatggccagttagttctcagctgagcttcctagggccagtgcaacagggccagaggctgctata

SEQ ID NO: 154763 - DNA, 83 bp, Homo sapiens
tcattggctatggccagttagttctcagctgagcttcctagggccagtgcaacagggccagaggctgctatagtgtaaattga

SEQ ID NO: 154764 - DNA, 78 bp, Homo sapiens
agttagttctcagctgagcttcctagggccagtgcaacagggccagaggctgctatagtgtaaattgaaataagaata

SEQ ID NO: 154765 - DNA, 79 bp, Homo sapiens
tgagcttcctagggccagtgcaacagggccagaggctgctatagtgtaaattgaaataagaatagatcattgttttgta

SEQ ID NO: 154766 - DNA, 79 bp, Homo sapiens
tcctagggccagtgcaacagggccagaggctgctatagtgtaaattgaaataagaatagatcattgttttgtacacaca

SEQ ID NO: 154767 - DNA, 79 bp, Homo sapiens
ggccagaggctgctatagtgtaaattgaaataagaatagatcattgttttgtacacacacacaataaaatgtaatgatg

SEQ ID NO: 154768 - DNA, 77 bp, Homo sapiens
gctatagtgtaaattgaaataagaatagatcattgttttgtacacacacacaataaaatgtaatgatggtgctaatt

SEQ ID NO: 154769 - DNA, 77 bp, Homo sapiens
tgaaataagaatagatcattgttttgtacacacacacaataaaatgtaatgatggtgctaatttcacggtataaata

SEQ ID NO: 154770 - DNA, 79 bp, Homo sapiens
gaatagatcattgttttgtacacacacacaataaaatgtaatgatggtgctaatttcacggtataaataagcactgcca

SEQ ID NO: 154771 - DNA, 74 bp, Homo sapiens
attgttttgtacacacacacaataaaatgtaatgatggtgctaatttcacggtataaataagcactgccaaggg

SEQ ID NO: 154772 - DNA, 76 bp, Homo sapiens
acacacacaataaaatgtaatgatggtgctaatttcacggtataaataagcactgccaagggttgagggactggca

SEQ ID NO: 154773 - DNA, 75 bp, Homo sapiens
aaaatgtaatgatggtgctaatttcacggtataaataagcactgccaagggttgagggactggcagctcaagaaa

SEQ ID NO: 154774 - DNA, 74 bp, Homo sapiens
taatgatggtgctaatttcacggtataaataagcactgccaagggttgagggactggcagctcaagaaacccgg

SEQ ID NO: 154775 - DNA, 70 bp, Homo sapiens
taatttcacggtataaataagcactgccaagggttgagggactggcagctcaagaaacccgggttcctgt

SEQ ID NO: 154776 - DNA, 71 bp, Homo sapiens
tataaataagcactgccaagggttgagggactggcagctcaagaaacccgggttcctgtttgggaggagat

SEQ ID NO: 154777 - DNA, 70 bp, Homo sapiens
actgccaagggttgagggactggcagctcaagaaacccgggttcctgtttgggaggagattttatgtaga

SEQ ID NO: 154778 - DNA, 63 bp, Homo sapiens
aagaaacccgggttcctgtttgggaggagattttatgtagaaaagtttgaggctttgttaaaa

SEQ ID NO: 154779 - DNA, 66 bp, Homo sapiens
gttcctgtttgggaggagattttatgtagaaaagtttgaggctttgttaaaagtggggagaaggaa

SEQ ID NO: 154780 - DNA, 69 bp, Homo sapiens
tgtttgggaggagattttatgtagaaaagtttgaggctttgttaaaagtggggagaaggaagatcctca

SEQ ID NO: 154781 - DNA, 70 bp, Homo sapiens
attttatgtagaaaagtttgaggctttgttaaaagtggggagaaggaagatcctcagtgaagcctgcacc

SEQ ID NO: 154782 - DNA, 69 bp, Homo sapiens
aaaagtttgaggctttgttaaaagtggggagaaggaagatcctcagtgaagcctgcacccaaccctgga

SEQ ID NO: 154783 - DNA, 72 bp, Homo sapiens
ttgaggctttgttaaaagtggggagaaggaagatcctcagtgaagcctgcacccaaccctggagtggcccag

SEQ ID NO: 154784 - DNA, 74 bp, Homo sapiens
ttaaaagtggggagaaggaagatcctcagtgaagcctgcacccaaccctggagtggcccagtgcaatccagagg

SEQ ID NO: 154785 - DNA, 78 bp, Homo sapiens
aaggaagatcctcagtgaagcctgcacccaaccctggagtggcccagtgcaatccagaggtggaagagatcctatatc

SEQ ID NO: 154786 - DNA, 79 bp, Homo sapiens
atcctcagtgaagcctgcacccaaccctggagtggcccagtgcaatccagaggtggaagagatcctatatccaggtgaa

SEQ ID NO: 154787 - DNA, 78 bp, Homo sapiens
cctgcacccaaccctggagtggcccagtgcaatccagaggtggaagagatcctatatccaggtgaaggtggccattga

SEQ ID NO: 154788 - DNA, 77 bp, Homo sapiens
aaccctggagtggcccagtgcaatccagaggtggaagagatcctatatccaggtgaaggtggccattgagtttctca

SEQ ID NO: 154789 - DNA, 77 bp, Homo sapiens
agtggcccagtgcaatccagaggtggaagagatcctatatccaggtgaaggtggccattgagtttctcagggctggg

SEQ ID NO: 154790 - DNA, 75 bp, Homo sapiens
aatccagaggtggaagagatcctatatccaggtgaaggtggccattgagtttctcagggctggggccaccttgtc

SEQ ID NO: 154791 - DNA, 76 bp, Homo sapiens
agaggtggaagagatcctatatccaggtgaaggtggccattgagtttctcagggctggggccaccttgtccatagc

SEQ ID NO: 154792 - DNA, 75 bp, Homo sapiens
agatcctatatccaggtgaaggtggccattgagtttctcagggctggggccaccttgtccatagcctccgtccac

SEQ ID NO: 154793 - DNA, 76 bp, Homo sapiens
atccaggtgaaggtggccattgagtttctcagggctggggccaccttgtccatagcctccgtccacgctgcctgga

SEQ ID NO: 154794 - DNA, 78 bp, Homo sapiens
tggccattgagtttctcagggctggggccaccttgtccatagcctccgtccacgctgcctggagcaggttgttagaga

SEQ ID NO: 154795 - DNA, 77 bp, Homo sapiens
ttctcagggctggggccaccttgtccatagcctccgtccacgctgcctggagcaggttgttagagagctctggttgt

SEQ ID NO: 154796 - DNA, 76 bp, Homo sapiens
tggggccaccttgtccatagcctccgtccacgctgcctggagcaggttgttagagagctctggttgttgggtcttc

SEQ ID NO: 154797 - DNA, 77 bp, Homo sapiens
accttgtccatagcctccgtccacgctgcctggagcaggttgttagagagctctggttgttgggtcttcctcagctc

SEQ ID NO: 154798 - DNA, 76 bp, Homo sapiens
ttgttagagagctctggttgttgggtcttcctcagctcccttctgcccctctctacctcttccactcatggaagcc

SEQ ID NO: 154799 - DNA, 75 bp, Homo sapiens
tggttgttgggtcttcctcagctcccttctgcccctctctacctcttccactcatggaagcccctctactgctta

SEQ ID NO: 154800 - DNA, 76 bp, Homo sapiens
ggtcttcctcagctcccttctgcccctctctacctcttccactcatggaagcccctctactgcttatgaagattaa

SEQ ID NO: 154801 - DNA, 74 bp, Homo sapiens
gctcccttctgcccctctctacctcttccactcatggaagcccctctactgcttatgaagattaagggtagtat

SEQ ID NO: 154802 - DNA, 74 bp, Homo sapiens
ttctgcccctctctacctcttccactcatggaagcccctctactgcttatgaagattaagggtagtattttcta

SEQ ID NO: 154803 - DNA, 72 bp, Homo sapiens
tacctcttccactcatggaagcccctctactgcttatgaagattaagggtagtattttctaaggaagtggaa

SEQ ID NO: 154804 - DNA, 70 bp, Homo sapiens
actcatggaagcccctctactgcttatgaagattaagggtagtattttctaaggaagtggaaagaattaa

SEQ ID NO: 154805 - DNA, 69 bp, Homo sapiens
tgcttatgaagattaagggtagtattttctaaggaagtggaaagaattaaactagaaatccacaacctc

SEQ ID NO: 154806 - DNA, 66 bp, Homo sapiens
agattaagggtagtattttctaaggaagtggaaagaattaaactagaaatccacaacctcggaaga

SEQ ID NO: 154807 - DNA, 66 bp, Homo sapiens
gtattttctaaggaagtggaaagaattaaactagaaatccacaacctcggaagaagtgtttcgagt

SEQ ID NO: 154808 - DNA, 67 bp, Homo sapiens
ttctaaggaagtggaaagaattaaactagaaatccacaacctcggaagaagtgtttcgagtttaaca

SEQ ID NO: 154809 - DNA, 70 bp, Homo sapiens
aaagaattaaactagaaatccacaacctcggaagaagtgtttcgagtttaacatgcgctgtttctgctta

SEQ ID NO: 154810 - DNA, 72 bp, Homo sapiens
ttaaactagaaatccacaacctcggaagaagtgtttcgagtttaacatgcgctgtttctgcttatgtggttc

SEQ ID NO: 154811 - DNA, 74 bp, Homo sapiens
aatccacaacctcggaagaagtgtttcgagtttaacatgcgctgtttctgcttatgtggttccttctctagagc

SEQ ID NO: 154812 - DNA, 75 bp, Homo sapiens
aagaagtgtttcgagtttaacatgcgctgtttctgcttatgtggttccttctctagagctgctttcccatggctt

SEQ ID NO: 154813 - DNA, 77 bp, Homo sapiens
tttaacatgcgctgtttctgcttatgtggttccttctctagagctgctttcccatggctttcaaaacatcaggttat

SEQ ID NO: 154814 - DNA, 77 bp, Homo sapiens
tgtttctgcttatgtggttccttctctagagctgctttcccatggctttcaaaacatcaggttattgtggggcttca

SEQ ID NO: 154815 - DNA, 75 bp, Homo sapiens
ttatgtggttccttctctagagctgctttcccatggctttcaaaacatcaggttattgtggggcttcaggtgtaa

SEQ ID NO: 154816 - DNA, 74 bp, Homo sapiens
tctctagagctgctttcccatggctttcaaaacatcaggttattgtggggcttcaggtgtaaggtcctggaagt

SEQ ID NO: 154817 - DNA, 73 bp, Homo sapiens
tgctttcccatggctttcaaaacatcaggttattgtggggcttcaggtgtaaggtcctggaagttcagcaaag

SEQ ID NO: 154818 - DNA, 71 bp, Homo sapiens
atggctttcaaaacatcaggttattgtggggcttcaggtgtaaggtcctggaagttcagcaaagtttcgtg

SEQ ID NO: 154819 - DNA, 71 bp, Homo sapiens
aaaacatcaggttattgtggggcttcaggtgtaaggtcctggaagttcagcaaagtttcgtggacaagaca

SEQ ID NO: 154820 - DNA, 73 bp, Homo sapiens
aggttattgtggggcttcaggtgtaaggtcctggaagttcagcaaagtttcgtggacaagacatgggcacaga

SEQ ID NO: 154821 - DNA, 76 bp, Homo sapiens
ttcaggtgtaaggtcctggaagttcagcaaagtttcgtggacaagacatgggcacagagagtagaagcagaaataa

SEQ ID NO: 154822 - DNA, 75 bp, Homo sapiens
tgtaaggtcctggaagttcagcaaagtttcgtggacaagacatgggcacagagagtagaagcagaaataaatggt

SEQ ID NO: 154823 - DNA, 75 bp, Homo sapiens
aagttcagcaaagtttcgtggacaagacatgggcacagagagtagaagcagaaataaatggttctatgttttcaa

SEQ ID NO: 154824 - DNA, 73 bp, Homo sapiens
aaagtttcgtggacaagacatgggcacagagagtagaagcagaaataaatggttctatgttttcaacttccag

SEQ ID NO: 154825 - DNA, 73 bp, Homo sapiens
cgtggacaagacatgggcacagagagtagaagcagaaataaatggttctatgttttcaacttccagggttggg

SEQ ID NO: 154826 - DNA, 75 bp, Homo sapiens
atgggcacagagagtagaagcagaaataaatggttctatgttttcaacttccagggttggggcaggccagagcaa

SEQ ID NO: 154827 - DNA, 73 bp, Homo sapiens
agtagaagcagaaataaatggttctatgttttcaacttccagggttggggcaggccagagcaaggcggtctca

SEQ ID NO: 154828 - DNA, 71 bp, Homo sapiens
aaataaatggttctatgttttcaacttccagggttggggcaggccagagcaaggcggtctcatcgaggtgg

SEQ ID NO: 154829 - DNA, 76 bp, Homo sapiens
tgttttcaacttccagggttggggcaggccagagcaaggcggtctcatcgaggtgggtgctacctgtgtgtgtgta

SEQ ID NO: 154830 - DNA, 81 bp, Homo sapiens
ttccagggttggggcaggccagagcaaggcggtctcatcgaggtgggtgctacctgtgtgtgtgtagatgagtgtgctgaa

SEQ ID NO: 154831 - DNA, 80 bp, Homo sapiens
gggcaggccagagcaaggcggtctcatcgaggtgggtgctacctgtgtgtgtgtagatgagtgtgctgaaggtggggagg

SEQ ID NO: 154832 - DNA, 84 bp, Homo sapiens
agagcaaggcggtctcatcgaggtgggtgctacctgtgtgtgtgtagatgagtgtgctgaaggtggggagggcagcacacagca

SEQ ID NO: 154833 - DNA, 88 bp, Homo sapiens
ggtctcatcgaggtgggtgctacctgtgtgtgtgtagatgagtgtgctgaaggtggggagggcagcacacagcagctcatggcagagc

SEQ ID NO: 154834 - DNA, 86 bp, Homo sapiens
ggtgctacctgtgtgtgtgtagatgagtgtgctgaaggtggggagggcagcacacagcagctcatggcagagccgcctcctaggtc

SEQ ID NO: 154835 - DNA, 86 bp, Homo sapiens
gtgtgtgtgtagatgagtgtgctgaaggtggggagggcagcacacagcagctcatggcagagccgcctcctaggtcttggcaaaga

SEQ ID NO: 154836 - DNA, 86 bp, Homo sapiens
tgctgaaggtggggagggcagcacacagcagctcatggcagagccgcctcctaggtcttggcaaagaggcaagctgacgatagaca

SEQ ID NO: 154837 - DNA, 85 bp, Homo sapiens
gggagggcagcacacagcagctcatggcagagccgcctcctaggtcttggcaaagaggcaagctgacgatagacatctacctata

SEQ ID NO: 154838 - DNA, 84 bp, Homo sapiens
cacacagcagctcatggcagagccgcctcctaggtcttggcaaagaggcaagctgacgatagacatctacctatattgttaaga

SEQ ID NO: 154839 - DNA, 79 bp, Homo sapiens
agctcatggcagagccgcctcctaggtcttggcaaagaggcaagctgacgatagacatctacctatattgttaagaaag

SEQ ID NO: 154840 - DNA, 74 bp, Homo sapiens
agagccgcctcctaggtcttggcaaagaggcaagctgacgatagacatctacctatattgttaagaaaggggtc

SEQ ID NO: 154841 - DNA, 71 bp, Homo sapiens
cctcctaggtcttggcaaagaggcaagctgacgatagacatctacctatattgttaagaaaggggtcgggg

SEQ ID NO: 154842 - DNA, 73 bp, Homo sapiens
aagctgacgatagacatctacctatattgttaagaaaggggtcggggggatcagccaaggtccatcattgctt

SEQ ID NO: 154843 - DNA, 70 bp, Homo sapiens
tctacctatattgttaagaaaggggtcggggggatcagccaaggtccatcattgcttttttgccgcgccc

SEQ ID NO: 154844 - DNA, 66 bp, Homo sapiens
ttgttaagaaaggggtcggggggatcagccaaggtccatcattgcttttttgccgcgccccccccc

SEQ ID NO: 154845 - DNA, 64 bp, Homo sapiens
aggggtcggggggatcagccaaggtccatcattgcttttttgccgcgcccccccccccccgccc

SEQ ID NO: 154846 - DNA, 71 bp, Homo sapiens
atcagccaaggtccatcattgcttttttgccgcgcccccccccccccgcccccatagattgtcagctgtaa

SEQ ID NO: 154847 - DNA, 66 bp, Homo sapiens
cgcgcccccccccccccgcccccatagattgtcagctgtaagtgaaactcctagtgaaaaagaggg

SEQ ID NO: 154848 - DNA, 70 bp, Homo sapiens
cccccgcccccatagattgtcagctgtaagtgaaactcctagtgaaaaagaggggagccctgtgttagga

SEQ ID NO: 154849 - DNA, 70 bp, Homo sapiens
taagtgaaactcctagtgaaaaagaggggagccctgtgttaggagtccccataaacatgtactgtaattc

SEQ ID NO: 154850 - DNA, 71 bp, Homo sapiens
tagtgaaaaagaggggagccctgtgttaggagtccccataaacatgtactgtaattctttgtatatagaaa

SEQ ID NO: 154851 - DNA, 68 bp, Homo sapiens
aaaagaggggagccctgtgttaggagtccccataaacatgtactgtaattctttgtatatagaaaaaa

SEQ ID NO: 154852 - DNA, 67 bp, Homo sapiens
taggagtccccataaacatgtactgtaattctttgtatatagaaaaaaaatttactgtaaagtaaag

SEQ ID NO: 154853 - DNA, 66 bp, Homo sapiens
acatgtactgtaattctttgtatatagaaaaaaaatttactgtaaagtaaagtttaactttactca

SEQ ID NO: 154854 - DNA, 67 bp, Homo sapiens
gtatatagaaaaaaaatttactgtaaagtaaagtttaactttactcatatatggcccttgccctgtg

SEQ ID NO: 154855 - DNA, 77 bp, Homo sapiens
tgtacagcctggcacttcgccctccaccacatctcacctcctgagggactctgagagaacgcccggccagggtgaac

SEQ ID NO: 154856 - DNA, 77 bp, Homo sapiens
tggcacttcgccctccaccacatctcacctcctgagggactctgagagaacgcccggccagggtgaacgccgcggca

SEQ ID NO: 154857 - DNA, 76 bp, Homo sapiens
ctccaccacatctcacctcctgagggactctgagagaacgcccggccagggtgaacgccgcggcaggagagcacgg

SEQ ID NO: 154858 - DNA, 77 bp, Homo sapiens
tctcacctcctgagggactctgagagaacgcccggccagggtgaacgccgcggcaggagagcacgggagattgtgaa

SEQ ID NO: 154859 - DNA, 78 bp, Homo sapiens
ctcctgagggactctgagagaacgcccggccagggtgaacgccgcggcaggagagcacgggagattgtgaagagcatg

SEQ ID NO: 154860 - DNA, 76 bp, Homo sapiens
actctgagagaacgcccggccagggtgaacgccgcggcaggagagcacgggagattgtgaagagcatggggagcct

SEQ ID NO: 154861 - DNA, 78 bp, Homo sapiens
cccggccagggtgaacgccgcggcaggagagcacgggagattgtgaagagcatggggagcctttgtcgtgcagcgtga

SEQ ID NO: 154862 - DNA, 78 bp, Homo sapiens
gtgaacgccgcggcaggagagcacgggagattgtgaagagcatggggagcctttgtcgtgcagcgtgaaacccttgta

SEQ ID NO: 154863 - DNA, 76 bp, Homo sapiens
cggcaggagagcacgggagattgtgaagagcatggggagcctttgtcgtgcagcgtgaaacccttgtaaaccctca

SEQ ID NO: 154864 - DNA, 75 bp, Homo sapiens
agagcacgggagattgtgaagagcatggggagcctttgtcgtgcagcgtgaaacccttgtaaaccctcatcccga

SEQ ID NO: 154865 - DNA, 73 bp, Homo sapiens
ttgtgaagagcatggggagcctttgtcgtgcagcgtgaaacccttgtaaaccctcatcccgagaccttcaaat

SEQ ID NO: 154866 - DNA, 70 bp, Homo sapiens
aagagcatggggagcctttgtcgtgcagcgtgaaacccttgtaaaccctcatcccgagaccttcaaattt

SEQ ID NO: 154867 - DNA, 78 bp, Homo sapiens
gtagtgctcagggctgttgccccctctcagcaccttctccttccacaggagcctttggcctaggagctgggagactca

SEQ ID NO: 154868 - DNA, 75 bp, Homo sapiens
gctgttgccccctctcagcaccttctccttccacaggagcctttggcctaggagctgggagactcagggcccttc

SEQ ID NO: 154869 - DNA, 77 bp, Homo sapiens
cctctcagcaccttctccttccacaggagcctttggcctaggagctgggagactcagggcccttctcacactcagaa

SEQ ID NO: 154870 - DNA, 76 bp, Homo sapiens
accttctccttccacaggagcctttggcctaggagctgggagactcagggcccttctcacactcagaattggagca

SEQ ID NO: 154871 - DNA, 77 bp, Homo sapiens
ttccacaggagcctttggcctaggagctgggagactcagggcccttctcacactcagaattggagcagggccttcta

SEQ ID NO: 154872 - DNA, 76 bp, Homo sapiens
agcctttggcctaggagctgggagactcagggcccttctcacactcagaattggagcagggccttctagacagtcc

SEQ ID NO: 154873 - DNA, 80 bp, Homo sapiens
taggagctgggagactcagggcccttctcacactcagaattggagcagggccttctagacagtcccagcaccatgagccc

SEQ ID NO: 154874 - DNA, 78 bp, Homo sapiens
agactcagggcccttctcacactcagaattggagcagggccttctagacagtcccagcaccatgagccctgaaaagtc

SEQ ID NO: 154875 - DNA, 78 bp, Homo sapiens
ccttctcacactcagaattggagcagggccttctagacagtcccagcaccatgagccctgaaaagtcccaagaggaga

SEQ ID NO: 154876 - DNA, 77 bp, Homo sapiens
actcagaattggagcagggccttctagacagtcccagcaccatgagccctgaaaagtcccaagaggagagcccagaa

SEQ ID NO: 154877 - DNA, 76 bp, Homo sapiens
aattggagcagggccttctagacagtcccagcaccatgagccctgaaaagtcccaagaggagagcccagaagaaga

SEQ ID NO: 154878 - DNA, 78 bp, Homo sapiens
ccttctagacagtcccagcaccatgagccctgaaaagtcccaagaggagagcccagaagaagacacagagagaacaga

SEQ ID NO: 154879 - DNA, 78 bp, Homo sapiens
acagtcccagcaccatgagccctgaaaagtcccaagaggagagcccagaagaagacacagagagaacagagcggaagc

SEQ ID NO: 154880 - DNA, 77 bp, Homo sapiens
atgagccctgaaaagtcccaagaggagagcccagaagaagacacagagagaacagagcggaagcccatggtgagaag

SEQ ID NO: 154881 - DNA, 75 bp, Homo sapiens
aaaagtcccaagaggagagcccagaagaagacacagagagaacagagcggaagcccatggtgagaagtggaggaa

SEQ ID NO: 154882 - DNA, 78 bp, Homo sapiens
aagaggagagcccagaagaagacacagagagaacagagcggaagcccatggtgagaagtggaggaagcgaagctggac

SEQ ID NO: 154883 - DNA, 80 bp, Homo sapiens
agagcccagaagaagacacagagagaacagagcggaagcccatggtgagaagtggaggaagcgaagctggactcctagca

SEQ ID NO: 154884 - DNA, 79 bp, Homo sapiens
ttgatgtgtactagtaaatcactgatggaatctgttacttcctctaggtcaaagatgccttcaaagacatttccatata

SEQ ID NO: 154885 - DNA, 78 bp, Homo sapiens
tgtactagtaaatcactgatggaatctgttacttcctctaggtcaaagatgccttcaaagacatttccatatacttca

SEQ ID NO: 154886 - DNA, 76 bp, Homo sapiens
aatcactgatggaatctgttacttcctctaggtcaaagatgccttcaaagacatttccatatacttcaccaaggaa

SEQ ID NO: 154887 - DNA, 75 bp, Homo sapiens
aatctgttacttcctctaggtcaaagatgccttcaaagacatttccatatacttcaccaaggaagaatgggcaga

SEQ ID NO: 154888 - DNA, 76 bp, Homo sapiens
acttcctctaggtcaaagatgccttcaaagacatttccatatacttcaccaaggaagaatgggcagagatgggaga

SEQ ID NO: 154889 - DNA, 74 bp, Homo sapiens
aaagatgccttcaaagacatttccatatacttcaccaaggaagaatgggcagagatgggagactgggagaaaac

SEQ ID NO: 154890 - DNA, 76 bp, Homo sapiens
tcaaagacatttccatatacttcaccaaggaagaatgggcagagatgggagactgggagaaaactcgctataggaa

SEQ ID NO: 154891 - DNA, 75 bp, Homo sapiens
atttccatatacttcaccaaggaagaatgggcagagatgggagactgggagaaaactcgctataggaatgtgaaa

SEQ ID NO: 154892 - DNA, 74 bp, Homo sapiens
ttcaccaaggaagaatgggcagagatgggagactgggagaaaactcgctataggaatgtgaaaaggaactataa

SEQ ID NO: 154893 - DNA, 77 bp, Homo sapiens
agaatgggcagagatgggagactgggagaaaactcgctataggaatgtgaaaaggaactataatgcactgattacta

SEQ ID NO: 154894 - DNA, 75 bp, Homo sapiens
agagatgggagactgggagaaaactcgctataggaatgtgaaaaggaactataatgcactgattactataggtaa

SEQ ID NO: 154895 - DNA, 73 bp, Homo sapiens
agactgggagaaaactcgctataggaatgtgaaaaggaactataatgcactgattactataggtaacaggaag

SEQ ID NO: 154896 - DNA, 76 bp, Homo sapiens
agaaaactcgctataggaatgtgaaaaggaactataatgcactgattactataggtaacaggaagtgctgggcaca

SEQ ID NO: 154897 - DNA, 77 bp, Homo sapiens
ctataggaatgtgaaaaggaactataatgcactgattactataggtaacaggaagtgctgggcacagaccagcctgg

SEQ ID NO: 154898 - DNA, 74 bp, Homo sapiens
ttctcccagctcttccattttagaacaaaatttttgcttcttttcaggtctcagagccactcgaccagctttca

SEQ ID NO: 154899 - DNA, 75 bp, Homo sapiens
tcttccattttagaacaaaatttttgcttcttttcaggtctcagagccactcgaccagctttcatgtgtcaccga

SEQ ID NO: 154900 - DNA, 74 bp, Homo sapiens
attttagaacaaaatttttgcttcttttcaggtctcagagccactcgaccagctttcatgtgtcaccgaaggca

SEQ ID NO: 154901 - DNA, 75 bp, Homo sapiens
aaaatttttgcttcttttcaggtctcagagccactcgaccagctttcatgtgtcaccgaaggcaggccatcaaac

SEQ ID NO: 154902 - DNA, 81 bp, Homo sapiens
ttttcaggtctcagagccactcgaccagctttcatgtgtcaccgaaggcaggccatcaaactccaggtggatgacacagaa

SEQ ID NO: 154903 - DNA, 85 bp, Homo sapiens
tctcagagccactcgaccagctttcatgtgtcaccgaaggcaggccatcaaactccaggtggatgacacagaagattctgatgaa

SEQ ID NO: 154904 - DNA, 82 bp, Homo sapiens
actcgaccagctttcatgtgtcaccgaaggcaggccatcaaactccaggtggatgacacagaagattctgatgaagaatgga

SEQ ID NO: 154905 - DNA, 80 bp, Homo sapiens
agctttcatgtgtcaccgaaggcaggccatcaaactccaggtggatgacacagaagattctgatgaagaatggaccccta

SEQ ID NO: 154906 - DNA, 78 bp, Homo sapiens
accgaaggcaggccatcaaactccaggtggatgacacagaagattctgatgaagaatggacccctaggcagcaaggta

SEQ ID NO: 154907 - DNA, 77 bp, Homo sapiens
gccatcaaactccaggtggatgacacagaagattctgatgaagaatggacccctaggcagcaaggtaagagggaagg

SEQ ID NO: 154908 - DNA, 74 bp, Homo sapiens
aaactccaggtggatgacacagaagattctgatgaagaatggacccctaggcagcaaggtaagagggaagggaa

SEQ ID NO: 154909 - DNA, 72 bp, Homo sapiens
atgacacagaagattctgatgaagaatggacccctaggcagcaaggtaagagggaagggaagtaggattttt

SEQ ID NO: 154910 - DNA, 68 bp, Homo sapiens
agaagattctgatgaagaatggacccctaggcagcaaggtaagagggaagggaagtaggatttttttt

SEQ ID NO: 154911 - DNA, 71 bp, Homo sapiens
aatagaagagagaatctctagtgtttggaaacatttaccaaccaaaccactgatttctcatcaccttttag

SEQ ID NO: 154912 - DNA, 71 bp, Homo sapiens
aagagagaatctctagtgtttggaaacatttaccaaccaaaccactgatttctcatcaccttttagtcaaa

SEQ ID NO: 154913 - DNA, 70 bp, Homo sapiens
tagtgtttggaaacatttaccaaccaaaccactgatttctcatcaccttttagtcaaacctccttggatg

SEQ ID NO: 154914 - DNA, 69 bp, Homo sapiens
aaacatttaccaaccaaaccactgatttctcatcaccttttagtcaaacctccttggatggccttaaga

SEQ ID NO: 154915 - DNA, 71 bp, Homo sapiens
accaaaccactgatttctcatcaccttttagtcaaacctccttggatggccttaagagtggaacagcgtaa

SEQ ID NO: 154916 - DNA, 72 bp, Homo sapiens
actgatttctcatcaccttttagtcaaacctccttggatggccttaagagtggaacagcgtaaacaccagaa

SEQ ID NO: 154917 - DNA, 69 bp, Homo sapiens
atcaccttttagtcaaacctccttggatggccttaagagtggaacagcgtaaacaccagaaggtaagta

SEQ ID NO: 154918 - DNA, 68 bp, Homo sapiens
ttttagtcaaacctccttggatggccttaagagtggaacagcgtaaacaccagaaggtaagtatttcc

SEQ ID NO: 154919 - DNA, 71 bp, Homo sapiens
cttggatggccttaagagtggaacagcgtaaacaccagaaggtaagtatttcccaaatcctattgacaaga

SEQ ID NO: 154920 - DNA, 68 bp, Homo sapiens
cttaagagtggaacagcgtaaacaccagaaggtaagtatttcccaaatcctattgacaagaaaccttc

SEQ ID NO: 154921 - DNA, 70 bp, Homo sapiens
agtggaacagcgtaaacaccagaaggtaagtatttcccaaatcctattgacaagaaaccttcctcatgga

SEQ ID NO: 154922 - DNA, 70 bp, Homo sapiens
aacaccagaaggtaagtatttcccaaatcctattgacaagaaaccttcctcatggatccaaacacaggta

SEQ ID NO: 154923 - DNA, 75 bp, Homo sapiens
taaagaaattcgtgttgtcttttaatatgtgactctcacattaaagggaatgcccaaggcgtcattcagtaatga

SEQ ID NO: 154924 - DNA, 75 bp, Homo sapiens
aaattcgtgttgtcttttaatatgtgactctcacattaaagggaatgcccaaggcgtcattcagtaatgaatcta

SEQ ID NO: 154925 - DNA, 74 bp, Homo sapiens
cttttaatatgtgactctcacattaaagggaatgcccaaggcgtcattcagtaatgaatctagtttgaaagaat

SEQ ID NO: 154926 - DNA, 78 bp, Homo sapiens
tatgtgactctcacattaaagggaatgcccaaggcgtcattcagtaatgaatctagtttgaaagaattgtcaagaaca

SEQ ID NO: 154927 - DNA, 73 bp, Homo sapiens
acattaaagggaatgcccaaggcgtcattcagtaatgaatctagtttgaaagaattgtcaagaacagcaaatt

SEQ ID NO: 154928 - DNA, 77 bp, Homo sapiens
aatgcccaaggcgtcattcagtaatgaatctagtttgaaagaattgtcaagaacagcaaatttactgaatgcaagtg

SEQ ID NO: 154929 - DNA, 80 bp, Homo sapiens
aaggcgtcattcagtaatgaatctagtttgaaagaattgtcaagaacagcaaatttactgaatgcaagtggctcagagca

SEQ ID NO: 154930 - DNA, 79 bp, Homo sapiens
agtaatgaatctagtttgaaagaattgtcaagaacagcaaatttactgaatgcaagtggctcagagcaggctcagaaac

SEQ ID NO: 154931 - DNA, 79 bp, Homo sapiens
atctagtttgaaagaattgtcaagaacagcaaatttactgaatgcaagtggctcagagcaggctcagaaaccagtgtcc

SEQ ID NO: 154932 - DNA, 78 bp, Homo sapiens
aaagaattgtcaagaacagcaaatttactgaatgcaagtggctcagagcaggctcagaaaccagtgtccccttctgga

SEQ ID NO: 154933 - DNA, 78 bp, Homo sapiens
aagaacagcaaatttactgaatgcaagtggctcagagcaggctcagaaaccagtgtccccttctggagaagcaagtac

SEQ ID NO: 154934 - DNA, 78 bp, Homo sapiens
aaatttactgaatgcaagtggctcagagcaggctcagaaaccagtgtccccttctggagaagcaagtacctctggaca

SEQ ID NO: 154935 - DNA, 78 bp, Homo sapiens
aagtggctcagagcaggctcagaaaccagtgtccccttctggagaagcaagtacctctggacagcactcaagactaaa

SEQ ID NO: 154936 - DNA, 76 bp, Homo sapiens
gagcaggctcagaaaccagtgtccccttctggagaagcaagtacctctggacagcactcaagactaaaactgggta

SEQ ID NO: 154937 - DNA, 71 bp, Homo sapiens
agaaaccagtgtccccttctggagaagcaagtacctctggacagcactcaagactaaaactgggtaagaaa

SEQ ID NO: 154938 - DNA, 70 bp, Homo sapiens
agtgtccccttctggagaagcaagtacctctggacagcactcaagactaaaactgggtaagaaaaaatat

SEQ ID NO: 154939 - DNA, 70 bp, Homo sapiens
tggagaagcaagtacctctggacagcactcaagactaaaactgggtaagaaaaaatatttgcggggactt

SEQ ID NO: 154940 - DNA, 67 bp, Homo sapiens
aagtacctctggacagcactcaagactaaaactgggtaagaaaaaatatttgcggggactttagtcc

SEQ ID NO: 154941 - DNA, 68 bp, Homo sapiens
acaaacaccccagattcccaattttacccgtctactcttctccaacctagaactcaggaagaaggaga

SEQ ID NO: 154942 - DNA, 69 bp, Homo sapiens
agattcccaattttacccgtctactcttctccaacctagaactcaggaagaaggagactgaaagaaaga

SEQ ID NO: 154943 - DNA, 70 bp, Homo sapiens
aattttacccgtctactcttctccaacctagaactcaggaagaaggagactgaaagaaagatgtatagcc

SEQ ID NO: 154944 - DNA, 74 bp, Homo sapiens
tctactcttctccaacctagaactcaggaagaaggagactgaaagaaagatgtatagcctgcgagaaagaaagg

SEQ ID NO: 154945 - DNA, 75 bp, Homo sapiens
aacctagaactcaggaagaaggagactgaaagaaagatgtatagcctgcgagaaagaaagggtcatgcatacaaa

SEQ ID NO: 154946 - DNA, 77 bp, Homo sapiens
aactcaggaagaaggagactgaaagaaagatgtatagcctgcgagaaagaaagggtcatgcatacaaagaggtcagc

SEQ ID NO: 154947 - DNA, 83 bp, Homo sapiens
gagactgaaagaaagatgtatagcctgcgagaaagaaagggtcatgcatacaaagaggtcagcgagccgcaggatgatgatta

SEQ ID NO: 154948 - DNA, 82 bp, Homo sapiens
agaaagatgtatagcctgcgagaaagaaagggtcatgcatacaaagaggtcagcgagccgcaggatgatgattacctctgta

SEQ ID NO: 154949 - DNA, 81 bp, Homo sapiens
tagcctgcgagaaagaaagggtcatgcatacaaagaggtcagcgagccgcaggatgatgattacctctgtaagtgacactt

SEQ ID NO: 154950 - DNA, 79 bp, Homo sapiens
agaaagaaagggtcatgcatacaaagaggtcagcgagccgcaggatgatgattacctctgtaagtgacacttttggcca

SEQ ID NO: 154951 - DNA, 81 bp, Homo sapiens
aaagggtcatgcatacaaagaggtcagcgagccgcaggatgatgattacctctgtaagtgacacttttggccactcacaca

SEQ ID NO: 154952 - DNA, 82 bp, Homo sapiens
atacaaagaggtcagcgagccgcaggatgatgattacctctgtaagtgacacttttggccactcacacagcttgctgttatg

SEQ ID NO: 154953 - DNA, 80 bp, Homo sapiens
aaggaacatgcattacaactttcctaatctctgcttccctcacttccagattgtgagatgtgtcagaacttcttcattga

SEQ ID NO: 154954 - DNA, 82 bp, Homo sapiens
attacaactttcctaatctctgcttccctcacttccagattgtgagatgtgtcagaacttcttcattgacagctgtgctgcc

SEQ ID NO: 154955 - DNA, 83 bp, Homo sapiens
tttcctaatctctgcttccctcacttccagattgtgagatgtgtcagaacttcttcattgacagctgtgctgcccatgggccc

SEQ ID NO: 154956 - DNA, 81 bp, Homo sapiens
cttccctcacttccagattgtgagatgtgtcagaacttcttcattgacagctgtgctgcccatgggccccctacatttgta

SEQ ID NO: 154957 - DNA, 80 bp, Homo sapiens
acttccagattgtgagatgtgtcagaacttcttcattgacagctgtgctgcccatgggccccctacatttgtaaaggaca

SEQ ID NO: 154958 - DNA, 82 bp, Homo sapiens
attgtgagatgtgtcagaacttcttcattgacagctgtgctgcccatgggccccctacatttgtaaaggacagtgcagtgga

SEQ ID NO: 154959 - DNA, 79 bp, Homo sapiens
tgtgtcagaacttcttcattgacagctgtgctgcccatgggccccctacatttgtaaaggacagtgcagtggacaaggg

SEQ ID NO: 154960 - DNA, 77 bp, Homo sapiens
ttcttcattgacagctgtgctgcccatgggccccctacatttgtaaaggacagtgcagtggacaaggggcaccccaa

SEQ ID NO: 154961 - DNA, 74 bp, Homo sapiens
acagctgtgctgcccatgggccccctacatttgtaaaggacagtgcagtggacaaggggcaccccaaccgttca

SEQ ID NO: 154962 - DNA, 71 bp, Homo sapiens
ccatgggccccctacatttgtaaaggacagtgcagtggacaaggggcaccccaaccgttcagccctcagtc

SEQ ID NO: 154963 - DNA, 71 bp, Homo sapiens
ccctacatttgtaaaggacagtgcagtggacaaggggcaccccaaccgttcagccctcagtctgcccccag

SEQ ID NO: 154964 - DNA, 73 bp, Homo sapiens
tttgtaaaggacagtgcagtggacaaggggcaccccaaccgttcagccctcagtctgcccccagggctgagaa

SEQ ID NO: 154965 - DNA, 75 bp, Homo sapiens
acagtgcagtggacaaggggcaccccaaccgttcagccctcagtctgcccccagggctgagaattgggccatcag

SEQ ID NO: 154966 - DNA, 74 bp, Homo sapiens
acaaggggcaccccaaccgttcagccctcagtctgcccccagggctgagaattgggccatcaggcatccctcag

SEQ ID NO: 154967 - DNA, 78 bp, Homo sapiens
caaccgttcagccctcagtctgcccccagggctgagaattgggccatcaggcatccctcaggctgggcttggagtatg

SEQ ID NO: 154968 - DNA, 80 bp, Homo sapiens
gttcagccctcagtctgcccccagggctgagaattgggccatcaggcatccctcaggctgggcttggagtatggaatgag

SEQ ID NO: 154969 - DNA, 83 bp, Homo sapiens
agtctgcccccagggctgagaattgggccatcaggcatccctcaggctgggcttggagtatggaatgaggcatctgatctgcc

SEQ ID NO: 154970 - DNA, 86 bp, Homo sapiens
gctgagaattgggccatcaggcatccctcaggctgggcttggagtatggaatgaggcatctgatctgccgctgggtctgcactttg

SEQ ID NO: 154971 - DNA, 83 bp, Homo sapiens
aattgggccatcaggcatccctcaggctgggcttggagtatggaatgaggcatctgatctgccgctgggtctgcactttggcc

SEQ ID NO: 154972 - DNA, 83 bp, Homo sapiens
atcaggcatccctcaggctgggcttggagtatggaatgaggcatctgatctgccgctgggtctgcactttggcccttatgagg

SEQ ID NO: 154973 - DNA, 80 bp, Homo sapiens
aggctgggcttggagtatggaatgaggcatctgatctgccgctgggtctgcactttggcccttatgagggccgaattaca

SEQ ID NO: 154974 - DNA, 80 bp, Homo sapiens
ttggagtatggaatgaggcatctgatctgccgctgggtctgcactttggcccttatgagggccgaattacagaagacgaa

SEQ ID NO: 154975 - DNA, 80 bp, Homo sapiens
aatgaggcatctgatctgccgctgggtctgcactttggcccttatgagggccgaattacagaagacgaagaggcagccaa

SEQ ID NO: 154976 - DNA, 80 bp, Homo sapiens
tctgatctgccgctgggtctgcactttggcccttatgagggccgaattacagaagacgaagaggcagccaacaatggata

SEQ ID NO: 154977 - DNA, 76 bp, Homo sapiens
cgctgggtctgcactttggcccttatgagggccgaattacagaagacgaagaggcagccaacaatggatactcctg

SEQ ID NO: 154978 - DNA, 74 bp, Homo sapiens
actttggcccttatgagggccgaattacagaagacgaagaggcagccaacaatggatactcctggctggtaaga

SEQ ID NO: 154979 - DNA, 77 bp, Homo sapiens
ttatgagggccgaattacagaagacgaagaggcagccaacaatggatactcctggctggtaagaagagcctgccatt

SEQ ID NO: 154980 - DNA, 75 bp, Homo sapiens
agggccgaattacagaagacgaagaggcagccaacaatggatactcctggctggtaagaagagcctgccatttcc

SEQ ID NO: 154981 - DNA, 77 bp, Homo sapiens
tacagaagacgaagaggcagccaacaatggatactcctggctggtaagaagagcctgccatttcccctgttctgtct

SEQ ID NO: 154982 - DNA, 69 bp, Homo sapiens
taaaataattcttctgatttttaccctctaaaaagcctttgccttgtttttctgaaactcagatcacca

SEQ ID NO: 154983 - DNA, 68 bp, Homo sapiens
taattcttctgatttttaccctctaaaaagcctttgccttgtttttctgaaactcagatcaccaaggg

SEQ ID NO: 154984 - DNA, 68 bp, Homo sapiens
tttttaccctctaaaaagcctttgccttgtttttctgaaactcagatcaccaaggggagaaactgcta

SEQ ID NO: 154985 - DNA, 74 bp, Homo sapiens
taaaaagcctttgccttgtttttctgaaactcagatcaccaaggggagaaactgctatgagtatgtggatggaa

SEQ ID NO: 154986 - DNA, 75 bp, Homo sapiens
tttgccttgtttttctgaaactcagatcaccaaggggagaaactgctatgagtatgtggatggaaaagataaatc

SEQ ID NO: 154987 - DNA, 75 bp, Homo sapiens
tttttctgaaactcagatcaccaaggggagaaactgctatgagtatgtggatggaaaagataaatcctgggccaa

SEQ ID NO: 154988 - DNA, 75 bp, Homo sapiens
agatcaccaaggggagaaactgctatgagtatgtggatggaaaagataaatcctgggccaactggatgaggtaag

SEQ ID NO: 154989 - DNA, 74 bp, Homo sapiens
aaggggagaaactgctatgagtatgtggatggaaaagataaatcctgggccaactggatgaggtaaggccagta

SEQ ID NO: 154990 - DNA, 77 bp, Homo sapiens
aaactgctatgagtatgtggatggaaaagataaatcctgggccaactggatgaggtaaggccagtagctctctgagt

SEQ ID NO: 154991 - DNA, 78 bp, Homo sapiens
tatgtggatggaaaagataaatcctgggccaactggatgaggtaaggccagtagctctctgagttgcagagagaacct

SEQ ID NO: 154992 - DNA, 79 bp, Homo sapiens
aaaagataaatcctgggccaactggatgaggtaaggccagtagctctctgagttgcagagagaaccttcatctctcaca

SEQ ID NO: 154993 - DNA, 80 bp, Homo sapiens
ataaatcctgggccaactggatgaggtaaggccagtagctctctgagttgcagagagaaccttcatctctcacaaagctg

SEQ ID NO: 154994 - DNA, 74 bp, Homo sapiens
ggaactcactgcctcttttctttccctttgcctgccttgaccccaggtatgtgaactgtgcccgggatgatgaa

SEQ ID NO: 154995 - DNA, 75 bp, Homo sapiens
actgcctcttttctttccctttgcctgccttgaccccaggtatgtgaactgtgcccgggatgatgaagagcagaa

SEQ ID NO: 154996 - DNA, 74 bp, Homo sapiens
ttttctttccctttgcctgccttgaccccaggtatgtgaactgtgcccgggatgatgaagagcagaacctggtg

SEQ ID NO: 154997 - DNA, 77 bp, Homo sapiens
tttgcctgccttgaccccaggtatgtgaactgtgcccgggatgatgaagagcagaacctggtggccttccagtacca

SEQ ID NO: 154998 - DNA, 78 bp, Homo sapiens
ttgaccccaggtatgtgaactgtgcccgggatgatgaagagcagaacctggtggccttccagtaccacaggcagatct

SEQ ID NO: 154999 - DNA, 79 bp, Homo sapiens
ggtatgtgaactgtgcccgggatgatgaagagcagaacctggtggccttccagtaccacaggcagatcttctatagaac

SEQ ID NO: 155000 - DNA, 78 bp, Homo sapiens
cccgggatgatgaagagcagaacctggtggccttccagtaccacaggcagatcttctatagaacctgccgagtcatta

SEQ ID NO: 155001 - DNA, 79 bp, Homo sapiens
atgaagagcagaacctggtggccttccagtaccacaggcagatcttctatagaacctgccgagtcattaggccaggctg

SEQ ID NO: 155002 - DNA, 78 bp, Homo sapiens
agcagaacctggtggccttccagtaccacaggcagatcttctatagaacctgccgagtcattaggccaggctgtgaac

SEQ ID NO: 155003 - DNA, 79 bp, Homo sapiens
ccttccagtaccacaggcagatcttctatagaacctgccgagtcattaggccaggctgtgaactgctggtctggtatgg

SEQ ID NO: 155004 - DNA, 81 bp, Homo sapiens
taccacaggcagatcttctatagaacctgccgagtcattaggccaggctgtgaactgctggtctggtatggggatgaatac

SEQ ID NO: 155005 - DNA, 78 bp, Homo sapiens
atcttctatagaacctgccgagtcattaggccaggctgtgaactgctggtctggtatggggatgaatacggccaggaa

SEQ ID NO: 155006 - DNA, 77 bp, Homo sapiens
ctatagaacctgccgagtcattaggccaggctgtgaactgctggtctggtatggggatgaatacggccaggaactgg

SEQ ID NO: 155007 - DNA, 77 bp, Homo sapiens
ccgagtcattaggccaggctgtgaactgctggtctggtatggggatgaatacggccaggaactgggcatcaagtggg

SEQ ID NO: 155008 - DNA, 79 bp, Homo sapiens
ccaggctgtgaactgctggtctggtatggggatgaatacggccaggaactgggcatcaagtggggcagcaagtggaaga

SEQ ID NO: 155009 - DNA, 78 bp, Homo sapiens
ctgtgaactgctggtctggtatggggatgaatacggccaggaactgggcatcaagtggggcagcaagtggaagaaaga

SEQ ID NO: 155010 - DNA, 80 bp, Homo sapiens
tctggtatggggatgaatacggccaggaactgggcatcaagtggggcagcaagtggaagaaagagctcatggcagggaga

SEQ ID NO: 155011 - DNA, 81 bp, Homo sapiens
ggatgaatacggccaggaactgggcatcaagtggggcagcaagtggaagaaagagctcatggcagggagaggtaggcatca

SEQ ID NO: 155012 - DNA, 80 bp, Homo sapiens
gccaggaactgggcatcaagtggggcagcaagtggaagaaagagctcatggcagggagaggtaggcatcactattactct

SEQ ID NO: 155013 - DNA, 78 bp, Homo sapiens
aactgggcatcaagtggggcagcaagtggaagaaagagctcatggcagggagaggtaggcatcactattactctttta

SEQ ID NO: 155014 - DNA, 75 bp, Homo sapiens
aagtggggcagcaagtggaagaaagagctcatggcagggagaggtaggcatcactattactcttttaaaaggaca

SEQ ID NO: 155015 - DNA, 73 bp, Homo sapiens
taaggcctgaacaaaacatctaccctgaccaaaaacttcctctttcagaaccaaagccagagatccatccatg

SEQ ID NO: 155016 - DNA, 74 bp, Homo sapiens
aacaaaacatctaccctgaccaaaaacttcctctttcagaaccaaagccagagatccatccatgtccctcatgc

SEQ ID NO: 155017 - DNA, 75 bp, Homo sapiens
taccctgaccaaaaacttcctctttcagaaccaaagccagagatccatccatgtccctcatgctgtctggccttt

SEQ ID NO: 155018 - DNA, 76 bp, Homo sapiens
aaaaacttcctctttcagaaccaaagccagagatccatccatgtccctcatgctgtctggccttttcaagtcagaa

SEQ ID NO: 155019 - DNA, 81 bp, Homo sapiens
tttcagaaccaaagccagagatccatccatgtccctcatgctgtctggccttttcaagtcagaaatttctcagtcaacatg

SEQ ID NO: 155020 - DNA, 80 bp, Homo sapiens
aaccaaagccagagatccatccatgtccctcatgctgtctggccttttcaagtcagaaatttctcagtcaacatgtagaa

SEQ ID NO: 155021 - DNA, 83 bp, Homo sapiens
atccatccatgtccctcatgctgtctggccttttcaagtcagaaatttctcagtcaacatgtagaacgcaatcactcctctca

SEQ ID NO: 155022 - DNA, 80 bp, Homo sapiens
atgtccctcatgctgtctggccttttcaagtcagaaatttctcagtcaacatgtagaacgcaatcactcctctcagaact

SEQ ID NO: 155023 - DNA, 79 bp, Homo sapiens
atgctgtctggccttttcaagtcagaaatttctcagtcaacatgtagaacgcaatcactcctctcagaacttcccagga

SEQ ID NO: 155024 - DNA, 79 bp, Homo sapiens
ttttcaagtcagaaatttctcagtcaacatgtagaacgcaatcactcctctcagaacttcccaggaccatctgcaagaa

SEQ ID NO: 155025 - DNA, 77 bp, Homo sapiens
aagtcagaaatttctcagtcaacatgtagaacgcaatcactcctctcagaacttcccaggaccatctgcaagaaaac

SEQ ID NO: 155026 - DNA, 78 bp, Homo sapiens
tttctcagtcaacatgtagaacgcaatcactcctctcagaacttcccaggaccatctgcaagaaaactcctccaacca

SEQ ID NO: 155027 - DNA, 76 bp, Homo sapiens
aacatgtagaacgcaatcactcctctcagaacttcccaggaccatctgcaagaaaactcctccaaccagagaatcc

SEQ ID NO: 155028 - DNA, 75 bp, Homo sapiens
acgcaatcactcctctcagaacttcccaggaccatctgcaagaaaactcctccaaccagagaatccctgcccagg

SEQ ID NO: 155029 - DNA, 77 bp, Homo sapiens
tctcagaacttcccaggaccatctgcaagaaaactcctccaaccagagaatccctgcccaggggatcagaatcagga

SEQ ID NO: 155030 - DNA, 79 bp, Homo sapiens
ttcccaggaccatctgcaagaaaactcctccaaccagagaatccctgcccaggggatcagaatcaggagcagcaatatc

SEQ ID NO: 155031 - DNA, 81 bp, Homo sapiens
accatctgcaagaaaactcctccaaccagagaatccctgcccaggggatcagaatcaggagcagcaatatccagatccaca

SEQ ID NO: 155032 - DNA, 78 bp, Homo sapiens
aaaactcctccaaccagagaatccctgcccaggggatcagaatcaggagcagcaatatccagatccacacagccgtaa

SEQ ID NO: 155033 - DNA, 79 bp, Homo sapiens
ccagagaatccctgcccaggggatcagaatcaggagcagcaatatccagatccacacagccgtaatgacaaaaccaaag

SEQ ID NO: 155034 - DNA, 78 bp, Homo sapiens
aatccctgcccaggggatcagaatcaggagcagcaatatccagatccacacagccgtaatgacaaaaccaaaggtcaa

SEQ ID NO: 155035 - DNA, 79 bp, Homo sapiens
gggatcagaatcaggagcagcaatatccagatccacacagccgtaatgacaaaaccaaaggtcaagagatcaaagaaag

SEQ ID NO: 155036 - DNA, 77 bp, Homo sapiens
aatcaggagcagcaatatccagatccacacagccgtaatgacaaaaccaaaggtcaagagatcaaagaaaggtccaa

SEQ ID NO: 155037 - DNA, 72 bp, Homo sapiens
tcaagagatcaaagaaaggtccaaactcttgaataaaaggacatggcagagggagatttcaagggccttttc

SEQ ID NO: 155038 - DNA, 71 bp, Homo sapiens
agatcaaagaaaggtccaaactcttgaataaaaggacatggcagagggagatttcaagggccttttctagc

SEQ ID NO: 155039 - DNA, 69 bp, Homo sapiens
aggtccaaactcttgaataaaaggacatggcagagggagatttcaagggccttttctagcccacccaaa

SEQ ID NO: 155040 - DNA, 71 bp, Homo sapiens
aaaggacatggcagagggagatttcaagggccttttctagcccacccaaaggacaaatggggagctgtaga

SEQ ID NO: 155041 - DNA, 67 bp, Homo sapiens
agggagatttcaagggccttttctagcccacccaaaggacaaatggggagctgtagagtgggaaaaa

SEQ ID NO: 155042 - DNA, 67 bp, Homo sapiens
atttcaagggccttttctagcccacccaaaggacaaatggggagctgtagagtgggaaaaagaataa

SEQ ID NO: 155043 - DNA, 71 bp, Homo sapiens
ccaaaggacaaatggggagctgtagagtgggaaaaagaataatggaagaagagtccagaacaggccagaaa

SEQ ID NO: 155044 - DNA, 73 bp, Homo sapiens
ggacaaatggggagctgtagagtgggaaaaagaataatggaagaagagtccagaacaggccagaaagtgaatc

SEQ ID NO: 155045 - DNA, 73 bp, Homo sapiens
agctgtagagtgggaaaaagaataatggaagaagagtccagaacaggccagaaagtgaatccagggaacacag

SEQ ID NO: 155046 - DNA, 72 bp, Homo sapiens
gaaaaagaataatggaagaagagtccagaacaggccagaaagtgaatccagggaacacaggcaaattatttg

SEQ ID NO: 155047 - DNA, 72 bp, Homo sapiens
agaataatggaagaagagtccagaacaggccagaaagtgaatccagggaacacaggcaaattatttgtgggg

SEQ ID NO: 155048 - DNA, 72 bp, Homo sapiens
aacaggccagaaagtgaatccagggaacacaggcaaattatttgtgggggtaggaatctcaagaattgcaaa

SEQ ID NO: 155049 - DNA, 71 bp, Homo sapiens
aaagtgaatccagggaacacaggcaaattatttgtgggggtaggaatctcaagaattgcaaaagtcaagta

SEQ ID NO: 155050 - DNA, 73 bp, Homo sapiens
agggaacacaggcaaattatttgtgggggtaggaatctcaagaattgcaaaagtcaagtatggagagtgtgga

SEQ ID NO: 155051 - DNA, 73 bp, Homo sapiens
gcaaattatttgtgggggtaggaatctcaagaattgcaaaagtcaagtatggagagtgtggacaaggtttcag

SEQ ID NO: 155052 - DNA, 73 bp, Homo sapiens
tatttgtgggggtaggaatctcaagaattgcaaaagtcaagtatggagagtgtggacaaggtttcagtgttaa

SEQ ID NO: 155053 - DNA, 75 bp, Homo sapiens
ggtaggaatctcaagaattgcaaaagtcaagtatggagagtgtggacaaggtttcagtgttaaatcagatgttat

SEQ ID NO: 155054 - DNA, 74 bp, Homo sapiens
aagaattgcaaaagtcaagtatggagagtgtggacaaggtttcagtgttaaatcagatgttattacacaccaaa

SEQ ID NO: 155055 - DNA, 74 bp, Homo sapiens
aaaagtcaagtatggagagtgtggacaaggtttcagtgttaaatcagatgttattacacaccaaaggacacata

SEQ ID NO: 155056 - DNA, 75 bp, Homo sapiens
agtatggagagtgtggacaaggtttcagtgttaaatcagatgttattacacaccaaaggacacatacaggggaga

SEQ ID NO: 155057 - DNA, 75 bp, Homo sapiens
tgtggacaaggtttcagtgttaaatcagatgttattacacaccaaaggacacatacaggggagaagctctacgtc

SEQ ID NO: 155058 - DNA, 77 bp, Homo sapiens
tttcagtgttaaatcagatgttattacacaccaaaggacacatacaggggagaagctctacgtctgcagggagtgtg

SEQ ID NO: 155059 - DNA, 75 bp, Homo sapiens
ttaaatcagatgttattacacaccaaaggacacatacaggggagaagctctacgtctgcagggagtgtgggcggg

SEQ ID NO: 155060 - DNA, 78 bp, Homo sapiens
ggagaagctctacgtctgcagggagtgtgggcggggctttagctggaagtcacacctcctcattcaccagaggataca

SEQ ID NO: 155061 - DNA, 78 bp, Homo sapiens
agctctacgtctgcagggagtgtgggcggggctttagctggaagtcacacctcctcattcaccagaggatacacacag

SEQ ID NO: 155062 - DNA, 74 bp, Homo sapiens
agggagtgtgggcggggctttagctggaagtcacacctcctcattcaccagaggatacacacaggggagaagcc

SEQ ID NO: 155063 - DNA, 79 bp, Homo sapiens
tgtgggcggggctttagctggaagtcacacctcctcattcaccagaggatacacacaggggagaagccctatgtctgca

SEQ ID NO: 155064 - DNA, 77 bp, Homo sapiens
ccctatgtctgcagggagtgtgggcggggctttagccggcagtcagtcctcctcactcaccagaggagacacacagg

SEQ ID NO: 155065 - DNA, 78 bp, Homo sapiens
tgtctgcagggagtgtgggcggggctttagccggcagtcagtcctcctcactcaccagaggagacacacaggggagaa

SEQ ID NO: 155066 - DNA, 75 bp, Homo sapiens
agtgtgggcggggctttagccggcagtcagtcctcctcactcaccagaggagacacacaggggagaagccctatg

SEQ ID NO: 155067 - DNA, 78 bp, Homo sapiens
gggctttagccggcagtcagtcctcctcactcaccagaggagacacacaggggagaagccctatgtctgcagggagtg

SEQ ID NO: 155068 - DNA, 77 bp, Homo sapiens; identical to SEQ ID NO: 155064

SEQ ID NO: 155069 - DNA, 77 bp, Homo sapiens
gtctgcagggagtgtgggcggggctttagccggcagtcagtcctcctcactcaccagaggagacacacaggggagaa

SEQ ID NO: 155070 - DNA, 75 bp, Homo sapiens; identical to SEQ ID NO: 155066

SEQ ID NO: 155071 - DNA, 78 bp, Homo sapiens; identical to SEQ ID NO: 155067

SEQ ID NO: 155072 - DNA, 78 bp, Homo sapiens
gccctatgtctgcagggagtgtgggcggggctttagcaataagtcacacctcctcagacaccagaggacacacacagg

SEQ ID NO: 155073 - DNA, 78 bp, Homo sapiens
atgtctgcagggagtgtgggcggggctttagcaataagtcacacctcctcagacaccagaggacacacacaggggaga

SEQ ID NO: 155074 - DNA, 75 bp, Homo sapiens
agtgtgggcggggctttagcaataagtcacacctcctcagacaccagaggacacacacaggggagaagccctatg

SEQ ID NO: 155075 - DNA, 78 bp, Homo sapiens
aagccctatgtctgcagggagtgtgggcggggctttcgcgataagtcacacctcctcagacaccagaggacacacaca

SEQ ID NO: 155076 - DNA, 78 bp, Homo sapiens
tgtctgcagggagtgtgggcggggctttcgcgataagtcacacctcctcagacaccagaggacacacacaggggagaa

SEQ ID NO: 155077 - DNA, 75 bp, Homo sapiens
agtgtgggcggggctttcgcgataagtcacacctcctcagacaccagaggacacacacaggggagaagccctatg

SEQ ID NO: 155078 - DNA, 77 bp, Homo sapiens
agccctatgtctgcagggagtgtgggcggggctttagagataagtcaaacctcctcagtcaccagaggacacacaca

SEQ ID NO: 155079 - DNA, 76 bp, Homo sapiens
tctgcagggagtgtgggcggggctttagagataagtcaaacctcctcagtcaccagaggacacacacaggggagaa

SEQ ID NO: 155080 - DNA, 73 bp, Homo sapiens
agtgtgggcggggctttagagataagtcaaacctcctcagtcaccagaggacacacacaggggagaagcccta

SEQ ID NO: 155081 - DNA, 77 bp, Homo sapiens
ccctatgtctgcagggagtgtgggcggggctttagcaataagtcacacctcctcagacaccagaggacacacacagg

SEQ ID NO: 155082 - DNA, 74 bp, Homo sapiens
agggagtgtgggcggggctttagcaataagtcacacctcctcagacaccagaggacacacacaggggagaagcc

SEQ ID NO: 155083 - DNA, 76 bp, Homo sapiens
gtgtgggcggggctttagcaataagtcacacctcctcagacaccagaggacacacacaggggagaagccctatgtc

SEQ ID NO: 155084 - DNA, 78 bp, Homo sapiens
aagccctatgtctgcagggagtgtgggcggggctttcgcaataagtcacacctcctcagacaccagaggacacacaca

SEQ ID NO: 155085 - DNA, 79 bp, Homo sapiens
tatgtctgcagggagtgtgggcggggctttcgcaataagtcacacctcctcagacaccagaggacacacacaggggaga

SEQ ID NO: 155086 - DNA, 74 bp, Homo sapiens
agtgtgggcggggctttcgcaataagtcacacctcctcagacaccagaggacacacacaggggagaagccctac

SEQ ID NO: 155087 - DNA, 76 bp, Homo sapiens
ggggctttcgcaataagtcacacctcctcagacaccagaggacacacacaggggagaagccctacgtctgcaggga

SEQ ID NO: 155088 - DNA, 79 bp, Homo sapiens
gagaagccctacgtctgcagggagtgtgggcggggctttagcgataggtcaagcctctgctatcaccagaggacacaca

SEQ ID NO: 155089 - DNA, 77 bp, Homo sapiens
ccctacgtctgcagggagtgtgggcggggctttagcgataggtcaagcctctgctatcaccagaggacacacacagg

SEQ ID NO: 155090 - DNA, 75 bp, Homo sapiens
agggagtgtgggcggggctttagcgataggtcaagcctctgctatcaccagaggacacacacaggggagaagccc

SEQ ID NO: 155091 - DNA, 77 bp, Homo sapiens
cggggctttagcgataggtcaagcctctgctatcaccagaggacacacacaggggagaagccctacgtctgcaggga

SEQ ID NO: 155092 - DNA, 76 bp, Homo sapiens
ggacacacacaggggagaagccctacgtctgcagggaggatgagtaagtcattagtaataaaacctcatctcaata

SEQ ID NO: 155093 - DNA, 74 bp, Homo sapiens
aggggagaagccctacgtctgcagggaggatgagtaagtcattagtaataaaacctcatctcaatagccacaaa

SEQ ID NO: 155094 - DNA, 74 bp, Homo sapiens
aagccctacgtctgcagggaggatgagtaagtcattagtaataaaacctcatctcaatagccacaaaaagacaa

SEQ ID NO: 155095 - DNA, 78 bp, Homo sapiens
tgcagggaggatgagtaagtcattagtaataaaacctcatctcaatagccacaaaaagacaaatgtggtcaccacaca

SEQ ID NO: 155096 - DNA, 77 bp, Homo sapiens
aggatgagtaagtcattagtaataaaacctcatctcaatagccacaaaaagacaaatgtggtcaccacacacttgca

SEQ ID NO: 155097 - DNA, 75 bp, Homo sapiens
aagtcattagtaataaaacctcatctcaatagccacaaaaagacaaatgtggtcaccacacacttgcacacccca

SEQ ID NO: 155098 - DNA, 78 bp, Homo sapiens
taataaaacctcatctcaatagccacaaaaagacaaatgtggtcaccacacacttgcacaccccagctgtgaggtggc

SEQ ID NO: 155099 - DNA, 79 bp, Homo sapiens
atctcaatagccacaaaaagacaaatgtggtcaccacacacttgcacaccccagctgtgaggtggcttcagcggaagtc

SEQ ID NO: 155100 - DNA, 78 bp, Homo sapiens
ccacaaaaagacaaatgtggtcaccacacacttgcacaccccagctgtgaggtggcttcagcggaagtctgctgaccc

SEQ ID NO: 155101 - DNA, 79 bp, Homo sapiens
agacaaatgtggtcaccacacacttgcacaccccagctgtgaggtggcttcagcggaagtctgctgaccccttatattc

SEQ ID NO: 155102 - DNA, 77 bp, Homo sapiens
ccacacacttgcacaccccagctgtgaggtggcttcagcggaagtctgctgaccccttatattccccgagagtataa

SEQ ID NO: 155103 - DNA, 76 bp, Homo sapiens
acttgcacaccccagctgtgaggtggcttcagcggaagtctgctgaccccttatattccccgagagtataaagaga

SEQ ID NO: 155104 - DNA, 74 bp, Homo sapiens
agctgtgaggtggcttcagcggaagtctgctgaccccttatattccccgagagtataaagagatcggaaataac

SEQ ID NO: 155105 - DNA, 71 bp, Homo sapiens
agcggaagtctgctgaccccttatattccccgagagtataaagagatcggaaataactgattaaacaaatc

SEQ ID NO: 155106 - DNA, 72 bp, Homo sapiens
tgaccccttatattccccgagagtataaagagatcggaaataactgattaaacaaatccgccactttcatga

SEQ ID NO: 155107 - DNA, 75 bp, Homo sapiens
ttatattccccgagagtataaagagatcggaaataactgattaaacaaatccgccactttcatgactagagatga

SEQ ID NO: 155108 - DNA, 74 bp, Homo sapiens
agagtataaagagatcggaaataactgattaaacaaatccgccactttcatgactagagatgaggaagaacaag

SEQ ID NO: 155109 - DNA, 73 bp, Homo sapiens
aaagagatcggaaataactgattaaacaaatccgccactttcatgactagagatgaggaagaacaagggatag

SEQ ID NO: 155110 - DNA, 73 bp, Homo sapiens
aataactgattaaacaaatccgccactttcatgactagagatgaggaagaacaagggatagttctgtaagtgt

SEQ ID NO: 155111 - DNA, 71 bp, Homo sapiens
attaaacaaatccgccactttcatgactagagatgaggaagaacaagggatagttctgtaagtgttcgggg

SEQ ID NO: 155112 - DNA, 77 bp, Homo sapiens
cactttcatgactagagatgaggaagaacaagggatagttctgtaagtgttcgggggacatcagcatgtgtggttct

SEQ ID NO: 155113 - DNA, 75 bp, Homo sapiens
atgactagagatgaggaagaacaagggatagttctgtaagtgttcgggggacatcagcatgtgtggttctttccc

SEQ ID NO: 155114 - DNA, 73 bp, Homo sapiens
aggaagaacaagggatagttctgtaagtgttcgggggacatcagcatgtgtggttctttcccgcactgatccc

SEQ ID NO: 155115 - DNA, 72 bp, Homo sapiens
aagggatagttctgtaagtgttcgggggacatcagcatgtgtggttctttcccgcactgatcccctccattt

SEQ ID NO: 155116 - DNA, 72 bp, Homo sapiens
tagttctgtaagtgttcgggggacatcagcatgtgtggttctttcccgcactgatcccctccattttttgtt

SEQ ID NO: 155117 - DNA, 70 bp, Homo sapiens
tttgtttttttgcctcctgttctaataaattttgtctccatacaaatctgaaccccaagtgtgtacctca

SEQ ID NO: 155118 - DNA, 71 bp, Homo sapiens
tttttgcctcctgttctaataaattttgtctccatacaaatctgaaccccaagtgtgtacctcattcttcc

SEQ ID NO: 155119 - DNA, 73 bp, Homo sapiens
tgttctaataaattttgtctccatacaaatctgaaccccaagtgtgtacctcattcttcccttatcactgaag

SEQ ID NO: 155120 - DNA, 74 bp, Homo sapiens
taaattttgtctccatacaaatctgaaccccaagtgtgtacctcattcttcccttatcactgaaggcaagaaga

SEQ ID NO: 155121 - DNA, 74 bp, Homo sapiens
atacaaatctgaaccccaagtgtgtacctcattcttcccttatcactgaaggcaagaagagtccagaagggcca

SEQ ID NO: 155122 - DNA, 75 bp, Homo sapiens
atctgaaccccaagtgtgtacctcattcttcccttatcactgaaggcaagaagagtccagaagggccacagagaa

SEQ ID NO: 155123 - DNA, 80 bp, Homo sapiens
gtgtacctcattcttcccttatcactgaaggcaagaagagtccagaagggccacagagaactcatgtgttcagctcaaga

SEQ ID NO: 155124 - DNA, 79 bp, Homo sapiens
attcttcccttatcactgaaggcaagaagagtccagaagggccacagagaactcatgtgttcagctcaagactccacag

SEQ ID NO: 155125 - DNA, 79 bp, Homo sapiens
atcactgaaggcaagaagagtccagaagggccacagagaactcatgtgttcagctcaagactccacaggaattcaaccc

SEQ ID NO: 155126 - DNA, 78 bp, Homo sapiens
gcaagaagagtccagaagggccacagagaactcatgtgttcagctcaagactccacaggaattcaacccccagaaaga

SEQ ID NO: 155127 - DNA, 76 bp, Homo sapiens
agtccagaagggccacagagaactcatgtgttcagctcaagactccacaggaattcaacccccagaaagacataaa

SEQ ID NO: 155128 - DNA, 75 bp, Homo sapiens
aagggccacagagaactcatgtgttcagctcaagactccacaggaattcaacccccagaaagacataaacttgga

SEQ ID NO: 155129 - DNA, 74 bp, Homo sapiens
ctcatgtgttcagctcaagactccacaggaattcaacccccagaaagacataaacttggagtccgtctggttta

SEQ ID NO: 155130 - DNA, 71 bp, Homo sapiens
ttcagctcaagactccacaggaattcaacccccagaaagacataaacttggagtccgtctggtttaattat

SEQ ID NO: 155131 - DNA, 69 bp, Homo sapiens
aagactccacaggaattcaacccccagaaagacataaacttggagtccgtctggtttaattattggaga

SEQ ID NO: 155132 - DNA, 69 bp, Homo sapiens
acaggaattcaacccccagaaagacataaacttggagtccgtctggtttaattattggagaatcgattc

SEQ ID NO: 155133 - DNA, 68 bp, Homo sapiens
aattcaacccccagaaagacataaacttggagtccgtctggtttaattattggagaatcgattcccaa

SEQ ID NO: 155134 - DNA, 68 bp, Homo sapiens
attcaacccccagaaagacataaacttggagtccgtctggtttaattattggagaatcgattcccaag

SEQ ID NO: 155135 - DNA, 69 bp, Homo sapiens
aaagacataaacttggagtccgtctggtttaattattggagaatcgattcccaagtccaggaagagaaa

SEQ ID NO: 155136 - DNA, 70 bp, Homo sapiens
acataaacttggagtccgtctggtttaattattggagaatcgattcccaagtccaggaagagaaatgtaa

SEQ ID NO: 155137 - DNA, 70 bp, Homo sapiens
taaacttggagtccgtctggtttaattattggagaatcgattcccaagtccaggaagagaaatgtaagat

SEQ ID NO: 155138 - DNA, 70 bp, Homo sapiens
agtccgtctggtttaattattggagaatcgattcccaagtccaggaagagaaatgtaagattctagaaag

SEQ ID NO: 155139 - DNA, 71 bp, Homo sapiens
gtccgtctggtttaattattggagaatcgattcccaagtccaggaagagaaatgtaagattctagaaagtc

SEQ ID NO: 155140 - DNA, 73 bp, Homo sapiens
gtttaattattggagaatcgattcccaagtccaggaagagaaatgtaagattctagaaagtcgcagcaggaaa

SEQ ID NO: 155141 - DNA, 71 bp, Homo sapiens
aagtccaggaagagaaatgtaagattctagaaagtcgcagcaggaaagggagttccctggtctcctgggaa

SEQ ID NO: 155142 - DNA, 72 bp, Homo sapiens
agagaaatgtaagattctagaaagtcgcagcaggaaagggagttccctggtctcctgggaagtgtggcttct

SEQ ID NO: 155143 - DNA, 73 bp, Homo sapiens
taagattctagaaagtcgcagcaggaaagggagttccctggtctcctgggaagtgtggcttcttctcctaatg

SEQ ID NO: 155144 - DNA, 73 bp, Homo sapiens
tctagaaagtcgcagcaggaaagggagttccctggtctcctgggaagtgtggcttcttctcctaatggacacc

SEQ ID NO: 155145 - DNA, 75 bp, Homo sapiens
caggaaagggagttccctggtctcctgggaagtgtggcttcttctcctaatggacacctctcctctgctgccata

SEQ ID NO: 155146 - DNA, 75 bp, Homo sapiens
agttccctggtctcctgggaagtgtggcttcttctcctaatggacacctctcctctgctgccatactctcccttg

SEQ ID NO: 155147 - DNA, 76 bp, Homo sapiens
cctggtctcctgggaagtgtggcttcttctcctaatggacacctctcctctgctgccatactctcccttggctccc

SEQ ID NO: 155148 - DNA, 79 bp, Homo sapiens
ttcttctcctaatggacacctctcctctgctgccatactctcccttggctccccagtctcctctcctgatctcctccaa

SEQ ID NO: 155149 - DNA, 80 bp, Homo sapiens
cctaatggacacctctcctctgctgccatactctcccttggctccccagtctcctctcctgatctcctccaatctctgta

SEQ ID NO: 155150 - DNA, 82 bp, Homo sapiens
tctcctctgctgccatactctcccttggctccccagtctcctctcctgatctcctccaatctctgtagcccaagatgtgaaa

SEQ ID NO: 155151 - DNA, 79 bp, Homo sapiens
ccatactctcccttggctccccagtctcctctcctgatctcctccaatctctgtagcccaagatgtgaaagccagacaa

SEQ ID NO: 155152 - DNA, 79 bp, Homo sapiens
tctcccttggctccccagtctcctctcctgatctcctccaatctctgtagcccaagatgtgaaagccagacaagaacac

SEQ ID NO: 155153 - DNA, 81 bp, Homo sapiens
cccagtctcctctcctgatctcctccaatctctgtagcccaagatgtgaaagccagacaagaacacgcgtgtgtgtatata

SEQ ID NO: 155154 - DNA, 73 bp, Homo sapiens
tgtgtatatatgtgttcgggtgtgggggtatgtgccctccgtgtaggtaactgtgtgagtgtggggggtttca

SEQ ID NO: 155155 - DNA, 70 bp, Homo sapiens
atatatgtgttcgggtgtgggggtatgtgccctccgtgtaggtaactgtgtgagtgtggggggtttcaag

SEQ ID NO: 155156 - DNA, 70 bp, Homo sapiens
tgtgggggtatgtgccctccgtgtaggtaactgtgtgagtgtggggggtttcaagggtgtgttaggaaca

SEQ ID NO: 155157 - DNA, 71 bp, Homo sapiens
tatgtgccctccgtgtaggtaactgtgtgagtgtggggggtttcaagggtgtgttaggaacaacgctcaaa

SEQ ID NO: 155158 - DNA, 69 bp, Homo sapiens
tccgtgtaggtaactgtgtgagtgtggggggtttcaagggtgtgttaggaacaacgctcaaaatcctaa

SEQ ID NO: 155159 - DNA, 69 bp, Homo sapiens
taactgtgtgagtgtggggggtttcaagggtgtgttaggaacaacgctcaaaatcctaaggaaactgaa

SEQ ID NO: 155160 - DNA, 67 bp, Homo sapiens
agtgtggggggtttcaagggtgtgttaggaacaacgctcaaaatcctaaggaaactgaacactcgaa

SEQ ID NO: 155161 - DNA, 69 bp, Homo sapiens
tttcaagggtgtgttaggaacaacgctcaaaatcctaaggaaactgaacactcgaacgaaggattctta

SEQ ID NO: 155162 - DNA, 65 bp, Homo sapiens
attagtgttataattcttataggaaaacctaaatcagtaaacttaattgtagtttaattcaaagt

SEQ ID NO: 155163 - DNA, 65 bp, Homo sapiens
taattcttataggaaaacctaaatcagtaaacttaattgtagtttaattcaaagtttttaatcca

SEQ ID NO: 155164 - DNA, 67 bp, Homo sapiens
aggaaaacctaaatcagtaaacttaattgtagtttaattcaaagtttttaatccaatattgcattca

SEQ ID NO: 155165 - DNA, 67 bp, Homo sapiens
acctaaatcagtaaacttaattgtagtttaattcaaagtttttaatccaatattgcattcaaaaaga

SEQ ID NO: 155166 - DNA, 69 bp, Homo sapiens
aacttaattgtagtttaattcaaagtttttaatccaatattgcattcaaaaagaatctgttaatacatg

SEQ ID NO: 155167 - DNA, 74 bp, Homo sapiens
tgtagtttaattcaaagtttttaatccaatattgcattcaaaaagaatctgttaatacatgttgctctgcttgt

SEQ ID NO: 155168 - DNA, 76 bp, Homo sapiens
caaagtttttaatccaatattgcattcaaaaagaatctgttaatacatgttgctctgcttgttacatggccaccaa

SEQ ID NO: 155169 - DNA, 80 bp, Homo sapiens
ttaatccaatattgcattcaaaaagaatctgttaatacatgttgctctgcttgttacatggccaccaagtgactataaga

SEQ ID NO: 155170 - DNA, 79 bp, Homo sapiens
atattgcattcaaaaagaatctgttaatacatgttgctctgcttgttacatggccaccaagtgactataagagaaaaca

SEQ ID NO: 155171 - DNA, 76 bp, Homo sapiens
aaaaagaatctgttaatacatgttgctctgcttgttacatggccaccaagtgactataagagaaaacacacagaaa

SEQ ID NO: 155172 - DNA, 74 bp, Homo sapiens
ctgttaatacatgttgctctgcttgttacatggccaccaagtgactataagagaaaacacacagaaaaaaaaat

SEQ ID NO: 155173 - DNA, 77 bp, Homo sapiens
aaaaaaaattttaaatgcagtatctgccatcttgtggtacagtgaggaaatgcagcaattgagaagcttctaaatgc

SEQ ID NO: 155174 - DNA, 81 bp, Homo sapiens
ttttaaatgcagtatctgccatcttgtggtacagtgaggaaatgcagcaattgagaagcttctaaatgctgtaatcctaaa

SEQ ID NO: 155175 - DNA, 80 bp, Homo sapiens
agtatctgccatcttgtggtacagtgaggaaatgcagcaattgagaagcttctaaatgctgtaatcctaaacatttctcc

SEQ ID NO: 155176 - DNA, 83 bp, Homo sapiens
tcttgtggtacagtgaggaaatgcagcaattgagaagcttctaaatgctgtaatcctaaacatttctccgcattgctcatgta

SEQ ID NO: 155177 - DNA, 81 bp, Homo sapiens
agtgaggaaatgcagcaattgagaagcttctaaatgctgtaatcctaaacatttctccgcattgctcatgtaaatagccaa

SEQ ID NO: 155178 - DNA, 80 bp, Homo sapiens
aaatgcagcaattgagaagcttctaaatgctgtaatcctaaacatttctccgcattgctcatgtaaatagccaataataa

SEQ ID NO: 155179 - DNA, 80 bp, Homo sapiens
caattgagaagcttctaaatgctgtaatcctaaacatttctccgcattgctcatgtaaatagccaataataacaatatga

SEQ ID NO: 155180 - DNA, 79 bp, Homo sapiens
gcttctaaatgctgtaatcctaaacatttctccgcattgctcatgtaaatagccaataataacaatatgatagttctat

SEQ ID NO: 155181 - DNA, 77 bp, Homo sapiens
gctgtaatcctaaacatttctccgcattgctcatgtaaatagccaataataacaatatgatagttctattttttctg

SEQ ID NO: 155182 - DNA, 78 bp, Homo sapiens
catttctccgcattgctcatgtaaatagccaataataacaatatgatagttctattttttctgtaatctacttaatgc

SEQ ID NO: 155183 - DNA, 76 bp, Homo sapiens
ccgcattgctcatgtaaatagccaataataacaatatgatagttctattttttctgtaatctacttaatgccattt

SEQ ID NO: 155184 - DNA, 76 bp, Homo sapiens
tcatgtaaatagccaataataacaatatgatagttctattttttctgtaatctacttaatgccatttttcttgaga

SEQ ID NO: 155185 - DNA, 75 bp, Homo sapiens
gccaataataacaatatgatagttctattttttctgtaatctacttaatgccatttttcttgagattatccttga

SEQ ID NO: 155186 - DNA, 75 bp, Homo sapiens
ctattttttctgtaatctacttaatgccatttttcttgagattatccttgagtaaattacagaggcatcaagatc

SEQ ID NO: 155187 - DNA, 74 bp, Homo sapiens
ttaatgccatttttcttgagattatccttgagtaaattacagaggcatcaagatccccccaaagttgtcaaata

SEQ ID NO: 155188 - DNA, 73 bp, Homo sapiens
attatccttgagtaaattacagaggcatcaagatccccccaaagttgtcaaatattattcgtatccttgctaa

SEQ ID NO: 155189 - DNA, 72 bp, Homo sapiens
agtaaattacagaggcatcaagatccccccaaagttgtcaaatattattcgtatccttgctaaaatcaggtc

SEQ ID NO: 155190 - DNA, 72 bp, Homo sapiens
agaggcatcaagatccccccaaagttgtcaaatattattcgtatccttgctaaaatcaggtctccaaaagat

SEQ ID NO: 155191 - DNA, 72 bp, Homo sapiens
atcaagatccccccaaagttgtcaaatattattcgtatccttgctaaaatcaggtctccaaaagattgcttc

SEQ ID NO: 155192 - DNA, 74 bp, Homo sapiens
aaatattattcgtatccttgctaaaatcaggtctccaaaagattgcttctctatccactatgacctagtagtct

SEQ ID NO: 155193 - DNA, 77 bp, Homo sapiens
tattcgtatccttgctaaaatcaggtctccaaaagattgcttctctatccactatgacctagtagtcttcacactag

SEQ ID NO: 155194 - DNA, 79 bp, Homo sapiens
taaaatcaggtctccaaaagattgcttctctatccactatgacctagtagtcttcacactagtaggcatcaaactgcaa

SEQ ID NO: 155195 - DNA, 77 bp, Homo sapiens
aggtctccaaaagattgcttctctatccactatgacctagtagtcttcacactagtaggcatcaaactgcaataaaa

SEQ ID NO: 155196 - DNA, 79 bp, Homo sapiens
aaaagattgcttctctatccactatgacctagtagtcttcacactagtaggcatcaaactgcaataaaaggctcagata

SEQ ID NO: 155197 - DNA, 80 bp, Homo sapiens
ttctctatccactatgacctagtagtcttcacactagtaggcatcaaactgcaataaaaggctcagatacaacccatctg

SEQ ID NO: 155198 - DNA, 79 bp, Homo sapiens
actatgacctagtagtcttcacactagtaggcatcaaactgcaataaaaggctcagatacaacccatctggcatctaaa

SEQ ID NO: 155199 - DNA, 79 bp, Homo sapiens
tagtcttcacactagtaggcatcaaactgcaataaaaggctcagatacaacccatctggcatctaaaggaacactcaaa

SEQ ID NO: 155200 - DNA, 75 bp, Homo sapiens
actagtaggcatcaaactgcaataaaaggctcagatacaacccatctggcatctaaaggaacactcaaaaattta

SEQ ID NO: 155201 - DNA, 73 bp, Homo sapiens
atcaaactgcaataaaaggctcagatacaacccatctggcatctaaaggaacactcaaaaatttaacacttcc

SEQ ID NO: 155202 - DNA, 71 bp, Homo sapiens
aataaaaggctcagatacaacccatctggcatctaaaggaacactcaaaaatttaacacttcccctggcac

SEQ ID NO: 155203 - DNA, 74 bp, Homo sapiens
gatacaacccatctggcatctaaaggaacactcaaaaatttaacacttcccctggcaccactctcacccatcta

SEQ ID NO: 155204 - DNA, 72 bp, Homo sapiens
atctggcatctaaaggaacactcaaaaatttaacacttcccctggcaccactctcacccatctatctacctt

SEQ ID NO: 155205 - DNA, 71 bp, Homo sapiens
aacactcaaaaatttaacacttcccctggcaccactctcacccatctatctacctttacctcataacaata

SEQ ID NO: 155206 - DNA, 73 bp, Homo sapiens
aaatttaacacttcccctggcaccactctcacccatctatctacctttacctcataacaatagcaagccaggc

SEQ ID NO: 155207 - DNA, 71 bp, Homo sapiens
gaaaaaaaaatagcagctaacccttactgagcattaactatgttattaactcaatcctcacaacaaaccta

SEQ ID NO: 155208 - DNA, 72 bp, Homo sapiens
aatagcagctaacccttactgagcattaactatgttattaactcaatcctcacaacaaacctattaagtagg

SEQ ID NO: 155209 - DNA, 71 bp, Homo sapiens
gctaacccttactgagcattaactatgttattaactcaatcctcacaacaaacctattaagtagggactat

SEQ ID NO: 155210 - DNA, 72 bp, Homo sapiens
actgagcattaactatgttattaactcaatcctcacaacaaacctattaagtagggactattattttcctca

SEQ ID NO: 155211 - DNA, 70 bp, Homo sapiens
ctatgttattaactcaatcctcacaacaaacctattaagtagggactattattttcctcattttaaatga

SEQ ID NO: 155212 - DNA, 75 bp, Homo sapiens
tcaatcctcacaacaaacctattaagtagggactattattttcctcattttaaatgatgaagcaactgaggcaca

SEQ ID NO: 155213 - DNA, 74 bp, Homo sapiens
attttcctcattttaaatgatgaagcaactgaggcacagaggttagtaattttcctaagattatggtggagatc

SEQ ID NO: 155214 - DNA, 74 bp, Homo sapiens
attttaaatgatgaagcaactgaggcacagaggttagtaattttcctaagattatggtggagatcctaagctat

SEQ ID NO: 155215 - DNA, 75 bp, Homo sapiens
aagcaactgaggcacagaggttagtaattttcctaagattatggtggagatcctaagctattgaaatgattacta

SEQ ID NO: 155216 - DNA, 72 bp, Homo sapiens
ggcacagaggttagtaattttcctaagattatggtggagatcctaagctattgaaatgattactacttgttt

SEQ ID NO: 155217 - DNA, 71 bp, Homo sapiens
tagtaattttcctaagattatggtggagatcctaagctattgaaatgattactacttgttttcaaaagccc

SEQ ID NO: 155218 - DNA, 72 bp, Homo sapiens
tttcctaagattatggtggagatcctaagctattgaaatgattactacttgttttcaaaagcccttatcatt

SEQ ID NO: 155219 - DNA, 76 bp, Homo sapiens
gattatggtggagatcctaagctattgaaatgattactacttgttttcaaaagcccttatcatttatatcacaata

SEQ ID NO: 155220 - DNA, 76 bp, Homo sapiens
gagatcctaagctattgaaatgattactacttgttttcaaaagcccttatcatttatatcacaatatgaataacaa

SEQ ID NO: 155221 - DNA, 77 bp, Homo sapiens
tgaaatgattactacttgttttcaaaagcccttatcatttatatcacaatatgaataacaaatattatgaatcgcag

SEQ ID NO: 155222 - DNA, 77 bp, Homo sapiens
gattactacttgttttcaaaagcccttatcatttatatcacaatatgaataacaaatattatgaatcgcagttatca

SEQ ID NO: 155223 - DNA, 77 bp, Homo sapiens
ttcaaaagcccttatcatttatatcacaatatgaataacaaatattatgaatcgcagttatcaaaaaaacttcagca

SEQ ID NO: 155224 - DNA, 77 bp, Homo sapiens
atatcacaatatgaataacaaatattatgaatcgcagttatcaaaaaaacttcagcagtattactacatcaaaacca

SEQ ID NO: 155225 - DNA, 75 bp, Homo sapiens
acaatatgaataacaaatattatgaatcgcagttatcaaaaaaacttcagcagtattactacatcaaaaccataa

SEQ ID NO: 155226 - DNA, 73 bp, Homo sapiens
caaatattatgaatcgcagttatcaaaaaaacttcagcagtattactacatcaaaaccataaaaaacagaaga

SEQ ID NO: 155227 - DNA, 73 bp, Homo sapiens
gaatcgcagttatcaaaaaaacttcagcagtattactacatcaaaaccataaaaaacagaagatgtaggtgac

SEQ ID NO: 155228 - DNA, 74 bp, Homo sapiens
cttcagcagtattactacatcaaaaccataaaaaacagaagatgtaggtgactaacttcaatgtaagaacttca

SEQ ID NO: 155229 - DNA, 72 bp, Homo sapiens
cagtattactacatcaaaaccataaaaaacagaagatgtaggtgactaacttcaatgtaagaacttcaaata

SEQ ID NO: 155230 - DNA, 77 bp, Homo sapiens
aaaaacagaagatgtaggtgactaacttcaatgtaagaacttcaaataattgcccattgacagaatgctagcagctc

SEQ ID NO: 155231 - DNA, 79 bp, Homo sapiens
agaagatgtaggtgactaacttcaatgtaagaacttcaaataattgcccattgacagaatgctagcagctctggtagaa

SEQ ID NO: 155232 - DNA, 77 bp, Homo sapiens
actaacttcaatgtaagaacttcaaataattgcccattgacagaatgctagcagctctggtagaagggcaaagctta

SEQ ID NO: 155233 - DNA, 80 bp, Homo sapiens
aatgtaagaacttcaaataattgcccattgacagaatgctagcagctctggtagaagggcaaagcttagatatgatgtaa

SEQ ID NO: 155234 - DNA, 80 bp, Homo sapiens
aacttcaaataattgcccattgacagaatgctagcagctctggtagaagggcaaagcttagatatgatgtaactagctta

SEQ ID NO: 155235 - DNA, 83 bp, Homo sapiens
taattgcccattgacagaatgctagcagctctggtagaagggcaaagcttagatatgatgtaactagcttagagtaccaatgc

SEQ ID NO: 155236 - DNA, 83 bp, Homo sapiens
ttgacagaatgctagcagctctggtagaagggcaaagcttagatatgatgtaactagcttagagtaccaatgctgacttagaa

SEQ ID NO: 155237 - DNA, 82 bp, Homo sapiens
tagcagctctggtagaagggcaaagcttagatatgatgtaactagcttagagtaccaatgctgacttagaacagcattcacc

SEQ ID NO: 155238 - DNA, 83 bp, Homo sapiens
aaagcttagatatgatgtaactagcttagagtaccaatgctgacttagaacagcattcacccatgccatagagaactgagaca

SEQ ID NO: 155239 - DNA, 85 bp, Homo sapiens
agatatgatgtaactagcttagagtaccaatgctgacttagaacagcattcacccatgccatagagaactgagacaatgtggcac

SEQ ID NO: 155240 - DNA, 84 bp, Homo sapiens
tagcttagagtaccaatgctgacttagaacagcattcacccatgccatagagaactgagacaatgtggcaccttcattaaatga

SEQ ID NO: 155241 - DNA, 81 bp, Homo sapiens
agtaccaatgctgacttagaacagcattcacccatgccatagagaactgagacaatgtggcaccttcattaaatgaattaa

SEQ ID NO: 155242 - DNA, 78 bp, Homo sapiens
acttagaacagcattcacccatgccatagagaactgagacaatgtggcaccttcattaaatgaattaaagagctttac

SEQ ID NO: 155243 - DNA, 79 bp, Homo sapiens
gcattcacccatgccatagagaactgagacaatgtggcaccttcattaaatgaattaaagagctttacttgagttaata

SEQ ID NO: 155244 - DNA, 77 bp, Homo sapiens
catgccatagagaactgagacaatgtggcaccttcattaaatgaattaaagagctttacttgagttaatatcttagt

SEQ ID NO: 155245 - DNA, 74 bp, Homo sapiens
gagaactgagacaatgtggcaccttcattaaatgaattaaagagctttacttgagttaatatcttagtttacca

SEQ ID NO: 155246 - DNA, 70 bp, Homo sapiens
ggcaccttcattaaatgaattaaagagctttacttgagttaatatcttagtttaccaaacctgacctgag

SEQ ID NO: 155247 - DNA, 69 bp, Homo sapiens
tgaattaaagagctttacttgagttaatatcttagtttaccaaacctgacctgagtttcctcaaacact

SEQ ID NO: 155248 - DNA, 70 bp, Homo sapiens
agagctttacttgagttaatatcttagtttaccaaacctgacctgagtttcctcaaacacttgacaatag

SEQ ID NO: 155249 - DNA, 70 bp, Homo sapiens
gagttaatatcttagtttaccaaacctgacctgagtttcctcaaacacttgacaatagttgctttctaag

SEQ ID NO: 155250 - DNA, 71 bp, Homo sapiens
aatatcttagtttaccaaacctgacctgagtttcctcaaacacttgacaatagttgctttctaagtctgta

SEQ ID NO: 155251 - DNA, 73 bp, Homo sapiens
taccaaacctgacctgagtttcctcaaacacttgacaatagttgctttctaagtctgtaacatgataggttta

SEQ ID NO: 155252 - DNA, 71 bp, Homo sapiens
acctgagtttcctcaaacacttgacaatagttgctttctaagtctgtaacatgataggtttaggccgggta

SEQ ID NO: 155253 - DNA, 71 bp, Homo sapiens
tttcctcaaacacttgacaatagttgctttctaagtctgtaacatgataggtttaggccgggtacggtggc

SEQ ID NO: 155254 - DNA, 76 bp, Homo sapiens
aggtgggagaataccctaagcctagaagttctaagatgtagtgagatatgatcaggctaccacactccatcctggg

SEQ ID NO: 155255 - DNA, 62 bp, Homo sapiens
aaaataaataaacataataggtttaaaaaactaagttaaaaaataagtctctctatagcttt

SEQ ID NO: 155256 - DNA, 64 bp, Homo sapiens
aacataataggtttaaaaaactaagttaaaaaataagtctctctatagctttttatttactgag

SEQ ID NO: 155257 - DNA, 64 bp, Homo sapiens
gtttaaaaaactaagttaaaaaataagtctctctatagctttttatttactgaggttaaagatc

SEQ ID NO: 155258 - DNA, 68 bp, Homo sapiens
ctaagttaaaaaataagtctctctatagctttttatttactgaggttaaagatcttttcatatttaca

SEQ ID NO: 155259 - DNA, 67 bp, Homo sapiens
aaaaataagtctctctatagctttttatttactgaggttaaagatcttttcatatttacaaactatt

SEQ ID NO: 155260 - DNA, 71 bp, Homo sapiens
gtctctctatagctttttatttactgaggttaaagatcttttcatatttacaaactatttatatgtatttg

SEQ ID NO: 155261 - DNA, 72 bp, Homo sapiens
ctgaggttaaagatcttttcatatttacaaactatttatatgtatttgtttcccagttcacatccttataca

SEQ ID NO: 155262 - DNA, 72 bp, Homo sapiens
gatcttttcatatttacaaactatttatatgtatttgtttcccagttcacatccttatacattttgttcctc

SEQ ID NO: 155263 - DNA, 72 bp, Homo sapiens
catatttacaaactatttatatgtatttgtttcccagttcacatccttatacattttgttcctctactatct

SEQ ID NO: 155264 - DNA, 74 bp, Homo sapiens
ctatttatatgtatttgtttcccagttcacatccttatacattttgttcctctactatctttagatatgagcct

SEQ ID NO: 155265 - DNA, 74 bp, Homo sapiens
tgtatttgtttcccagttcacatccttatacattttgttcctctactatctttagatatgagccttttgacctg

SEQ ID NO: 155266 - DNA, 75 bp, Homo sapiens
tttcccagttcacatccttatacattttgttcctctactatctttagatatgagccttttgacctggatgagtta

SEQ ID NO: 155267 - DNA, 77 bp, Homo sapiens
ttcacatccttatacattttgttcctctactatctttagatatgagccttttgacctggatgagttacaaatctgcc

SEQ ID NO: 155268 - DNA, 77 bp, Homo sapiens
tatacattttgttcctctactatctttagatatgagccttttgacctggatgagttacaaatctgcctcccactctg

SEQ ID NO: 155269 - DNA, 76 bp, Homo sapiens
tctactatctttagatatgagccttttgacctggatgagttacaaatctgcctcccactctgtcttttgtcatttt

SEQ ID NO: 155270 - DNA, 77 bp, Homo sapiens
tatctttagatatgagccttttgacctggatgagttacaaatctgcctcccactctgtcttttgtcatttttcttga

SEQ ID NO: 155271 - DNA, 76 bp, Homo sapiens
ttagatatgagccttttgacctggatgagttacaaatctgcctcccactctgtcttttgtcatttttcttgacttg

SEQ ID NO: 155272 - DNA, 74 bp, Homo sapiens
agccttttgacctggatgagttacaaatctgcctcccactctgtcttttgtcatttttcttgacttgtcttcta

SEQ ID NO: 155273 - DNA, 73 bp, Homo sapiens
tttgacctggatgagttacaaatctgcctcccactctgtcttttgtcatttttcttgacttgtcttctaagtt

SEQ ID NO: 155274 - DNA, 72 bp, Homo sapiens
ctggatgagttacaaatctgcctcccactctgtcttttgtcatttttcttgacttgtcttctaagtttttgt

SEQ ID NO: 155275 - DNA, 71 bp, Homo sapiens
atgagttacaaatctgcctcccactctgtcttttgtcatttttcttgacttgtcttctaagtttttgttgg

SEQ ID NO: 155276 - DNA, 71 bp, Homo sapiens
aaatctgcctcccactctgtcttttgtcatttttcttgacttgtcttctaagtttttgttggtccactgaa

SEQ ID NO: 155277 - DNA, 71 bp, Homo sapiens
tgcctcccactctgtcttttgtcatttttcttgacttgtcttctaagtttttgttggtccactgaactaat

SEQ ID NO: 155278 - DNA, 69 bp, Homo sapiens
ctcccactctgtcttttgtcatttttcttgacttgtcttctaagtttttgttggtccactgaactaatt

SEQ ID NO: 155279 - DNA, 65 bp, Homo sapiens
gtcttttgtcatttttcttgacttgtcttctaagtttttgttggtccactgaactaatttttttt

SEQ ID NO: 155280 - DNA, 70 bp, Homo sapiens
ttttttttgttatcaaatatatcttttatagttgagtttggtgtcacacttaggccttcttcaatccatt

SEQ ID NO: 155281 - DNA, 73 bp, Homo sapiens
gttatcaaatatatcttttatagttgagtttggtgtcacacttaggccttcttcaatccatttgctttaagag

SEQ ID NO: 155282 - DNA, 69 bp, Homo sapiens
atcttttatagttgagtttggtgtcacacttaggccttcttcaatccatttgctttaagagtttaggtt

SEQ ID NO: 155283 - DNA, 70 bp, Homo sapiens
tatagttgagtttggtgtcacacttaggccttcttcaatccatttgctttaagagtttaggtttttggta

SEQ ID NO: 155284 - DNA, 67 bp, Homo sapiens
gtttggtgtcacacttaggccttcttcaatccatttgctttaagagtttaggtttttggtagtttta

SEQ ID NO: 155285 - DNA, 67 bp, Homo sapiens
tgctttaagagtttaggtttttggtagttttatcttttcctatttaaatcttctagtggagggcaga

SEQ ID NO: 155286 - DNA, 64 bp, Homo sapiens
gtttaggtttttggtagttttatcttttcctatttaaatcttctagtggagggcagaaaactgg

SEQ ID NO: 155287 - DNA, 63 bp, Homo sapiens
aggtttttggtagttttatcttttcctatttaaatcttctagtggagggcagaaaactgggtt

SEQ ID NO: 155288 - DNA, 65 bp, Homo sapiens
ggtagttttatcttttcctatttaaatcttctagtggagggcagaaaactgggttttccatttgg

SEQ ID NO: 155289 - DNA, 67 bp, Homo sapiens
tatcttttcctatttaaatcttctagtggagggcagaaaactgggttttccatttggttaccagttg

SEQ ID NO: 155290 - DNA, 66 bp, Homo sapiens
ttttcctatttaaatcttctagtggagggcagaaaactgggttttccatttggttaccagttgttg

SEQ ID NO: 155291 - DNA, 67 bp, Homo sapiens
tatttaaatcttctagtggagggcagaaaactgggttttccatttggttaccagttgttgtcccaat

SEQ ID NO: 155292 - DNA, 68 bp, Homo sapiens
atcttctagtggagggcagaaaactgggttttccatttggttaccagttgttgtcccaattccactta

SEQ ID NO: 155293 - DNA, 67 bp, Homo sapiens
tagtggagggcagaaaactgggttttccatttggttaccagttgttgtcccaattccacttacaaaa

SEQ ID NO: 155294 - DNA, 67 bp, Homo sapiens
ggcagaaaactgggttttccatttggttaccagttgttgtcccaattccacttacaaaataatgtct

SEQ ID NO: 155295 - DNA, 67 bp, Homo sapiens
ggttttccatttggttaccagttgttgtcccaattccacttacaaaataatgtctttccttgccaat

SEQ ID NO: 155296 - DNA, 71 bp, Homo sapiens
catttggttaccagttgttgtcccaattccacttacaaaataatgtctttccttgccaatttcaaatatca

SEQ ID NO: 155297 - DNA, 70 bp, Homo sapiens
ccagttgttgtcccaattccacttacaaaataatgtctttccttgccaatttcaaatatcatttttatcc

SEQ ID NO: 155298 - DNA, 70 bp, Homo sapiens
cccaattccacttacaaaataatgtctttccttgccaatttcaaatatcatttttatcctatatgaattt

SEQ ID NO: 155299 - DNA, 68 bp, Homo sapiens
acttacaaaataatgtctttccttgccaatttcaaatatcatttttatcctatatgaattttttaaag

SEQ ID NO: 155300 - DNA, 70 bp, Homo sapiens
gtctttccttgccaatttcaaatatcatttttatcctatatgaattttttaaagtattagggtattctga

SEQ ID NO: 155301 - DNA, 73 bp, Homo sapiens
tgccaatttcaaatatcatttttatcctatatgaattttttaaagtattagggtattctgacatcttactatg

SEQ ID NO: 155302 - DNA, 72 bp, Homo sapiens
atatcatttttatcctatatgaattttttaaagtattagggtattctgacatcttactatgttacattgacc

SEQ ID NO: 155303 - DNA, 74 bp, Homo sapiens
tatcctatatgaattttttaaagtattagggtattctgacatcttactatgttacattgaccttactagacaca

SEQ ID NO: 155304 - DNA, 74 bp, Homo sapiens
aagtattagggtattctgacatcttactatgttacattgaccttactagacacaagaaccatagcttctttaca

SEQ ID NO: 155305 - DNA, 74 bp, Homo sapiens
ctgacatcttactatgttacattgaccttactagacacaagaaccatagcttctttacatattatttctaaaaa

SEQ ID NO: 155306 - DNA, 70 bp, Homo sapiens
actatgttacattgaccttactagacacaagaaccatagcttctttacatattatttctaaaaattttgt

SEQ ID NO: 155307 - DNA, 70 bp, Homo sapiens
tgaccttactagacacaagaaccatagcttctttacatattatttctaaaaattttgttattacaaatgg

SEQ ID NO: 155308 - DNA, 68 bp, Homo sapiens
gacacaagaaccatagcttctttacatattatttctaaaaattttgttattacaaatgggggtctttg

SEQ ID NO: 155309 - DNA, 67 bp, Homo sapiens
gaaccatagcttctttacatattatttctaaaaattttgttattacaaatgggggtctttgttcttc

SEQ ID NO: 155310 - DNA, 68 bp, Homo sapiens
tacatattatttctaaaaattttgttattacaaatgggggtctttgttcttccaacagacttggtcac

SEQ ID NO: 155311 - DNA, 67 bp, Homo sapiens
ttctaaaaattttgttattacaaatgggggtctttgttcttccaacagacttggtcactaagtgtta

SEQ ID NO: 155312 - DNA, 69 bp, Homo sapiens
tttgttattacaaatgggggtctttgttcttccaacagacttggtcactaagtgttactgatttctgtt

SEQ ID NO: 155313 - DNA, 69 bp, Homo sapiens
attacaaatgggggtctttgttcttccaacagacttggtcactaagtgttactgatttctgtttattaa

SEQ ID NO: 155314 - DNA, 73 bp, Homo sapiens
tctttgttcttccaacagacttggtcactaagtgttactgatttctgtttattaatgctgtaccaaatcacct

SEQ ID NO: 155315 - DNA, 76 bp, Homo sapiens
gacttggtcactaagtgttactgatttctgtttattaatgctgtaccaaatcaccttgctgaaattgctttagata

SEQ ID NO: 155316 - DNA, 75 bp, Homo sapiens
agtgttactgatttctgtttattaatgctgtaccaaatcaccttgctgaaattgctttagatagttctcttgagg

SEQ ID NO: 155317 - DNA, 74 bp, Homo sapiens
attaatgctgtaccaaatcaccttgctgaaattgctttagatagttctcttgaggttttagttgtatataacca

SEQ ID NO: 155318 - DNA, 74 bp, Homo sapiens
tgctgtaccaaatcaccttgctgaaattgctttagatagttctcttgaggttttagttgtatataaccaactac

SEQ ID NO: 155319 - DNA, 71 bp, Homo sapiens
aatcaccttgctgaaattgctttagatagttctcttgaggttttagttgtatataaccaactacttagaaa

SEQ ID NO: 155320 - DNA, 68 bp, Homo sapiens
ctgaaattgctttagatagttctcttgaggttttagttgtatataaccaactacttagaaaaacaaaa

SEQ ID NO: 155321 - DNA, 66 bp, Homo sapiens
tgaggttttagttgtatataaccaactacttagaaaaacaaaacctcttaaatacacccaaggaga

SEQ ID NO: 155322 - DNA, 67 bp, Homo sapiens
agttgtatataaccaactacttagaaaaacaaaacctcttaaatacacccaaggagatccagtatag

SEQ ID NO: 155323 - DNA, 67 bp, Homo sapiens
aaccaactacttagaaaaacaaaacctcttaaatacacccaaggagatccagtatagtattgaagtg

SEQ ID NO: 155324 - DNA, 71 bp, Homo sapiens
tagaaaaacaaaacctcttaaatacacccaaggagatccagtatagtattgaagtgtacaatttcagtatg

SEQ ID NO: 155325 - DNA, 73 bp, Homo sapiens
acaaaacctcttaaatacacccaaggagatccagtatagtattgaagtgtacaatttcagtatgttcacacaa

SEQ ID NO: 155326 - DNA, 79 bp, Homo sapiens
aatacacccaaggagatccagtatagtattgaagtgtacaatttcagtatgttcacacaatggaacataatacatagca

SEQ ID NO: 155327 - DNA, 81 bp, Homo sapiens
caaggagatccagtatagtattgaagtgtacaatttcagtatgttcacacaatggaacataatacatagcagtcaaaatga

SEQ ID NO: 155328 - DNA, 79 bp, Homo sapiens
ccagtatagtattgaagtgtacaatttcagtatgttcacacaatggaacataatacatagcagtcaaaatgaactatac

SEQ ID NO: 155329 - DNA, 80 bp, Homo sapiens
gaagtgtacaatttcagtatgttcacacaatggaacataatacatagcagtcaaaatgaactatacttaacatgtgtcaa

SEQ ID NO: 155330 - DNA, 78 bp, Homo sapiens
acaatttcagtatgttcacacaatggaacataatacatagcagtcaaaatgaactatacttaacatgtgtcaacaggg

SEQ ID NO: 155331 - DNA, 80 bp, Homo sapiens
tgttcacacaatggaacataatacatagcagtcaaaatgaactatacttaacatgtgtcaacaggggtagatcagaatat

SEQ ID NO: 155332 - DNA, 78 bp, Homo sapiens
aatggaacataatacatagcagtcaaaatgaactatacttaacatgtgtcaacaggggtagatcagaatattaaatga

SEQ ID NO: 155333 - DNA, 76 bp, Homo sapiens
cataatacatagcagtcaaaatgaactatacttaacatgtgtcaacaggggtagatcagaatattaaatgaaaaaa

SEQ ID NO: 155334 - DNA, 73 bp, Homo sapiens
gtagatcagaatattaaatgaaaaaaagcaaagggcctttgtctcctggcacccggatactgagctcagtttc

SEQ ID NO: 155335 - DNA, 70 bp, Homo sapiens
aaatgaaaaaaagcaaagggcctttgtctcctggcacccggatactgagctcagtttccgtcttcactgt

SEQ ID NO: 155336 - DNA, 76 bp, Homo sapiens
cctttgtctcctggcacccggatactgagctcagtttccgtcttcactgttccatctcctccatccactactccag

SEQ ID NO: 155337 - DNA, 80 bp, Homo sapiens
gtctcctggcacccggatactgagctcagtttccgtcttcactgttccatctcctccatccactactccaggatctcata

SEQ ID NO: 155338 - DNA, 81 bp, Homo sapiens
ggatactgagctcagtttccgtcttcactgttccatctcctccatccactactccaggatctcataggtgactctaccaca

SEQ ID NO: 155339 - DNA, 78 bp, Homo sapiens
tcagtttccgtcttcactgttccatctcctccatccactactccaggatctcataggtgactctaccacagcccctgt

SEQ ID NO: 155340 - DNA, 78 bp, Homo sapiens
ttccgtcttcactgttccatctcctccatccactactccaggatctcataggtgactctaccacagcccctgttgtcc

SEQ ID NO: 155341 - DNA, 83 bp, Homo sapiens
actgttccatctcctccatccactactccaggatctcataggtgactctaccacagcccctgttgtcctgtgagctgcaggca

SEQ ID NO: 155342 - DNA, 83 bp, Homo sapiens
tccatccactactccaggatctcataggtgactctaccacagcccctgttgtcctgtgagctgcaggcactgggaaatccaca

SEQ ID NO: 155343 - DNA, 80 bp, Homo sapiens
actactccaggatctcataggtgactctaccacagcccctgttgtcctgtgagctgcaggcactgggaaatccacaggga

SEQ ID NO: 155344 - DNA, 82 bp, Homo sapiens
atctcataggtgactctaccacagcccctgttgtcctgtgagctgcaggcactgggaaatccacagggaggatgccagaaca

SEQ ID NO: 155345 - DNA, 81 bp, Homo sapiens
gcccctgttgtcctgtgagctgcaggcactgggaaatccacagggaggatgccagaacatctggagcctgcgaaatggtat

SEQ ID NO: 155346 - DNA, 81 bp, Homo sapiens
tgttgtcctgtgagctgcaggcactgggaaatccacagggaggatgccagaacatctggagcctgcgaaatggtattttct

SEQ ID NO: 155347 - DNA, 77 bp, Homo sapiens
agctgcaggcactgggaaatccacagggaggatgccagaacatctggagcctgcgaaatggtattttcttatttaaa

SEQ ID NO: 155348 - DNA, 77 bp, Homo sapiens
tgggaaatccacagggaggatgccagaacatctggagcctgcgaaatggtattttcttatttaaaacaggatcatca

SEQ ID NO: 155349 - DNA, 77 bp, Homo sapiens
atgccagaacatctggagcctgcgaaatggtattttcttatttaaaacaggatcatcatggtagacgggaggcatgg

SEQ ID NO: 155350 - DNA, 75 bp, Homo sapiens
aacatctggagcctgcgaaatggtattttcttatttaaaacaggatcatcatggtagacgggaggcatggtggga

SEQ ID NO: 155351 - DNA, 69 bp, Homo sapiens
attttcttatttaaaacaggatcatcatggtagacgggaggcatggtgggaggggggcgagggataaaa

SEQ ID NO: 155352 - DNA, 71 bp, Homo sapiens
ttatttaaaacaggatcatcatggtagacgggaggcatggtgggaggggggcgagggataaaagattacaa

SEQ ID NO: 155353 - DNA, 70 bp, Homo sapiens
aaataaaaaaagcaaagttacagaattgtccaaatacataccatctatgtttcacaaacactaaatacat

SEQ ID NO: 155354 - DNA, 73 bp, Homo sapiens
aaagcaaagttacagaattgtccaaatacataccatctatgtttcacaaacactaaatacatttcattatccc

SEQ ID NO: 155355 - DNA, 72 bp, Homo sapiens
cagaattgtccaaatacataccatctatgtttcacaaacactaaatacatttcattatccccctaacgaagg

SEQ ID NO: 155356 - DNA, 70 bp, Homo sapiens
ccaaatacataccatctatgtttcacaaacactaaatacatttcattatccccctaacgaagggactaag

SEQ ID NO: 155357 - DNA, 69 bp, Homo sapiens
taccatctatgtttcacaaacactaaatacatttcattatccccctaacgaagggactaagtttcttag

SEQ ID NO: 155358 - DNA, 69 bp, Homo sapiens
ttcacaaacactaaatacatttcattatccccctaacgaagggactaagtttcttagttcctaatgtca

SEQ ID NO: 155359 - DNA, 69 bp, Homo sapiens
cacaaacactaaatacatttcattatccccctaacgaagggactaagtttcttagttcctaatgtcata

SEQ ID NO: 155360 - DNA, 67 bp, Homo sapiens
cactaaatacatttcattatccccctaacgaagggactaagtttcttagttcctaatgtcataaagg

SEQ ID NO: 155361 - DNA, 68 bp, Homo sapiens
tacatttcattatccccctaacgaagggactaagtttcttagttcctaatgtcataaaggtttacaga

SEQ ID NO: 155362 - DNA, 69 bp, Homo sapiens
ttcattatccccctaacgaagggactaagtttcttagttcctaatgtcataaaggtttacagattgata

SEQ ID NO: 155363 - DNA, 68 bp, Homo sapiens
ccctaacgaagggactaagtttcttagttcctaatgtcataaaggtttacagattgataacaaatatg

SEQ ID NO: 155364 - DNA, 70 bp, Homo sapiens
acgaagggactaagtttcttagttcctaatgtcataaaggtttacagattgataacaaatatgtagcaaa

SEQ ID NO: 155365 - DNA, 71 bp, Homo sapiens
gggactaagtttcttagttcctaatgtcataaaggtttacagattgataacaaatatgtagcaaaagtaca

SEQ ID NO: 155366 - DNA, 71 bp, Homo sapiens
gtttcttagttcctaatgtcataaaggtttacagattgataacaaatatgtagcaaaagtacaaaaacatg

SEQ ID NO: 155367 - DNA, 72 bp, Homo sapiens
ctaatgtcataaaggtttacagattgataacaaatatgtagcaaaagtacaaaaacatgggtaaaatattca

SEQ ID NO: 155368 - DNA, 71 bp, Homo sapiens
ggtttacagattgataacaaatatgtagcaaaagtacaaaaacatgggtaaaatattcacaaaaacatgga

SEQ ID NO: 155369 - DNA, 73 bp, Homo sapiens
tgataacaaatatgtagcaaaagtacaaaaacatgggtaaaatattcacaaaaacatggataaaataatcaca

SEQ ID NO: 155370 - DNA, 72 bp, Homo sapiens
atatgtagcaaaagtacaaaaacatgggtaaaatattcacaaaaacatggataaaataatcacaatggtgat

SEQ ID NO: 155371 - DNA, 71 bp, Homo sapiens
gcaaaagtacaaaaacatgggtaaaatattcacaaaaacatggataaaataatcacaatggtgattacttc

SEQ ID NO: 155372 - DNA, 70 bp, Homo sapiens
aaaatattcacaaaaacatggataaaataatcacaatggtgattacttcttaaggctgggagggagggag

SEQ ID NO: 155373 - DNA, 68 bp, Homo sapiens
ggagggagggaggattacaaacgacaaagtacacaaagagagcttcaatttcggtgtattttaagaaa

SEQ ID NO: 155374 - DNA, 67 bp, Homo sapiens
gagggaggattacaaacgacaaagtacacaaagagagcttcaatttcggtgtattttaagaaaaaaa

SEQ ID NO: 155375 - DNA, 67 bp, Homo sapiens
acaaacgacaaagtacacaaagagagcttcaatttcggtgtattttaagaaaaaaacaccgaagcaa

SEQ ID NO: 155376 - DNA, 70 bp, Homo sapiens
cgacaaagtacacaaagagagcttcaatttcggtgtattttaagaaaaaaacaccgaagcaaatatagca

SEQ ID NO: 155377 - DNA, 68 bp, Homo sapiens
agtacacaaagagagcttcaatttcggtgtattttaagaaaaaaacaccgaagcaaatatagcaaaag

SEQ ID NO: 155378 - DNA, 67 bp, Homo sapiens
aagagagcttcaatttcggtgtattttaagaaaaaaacaccgaagcaaatatagcaaaagtaaaata

SEQ ID NO: 155379 - DNA, 65 bp, Homo sapiens
tcggtgtattttaagaaaaaaacaccgaagcaaatatagcaaaagtaaaatatttgttaagtcgg

SEQ ID NO: 155380 - DNA, 68 bp, Homo sapiens
taagaaaaaaacaccgaagcaaatatagcaaaagtaaaatatttgttaagtcggggtgggtgcacagc

SEQ ID NO: 155381 - DNA, 70 bp, Homo sapiens
aaaacaccgaagcaaatatagcaaaagtaaaatatttgttaagtcggggtgggtgcacagctgttcatta

SEQ ID NO: 155382 - DNA, 70 bp, Homo sapiens
accgaagcaaatatagcaaaagtaaaatatttgttaagtcggggtgggtgcacagctgttcattacaaaa

SEQ ID NO: 155383 - DNA, 69 bp, Homo sapiens
aaatatagcaaaagtaaaatatttgttaagtcggggtgggtgcacagctgttcattacaaaagtctagg

SEQ ID NO: 155384 - DNA, 71 bp, Homo sapiens
aaagtaaaatatttgttaagtcggggtgggtgcacagctgttcattacaaaagtctaggtgctattgtgaa

SEQ ID NO: 155385 - DNA, 75 bp, Homo sapiens
tatttgttaagtcggggtgggtgcacagctgttcattacaaaagtctaggtgctattgtgaatgtctgaaacatt

SEQ ID NO: 155386 - DNA, 78 bp, Homo sapiens
ggtgggtgcacagctgttcattacaaaagtctaggtgctattgtgaatgtctgaaacatttaagaggcttgtagagaa

SEQ ID NO: 155387 - DNA, 76 bp, Homo sapiens
cacagctgttcattacaaaagtctaggtgctattgtgaatgtctgaaacatttaagaggcttgtagagaaatattt

SEQ ID NO: 155388 - DNA, 73 bp, Homo sapiens
gttcattacaaaagtctaggtgctattgtgaatgtctgaaacatttaagaggcttgtagagaaatattttttc

SEQ ID NO: 155389 - DNA, 71 bp, Homo sapiens
aaagtctaggtgctattgtgaatgtctgaaacatttaagaggcttgtagagaaatattttttcttttaata

SEQ ID NO: 155390 - DNA, 72 bp, Homo sapiens
attttttcttttaatattttactgcactgaagagaaatacttttgactgaattatcttctggcattctgtaa

SEQ ID NO: 155391 - DNA, 75 bp, Homo sapiens
ttaatattttactgcactgaagagaaatacttttgactgaattatcttctggcattctgtaatttttaatctcaa

SEQ ID NO: 155392 - DNA, 77 bp, Homo sapiens
tactgcactgaagagaaatacttttgactgaattatcttctggcattctgtaatttttaatctcaaaagaatcaatg

SEQ ID NO: 155393 - DNA, 75 bp, Homo sapiens
agagaaatacttttgactgaattatcttctggcattctgtaatttttaatctcaaaagaatcaatgtgggcctga

SEQ ID NO: 155394 - DNA, 73 bp, Homo sapiens
ttttgactgaattatcttctggcattctgtaatttttaatctcaaaagaatcaatgtgggcctgacaaaaagg

SEQ ID NO: 155395 - DNA, 73 bp, Homo sapiens
cttctggcattctgtaatttttaatctcaaaagaatcaatgtgggcctgacaaaaagggagatttcactgatt

SEQ ID NO: 155396 - DNA, 70 bp, Homo sapiens
aatttttaatctcaaaagaatcaatgtgggcctgacaaaaagggagatttcactgattttggcaagttcc

SEQ ID NO: 155397 - DNA, 72 bp, Homo sapiens
taatctcaaaagaatcaatgtgggcctgacaaaaagggagatttcactgattttggcaagttcctaaaatgt

SEQ ID NO: 155398 - DNA, 70 bp, Homo sapiens
aagaatcaatgtgggcctgacaaaaagggagatttcactgattttggcaagttcctaaaatgttttgtct

SEQ ID NO: 155399 - DNA, 71 bp, Homo sapiens
cctgacaaaaagggagatttcactgattttggcaagttcctaaaatgttttgtcttctttgcacatcttag

SEQ ID NO: 155400 - DNA, 71 bp, Homo sapiens
aaaaagggagatttcactgattttggcaagttcctaaaatgttttgtcttctttgcacatcttagtagcag

SEQ ID NO: 155401 - DNA, 71 bp, Homo sapiens
atttcactgattttggcaagttcctaaaatgttttgtcttctttgcacatcttagtagcaggagttacccc

SEQ ID NO: 155402 - DNA, 70 bp, Homo sapiens
attttggcaagttcctaaaatgttttgtcttctttgcacatcttagtagcaggagttacccccatttgtc

SEQ ID NO: 155403 - DNA, 75 bp, Homo sapiens
taaaatgttttgtcttctttgcacatcttagtagcaggagttacccccatttgtctgcttcctgctactagaatg

SEQ ID NO: 155404 - DNA, 76 bp, Homo sapiens
gttttgtcttctttgcacatcttagtagcaggagttacccccatttgtctgcttcctgctactagaatgtaagctc

SEQ ID NO: 155405 - DNA, 79 bp, Homo sapiens
tcttagtagcaggagttacccccatttgtctgcttcctgctactagaatgtaagctctgagtgtaagctctgagtgaaa

SEQ ID NO: 155406 - DNA, 80 bp, Homo sapiens
ttcctgctactagaatgtaagctctgagtgtaagctctgagtgaaagcatttttccattatattcagttacactcctaca

SEQ ID NO: 155407 - DNA, 77 bp, Homo sapiens
gaatgtaagctctgagtgtaagctctgagtgaaagcatttttccattatattcagttacactcctacagtcttaaaa

SEQ ID NO: 155408 - DNA, 78 bp, Homo sapiens
taagctctgagtgtaagctctgagtgaaagcatttttccattatattcagttacactcctacagtcttaaaatgggca

SEQ ID NO: 155409 - DNA, 77 bp, Homo sapiens
taagctctgagtgaaagcatttttccattatattcagttacactcctacagtcttaaaatgggcagacacacaataa

SEQ ID NO: 155410 - DNA, 75 bp, Homo sapiens
tgagtgaaagcatttttccattatattcagttacactcctacagtcttaaaatgggcagacacacaataagtagt

SEQ ID NO: 155411 - DNA, 78 bp, Homo sapiens
tttccattatattcagttacactcctacagtcttaaaatgggcagacacacaataagtagttgctgaatgataaatca

SEQ ID NO: 155412 - DNA, 78 bp, Homo sapiens
ttatattcagttacactcctacagtcttaaaatgggcagacacacaataagtagttgctgaatgataaatcagttgtg

SEQ ID NO: 155413 - DNA, 76 bp, Homo sapiens
ttacactcctacagtcttaaaatgggcagacacacaataagtagttgctgaatgataaatcagttgtgtttatttc

SEQ ID NO: 155414 - DNA, 75 bp, Homo sapiens
aatgggcagacacacaataagtagttgctgaatgataaatcagttgtgtttatttccttgagttagaaacctgga

SEQ ID NO: 155415 - DNA, 75 bp, Homo sapiens
cacacaataagtagttgctgaatgataaatcagttgtgtttatttccttgagttagaaacctggatgtcacgtaa

SEQ ID NO: 155416 - DNA, 74 bp, Homo sapiens
tgctgaatgataaatcagttgtgtttatttccttgagttagaaacctggatgtcacgtaaataataatggaacc

SEQ ID NO: 155417 - DNA, 74 bp, Homo sapiens
tgataaatcagttgtgtttatttccttgagttagaaacctggatgtcacgtaaataataatggaacctggatgc

SEQ ID NO: 155418 - DNA, 72 bp, Homo sapiens
gttgtgtttatttccttgagttagaaacctggatgtcacgtaaataataatggaacctggatgccatgtaaa

SEQ ID NO: 155419 - DNA, 74 bp, Homo sapiens
tatttccttgagttagaaacctggatgtcacgtaaataataatggaacctggatgccatgtaaatgcagtaaaa

SEQ ID NO: 155420 - DNA, 72 bp, Homo sapiens
ttagaaacctggatgtcacgtaaataataatggaacctggatgccatgtaaatgcagtaaaagaaacaggtt

SEQ ID NO: 155421 - DNA, 74 bp, Homo sapiens
atgtcacgtaaataataatggaacctggatgccatgtaaatgcagtaaaagaaacaggttttgtctgcaggttc

SEQ ID NO: 155422 - DNA, 72 bp, Homo sapiens
aataataatggaacctggatgccatgtaaatgcagtaaaagaaacaggttttgtctgcaggttccattttaa

SEQ ID NO: 155423 - DNA, 73 bp, Homo sapiens
ccatgtaaatgcagtaaaagaaacaggttttgtctgcaggttccattttaaaccagcaatatactataggcaa

SEQ ID NO: 155424 - DNA, 73 bp, Homo sapiens
taaatgcagtaaaagaaacaggttttgtctgcaggttccattttaaaccagcaatatactataggcaagtctg

SEQ ID NO: 155425 - DNA, 72 bp, Homo sapiens
aaacaggttttgtctgcaggttccattttaaaccagcaatatactataggcaagtctggtcaatacaagttc

SEQ ID NO: 155426 - DNA, 74 bp, Homo sapiens
ttttgtctgcaggttccattttaaaccagcaatatactataggcaagtctggtcaatacaagttctggtcagtt

SEQ ID NO: 155427 - DNA, 71 bp, Homo sapiens
aggttccattttaaaccagcaatatactataggcaagtctggtcaatacaagttctggtcagtttcttctt

SEQ ID NO: 155428 - DNA, 75 bp, Homo sapiens
taaaccagcaatatactataggcaagtctggtcaatacaagttctggtcagtttcttctttcaattcagaatttc

SEQ ID NO: 155429 - DNA, 76 bp, Homo sapiens
gcaatatactataggcaagtctggtcaatacaagttctggtcagtttcttctttcaattcagaatttccatttcaa

SEQ ID NO: 155430 - DNA, 71 bp, Homo sapiens
ggtcaatacaagttctggtcagtttcttctttcaattcagaatttccatttcaattttgagaatctttggg

SEQ ID NO: 155431 - DNA, 74 bp, Homo sapiens
ttcttctttcaattcagaatttccatttcaattttgagaatctttgggtcaactcaaagaactcctacatctca

SEQ ID NO: 155432 - DNA, 75 bp, Homo sapiens
aattcagaatttccatttcaattttgagaatctttgggtcaactcaaagaactcctacatctcaattgcagagtc

SEQ ID NO: 155433 - DNA, 77 bp, Homo sapiens
ttccatttcaattttgagaatctttgggtcaactcaaagaactcctacatctcaattgcagagtctgtattatttca

SEQ ID NO: 155434 - DNA, 76 bp, Homo sapiens
caattttgagaatctttgggtcaactcaaagaactcctacatctcaattgcagagtctgtattatttcataaattg

SEQ ID NO: 155435 - DNA, 76 bp, Homo sapiens
gggtcaactcaaagaactcctacatctcaattgcagagtctgtattatttcataaattgtaatgggatgttaatct

SEQ ID NO: 155436 - DNA, 81 bp, Homo sapiens
tctcaattgcagagtctgtattatttcataaattgtaatgggatgttaatcttcactgatactaactggctaagctataga

SEQ ID NO: 155437 - DNA, 76 bp, Homo sapiens
tatttcataaattgtaatgggatgttaatcttcactgatactaactggctaagctatagagggcaaggtggtagaa

SEQ ID NO: 155438 - DNA, 77 bp, Homo sapiens
gatgttaatcttcactgatactaactggctaagctatagagggcaaggtggtagaatttctattgcaaagataagta

SEQ ID NO: 155439 - DNA, 76 bp, Homo sapiens
taatcttcactgatactaactggctaagctatagagggcaaggtggtagaatttctattgcaaagataagtaataa

SEQ ID NO: 155440 - DNA, 74 bp, Homo sapiens
gatactaactggctaagctatagagggcaaggtggtagaatttctattgcaaagataagtaataattactataa

SEQ ID NO: 155441 - DNA, 73 bp, Homo sapiens
ggctaagctatagagggcaaggtggtagaatttctattgcaaagataagtaataattactataaatactcttc

SEQ ID NO: 155442 - DNA, 71 bp, Homo sapiens
atagagggcaaggtggtagaatttctattgcaaagataagtaataattactataaatactcttcccaaaga

SEQ ID NO: 155443 - DNA, 70 bp, Homo sapiens
aggtggtagaatttctattgcaaagataagtaataattactataaatactcttcccaaagaaacagcaaa

SEQ ID NO: 155444 - DNA, 72 bp, Homo sapiens
ctattgcaaagataagtaataattactataaatactcttcccaaagaaacagcaaatagttatctttcaagc

SEQ ID NO: 155445 - DNA, 72 bp, Homo sapiens
agataagtaataattactataaatactcttcccaaagaaacagcaaatagttatctttcaagctgtaatcat

SEQ ID NO: 155446 - DNA, 74 bp, Homo sapiens
aatactcttcccaaagaaacagcaaatagttatctttcaagctgtaatcattatctttcacctagagtgtattg

SEQ ID NO: 155447 - DNA, 75 bp, Homo sapiens
cccaaagaaacagcaaatagttatctttcaagctgtaatcattatctttcacctagagtgtattgtaagtctaca

SEQ ID NO: 155448 - DNA, 80 bp, Homo sapiens
gcaaatagttatctttcaagctgtaatcattatctttcacctagagtgtattgtaagtctacagaaatgatgtcattagc

SEQ ID NO: 155449 - DNA, 80 bp, Homo sapiens
atctttcaagctgtaatcattatctttcacctagagtgtattgtaagtctacagaaatgatgtcattagccactgaaaca

SEQ ID NO: 155450 - DNA, 80 bp, Homo sapiens
ctgtaatcattatctttcacctagagtgtattgtaagtctacagaaatgatgtcattagccactgaaacaagacttcata

SEQ ID NO: 155451 - DNA, 79 bp, Homo sapiens
tatctttcacctagagtgtattgtaagtctacagaaatgatgtcattagccactgaaacaagacttcatattgtagtaa

SEQ ID NO: 155452 - DNA, 78 bp, Homo sapiens
cacctagagtgtattgtaagtctacagaaatgatgtcattagccactgaaacaagacttcatattgtagtaataaaca

SEQ ID NO: 155453 - DNA, 74 bp, Homo sapiens
gatgtcattagccactgaaacaagacttcatattgtagtaataaacagacaaaagataatccaagtacaatttt

SEQ ID NO: 155454 - DNA, 71 bp, Homo sapiens
ttagccactgaaacaagacttcatattgtagtaataaacagacaaaagataatccaagtacaattttttaa

SEQ ID NO: 155455 - DNA, 69 bp, Homo sapiens
aaacaagacttcatattgtagtaataaacagacaaaagataatccaagtacaattttttaataaagata

SEQ ID NO: 155456 - DNA, 69 bp, Homo sapiens
ttgtagtaataaacagacaaaagataatccaagtacaattttttaataaagataattacaaaagatgga

SEQ ID NO: 155457 - DNA, 69 bp, Homo sapiens
taaacagacaaaagataatccaagtacaattttttaataaagataattacaaaagatggaaaaatcagc

SEQ ID NO: 155458 - DNA, 70 bp, Homo sapiens
aagataatccaagtacaattttttaataaagataattacaaaagatggaaaaatcagctcagaaaggcca

SEQ ID NO: 155459 - DNA, 69 bp, Homo sapiens
caagtacaattttttaataaagataattacaaaagatggaaaaatcagctcagaaaggccaattacttc

SEQ ID NO: 155460 - DNA, 71 bp, Homo sapiens
ttttaataaagataattacaaaagatggaaaaatcagctcagaaaggccaattacttctttaatagatcag

SEQ ID NO: 155461 - DNA, 69 bp, Homo sapiens
aaagataattacaaaagatggaaaaatcagctcagaaaggccaattacttctttaatagatcagttttt

SEQ ID NO: 155462 - DNA, 72 bp, Homo sapiens
aaagatggaaaaatcagctcagaaaggccaattacttctttaatagatcagtttttttgacataataactca

SEQ ID NO: 155463 - DNA, 73 bp, Homo sapiens
ggaaaaatcagctcagaaaggccaattacttctttaatagatcagtttttttgacataataactcacatcaat

SEQ ID NO: 155464 - DNA, 73 bp, Homo sapiens
ggccaattacttctttaatagatcagtttttttgacataataactcacatcaattttaaatactatcacataa

SEQ ID NO: 155465 - DNA, 76 bp, Homo sapiens
tctttaatagatcagtttttttgacataataactcacatcaattttaaatactatcacataaagcatggtggagaa

SEQ ID NO: 155466 - DNA, 74 bp, Homo sapiens
gatcagtttttttgacataataactcacatcaattttaaatactatcacataaagcatggtggagaaaagaaat

SEQ ID NO: 155467 - DNA, 76 bp, Homo sapiens
tttgacataataactcacatcaattttaaatactatcacataaagcatggtggagaaaagaaattttgcttcataa

SEQ ID NO: 155468 - DNA, 73 bp, Homo sapiens
ctcacatcaattttaaatactatcacataaagcatggtggagaaaagaaattttgcttcataattagaaaaac

SEQ ID NO: 155469 - DNA, 72 bp, Homo sapiens
caattttaaatactatcacataaagcatggtggagaaaagaaattttgcttcataattagaaaaactcacaa

SEQ ID NO: 155470 - DNA, 74 bp, Homo sapiens
tactatcacataaagcatggtggagaaaagaaattttgcttcataattagaaaaactcacaataaaacttgcca

SEQ ID NO: 155471 - DNA, 70 bp, Homo sapiens
agcatggtggagaaaagaaattttgcttcataattagaaaaactcacaataaaacttgccaagaaaaaca

SEQ ID NO: 155472 - DNA, 66 bp, Homo sapiens
ggagaaaagaaattttgcttcataattagaaaaactcacaataaaacttgccaagaaaaacaaaaa

SEQ ID NO: 155473 - DNA, 68 bp, Homo sapiens
ttgcttcataattagaaaaactcacaataaaacttgccaagaaaaacaaaaacgaaaaagccatttga

SEQ ID NO: 155474 - DNA, 66 bp, Homo sapiens
tcataattagaaaaactcacaataaaacttgccaagaaaaacaaaaacgaaaaagccatttgaaaa

SEQ ID NO: 155475 - DNA, 69 bp, Homo sapiens
tcacaataaaacttgccaagaaaaacaaaaacgaaaaagccatttgaaaataaatacagtccatgccaa

SEQ ID NO: 155476 - DNA, 68 bp, Homo sapiens
cttgccaagaaaaacaaaaacgaaaaagccatttgaaaataaatacagtccatgccaaagtagtataa

SEQ ID NO: 155477 - DNA, 71 bp, Homo sapiens
aacgaaaaagccatttgaaaataaatacagtccatgccaaagtagtataaaatgaagccagaagtcttcaa

SEQ ID NO: 155478 - DNA, 71 bp, Homo sapiens
ccatttgaaaataaatacagtccatgccaaagtagtataaaatgaagccagaagtcttcaaaaagaaaaca

SEQ ID NO: 155479 - DNA, 71 bp, Homo sapiens
taaatacagtccatgccaaagtagtataaaatgaagccagaagtcttcaaaaagaaaacattttcctttca

SEQ ID NO: 155480 - DNA, 69 bp, Homo sapiens
ccatgccaaagtagtataaaatgaagccagaagtcttcaaaaagaaaacattttcctttcaatattttc

SEQ ID NO: 155481 - DNA, 66 bp, Homo sapiens
agtagtataaaatgaagccagaagtcttcaaaaagaaaacattttcctttcaatattttcttttta

SEQ ID NO: 155482 - DNA, 73 bp, Homo sapiens
ttttctttttaatgattttctgaaattggtgagactgtcaaattcaggggttgctgagctgttctgatttggt

SEQ ID NO: 155483 - DNA, 75 bp, Homo sapiens
ttttctgaaattggtgagactgtcaaattcaggggttgctgagctgttctgatttggttctgttaaaagaggcaa

SEQ ID NO: 155484 - DNA, 76 bp, Homo sapiens
tgagactgtcaaattcaggggttgctgagctgttctgatttggttctgttaaaagaggcaatgtgaaatattaaaa

SEQ ID NO: 155485 - DNA, 70 bp, Homo sapiens
cacacaccaataaacatgtttagtatttttatagtatgtaaaaagtacttgataaggaacatcatttacc

SEQ ID NO: 155486 - DNA, 68 bp, Homo sapiens
aacatgtttagtatttttatagtatgtaaaaagtacttgataaggaacatcatttaccctttggtatc

SEQ ID NO: 155487 - DNA, 66 bp, Homo sapiens
agtatttttatagtatgtaaaaagtacttgataaggaacatcatttaccctttggtatctgttttt

SEQ ID NO: 155488 - DNA, 69 bp, Homo sapiens
agtatgtaaaaagtacttgataaggaacatcatttaccctttggtatctgttttttcaccactgttgtc

SEQ ID NO: 155489 - DNA, 68 bp, Homo sapiens
aaagtacttgataaggaacatcatttaccctttggtatctgttttttcaccactgttgtccttggatt

SEQ ID NO: 155490 - DNA, 70 bp, Homo sapiens
cttgataaggaacatcatttaccctttggtatctgttttttcaccactgttgtccttggatttatcttct

SEQ ID NO: 155491 - DNA, 69 bp, Homo sapiens
tcatttaccctttggtatctgttttttcaccactgttgtccttggatttatcttcttccttaacgtcta

SEQ ID NO: 155492 - DNA, 66 bp, Homo sapiens
ccctttggtatctgttttttcaccactgttgtccttggatttatcttcttccttaacgtctaaaaa

SEQ ID NO: 155493 - DNA, 67 bp, Homo sapiens
ctgttttttcaccactgttgtccttggatttatcttcttccttaacgtctaaaaataaagattggga

SEQ ID NO: 155494 - DNA, 67 bp, Homo sapiens
caccactgttgtccttggatttatcttcttccttaacgtctaaaaataaagattgggaaaagattaa

SEQ ID NO: 155495 - DNA, 65 bp, Homo sapiens
tgtccttggatttatcttcttccttaacgtctaaaaataaagattgggaaaagattaaaacctat

SEQ ID NO: 155496 - DNA, 64 bp, Homo sapiens
tttatcttcttccttaacgtctaaaaataaagattgggaaaagattaaaacctattttgaaata

SEQ ID NO: 155497 - DNA, 65 bp, Homo sapiens
tttaaaatttacaattaaaacacaattaccaagaaacaaatctgacctgtttttttgtcctctgt

SEQ ID NO: 155498 - DNA, 67 bp, Homo sapiens
acaattaaaacacaattaccaagaaacaaatctgacctgtttttttgtcctctgtttctttcttatc

SEQ ID NO: 155499 - DNA, 69 bp, Homo sapiens
acacaattaccaagaaacaaatctgacctgtttttttgtcctctgtttctttcttatcttcttcaattc

SEQ ID NO: 155500 - DNA, 69 bp, Homo sapiens
ccaagaaacaaatctgacctgtttttttgtcctctgtttctttcttatcttcttcaattctagctttct

SEQ ID NO: 155501 - DNA, 70 bp, Homo sapiens
acaaatctgacctgtttttttgtcctctgtttctttcttatcttcttcaattctagctttctttgctcct

SEQ ID NO: 155502 - DNA, 74 bp, Homo sapiens
ttttttgtcctctgtttctttcttatcttcttcaattctagctttctttgctcctttcttatgatcagccacat

SEQ ID NO: 155503 - DNA, 76 bp, Homo sapiens
tctgtttctttcttatcttcttcaattctagctttctttgctcctttcttatgatcagccacatttcttcgacctc

SEQ ID NO: 155504 - DNA, 75 bp, Homo sapiens
ttcttatcttcttcaattctagctttctttgctcctttcttatgatcagccacatttcttcgacctccttctcct

SEQ ID NO: 155505 - DNA, 78 bp, Homo sapiens
tcttcttcaattctagctttctttgctcctttcttatgatcagccacatttcttcgacctccttctccttcatcctca

SEQ ID NO: 155506 - DNA, 79 bp, Homo sapiens
tctagctttctttgctcctttcttatgatcagccacatttcttcgacctccttctccttcatcctcagaatctgagaat

SEQ ID NO: 155507 - DNA, 81 bp, Homo sapiens
tttgctcctttcttatgatcagccacatttcttcgacctccttctccttcatcctcagaatctgagaattcttcatcacaa

SEQ ID NO: 155508 - DNA, 82 bp, Homo sapiens
ttcttatgatcagccacatttcttcgacctccttctccttcatcctcagaatctgagaattcttcatcacaagctatccgct

SEQ ID NO: 155509 - DNA, 82 bp, Homo sapiens
acatttcttcgacctccttctccttcatcctcagaatctgagaattcttcatcacaagctatccgcttgtctgatgctcgaa

SEQ ID NO: 155510 - DNA, 85 bp, Homo sapiens
gacctccttctccttcatcctcagaatctgagaattcttcatcacaagctatccgcttgtctgatgctcgaactgcacagaatat

SEQ ID NO: 155511 - DNA, 85 bp, Homo sapiens
ttctccttcatcctcagaatctgagaattcttcatcacaagctatccgcttgtctgatgctcgaactgcacagaatattttaata

SEQ ID NO: 155512 - DNA, 81 bp, Homo sapiens
atcctcagaatctgagaattcttcatcacaagctatccgcttgtctgatgctcgaactgcacagaatattttaataaattt

SEQ ID NO: 155513 - DNA, 80 bp, Homo sapiens
atctgagaattcttcatcacaagctatccgcttgtctgatgctcgaactgcacagaatattttaataaattttgacaaaa

SEQ ID NO: 155514 - DNA, 75 bp, Homo sapiens
tcaattatcattttgacaaattggaaaaataaaggcattatcttactagaaattctcttgtctggatcttctcca

SEQ ID NO: 155515 - DNA, 75 bp, Homo sapiens
cattttgacaaattggaaaaataaaggcattatcttactagaaattctcttgtctggatcttctccatcttcatc

SEQ ID NO: 155516 - DNA, 75 bp, Homo sapiens
aattggaaaaataaaggcattatcttactagaaattctcttgtctggatcttctccatcttcatctccactgtct

SEQ ID NO: 155517 - DNA, 80 bp, Homo sapiens
aaaataaaggcattatcttactagaaattctcttgtctggatcttctccatcttcatctccactgtcttcatgaacagca

SEQ ID NO: 155518 - DNA, 83 bp, Homo sapiens
attatcttactagaaattctcttgtctggatcttctccatcttcatctccactgtcttcatgaacagcatcttctggaatagc

SEQ ID NO: 155519 - DNA, 87 bp, Homo sapiens
tagaaattctcttgtctggatcttctccatcttcatctccactgtcttcatgaacagcatcttctggaatagcttgcatctggacac

SEQ ID NO: 155520 - DNA, 89 bp, Homo sapiens
tctggatcttctccatcttcatctccactgtcttcatgaacagcatcttctggaatagcttgcatctggacaccaggtgcatgaggtaa

SEQ ID NO: 155521 - DNA, 89 bp, Homo sapiens
ctccatcttcatctccactgtcttcatgaacagcatcttctggaatagcttgcatctggacaccaggtgcatgaggtaacatgcgcaaa

SEQ ID NO: 155522 - DNA, 86 bp, Homo sapiens
atctccactgtcttcatgaacagcatcttctggaatagcttgcatctggacaccaggtgcatgaggtaacatgcgcaaattttcaa

SEQ ID NO: 155523 - DNA, 84 bp, Homo sapiens
actgtcttcatgaacagcatcttctggaatagcttgcatctggacaccaggtgcatgaggtaacatgcgcaaattttcaaacaa

SEQ ID NO: 155524 - DNA, 82 bp, Homo sapiens
cagcatcttctggaatagcttgcatctggacaccaggtgcatgaggtaacatgcgcaaattttcaaacaaacgctgtctaaa

SEQ ID NO: 155525 - DNA, 80 bp, Homo sapiens
ttctggaatagcttgcatctggacaccaggtgcatgaggtaacatgcgcaaattttcaaacaaacgctgtctaaattaca

SEQ ID NO: 155526 - DNA, 79 bp, Homo sapiens
ttgcatctggacaccaggtgcatgaggtaacatgcgcaaattttcaaacaaacgctgtctaaattacacatgcaaagtt

SEQ ID NO: 155527 - DNA, 76 bp, Homo sapiens
acaccaggtgcatgaggtaacatgcgcaaattttcaaacaaacgctgtctaaattacacatgcaaagtttattaga

SEQ ID NO: 155528 - DNA, 75 bp, Homo sapiens
ggtgcatgaggtaacatgcgcaaattttcaaacaaacgctgtctaaattacacatgcaaagtttattagacaaaa

SEQ ID NO: 155529 - DNA, 73 bp, Homo sapiens
tttgtcaagataaaatgtttatcaaaacaattcaatgatttcttactttatcttttccatatattctggagtg

SEQ ID NO: 155530 - DNA, 72 bp, Homo sapiens
gataaaatgtttatcaaaacaattcaatgatttcttactttatcttttccatatattctggagtgttctggt

SEQ ID NO: 155531 - DNA, 75 bp, Homo sapiens
tatcaaaacaattcaatgatttcttactttatcttttccatatattctggagtgttctggtttgtcatgtttgaa

SEQ ID NO: 155532 - DNA, 77 bp, Homo sapiens
ttcaatgatttcttactttatcttttccatatattctggagtgttctggtttgtcatgtttgaaggactaatatgca

SEQ ID NO: 155533 - DNA, 75 bp, Homo sapiens
tcttactttatcttttccatatattctggagtgttctggtttgtcatgtttgaaggactaatatgcagtttgaag

SEQ ID NO: 155534 - DNA, 75 bp, Homo sapiens
ctttatcttttccatatattctggagtgttctggtttgtcatgtttgaaggactaatatgcagtttgaagtctgg

SEQ ID NO: 155535 - DNA, 76 bp, Homo sapiens
atatattctggagtgttctggtttgtcatgtttgaaggactaatatgcagtttgaagtctggtccaaaatactcaa

SEQ ID NO: 155536 - DNA, 75 bp, Homo sapiens
gtgttctggtttgtcatgtttgaaggactaatatgcagtttgaagtctggtccaaaatactcaaagtaatcatta

SEQ ID NO: 155537 - DNA, 76 bp, Homo sapiens
ggtttgtcatgtttgaaggactaatatgcagtttgaagtctggtccaaaatactcaaagtaatcattatatggcaa

SEQ ID NO: 155538 - DNA, 76 bp, Homo sapiens
gtttgaaggactaatatgcagtttgaagtctggtccaaaatactcaaagtaatcattatatggcaactctaatgaa

SEQ ID NO: 155539 - DNA, 76 bp, Homo sapiens
gactaatatgcagtttgaagtctggtccaaaatactcaaagtaatcattatatggcaactctaatgaaaacaataa

SEQ ID NO: 155540 - DNA, 71 bp, Homo sapiens
gtttgaagtctggtccaaaatactcaaagtaatcattatatggcaactctaatgaaaacaataaaataaag

SEQ ID NO: 155541 - DNA, 73 bp, Homo sapiens
tctggtccaaaatactcaaagtaatcattatatggcaactctaatgaaaacaataaaataaagttacatatta

SEQ ID NO: 155542 - DNA, 78 bp, Homo sapiens
atctgtattgacagttcatacaataaagatattgtaatgagaacacttaccattgggaatctcacaatcaagggcaac

SEQ ID NO: 155543 - DNA, 80 bp, Homo sapiens
agttcatacaataaagatattgtaatgagaacacttaccattgggaatctcacaatcaagggcaactgcagtctcatatg

SEQ ID NO: 155544 - DNA, 80 bp, Homo sapiens
aataaagatattgtaatgagaacacttaccattgggaatctcacaatcaagggcaactgcagtctcatatgtccaacatc

SEQ ID NO: 155545 - DNA, 83 bp, Homo sapiens
tattgtaatgagaacacttaccattgggaatctcacaatcaagggcaactgcagtctcatatgtccaacatcgagcaacatta

SEQ ID NO: 155546 - DNA, 81 bp, Homo sapiens
acacttaccattgggaatctcacaatcaagggcaactgcagtctcatatgtccaacatcgagcaacattacggattgtgta

SEQ ID NO: 155547 - DNA, 81 bp, Homo sapiens
attgggaatctcacaatcaagggcaactgcagtctcatatgtccaacatcgagcaacattacggattgtgtagccacctcc

SEQ ID NO: 155548 - DNA, 83 bp, Homo sapiens
acaatcaagggcaactgcagtctcatatgtccaacatcgagcaacattacggattgtgtagccacctcctccaagcatcagta

SEQ ID NO: 155549 - DNA, 81 bp, Homo sapiens
caactgcagtctcatatgtccaacatcgagcaacattacggattgtgtagccacctcctccaagcatcagtaatggtaagt

SEQ ID NO: 155550 - DNA, 78 bp, Homo sapiens
agtctcatatgtccaacatcgagcaacattacggattgtgtagccacctcctccaagcatcagtaatggtaagttaaa

SEQ ID NO: 155551 - DNA, 73 bp, Homo sapiens
caacatcgagcaacattacggattgtgtagccacctcctccaagcatcagtaatggtaagttaaaagttttta

SEQ ID NO: 155552 - DNA, 70 bp, Homo sapiens
agcaacattacggattgtgtagccacctcctccaagcatcagtaatggtaagttaaaagtttttacaact

SEQ ID NO: 155553 - DNA, 71 bp, Homo sapiens
ggattgtgtagccacctcctccaagcatcagtaatggtaagttaaaagtttttacaacttctacacattta

SEQ ID NO: 155554 - DNA, 71 bp, Homo sapiens
ccacctcctccaagcatcagtaatggtaagttaaaagtttttacaacttctacacatttagcatgacctaa

SEQ ID NO: 155555 - DNA, 72 bp, Homo sapiens
cctccaagcatcagtaatggtaagttaaaagtttttacaacttctacacatttagcatgacctaagacaaga

SEQ ID NO: 155556 - DNA, 69 bp, Homo sapiens
cagtaatggtaagttaaaagtttttacaacttctacacatttagcatgacctaagacaagaagatttgg

SEQ ID NO: 155557 - DNA, 68 bp, Homo sapiens
gttaaaagtttttacaacttctacacatttagcatgacctaagacaagaagatttgggtaacaacaaa

SEQ ID NO: 155558 - DNA, 67 bp, Homo sapiens
ggaagaaaaaccatttttttctggaaataccaccctttgaattgcttacctttgactgttagattga

SEQ ID NO: 155559 - DNA, 68 bp, Homo sapiens
tttttttctggaaataccaccctttgaattgcttacctttgactgttagattgaaacaacccagtcta

SEQ ID NO: 155560 - DNA, 74 bp, Homo sapiens
tggaaataccaccctttgaattgcttacctttgactgttagattgaaacaacccagtctatcaccagataatga

SEQ ID NO: 155561 - DNA, 76 bp, Homo sapiens
accctttgaattgcttacctttgactgttagattgaaacaacccagtctatcaccagataatgagtctgcaccaca

SEQ ID NO: 155562 - DNA, 77 bp, Homo sapiens
aattgcttacctttgactgttagattgaaacaacccagtctatcaccagataatgagtctgcaccacactgtaatac

SEQ ID NO: 155563 - DNA, 79 bp, Homo sapiens
tttgactgttagattgaaacaacccagtctatcaccagataatgagtctgcaccacactgtaataccacagcactaggt

SEQ ID NO: 155564 - DNA, 82 bp, Homo sapiens
ttagattgaaacaacccagtctatcaccagataatgagtctgcaccacactgtaataccacagcactaggttgatacatctc

SEQ ID NO: 155565 - DNA, 84 bp, Homo sapiens
ccagtctatcaccagataatgagtctgcaccacactgtaataccacagcactaggttgatacatctccatcacctttgagataa

SEQ ID NO: 155566 - DNA, 86 bp, Homo sapiens
tatcaccagataatgagtctgcaccacactgtaataccacagcactaggttgatacatctccatcacctttgagataatctacaca

SEQ ID NO: 155567 - DNA, 84 bp, Homo sapiens
ataatgagtctgcaccacactgtaataccacagcactaggttgatacatctccatcacctttgagataatctacacacaagata

SEQ ID NO: 155568 - DNA, 79 bp, Homo sapiens
accacactgtaataccacagcactaggttgatacatctccatcacctttgagataatctacacacaagataacaaatgt

SEQ ID NO: 155569 - DNA, 82 bp, Homo sapiens
ataccacagcactaggttgatacatctccatcacctttgagataatctacacacaagataacaaatgttagcatctccaata

SEQ ID NO: 155570 - DNA, 79 bp, Homo sapiens
ttgagataatctacacacaagataacaaatgttagcatctccaataacattctgaaattccattccaattgtgaaaaca

SEQ ID NO: 155571 - DNA, 75 bp, Homo sapiens
ccaataacattctgaaattccattccaattgtgaaaacaataatacttacaggcttaaatatctgcccatatgac

SEQ ID NO: 155572 - DNA, 80 bp, Homo sapiens
tctgaaattccattccaattgtgaaaacaataatacttacaggcttaaatatctgcccatatgactcatcatctatacca

SEQ ID NO: 155573 - DNA, 81 bp, Homo sapiens
ttccattccaattgtgaaaacaataatacttacaggcttaaatatctgcccatatgactcatcatctataccatctctcat

SEQ ID NO: 155574 - DNA, 81 bp, Homo sapiens
gtgaaaacaataatacttacaggcttaaatatctgcccatatgactcatcatctataccatctctcattggaaaattgaca

SEQ ID NO: 155575 - DNA, 82 bp, Homo sapiens
aataatacttacaggcttaaatatctgcccatatgactcatcatctataccatctctcattggaaaattgacagcatagtat

SEQ ID NO: 155576 - DNA, 82 bp, Homo sapiens
ttacaggcttaaatatctgcccatatgactcatcatctataccatctctcattggaaaattgacagcatagtatttgccttt

SEQ ID NO: 155577 - DNA, 84 bp, Homo sapiens
taaatatctgcccatatgactcatcatctataccatctctcattggaaaattgacagcatagtatttgccttttccagcaccaa

SEQ ID NO: 155578 - DNA, 82 bp, Homo sapiens
tatgactcatcatctataccatctctcattggaaaattgacagcatagtatttgccttttccagcaccaatatcctaaaata

SEQ ID NO: 155579 - DNA, 81 bp, Homo sapiens
tcatcatctataccatctctcattggaaaattgacagcatagtatttgccttttccagcaccaatatcctaaaatacataa

SEQ ID NO: 155580 - DNA, 75 bp, Homo sapiens
ccatctctcattggaaaattgacagcatagtatttgccttttccagcaccaatatcctaaaatacataattaaac

SEQ ID NO: 155581 - DNA, 75 bp, Homo sapiens
ggaaaattgacagcatagtatttgccttttccagcaccaatatcctaaaatacataattaaactgatcttagaga

SEQ ID NO: 155582 - DNA, 77 bp, Homo sapiens
ttgacagcatagtatttgccttttccagcaccaatatcctaaaatacataattaaactgatcttagagaatattcta

SEQ ID NO: 155583 - DNA, 74 bp, Homo sapiens
atctcctaggttcatctcacaatattttttcagacagaatttagtcttaccctcaagtctcctgtgccaggaaa

SEQ ID NO: 155584 - DNA, 73 bp, Homo sapiens
gttcatctcacaatattttttcagacagaatttagtcttaccctcaagtctcctgtgccaggaaagtattccc

SEQ ID NO: 155585 - DNA, 71 bp, Homo sapiens
ttttttcagacagaatttagtcttaccctcaagtctcctgtgccaggaaagtattccccatatttatggaa

SEQ ID NO: 155586 - DNA, 73 bp, Homo sapiens
cagaatttagtcttaccctcaagtctcctgtgccaggaaagtattccccatatttatggaatgataccgtcat

SEQ ID NO: 155587 - DNA, 73 bp, Homo sapiens
tttagtcttaccctcaagtctcctgtgccaggaaagtattccccatatttatggaatgataccgtcattacac

SEQ ID NO: 155588 - DNA, 74 bp, Homo sapiens
aagtctcctgtgccaggaaagtattccccatatttatggaatgataccgtcattacacgatctgttgtataaaa

SEQ ID NO: 155589 - DNA, 74 bp, Homo sapiens
ctgtgccaggaaagtattccccatatttatggaatgataccgtcattacacgatctgttgtataaaaagcttct

SEQ ID NO: 155590 - DNA, 75 bp, Homo sapiens
aagtattccccatatttatggaatgataccgtcattacacgatctgttgtataaaaagcttcttcaacaccatca

SEQ ID NO: 155591 - DNA, 81 bp, Homo sapiens
tatttatggaatgataccgtcattacacgatctgttgtataaaaagcttcttcaacaccatcaccatgatgaatatctata

SEQ ID NO: 155592 - DNA, 82 bp, Homo sapiens
atggaatgataccgtcattacacgatctgttgtataaaaagcttcttcaacaccatcaccatgatgaatatctatatcaata

SEQ ID NO: 155593 - DNA, 85 bp, Homo sapiens
cattacacgatctgttgtataaaaagcttcttcaacaccatcaccatgatgaatatctatatcaatatataagactctctgatga

SEQ ID NO: 155594 - DNA, 83 bp, Homo sapiens
acgatctgttgtataaaaagcttcttcaacaccatcaccatgatgaatatctatatcaatatataagactctctgatgatacc

SEQ ID NO: 155595 - DNA, 81 bp, Homo sapiens
aaaaagcttcttcaacaccatcaccatgatgaatatctatatcaatatataagactctctgatgatacctgaaaacaaatc

SEQ ID NO: 155596 - DNA, 83 bp, Homo sapiens
gcttcttcaacaccatcaccatgatgaatatctatatcaatatataagactctctgatgatacctgaaaacaaatccataagt

SEQ ID NO: 155597 - DNA, 80 bp, Homo sapiens
caccatcaccatgatgaatatctatatcaatatataagactctctgatgatacctgaaaacaaatccataagttttggtt

SEQ ID NO: 155598 - DNA, 76 bp, Homo sapiens
atgatgaatatctatatcaatatataagactctctgatgatacctgaaaacaaatccataagttttggtttttcct

SEQ ID NO: 155599 - DNA, 74 bp, Homo sapiens
gaaaacactttatcactgaaaagagtatcaatataaattaacatactttagtaattcaaggatggcaagcacaa

SEQ ID NO: 155600 - DNA, 77 bp, Homo sapiens
tatcactgaaaagagtatcaatataaattaacatactttagtaattcaaggatggcaagcacaatatcattaacgta

SEQ ID NO: 155601 - DNA, 75 bp, Homo sapiens
aagagtatcaatataaattaacatactttagtaattcaaggatggcaagcacaatatcattaacgtaacagaatc

SEQ ID NO: 155602 - DNA, 78 bp, Homo sapiens
atataaattaacatactttagtaattcaaggatggcaagcacaatatcattaacgtaacagaatcctgatgcttctga

SEQ ID NO: 155603 - DNA, 77 bp, Homo sapiens
attaacatactttagtaattcaaggatggcaagcacaatatcattaacgtaacagaatcctgatgcttctgatttct

SEQ ID NO: 155604 - DNA, 82 bp, Homo sapiens
tttagtaattcaaggatggcaagcacaatatcattaacgtaacagaatcctgatgcttctgatttcttagcatgatgtaatc

SEQ ID NO: 155605 - DNA, 83 bp, Homo sapiens
gatggcaagcacaatatcattaacgtaacagaatcctgatgcttctgatttcttagcatgatgtaatcctccagcccaattaa

SEQ ID NO: 155606 - DNA, 81 bp, Homo sapiens
acaatatcattaacgtaacagaatcctgatgcttctgatttcttagcatgatgtaatcctccagcccaattaacagccata

SEQ ID NO: 155607 - DNA, 82 bp, Homo sapiens
atcattaacgtaacagaatcctgatgcttctgatttcttagcatgatgtaatcctccagcccaattaacagccatatcagtc

SEQ ID NO: 155608 - DNA, 81 bp, Homo sapiens
gaatcctgatgcttctgatttcttagcatgatgtaatcctccagcccaattaacagccatatcagtctgttgtcggtttaa

SEQ ID NO: 155609 - DNA, 80 bp, Homo sapiens
atgcttctgatttcttagcatgatgtaatcctccagcccaattaacagccatatcagtctgttgtcggtttaacttcaca

SEQ ID NO: 155610 - DNA, 80 bp, Homo sapiens
ttcttagcatgatgtaatcctccagcccaattaacagccatatcagtctgttgtcggtttaacttcacagctccagctaa

SEQ ID NO: 155611 - DNA, 78 bp, Homo sapiens
atgatgtaatcctccagcccaattaacagccatatcagtctgttgtcggtttaacttcacagctccagctaagaagta

SEQ ID NO: 155612 - DNA, 76 bp, Homo sapiens
atcctccagcccaattaacagccatatcagtctgttgtcggtttaacttcacagctccagctaagaagtagaaaca

SEQ ID NO: 155613 - DNA, 75 bp, Homo sapiens
taacagccatatcagtctgttgtcggtttaacttcacagctccagctaagaagtagaaacaagatagacctttta

SEQ ID NO: 155614 - DNA, 72 bp, Homo sapiens
atatcagtctgttgtcggtttaacttcacagctccagctaagaagtagaaacaagatagaccttttaaacat

SEQ ID NO: 155615 - DNA, 73 bp, Homo sapiens
ataacccgaaagataacacaccaagttcagatcaacttttaaatctgattgcattagcacttaccaactgaac

SEQ ID NO: 155616 - DNA, 78 bp, Homo sapiens
ataacacaccaagttcagatcaacttttaaatctgattgcattagcacttaccaactgaaccgccagttgagagctga

SEQ ID NO: 155617 - DNA, 77 bp, Homo sapiens
aagttcagatcaacttttaaatctgattgcattagcacttaccaactgaaccgccagttgagagctgacaaaactca

SEQ ID NO: 155618 - DNA, 77 bp, Homo sapiens
cttttaaatctgattgcattagcacttaccaactgaaccgccagttgagagctgacaaaactcaaagagtccatcaa

SEQ ID NO: 155619 - DNA, 78 bp, Homo sapiens
aaatctgattgcattagcacttaccaactgaaccgccagttgagagctgacaaaactcaaagagtccatcaaacactg

SEQ ID NO: 155620 - DNA, 76 bp, Homo sapiens
attagcacttaccaactgaaccgccagttgagagctgacaaaactcaaagagtccatcaaacactggacaatcttc

SEQ ID NO: 155621 - DNA, 76 bp, Homo sapiens
ttaccaactgaaccgccagttgagagctgacaaaactcaaagagtccatcaaacactggacaatcttctccaacat

SEQ ID NO: 155622 - DNA, 76 bp, Homo sapiens
aaccgccagttgagagctgacaaaactcaaagagtccatcaaacactggacaatcttctccaacattaactgtgga

SEQ ID NO: 155623 - DNA, 77 bp, Homo sapiens
agctgacaaaactcaaagagtccatcaaacactggacaatcttctccaacattaactgtggaagatggatttcatta

SEQ ID NO: 155624 - DNA, 74 bp, Homo sapiens
caaaactcaaagagtccatcaaacactggacaatcttctccaacattaactgtggaagatggatttcattaatt

SEQ ID NO: 155625 - DNA, 78 bp, Homo sapiens
tccatcaaacactggacaatcttctccaacattaactgtggaagatggatttcattaatttcaacacattctgcaaat

SEQ ID NO: 155626 - DNA, 74 bp, Homo sapiens
aatttacatttatcaaagcaaaactactttttacttagaaacgtacatctctgcatctgcttactatactcaga

SEQ ID NO: 155627 - DNA, 77 bp, Homo sapiens
ttatcaaagcaaaactactttttacttagaaacgtacatctctgcatctgcttactatactcagacatgttatctgg

SEQ ID NO: 155628 - DNA, 76 bp, Homo sapiens
aaactactttttacttagaaacgtacatctctgcatctgcttactatactcagacatgttatctggtcttattgac

SEQ ID NO: 155629 - DNA, 77 bp, Homo sapiens
ttttacttagaaacgtacatctctgcatctgcttactatactcagacatgttatctggtcttattgaccgtagaaat

SEQ ID NO: 155630 - DNA, 82 bp, Homo sapiens
tagaaacgtacatctctgcatctgcttactatactcagacatgttatctggtcttattgaccgtagaaatttgatatactca

SEQ ID NO: 155631 - DNA, 84 bp, Homo sapiens
atctctgcatctgcttactatactcagacatgttatctggtcttattgaccgtagaaatttgatatactcatcactgtgatatt

SEQ ID NO: 155632 - DNA, 82 bp, Homo sapiens
tctgcttactatactcagacatgttatctggtcttattgaccgtagaaatttgatatactcatcactgtgatattttgtcat

SEQ ID NO: 155633 - DNA, 79 bp, Homo sapiens
atactcagacatgttatctggtcttattgaccgtagaaatttgatatactcatcactgtgatattttgtcatttcttcg

SEQ ID NO: 155634 - DNA, 78 bp, Homo sapiens
ttatctggtcttattgaccgtagaaatttgatatactcatcactgtgatattttgtcatttcttcggcagtggcttta

SEQ ID NO: 155635 - DNA, 77 bp, Homo sapiens
gtcttattgaccgtagaaatttgatatactcatcactgtgatattttgtcatttcttcggcagtggctttatggggc

SEQ ID NO: 155636 - DNA, 79 bp, Homo sapiens
tagaaatttgatatactcatcactgtgatattttgtcatttcttcggcagtggctttatggggcctctgtgaagagaaa

SEQ ID NO: 155637 - DNA, 81 bp, Homo sapiens
ttgatatactcatcactgtgatattttgtcatttcttcggcagtggctttatggggcctctgtgaagagaaataaatgtca

SEQ ID NO: 155638 - DNA, 77 bp, Homo sapiens
ctgtgatattttgtcatttcttcggcagtggctttatggggcctctgtgaagagaaataaatgtcagaactgtggaa

SEQ ID NO: 155639 - DNA, 74 bp, Homo sapiens
aaataaaaaagatcagtgctgaatatgtattaaaaggaatactcacatatatttccatttttctgtataagcca

SEQ ID NO: 155640 - DNA, 78 bp, Homo sapiens
agatcagtgctgaatatgtattaaaaggaatactcacatatatttccatttttctgtataagccataatttaacagca

SEQ ID NO: 155641 - DNA, 75 bp, Homo sapiens
gtgctgaatatgtattaaaaggaatactcacatatatttccatttttctgtataagccataatttaacagcaagt

SEQ ID NO: 155642 - DNA, 75 bp, Homo sapiens
taaaaggaatactcacatatatttccatttttctgtataagccataatttaacagcaagttatgggtcatgcgga

SEQ ID NO: 155643 - DNA, 78 bp, Homo sapiens
gaatactcacatatatttccatttttctgtataagccataatttaacagcaagttatgggtcatgcggattctatgag

SEQ ID NO: 155644 - DNA, 78 bp, Homo sapiens
atttccatttttctgtataagccataatttaacagcaagttatgggtcatgcggattctatgaggcttcatgggatga

SEQ ID NO: 155645 - DNA, 77 bp, Homo sapiens
atttttctgtataagccataatttaacagcaagttatgggtcatgcggattctatgaggcttcatgggatgaccctg

SEQ ID NO: 155646 - DNA, 78 bp, Homo sapiens
aagccataatttaacagcaagttatgggtcatgcggattctatgaggcttcatgggatgaccctgtccataataataa

SEQ ID NO: 155647 - DNA, 77 bp, Homo sapiens
aatttaacagcaagttatgggtcatgcggattctatgaggcttcatgggatgaccctgtccataataataatttcca

SEQ ID NO: 155648 - DNA, 78 bp, Homo sapiens
ttatgggtcatgcggattctatgaggcttcatgggatgaccctgtccataataataatttccaatatcacctaaaata

SEQ ID NO: 155649 - DNA, 76 bp, Homo sapiens
atgcggattctatgaggcttcatgggatgaccctgtccataataataatttccaatatcacctaaaatagaaaaga

SEQ ID NO: 155650 - DNA, 75 bp, Homo sapiens
tctatgaggcttcatgggatgaccctgtccataataataatttccaatatcacctaaaatagaaaagacacaaac

SEQ ID NO: 155651 - DNA, 72 bp, Homo sapiens
cttcatgggatgaccctgtccataataataatttccaatatcacctaaaatagaaaagacacaaactaaaca

SEQ ID NO: 155652 - DNA, 78 bp, Homo sapiens
aggagctagattcaaactctggcagggcagctcacagctaatgttcttaagtaataacaacagggaatgtcaaggaca

SEQ ID NO: 155653 - DNA, 77 bp, Homo sapiens
ttcaaactctggcagggcagctcacagctaatgttcttaagtaataacaacagggaatgtcaaggacacttacagat

SEQ ID NO: 155654 - DNA, 78 bp, Homo sapiens
gcagggcagctcacagctaatgttcttaagtaataacaacagggaatgtcaaggacacttacagattcactagaaatg

SEQ ID NO: 155655 - DNA, 77 bp, Homo sapiens
tcacagctaatgttcttaagtaataacaacagggaatgtcaaggacacttacagattcactagaaatggcagggtga

SEQ ID NO: 155656 - DNA, 73 bp, Homo sapiens
ctaatgttcttaagtaataacaacagggaatgtcaaggacacttacagattcactagaaatggcagggtgaag

SEQ ID NO: 155657 - DNA, 73 bp, Homo sapiens
ttaagtaataacaacagggaatgtcaaggacacttacagattcactagaaatggcagggtgaaggctgaaaaa

SEQ ID NO: 155658 - DNA, 74 bp, Homo sapiens
agggaatgtcaaggacacttacagattcactagaaatggcagggtgaaggctgaaaaaaagacataatatgaaa

SEQ ID NO: 155659 - DNA, 75 bp, Homo sapiens
atgtcaaggacacttacagattcactagaaatggcagggtgaaggctgaaaaaaagacataatatgaaatataaa

SEQ ID NO: 155660 - DNA, 73 bp, Homo sapiens
cacttacagattcactagaaatggcagggtgaaggctgaaaaaaagacataatatgaaatataaatattttaa

SEQ ID NO: 155661 - DNA, 66 bp, Homo sapiens
ggggacgggtcgagggggtaggaggccgacgcggggcaccccaaacctgcgttgccacgaatggtg

SEQ ID NO: 155662 - DNA, 68 bp, Homo sapiens
gtcgagggggtaggaggccgacgcggggcaccccaaacctgcgttgccacgaatggtgggcgggagaa

SEQ ID NO: 155663 - DNA, 69 bp, Homo sapiens
ccgacgcggggcaccccaaacctgcgttgccacgaatggtgggcgggagaagggagagaatgggccgcc

SEQ ID NO: 155664 - DNA, 70 bp, Homo sapiens
ccaaacctgcgttgccacgaatggtgggcgggagaagggagagaatgggccgcccccttcgccgccgcca

SEQ ID NO: 155665 - DNA, 71 bp, Homo sapiens
ctgcgttgccacgaatggtgggcgggagaagggagagaatgggccgcccccttcgccgccgccaccaccaa

SEQ ID NO: 155666 - DNA, 67 bp, Homo sapiens
acgaatggtgggcgggagaagggagagaatgggccgcccccttcgccgccgccaccaccaaggcggg

SEQ ID NO: 155667 - DNA, 67 bp, Homo sapiens
ggagaagggagagaatgggccgcccccttcgccgccgccaccaccaaggcggggtaggccggcgccg

SEQ ID NO: 155668 - DNA, 66 bp, Homo sapiens
agggagagaatgggccgcccccttcgccgccgccaccaccaaggcggggtaggccggcgccgtccc

SEQ ID NO: 155669 - DNA, 66 bp, Homo sapiens
cgcccccttcgccgccgccaccaccaaggcggggtaggccggcgccgtccccagcggcggccacct

SEQ ID NO: 155670 - DNA, 70 bp, Homo sapiens
gccgccgccaccaccaaggcggggtaggccggcgccgtccccagcggcggccaccttcgaggctgcggac

SEQ ID NO: 155671 - DNA, 70 bp, Homo sapiens
accaccaaggcggggtaggccggcgccgtccccagcggcggccaccttcgaggctgcggactgcacggcc

SEQ ID NO: 155672 - DNA, 69 bp, Homo sapiens
aaggcggggtaggccggcgccgtccccagcggcggccaccttcgaggctgcggactgcacggccgaagg

SEQ ID NO: 155673 - DNA, 72 bp, Homo sapiens
aggccggcgccgtccccagcggcggccaccttcgaggctgcggactgcacggccgaagggggagaggcagga

SEQ ID NO: 155674 - DNA, 72 bp, Homo sapiens
cccagcggcggccaccttcgaggctgcggactgcacggccgaagggggagaggcaggagacaagacgggcgg

SEQ ID NO: 155675 - DNA, 71 bp, Homo sapiens
ggcggccaccttcgaggctgcggactgcacggccgaagggggagaggcaggagacaagacgggcgggcccc

SEQ ID NO: 155676 - DNA, 72 bp, Homo sapiens
ttcgaggctgcggactgcacggccgaagggggagaggcaggagacaagacgggcgggccccctgattcccgc

SEQ ID NO: 155677 - DNA, 69 bp, Homo sapiens
actgcacggccgaagggggagaggcaggagacaagacgggcgggccccctgattcccgcccgcaggaac

SEQ ID NO: 155678 - DNA, 66 bp, Homo sapiens
ccgaagggggagaggcaggagacaagacgggcgggccccctgattcccgcccgcaggaaccgcggg

SEQ ID NO: 155679 - DNA, 70 bp, Homo sapiens
aggcaggagacaagacgggcgggccccctgattcccgcccgcaggaaccgcgggggctgcgccaggaaga

SEQ ID NO: 155680 - DNA, 68 bp, Homo sapiens
agacaagacgggcgggccccctgattcccgcccgcaggaaccgcgggggctgcgccaggaagagggtc

SEQ ID NO: 155681 - DNA, 70 bp, Homo sapiens
ctgattcccgcccgcaggaaccgcgggggctgcgccaggaagagggtctcgttctaactgtgccgggccg

SEQ ID NO: 155682 - DNA, 68 bp, Homo sapiens
ccaggaagagggtctcgttctaactgtgccgggccgggaacgggttaagatgcggccaaatgtcggtc

SEQ ID NO: 155683 - DNA, 67 bp, Homo sapiens
aagagggtctcgttctaactgtgccgggccgggaacgggttaagatgcggccaaatgtcggtccctc

SEQ ID NO: 155684 - DNA, 67 bp, Homo sapiens
cccgcgcgcccaccccgacaccggcccggccgctcaccgtcgtagtagtagcagactttttttttgc

SEQ ID NO: 155685 - DNA, 67 bp, Homo sapiens
accccgacaccggcccggccgctcaccgtcgtagtagtagcagactttttttttgccgcctccttga

SEQ ID NO: 155686 - DNA, 69 bp, Homo sapiens
accggcccggccgctcaccgtcgtagtagtagcagactttttttttgccgcctccttgactgtacgcca

SEQ ID NO: 155687 - DNA, 71 bp, Homo sapiens
cggccgctcaccgtcgtagtagtagcagactttttttttgccgcctccttgactgtacgccatgggctccc

SEQ ID NO: 155688 - DNA, 69 bp, Homo sapiens
ccgtcgtagtagtagcagactttttttttgccgcctccttgactgtacgccatgggctccccggccacc

SEQ ID NO: 155689 - DNA, 69 bp, Homo sapiens
cagactttttttttgccgcctccttgactgtacgccatgggctccccggccaccgccgccaccgggctc

SEQ ID NO: 155690 - DNA, 73 bp, Homo sapiens
tttttgccgcctccttgactgtacgccatgggctccccggccaccgccgccaccgggctcctcctcctgctgc

SEQ ID NO: 155691 - DNA, 71 bp, Homo sapiens
ctgctgctgccgccgcggctcggccgggagagaaaagggctgagggaaacgtgggggcgatagtcccgcgg

SEQ ID NO: 155692 - DNA, 68 bp, Homo sapiens
tgccgccgcggctcggccgggagagaaaagggctgagggaaacgtgggggcgatagtcccgcggggaa

SEQ ID NO: 155693 - DNA, 66 bp, Homo sapiens
cggctcggccgggagagaaaagggctgagggaaacgtgggggcgatagtcccgcggggaagggcag

SEQ ID NO: 155694 - DNA, 66 bp, Homo sapiens
agaaaagggctgagggaaacgtgggggcgatagtcccgcggggaagggcaggccggtgggaggaga

SEQ ID NO: 155695 - DNA, 66 bp, Homo sapiens
agggctgagggaaacgtgggggcgatagtcccgcggggaagggcaggccggtgggaggagaggagg

SEQ ID NO: 155696 - DNA, 64 bp, Homo sapiens
aaacgtgggggcgatagtcccgcggggaagggcaggccggtgggaggagaggagggggcgccgg

SEQ ID NO: 155697 - DNA, 66 bp, Homo sapiens
atagtcccgcggggaagggcaggccggtgggaggagaggagggggcgccgggaaggctcggtacca

SEQ ID NO: 155698 - DNA, 66 bp, Homo sapiens
gggaagggcaggccggtgggaggagaggagggggcgccgggaaggctcggtaccacccggcagagg

SEQ ID NO: 155699 - DNA, 67 bp, Homo sapiens
aggccggtgggaggagaggagggggcgccgggaaggctcggtaccacccggcagaggtgccgaaagc

SEQ ID NO: 155700 - DNA, 68 bp, Homo sapiens
aggagaggagggggcgccgggaaggctcggtaccacccggcagaggtgccgaaagctcggaatcggag

SEQ ID NO: 155701 - DNA, 71 bp, Homo sapiens
ggggcgccgggaaggctcggtaccacccggcagaggtgccgaaagctcggaatcggaggtggcagcggcac

SEQ ID NO: 155702 - DNA, 74 bp, Homo sapiens
gaaggctcggtaccacccggcagaggtgccgaaagctcggaatcggaggtggcagcggcaccaactcgcgagga

SEQ ID NO: 155703 - DNA, 72 bp, Homo sapiens
ctcggtaccacccggcagaggtgccgaaagctcggaatcggaggtggcagcggcaccaactcgcgaggaggg

SEQ ID NO: 155704 - DNA, 72 bp, Homo sapiens
cagaggtgccgaaagctcggaatcggaggtggcagcggcaccaactcgcgaggagggggccaccaaaccacc

SEQ ID NO: 155705 - DNA, 73 bp, Homo sapiens
gtgccgaaagctcggaatcggaggtggcagcggcaccaactcgcgaggagggggccaccaaaccacctcagga

SEQ ID NO: 155706 - DNA, 73 bp, Homo sapiens
tcggaatcggaggtggcagcggcaccaactcgcgaggagggggccaccaaaccacctcaggaggccgcaggga

SEQ ID NO: 155707 - DNA, 75 bp, Homo sapiens
aggtggcagcggcaccaactcgcgaggagggggccaccaaaccacctcaggaggccgcagggaggtgagcgcatc

SEQ ID NO: 155708 - DNA, 74 bp, Homo sapiens
accaactcgcgaggagggggccaccaaaccacctcaggaggccgcagggaggtgagcgcatccactgcggcctc

SEQ ID NO: 155709 - DNA, 74 bp, Homo sapiens
tcgcgaggagggggccaccaaaccacctcaggaggccgcagggaggtgagcgcatccactgcggcctccacggg

SEQ ID NO: 155710 - DNA, 72 bp, Homo sapiens
gggccaccaaaccacctcaggaggccgcagggaggtgagcgcatccactgcggcctccacgggggaggaagg

SEQ ID NO: 155711 - DNA, 74 bp, Homo sapiens
tgtccaaagctctttgtttgatggcatctctgtttacagagtttacactttaatatcaacctgtttcctcctcc

SEQ ID NO: 155712 - DNA, 76 bp, Homo sapiens
tcctcctcctccgtgacctcctcctcctctttctcctgagaaacttcgccccagcggtgcggagcgccgctgcgca

SEQ ID NO: 155713 - DNA, 75 bp, Homo sapiens
tcctccgtgacctcctcctcctctttctcctgagaaacttcgccccagcggtgcggagcgccgctgcgcagccgg

SEQ ID NO: 155714 - DNA, 76 bp, Homo sapiens
ctcctcctctttctcctgagaaacttcgccccagcggtgcggagcgccgctgcgcagccggggagggacgcaggca

SEQ ID NO: 155715 - DNA, 75 bp, Homo sapiens
tttctcctgagaaacttcgccccagcggtgcggagcgccgctgcgcagccggggagggacgcaggcaggcggcgg

SEQ ID NO: 155716 - DNA, 77 bp, Homo sapiens
tgagaaacttcgccccagcggtgcggagcgccgctgcgcagccggggagggacgcaggcaggcggcgggcagcggga

SEQ ID NO: 155717 - DNA, 76 bp, Homo sapiens
cccagcggtgcggagcgccgctgcgcagccggggagggacgcaggcaggcggcgggcagcgggaggcggcagcccg

SEQ ID NO: 155718 - DNA, 77 bp, Homo sapiens
gtgcggagcgccgctgcgcagccggggagggacgcaggcaggcggcgggcagcgggaggcggcagcccggtgcggtc

SEQ ID NO: 155719 - DNA, 75 bp, Homo sapiens
tgcgcagccggggagggacgcaggcaggcggcgggcagcgggaggcggcagcccggtgcggtccccgcggctctc

SEQ ID NO: 155720 - DNA, 73 bp, Homo sapiens
gggagggacgcaggcaggcggcgggcagcgggaggcggcagcccggtgcggtccccgcggctctcggcggagc

SEQ ID NO: 155721 - DNA, 73 bp, Homo sapiens
ggacgcaggcaggcggcgggcagcgggaggcggcagcccggtgcggtccccgcggctctcggcggagccccgc

SEQ ID NO: 155722 - DNA, 70 bp, Homo sapiens
aggcggcgggcagcgggaggcggcagcccggtgcggtccccgcggctctcggcggagccccgcgcccgcc

SEQ ID NO: 155723 - DNA, 72 bp, Homo sapiens
ggaggcggcagcccggtgcggtccccgcggctctcggcggagccccgcgcccgccgcgccatggcccgaaga

SEQ ID NO: 155724 - DNA, 70 bp, Homo sapiens
cggcagcccggtgcggtccccgcggctctcggcggagccccgcgcccgccgcgccatggcccgaagaccc

SEQ ID NO: 155725 - DNA, 71 bp, Homo sapiens
tgcggtccccgcggctctcggcggagccccgcgcccgccgcgccatggcccgaagaccccggcacaggtaa

SEQ ID NO: 155726 - DNA, 68 bp, Homo sapiens
ctctcggcggagccccgcgcccgccgcgccatggcccgaagaccccggcacaggtaacggggagccgg

SEQ ID NO: 155727 - DNA, 67 bp, Homo sapiens
ggcggagccccgcgcccgccgcgccatggcccgaagaccccggcacaggtaacggggagccgggcgg

SEQ ID NO: 155728 - DNA, 66 bp, Homo sapiens
cccgccgcgccatggcccgaagaccccggcacaggtaacggggagccgggcgggcggccgagggcg

SEQ ID NO: 155729 - DNA, 70 bp, Homo sapiens
ttgtgtaagttttgtaatccagtagtagtctaaatcctcttgtttcagcccacgtctacccattcttatt

SEQ ID NO: 155730 - DNA, 78 bp, Homo sapiens
tttgtaatccagtagtagtctaaatcctcttgtttcagcccacgtctacccattcttatttctgcagcatatatagca

SEQ ID NO: 155731 - DNA, 82 bp, Homo sapiens
tagtagtctaaatcctcttgtttcagcccacgtctacccattcttatttctgcagcatatatagcagtgacgaggatgatga

SEQ ID NO: 155732 - DNA, 80 bp, Homo sapiens
taaatcctcttgtttcagcccacgtctacccattcttatttctgcagcatatatagcagtgacgaggatgatgaggactt

SEQ ID NO: 155733 - DNA, 86 bp, Homo sapiens
tttcagcccacgtctacccattcttatttctgcagcatatatagcagtgacgaggatgatgaggactttgagatgtgtgaccatga

SEQ ID NO: 155734 - DNA, 86 bp, Homo sapiens
acgtctacccattcttatttctgcagcatatatagcagtgacgaggatgatgaggactttgagatgtgtgaccatgactatgatgg

SEQ ID NO: 155735 - DNA, 88 bp, Homo sapiens
attcttatttctgcagcatatatagcagtgacgaggatgatgaggactttgagatgtgtgaccatgactatgatgggctgcttcccaa

SEQ ID NO: 155736 - DNA, 86 bp, Homo sapiens
agcatatatagcagtgacgaggatgatgaggactttgagatgtgtgaccatgactatgatgggctgcttcccaagtctggaaagcg

SEQ ID NO: 155737 - DNA, 85 bp, Homo sapiens
tatagcagtgacgaggatgatgaggactttgagatgtgtgaccatgactatgatgggctgcttcccaagtctggaaagcgtcact

SEQ ID NO: 155738 - DNA, 80 bp, Homo sapiens
aggatgatgaggactttgagatgtgtgaccatgactatgatgggctgcttcccaagtctggaaagcgtcacttggggaaa

SEQ ID NO: 155739 - DNA, 78 bp, Homo sapiens
atgaggactttgagatgtgtgaccatgactatgatgggctgcttcccaagtctggaaagcgtcacttggggaaaacaa

SEQ ID NO: 155740 - DNA, 75 bp, Homo sapiens
agatgtgtgaccatgactatgatgggctgcttcccaagtctggaaagcgtcacttggggaaaacaaggtggaccc

SEQ ID NO: 155741 - DNA, 71 bp, Homo sapiens
atgactatgatgggctgcttcccaagtctggaaagcgtcacttggggaaaacaaggtggacccgggaagag

SEQ ID NO: 155742 - DNA, 69 bp, Homo sapiens
atgatgggctgcttcccaagtctggaaagcgtcacttggggaaaacaaggtggacccgggaagaggtaa

SEQ ID NO: 155743 - DNA, 66 bp, Homo sapiens
ccaagtctggaaagcgtcacttggggaaaacaaggtggacccgggaagaggtaactaatcatttta

SEQ ID NO: 155744 - DNA, 68 bp, Homo sapiens
aaagcgtcacttggggaaaacaaggtggacccgggaagaggtaactaatcattttatcaagacgcaga

SEQ ID NO: 155745 - DNA, 71 bp, Homo sapiens
ctttaacttgaacagagttatatagtaaataactgatatcctaggattacctttaaatgtcttaggatgaa

SEQ ID NO: 155746 - DNA, 72 bp, Homo sapiens
cagagttatatagtaaataactgatatcctaggattacctttaaatgtcttaggatgaaaaactgaagaagc

SEQ ID NO: 155747 - DNA, 72 bp, Homo sapiens
gtaaataactgatatcctaggattacctttaaatgtcttaggatgaaaaactgaagaagctggtggaacaga

SEQ ID NO: 155748 - DNA, 72 bp, Homo sapiens
aactgatatcctaggattacctttaaatgtcttaggatgaaaaactgaagaagctggtggaacagaatggaa

SEQ ID NO: 155749 - DNA, 72 bp, Homo sapiens
attacctttaaatgtcttaggatgaaaaactgaagaagctggtggaacagaatggaacagatgactggaaag

SEQ ID NO: 155750 - DNA, 75 bp, Homo sapiens
aatgtcttaggatgaaaaactgaagaagctggtggaacagaatggaacagatgactggaaagttattgccaatta

SEQ ID NO: 155751 - DNA, 75 bp, Homo sapiens
ttaggatgaaaaactgaagaagctggtggaacagaatggaacagatgactggaaagttattgccaattatctccc

SEQ ID NO: 155752 - DNA, 74 bp, Homo sapiens
tgaagaagctggtggaacagaatggaacagatgactggaaagttattgccaattatctcccggtaagttagtaa

SEQ ID NO: 155753 - DNA, 70 bp, Homo sapiens
tggtggaacagaatggaacagatgactggaaagttattgccaattatctcccggtaagttagtaagtttt

SEQ ID NO: 155754 - DNA, 69 bp, Homo sapiens
aacagaatggaacagatgactggaaagttattgccaattatctcccggtaagttagtaagtttttctta

SEQ ID NO: 155755 - DNA, 68 bp, Homo sapiens
cagatgactggaaagttattgccaattatctcccggtaagttagtaagtttttcttataacgaaagga

SEQ ID NO: 155756 - DNA, 65 bp, Homo sapiens
agttattgccaattatctcccggtaagttagtaagtttttcttataacgaaaggaaagcttctcc

SEQ ID NO: 155757 - DNA, 85 bp, Homo sapiens
attcacgtgcttatcacatcatatctttatggtggtgcatactttatttgtctagaatcgaacagatgtgcagtgccagcaccga

SEQ ID NO: 155758 - DNA, 86 bp, Homo sapiens
tatcacatcatatctttatggtggtgcatactttatttgtctagaatcgaacagatgtgcagtgccagcaccgatggcagaaagta

SEQ ID NO: 155759 - DNA, 81 bp, Homo sapiens
tatctttatggtggtgcatactttatttgtctagaatcgaacagatgtgcagtgccagcaccgatggcagaaagtactaaa

SEQ ID NO: 155760 - DNA, 83 bp, Homo sapiens
tgcatactttatttgtctagaatcgaacagatgtgcagtgccagcaccgatggcagaaagtactaaaccctgagctcatcaag

SEQ ID NO: 155761 - DNA, 79 bp, Homo sapiens
actttatttgtctagaatcgaacagatgtgcagtgccagcaccgatggcagaaagtactaaaccctgagctcatcaagg

SEQ ID NO: 155762 - DNA, 78 bp, Homo sapiens
aatcgaacagatgtgcagtgccagcaccgatggcagaaagtactaaaccctgagctcatcaagggtccttggaccaaa

SEQ ID NO: 155763 - DNA, 79 bp, Homo sapiens
atgtgcagtgccagcaccgatggcagaaagtactaaaccctgagctcatcaagggtccttggaccaaagaagaagatca

SEQ ID NO: 155764 - DNA, 77 bp, Homo sapiens
agtgccagcaccgatggcagaaagtactaaaccctgagctcatcaagggtccttggaccaaagaagaagatcagaga

SEQ ID NO: 155765 - DNA, 73 bp, Homo sapiens
tggcagaaagtactaaaccctgagctcatcaagggtccttggaccaaagaagaagatcagagagtaagttctt

SEQ ID NO: 155766 - DNA, 70 bp, Homo sapiens
aaagtactaaaccctgagctcatcaagggtccttggaccaaagaagaagatcagagagtaagttctttct

SEQ ID NO: 155767 - DNA, 78 bp, Homo sapiens
tgagctcatcaagggtccttggaccaaagaagaagatcagagagtaagttctttcttcattggtgtgtgactcataat

SEQ ID NO: 155768 - DNA, 74 bp, Homo sapiens
atcaagggtccttggaccaaagaagaagatcagagagtaagttctttcttcattggtgtgtgactcataattaa

SEQ ID NO: 155769 - DNA, 71 bp, Homo sapiens
ttacataactttaaaacataggttatttttgtgtgtttatctgaaggtgatagagcttgtacagaaatacg

SEQ ID NO: 155770 - DNA, 70 bp, Homo sapiens
ttaaaacataggttatttttgtgtgtttatctgaaggtgatagagcttgtacagaaatacggtccgaaac

SEQ ID NO: 155771 - DNA, 70 bp, Homo sapiens
ataggttatttttgtgtgtttatctgaaggtgatagagcttgtacagaaatacggtccgaaacgttggtc

SEQ ID NO: 155772 - DNA, 73 bp, Homo sapiens
ttttgtgtgtttatctgaaggtgatagagcttgtacagaaatacggtccgaaacgttggtctgttattgccaa

SEQ ID NO: 155773 - DNA, 73 bp, Homo sapiens
tttatctgaaggtgatagagcttgtacagaaatacggtccgaaacgttggtctgttattgccaagcacttaaa

SEQ ID NO: 155774 - DNA, 70 bp, Homo sapiens
atagagcttgtacagaaatacggtccgaaacgttggtctgttattgccaagcacttaaaggggagaattg

SEQ ID NO: 155775 - DNA, 68 bp, Homo sapiens
ttgtacagaaatacggtccgaaacgttggtctgttattgccaagcacttaaaggggagaattggaaaa

SEQ ID NO: 155776 - DNA, 67 bp, Homo sapiens
aatacggtccgaaacgttggtctgttattgccaagcacttaaaggggagaattggaaaacaatgtag

SEQ ID NO: 155777 - DNA, 70 bp, Homo sapiens
aaacgttggtctgttattgccaagcacttaaaggggagaattggaaaacaatgtagggagaggtggcata

SEQ ID NO: 155778 - DNA, 73 bp, Homo sapiens
tctgttattgccaagcacttaaaggggagaattggaaaacaatgtagggagaggtggcataaccacttgaatc

SEQ ID NO: 155779 - DNA, 70 bp, Homo sapiens
aagcacttaaaggggagaattggaaaacaatgtagggagaggtggcataaccacttgaatccagaagtta

SEQ ID NO: 155780 - DNA, 70 bp, Homo sapiens
ggagaattggaaaacaatgtagggagaggtggcataaccacttgaatccagaagttaagaaaacctcctg

SEQ ID NO: 155781 - DNA, 70 bp, Homo sapiens
aaaacaatgtagggagaggtggcataaccacttgaatccagaagttaagaaaacctcctggacagaagag

SEQ ID NO: 155782 - DNA, 72 bp, Homo sapiens
aatgtagggagaggtggcataaccacttgaatccagaagttaagaaaacctcctggacagaagaggaagaca

SEQ ID NO: 155783 - DNA, 71 bp, Homo sapiens
aggtggcataaccacttgaatccagaagttaagaaaacctcctggacagaagaggaagacagaattattta

SEQ ID NO: 155784 - DNA, 72 bp, Homo sapiens
acttgaatccagaagttaagaaaacctcctggacagaagaggaagacagaattatttaccaggcacacaaga

SEQ ID NO: 155785 - DNA, 72 bp, Homo sapiens
atccagaagttaagaaaacctcctggacagaagaggaagacagaattatttaccaggcacacaagagactgg

SEQ ID NO: 155786 - DNA, 73 bp, Homo sapiens
taagaaaacctcctggacagaagaggaagacagaattatttaccaggcacacaagagactggggaacagatgg

SEQ ID NO: 155787 - DNA, 78 bp, Homo sapiens
tggacagaagaggaagacagaattatttaccaggcacacaagagactggggaacagatgggcagaaatcgcaaagcta

SEQ ID NO: 155788 - DNA, 76 bp, Homo sapiens
ttatttaccaggcacacaagagactggggaacagatgggcagaaatcgcaaagctactgcctggacggtaataata

SEQ ID NO: 155789 - DNA, 76 bp, Homo sapiens
aggcacacaagagactggggaacagatgggcagaaatcgcaaagctactgcctggacggtaataatatgtcaaaaa

SEQ ID NO: 155790 - DNA, 74 bp, Homo sapiens
aagagactggggaacagatgggcagaaatcgcaaagctactgcctggacggtaataatatgtcaaaaaatatat

SEQ ID NO: 155791 - DNA, 75 bp, Homo sapiens
aacagatgggcagaaatcgcaaagctactgcctggacggtaataatatgtcaaaaaatatattgatcgggaagaa

SEQ ID NO: 155792 - DNA, 79 bp, Homo sapiens
ctgaattgaaatttttgtttgtgaaatttgtgtgatatatttctgtgcagaactgataatgctatcaagaaccactgga

SEQ ID NO: 155793 - DNA, 80 bp, Homo sapiens
ttttgtttgtgaaatttgtgtgatatatttctgtgcagaactgataatgctatcaagaaccactggaattctacaatgcg

SEQ ID NO: 155794 - DNA, 79 bp, Homo sapiens
aaatttgtgtgatatatttctgtgcagaactgataatgctatcaagaaccactggaattctacaatgcgtcggaaggtc

SEQ ID NO: 155795 - DNA, 78 bp, Homo sapiens
atatatttctgtgcagaactgataatgctatcaagaaccactggaattctacaatgcgtcggaaggtcgaacaggaag

SEQ ID NO: 155796 - DNA, 77 bp, Homo sapiens
tttctgtgcagaactgataatgctatcaagaaccactggaattctacaatgcgtcggaaggtcgaacaggaaggtta

SEQ ID NO: 155797 - DNA, 76 bp, Homo sapiens
aactgataatgctatcaagaaccactggaattctacaatgcgtcggaaggtcgaacaggaaggttatctgcaggag

SEQ ID NO: 155798 - DNA, 74 bp, Homo sapiens
ctatcaagaaccactggaattctacaatgcgtcggaaggtcgaacaggaaggttatctgcaggagtcttcaaaa

SEQ ID NO: 155799 - DNA, 74 bp, Homo sapiens
aaccactggaattctacaatgcgtcggaaggtcgaacaggaaggttatctgcaggagtcttcaaaagccagcca

SEQ ID NO: 155800 - DNA, 78 bp, Homo sapiens
attctacaatgcgtcggaaggtcgaacaggaaggttatctgcaggagtcttcaaaagccagccagccagcagtggcca

SEQ ID NO: 155801 - DNA, 78 bp, Homo sapiens
tcggaaggtcgaacaggaaggttatctgcaggagtcttcaaaagccagccagccagcagtggccacaagcttccagaa

SEQ ID NO: 155802 - DNA, 78 bp, Homo sapiens
aacaggaaggttatctgcaggagtcttcaaaagccagccagccagcagtggccacaagcttccagaagaacagtcatt

SEQ ID NO: 155803 - DNA, 79 bp, Homo sapiens
gttatctgcaggagtcttcaaaagccagccagccagcagtggccacaagcttccagaagaacagtcatttgatgggttt

SEQ ID NO: 155804 - DNA, 79 bp, Homo sapiens
agtcttcaaaagccagccagccagcagtggccacaagcttccagaagaacagtcatttgatgggttttgctcaggctcc

SEQ ID NO: 155805 - DNA, 79 bp, Homo sapiens
aaaagccagccagccagcagtggccacaagcttccagaagaacagtcatttgatgggttttgctcaggctccgcctaca

SEQ ID NO: 155806 - DNA, 79 bp, Homo sapiens
agccagcagtggccacaagcttccagaagaacagtcatttgatgggttttgctcaggctccgcctacagctcaactccc

SEQ ID NO: 155807 - DNA, 78 bp, Homo sapiens
agtggccacaagcttccagaagaacagtcatttgatgggttttgctcaggctccgcctacagctcaactccctgccac

SEQ ID NO: 155808 - DNA, 79 bp, Homo sapiens
tccagaagaacagtcatttgatgggttttgctcaggctccgcctacagctcaactccctgccactggccagcccactgt

SEQ ID NO: 155809 - DNA, 77 bp, Homo sapiens
aacagtcatttgatgggttttgctcaggctccgcctacagctcaactccctgccactggccagcccactgttaacaa

SEQ ID NO: 155810 - DNA, 76 bp, Homo sapiens
tttgatgggttttgctcaggctccgcctacagctcaactccctgccactggccagcccactgttaacaacgactat

SEQ ID NO: 155811 - DNA, 76 bp, Homo sapiens
tcaggctccgcctacagctcaactccctgccactggccagcccactgttaacaacgactattcctattaccacatt

SEQ ID NO: 155812 - DNA, 76 bp, Homo sapiens
tccgcctacagctcaactccctgccactggccagcccactgttaacaacgactattcctattaccacatttctgaa

SEQ ID NO: 155813 - DNA, 74 bp, Homo sapiens
aactccctgccactggccagcccactgttaacaacgactattcctattaccacatttctgaagcacaaaatgta

SEQ ID NO: 155814 - DNA, 75 bp, Homo sapiens
cactggccagcccactgttaacaacgactattcctattaccacatttctgaagcacaaaatgtaagccattcctg

SEQ ID NO: 155815 - DNA, 75 bp, Homo sapiens
agcccactgttaacaacgactattcctattaccacatttctgaagcacaaaatgtaagccattcctgtgaatcta

SEQ ID NO: 155816 - DNA, 76 bp, Homo sapiens
taacaacgactattcctattaccacatttctgaagcacaaaatgtaagccattcctgtgaatctagtttaatgaga

SEQ ID NO: 155817 - DNA, 78 bp, Homo sapiens
cctgaagcatatgtagccctgaatgacgtggcctttgttttgtcttttgcatctaggtctccagtcatgttccatacc

SEQ ID NO: 155818 - DNA, 78 bp, Homo sapiens
agcatatgtagccctgaatgacgtggcctttgttttgtcttttgcatctaggtctccagtcatgttccataccctgta

SEQ ID NO: 155819 - DNA, 77 bp, Homo sapiens
tgaatgacgtggcctttgttttgtcttttgcatctaggtctccagtcatgttccataccctgtagcgttacatgtaa

SEQ ID NO: 155820 - DNA, 76 bp, Homo sapiens
gcctttgttttgtcttttgcatctaggtctccagtcatgttccataccctgtagcgttacatgtaaatatagtcaa

SEQ ID NO: 155821 - DNA, 78 bp, Homo sapiens
ttttgtcttttgcatctaggtctccagtcatgttccataccctgtagcgttacatgtaaatatagtcaatgtccctca

SEQ ID NO: 155822 - DNA, 83 bp, Homo sapiens
tttgcatctaggtctccagtcatgttccataccctgtagcgttacatgtaaatatagtcaatgtccctcagccagctgccgca

SEQ ID NO: 155823 - DNA, 82 bp, Homo sapiens
tccagtcatgttccataccctgtagcgttacatgtaaatatagtcaatgtccctcagccagctgccgcagccattcaggtaa

SEQ ID NO: 155824 - DNA, 81 bp, Homo sapiens
atgttccataccctgtagcgttacatgtaaatatagtcaatgtccctcagccagctgccgcagccattcaggtaagatcat

SEQ ID NO: 155825 - DNA, 86 bp, Homo sapiens
tgtagcgttacatgtaaatatagtcaatgtccctcagccagctgccgcagccattcaggtaagatcattgatcattcactgttcaa

SEQ ID NO: 155826 - DNA, 84 bp, Homo sapiens
atgtaaatatagtcaatgtccctcagccagctgccgcagccattcaggtaagatcattgatcattcactgttcaaagcaccact

SEQ ID NO: 155827 - DNA, 83 bp, Homo sapiens
aatatagtcaatgtccctcagccagctgccgcagccattcaggtaagatcattgatcattcactgttcaaagcaccactttta

SEQ ID NO: 155828 - DNA, 74 bp, Homo sapiens
ttccaatcagacctttgtctttatttcccttactttgtaatttcagagacactataatgatgaagaccctgaga

SEQ ID NO: 155829 - DNA, 75 bp, Homo sapiens
taatttcagagacactataatgatgaagaccctgagaaggaaaagcgaataaaggaattagaattgctcctaatg

SEQ ID NO: 155830 - DNA, 73 bp, Homo sapiens
actataatgatgaagaccctgagaaggaaaagcgaataaaggaattagaattgctcctaatgtcaaccgagaa

SEQ ID NO: 155831 - DNA, 73 bp, Homo sapiens
tgaagaccctgagaaggaaaagcgaataaaggaattagaattgctcctaatgtcaaccgagaatgagctaaaa

SEQ ID NO: 155832 - DNA, 71 bp, Homo sapiens
accctgagaaggaaaagcgaataaaggaattagaattgctcctaatgtcaaccgagaatgagctaaaagga

SEQ ID NO: 155833 - DNA, 74 bp, Homo sapiens
aaaagcgaataaaggaattagaattgctcctaatgtcaaccgagaatgagctaaaaggacagcaggtgctacca

SEQ ID NO: 155834 - DNA, 78 bp, Homo sapiens
aaggaattagaattgctcctaatgtcaaccgagaatgagctaaaaggacagcaggtgctaccagtaagactgtcatca

SEQ ID NO: 155835 - DNA, 84 bp, Homo sapiens
tagaattgctcctaatgtcaaccgagaatgagctaaaaggacagcaggtgctaccagtaagactgtcatcatgtgcttgaatga

SEQ ID NO: 155836 - DNA, 81 bp, Homo sapiens
cctaatgtcaaccgagaatgagctaaaaggacagcaggtgctaccagtaagactgtcatcatgtgcttgaatgaggggata

SEQ ID NO: 155837 - DNA, 83 bp, Homo sapiens
agaatgagctaaaaggacagcaggtgctaccagtaagactgtcatcatgtgcttgaatgaggggatagcagctttgcctcagt

SEQ ID NO: 155838 - DNA, 81 bp, Homo sapiens
agctaaaaggacagcaggtgctaccagtaagactgtcatcatgtgcttgaatgaggggatagcagctttgcctcagtttac

SEQ ID NO: 155839 - DNA, 81 bp, Homo sapiens
aggtgctaccagtaagactgtcatcatgtgcttgaatgaggggatagcagctttgcctcagtttacctaagcgctcttctc

SEQ ID NO: 155840 - DNA, 80 bp, Homo sapiens
agtaagactgtcatcatgtgcttgaatgaggggatagcagctttgcctcagtttacctaagcgctcttctcttctaaata

SEQ ID NO: 155841 - DNA, 81 bp, Homo sapiens
tgtcatcatgtgcttgaatgaggggatagcagctttgcctcagtttacctaagcgctcttctcttctaaatattacactta

SEQ ID NO: 155842 - DNA, 78 bp, Homo sapiens
atgtgcttgaatgaggggatagcagctttgcctcagtttacctaagcgctcttctcttctaaatattacacttagcaa

SEQ ID NO: 155843 - DNA, 78 bp, Homo sapiens
gggatagcagctttgcctcagtttacctaagcgctcttctcttctaaatattacacttagcaaggctccatatatcca

SEQ ID NO: 155844 - DNA, 77 bp, Homo sapiens
ctttgcctcagtttacctaagcgctcttctcttctaaatattacacttagcaaggctccatatatccattcagaatg

SEQ ID NO: 155845 - DNA, 78 bp, Homo sapiens
agtttacctaagcgctcttctcttctaaatattacacttagcaaggctccatatatccattcagaatgtctcaacaca

SEQ ID NO: 155846 - DNA, 80 bp, Homo sapiens
taagcgctcttctcttctaaatattacacttagcaaggctccatatatccattcagaatgtctcaacacaagaagttgct

SEQ ID NO: 155847 - DNA, 77 bp, Homo sapiens
cttctaaatattacacttagcaaggctccatatatccattcagaatgtctcaacacaagaagttgcttgtagtaaaa

SEQ ID NO: 155848 - DNA, 77 bp, Homo sapiens
aaatattacacttagcaaggctccatatatccattcagaatgtctcaacacaagaagttgcttgtagtaaaatgtag

SEQ ID NO: 155849 - DNA, 81 bp, Homo sapiens
tagcaaggctccatatatccattcagaatgtctcaacacaagaagttgcttgtagtaaaatgtagttggtatcagattata

SEQ ID NO: 155850 - DNA, 82 bp, Homo sapiens
ctccatatatccattcagaatgtctcaacacaagaagttgcttgtagtaaaatgtagttggtatcagattatatgctgatta

SEQ ID NO: 155851 - DNA, 80 bp, Homo sapiens
tcagaatgtctcaacacaagaagttgcttgtagtaaaatgtagttggtatcagattatatgctgattaaattggaagcag

SEQ ID NO: 155852 - DNA, 78 bp, Homo sapiens
tgtctcaacacaagaagttgcttgtagtaaaatgtagttggtatcagattatatgctgattaaattggaagcagtctt

SEQ ID NO: 155853 - DNA, 77 bp, Homo sapiens
gaagttgcttgtagtaaaatgtagttggtatcagattatatgctgattaaattggaagcagtctttttgtaattgca

SEQ ID NO: 155854 - DNA, 75 bp, Homo sapiens
cttgtagtaaaatgtagttggtatcagattatatgctgattaaattggaagcagtctttttgtaattgcaataaa

SEQ ID NO: 155855 - DNA, 77 bp, Homo sapiens
gtagttggtatcagattatatgctgattaaattggaagcagtctttttgtaattgcaataaaaatgcaatatccact

SEQ ID NO: 155856 - DNA, 80 bp, Homo sapiens
cagattatatgctgattaaattggaagcagtctttttgtaattgcaataaaaatgcaatatccacttatgattgttatca

SEQ ID NO: 155857 - DNA, 77 bp, Homo sapiens
gctgattaaattggaagcagtctttttgtaattgcaataaaaatgcaatatccacttatgattgttatcatcaattt

SEQ ID NO: 155858 - DNA, 74 bp, Homo sapiens
taaattggaagcagtctttttgtaattgcaataaaaatgcaatatccacttatgattgttatcatcaatttttt

SEQ ID NO: 155859 - DNA, 76 bp, Homo sapiens
gcagtctttttgtaattgcaataaaaatgcaatatccacttatgattgttatcatcaatttttttcttcagaagga

SEQ ID NO: 155860 - DNA, 80 bp, Homo sapiens
tcttcataaataacattagctgctctcttttatttgcatgtgtgaaagttatgtgggccattactgaattctgacatctt

SEQ ID NO: 155861 - DNA, 79 bp, Homo sapiens
aaataacattagctgctctcttttatttgcatgtgtgaaagttatgtgggccattactgaattctgacatctttagcga

SEQ ID NO: 155862 - DNA, 79 bp, Homo sapiens
ctctcttttatttgcatgtgtgaaagttatgtgggccattactgaattctgacatctttagcgactgggcagccaactg

SEQ ID NO: 155863 - DNA, 79 bp, Homo sapiens
ttttatttgcatgtgtgaaagttatgtgggccattactgaattctgacatctttagcgactgggcagccaactgggatg

SEQ ID NO: 155864 - DNA, 79 bp, Homo sapiens
tgtgaaagttatgtgggccattactgaattctgacatctttagcgactgggcagccaactgggatggctccttgtgctt

SEQ ID NO: 155865 - DNA, 83 bp, Homo sapiens
tatgtgggccattactgaattctgacatctttagcgactgggcagccaactgggatggctccttgtgctttgcaacatacata

SEQ ID NO: 155866 - DNA, 79 bp, Homo sapiens
attactgaattctgacatctttagcgactgggcagccaactgggatggctccttgtgctttgcaacatacatagttaac

SEQ ID NO: 155867 - DNA, 78 bp, Homo sapiens
attctgacatctttagcgactgggcagccaactgggatggctccttgtgctttgcaacatacatagttaaccaacaaa

SEQ ID NO: 155868 - DNA, 76 bp, Homo sapiens
tttagcgactgggcagccaactgggatggctccttgtgctttgcaacatacatagttaaccaacaaagacaataaa

SEQ ID NO: 155869 - DNA, 76 bp, Homo sapiens
agccaactgggatggctccttgtgctttgcaacatacatagttaaccaacaaagacaataaaagagaagtgatgcc

SEQ ID NO: 155870 - DNA, 76 bp, Homo sapiens
gatggctccttgtgctttgcaacatacatagttaaccaacaaagacaataaaagagaagtgatgcccagtaggtat

SEQ ID NO: 155871 - DNA, 75 bp, Homo sapiens
tccttgtgctttgcaacatacatagttaaccaacaaagacaataaaagagaagtgatgcccagtaggtattccta

SEQ ID NO: 155872 - DNA, 69 bp, Homo sapiens
aacatacatagttaaccaacaaagacaataaaagagaagtgatgcccagtaggtattcctaggggtaaa

SEQ ID NO: 155873 - DNA, 68 bp, Homo sapiens
acatagttaaccaacaaagacaataaaagagaagtgatgcccagtaggtattcctaggggtaaattta

SEQ ID NO: 155874 - DNA, 66 bp, Homo sapiens
ccaacaaagacaataaaagagaagtgatgcccagtaggtattcctaggggtaaatttattttttgt

SEQ ID NO: 155875 - DNA, 71 bp, Homo sapiens
tgtcctctctttatttctacacccttcccccttccttagacacagaaccacacatgcagctaccccgggtg

SEQ ID NO: 155876 - DNA, 73 bp, Homo sapiens
tttatttctacacccttcccccttccttagacacagaaccacacatgcagctaccccgggtggcacagcacca

SEQ ID NO: 155877 - DNA, 75 bp, Homo sapiens
cttcccccttccttagacacagaaccacacatgcagctaccccgggtggcacagcaccaccattgccgaccacac

SEQ ID NO: 155878 - DNA, 80 bp, Homo sapiens
ttccttagacacagaaccacacatgcagctaccccgggtggcacagcaccaccattgccgaccacaccagacctcatgga

SEQ ID NO: 155879 - DNA, 81 bp, Homo sapiens
acagaaccacacatgcagctaccccgggtggcacagcaccaccattgccgaccacaccagacctcatggagacagtgcacc

SEQ ID NO: 155880 - DNA, 79 bp, Homo sapiens
atgcagctaccccgggtggcacagcaccaccattgccgaccacaccagacctcatggagacagtgcacctgtttcctgt

SEQ ID NO: 155881 - DNA, 77 bp, Homo sapiens
cccgggtggcacagcaccaccattgccgaccacaccagacctcatggagacagtgcacctgtttcctgtttgggaga

SEQ ID NO: 155882 - DNA, 78 bp, Homo sapiens
acagcaccaccattgccgaccacaccagacctcatggagacagtgcacctgtttcctgtttgggagaacaccactcca

SEQ ID NO: 155883 - DNA, 76 bp, Homo sapiens
accaccattgccgaccacaccagacctcatggagacagtgcacctgtttcctgtttgggagaacaccactccactc

SEQ ID NO: 155884 - DNA, 79 bp, Homo sapiens
accacaccagacctcatggagacagtgcacctgtttcctgtttgggagaacaccactccactccatctctgccagcgga

SEQ ID NO: 155885 - DNA, 80 bp, Homo sapiens
ctcatggagacagtgcacctgtttcctgtttgggagaacaccactccactccatctctgccagcggatcctggctcccta

SEQ ID NO: 155886 - DNA, 77 bp, Homo sapiens
acagtgcacctgtttcctgtttgggagaacaccactccactccatctctgccagcggatcctggctccctacctgaa

SEQ ID NO: 155887 - DNA, 74 bp, Homo sapiens
acctgtttcctgtttgggagaacaccactccactccatctctgccagcggatcctggctccctacctgaagaaa

SEQ ID NO: 155888 - DNA, 79 bp, Homo sapiens
tgtttgggagaacaccactccactccatctctgccagcggatcctggctccctacctgaagaaagcgcctcgccagcaa

SEQ ID NO: 155889 - DNA, 82 bp, Homo sapiens
accactccactccatctctgccagcggatcctggctccctacctgaagaaagcgcctcgccagcaaggtgcatgatcgtcca

SEQ ID NO: 155890 - DNA, 82 bp, Homo sapiens
ccatctctgccagcggatcctggctccctacctgaagaaagcgcctcgccagcaaggtgcatgatcgtccaccagggcacca

SEQ ID NO: 155891 - DNA, 81 bp, Homo sapiens
cagcggatcctggctccctacctgaagaaagcgcctcgccagcaaggtgcatgatcgtccaccagggcaccattctggata

SEQ ID NO: 155892 - DNA, 80 bp, Homo sapiens
tggctccctacctgaagaaagcgcctcgccagcaaggtgcatgatcgtccaccagggcaccattctggataatgttaaga

SEQ ID NO: 155893 - DNA, 78 bp, Homo sapiens
tacctgaagaaagcgcctcgccagcaaggtgcatgatcgtccaccagggcaccattctggataatgttaagaacctct

SEQ ID NO: 155894 - DNA, 76 bp, Homo sapiens
aaagcgcctcgccagcaaggtgcatgatcgtccaccagggcaccattctggataatgttaagaacctcttagaatt

SEQ ID NO: 155895 - DNA, 75 bp, Homo sapiens
atgatcgtccaccagggcaccattctggataatgttaagaacctcttagaatttgcagaaacactccaatttata

SEQ ID NO: 155896 - DNA, 74 bp, Homo sapiens
accagggcaccattctggataatgttaagaacctcttagaatttgcagaaacactccaatttatagattctgta

SEQ ID NO: 155897 - DNA, 72 bp, Homo sapiens
aatgttaagaacctcttagaatttgcagaaacactccaatttatagattctgtaagtagaattgtgaaggga

SEQ ID NO: 155898 - DNA, 71 bp, Homo sapiens
acctcttagaatttgcagaaacactccaatttatagattctgtaagtagaattgtgaagggaagttaacga

SEQ ID NO: 155899 - DNA, 85 bp, Homo sapiens
taatatgccatctagaaaaggtcttcattttgctttccattgcatgcagatgtagagtgtcgggaggtccctgcagcacatcaga

SEQ ID NO: 155900 - DNA, 82 bp, Homo sapiens
atctagaaaaggtcttcattttgctttccattgcatgcagatgtagagtgtcgggaggtccctgcagcacatcagagggcca

SEQ ID NO: 155901 - DNA, 84 bp, Homo sapiens
aggtcttcattttgctttccattgcatgcagatgtagagtgtcgggaggtccctgcagcacatcagagggccagccttgaggca

SEQ ID NO: 155902 - DNA, 85 bp, Homo sapiens
tttgctttccattgcatgcagatgtagagtgtcgggaggtccctgcagcacatcagagggccagccttgaggcagcccactagac

SEQ ID NO: 155903 - DNA, 85 bp, Homo sapiens
attgcatgcagatgtagagtgtcgggaggtccctgcagcacatcagagggccagccttgaggcagcccactagaccctgctctac

SEQ ID NO: 155904 - DNA, 83 bp, Homo sapiens
tagagtgtcgggaggtccctgcagcacatcagagggccagccttgaggcagcccactagaccctgctctactgcagtataata

SEQ ID NO: 155905 - DNA, 87 bp, Homo sapiens
gaggtccctgcagcacatcagagggccagccttgaggcagcccactagaccctgctctactgcagtataatagagcaactgctcatc

SEQ ID NO: 155906 - DNA, 87 bp, Homo sapiens
cagcacatcagagggccagccttgaggcagcccactagaccctgctctactgcagtataatagagcaactgctcatcttgaagctgt

SEQ ID NO: 155907 - DNA, 85 bp, Homo sapiens
agagggccagccttgaggcagcccactagaccctgctctactgcagtataatagagcaactgctcatcttgaagctgttgctcaa

SEQ ID NO: 155908 - DNA, 84 bp, Homo sapiens
cttgaggcagcccactagaccctgctctactgcagtataatagagcaactgctcatcttgaagctgttgctcaagaagccaaac

SEQ ID NO: 155909 - DNA, 81 bp, Homo sapiens
agcccactagaccctgctctactgcagtataatagagcaactgctcatcttgaagctgttgctcaagaagccaaaccaacg

SEQ ID NO: 155910 - DNA, 80 bp, Homo sapiens
cctgctctactgcagtataatagagcaactgctcatcttgaagctgttgctcaagaagccaaaccaacgggcctagtgtt

SEQ ID NO: 155911 - DNA, 80 bp, Homo sapiens
tctactgcagtataatagagcaactgctcatcttgaagctgttgctcaagaagccaaaccaacgggcctagtgtttgctt

SEQ ID NO: 155912 - DNA, 81 bp, Homo sapiens
tataatagagcaactgctcatcttgaagctgttgctcaagaagccaaaccaacgggcctagtgtttgctttgcgttgagca

SEQ ID NO: 155913 - DNA, 81 bp, Homo sapiens
aactgctcatcttgaagctgttgctcaagaagccaaaccaacgggcctagtgtttgctttgcgttgagcatctctctctca

SEQ ID NO: 155914 - DNA, 81 bp, Homo sapiens
ttgaagctgttgctcaagaagccaaaccaacgggcctagtgtttgctttgcgttgagcatctctctctcagtgctgtttca

SEQ ID NO: 155915 - DNA, 82 bp, Homo sapiens
ttgctcaagaagccaaaccaacgggcctagtgtttgctttgcgttgagcatctctctctcagtgctgtttcaggtgatgatg

SEQ ID NO: 155916 - DNA, 83 bp, Homo sapiens
aaaccaacgggcctagtgtttgctttgcgttgagcatctctctctcagtgctgtttcaggtgatgatggcacacactatctca

SEQ ID NO: 155917 - DNA, 82 bp, Homo sapiens
aacgggcctagtgtttgctttgcgttgagcatctctctctcagtgctgtttcaggtgatgatggcacacactatctcaaagt

SEQ ID NO: 155918 - DNA, 87 bp, Homo sapiens
tctctctcagtgctgtttcaggtgatgatggcacacactatctcaaagttctgtgcctcccacattgtttcaggattcttcatcatg

SEQ ID NO: 155919 - DNA, 79 bp, Homo sapiens
ggtgtgatctcagcagttttgaattctttgaagaagcagatttttcacctagccaacatcacacaggcaaagccctaca

SEQ ID NO: 155920 - DNA, 79 bp, Homo sapiens
atctcagcagttttgaattctttgaagaagcagatttttcacctagccaacatcacacaggcaaagccctacagcttca

SEQ ID NO: 155921 - DNA, 78 bp, Homo sapiens
ttttgaattctttgaagaagcagatttttcacctagccaacatcacacaggcaaagccctacagcttcagcaaagaga

SEQ ID NO: 155922 - DNA, 78 bp, Homo sapiens
agaagcagatttttcacctagccaacatcacacaggcaaagccctacagcttcagcaaagagagggcaatgggactaa

SEQ ID NO: 155923 - DNA, 75 bp, Homo sapiens
agatttttcacctagccaacatcacacaggcaaagccctacagcttcagcaaagagagggcaatgggactaaacc

SEQ ID NO: 155924 - DNA, 78 bp, Homo sapiens
ctagccaacatcacacaggcaaagccctacagcttcagcaaagagagggcaatgggactaaacctgcaggagaaccta

SEQ ID NO: 155925 - DNA, 76 bp, Homo sapiens
atcacacaggcaaagccctacagcttcagcaaagagagggcaatgggactaaacctgcaggagaacctagcccaag

SEQ ID NO: 155926 - DNA, 73 bp, Homo sapiens
agccctacagcttcagcaaagagagggcaatgggactaaacctgcaggagaacctagcccaagggtgaacaaa

SEQ ID NO: 155927 - DNA, 73 bp, Homo sapiens
ttcagcaaagagagggcaatgggactaaacctgcaggagaacctagcccaagggtgaacaaacgtatgttgag

SEQ ID NO: 155928 - DNA, 73 bp, Homo sapiens
agagggcaatgggactaaacctgcaggagaacctagcccaagggtgaacaaacgtatgttgagtgagagttca

SEQ ID NO: 155929 - DNA, 72 bp, Homo sapiens
aatgggactaaacctgcaggagaacctagcccaagggtgaacaaacgtatgttgagtgagagttcacttgac

SEQ ID NO: 155930 - DNA, 72 bp, Homo sapiens
taaacctgcaggagaacctagcccaagggtgaacaaacgtatgttgagtgagagttcacttgacccacccaa

SEQ ID NO: 155931 - DNA, 69 bp, Homo sapiens
agaacctagcccaagggtgaacaaacgtatgttgagtgagagttcacttgacccacccaaggtcttacc

SEQ ID NO: 155932 - DNA, 72 bp, Homo sapiens
cccaagggtgaacaaacgtatgttgagtgagagttcacttgacccacccaaggtcttacctcctgcaaggca

SEQ ID NO: 155933 - DNA, 75 bp, Homo sapiens
aacaaacgtatgttgagtgagagttcacttgacccacccaaggtcttacctcctgcaaggcacagcacaattcca

SEQ ID NO: 155934 - DNA, 77 bp, Homo sapiens
atgttgagtgagagttcacttgacccacccaaggtcttacctcctgcaaggcacagcacaattccactggtcatcct

SEQ ID NO: 155935 - DNA, 69 bp, Homo sapiens
acccacccaaggtcttacctcctgcaaggcacagcacaattccactggtcatccttcgaaaaaaacggg

SEQ ID NO: 155936 - DNA, 72 bp, Homo sapiens
aaggtcttacctcctgcaaggcacagcacaattccactggtcatccttcgaaaaaaacggggccaggccagc

SEQ ID NO: 155937 - DNA, 75 bp, Homo sapiens
tgcaaggcacagcacaattccactggtcatccttcgaaaaaaacggggccaggccagccccttagccactggaga

SEQ ID NO: 155938 - DNA, 72 bp, Homo sapiens
acagcacaattccactggtcatccttcgaaaaaaacggggccaggccagccccttagccactggagactgta

SEQ ID NO: 155939 - DNA, 71 bp, Homo sapiens
actggtcatccttcgaaaaaaacggggccaggccagccccttagccactggagactgtagctccttcatat

SEQ ID NO: 155940 - DNA, 72 bp, Homo sapiens
atccttcgaaaaaaacggggccaggccagccccttagccactggagactgtagctccttcatatttgctgac

SEQ ID NO: 155941 - DNA, 75 bp, Homo sapiens
aaaaacggggccaggccagccccttagccactggagactgtagctccttcatatttgctgacgtcagcagttcaa

SEQ ID NO: 155942 - DNA, 77 bp, Homo sapiens
aggccagccccttagccactggagactgtagctccttcatatttgctgacgtcagcagttcaactcccaagcgttcc

SEQ ID NO: 155943 - DNA, 77 bp, Homo sapiens
cttagccactggagactgtagctccttcatatttgctgacgtcagcagttcaactcccaagcgttcccctgtcaaaa

SEQ ID NO: 155944 - DNA, 76 bp, Homo sapiens
tgtagctccttcatatttgctgacgtcagcagttcaactcccaagcgttcccctgtcaaaagcctacccttctctc

SEQ ID NO: 155945 - DNA, 74 bp, Homo sapiens
tatttgctgacgtcagcagttcaactcccaagcgttcccctgtcaaaagcctacccttctctccctcgcaggta

SEQ ID NO: 155946 - DNA, 72 bp, Homo sapiens
tcagcagttcaactcccaagcgttcccctgtcaaaagcctacccttctctccctcgcaggtagaacacaatt

SEQ ID NO: 155947 - DNA, 69 bp, Homo sapiens
agttcaactcccaagcgttcccctgtcaaaagcctacccttctctccctcgcaggtagaacacaatttc

SEQ ID NO: 155948 - DNA, 73 bp, Homo sapiens
cgttcccctgtcaaaagcctacccttctctccctcgcaggtagaacacaatttctgcacagctgttactcatt

SEQ ID NO: 155949 - DNA, 69 bp, Homo sapiens
gaattaccatctaatctaagtattttttctttctctccatatttagttcttaaacacttccagtaacca

SEQ ID NO: 155950 - DNA, 69 bp, Homo sapiens
accatctaatctaagtattttttctttctctccatatttagttcttaaacacttccagtaaccatgaaa

SEQ ID NO: 155951 - DNA, 69 bp, Homo sapiens
gtattttttctttctctccatatttagttcttaaacacttccagtaaccatgaaaactcagacttggaa

SEQ ID NO: 155952 - DNA, 70 bp, Homo sapiens
ctttctctccatatttagttcttaaacacttccagtaaccatgaaaactcagacttggaaatgccttctt

SEQ ID NO: 155953 - DNA, 68 bp, Homo sapiens
atttagttcttaaacacttccagtaaccatgaaaactcagacttggaaatgccttctttaacttccac

SEQ ID NO: 155954 - DNA, 67 bp, Homo sapiens
gttcttaaacacttccagtaaccatgaaaactcagacttggaaatgccttctttaacttccaccccc

SEQ ID NO: 155955 - DNA, 71 bp, Homo sapiens
cagtaaccatgaaaactcagacttggaaatgccttctttaacttccacccccctcattggtcacaaattga

SEQ ID NO: 155956 - DNA, 71 bp, Homo sapiens
tgaaaactcagacttggaaatgccttctttaacttccacccccctcattggtcacaaattgactgttacaa

SEQ ID NO: 155957 - DNA, 70 bp, Homo sapiens
acttggaaatgccttctttaacttccacccccctcattggtcacaaattgactgttacaacaccatttca

SEQ ID NO: 155958 - DNA, 71 bp, Homo sapiens
aaatgccttctttaacttccacccccctcattggtcacaaattgactgttacaacaccatttcatagagac

SEQ ID NO: 155959 - DNA, 73 bp, Homo sapiens
tttaacttccacccccctcattggtcacaaattgactgttacaacaccatttcatagagaccagactgtgaaa

SEQ ID NO: 155960 - DNA, 73 bp, Homo sapiens
ccctcattggtcacaaattgactgttacaacaccatttcatagagaccagactgtgaaaactcaaaaggaaaa

SEQ ID NO: 155961 - DNA, 73 bp, Homo sapiens
attggtcacaaattgactgttacaacaccatttcatagagaccagactgtgaaaactcaaaaggaaaatactg

SEQ ID NO: 155962 - DNA, 72 bp, Homo sapiens
aattgactgttacaacaccatttcatagagaccagactgtgaaaactcaaaaggaaaatactgtgtaagtct

SEQ ID NO: 155963 - DNA, 72 bp, Homo sapiens
acaccatttcatagagaccagactgtgaaaactcaaaaggaaaatactgtgtaagtctttggttcaggaata

SEQ ID NO: 155964 - DNA, 72 bp, Homo sapiens
tttcatagagaccagactgtgaaaactcaaaaggaaaatactgtgtaagtctttggttcaggaataaaatga

SEQ ID NO: 155965 - DNA, 74 bp, Homo sapiens
tattttttctttttgaatttatgtgtagataggacctcttctgacatccccaggaatattatatgattagaagc

SEQ ID NO: 155966 - DNA, 77 bp, Homo sapiens
ttttgaatttatgtgtagataggacctcttctgacatccccaggaatattatatgattagaagccaagggatgagta

SEQ ID NO: 155967 - DNA, 79 bp, Homo sapiens
ttatgtgtagataggacctcttctgacatccccaggaatattatatgattagaagccaagggatgagtaagcagtcatt

SEQ ID NO: 155968 - DNA, 77 bp, Homo sapiens
tagataggacctcttctgacatccccaggaatattatatgattagaagccaagggatgagtaagcagtcatttttat

SEQ ID NO: 155969 - DNA, 77 bp, Homo sapiens
tctgacatccccaggaatattatatgattagaagccaagggatgagtaagcagtcatttttattcaataaagcctta

SEQ ID NO: 155970 - DNA, 74 bp, Homo sapiens
cccaggaatattatatgattagaagccaagggatgagtaagcagtcatttttattcaataaagccttaatcaat

SEQ ID NO: 155971 - DNA, 76 bp, Homo sapiens
ttatatgattagaagccaagggatgagtaagcagtcatttttattcaataaagccttaatcaattcagagaaatgg

SEQ ID NO: 155972 - DNA, 75 bp, Homo sapiens
attagaagccaagggatgagtaagcagtcatttttattcaataaagccttaatcaattcagagaaatggtagaga

SEQ ID NO: 155973 - DNA, 69 bp, Homo sapiens
gggacatttattcttttgtattgagccactgcttgttttctttttaaagttttagaaccccagctatca

SEQ ID NO: 155974 - DNA, 69 bp, Homo sapiens
tcttttgtattgagccactgcttgttttctttttaaagttttagaaccccagctatcaaaaggtcaatc

SEQ ID NO: 155975 - DNA, 69 bp, Homo sapiens
ttgagccactgcttgttttctttttaaagttttagaaccccagctatcaaaaggtcaatcttagaaagc

SEQ ID NO: 155976 - DNA, 67 bp, Homo sapiens
tgttttctttttaaagttttagaaccccagctatcaaaaggtcaatcttagaaagctctccaagaac

SEQ ID NO: 155977 - DNA, 71 bp, Homo sapiens
ttaaagttttagaaccccagctatcaaaaggtcaatcttagaaagctctccaagaactcctacaccattca

SEQ ID NO: 155978 - DNA, 74 bp, Homo sapiens
tttagaaccccagctatcaaaaggtcaatcttagaaagctctccaagaactcctacaccattcaaacatgcact

SEQ ID NO: 155979 - DNA, 78 bp, Homo sapiens
ctatcaaaaggtcaatcttagaaagctctccaagaactcctacaccattcaaacatgcacttgcagctcaagaaatta

SEQ ID NO: 155980 - DNA, 75 bp, Homo sapiens
aaaaggtcaatcttagaaagctctccaagaactcctacaccattcaaacatgcacttgcagctcaagaaattaaa

SEQ ID NO: 155981 - DNA, 76 bp, Homo sapiens
tagaaagctctccaagaactcctacaccattcaaacatgcacttgcagctcaagaaattaaatacggtcccctgaa

SEQ ID NO: 155982 - DNA, 77 bp, Homo sapiens
tccaagaactcctacaccattcaaacatgcacttgcagctcaagaaattaaatacggtcccctgaagatgctagtaa

SEQ ID NO: 155983 - DNA, 76 bp, Homo sapiens
tacaccattcaaacatgcacttgcagctcaagaaattaaatacggtcccctgaagatgctagtaagttctagaaaa

SEQ ID NO: 155984 - DNA, 73 bp, Homo sapiens
attcaaacatgcacttgcagctcaagaaattaaatacggtcccctgaagatgctagtaagttctagaaaagtt

SEQ ID NO: 155985 - DNA, 69 bp, Homo sapiens
acttgcagctcaagaaattaaatacggtcccctgaagatgctagtaagttctagaaaagtttttggatt

SEQ ID NO: 155986 - DNA, 69 bp, Homo sapiens
gctcaagaaattaaatacggtcccctgaagatgctagtaagttctagaaaagtttttggatttcattgg

SEQ ID NO: 155987 - DNA, 77 bp, Homo sapiens
cattaggagttctctctgatgcaaaaatacccactcttccgtttagcctcagacaccctctcatctagtagaagatc

SEQ ID NO: 155988 - DNA, 83 bp, Homo sapiens
tctctctgatgcaaaaatacccactcttccgtttagcctcagacaccctctcatctagtagaagatctgcaggatgtgatcaa

SEQ ID NO: 155989 - DNA, 79 bp, Homo sapiens
atgcaaaaatacccactcttccgtttagcctcagacaccctctcatctagtagaagatctgcaggatgtgatcaaacag

SEQ ID NO: 155990 - DNA, 80 bp, Homo sapiens
aatacccactcttccgtttagcctcagacaccctctcatctagtagaagatctgcaggatgtgatcaaacaggaatctga

SEQ ID NO: 155991 - DNA, 82 bp, Homo sapiens
cttccgtttagcctcagacaccctctcatctagtagaagatctgcaggatgtgatcaaacaggaatctgatgaatctggaat

SEQ ID NO: 155992 - DNA, 83 bp, Homo sapiens
ccctctcatctagtagaagatctgcaggatgtgatcaaacaggaatctgatgaatctggaattgttgctgagtttcaagaaaa

SEQ ID NO: 155993 - DNA, 82 bp, Homo sapiens
tagtagaagatctgcaggatgtgatcaaacaggaatctgatgaatctggaattgttgctgagtttcaagaaaatggaccacc

SEQ ID NO: 155994 - DNA, 78 bp, Homo sapiens
aggatgtgatcaaacaggaatctgatgaatctggaattgttgctgagtttcaagaaaatggaccacccttactgaaga

SEQ ID NO: 155995 - DNA, 76 bp, Homo sapiens
atcaaacaggaatctgatgaatctggaattgttgctgagtttcaagaaaatggaccacccttactgaagaaaatca

SEQ ID NO: 155996 - DNA, 70 bp, Homo sapiens
aatctggaattgttgctgagtttcaagaaaatggaccacccttactgaagaaaatcaaacaagaggtaaa

SEQ ID NO: 155997 - DNA, 70 bp, Homo sapiens
attgttgctgagtttcaagaaaatggaccacccttactgaagaaaatcaaacaagaggtaaacacgcaac

SEQ ID NO: 155998 - DNA, 68 bp, Homo sapiens
aaatggaccacccttactgaagaaaatcaaacaagaggtaaacacgcaaccctttggaagcaacaagc

SEQ ID NO: 155999 - DNA, 71 bp, Homo sapiens
cccttactgaagaaaatcaaacaagaggtaaacacgcaaccctttggaagcaacaagctgagaatcctgcc

SEQ ID NO: 156000 - DNA, 69 bp, Homo sapiens
aaaatcaaacaagaggtaaacacgcaaccctttggaagcaacaagctgagaatcctgccccctttattc

SEQ ID NO: 156001 - DNA, 72 bp, Homo sapiens
aagaggtaaacacgcaaccctttggaagcaacaagctgagaatcctgccccctttattccttgtgtgcagct

SEQ ID NO: 156002 - DNA, 78 bp, Homo sapiens
aacacgcaaccctttggaagcaacaagctgagaatcctgccccctttattccttgtgtgcagcttgatgtgtctgcca

SEQ ID NO: 156003 - DNA, 83 bp, Homo sapiens
tttggaagcaacaagctgagaatcctgccccctttattccttgtgtgcagcttgatgtgtctgccattggcactgtgcaacac

SEQ ID NO: 156004 - DNA, 80 bp, Homo sapiens
aagctgagaatcctgccccctttattccttgtgtgcagcttgatgtgtctgccattggcactgtgcaacaccacgacttt

SEQ ID NO: 156005 - DNA, 80 bp, Homo sapiens
aatcctgccccctttattccttgtgtgcagcttgatgtgtctgccattggcactgtgcaacaccacgacttttcgtgcaa

SEQ ID NO: 156006 - DNA, 82 bp, Homo sapiens
tttattccttgtgtgcagcttgatgtgtctgccattggcactgtgcaacaccacgacttttcgtgcaagattttcatacaag

SEQ ID NO: 156007 - DNA, 85 bp, Homo sapiens
tgtgtgcagcttgatgtgtctgccattggcactgtgcaacaccacgacttttcgtgcaagattttcatacaaggtgcagcgaaaa

SEQ ID NO: 156008 - DNA, 80 bp, Homo sapiens
ttgatgtgtctgccattggcactgtgcaacaccacgacttttcgtgcaagattttcatacaaggtgcagcgaaaaggtac

SEQ ID NO: 156009 - DNA, 78 bp, Homo sapiens
ccattggcactgtgcaacaccacgacttttcgtgcaagattttcatacaaggtgcagcgaaaaggtactgccagactg

SEQ ID NO: 156010 - DNA, 81 bp, Homo sapiens
tgtgcaacaccacgacttttcgtgcaagattttcatacaaggtgcagcgaaaaggtactgccagactgtaggcatcatcaa

SEQ ID NO: 156011 - DNA, 77 bp, Homo sapiens
aacaccacgacttttcgtgcaagattttcatacaaggtgcagcgaaaaggtactgccagactgtaggcatcatcaac

SEQ ID NO: 156012 - DNA, 75 bp, Homo sapiens
cttttcgtgcaagattttcatacaaggtgcagcgaaaaggtactgccagactgtaggcatcatcaacctttcctt

SEQ ID NO: 156013 - DNA, 75 bp, Homo sapiens
aagattttcatacaaggtgcagcgaaaaggtactgccagactgtaggcatcatcaacctttcctttgggaagcca

SEQ ID NO: 156014 - DNA, 75 bp, Homo sapiens
tttgggaagccaagccatctctatctacttcatgtttggacagaaaacatactagagagtatcaagaaaagggag

SEQ ID NO: 156015 - DNA, 75 bp, Homo sapiens
agccaagccatctctatctacttcatgtttggacagaaaacatactagagagtatcaagaaaagggagggaaaga

SEQ ID NO: 156016 - DNA, 70 bp, Homo sapiens
ctatctacttcatgtttggacagaaaacatactagagagtatcaagaaaagggagggaaagaggttttta

SEQ ID NO: 156017 - DNA, 69 bp, Homo sapiens
cttcatgtttggacagaaaacatactagagagtatcaagaaaagggagggaaagaggtttttaatgtac

SEQ ID NO: 156018 - DNA, 68 bp, Homo sapiens
catactagagagtatcaagaaaagggagggaaagaggtttttaatgtacttttaaacattactgatta

SEQ ID NO: 156019 - DNA, 75 bp, Homo sapiens
ttcataggaagttctagaaacaacaaagcactttctatatgcttttaggtggaatctccaactgataaatcagga

SEQ ID NO: 156020 - DNA, 72 bp, Homo sapiens
agttctagaaacaacaaagcactttctatatgcttttaggtggaatctccaactgataaatcaggaaacttc

SEQ ID NO: 156021 - DNA, 75 bp, Homo sapiens
aaacaacaaagcactttctatatgcttttaggtggaatctccaactgataaatcaggaaacttcttctgctcaca

SEQ ID NO: 156022 - DNA, 74 bp, Homo sapiens
actttctatatgcttttaggtggaatctccaactgataaatcaggaaacttcttctgctcacaccactgggaag

SEQ ID NO: 156023 - DNA, 74 bp, Homo sapiens
ttttaggtggaatctccaactgataaatcaggaaacttcttctgctcacaccactgggaaggggacagtctgaa

SEQ ID NO: 156024 - DNA, 74 bp, Homo sapiens
aatctccaactgataaatcaggaaacttcttctgctcacaccactgggaaggggacagtctgaatacccaactg

SEQ ID NO: 156025 - DNA, 75 bp, Homo sapiens
aactgataaatcaggaaacttcttctgctcacaccactgggaaggggacagtctgaatacccaactgttcacgca

SEQ ID NO: 156026 - DNA, 75 bp, Homo sapiens
aatcaggaaacttcttctgctcacaccactgggaaggggacagtctgaatacccaactgttcacgcagacctcgc

SEQ ID NO: 156027 - DNA, 80 bp, Homo sapiens
cttcttctgctcacaccactgggaaggggacagtctgaatacccaactgttcacgcagacctcgcctgtggcagatgcac

SEQ ID NO: 156028 - DNA, 75 bp, Homo sapiens
accactgggaaggggacagtctgaatacccaactgttcacgcagacctcgcctgtggcagatgcaccggtaagta

SEQ ID NO: 156029 - DNA, 77 bp, Homo sapiens
aaggggacagtctgaatacccaactgttcacgcagacctcgcctgtggcagatgcaccggtaagtacgtgtgcacca

SEQ ID NO: 156030 - DNA, 77 bp, Homo sapiens
agtctgaatacccaactgttcacgcagacctcgcctgtggcagatgcaccggtaagtacgtgtgcaccagcccccaa

SEQ ID NO: 156031 - DNA, 71 bp, Homo sapiens
tctcatattatccaacctcatttaaatttcaaattattctcttccctttagaatattcttacaagctccgt

SEQ ID NO: 156032 - DNA, 69 bp, Homo sapiens
cctcatttaaatttcaaattattctcttccctttagaatattcttacaagctccgttttaatggcacca

SEQ ID NO: 156033 - DNA, 74 bp, Homo sapiens
atttcaaattattctcttccctttagaatattcttacaagctccgttttaatggcaccagcatcagaagatgaa

SEQ ID NO: 156034 - DNA, 74 bp, Homo sapiens
aaattattctcttccctttagaatattcttacaagctccgttttaatggcaccagcatcagaagatgaagacaa

SEQ ID NO: 156035 - DNA, 78 bp, Homo sapiens
ctttagaatattcttacaagctccgttttaatggcaccagcatcagaagatgaagacaatgttctcaaagcatttaca

SEQ ID NO: 156036 - DNA, 78 bp, Homo sapiens
atattcttacaagctccgttttaatggcaccagcatcagaagatgaagacaatgttctcaaagcatttacagtaccta

SEQ ID NO: 156037 - DNA, 76 bp, Homo sapiens
acaagctccgttttaatggcaccagcatcagaagatgaagacaatgttctcaaagcatttacagtacctaaaaaca

SEQ ID NO: 156038 - DNA, 76 bp, Homo sapiens
ttttaatggcaccagcatcagaagatgaagacaatgttctcaaagcatttacagtacctaaaaacaggtccctggc

SEQ ID NO: 156039 - DNA, 74 bp, Homo sapiens
accagcatcagaagatgaagacaatgttctcaaagcatttacagtacctaaaaacaggtccctggcgagcccct

SEQ ID NO: 156040 - DNA, 72 bp, Homo sapiens
atgaagacaatgttctcaaagcatttacagtacctaaaaacaggtccctggcgagccccttgcaggtaatta

SEQ ID NO: 156041 - DNA, 70 bp, Homo sapiens
aatgttctcaaagcatttacagtacctaaaaacaggtccctggcgagccccttgcaggtaattactattc

SEQ ID NO: 156042 - DNA, 69 bp, Homo sapiens
catttacagtacctaaaaacaggtccctggcgagccccttgcaggtaattactattccaacattggtat

SEQ ID NO: 156043 - DNA, 67 bp, Homo sapiens
agtacctaaaaacaggtccctggcgagccccttgcaggtaattactattccaacattggtattttaa

SEQ ID NO: 156044 - DNA, 72 bp, Homo sapiens
ttttattttttatgctgtatccctaggcaaccaaagctcagagactgttccaattttaaatgaagtctgaaa

SEQ ID NO: 156045 - DNA, 75 bp, Homo sapiens
tttttatgctgtatccctaggcaaccaaagctcagagactgttccaattttaaatgaagtctgaaattagtcaga

SEQ ID NO: 156046 - DNA, 74 bp, Homo sapiens
tatccctaggcaaccaaagctcagagactgttccaattttaaatgaagtctgaaattagtcagacagaaaataa

SEQ ID NO: 156047 - DNA, 76 bp, Homo sapiens
ggcaaccaaagctcagagactgttccaattttaaatgaagtctgaaattagtcagacagaaaataattgcaatgta

SEQ ID NO: 156048 - DNA, 79 bp, Homo sapiens
gctcagagactgttccaattttaaatgaagtctgaaattagtcagacagaaaataattgcaatgtatttgactgtcaga

SEQ ID NO: 156049 - DNA, 74 bp, Homo sapiens
ccaattttaaatgaagtctgaaattagtcagacagaaaataattgcaatgtatttgactgtcagaataagaaag

SEQ ID NO: 156050 - DNA, 79 bp, Homo sapiens
tgaagtctgaaattagtcagacagaaaataattgcaatgtatttgactgtcagaataagaaagtcaactgtcaatgttg

SEQ ID NO: 156051 - DNA, 77 bp, Homo sapiens
aaattagtcagacagaaaataattgcaatgtatttgactgtcagaataagaaagtcaactgtcaatgttgtgaggcc

SEQ ID NO: 156052 - DNA, 79 bp, Homo sapiens
acagaaaataattgcaatgtatttgactgtcagaataagaaagtcaactgtcaatgttgtgaggccgatctgaagttga

SEQ ID NO: 156053 - DNA, 79 bp, Homo sapiens
aaataattgcaatgtatttgactgtcagaataagaaagtcaactgtcaatgttgtgaggccgatctgaagttgaccatc

SEQ ID NO: 156054 - DNA, 80 bp, Homo sapiens
tatttgactgtcagaataagaaagtcaactgtcaatgttgtgaggccgatctgaagttgaccatctgctgtcaggtttta

SEQ ID NO: 156055 - DNA, 79 bp, Homo sapiens
tcagaataagaaagtcaactgtcaatgttgtgaggccgatctgaagttgaccatctgctgtcaggttttaatatcaaaa

SEQ ID NO: 156056 - DNA, 78 bp, Homo sapiens
taagaaagtcaactgtcaatgttgtgaggccgatctgaagttgaccatctgctgtcaggttttaatatcaaaagagat

SEQ ID NO: 156057 - DNA, 77 bp, Homo sapiens
tgtcaatgttgtgaggccgatctgaagttgaccatctgctgtcaggttttaatatcaaaagagatttcccttgtaac

SEQ ID NO: 156058 - DNA, 71 bp, Homo sapiens
atctgaagttgaccatctgctgtcaggttttaatatcaaaagagatttcccttgtaaccctaaagtgggtg

SEQ ID NO: 156059 - DNA, 73 bp, Homo sapiens
catctgctgtcaggttttaatatcaaaagagatttcccttgtaaccctaaagtgggtgtgtgttgatgaaata

SEQ ID NO: 156060 - DNA, 71 bp, Homo sapiens
gctgtcaggttttaatatcaaaagagatttcccttgtaaccctaaagtgggtgtgtgttgatgaaatataa

SEQ ID NO: 156061 - DNA, 69 bp, Homo sapiens
atatcaaaagagatttcccttgtaaccctaaagtgggtgtgtgttgatgaaatataaccaattccaaat

SEQ ID NO: 156062 - DNA, 70 bp, Homo sapiens
agagatttcccttgtaaccctaaagtgggtgtgtgttgatgaaatataaccaattccaaattaatcctga

SEQ ID NO: 156063 - DNA, 71 bp, Homo sapiens
cttgtaaccctaaagtgggtgtgtgttgatgaaatataaccaattccaaattaatcctgagccaaatgtaa

SEQ ID NO: 156064 - DNA, 74 bp, Homo sapiens
cctaaagtgggtgtgtgttgatgaaatataaccaattccaaattaatcctgagccaaatgtaaataagaatgca

SEQ ID NO: 156065 - DNA, 73 bp, Homo sapiens
gtgttgatgaaatataaccaattccaaattaatcctgagccaaatgtaaataagaatgcaaattttgcttccc

SEQ ID NO: 156066 - DNA, 80 bp, Homo sapiens
agaatgagcttctttgtctgacgctcctgttgccatccctttctccatcagccttgtagcagtacctgggaacctgcatc

SEQ ID NO: 156067 - DNA, 79 bp, Homo sapiens
tctttgtctgacgctcctgttgccatccctttctccatcagccttgtagcagtacctgggaacctgcatcctgtggaaa

SEQ ID NO: 156068 - DNA, 78 bp, Homo sapiens
acgctcctgttgccatccctttctccatcagccttgtagcagtacctgggaacctgcatcctgtggaaagatggagga

SEQ ID NO: 156069 - DNA, 80 bp, Homo sapiens
cttgtagcagtacctgggaacctgcatcctgtggaaagatggaggagcagatgacatcttccagtcaagctcgtaaatac

SEQ ID NO: 156070 - DNA, 82 bp, Homo sapiens
tacctgggaacctgcatcctgtggaaagatggaggagcagatgacatcttccagtcaagctcgtaaatacgtgaatgcattc

SEQ ID NO: 156071 - DNA, 82 bp, Homo sapiens
aacctgcatcctgtggaaagatggaggagcagatgacatcttccagtcaagctcgtaaatacgtgaatgcattctcagcccg

SEQ ID NO: 156072 - DNA, 85 bp, Homo sapiens
gaaagatggaggagcagatgacatcttccagtcaagctcgtaaatacgtgaatgcattctcagcccggacgctggtcatgtgaga

SEQ ID NO: 156073 - DNA, 84 bp, Homo sapiens
aggagcagatgacatcttccagtcaagctcgtaaatacgtgaatgcattctcagcccggacgctggtcatgtgagacatttcca

SEQ ID NO: 156074 - DNA, 81 bp, Homo sapiens
atgacatcttccagtcaagctcgtaaatacgtgaatgcattctcagcccggacgctggtcatgtgagacatttccagaaaa

SEQ ID NO: 156075 - DNA, 81 bp, Homo sapiens
ttccagtcaagctcgtaaatacgtgaatgcattctcagcccggacgctggtcatgtgagacatttccagaaaagcattatg

SEQ ID NO: 156076 - DNA, 79 bp, Homo sapiens
tcgtaaatacgtgaatgcattctcagcccggacgctggtcatgtgagacatttccagaaaagcattatggttttcagaa

SEQ ID NO: 156077 - DNA, 79 bp, Homo sapiens
aatgcattctcagcccggacgctggtcatgtgagacatttccagaaaagcattatggttttcagaacacttcaagttga

SEQ ID NO: 156078 - DNA, 76 bp, Homo sapiens
attctcagcccggacgctggtcatgtgagacatttccagaaaagcattatggttttcagaacacttcaagttgact

SEQ ID NO: 156079 - DNA, 78 bp, Homo sapiens
acgctggtcatgtgagacatttccagaaaagcattatggttttcagaacacttcaagttgacttgggatatatcattc

SEQ ID NO: 156080 - DNA, 78 bp, Homo sapiens
tgagacatttccagaaaagcattatggttttcagaacacttcaagttgacttgggatatatcattcctcaacatgaaa

SEQ ID NO: 156081 - DNA, 76 bp, Homo sapiens
tccagaaaagcattatggttttcagaacacttcaagttgacttgggatatatcattcctcaacatgaaacttttca

SEQ ID NO: 156082 - DNA, 76 bp, Homo sapiens
aagcattatggttttcagaacacttcaagttgacttgggatatatcattcctcaacatgaaacttttcatgaatgg

SEQ ID NO: 156083 - DNA, 76 bp, Homo sapiens
tcagaacacttcaagttgacttgggatatatcattcctcaacatgaaacttttcatgaatgggagaagaacctatt

SEQ ID NO: 156084 - DNA, 74 bp, Homo sapiens
cacttcaagttgacttgggatatatcattcctcaacatgaaacttttcatgaatgggagaagaacctatttttg

SEQ ID NO: 156085 - DNA, 75 bp, Homo sapiens
ttgacttgggatatatcattcctcaacatgaaacttttcatgaatgggagaagaacctatttttgttgtggtaca

SEQ ID NO: 156086 - DNA, 77 bp, Homo sapiens
tatatcattcctcaacatgaaacttttcatgaatgggagaagaacctatttttgttgtggtacaacagttgagagca

SEQ ID NO: 156087 - DNA, 76 bp, Homo sapiens
acatgaaacttttcatgaatgggagaagaacctatttttgttgtggtacaacagttgagagcagcaccaagtgcat

SEQ ID NO: 156088 - DNA, 74 bp, Homo sapiens
aaacttttcatgaatgggagaagaacctatttttgttgtggtacaacagttgagagcagcaccaagtgcattta

SEQ ID NO: 156089 - DNA, 75 bp, Homo sapiens
aatgggagaagaacctatttttgttgtggtacaacagttgagagcagcaccaagtgcatttagttgaatgaagtc

SEQ ID NO: 156090 - DNA, 74 bp, Homo sapiens
aacctatttttgttgtggtacaacagttgagagcagcaccaagtgcatttagttgaatgaagtcttcttggatt

SEQ ID NO: 156091 - DNA, 76 bp, Homo sapiens
ttgtggtacaacagttgagagcagcaccaagtgcatttagttgaatgaagtcttcttggatttcacccaactaaaa

SEQ ID NO: 156092 - DNA, 73 bp, Homo sapiens
aacagttgagagcagcaccaagtgcatttagttgaatgaagtcttcttggatttcacccaactaaaaggattt

SEQ ID NO: 156093 - DNA, 71 bp, Homo sapiens
agagcagcaccaagtgcatttagttgaatgaagtcttcttggatttcacccaactaaaaggatttttaaaa

SEQ ID NO: 156094 - DNA, 67 bp, Homo sapiens
accaagtgcatttagttgaatgaagtcttcttggatttcacccaactaaaaggatttttaaaaataa

SEQ ID NO: 156095 - DNA, 67 bp, Homo sapiens
ttttaaaaataaataacagtcttacctaaattattaggtaatgaattgtagccagttgttaatatct

SEQ ID NO: 156096 - DNA, 70 bp, Homo sapiens
acagtcttacctaaattattaggtaatgaattgtagccagttgttaatatcttaatgcagatttttttaa

SEQ ID NO: 156097 - DNA, 69 bp, Homo sapiens
tttaaaaaaaacataaaatgatttatctgtattttaaaggatccaacagatcagtattttttcctgtga

SEQ ID NO: 156098 - DNA, 69 bp, Homo sapiens
aacataaaatgatttatctgtattttaaaggatccaacagatcagtattttttcctgtgatgggttttt

SEQ ID NO: 156099 - DNA, 71 bp, Homo sapiens
gatttatctgtattttaaaggatccaacagatcagtattttttcctgtgatgggttttttgaaatttgaca

SEQ ID NO: 156100 - DNA, 70 bp, Homo sapiens
ctgtattttaaaggatccaacagatcagtattttttcctgtgatgggttttttgaaatttgacacattaa

SEQ ID NO: 156101 - DNA, 70 bp, Homo sapiens
ggatccaacagatcagtattttttcctgtgatgggttttttgaaatttgacacattaaaaggtactccag

SEQ ID NO: 156102 - DNA, 70 bp, Homo sapiens
cagatcagtattttttcctgtgatgggttttttgaaatttgacacattaaaaggtactccagtatttcac

SEQ ID NO: 156103 - DNA, 70 bp, Homo sapiens
tttcctgtgatgggttttttgaaatttgacacattaaaaggtactccagtatttcacttttctcgatcac

SEQ ID NO: 156104 - DNA, 71 bp, Homo sapiens
gggttttttgaaatttgacacattaaaaggtactccagtatttcacttttctcgatcactaaacatatgca

SEQ ID NO: 156105 - DNA, 73 bp, Homo sapiens
ttttgaaatttgacacattaaaaggtactccagtatttcacttttctcgatcactaaacatatgcatatattt

SEQ ID NO: 156106 - DNA, 72 bp, Homo sapiens
tttttaaaaatcagtaaaagcattactctaagtgtagacttaataccatgtgacatttaatccagattgtaa

SEQ ID NO: 156107 - DNA, 77 bp, Homo sapiens
tcagtaaaagcattactctaagtgtagacttaataccatgtgacatttaatccagattgtaaatgctcatttatggt

SEQ ID NO: 156108 - DNA, 80 bp, Homo sapiens
gcattactctaagtgtagacttaataccatgtgacatttaatccagattgtaaatgctcatttatggttaatgacattga

SEQ ID NO: 156109 - DNA, 77 bp, Homo sapiens
ctctaagtgtagacttaataccatgtgacatttaatccagattgtaaatgctcatttatggttaatgacattgaagg

SEQ ID NO: 156110 - DNA, 77 bp, Homo sapiens
agtgtagacttaataccatgtgacatttaatccagattgtaaatgctcatttatggttaatgacattgaaggtacat

SEQ ID NO: 156111 - DNA, 77 bp, Homo sapiens
gacttaataccatgtgacatttaatccagattgtaaatgctcatttatggttaatgacattgaaggtacatttattg

SEQ ID NO: 156112 - DNA, 76 bp, Homo sapiens
ccatgtgacatttaatccagattgtaaatgctcatttatggttaatgacattgaaggtacatttattgtaccaaac

SEQ ID NO: 156113 - DNA, 74 bp, Homo sapiens
gacatttaatccagattgtaaatgctcatttatggttaatgacattgaaggtacatttattgtaccaaaccatt

SEQ ID NO: 156114 - DNA, 74 bp, Homo sapiens
aatccagattgtaaatgctcatttatggttaatgacattgaaggtacatttattgtaccaaaccattttatgag

SEQ ID NO: 156115 - DNA, 74 bp, Homo sapiens
tccagattgtaaatgctcatttatggttaatgacattgaaggtacatttattgtaccaaaccattttatgagtt

SEQ ID NO: 156116 - DNA, 74 bp, Homo sapiens
gctcatttatggttaatgacattgaaggtacatttattgtaccaaaccattttatgagttttctgttagcttgc

SEQ ID NO: 156117 - DNA, 71 bp, Homo sapiens
atggttaatgacattgaaggtacatttattgtaccaaaccattttatgagttttctgttagcttgctttaa

SEQ ID NO: 156118 - DNA, 70 bp, Homo sapiens
tgacattgaaggtacatttattgtaccaaaccattttatgagttttctgttagcttgctttaaaaattat

SEQ ID NO: 156119 - DNA, 69 bp, Homo sapiens
gtacatttattgtaccaaaccattttatgagttttctgttagcttgctttaaaaattattactgtaaga

SEQ ID NO: 156120 - DNA, 66 bp, Homo sapiens
gtaccaaaccattttatgagttttctgttagcttgctttaaaaattattactgtaagaaatagttt

SEQ ID NO: 156121 - DNA, 64 bp, Homo sapiens
agttttctgttagcttgctttaaaaattattactgtaagaaatagttttataaaaaattatatt

SEQ ID NO: 156122 - DNA, 71 bp, Homo sapiens
ttattcagtaatttaattttgtaaatgccaaatgaaaaacgttttttgctgctatggtcttagcctgtaga

SEQ ID NO: 156123 - DNA, 74 bp, Homo sapiens
atttaattttgtaaatgccaaatgaaaaacgttttttgctgctatggtcttagcctgtagacatgctgctagta

SEQ ID NO: 156124 - DNA, 76 bp, Homo sapiens
attttgtaaatgccaaatgaaaaacgttttttgctgctatggtcttagcctgtagacatgctgctagtatcagagg

SEQ ID NO: 156125 - DNA, 78 bp, Homo sapiens
aaatgaaaaacgttttttgctgctatggtcttagcctgtagacatgctgctagtatcagaggggcagtagagcttgga

SEQ ID NO: 156126 - DNA, 78 bp, Homo sapiens
aaaacgttttttgctgctatggtcttagcctgtagacatgctgctagtatcagaggggcagtagagcttggacagaaa

SEQ ID NO: 156127 - DNA, 81 bp, Homo sapiens
ttgctgctatggtcttagcctgtagacatgctgctagtatcagaggggcagtagagcttggacagaaagaaaagaaacttg

SEQ ID NO: 156128 - DNA, 77 bp, Homo sapiens
tagcctgtagacatgctgctagtatcagaggggcagtagagcttggacagaaagaaaagaaacttggtgttaggtaa

SEQ ID NO: 156129 - DNA, 77 bp, Homo sapiens
tagacatgctgctagtatcagaggggcagtagagcttggacagaaagaaaagaaacttggtgttaggtaattgacta

SEQ ID NO: 156130 - DNA, 75 bp, Homo sapiens
tagtatcagaggggcagtagagcttggacagaaagaaaagaaacttggtgttaggtaattgactatgcactagta

SEQ ID NO: 156131 - DNA, 73 bp, Homo sapiens
gggcagtagagcttggacagaaagaaaagaaacttggtgttaggtaattgactatgcactagtatttcagact

SEQ ID NO: 156132 - DNA, 71 bp, Homo sapiens
gtagagcttggacagaaagaaaagaaacttggtgttaggtaattgactatgcactagtatttcagactttt

SEQ ID NO: 156133 - DNA, 70 bp, Homo sapiens
tatacattttttttccttctgcaatacatttgaaaacttgtttgggagactctgcattttttattgtggt

SEQ ID NO: 156134 - DNA, 68 bp, Homo sapiens
tttttccttctgcaatacatttgaaaacttgtttgggagactctgcattttttattgtggtttttttg

SEQ ID NO: 156135 - DNA, 69 bp, Homo sapiens
cttctgcaatacatttgaaaacttgtttgggagactctgcattttttattgtggtttttttgttattgt

SEQ ID NO: 156136 - DNA, 71 bp, Homo sapiens
gtttgggagactctgcattttttattgtggtttttttgttattgttggtttatacaagcatgcgttgcact

SEQ ID NO: 156137 - DNA, 71 bp, Homo sapiens
gagactctgcattttttattgtggtttttttgttattgttggtttatacaagcatgcgttgcacttctttt

SEQ ID NO: 156138 - DNA, 71 bp, Homo sapiens
ttattgtggtttttttgttattgttggtttatacaagcatgcgttgcacttcttttttgggagatgtgtgt

SEQ ID NO: 156139 - DNA, 74 bp, Homo sapiens
ttttttgttattgttggtttatacaagcatgcgttgcacttcttttttgggagatgtgtgttgttgatgttcta

SEQ ID NO: 156140 - DNA, 75 bp, Homo sapiens
tattgttggtttatacaagcatgcgttgcacttcttttttgggagatgtgtgttgttgatgttctatgttttgtt

SEQ ID NO: 156141 - DNA, 76 bp, Homo sapiens
gtttatacaagcatgcgttgcacttcttttttgggagatgtgtgttgttgatgttctatgttttgttttgagtgta

SEQ ID NO: 156142 - DNA, 74 bp, Homo sapiens
gcacttcttttttgggagatgtgtgttgttgatgttctatgttttgttttgagtgtagcctgactgttttataa

SEQ ID NO: 156143 - DNA, 73 bp, Homo sapiens
tttgggagatgtgtgttgttgatgttctatgttttgttttgagtgtagcctgactgttttataatttgggagt

SEQ ID NO: 156144 - DNA, 76 bp, Homo sapiens
tgtgttgttgatgttctatgttttgttttgagtgtagcctgactgttttataatttgggagttctgcatttgatcc

SEQ ID NO: 156145 - DNA, 74 bp, Homo sapiens
ttgttttgagtgtagcctgactgttttataatttgggagttctgcatttgatccgcatcccctgtggtttctaa

SEQ ID NO: 156146 - DNA, 74 bp, Homo sapiens
agtgtagcctgactgttttataatttgggagttctgcatttgatccgcatcccctgtggtttctaagtgtatgg

SEQ ID NO: 156147 - DNA, 77 bp, Homo sapiens
tgttttataatttgggagttctgcatttgatccgcatcccctgtggtttctaagtgtatggtctcagaactgttgca

SEQ ID NO: 156148 - DNA, 78 bp, Homo sapiens
ataatttgggagttctgcatttgatccgcatcccctgtggtttctaagtgtatggtctcagaactgttgcatggatcc

SEQ ID NO: 156149 - DNA, 80 bp, Homo sapiens
agttctgcatttgatccgcatcccctgtggtttctaagtgtatggtctcagaactgttgcatggatcctgtgtttgcaac

SEQ ID NO: 156150 - DNA, 80 bp, Homo sapiens
ttgatccgcatcccctgtggtttctaagtgtatggtctcagaactgttgcatggatcctgtgtttgcaactggggagaca

SEQ ID NO: 156151 - DNA, 79 bp, Homo sapiens
tgtggtttctaagtgtatggtctcagaactgttgcatggatcctgtgtttgcaactggggagacagaaactgtggttga

SEQ ID NO: 156152 - DNA, 80 bp, Homo sapiens
tttctaagtgtatggtctcagaactgttgcatggatcctgtgtttgcaactggggagacagaaactgtggttgatagcca

SEQ ID NO: 156153 - DNA, 81 bp, Homo sapiens
tctcagaactgttgcatggatcctgtgtttgcaactggggagacagaaactgtggttgatagccagtcactgccttaagaa

SEQ ID NO: 156154 - DNA, 78 bp, Homo sapiens
aactgttgcatggatcctgtgtttgcaactggggagacagaaactgtggttgatagccagtcactgccttaagaacat

SEQ ID NO: 156155 - DNA, 80 bp, Homo sapiens
atggatcctgtgtttgcaactggggagacagaaactgtggttgatagccagtcactgccttaagaacatttgatgcaaga

SEQ ID NO: 156156 - DNA, 82 bp, Homo sapiens
tttgcaactggggagacagaaactgtggttgatagccagtcactgccttaagaacatttgatgcaagatggccagcactgaa

SEQ ID NO: 156157 - DNA, 83 bp, Homo sapiens
agacagaaactgtggttgatagccagtcactgccttaagaacatttgatgcaagatggccagcactgaacttttgagatatga

SEQ ID NO: 156158 - DNA, 80 bp, Homo sapiens
aaactgtggttgatagccagtcactgccttaagaacatttgatgcaagatggccagcactgaacttttgagatatgacgg

SEQ ID NO: 156159 - DNA, 80 bp, Homo sapiens
tgccttaagaacatttgatgcaagatggccagcactgaacttttgagatatgacggtgtacttactgccttgtagcaaaa

SEQ ID NO: 156160 - DNA, 77 bp, Homo sapiens
caagatggccagcactgaacttttgagatatgacggtgtacttactgccttgtagcaaaataaagatgtgcccttat

SEQ ID NO: 156161 - DNA, 73 bp, Homo sapiens
agcactgaacttttgagatatgacggtgtacttactgccttgtagcaaaataaagatgtgcccttattttacc

SEQ ID NO: 156162 - DNA, 70 bp, Homo sapiens
aacttttgagatatgacggtgtacttactgccttgtagcaaaataaagatgtgcccttattttacctact

SEQ ID NO: 156163 - DNA, 70 bp, Homo sapiens
gatatgacggtgtacttactgccttgtagcaaaataaagatgtgcccttattttacctacttttgttttc

SEQ ID NO: 156164 - DNA, 71 bp, Homo sapiens
gccttgtagcaaaataaagatgtgcccttattttacctacttttgttttctctcttatttgtcactatgga

SEQ ID NO: 156165 - DNA, 74 bp, Homo sapiens
ggcgcggactgagccccaggcggaggccaagtcggaggacgcggcgcggccgcggaggcggaggcagccgcgga

SEQ ID NO: 156166 - DNA, 73 bp, Homo sapiens
actgagccccaggcggaggccaagtcggaggacgcggcgcggccgcggaggcggaggcagccgcggaggcgga

SEQ ID NO: 156167 - DNA, 71 bp, Homo sapiens
aggcggaggccaagtcggaggacgcggcgcggccgcggaggcggaggcagccgcggaggcggaggcggccg

SEQ ID NO: 156168 - DNA, 69 bp, Homo sapiens
ccaagtcggaggacgcggcgcggccgcggaggcggaggcagccgcggaggcggaggcggccggcggggg

SEQ ID NO: 156169 - DNA, 69 bp, Homo sapiens
aggacgcggcgcggccgcggaggcggaggcagccgcggaggcggaggcggccggcggggggtggcgagg

SEQ ID NO: 156170 - DNA, 67 bp, Homo sapiens
ccgcggaggcggaggcagccgcggaggcggaggcggccggcggggggtggcgaggggcgccgggccc

SEQ ID NO: 156171 - DNA, 67 bp, Homo sapiens
gaggcagccgcggaggcggaggcggccggcggggggtggcgaggggcgccgggcccccgcggacctg

SEQ ID NO: 156172 - DNA, 65 bp, Homo sapiens
cggaggcggaggcggccggcggggggtggcgaggggcgccgggcccccgcggacctgtcgtcctc

SEQ ID NO: 156173 - DNA, 64 bp, Homo sapiens
aggcggccggcggggggtggcgaggggcgccgggcccccgcggacctgtcgtcctcggcccgtc

SEQ ID NO: 156174 - DNA, 63 bp, Homo sapiens
cggggggtggcgaggggcgccgggcccccgcggacctgtcgtcctcggcccgtcctccggccc

SEQ ID NO: 156175 - DNA, 64 bp, Homo sapiens
gtggcgaggggcgccgggcccccgcggacctgtcgtcctcggcccgtcctccggccccggcccc

SEQ ID NO: 156176 - DNA, 65 bp, Homo sapiens
ccgggcccccgcggacctgtcgtcctcggcccgtcctccggccccggccccgcgcggctgaggag

SEQ ID NO: 156177 - DNA, 70 bp, Homo sapiens
ggacctgtcgtcctcggcccgtcctccggccccggccccgcgcggctgaggaggcgcggccaggaccatg

SEQ ID NO: 156178 - DNA, 71 bp, Homo sapiens
tgtcgtcctcggcccgtcctccggccccggccccgcgcggctgaggaggcgcggccaggaccatgtcggcg

SEQ ID NO: 156179 - DNA, 71 bp, Homo sapiens
gtcctccggccccggccccgcgcggctgaggaggcgcggccaggaccatgtcggcgggcggccgtgacgag

SEQ ID NO: 156180 - DNA, 72 bp, Homo sapiens
cccggccccgcgcggctgaggaggcgcggccaggaccatgtcggcgggcggccgtgacgaggagcggcggaa

SEQ ID NO: 156181 - DNA, 78 bp, Homo sapiens
cgcggctgaggaggcgcggccaggaccatgtcggcgggcggccgtgacgaggagcggcggaagctggccgacatcatc

SEQ ID NO: 156182 - DNA, 78 bp, Homo sapiens
ctgaggaggcgcggccaggaccatgtcggcgggcggccgtgacgaggagcggcggaagctggccgacatcatccacca

SEQ ID NO: 156183 - DNA, 76 bp, Homo sapiens
caggaccatgtcggcgggcggccgtgacgaggagcggcggaagctggccgacatcatccaccactggaacgccaac

SEQ ID NO: 156184 - DNA, 75 bp, Homo sapiens
atgtcggcgggcggccgtgacgaggagcggcggaagctggccgacatcatccaccactggaacgccaaccggctg

SEQ ID NO: 156185 - DNA, 78 bp, Homo sapiens
gccgtgacgaggagcggcggaagctggccgacatcatccaccactggaacgccaaccggctggacctgttcgagatca

SEQ ID NO: 156186 - DNA, 78 bp, Homo sapiens
acgaggagcggcggaagctggccgacatcatccaccactggaacgccaaccggctggacctgttcgagatcagccagc

SEQ ID NO: 156187 - DNA, 79 bp, Homo sapiens
aagctggccgacatcatccaccactggaacgccaaccggctggacctgttcgagatcagccagccgaccgaggtgagca

SEQ ID NO: 156188 - DNA, 76 bp, Homo sapiens
acatcatccaccactggaacgccaaccggctggacctgttcgagatcagccagccgaccgaggtgagcaccgccgg

SEQ ID NO: 156189 - DNA, 75 bp, Homo sapiens
atccaccactggaacgccaaccggctggacctgttcgagatcagccagccgaccgaggtgagcaccgccgggcgc

SEQ ID NO: 156190 - DNA, 74 bp, Homo sapiens
ggaacgccaaccggctggacctgttcgagatcagccagccgaccgaggtgagcaccgccgggcgcggggcctgc

SEQ ID NO: 156191 - DNA, 73 bp, Homo sapiens
ccggctggacctgttcgagatcagccagccgaccgaggtgagcaccgccgggcgcggggcctgcgcgaccccc

SEQ ID NO: 156192 - DNA, 76 bp, Homo sapiens
tcgagatcagccagccgaccgaggtgagcaccgccgggcgcggggcctgcgcgacccccgcccgctgcgccgcgcc

SEQ ID NO: 156193 - DNA, 74 bp, Homo sapiens
tcagccagccgaccgaggtgagcaccgccgggcgcggggcctgcgcgacccccgcccgctgcgccgcgccccgc

SEQ ID NO: 156194 - DNA, 69 bp, Homo sapiens
accgaggtgagcaccgccgggcgcggggcctgcgcgacccccgcccgctgcgccgcgccccgcccctcc

SEQ ID NO: 156195 - DNA, 67 bp, Homo sapiens
agcaccgccgggcgcggggcctgcgcgacccccgcccgctgcgccgcgccccgcccctcccccccgc

SEQ ID NO: 156196 - DNA, 67 bp, Homo sapiens
cgcggggcctgcgcgacccccgcccgctgcgccgcgccccgcccctcccccccgccgccgcccgcca

SEQ ID NO: 156197 - DNA, 68 bp, Homo sapiens
tgcgcgacccccgcccgctgcgccgcgccccgcccctcccccccgccgccgcccgccagccgcggacc

SEQ ID NO: 156198 - DNA, 63 bp, Homo sapiens
cgccgcgccccgcccctcccccccgccgccgcccgccagccgcggacccgccctcctttcccc

SEQ ID NO: 156199 - DNA, 61 bp, Homo sapiens
ccctcccccccgccgccgcccgccagccgcggacccgccctcctttccccctcccccctcc

SEQ ID NO: 156200 - DNA, 63 bp, Homo sapiens
cgcccgccagccgcggacccgccctcctttccccctcccccctccgccccttctctcccctcc

SEQ ID NO: 156201 - DNA, 63 bp, Homo sapiens
tccccctcccccaggcccaccgcgggccccggcgtcccccgcagcccccgtccccctgccgcg

SEQ ID NO: 156202 - DNA, 64 bp, Homo sapiens
ccaggcccaccgcgggccccggcgtcccccgcagcccccgtccccctgccgcggtgtatcccgg

SEQ ID NO: 156203 - DNA, 63 bp, Homo sapiens
cccaccgcgggccccggcgtcccccgcagcccccgtccccctgccgcggtgtatcccggggtc

SEQ ID NO: 156204 - DNA, 65 bp, Homo sapiens
cccggcgtcccccgcagcccccgtccccctgccgcggtgtatcccggggtcgcgcgggccgagcg

SEQ ID NO: 156205 - DNA, 66 bp, Homo sapiens
cccgcagcccccgtccccctgccgcggtgtatcccggggtcgcgcgggccgagcgggggctggcgg

SEQ ID NO: 156206 - DNA, 70 bp, Homo sapiens
tccccctgccgcggtgtatcccggggtcgcgcgggccgagcgggggctggcggggcgcggcagtcacctg

SEQ ID NO: 156207 - DNA, 70 bp, Homo sapiens
ctgccgcggtgtatcccggggtcgcgcgggccgagcgggggctggcggggcgcggcagtcacctgttccc

SEQ ID NO: 156208 - DNA, 69 bp, Homo sapiens
gtatcccggggtcgcgcgggccgagcgggggctggcggggcgcggcagtcacctgttcccctctccggc

SEQ ID NO: 156209 - DNA, 73 bp, Homo sapiens
cgcgggccgagcgggggctggcggggcgcggcagtcacctgttcccctctccggccgctcacctggtggctca

SEQ ID NO: 156210 - DNA, 72 bp, Homo sapiens
ctggcggggcgcggcagtcacctgttcccctctccggccgctcacctggtggctcacctgggccgccgcccc

SEQ ID NO: 156211 - DNA, 70 bp, Homo sapiens
cgcggcagtcacctgttcccctctccggccgctcacctggtggctcacctgggccgccgcccccaccccc

SEQ ID NO: 156212 - DNA, 69 bp, Homo sapiens
acctgttcccctctccggccgctcacctggtggctcacctgggccgccgcccccacccccgcgagcgcg

SEQ ID NO: 156213 - DNA, 70 bp, Homo sapiens
ctctccggccgctcacctggtggctcacctgggccgccgcccccacccccgcgagcgcggcgcggccccg

SEQ ID NO: 156214 - DNA, 70 bp, Homo sapiens
tcacctggtggctcacctgggccgccgcccccacccccgcgagcgcggcgcggccccggcctcatccccg

SEQ ID NO: 156215 - DNA, 70 bp, Homo sapiens
tggctcacctgggccgccgcccccacccccgcgagcgcggcgcggccccggcctcatccccggcggcgcg

SEQ ID NO: 156216 - DNA, 66 bp, Homo sapiens
gggccgccgcccccacccccgcgagcgcggcgcggccccggcctcatccccggcggcgcggggggc

SEQ ID NO: 156217 - DNA, 68 bp, Homo sapiens
cccacccccgcgagcgcggcgcggccccggcctcatccccggcggcgcggggggcgcggcggcgcgcg

SEQ ID NO: 156218 - DNA, 68 bp, Homo sapiens
cccgcgagcgcggcgcggccccggcctcatccccggcggcgcggggggcgcggcggcgcgcggggccg

SEQ ID NO: 156219 - DNA, 68 bp, Homo sapiens
cgcggcgcggccccggcctcatccccggcggcgcggggggcgcggcggcgcgcggggccggcgccctc

SEQ ID NO: 156220 - DNA, 67 bp, Homo sapiens
cgcggccccggcctcatccccggcggcgcggggggcgcggcggcgcgcggggccggcgccctccacc

SEQ ID NO: 156221 - DNA, 69 bp, Homo sapiens
cggccccggcctcatccccggcggcgcggggggcgcggcggcgcgcggggccggcgccctccacctgca

SEQ ID NO: 156222 - DNA, 70 bp, Homo sapiens
gcctcatccccggcggcgcggggggcgcggcggcgcgcggggccggcgccctccacctgcagcccggttg

SEQ ID NO: 156223 - DNA, 70 bp, Homo sapiens
ccggcggcgcggggggcgcggcggcgcgcggggccggcgccctccacctgcagcccggttgtggctcgcg

SEQ ID NO: 156224 - DNA, 71 bp, Homo sapiens
ggcgcggggggcgcggcggcgcgcggggccggcgccctccacctgcagcccggttgtggctcgcggcgccc

SEQ ID NO: 156225 - DNA, 71 bp, Homo sapiens
gggggcgcggcggcgcgcggggccggcgccctccacctgcagcccggttgtggctcgcggcgccccttcgc

SEQ ID NO: 156226 - DNA, 72 bp, Homo sapiens
ggcgcggcggcgcgcggggccggcgccctccacctgcagcccggttgtggctcgcggcgccccttcgccgtg

SEQ ID NO: 156227 - DNA, 70 bp, Homo sapiens
cggcgcgcggggccggcgccctccacctgcagcccggttgtggctcgcggcgccccttcgccgtggccgg

SEQ ID NO: 156228 - DNA, 74 bp, Homo sapiens
ggccggcgccctccacctgcagcccggttgtggctcgcggcgccccttcgccgtggccgggatggagcctgtga

SEQ ID NO: 156229 - DNA, 77 bp, Homo sapiens
ctccacctgcagcccggttgtggctcgcggcgccccttcgccgtggccgggatggagcctgtgacgcgcgctgtgct

SEQ ID NO: 156230 - DNA, 73 bp, Homo sapiens
agcccggttgtggctcgcggcgccccttcgccgtggccgggatggagcctgtgacgcgcgctgtgcttcgggt

SEQ ID NO: 156231 - DNA, 75 bp, Homo sapiens
ttgtggctcgcggcgccccttcgccgtggccgggatggagcctgtgacgcgcgctgtgcttcgggttcataaact

SEQ ID NO: 156232 - DNA, 77 bp, Homo sapiens
cggcgccccttcgccgtggccgggatggagcctgtgacgcgcgctgtgcttcgggttcataaacttgcaggctgcca

SEQ ID NO: 156233 - DNA, 78 bp, Homo sapiens
cttcgccgtggccgggatggagcctgtgacgcgcgctgtgcttcgggttcataaacttgcaggctgccagctgggagg

SEQ ID NO: 156234 - DNA, 81 bp, Homo sapiens
gatggagcctgtgacgcgcgctgtgcttcgggttcataaacttgcaggctgccagctgggaggggaaagtcagtatcacaa

SEQ ID NO: 156235 - DNA, 75 bp, Homo sapiens
ctgtgcttcgggttcataaacttgcaggctgccagctgggaggggaaagtcagtatcacaaagttcgggaggtgc

SEQ ID NO: 156236 - DNA, 72 bp, Homo sapiens
cttcgggttcataaacttgcaggctgccagctgggaggggaaagtcagtatcacaaagttcgggaggtgcgg

SEQ ID NO: 156237 - DNA, 73 bp, Homo sapiens
aggggaaagtcagtatcacaaagttcgggaggtgcgggctgcctgatggcacaggcccggagtcggacgcctc

SEQ ID NO: 156238 - DNA, 74 bp, Homo sapiens
agtcagtatcacaaagttcgggaggtgcgggctgcctgatggcacaggcccggagtcggacgcctccgaggaaa

SEQ ID NO: 156239 - DNA, 71 bp, Homo sapiens
aaagttcgggaggtgcgggctgcctgatggcacaggcccggagtcggacgcctccgaggaaaggcgcgcct

SEQ ID NO: 156240 - DNA, 73 bp, Homo sapiens
aggtgcgggctgcctgatggcacaggcccggagtcggacgcctccgaggaaaggcgcgccttctccaccttcg

SEQ ID NO: 156241 - DNA, 73 bp, Homo sapiens
tgcctgatggcacaggcccggagtcggacgcctccgaggaaaggcgcgccttctccaccttcggggccgcgag

SEQ ID NO: 156242 - DNA, 70 bp, Homo sapiens
atggcacaggcccggagtcggacgcctccgaggaaaggcgcgccttctccaccttcggggccgcgaggaa

SEQ ID NO: 156243 - DNA, 67 bp, Homo sapiens
ccggagtcggacgcctccgaggaaaggcgcgccttctccaccttcggggccgcgaggaagggccctc

SEQ ID NO: 156244 - DNA, 69 bp, Homo sapiens
aggaaaggcgcgccttctccaccttcggggccgcgaggaagggccctctgcggcggcctctgcccggag

SEQ ID NO: 156245 - DNA, 69 bp, Homo sapiens
cttctccaccttcggggccgcgaggaagggccctctgcggcggcctctgcccggagggaggcgccggcc

SEQ ID NO: 156246 - DNA, 68 bp, Homo sapiens
accttcggggccgcgaggaagggccctctgcggcggcctctgcccggagggaggcgccggccccaggc

SEQ ID NO: 156247 - DNA, 72 bp, Homo sapiens
aggaagggccctctgcggcggcctctgcccggagggaggcgccggccccaggctggctccctgagaggagga

SEQ ID NO: 156248 - DNA, 75 bp, Homo sapiens
ctctgcggcggcctctgcccggagggaggcgccggccccaggctggctccctgagaggaggaggaaatcacgctc

SEQ ID NO: 156249 - DNA, 74 bp, Homo sapiens
cggcctctgcccggagggaggcgccggccccaggctggctccctgagaggaggaggaaatcacgctcgctcctg

SEQ ID NO: 156250 - DNA, 73 bp, Homo sapiens
aggcgccggccccaggctggctccctgagaggaggaggaaatcacgctcgctcctggcctggtaacaatgggg

SEQ ID NO: 156251 - DNA, 74 bp, Homo sapiens
ggctggctccctgagaggaggaggaaatcacgctcgctcctggcctggtaacaatgggggttgtttatagcaaa

SEQ ID NO: 156252 - DNA, 73 bp, Homo sapiens
aggaggaaatcacgctcgctcctggcctggtaacaatgggggttgtttatagcaaagctgctgaaagcgttcc

SEQ ID NO: 156253 - DNA, 74 bp, Homo sapiens
acgctcgctcctggcctggtaacaatgggggttgtttatagcaaagctgctgaaagcgttccgagcagctttta

SEQ ID NO: 156254 - DNA, 71 bp, Homo sapiens
ctcctggcctggtaacaatgggggttgtttatagcaaagctgctgaaagcgttccgagcagcttttaaaaa

SEQ ID NO: 156255 - DNA, 71 bp, Homo sapiens
tggtaacaatgggggttgtttatagcaaagctgctgaaagcgttccgagcagcttttaaaaaaatgtttga

SEQ ID NO: 156256 - DNA, 73 bp, Homo sapiens
ttgtttatagcaaagctgctgaaagcgttccgagcagcttttaaaaaaatgtttgagtccaagtccactagga

SEQ ID NO: 156257 - DNA, 73 bp, Homo sapiens
tatagcaaagctgctgaaagcgttccgagcagcttttaaaaaaatgtttgagtccaagtccactaggaagggc

SEQ ID NO: 156258 - DNA, 70 bp, Homo sapiens
ctgaaagcgttccgagcagcttttaaaaaaatgtttgagtccaagtccactaggaagggctccgtggaga

SEQ ID NO: 156259 - DNA, 68 bp, Homo sapiens
cgttccgagcagcttttaaaaaaatgtttgagtccaagtccactaggaagggctccgtggagagggga

SEQ ID NO: 156260 - DNA, 66 bp, Homo sapiens
ttaaaaaaatgtttgagtccaagtccactaggaagggctccgtggagaggggagggaggtgaaggg

SEQ ID NO: 156261 - DNA, 66 bp, Homo sapiens
aaaatgtttgagtccaagtccactaggaagggctccgtggagaggggagggaggtgaagggtcggg

SEQ ID NO: 156262 - DNA, 67 bp, Homo sapiens
actaggaagggctccgtggagaggggagggaggtgaagggtcggggagcaaccctgtaaatcgctcc

SEQ ID NO: 156263 - DNA, 67 bp, Homo sapiens
cgtggagaggggagggaggtgaagggtcggggagcaaccctgtaaatcgctccgcaagggtcggttc

SEQ ID NO: 156264 - DNA, 70 bp, Homo sapiens
ggagggaggtgaagggtcggggagcaaccctgtaaatcgctccgcaagggtcggttccgcgctctgttca

SEQ ID NO: 156265 - DNA, 74 bp, Homo sapiens
gggagcaaccctgtaaatcgctccgcaagggtcggttccgcgctctgttcattcggtggctgcacagactttac

SEQ ID NO: 156266 - DNA, 73 bp, Homo sapiens
atcgctccgcaagggtcggttccgcgctctgttcattcggtggctgcacagactttaccagcataaaaaaatt

SEQ ID NO: 156267 - DNA, 73 bp, Homo sapiens
aagggtcggttccgcgctctgttcattcggtggctgcacagactttaccagcataaaaaaatttcactcaata

SEQ ID NO: 156268 - DNA, 75 bp, Homo sapiens
gctctgttcattcggtggctgcacagactttaccagcataaaaaaatttcactcaatatttgtgcccgtttagga

SEQ ID NO: 156269 - DNA, 73 bp, Homo sapiens
gctgcacagactttaccagcataaaaaaatttcactcaatatttgtgcccgtttaggaaatcattttaatagc

SEQ ID NO: 156270 - DNA, 70 bp, Homo sapiens
gactttaccagcataaaaaaatttcactcaatatttgtgcccgtttaggaaatcattttaatagcgtcta

SEQ ID NO: 156271 - DNA, 67 bp, Homo sapiens
aaaaaatttcactcaatatttgtgcccgtttaggaaatcattttaatagcgtctatttttgatttgt

SEQ ID NO: 156272 - DNA, 70 bp, Homo sapiens
cactcaatatttgtgcccgtttaggaaatcattttaatagcgtctatttttgatttgttgtaataggtaa

SEQ ID NO: 156273 - DNA, 71 bp, Homo sapiens
taggaaatcattttaatagcgtctatttttgatttgttgtaataggtaatttatagttaatacttgctata

SEQ ID NO: 156274 - DNA, 70 bp, Homo sapiens
tcattttaatagcgtctatttttgatttgttgtaataggtaatttatagttaatacttgctataaaatac

SEQ ID NO: 156275 - DNA, 72 bp, Homo sapiens
gcgtctatttttgatttgttgtaataggtaatttatagttaatacttgctataaaatactagctcctaggca

SEQ ID NO: 156276 - DNA, 72 bp, Homo sapiens
tgatttgttgtaataggtaatttatagttaatacttgctataaaatactagctcctaggcaacaaaacatgt

SEQ ID NO: 156277 - DNA, 75 bp, Homo sapiens
tacttgctataaaatactagctcctaggcaacaaaacatgtttggcagatttgaacattcttacgaaatgtaatc

SEQ ID NO: 156278 - DNA, 73 bp, Homo sapiens
gctataaaatactagctcctaggcaacaaaacatgtttggcagatttgaacattcttacgaaatgtaatcctt

SEQ ID NO: 156279 - DNA, 73 bp, Homo sapiens
actagctcctaggcaacaaaacatgtttggcagatttgaacattcttacgaaatgtaatccttttatcattaa

SEQ ID NO: 156280 - DNA, 70 bp, Homo sapiens
acatgtttggcagatttgaacattcttacgaaatgtaatccttttatcattaaattccactttatgtttt

SEQ ID NO: 156281 - DNA, 70 bp, Homo sapiens
cagatttgaacattcttacgaaatgtaatccttttatcattaaattccactttatgtttttgagagaatt

SEQ ID NO: 156282 - DNA, 72 bp, Homo sapiens
tcttacgaaatgtaatccttttatcattaaattccactttatgtttttgagagaatttgactattgcttctc

SEQ ID NO: 156283 - DNA, 73 bp, Homo sapiens
gtaatccttttatcattaaattccactttatgtttttgagagaatttgactattgcttctctgatttcttgag

SEQ ID NO: 156284 - DNA, 75 bp, Homo sapiens
atcattaaattccactttatgtttttgagagaatttgactattgcttctctgatttcttgagtttttgccagtca

SEQ ID NO: 156285 - DNA, 74 bp, Homo sapiens
attccactttatgtttttgagagaatttgactattgcttctctgatttcttgagtttttgccagtcatgggaag

SEQ ID NO: 156286 - DNA, 75 bp, Homo sapiens
ttatgtttttgagagaatttgactattgcttctctgatttcttgagtttttgccagtcatgggaaggactctatt

SEQ ID NO: 156287 - DNA, 74 bp, Homo sapiens
agagaatttgactattgcttctctgatttcttgagtttttgccagtcatgggaaggactctatttcttctgttt

SEQ ID NO: 156288 - DNA, 75 bp, Homo sapiens
actattgcttctctgatttcttgagtttttgccagtcatgggaaggactctatttcttctgttttcatctgtacc

SEQ ID NO: 156289 - DNA, 79 bp, Homo sapiens
tctgatttcttgagtttttgccagtcatgggaaggactctatttcttctgttttcatctgtacctgtgactgcacttga

SEQ ID NO: 156290 - DNA, 75 bp, Homo sapiens
agtttttgccagtcatgggaaggactctatttcttctgttttcatctgtacctgtgactgcacttgacgtgggta

SEQ ID NO: 156291 - DNA, 77 bp, Homo sapiens
agtcatgggaaggactctatttcttctgttttcatctgtacctgtgactgcacttgacgtgggtagctagccatttg

SEQ ID NO: 156292 - DNA, 76 bp, Homo sapiens
aaggactctatttcttctgttttcatctgtacctgtgactgcacttgacgtgggtagctagccatttgtcttaata

SEQ ID NO: 156293 - DNA, 78 bp, Homo sapiens
tttcttctgttttcatctgtacctgtgactgcacttgacgtgggtagctagccatttgtcttaatactgagttgaata

SEQ ID NO: 156294 - DNA, 80 bp, Homo sapiens
tgttttcatctgtacctgtgactgcacttgacgtgggtagctagccatttgtcttaatactgagttgaatactgacacac

SEQ ID NO: 156295 - DNA, 78 bp, Homo sapiens
cacttgacgtgggtagctagccatttgtcttaatactgagttgaatactgacacacgccattaggctcaggttgtcaa

SEQ ID NO: 156296 - DNA, 77 bp, Homo sapiens
acgtgggtagctagccatttgtcttaatactgagttgaatactgacacacgccattaggctcaggttgtcaatttga

SEQ ID NO: 156297 - DNA, 80 bp, Homo sapiens
ccatttgtcttaatactgagttgaatactgacacacgccattaggctcaggttgtcaatttgagcatagatgttatgtta

SEQ ID NO: 156298 - DNA, 79 bp, Homo sapiens
agttgaatactgacacacgccattaggctcaggttgtcaatttgagcatagatgttatgttaagttactcctgattcat

SEQ ID NO: 156299 - DNA, 80 bp, Homo sapiens
acacacgccattaggctcaggttgtcaatttgagcatagatgttatgttaagttactcctgattcattcatcttctgtaa

SEQ ID NO: 156300 - DNA, 79 bp, Homo sapiens
ccattaggctcaggttgtcaatttgagcatagatgttatgttaagttactcctgattcattcatcttctgtaatgattt

SEQ ID NO: 156301 - DNA, 74 bp, Homo sapiens
gatgttatgttaagttactcctgattcattcatcttctgtaatgattttatgagttaggttctagtaagggagt

SEQ ID NO: 156302 - DNA, 73 bp, Homo sapiens
aagttactcctgattcattcatcttctgtaatgattttatgagttaggttctagtaagggagttagtactatg

SEQ ID NO: 156303 - DNA, 72 bp, Homo sapiens
catcttctgtaatgattttatgagttaggttctagtaagggagttagtactatgtacttaagtgttcgttca

SEQ ID NO: 156304 - DNA, 72 bp, Homo sapiens
tgattttatgagttaggttctagtaagggagttagtactatgtacttaagtgttcgttcatagactagtgta

SEQ ID NO: 156305 - DNA, 71 bp, Homo sapiens
gagttaggttctagtaagggagttagtactatgtacttaagtgttcgttcatagactagtgtatctttaga

SEQ ID NO: 156306 - DNA, 69 bp, Homo sapiens
ggttctagtaagggagttagtactatgtacttaagtgttcgttcatagactagtgtatctttagaaagg

SEQ ID NO: 156307 - DNA, 72 bp, Homo sapiens
agggagttagtactatgtacttaagtgttcgttcatagactagtgtatctttagaaaggtgacatgataatt

SEQ ID NO: 156308 - DNA, 73 bp, Homo sapiens
ttaagtgttcgttcatagactagtgtatctttagaaaggtgacatgataatttagtttcaggattatgttttc

SEQ ID NO: 156309 - DNA, 73 bp, Homo sapiens
tagtgtatctttagaaaggtgacatgataatttagtttcaggattatgttttcttttagaataatgaattcat

SEQ ID NO: 156310 - DNA, 70 bp, Homo sapiens
ttagaaaggtgacatgataatttagtttcaggattatgttttcttttagaataatgaattcatttttctt

SEQ ID NO: 156311 - DNA, 66 bp, Homo sapiens
tttagaataatgaattcatttttctttttatcacaaggtaaaaaaagttgaccataaaacattttc

SEQ ID NO: 156312 - DNA, 67 bp, Homo sapiens
gaattcatttttctttttatcacaaggtaaaaaaagttgaccataaaacattttcttggtgtgtagc

SEQ ID NO: 156313 - DNA, 64 bp, Homo sapiens
ttttctttttatcacaaggtaaaaaaagttgaccataaaacattttcttggtgtgtagcttttt

SEQ ID NO: 156314 - DNA, 67 bp, Homo sapiens
ttttttttgagagatttctcaagtctggtggaaaggaatcttttttcggtttaataaagagaattca

SEQ ID NO: 156315 - DNA, 69 bp, Homo sapiens
tgagagatttctcaagtctggtggaaaggaatcttttttcggtttaataaagagaattcagctttttgg

SEQ ID NO: 156316 - DNA, 67 bp, Homo sapiens
ctcaagtctggtggaaaggaatcttttttcggtttaataaagagaattcagctttttgggattttga

SEQ ID NO: 156317 - DNA, 66 bp, Homo sapiens
tggtggaaaggaatcttttttcggtttaataaagagaattcagctttttgggattttgaattgagt

SEQ ID NO: 156318 - DNA, 73 bp, Homo sapiens
gagaattcagctttttgggattttgaattgagttagcattaaaaaaatctcaaatcagaaacattatagttca

SEQ ID NO: 156319 - DNA, 71 bp, Homo sapiens
ggattttgaattgagttagcattaaaaaaatctcaaatcagaaacattatagttcattgatttaattaaat

SEQ ID NO: 156320 - DNA, 73 bp, Homo sapiens
ttagcattaaaaaaatctcaaatcagaaacattatagttcattgatttaattaaattctattttaagcactca

SEQ ID NO: 156321 - DNA, 71 bp, Homo sapiens
aaaaatctcaaatcagaaacattatagttcattgatttaattaaattctattttaagcactcaattgaaac

SEQ ID NO: 156322 - DNA, 72 bp, Homo sapiens
tctcaaatcagaaacattatagttcattgatttaattaaattctattttaagcactcaattgaaacttttta

SEQ ID NO: 156323 - DNA, 71 bp, Homo sapiens
cattatagttcattgatttaattaaattctattttaagcactcaattgaaactttttatttcttagtgata

SEQ ID NO: 156324 - DNA, 71 bp, Homo sapiens
gttcattgatttaattaaattctattttaagcactcaattgaaactttttatttcttagtgatatgactag

SEQ ID NO: 156325 - DNA, 67 bp, Homo sapiens
attaaattctattttaagcactcaattgaaactttttatttcttagtgatatgactagtttttaaaa

SEQ ID NO: 156326 - DNA, 70 bp, Homo sapiens
ctattttaagcactcaattgaaactttttatttcttagtgatatgactagtttttaaaattggcctgtca

SEQ ID NO: 156327 - DNA, 71 bp, Homo sapiens
gcactcaattgaaactttttatttcttagtgatatgactagtttttaaaattggcctgtcatttggaaagc

SEQ ID NO: 156328 - DNA, 69 bp, Homo sapiens
caattgaaactttttatttcttagtgatatgactagtttttaaaattggcctgtcatttggaaagctgt

SEQ ID NO: 156329 - DNA, 67 bp, Homo sapiens
gaaactttttatttcttagtgatatgactagtttttaaaattggcctgtcatttggaaagctgtttt

SEQ ID NO: 156330 - DNA, 71 bp, Homo sapiens
tatttcttagtgatatgactagtttttaaaattggcctgtcatttggaaagctgttttttcagttatactg

SEQ ID NO: 156331 - DNA, 70 bp, Homo sapiens
cttagtgatatgactagtttttaaaattggcctgtcatttggaaagctgttttttcagttatactgtagg

SEQ ID NO: 156332 - DNA, 70 bp, Homo sapiens
gatatgactagtttttaaaattggcctgtcatttggaaagctgttttttcagttatactgtaggtgaaag

SEQ ID NO: 156333 - DNA, 67 bp, Homo sapiens
agtttttaaaattggcctgtcatttggaaagctgttttttcagttatactgtaggtgaaagtttgct

SEQ ID NO: 156334 - DNA, 70 bp, Homo sapiens
tttaaaattggcctgtcatttggaaagctgttttttcagttatactgtaggtgaaagtttgctttgtaca

SEQ ID NO: 156335 - DNA, 71 bp, Homo sapiens
aaattggcctgtcatttggaaagctgttttttcagttatactgtaggtgaaagtttgctttgtacatacac

SEQ ID NO: 156336 - DNA, 73 bp, Homo sapiens
attggcctgtcatttggaaagctgttttttcagttatactgtaggtgaaagtttgctttgtacatacactgaa

SEQ ID NO: 156337 - DNA, 73 bp, Homo sapiens
gctgttttttcagttatactgtaggtgaaagtttgctttgtacatacactgaagcaaaacaagaattgaagga

SEQ ID NO: 156338 - DNA, 73 bp, Homo sapiens
ttttcagttatactgtaggtgaaagtttgctttgtacatacactgaagcaaaacaagaattgaaggacttgga

SEQ ID NO: 156339 - DNA, 72 bp, Homo sapiens
ctgtaggtgaaagtttgctttgtacatacactgaagcaaaacaagaattgaaggacttggaaaaaaagatga

SEQ ID NO: 156340 - DNA, 74 bp, Homo sapiens
tgaaagtttgctttgtacatacactgaagcaaaacaagaattgaaggacttggaaaaaaagatgatatatttca

SEQ ID NO: 156341 - DNA, 72 bp, Homo sapiens
ctttgtacatacactgaagcaaaacaagaattgaaggacttggaaaaaaagatgatatatttcatttcctaa

SEQ ID NO: 156342 - DNA, 69 bp, Homo sapiens
ctgaagcaaaacaagaattgaaggacttggaaaaaaagatgatatatttcatttcctaatttttctccc

SEQ ID NO: 156343 - DNA, 71 bp, Homo sapiens
caagaattgaaggacttggaaaaaaagatgatatatttcatttcctaatttttctccctacttatatctga

SEQ ID NO: 156344 - DNA, 69 bp, Homo sapiens
aaaaagatgatatatttcatttcctaatttttctccctacttatatctgaacatttccatttttagaaa

SEQ ID NO: 156345 - DNA, 70 bp, Homo sapiens
catttcctaatttttctccctacttatatctgaacatttccatttttagaaattattcttcagaattgta

SEQ ID NO: 156346 - DNA, 72 bp, Homo sapiens
tttctccctacttatatctgaacatttccatttttagaaattattcttcagaattgtattagaagcctttca

SEQ ID NO: 156347 - DNA, 73 bp, Homo sapiens
cctacttatatctgaacatttccatttttagaaattattcttcagaattgtattagaagcctttcataatgaa

SEQ ID NO: 156348 - DNA, 72 bp, Homo sapiens
ctgaacatttccatttttagaaattattcttcagaattgtattagaagcctttcataatgaaatgaatggtt

SEQ ID NO: 156349 - DNA, 72 bp, Homo sapiens
ttttagaaattattcttcagaattgtattagaagcctttcataatgaaatgaatggtttttaagaatgtcca

SEQ ID NO: 156350 - DNA, 73 bp, Homo sapiens
tattcttcagaattgtattagaagcctttcataatgaaatgaatggtttttaagaatgtccatatattggttt

SEQ ID NO: 156351 - DNA, 69 bp, Homo sapiens
tattagaagcctttcataatgaaatgaatggtttttaagaatgtccatatattggttttttagcttttt

SEQ ID NO: 156352 - DNA, 71 bp, Homo sapiens
cataatgaaatgaatggtttttaagaatgtccatatattggttttttagcttttttactatatagtggctg

SEQ ID NO: 156353 - DNA, 71 bp, Homo sapiens
gaatggtttttaagaatgtccatatattggttttttagcttttttactatatagtggctggctcacatttc

SEQ ID NO: 156354 - DNA, 70 bp, Homo sapiens
gtttttaagaatgtccatatattggttttttagcttttttactatatagtggctggctcacatttctatt

SEQ ID NO: 156355 - DNA, 72 bp, Homo sapiens
gtccatatattggttttttagcttttttactatatagtggctggctcacatttctattttgttttctcgaga

SEQ ID NO: 156356 - DNA, 69 bp, Homo sapiens
gttttttagcttttttactatatagtggctggctcacatttctattttgttttctcgagaactttcctg

SEQ ID NO: 156357 - DNA, 70 bp, Homo sapiens
tttttactatatagtggctggctcacatttctattttgttttctcgagaactttcctgtactattaaatt

SEQ ID NO: 156358 - DNA, 71 bp, Homo sapiens
atagtggctggctcacatttctattttgttttctcgagaactttcctgtactattaaatttattctggtcc

SEQ ID NO: 156359 - DNA, 70 bp, Homo sapiens
ggctggctcacatttctattttgttttctcgagaactttcctgtactattaaatttattctggtcctagt

SEQ ID NO: 156360 - DNA, 68 bp, Homo sapiens
ctattttgttttctcgagaactttcctgtactattaaatttattctggtcctagttaagctttgcatt

SEQ ID NO: 156361 - DNA, 70 bp, Homo sapiens
ttgttttctcgagaactttcctgtactattaaatttattctggtcctagttaagctttgcatttaacata

SEQ ID NO: 156362 - DNA, 70 bp, Homo sapiens
gagaactttcctgtactattaaatttattctggtcctagttaagctttgcatttaacatattgtatcttt

SEQ ID NO: 156363 - DNA, 74 bp, Homo sapiens
tattctggtcctagttaagctttgcatttaacatattgtatcttttattatgatgtaggtaaacttaatatgag

SEQ ID NO: 156364 - DNA, 76 bp, Homo sapiens
gctttgcatttaacatattgtatcttttattatgatgtaggtaaacttaatatgagtaattctctcagccagtatt

SEQ ID NO: 156365 - DNA, 76 bp, Homo sapiens
acatattgtatcttttattatgatgtaggtaaacttaatatgagtaattctctcagccagtatttcaaggccaaca

SEQ ID NO: 156366 - DNA, 75 bp, Homo sapiens
gtatcttttattatgatgtaggtaaacttaatatgagtaattctctcagccagtatttcaaggccaacagtttca

SEQ ID NO: 156367 - DNA, 76 bp, Homo sapiens
tatgatgtaggtaaacttaatatgagtaattctctcagccagtatttcaaggccaacagtttcaatttgctttgtc

SEQ ID NO: 156368 - DNA, 74 bp, Homo sapiens
taggtaaacttaatatgagtaattctctcagccagtatttcaaggccaacagtttcaatttgctttgtctaagc

SEQ ID NO: 156369 - DNA, 74 bp, Homo sapiens
atgagtaattctctcagccagtatttcaaggccaacagtttcaatttgctttgtctaagctcgtgtgaattttt

SEQ ID NO: 156370 - DNA, 71 bp, Homo sapiens
aattctctcagccagtatttcaaggccaacagtttcaatttgctttgtctaagctcgtgtgaatttttttt

SEQ ID NO: 156371 - DNA, 66 bp, Homo sapiens
tttttttttaaccatctaatgattatttttactctatttggccatcacaagtccaattttttagtt

SEQ ID NO: 156372 - DNA, 72 bp, Homo sapiens
aaccatctaatgattatttttactctatttggccatcacaagtccaattttttagttttctgcaagaacaga

SEQ ID NO: 156373 - DNA, 76 bp, Homo sapiens
atttggccatcacaagtccaattttttagttttctgcaagaacagaagcattgtactggtccttatcagatgttca

SEQ ID NO: 156374 - DNA, 79 bp, Homo sapiens
tttttagttttctgcaagaacagaagcattgtactggtccttatcagatgttcagtagatgttgaacaaattcactgca

SEQ ID NO: 156375 - DNA, 81 bp, Homo sapiens
tttctgcaagaacagaagcattgtactggtccttatcagatgttcagtagatgttgaacaaattcactgcaggagttgatt

SEQ ID NO: 156376 - DNA, 79 bp, Homo sapiens
agaagcattgtactggtccttatcagatgttcagtagatgttgaacaaattcactgcaggagttgatttgtagaaataa

SEQ ID NO: 156377 - DNA, 78 bp, Homo sapiens
ttgtactggtccttatcagatgttcagtagatgttgaacaaattcactgcaggagttgatttgtagaaataagattta

SEQ ID NO: 156378 - DNA, 77 bp, Homo sapiens
ccttatcagatgttcagtagatgttgaacaaattcactgcaggagttgatttgtagaaataagatttaagccttgta

SEQ ID NO: 156379 - DNA, 74 bp, Homo sapiens
gttcagtagatgttgaacaaattcactgcaggagttgatttgtagaaataagatttaagccttgtatttattta

SEQ ID NO: 156380 - DNA, 71 bp, Homo sapiens
atgttgaacaaattcactgcaggagttgatttgtagaaataagatttaagccttgtatttatttacttggg

SEQ ID NO: 156381 - DNA, 71 bp, Homo sapiens
tcactgcaggagttgatttgtagaaataagatttaagccttgtatttatttacttgggtaatctttttatg

SEQ ID NO: 156382 - DNA, 70 bp, Homo sapiens
ggagttgatttgtagaaataagatttaagccttgtatttatttacttgggtaatctttttatgtgtatga

SEQ ID NO: 156383 - DNA, 69 bp, Homo sapiens
gatttaagccttgtatttatttacttgggtaatctttttatgtgtatgagagtatagttgtgggttttc

SEQ ID NO: 156384 - DNA, 67 bp, Homo sapiens
ccttgtatttatttacttgggtaatctttttatgtgtatgagagtatagttgtgggttttcttttgt

SEQ ID NO: 156385 - DNA, 65 bp, Homo sapiens
atttacttgggtaatctttttatgtgtatgagagtatagttgtgggttttcttttgttgtttttt

SEQ ID NO: 156386 - DNA, 70 bp, Homo sapiens
gttgttttttttttgggtacagtgataagtatctgttttcaaattttataacttcattaatcatctatga

SEQ ID NO: 156387 - DNA, 73 bp, Homo sapiens
ttttgggtacagtgataagtatctgttttcaaattttataacttcattaatcatctatgattggtggtttcag

SEQ ID NO: 156388 - DNA, 75 bp, Homo sapiens
ggtacagtgataagtatctgttttcaaattttataacttcattaatcatctatgattggtggtttcaggcagctt

SEQ ID NO: 156389 - DNA, 77 bp, Homo sapiens
gtatctgttttcaaattttataacttcattaatcatctatgattggtggtttcaggcagctttgataaccactgata

SEQ ID NO: 156390 - DNA, 75 bp, Homo sapiens
caaattttataacttcattaatcatctatgattggtggtttcaggcagctttgataaccactgataattttgtgg

SEQ ID NO: 156391 - DNA, 76 bp, Homo sapiens
ataacttcattaatcatctatgattggtggtttcaggcagctttgataaccactgataattttgtggtttctgtgt

SEQ ID NO: 156392 - DNA, 75 bp, Homo sapiens
attaatcatctatgattggtggtttcaggcagctttgataaccactgataattttgtggtttctgtgtttaggaa

SEQ ID NO: 156393 - DNA, 72 bp, Homo sapiens
tttcaggcagctttgataaccactgataattttgtggtttctgtgtttaggaagatgataaacttggttctt

SEQ ID NO: 156394 - DNA, 72 bp, Homo sapiens
gctttgataaccactgataattttgtggtttctgtgtttaggaagatgataaacttggttctttggattaca

SEQ ID NO: 156395 - DNA, 69 bp, Homo sapiens
ccactgataattttgtggtttctgtgtttaggaagatgataaacttggttctttggattacattctttt

SEQ ID NO: 156396 - DNA, 67 bp, Homo sapiens
attttgtggtttctgtgtttaggaagatgataaacttggttctttggattacattctttttttaaga

SEQ ID NO: 156397 - DNA, 68 bp, Homo sapiens
cttggttctttggattacattctttttttaagaaaactagagtatgttttaacatcatcctggctaag

SEQ ID NO: 156398 - DNA, 69 bp, Homo sapiens
tctttggattacattctttttttaagaaaactagagtatgttttaacatcatcctggctaagtttgctt

SEQ ID NO: 156399 - DNA, 66 bp, Homo sapiens
ctttttttaagaaaactagagtatgttttaacatcatcctggctaagtttgctttttcctttgtat

SEQ ID NO: 156400 - DNA, 70 bp, Homo sapiens
agaaaactagagtatgttttaacatcatcctggctaagtttgctttttcctttgtattcacatttgtggg

SEQ ID NO: 156401 - DNA, 70 bp, Homo sapiens
gagtatgttttaacatcatcctggctaagtttgctttttcctttgtattcacatttgtgggtaaaggaag

SEQ ID NO: 156402 - DNA, 69 bp, Homo sapiens
ttttaacatcatcctggctaagtttgctttttcctttgtattcacatttgtgggtaaaggaagggctta

SEQ ID NO: 156403 - DNA, 68 bp, Homo sapiens
atcctggctaagtttgctttttcctttgtattcacatttgtgggtaaaggaagggcttacaaagaata

SEQ ID NO: 156404 - DNA, 70 bp, Homo sapiens
agtttgctttttcctttgtattcacatttgtgggtaaaggaagggcttacaaagaataagcaggctatca

SEQ ID NO: 156405 - DNA, 74 bp, Homo sapiens
taaaggaagggcttacaaagaataagcaggctatcactggagtatttttcaggctctttgtcacttggatccta

SEQ ID NO: 156406 - DNA, 76 bp, Homo sapiens
cttacaaagaataagcaggctatcactggagtatttttcaggctctttgtcacttggatcctagattcatttggaa

SEQ ID NO: 156407 - DNA, 75 bp, Homo sapiens
aataagcaggctatcactggagtatttttcaggctctttgtcacttggatcctagattcatttggaatttgtaaa

SEQ ID NO: 156408 - DNA, 77 bp, Homo sapiens
tatcactggagtatttttcaggctctttgtcacttggatcctagattcatttggaatttgtaaaatgagagttgatc

SEQ ID NO: 156409 - DNA, 74 bp, Homo sapiens
agtatttttcaggctctttgtcacttggatcctagattcatttggaatttgtaaaatgagagttgatctgaacc

SEQ ID NO: 156410 - DNA, 75 bp, Homo sapiens
gtcacttggatcctagattcatttggaatttgtaaaatgagagttgatctgaacctgatgttgttattttataac

SEQ ID NO: 156411 - DNA, 75 bp, Homo sapiens
ggatcctagattcatttggaatttgtaaaatgagagttgatctgaacctgatgttgttattttataaccaggaga

SEQ ID NO: 156412 - DNA, 77 bp, Homo sapiens
ttggaatttgtaaaatgagagttgatctgaacctgatgttgttattttataaccaggagattgatgctaagctgact

SEQ ID NO: 156413 - DNA, 79 bp, Homo sapiens
taaaatgagagttgatctgaacctgatgttgttattttataaccaggagattgatgctaagctgacttaatgtcttgat

SEQ ID NO: 156414 - DNA, 80 bp, Homo sapiens
gagttgatctgaacctgatgttgttattttataaccaggagattgatgctaagctgacttaatgtcttgattactatgaa

SEQ ID NO: 156415 - DNA, 78 bp, Homo sapiens
gaacctgatgttgttattttataaccaggagattgatgctaagctgacttaatgtcttgattactatgaaaagctgta

SEQ ID NO: 156416 - DNA, 79 bp, Homo sapiens
tttataaccaggagattgatgctaagctgacttaatgtcttgattactatgaaaagctgtagctcacagaaactcctta

SEQ ID NO: 156417 - DNA, 74 bp, Homo sapiens
atgtcttgattactatgaaaagctgtagctcacagaaactccttaaagtatgtatagtccctcctttgcttatt

SEQ ID NO: 156418 - DNA, 72 bp, Homo sapiens
gattactatgaaaagctgtagctcacagaaactccttaaagtatgtatagtccctcctttgcttatttttaa

SEQ ID NO: 156419 - DNA, 67 bp, Homo sapiens
ctccttaaagtatgtatagtccctcctttgcttatttttaatgttacagcttgttttcttttaggga

SEQ ID NO: 156420 - DNA, 69 bp, Homo sapiens
agtatgtatagtccctcctttgcttatttttaatgttacagcttgttttcttttagggattcctggata

SEQ ID NO: 156421 - DNA, 72 bp, Homo sapiens
tcctttgcttatttttaatgttacagcttgttttcttttagggattcctggataattatggcagcagagtcc

SEQ ID NO: 156422 - DNA, 70 bp, Homo sapiens
atttttaatgttacagcttgttttcttttagggattcctggataattatggcagcagagtccttttaatc

SEQ ID NO: 156423 - DNA, 72 bp, Homo sapiens
taatgttacagcttgttttcttttagggattcctggataattatggcagcagagtccttttaatctttcctg

SEQ ID NO: 156424 - DNA, 72 bp, Homo sapiens
tttagggattcctggataattatggcagcagagtccttttaatctttcctgtcacctccttagaagagggct

SEQ ID NO: 156425 - DNA, 74 bp, Homo sapiens
gataattatggcagcagagtccttttaatctttcctgtcacctccttagaagagggcttctctggttatccaaa

SEQ ID NO: 156426 - DNA, 73 bp, Homo sapiens
ttatggcagcagagtccttttaatctttcctgtcacctccttagaagagggcttctctggttatccaaaggtc

SEQ ID NO: 156427 - DNA, 68 bp, Homo sapiens
agtccttttaatctttcctgtcacctccttagaagagggcttctctggttatccaaaggtctccctgt

SEQ ID NO: 156428 - DNA, 68 bp, Homo sapiens
tttcctgtcacctccttagaagagggcttctctggttatccaaaggtctccctgttggttttaactta

SEQ ID NO: 156429 - DNA, 66 bp, Homo sapiens
acctccttagaagagggcttctctggttatccaaaggtctccctgttggttttaacttaccagact

SEQ ID NO: 156430 - DNA, 71 bp, Homo sapiens
ttagaagagggcttctctggttatccaaaggtctccctgttggttttaacttaccagacttgtcattgtca

SEQ ID NO: 156431 - DNA, 73 bp, Homo sapiens
ttctctggttatccaaaggtctccctgttggttttaacttaccagacttgtcattgtcattggtatgtctgtc

SEQ ID NO: 156432 - DNA, 72 bp, Homo sapiens
caaaggtctccctgttggttttaacttaccagacttgtcattgtcattggtatgtctgtctccctcttatta

SEQ ID NO: 156433 - DNA, 73 bp, Homo sapiens
cctgttggttttaacttaccagacttgtcattgtcattggtatgtctgtctccctcttattacacgaaggcaa

SEQ ID NO: 156434 - DNA, 75 bp, Homo sapiens
tttaacttaccagacttgtcattgtcattggtatgtctgtctccctcttattacacgaaggcaagagtgtagaat

SEQ ID NO: 156435 - DNA, 76 bp, Homo sapiens
cttattacacgaaggcaagagtgtagaattttcttggataattgttctgtatcttgcatggtaggagctcaataaa

SEQ ID NO: 156436 - DNA, 77 bp, Homo sapiens
caagagtgtagaattttcttggataattgttctgtatcttgcatggtaggagctcaataaatattgtgtggaaagaa

SEQ ID NO: 156437 - DNA, 78 bp, Homo sapiens
gtgtagaattttcttggataattgttctgtatcttgcatggtaggagctcaataaatattgtgtggaaagaatgttga

SEQ ID NO: 156438 - DNA, 80 bp, Homo sapiens
gaatgttgaatatggccttcattgtatatacctttattcatgacaaaatatggcatatatgctttctaaaaatgtagtga

SEQ ID NO: 156439 - DNA, 79 bp, Homo sapiens
gaatatggccttcattgtatatacctttattcatgacaaaatatggcatatatgctttctaaaaatgtagtgaagagtg

SEQ ID NO: 156440 - DNA, 77 bp, Homo sapiens
ttgtatatacctttattcatgacaaaatatggcatatatgctttctaaaaatgtagtgaagagtgtttattaggcca

SEQ ID NO: 156441 - DNA, 77 bp, Homo sapiens
tacctttattcatgacaaaatatggcatatatgctttctaaaaatgtagtgaagagtgtttattaggccagtgagta

SEQ ID NO: 156442 - DNA, 77 bp, Homo sapiens
tcatgacaaaatatggcatatatgctttctaaaaatgtagtgaagagtgtttattaggccagtgagtatttatgttt

SEQ ID NO: 156443 - DNA, 77 bp, Homo sapiens
tggcatatatgctttctaaaaatgtagtgaagagtgtttattaggccagtgagtatttatgttttcatgtcttattc

SEQ ID NO: 156444 - DNA, 72 bp, Homo sapiens
gctttctaaaaatgtagtgaagagtgtttattaggccagtgagtatttatgttttcatgtcttattcttagt

SEQ ID NO: 156445 - DNA, 74 bp, Homo sapiens
aatgtagtgaagagtgtttattaggccagtgagtatttatgttttcatgtcttattcttagttttgcaagaagc

SEQ ID NO: 156446 - DNA, 74 bp, Homo sapiens
gtgaagagtgtttattaggccagtgagtatttatgttttcatgtcttattcttagttttgcaagaagcttacac

SEQ ID NO: 156447 - DNA, 75 bp, Homo sapiens
tttattaggccagtgagtatttatgttttcatgtcttattcttagttttgcaagaagcttacacttaaatgcaga

SEQ ID NO: 156448 - DNA, 75 bp, Homo sapiens
gtgagtatttatgttttcatgtcttattcttagttttgcaagaagcttacacttaaatgcagaaattatgctagg

SEQ ID NO: 156449 - DNA, 74 bp, Homo sapiens
gttttcatgtcttattcttagttttgcaagaagcttacacttaaatgcagaaattatgctaggtaattgactat

SEQ ID NO: 156450 - DNA, 75 bp, Homo sapiens
ttattcttagttttgcaagaagcttacacttaaatgcagaaattatgctaggtaattgactatttagcttcacga

SEQ ID NO: 156451 - DNA, 75 bp, Homo sapiens
gttttgcaagaagcttacacttaaatgcagaaattatgctaggtaattgactatttagcttcacgagatacttct

SEQ ID NO: 156452 - DNA, 75 bp, Homo sapiens
gcaagaagcttacacttaaatgcagaaattatgctaggtaattgactatttagcttcacgagatacttcttaaag

SEQ ID NO: 156453 - DNA, 74 bp, Homo sapiens
caagaagcttacacttaaatgcagaaattatgctaggtaattgactatttagcttcacgagatacttcttaaag

SEQ ID NO: 156454 - DNA, 74 bp, Homo sapiens
agcttacacttaaatgcagaaattatgctaggtaattgactatttagcttcacgagatacttcttaaagtcatt

SEQ ID NO: 156455 - DNA, 72 bp, Homo sapiens
aaatgcagaaattatgctaggtaattgactatttagcttcacgagatacttcttaaagtcatttatttttta

SEQ ID NO: 156456 - DNA, 72 bp, Homo sapiens
tgctaggtaattgactatttagcttcacgagatacttcttaaagtcatttattttttattggatttattgcc

SEQ ID NO: 156457 - DNA, 71 bp, Homo sapiens
gctaggtaattgactatttagcttcacgagatacttcttaaagtcatttattttttattggatttattgcc

SEQ ID NO: 156458 - DNA, 72 bp, Homo sapiens
ttgactatttagcttcacgagatacttcttaaagtcatttattttttattggatttattgcctccttcttgc

SEQ ID NO: 156459 - DNA, 72 bp, Homo sapiens
tgactatttagcttcacgagatacttcttaaagtcatttattttttattggatttattgcctccttcttgcc

SEQ ID NO: 156460 - DNA, 72 bp, Homo sapiens
ttagcttcacgagatacttcttaaagtcatttattttttattggatttattgcctccttcttgccctgatgg

SEQ ID NO: 156461 - DNA, 70 bp, Homo sapiens
cacgagatacttcttaaagtcatttattttttattggatttattgcctccttcttgccctgatggtaaaa

SEQ ID NO: 156462 - DNA, 69 bp, Homo sapiens
tcttaaagtcatttattttttattggatttattgcctccttcttgccctgatggtaaaaataacccaga

SEQ ID NO: 156463 - DNA, 69 bp, Homo sapiens
attttttattggatttattgcctccttcttgccctgatggtaaaaataacccagaatttatgtggacac

SEQ ID NO: 156464 - DNA, 74 bp, Homo sapiens
tattgcctccttcttgccctgatggtaaaaataacccagaatttatgtggacacctacatatgctttattacag

SEQ ID NO: 156465 - DNA, 75 bp, Homo sapiens
tcttgccctgatggtaaaaataacccagaatttatgtggacacctacatatgctttattacaggtgaatacatta

SEQ ID NO: 156466 - DNA, 73 bp, Homo sapiens
gatggtaaaaataacccagaatttatgtggacacctacatatgctttattacaggtgaatacattacatttta

SEQ ID NO: 156467 - DNA, 77 bp, Homo sapiens
ccagaatttatgtggacacctacatatgctttattacaggtgaatacattacattttaatactctgattaatcgaga

SEQ ID NO: 156468 - DNA, 77 bp, Homo sapiens
tgtggacacctacatatgctttattacaggtgaatacattacattttaatactctgattaatcgagaagtaatgtgg

SEQ ID NO: 156469 - DNA, 78 bp, Homo sapiens
cacctacatatgctttattacaggtgaatacattacattttaatactctgattaatcgagaagtaatgtggtgattca

SEQ ID NO: 156470 - DNA, 78 bp, Homo sapiens
acaggtgaatacattacattttaatactctgattaatcgagaagtaatgtggtgattcatgttttctggagatgtgtg

SEQ ID NO: 156471 - DNA, 75 bp, Homo sapiens
acattttaatactctgattaatcgagaagtaatgtggtgattcatgttttctggagatgtgtgtaagaaataact

SEQ ID NO: 156472 - DNA, 80 bp, Homo sapiens
taatactctgattaatcgagaagtaatgtggtgattcatgttttctggagatgtgtgtaagaaataactttgtcagcaga

SEQ ID NO: 156473 - DNA, 78 bp, Homo sapiens
ttaatcgagaagtaatgtggtgattcatgttttctggagatgtgtgtaagaaataactttgtcagcagaggtggagta

SEQ ID NO: 156474 - DNA, 76 bp, Homo sapiens
agtaatgtggtgattcatgttttctggagatgtgtgtaagaaataactttgtcagcagaggtggagtaggaagtct

SEQ ID NO: 156475 - DNA, 76 bp, Homo sapiens
attcatgttttctggagatgtgtgtaagaaataactttgtcagcagaggtggagtaggaagtcttcaggtgaagtg

SEQ ID NO: 156476 - DNA, 75 bp, Homo sapiens
ttctggagatgtgtgtaagaaataactttgtcagcagaggtggagtaggaagtcttcaggtgaagtggtaataat

SEQ ID NO: 156477 - DNA, 75 bp, Homo sapiens
tgtgtaagaaataactttgtcagcagaggtggagtaggaagtcttcaggtgaagtggtaataattgcataactta

SEQ ID NO: 156478 - DNA, 75 bp, Homo sapiens
aaataactttgtcagcagaggtggagtaggaagtcttcaggtgaagtggtaataattgcataacttatagctaca

SEQ ID NO: 156479 - DNA, 78 bp, Homo sapiens
agcagaggtggagtaggaagtcttcaggtgaagtggtaataattgcataacttatagctacatctatattccagacta

SEQ ID NO: 156480 - DNA, 77 bp, Homo sapiens
gagtaggaagtcttcaggtgaagtggtaataattgcataacttatagctacatctatattccagactaatattagct

SEQ ID NO: 156481 - DNA, 80 bp, Homo sapiens
agtcttcaggtgaagtggtaataattgcataacttatagctacatctatattccagactaatattagcttgtgactatgc

SEQ ID NO: 156482 - DNA, 80 bp, Homo sapiens
aggtgaagtggtaataattgcataacttatagctacatctatattccagactaatattagcttgtgactatgctttatca

SEQ ID NO: 156483 - DNA, 81 bp, Homo sapiens
gtaataattgcataacttatagctacatctatattccagactaatattagcttgtgactatgctttatcatacaactgaac

SEQ ID NO: 156484 - DNA, 81 bp, Homo sapiens
cataacttatagctacatctatattccagactaatattagcttgtgactatgctttatcatacaactgaactatatttgaa

SEQ ID NO: 156485 - DNA, 77 bp, Homo sapiens
agctacatctatattccagactaatattagcttgtgactatgctttatcatacaactgaactatatttgaaactttt

SEQ ID NO: 156486 - DNA, 79 bp, Homo sapiens
tgtgcctggctgtcaatagttgtatttttaaatattggtactgctgaagatctgtttctggtgactgatgttttaatga

SEQ ID NO: 156487 - DNA, 78 bp, Homo sapiens
ctggctgtcaatagttgtatttttaaatattggtactgctgaagatctgtttctggtgactgatgttttaatgagatg

SEQ ID NO: 156488 - DNA, 82 bp, Homo sapiens
tgtatttttaaatattggtactgctgaagatctgtttctggtgactgatgttttaatgagatggatgattgccaatgatgta

SEQ ID NO: 156489 - DNA, 80 bp, Homo sapiens
tttaaatattggtactgctgaagatctgtttctggtgactgatgttttaatgagatggatgattgccaatgatgtatttt

SEQ ID NO: 156490 - DNA, 82 bp, Homo sapiens
tggtactgctgaagatctgtttctggtgactgatgttttaatgagatggatgattgccaatgatgtatttttagtatttata

SEQ ID NO: 156491 - DNA, 79 bp, Homo sapiens
tctgtttctggtgactgatgttttaatgagatggatgattgccaatgatgtatttttagtatttataggcatccctatt

SEQ ID NO: 156492 - DNA, 77 bp, Homo sapiens
ttctggtgactgatgttttaatgagatggatgattgccaatgatgtatttttagtatttataggcatccctattttt

SEQ ID NO: 156493 - DNA, 64 bp, Homo sapiens
ttttatttttgataagttgaatctcattggtggttataaccttttaaaaatcttttatttcctt

SEQ ID NO: 156494 - DNA, 66 bp, Homo sapiens
ttgataagttgaatctcattggtggttataaccttttaaaaatcttttatttcctttaataactgg

SEQ ID NO: 156495 - DNA, 64 bp, Homo sapiens
tgaatctcattggtggttataaccttttaaaaatcttttatttcctttaataactggttacgtt

SEQ ID NO: 156496 - DNA, 62 bp, Homo sapiens
tataaccttttaaaaatcttttatttcctttaataactggttacgttttatgtttgattcgg

SEQ ID NO: 156497 - DNA, 62 bp, Homo sapiens
taaccttttaaaaatcttttatttcctttaataactggttacgttttatgtttgattcggtg

SEQ ID NO: 156498 - DNA, 76 bp, Homo sapiens
tacgttttatgtttgattcggtgtgttcttgtaagtctgagggacagctcttatctaacagtgttgagtcatctta

SEQ ID NO: 156499 - DNA, 77 bp, Homo sapiens
ttatgtttgattcggtgtgttcttgtaagtctgagggacagctcttatctaacagtgttgagtcatcttaagttgaa

SEQ ID NO: 156500 - DNA, 77 bp, Homo sapiens
ttcggtgtgttcttgtaagtctgagggacagctcttatctaacagtgttgagtcatcttaagttgaaactacatcta

SEQ ID NO: 156501 - DNA, 76 bp, Homo sapiens
taagtctgagggacagctcttatctaacagtgttgagtcatcttaagttgaaactacatctaggctagtttcaatt

SEQ ID NO: 156502 - DNA, 76 bp, Homo sapiens
agggacagctcttatctaacagtgttgagtcatcttaagttgaaactacatctaggctagtttcaatttgctgtct

SEQ ID NO: 156503 - DNA, 78 bp, Homo sapiens
ttatctaacagtgttgagtcatcttaagttgaaactacatctaggctagtttcaatttgctgtcttcctgccagtgaa

SEQ ID NO: 156504 - DNA, 75 bp, Homo sapiens
tgttgagtcatcttaagttgaaactacatctaggctagtttcaatttgctgtcttcctgccagtgaaaaataatt

SEQ ID NO: 156505 - DNA, 73 bp, Homo sapiens
agtcatcttaagttgaaactacatctaggctagtttcaatttgctgtcttcctgccagtgaaaaataatttta

SEQ ID NO: 156506 - DNA, 72 bp, Homo sapiens
agttgaaactacatctaggctagtttcaatttgctgtcttcctgccagtgaaaaataattttattttacata

SEQ ID NO: 156507 - DNA, 68 bp, Homo sapiens
aaaaataattttattttacataatttgcagacctgatggaaaataagtgttataactgtagactttta

SEQ ID NO: 156508 - DNA, 72 bp, Homo sapiens
ttattttacataatttgcagacctgatggaaaataagtgttataactgtagacttttataacactatcaaac

SEQ ID NO: 156509 - DNA, 75 bp, Homo sapiens
cataatttgcagacctgatggaaaataagtgttataactgtagacttttataacactatcaaactgtgattgtgg

SEQ ID NO: 156510 - DNA, 73 bp, Homo sapiens
gcagacctgatggaaaataagtgttataactgtagacttttataacactatcaaactgtgattgtggttaaat

SEQ ID NO: 156511 - DNA, 72 bp, Homo sapiens
aaataagtgttataactgtagacttttataacactatcaaactgtgattgtggttaaattaatagtggcaga

SEQ ID NO: 156512 - DNA, 75 bp, Homo sapiens
tataactgtagacttttataacactatcaaactgtgattgtggttaaattaatagtggcagactagcagaagtgg

SEQ ID NO: 156513 - DNA, 76 bp, Homo sapiens
ataacactatcaaactgtgattgtggttaaattaatagtggcagactagcagaagtgggtctttcatattcttgaa

SEQ ID NO: 156514 - DNA, 74 bp, Homo sapiens
atcaaactgtgattgtggttaaattaatagtggcagactagcagaagtgggtctttcatattcttgaaaaacag

SEQ ID NO: 156515 - DNA, 75 bp, Homo sapiens
tgtggttaaattaatagtggcagactagcagaagtgggtctttcatattcttgaaaaacagggatcataaatgat

SEQ ID NO: 156516 - DNA, 75 bp, Homo sapiens
agactagcagaagtgggtctttcatattcttgaaaaacagggatcataaatgattaggatatgataccaaattgg

SEQ ID NO: 156517 - DNA, 75 bp, Homo sapiens
gaagtgggtctttcatattcttgaaaaacagggatcataaatgattaggatatgataccaaattggtgagaagct

SEQ ID NO: 156518 - DNA, 74 bp, Homo sapiens
tcatattcttgaaaaacagggatcataaatgattaggatatgataccaaattggtgagaagcttaagaaacgtt

SEQ ID NO: 156519 - DNA, 75 bp, Homo sapiens
gaaaaacagggatcataaatgattaggatatgataccaaattggtgagaagcttaagaaacgtttatgattgtca

SEQ ID NO: 156520 - DNA, 76 bp, Homo sapiens
cagggatcataaatgattaggatatgataccaaattggtgagaagcttaagaaacgtttatgattgtcattaagga

SEQ ID NO: 156521 - DNA, 77 bp, Homo sapiens
aatgattaggatatgataccaaattggtgagaagcttaagaaacgtttatgattgtcattaaggatttgattgagca

SEQ ID NO: 156522 - DNA, 77 bp, Homo sapiens
gatatgataccaaattggtgagaagcttaagaaacgtttatgattgtcattaaggatttgattgagcaattgtagtg

SEQ ID NO: 156523 - DNA, 76 bp, Homo sapiens
caaattggtgagaagcttaagaaacgtttatgattgtcattaaggatttgattgagcaattgtagtgtataaagca

SEQ ID NO: 156524 - DNA, 75 bp, Homo sapiens
gcttaagaaacgtttatgattgtcattaaggatttgattgagcaattgtagtgtataaagcattatttctaggtg

SEQ ID NO: 156525 - DNA, 74 bp, Homo sapiens
agaaacgtttatgattgtcattaaggatttgattgagcaattgtagtgtataaagcattatttctaggtgttgg

SEQ ID NO: 156526 - DNA, 78 bp, Homo sapiens
tgtcattaaggatttgattgagcaattgtagtgtataaagcattatttctaggtgttggttaatctggtagcatagac

SEQ ID NO: 156527 - DNA, 76 bp, Homo sapiens
ggatttgattgagcaattgtagtgtataaagcattatttctaggtgttggttaatctggtagcatagactaatttg

SEQ ID NO: 156528 - DNA, 76 bp, Homo sapiens
gattgagcaattgtagtgtataaagcattatttctaggtgttggttaatctggtagcatagactaatttgtttata

SEQ ID NO: 156529 - DNA, 72 bp, Homo sapiens
ttgtagtgtataaagcattatttctaggtgttggttaatctggtagcatagactaatttgtttataaacagt

SEQ ID NO: 156530 - DNA, 72 bp, Homo sapiens
gcattatttctaggtgttggttaatctggtagcatagactaatttgtttataaacagttttaccagacttga

SEQ ID NO: 156531 - DNA, 69 bp, Homo sapiens
ctaggtgttggttaatctggtagcatagactaatttgtttataaacagttttaccagacttgaattttg

SEQ ID NO: 156532 - DNA, 73 bp, Homo sapiens
taatctggtagcatagactaatttgtttataaacagttttaccagacttgaattttggtgtaatgtcagacag

SEQ ID NO: 156533 - DNA, 70 bp, Homo sapiens
atttgtttataaacagttttaccagacttgaattttggtgtaatgtcagacagtgtgtactaataagtag

SEQ ID NO: 156534 - DNA, 75 bp, Homo sapiens
taataagtaggatagcatttattttgatataaacatgtttctttattataaataaaatgtatatgcaggtagcag

SEQ ID NO: 156535 - DNA, 76 bp, Homo sapiens
ggatagcatttattttgatataaacatgtttctttattataaataaaatgtatatgcaggtagcagttattgaaca

SEQ ID NO: 156536 - DNA, 78 bp, Homo sapiens
tattttgatataaacatgtttctttattataaataaaatgtatatgcaggtagcagttattgaacatatgagactgaa

SEQ ID NO: 156537 - DNA, 77 bp, Homo sapiens
aaacatgtttctttattataaataaaatgtatatgcaggtagcagttattgaacatatgagactgaactcatttgaa

SEQ ID NO: 156538 - DNA, 76 bp, Homo sapiens
gtttctttattataaataaaatgtatatgcaggtagcagttattgaacatatgagactgaactcatttgaaaatta

SEQ ID NO: 156539 - DNA, 79 bp, Homo sapiens
gtatatgcaggtagcagttattgaacatatgagactgaactcatttgaaaattattttcaggttagattgagtcttgat

SEQ ID NO: 156540 - DNA, 78 bp, Homo sapiens
caggtagcagttattgaacatatgagactgaactcatttgaaaattattttcaggttagattgagtcttgatttctgc

SEQ ID NO: 156541 - DNA, 77 bp, Homo sapiens
gaacatatgagactgaactcatttgaaaattattttcaggttagattgagtcttgatttctgctgttgttcaaatgt

SEQ ID NO: 156542 - DNA, 77 bp, Homo sapiens
atgagactgaactcatttgaaaattattttcaggttagattgagtcttgatttctgctgttgttcaaatgtttgcta

SEQ ID NO: 156543 - DNA, 74 bp, Homo sapiens
catttgaaaattattttcaggttagattgagtcttgatttctgctgttgttcaaatgtttgctatttctgttag

SEQ ID NO: 156544 - DNA, 76 bp, Homo sapiens
ttattttcaggttagattgagtcttgatttctgctgttgttcaaatgtttgctatttctgttagttttctggctga

SEQ ID NO: 156545 - DNA, 79 bp, Homo sapiens
tcttgatttctgctgttgttcaaatgtttgctatttctgttagttttctggctgatagtatataggatatacccattca

SEQ ID NO: 156546 - DNA, 76 bp, Homo sapiens
tttctgctgttgttcaaatgtttgctatttctgttagttttctggctgatagtatataggatatacccattcacct

SEQ ID NO: 156547 - DNA, 75 bp, Homo sapiens
gttcaaatgtttgctatttctgttagttttctggctgatagtatataggatatacccattcaccttgtagatact

SEQ ID NO: 156548 - DNA, 77 bp, Homo sapiens
ctatttctgttagttttctggctgatagtatataggatatacccattcaccttgtagatacttaagacagagatcaa

SEQ ID NO: 156549 - DNA, 79 bp, Homo sapiens
tgttagttttctggctgatagtatataggatatacccattcaccttgtagatacttaagacagagatcaaatgtatctg

SEQ ID NO: 156550 - DNA, 81 bp, Homo sapiens
gctgatagtatataggatatacccattcaccttgtagatacttaagacagagatcaaatgtatctgtctgacctacattta

SEQ ID NO: 156551 - DNA, 79 bp, Homo sapiens
tatataggatatacccattcaccttgtagatacttaagacagagatcaaatgtatctgtctgacctacatttacacttg

SEQ ID NO: 156552 - DNA, 80 bp, Homo sapiens
ttcaccttgtagatacttaagacagagatcaaatgtatctgtctgacctacatttacacttgtaagttggatactgagca

SEQ ID NO: 156553 - DNA, 78 bp, Homo sapiens
agatcaaatgtatctgtctgacctacatttacacttgtaagttggatactgagcagtgtgccaaatcccacagaccct

SEQ ID NO: 156554 - DNA, 76 bp, Homo sapiens
aaatgtatctgtctgacctacatttacacttgtaagttggatactgagcagtgtgccaaatcccacagacccttta

SEQ ID NO: 156555 - DNA, 72 bp, Homo sapiens
acctacatttacacttgtaagttggatactgagcagtgtgccaaatcccacagaccctttaaccagttctgg

SEQ ID NO: 156556 - DNA, 74 bp, Homo sapiens
atttacacttgtaagttggatactgagcagtgtgccaaatcccacagaccctttaaccagttctgggcatgtcg

SEQ ID NO: 156557 - DNA, 76 bp, Homo sapiens
tgtaagttggatactgagcagtgtgccaaatcccacagaccctttaaccagttctgggcatgtcggagttggctaa

SEQ ID NO: 156558 - DNA, 81 bp, Homo sapiens
tactgagcagtgtgccaaatcccacagaccctttaaccagttctgggcatgtcggagttggctaacgctgatgtgctgata

SEQ ID NO: 156559 - DNA, 76 bp, Homo sapiens
ccaaatcccacagaccctttaaccagttctgggcatgtcggagttggctaacgctgatgtgctgatagggcctgaa

SEQ ID NO: 156560 - DNA, 75 bp, Homo sapiens
acagaccctttaaccagttctgggcatgtcggagttggctaacgctgatgtgctgatagggcctgaaaaatctac

SEQ ID NO: 156561 - DNA, 74 bp, Homo sapiens
ctttaaccagttctgggcatgtcggagttggctaacgctgatgtgctgatagggcctgaaaaatctaccggtgg

SEQ ID NO: 156562 - DNA, 76 bp, Homo sapiens
gttctgggcatgtcggagttggctaacgctgatgtgctgatagggcctgaaaaatctaccggtgggcttccagttc

SEQ ID NO: 156563 - DNA, 77 bp, Homo sapiens
tgtcggagttggctaacgctgatgtgctgatagggcctgaaaaatctaccggtgggcttccagttcgtgtctctcta

SEQ ID NO: 156564 - DNA, 78 bp, Homo sapiens
taacgctgatgtgctgatagggcctgaaaaatctaccggtgggcttccagttcgtgtctctctatgtgggagttcata

SEQ ID NO: 156565 - DNA, 77 bp, Homo sapiens
atgtgctgatagggcctgaaaaatctaccggtgggcttccagttcgtgtctctctatgtgggagttcatagcaggag

SEQ ID NO: 156566 - DNA, 77 bp, Homo sapiens
gcttccagttcgtgtctctctatgtgggagttcatagcaggagtgtgcgtgttctaagaattgtaccgtctttgtta

SEQ ID NO: 156567 - DNA, 76 bp, Homo sapiens
agttcgtgtctctctatgtgggagttcatagcaggagtgtgcgtgttctaagaattgtaccgtctttgttaatgag

SEQ ID NO: 156568 - DNA, 74 bp, Homo sapiens
agttcatagcaggagtgtgcgtgttctaagaattgtaccgtctttgttaatgagtagaagatttttctgaacat

SEQ ID NO: 156569 - DNA, 71 bp, Homo sapiens
aagaattgtaccgtctttgttaatgagtagaagatttttctgaacatttctcgttgtgtgtaactgggcta

SEQ ID NO: 156570 - DNA, 74 bp, Homo sapiens
ccgtctttgttaatgagtagaagatttttctgaacatttctcgttgtgtgtaactgggctaaagcaggctgaga

SEQ ID NO: 156571 - DNA, 76 bp, Homo sapiens
taatgagtagaagatttttctgaacatttctcgttgtgtgtaactgggctaaagcaggctgagaggtggcaaggga

SEQ ID NO: 156572 - DNA, 75 bp, Homo sapiens
atttttctgaacatttctcgttgtgtgtaactgggctaaagcaggctgagaggtggcaagggagatctttgccta

SEQ ID NO: 156573 - DNA, 78 bp, Homo sapiens
aacatttctcgttgtgtgtaactgggctaaagcaggctgagaggtggcaagggagatctttgcctagctgaagtcatc

SEQ ID NO: 156574 - DNA, 80 bp, Homo sapiens
tgtgtgtaactgggctaaagcaggctgagaggtggcaagggagatctttgcctagctgaagtcatctggttgagatttta

SEQ ID NO: 156575 - DNA, 79 bp, Homo sapiens
taactgggctaaagcaggctgagaggtggcaagggagatctttgcctagctgaagtcatctggttgagattttattcta

SEQ ID NO: 156576 - DNA, 78 bp, Homo sapiens
gagatctttgcctagctgaagtcatctggttgagattttattctagcaaccataagaacataaaattcactaatcatt

SEQ ID NO: 156577 - DNA, 79 bp, Homo sapiens
gcctagctgaagtcatctggttgagattttattctagcaaccataagaacataaaattcactaatcattttgacatatg

SEQ ID NO: 156578 - DNA, 76 bp, Homo sapiens
tttattctagcaaccataagaacataaaattcactaatcattttgacatatgtgattgaccaaaaccatattagaa

SEQ ID NO: 156579 - DNA, 76 bp, Homo sapiens
tcactaatcattttgacatatgtgattgaccaaaaccatattagaatttaatttagaaagtgaatgtgcttaataa

SEQ ID NO: 156580 - DNA, 77 bp, Homo sapiens
tgacatatgtgattgaccaaaaccatattagaatttaatttagaaagtgaatgtgcttaataaagtgagaataagca

SEQ ID NO: 156581 - DNA, 76 bp, Homo sapiens
tgtgattgaccaaaaccatattagaatttaatttagaaagtgaatgtgcttaataaagtgagaataagcatataga

SEQ ID NO: 156582 - DNA, 74 bp, Homo sapiens
ccatattagaatttaatttagaaagtgaatgtgcttaataaagtgagaataagcatatagagaggtggttcaaa

SEQ ID NO: 156583 - DNA, 75 bp, Homo sapiens
atttaatttagaaagtgaatgtgcttaataaagtgagaataagcatatagagaggtggttcaaatacaagcagga

SEQ ID NO: 156584 - DNA, 75 bp, Homo sapiens
gaaagtgaatgtgcttaataaagtgagaataagcatatagagaggtggttcaaatacaagcaggaaggtattttc

SEQ ID NO: 156585 - DNA, 75 bp, Homo sapiens
atgtgcttaataaagtgagaataagcatatagagaggtggttcaaatacaagcaggaaggtattttcccagtgta

SEQ ID NO: 156586 - DNA, 73 bp, Homo sapiens
taaagtgagaataagcatatagagaggtggttcaaatacaagcaggaaggtattttcccagtgtatttccaaa

SEQ ID NO: 156587 - DNA, 70 bp, Homo sapiens
aagcatatagagaggtggttcaaatacaagcaggaaggtattttcccagtgtatttccaaaaaggataat

SEQ ID NO: 156588 - DNA, 69 bp, Homo sapiens
tagagaggtggttcaaatacaagcaggaaggtattttcccagtgtatttccaaaaaggataatttgaag

SEQ ID NO: 156589 - DNA, 67 bp, Homo sapiens
ggttcaaatacaagcaggaaggtattttcccagtgtatttccaaaaaggataatttgaagttttata

SEQ ID NO: 156590 - DNA, 66 bp, Homo sapiens
acaagcaggaaggtattttcccagtgtatttccaaaaaggataatttgaagttttatacttacaaa

SEQ ID NO: 156591 - DNA, 73 bp, Homo sapiens
ccagtgtatttccaaaaaggataatttgaagttttatacttacaaatttatgcatgtatgtcatgagtgaaac

SEQ ID NO: 156592 - DNA, 74 bp, Homo sapiens
aaaggataatttgaagttttatacttacaaatttatgcatgtatgtcatgagtgaaactcttttgaggaactga

SEQ ID NO: 156593 - DNA, 75 bp, Homo sapiens
tttgaagttttatacttacaaatttatgcatgtatgtcatgagtgaaactcttttgaggaactgaaatggaatag

SEQ ID NO: 156594 - DNA, 77 bp, Homo sapiens
atacttacaaatttatgcatgtatgtcatgagtgaaactcttttgaggaactgaaatggaatagtttactatggctg

SEQ ID NO: 156595 - DNA, 70 bp, Homo sapiens
agtgaaactcttttgaggaactgaaatggaatagtttactatggctggaaaagagccaaaatttttgtgc

SEQ ID NO: 156596 - DNA, 70 bp, Homo sapiens
actcttttgaggaactgaaatggaatagtttactatggctggaaaagagccaaaatttttgtgcttttgc

SEQ ID NO: 156597 - DNA, 71 bp, Homo sapiens
ggaactgaaatggaatagtttactatggctggaaaagagccaaaatttttgtgcttttgctcacaagaaat

SEQ ID NO: 156598 - DNA, 71 bp, Homo sapiens
atggaatagtttactatggctggaaaagagccaaaatttttgtgcttttgctcacaagaaatttaatgtta

SEQ ID NO: 156599 - DNA, 72 bp, Homo sapiens
tactatggctggaaaagagccaaaatttttgtgcttttgctcacaagaaatttaatgttaaaattgtatggc

SEQ ID NO: 156600 - DNA, 70 bp, Homo sapiens
ggaaaagagccaaaatttttgtgcttttgctcacaagaaatttaatgttaaaattgtatggcttacagaa

SEQ ID NO: 156601 - DNA, 72 bp, Homo sapiens
atttttgtgcttttgctcacaagaaatttaatgttaaaattgtatggcttacagaaaataagcaatgtcaac

SEQ ID NO: 156602 - DNA, 73 bp, Homo sapiens
ctcacaagaaatttaatgttaaaattgtatggcttacagaaaataagcaatgtcaaccttggttgcacatgtt

SEQ ID NO: 156603 - DNA, 74 bp, Homo sapiens
atgttaaaattgtatggcttacagaaaataagcaatgtcaaccttggttgcacatgtttacactttgctgtgtt

SEQ ID NO: 156604 - DNA, 73 bp, Homo sapiens
aaattgtatggcttacagaaaataagcaatgtcaaccttggttgcacatgtttacactttgctgtgtttttag

SEQ ID NO: 156605 - DNA, 76 bp, Homo sapiens
ttacagaaaataagcaatgtcaaccttggttgcacatgtttacactttgctgtgtttttaggctgaatatacacaa

SEQ ID NO: 156606 - DNA, 76 bp, Homo sapiens
ataagcaatgtcaaccttggttgcacatgtttacactttgctgtgtttttaggctgaatatacacaacttgcttta

SEQ ID NO: 156607 - DNA, 72 bp, Homo sapiens
aaccttggttgcacatgtttacactttgctgtgtttttaggctgaatatacacaacttgctttaccttgtaa

SEQ ID NO: 156608 - DNA, 73 bp, Homo sapiens
cacatgtttacactttgctgtgtttttaggctgaatatacacaacttgctttaccttgtaagcgtcactcctt

SEQ ID NO: 156609 - DNA, 73 bp, Homo sapiens
tacactttgctgtgtttttaggctgaatatacacaacttgctttaccttgtaagcgtcactcctttgtagtta

SEQ ID NO: 156610 - DNA, 75 bp, Homo sapiens
tatacacaacttgctttaccttgtaagcgtcactcctttgtagttagagtggctatgtggaaccctgtgagtaca

SEQ ID NO: 156611 - DNA, 73 bp, Homo sapiens
tttaccttgtaagcgtcactcctttgtagttagagtggctatgtggaaccctgtgagtacaagtgggcactat

SEQ ID NO: 156612 - DNA, 74 bp, Homo sapiens
tcctttgtagttagagtggctatgtggaaccctgtgagtacaagtgggcactattaataattataccaggacaa

SEQ ID NO: 156613 - DNA, 76 bp, Homo sapiens
tagttagagtggctatgtggaaccctgtgagtacaagtgggcactattaataattataccaggacaacagccataa

SEQ ID NO: 156614 - DNA, 75 bp, Homo sapiens
tatgtggaaccctgtgagtacaagtgggcactattaataattataccaggacaacagccataaactggagttgtc

SEQ ID NO: 156615 - DNA, 74 bp, Homo sapiens
tgtgagtacaagtgggcactattaataattataccaggacaacagccataaactggagttgtctcctttaactc

SEQ ID NO: 156616 - DNA, 71 bp, Homo sapiens
aagtgggcactattaataattataccaggacaacagccataaactggagttgtctcctttaactctaggta

SEQ ID NO: 156617 - DNA, 71 bp, Homo sapiens
attaataattataccaggacaacagccataaactggagttgtctcctttaactctaggtatgaacaggttg

SEQ ID NO: 156618 - DNA, 73 bp, Homo sapiens
taattataccaggacaacagccataaactggagttgtctcctttaactctaggtatgaacaggttggacttgc

SEQ ID NO: 156619 - DNA, 71 bp, Homo sapiens
aacagccataaactggagttgtctcctttaactctaggtatgaacaggttggacttgctggcactgttttt

SEQ ID NO: 156620 - DNA, 70 bp, Homo sapiens
ataaactggagttgtctcctttaactctaggtatgaacaggttggacttgctggcactgttttttcagtt

SEQ ID NO: 156621 - DNA, 73 bp, Homo sapiens
ttgtctcctttaactctaggtatgaacaggttggacttgctggcactgttttttcagtttctgcagtttcaaa

SEQ ID NO: 156622 - DNA, 73 bp, Homo sapiens
tttaactctaggtatgaacaggttggacttgctggcactgttttttcagtttctgcagtttcaaacttcctga

SEQ ID NO: 156623 - DNA, 77 bp, Homo sapiens
ttcaaacttcctgaagtttattagtgcctgactgacctaggctgacaggacaagaccattttcacagaatattcaga

SEQ ID NO: 156624 - DNA, 74 bp, Homo sapiens
aagtttattagtgcctgactgacctaggctgacaggacaagaccattttcacagaatattcagacttttttgtg

SEQ ID NO: 156625 - DNA, 74 bp, Homo sapiens
tgcctgactgacctaggctgacaggacaagaccattttcacagaatattcagacttttttgtgggtgttttaaa

SEQ ID NO: 156626 - DNA, 67 bp, Homo sapiens
gaccattttcacagaatattcagacttttttgtgggtgttttaaaaaccatcttcctcttcggtagg

SEQ ID NO: 156627 - DNA, 69 bp, Homo sapiens
ttcacagaatattcagacttttttgtgggtgttttaaaaaccatcttcctcttcggtagggtggaagca

SEQ ID NO: 156628 - DNA, 67 bp, Homo sapiens
attcagacttttttgtgggtgttttaaaaaccatcttcctcttcggtagggtggaagcaggctgaaa

SEQ ID NO: 156629 - DNA, 70 bp, Homo sapiens
ttttgtgggtgttttaaaaaccatcttcctcttcggtagggtggaagcaggctgaaaagtacatattgca

SEQ ID NO: 156630 - DNA, 74 bp, Homo sapiens
tttaaaaaccatcttcctcttcggtagggtggaagcaggctgaaaagtacatattgcagttgaggctagctcta

SEQ ID NO: 156631 - DNA, 79 bp, Homo sapiens
atcttcctcttcggtagggtggaagcaggctgaaaagtacatattgcagttgaggctagctctagtctagctctgccac

SEQ ID NO: 156632 - DNA, 81 bp, Homo sapiens
gtagggtggaagcaggctgaaaagtacatattgcagttgaggctagctctagtctagctctgccactgactatagtaacaa

SEQ ID NO: 156633 - DNA, 83 bp, Homo sapiens
aagcaggctgaaaagtacatattgcagttgaggctagctctagtctagctctgccactgactatagtaacaacagcaggatag

SEQ ID NO: 156634 - DNA, 80 bp, Homo sapiens
atattgcagttgaggctagctctagtctagctctgccactgactatagtaacaacagcaggataggttgtttccaaatta

SEQ ID NO: 156635 - DNA, 77 bp, Homo sapiens
tagtctagctctgccactgactatagtaacaacagcaggataggttgtttccaaattaggaagtcgtgccttgcctc

SEQ ID NO: 156636 - DNA, 70 bp, Homo sapiens
actatagtaacaacagcaggataggttgtttccaaattaggaagtcgtgccttgcctcctaaaactccac

SEQ ID NO: 156637 - DNA, 70 bp, Homo sapiens
taacaacagcaggataggttgtttccaaattaggaagtcgtgccttgcctcctaaaactccacctgaaag

SEQ ID NO: 156638 - DNA, 71 bp, Homo sapiens
ttccaaattaggaagtcgtgccttgcctcctaaaactccacctgaaagtgcctttgattttcagaatagaa

SEQ ID NO: 156639 - DNA, 70 bp, Homo sapiens
taggaagtcgtgccttgcctcctaaaactccacctgaaagtgcctttgattttcagaatagaagaaaggt

SEQ ID NO: 156640 - DNA, 71 bp, Homo sapiens
acctgaaagtgcctttgattttcagaatagaagaaaggttgacccaacattatgatccgtgaaaaaaatgc

SEQ ID NO: 156641 - DNA, 72 bp, Homo sapiens
gcctttgattttcagaatagaagaaaggttgacccaacattatgatccgtgaaaaaaatgctcatttgtttg

SEQ ID NO: 156642 - DNA, 71 bp, Homo sapiens
ttcagaatagaagaaaggttgacccaacattatgatccgtgaaaaaaatgctcatttgtttgttgtttggg

SEQ ID NO: 156643 - DNA, 67 bp, Homo sapiens
aaggttgacccaacattatgatccgtgaaaaaaatgctcatttgtttgttgtttggggggtgtttta

SEQ ID NO: 156644 - DNA, 69 bp, Homo sapiens
acccaacattatgatccgtgaaaaaaatgctcatttgtttgttgtttggggggtgttttattggctgag

SEQ ID NO: 156645 - DNA, 72 bp, Homo sapiens
ttatgatccgtgaaaaaaatgctcatttgtttgttgtttggggggtgttttattggctgagtggtgcagtgg

SEQ ID NO: 156646 - DNA, 73 bp, Homo sapiens
aaaatgctcatttgtttgttgtttggggggtgttttattggctgagtggtgcagtgggctgttctattcagaa

SEQ ID NO: 156647 - DNA, 73 bp, Homo sapiens
atttgtttgttgtttggggggtgttttattggctgagtggtgcagtgggctgttctattcagaatcctagcaa

SEQ ID NO: 156648 - DNA, 82 bp, Homo sapiens
tgttttattggctgagtggtgcagtgggctgttctattcagaatcctagcaagttctcttgcttgagttcatacatgttcta

SEQ ID NO: 156649 - DNA, 82 bp, Homo sapiens
tattggctgagtggtgcagtgggctgttctattcagaatcctagcaagttctcttgcttgagttcatacatgttctattaaa

SEQ ID NO: 156650 - DNA, 76 bp, Homo sapiens
tgttctattcagaatcctagcaagttctcttgcttgagttcatacatgttctattaaaggaaaatcaggcggtttc

SEQ ID NO: 156651 - DNA, 76 bp, Homo sapiens
ttcagaatcctagcaagttctcttgcttgagttcatacatgttctattaaaggaaaatcaggcggtttctgctctt

SEQ ID NO: 156652 - DNA, 73 bp, Homo sapiens
tcttgcttgagttcatacatgttctattaaaggaaaatcaggcggtttctgctctttgcagacttaaaacttt

SEQ ID NO: 156653 - DNA, 69 bp, Homo sapiens
tattaaaggaaaatcaggcggtttctgctctttgcagacttaaaacttttggttcttccaagaatttgc

SEQ ID NO: 156654 - DNA, 68 bp, Homo sapiens
aaggaaaatcaggcggtttctgctctttgcagacttaaaacttttggttcttccaagaatttgctttc

SEQ ID NO: 156655 - DNA, 68 bp, Homo sapiens
aggcggtttctgctctttgcagacttaaaacttttggttcttccaagaatttgctttctctttattct

SEQ ID NO: 156656 - DNA, 72 bp, Homo sapiens
gctctttgcagacttaaaacttttggttcttccaagaatttgctttctctttattcttgtttgctcatagtg

SEQ ID NO: 156657 - DNA, 69 bp, Homo sapiens
taaaacttttggttcttccaagaatttgctttctctttattcttgtttgctcatagtggtactttccat

SEQ ID NO: 156658 - DNA, 73 bp, Homo sapiens
tggttcttccaagaatttgctttctctttattcttgtttgctcatagtggtactttccattgtggtctactta

SEQ ID NO: 156659 - DNA, 73 bp, Homo sapiens
caagaatttgctttctctttattcttgtttgctcatagtggtactttccattgtggtctacttattattctag

SEQ ID NO: 156660 - DNA, 72 bp, Homo sapiens
ttctctttattcttgtttgctcatagtggtactttccattgtggtctacttattattctagttcctgatttt

SEQ ID NO: 156661 - DNA, 73 bp, Homo sapiens
tcttgtttgctcatagtggtactttccattgtggtctacttattattctagttcctgatttttttataggaga

SEQ ID NO: 156662 - DNA, 72 bp, Homo sapiens
gctcatagtggtactttccattgtggtctacttattattctagttcctgatttttttataggagaaccaaca

SEQ ID NO: 156663 - DNA, 68 bp, Homo sapiens
gtggtactttccattgtggtctacttattattctagttcctgatttttttataggagaaccaacaaaa

SEQ ID NO: 156664 - DNA, 69 bp, Homo sapiens
ccattgtggtctacttattattctagttcctgatttttttataggagaaccaacaaaaattctgtcaat

SEQ ID NO: 156665 - DNA, 67 bp, Homo sapiens
acttattattctagttcctgatttttttataggagaaccaacaaaaattctgtcaattttttcactg

SEQ ID NO: 156666 - DNA, 68 bp, Homo sapiens
tttttataggagaaccaacaaaaattctgtcaattttttcactgttaaccagcttttggtactgagct

SEQ ID NO: 156667 - DNA, 69 bp, Homo sapiens
ataggagaaccaacaaaaattctgtcaattttttcactgttaaccagcttttggtactgagctttgagg

SEQ ID NO: 156668 - DNA, 69 bp, Homo sapiens
aacaaaaattctgtcaattttttcactgttaaccagcttttggtactgagctttgaggttgccagtttc

SEQ ID NO: 156669 - DNA, 70 bp, Homo sapiens
tgtcaattttttcactgttaaccagcttttggtactgagctttgaggttgccagtttccctcctcctctt

SEQ ID NO: 156670 - DNA, 70 bp, Homo sapiens
ttttcactgttaaccagcttttggtactgagctttgaggttgccagtttccctcctcctctttgacttcg

SEQ ID NO: 156671 - DNA, 71 bp, Homo sapiens
gtactgagctttgaggttgccagtttccctcctcctctttgacttcggttctgtatgttaagtagagaaaa

SEQ ID NO: 156672 - DNA, 69 bp, Homo sapiens
agtttccctcctcctctttgacttcggttctgtatgttaagtagagaaaatgaaatgggagtaacaata

SEQ ID NO: 156673 - DNA, 75 bp, Homo sapiens
tcctctttgacttcggttctgtatgttaagtagagaaaatgaaatgggagtaacaatatggtcactctcagacac

SEQ ID NO: 156674 - DNA, 76 bp, Homo sapiens
tttgacttcggttctgtatgttaagtagagaaaatgaaatgggagtaacaatatggtcactctcagacactatcca

SEQ ID NO: 156675 - DNA, 75 bp, Homo sapiens
gttctgtatgttaagtagagaaaatgaaatgggagtaacaatatggtcactctcagacactatccactgttttaa

SEQ ID NO: 156676 - DNA, 73 bp, Homo sapiens
ttaagtagagaaaatgaaatgggagtaacaatatggtcactctcagacactatccactgttttaaaaacattg

SEQ ID NO: 156677 - DNA, 71 bp, Homo sapiens
aatgaaatgggagtaacaatatggtcactctcagacactatccactgttttaaaaacattgtatttttaag

SEQ ID NO: 156678 - DNA, 70 bp, Homo sapiens
gggagtaacaatatggtcactctcagacactatccactgttttaaaaacattgtatttttaagttttata

SEQ ID NO: 156679 - DNA, 72 bp, Homo sapiens
gtcactctcagacactatccactgttttaaaaacattgtatttttaagttttataatctcttataaacatgc

SEQ ID NO: 156680 - DNA, 70 bp, Homo sapiens
ctcagacactatccactgttttaaaaacattgtatttttaagttttataatctcttataaacatgcttag

SEQ ID NO: 156681 - DNA, 73 bp, Homo sapiens
tttttaagttttataatctcttataaacatgcttagtataaaattcatagattgaggacatatctttcaaata

SEQ ID NO: 156682 - DNA, 74 bp, Homo sapiens
aagttttataatctcttataaacatgcttagtataaaattcatagattgaggacatatctttcaaatatgttat

SEQ ID NO: 156683 - DNA, 74 bp, Homo sapiens
aacatgcttagtataaaattcatagattgaggacatatctttcaaatatgttattttaaatattgttattatta

SEQ ID NO: 156684 - DNA, 73 bp, Homo sapiens
gtataaaattcatagattgaggacatatctttcaaatatgttattttaaatattgttattattatccaaataa

SEQ ID NO: 156685 - DNA, 77 bp, Homo sapiens
gattgaggacatatctttcaaatatgttattttaaatattgttattattatccaaataaacttctgagtgctgcaga

SEQ ID NO: 156686 - DNA, 77 bp, Homo sapiens
tatctttcaaatatgttattttaaatattgttattattatccaaataaacttctgagtgctgcagactcctagatgc

SEQ ID NO: 156687 - DNA, 78 bp, Homo sapiens
caaatatgttattttaaatattgttattattatccaaataaacttctgagtgctgcagactcctagatgctcatacag

SEQ ID NO: 156688 - DNA, 80 bp, Homo sapiens
ttaaatattgttattattatccaaataaacttctgagtgctgcagactcctagatgctcatacagtataccatgatttta

SEQ ID NO: 156689 - DNA, 80 bp, Homo sapiens
ttgttattattatccaaataaacttctgagtgctgcagactcctagatgctcatacagtataccatgattttacataggt

SEQ ID NO: 156690 - DNA, 81 bp, Homo sapiens
attatccaaataaacttctgagtgctgcagactcctagatgctcatacagtataccatgattttacataggttgcaaagaa

SEQ ID NO: 156691 - DNA, 80 bp, Homo sapiens
taaacttctgagtgctgcagactcctagatgctcatacagtataccatgattttacataggttgcaaagaacatttgttt

SEQ ID NO: 156692 - DNA, 80 bp, Homo sapiens
agtgctgcagactcctagatgctcatacagtataccatgattttacataggttgcaaagaacatttgtttttcaataata

SEQ ID NO: 156693 - DNA, 76 bp, Homo sapiens
actcctagatgctcatacagtataccatgattttacataggttgcaaagaacatttgtttttcaataatatgattt

SEQ ID NO: 156694 - DNA, 76 bp, Homo sapiens
gctcatacagtataccatgattttacataggttgcaaagaacatttgtttttcaataatatgattttacacgagct

SEQ ID NO: 156695 - DNA, 72 bp, Homo sapiens
ccatgattttacataggttgcaaagaacatttgtttttcaataatatgattttacacgagctttttaatgag

SEQ ID NO: 156696 - DNA, 70 bp, Homo sapiens
acataggttgcaaagaacatttgtttttcaataatatgattttacacgagctttttaatgagttattagg

SEQ ID NO: 156697 - DNA, 70 bp, Homo sapiens
gttgcaaagaacatttgtttttcaataatatgattttacacgagctttttaatgagttattaggttacat

SEQ ID NO: 156698 - DNA, 69 bp, Homo sapiens
tgtttttcaataatatgattttacacgagctttttaatgagttattaggttacattacattacactttt

SEQ ID NO: 156699 - DNA, 71 bp, Homo sapiens
ttcaataatatgattttacacgagctttttaatgagttattaggttacattacattacactttttacatta

SEQ ID NO: 156700 - DNA, 69 bp, Homo sapiens
tttacacgagctttttaatgagttattaggttacattacattacactttttacattaatttcattggga

SEQ ID NO: 156701 - DNA, 67 bp, Homo sapiens
cgagctttttaatgagttattaggttacattacattacactttttacattaatttcattgggaaaaa

SEQ ID NO: 156702 - DNA, 66 bp, Homo sapiens
aatgagttattaggttacattacattacactttttacattaatttcattgggaaaaacttggaatt

SEQ ID NO: 156703 - DNA, 64 bp, Homo sapiens
taggttacattacattacactttttacattaatttcattgggaaaaacttggaattttttttta

SEQ ID NO: 156704 - DNA, 78 bp, Homo sapiens
gagattttagtgcatccatcaccctagcagtgtacactgaacccagttagtagtcttttatctctcatcctcttccca

SEQ ID NO: 156705 - DNA, 76 bp, Homo sapiens
tttagtgcatccatcaccctagcagtgtacactgaacccagttagtagtcttttatctctcatcctcttcccaccc

SEQ ID NO: 156706 - DNA, 69 bp, Homo sapiens
accctagcagtgtacactgaacccagttagtagtcttttatctctcatcctcttcccacccttttcccc

SEQ ID NO: 156707 - DNA, 68 bp, Homo sapiens
agtgtacactgaacccagttagtagtcttttatctctcatcctcttcccacccttttccccgagtccc

SEQ ID NO: 156708 - DNA, 66 bp, Homo sapiens
actgaacccagttagtagtcttttatctctcatcctcttcccacccttttccccgagtccccgaag

SEQ ID NO: 156709 - DNA, 76 bp, Homo sapiens
agtccattgtgtcattcttaggcctttgtatcctcataagtgctcgcacttaggagcgagaacatatgtttggttt

SEQ ID NO: 156710 - DNA, 69 bp, Homo sapiens
tttttttttcgaaaggtataaaacgtgatagatggaacactggactacatcttgaataacaagtcacgg

SEQ ID NO: 156711 - DNA, 76 bp, Homo sapiens
ttttcgaaaggtataaaacgtgatagatggaacactggactacatcttgaataacaagtcacggtgcatcacacca

SEQ ID NO: 156712 - DNA, 77 bp, Homo sapiens
gtataaaacgtgatagatggaacactggactacatcttgaataacaagtcacggtgcatcacaccatgaaaacaccc

SEQ ID NO: 156713 - DNA, 78 bp, Homo sapiens
atagatggaacactggactacatcttgaataacaagtcacggtgcatcacaccatgaaaacacccctcctgccaccca

SEQ ID NO: 156714 - DNA, 77 bp, Homo sapiens
tggactacatcttgaataacaagtcacggtgcatcacaccatgaaaacacccctcctgccacccatggaacgattct

SEQ ID NO: 156715 - DNA, 74 bp, Homo sapiens
atcttgaataacaagtcacggtgcatcacaccatgaaaacacccctcctgccacccatggaacgattcttttta

SEQ ID NO: 156716 - DNA, 74 bp, Homo sapiens
ataacaagtcacggtgcatcacaccatgaaaacacccctcctgccacccatggaacgattctttttaagaggca

SEQ ID NO: 156717 - DNA, 73 bp, Homo sapiens
gtgcatcacaccatgaaaacacccctcctgccacccatggaacgattctttttaagaggcattgggaataaaa

SEQ ID NO: 156718 - DNA, 70 bp, Homo sapiens
atcacaccatgaaaacacccctcctgccacccatggaacgattctttttaagaggcattgggaataaaac

SEQ ID NO: 156719 - DNA, 68 bp, Homo sapiens
atgaaaacacccctcctgccacccatggaacgattctttttaagaggcattgggaataaaaccagttg

SEQ ID NO: 156720 - DNA, 70 bp, Homo sapiens
ccctcctgccacccatggaacgattctttttaagaggcattgggaataaaaccagttgtgtcaaggattc

SEQ ID NO: 156721 - DNA, 69 bp, Homo sapiens
tggaacgattctttttaagaggcattgggaataaaaccagttgtgtcaaggattctagtttgaacttac

SEQ ID NO: 156722 - DNA, 68 bp, Homo sapiens
cgattctttttaagaggcattgggaataaaaccagttgtgtcaaggattctagtttgaacttacttta

SEQ ID NO: 156723 - DNA, 66 bp, Homo sapiens
ctttttaagaggcattgggaataaaaccagttgtgtcaaggattctagtttgaacttactttattt

SEQ ID NO: 156724 - DNA, 71 bp, Homo sapiens
agaggcattgggaataaaaccagttgtgtcaaggattctagtttgaacttactttattttcatttctgctg

SEQ ID NO: 156725 - DNA, 70 bp, Homo sapiens
tgggaataaaaccagttgtgtcaaggattctagtttgaacttactttattttcatttctgctgtcctcct

SEQ ID NO: 156726 - DNA, 71 bp, Homo sapiens
cagttgtgtcaaggattctagtttgaacttactttattttcatttctgctgtcctcctttggaagattctt

SEQ ID NO: 156727 - DNA, 69 bp, Homo sapiens
caaggattctagtttgaacttactttattttcatttctgctgtcctcctttggaagattcttttaaata

SEQ ID NO: 156728 - DNA, 71 bp, Homo sapiens
tgaacttactttattttcatttctgctgtcctcctttggaagattcttttaaatacttttcatactctata

SEQ ID NO: 156729 - DNA, 73 bp, Homo sapiens
ttattttcatttctgctgtcctcctttggaagattcttttaaatacttttcatactctatacagtggcttatc

SEQ ID NO: 156730 - DNA, 74 bp, Homo sapiens
ttcatttctgctgtcctcctttggaagattcttttaaatacttttcatactctatacagtggcttatccctgta

SEQ ID NO: 156731 - DNA, 69 bp, Homo sapiens
caaaaaagaaaaacatttgtctgccttgcactttgaatggttcttttactcacgtgtgattttcttccc

SEQ ID NO: 156732 - DNA, 72 bp, Homo sapiens
aaacatttgtctgccttgcactttgaatggttcttttactcacgtgtgattttcttccctcttgttgattat

SEQ ID NO: 156733 - DNA, 73 bp, Homo sapiens
tctgccttgcactttgaatggttcttttactcacgtgtgattttcttccctcttgttgattattaggaaaata

SEQ ID NO: 156734 - DNA, 73 bp, Homo sapiens
gcactttgaatggttcttttactcacgtgtgattttcttccctcttgttgattattaggaaaatattgattca

SEQ ID NO: 156735 - DNA, 75 bp, Homo sapiens
tggttcttttactcacgtgtgattttcttccctcttgttgattattaggaaaatattgattcactgagttatgca

SEQ ID NO: 156736 - DNA, 77 bp, Homo sapiens
ctcacgtgtgattttcttccctcttgttgattattaggaaaatattgattcactgagttatgcagatctactaaatg

SEQ ID NO: 156737 - DNA, 77 bp, Homo sapiens
gtgattttcttccctcttgttgattattaggaaaatattgattcactgagttatgcagatctactaaatgttgataa

SEQ ID NO: 156738 - DNA, 76 bp, Homo sapiens
tccctcttgttgattattaggaaaatattgattcactgagttatgcagatctactaaatgttgataaatttcctta

SEQ ID NO: 156739 - DNA, 76 bp, Homo sapiens
tgattattaggaaaatattgattcactgagttatgcagatctactaaatgttgataaatttccttaaacaataaca

SEQ ID NO: 156740 - DNA, 73 bp, Homo sapiens
tattgattcactgagttatgcagatctactaaatgttgataaatttccttaaacaataacaaaatgttaacct

SEQ ID NO: 156741 - DNA, 71 bp, Homo sapiens
cactgagttatgcagatctactaaatgttgataaatttccttaaacaataacaaaatgttaacctttgtta

SEQ ID NO: 156742 - DNA, 70 bp, Homo sapiens
gcagatctactaaatgttgataaatttccttaaacaataacaaaatgttaacctttgttaatatcaccac

SEQ ID NO: 156743 - DNA, 74 bp, Homo sapiens
ataacaaaatgttaacctttgttaatatcaccactgatctcatcagaaaaattgtaagtatagggaagctctca

SEQ ID NO: 156744 - DNA, 76 bp, Homo sapiens
tgttaacctttgttaatatcaccactgatctcatcagaaaaattgtaagtatagggaagctctcaaactctcagta

SEQ ID NO: 156745 - DNA, 75 bp, Homo sapiens
ttaacctttgttaatatcaccactgatctcatcagaaaaattgtaagtatagggaagctctcaaactctcagtag

SEQ ID NO: 156746 - DNA, 78 bp, Homo sapiens
tttgttaatatcaccactgatctcatcagaaaaattgtaagtatagggaagctctcaaactctcagtagtggatacaa

SEQ ID NO: 156747 - DNA, 77 bp, Homo sapiens
tatcaccactgatctcatcagaaaaattgtaagtatagggaagctctcaaactctcagtagtggatacaagttttta

SEQ ID NO: 156748 - DNA, 74 bp, Homo sapiens
accactgatctcatcagaaaaattgtaagtatagggaagctctcaaactctcagtagtggatacaagtttttaa

SEQ ID NO: 156749 - DNA, 74 bp, Homo sapiens
ccactgatctcatcagaaaaattgtaagtatagggaagctctcaaactctcagtagtggatacaagtttttaaa

SEQ ID NO: 156750 - DNA, 72 bp, Homo sapiens
gatctcatcagaaaaattgtaagtatagggaagctctcaaactctcagtagtggatacaagtttttaaaaaa

SEQ ID NO: 156751 - DNA, 69 bp, Homo sapiens
catcagaaaaattgtaagtatagggaagctctcaaactctcagtagtggatacaagtttttaaaaaatt

SEQ ID NO: 156752 - DNA, 81 bp, Homo sapiens
ttcatttcagagctcaaattttattattgacatcactgtcataggcagcacttgaagagataagcttgcgttattcatttt

SEQ ID NO: 156753 - DNA, 80 bp, Homo sapiens
agagctcaaattttattattgacatcactgtcataggcagcacttgaagagataagcttgcgttattcatttttgacaaa

SEQ ID NO: 156754 - DNA, 81 bp, Homo sapiens
tttattattgacatcactgtcataggcagcacttgaagagataagcttgcgttattcatttttgacaaaatgtctgtcaaa

SEQ ID NO: 156755 - DNA, 80 bp, Homo sapiens
tgtcataggcagcacttgaagagataagcttgcgttattcatttttgacaaaatgtctgtcaaatatctaagcctaaata

SEQ ID NO: 156756 - DNA, 77 bp, Homo sapiens
gcacttgaagagataagcttgcgttattcatttttgacaaaatgtctgtcaaatatctaagcctaaataagcatagt

SEQ ID NO: 156757 - DNA, 75 bp, Homo sapiens
gagataagcttgcgttattcatttttgacaaaatgtctgtcaaatatctaagcctaaataagcatagttgttctt

SEQ ID NO: 156758 - DNA, 73 bp, Homo sapiens
gcgttattcatttttgacaaaatgtctgtcaaatatctaagcctaaataagcatagttgttctttcaagtaaa

SEQ ID NO: 156759 - DNA, 73 bp, Homo sapiens
tgacaaaatgtctgtcaaatatctaagcctaaataagcatagttgttctttcaagtaaaaaaatggtgttcca

SEQ ID NO: 156760 - DNA, 72 bp, Homo sapiens
gtctgtcaaatatctaagcctaaataagcatagttgttctttcaagtaaaaaaatggtgttccatgaaagaa

SEQ ID NO: 156761 - DNA, 71 bp, Homo sapiens
caaatatctaagcctaaataagcatagttgttctttcaagtaaaaaaatggtgttccatgaaagaagtgac

SEQ ID NO: 156762 - DNA, 71 bp, Homo sapiens
ctaagcctaaataagcatagttgttctttcaagtaaaaaaatggtgttccatgaaagaagtgactaattca

SEQ ID NO: 156763 - DNA, 72 bp, Homo sapiens
gcctaaataagcatagttgttctttcaagtaaaaaaatggtgttccatgaaagaagtgactaattcaattca

SEQ ID NO: 156764 - DNA, 71 bp, Homo sapiens
aataagcatagttgttctttcaagtaaaaaaatggtgttccatgaaagaagtgactaattcaattcacaac

SEQ ID NO: 156765 - DNA, 70 bp, Homo sapiens
aaaaaatggtgttccatgaaagaagtgactaattcaattcacaacttaaacaattgctcatatacttttt

SEQ ID NO: 156766 - DNA, 79 bp, Homo sapiens
ttttttgagacagctgtcaagctgtggtatgcagaagggctttatgtatgcctcccattttggcacataattgaacaaa

SEQ ID NO: 156767 - DNA, 75 bp, Homo sapiens
gctgtggtatgcagaagggctttatgtatgcctcccattttggcacataattgaacaaagaaacgtactcaattt

SEQ ID NO: 156768 - DNA, 74 bp, Homo sapiens
ggtatgcagaagggctttatgtatgcctcccattttggcacataattgaacaaagaaacgtactcaattttcaa

SEQ ID NO: 156769 - DNA, 74 bp, Homo sapiens
gctttatgtatgcctcccattttggcacataattgaacaaagaaacgtactcaattttcaaggaaatcagtcat

SEQ ID NO: 156770 - DNA, 71 bp, Homo sapiens
gtatgcctcccattttggcacataattgaacaaagaaacgtactcaattttcaaggaaatcagtcattttt

SEQ ID NO: 156771 - DNA, 71 bp, Homo sapiens
tggcacataattgaacaaagaaacgtactcaattttcaaggaaatcagtcatttttttctgttgtaccaaa

SEQ ID NO: 156772 - DNA, 69 bp, Homo sapiens
attgaacaaagaaacgtactcaattttcaaggaaatcagtcatttttttctgttgtaccaaagacattc

SEQ ID NO: 156773 - DNA, 68 bp, Homo sapiens
caaagaaacgtactcaattttcaaggaaatcagtcatttttttctgttgtaccaaagacattcttaag

SEQ ID NO: 156774 - DNA, 69 bp, Homo sapiens
actcaattttcaaggaaatcagtcatttttttctgttgtaccaaagacattcttaagtgaaactggctt

SEQ ID NO: 156775 - DNA, 67 bp, Homo sapiens
caaggaaatcagtcatttttttctgttgtaccaaagacattcttaagtgaaactggctttttaaaaa

SEQ ID NO: 156776 - DNA, 67 bp, Homo sapiens
gtcatttttttctgttgtaccaaagacattcttaagtgaaactggctttttaaaaaagtttgcatgg

SEQ ID NO: 156777 - DNA, 67 bp, Homo sapiens
ttctgttgtaccaaagacattcttaagtgaaactggctttttaaaaaagtttgcatggtagtaaaaa

SEQ ID NO: 156778 - DNA, 64 bp, Homo sapiens
ccaaagacattcttaagtgaaactggctttttaaaaaagtttgcatggtagtaaaaaatacgtt

SEQ ID NO: 156779 - DNA, 67 bp, Homo sapiens
cttaagtgaaactggctttttaaaaaagtttgcatggtagtaaaaaatacgttttgtatatagtgca

SEQ ID NO: 156780 - DNA, 73 bp, Homo sapiens
aaaaagtttgcatggtagtaaaaaatacgttttgtatatagtgcattttgatgctactgccttgatttggtgc

SEQ ID NO: 156781 - DNA, 77 bp, Homo sapiens
tttgcatggtagtaaaaaatacgttttgtatatagtgcattttgatgctactgccttgatttggtgctaaggtgcca

SEQ ID NO: 156782 - DNA, 80 bp, Homo sapiens
aaaaatacgttttgtatatagtgcattttgatgctactgccttgatttggtgctaaggtgccatcagctatactcatcat

SEQ ID NO: 156783 - DNA, 86 bp, Homo sapiens
ttttgtatatagtgcattttgatgctactgccttgatttggtgctaaggtgccatcagctatactcatcattgctttgaccattca

SEQ ID NO: 156784 - DNA, 88 bp, Homo sapiens
tatagtgcattttgatgctactgccttgatttggtgctaaggtgccatcagctatactcatcattgctttgaccattcatgcaaattc

SEQ ID NO: 156785 - DNA, 85 bp, Homo sapiens
tttgatgctactgccttgatttggtgctaaggtgccatcagctatactcatcattgctttgaccattcatgcaaattccaacaaa

SEQ ID NO: 156786 - DNA, 81 bp, Homo sapiens
ccttgatttggtgctaaggtgccatcagctatactcatcattgctttgaccattcatgcaaattccaacaaaatgagaaag

SEQ ID NO: 156787 - DNA, 84 bp, Homo sapiens
tgctaaggtgccatcagctatactcatcattgctttgaccattcatgcaaattccaacaaaatgagaaaggctaatactgtcaa

SEQ ID NO: 156788 - DNA, 81 bp, Homo sapiens
ccatcagctatactcatcattgctttgaccattcatgcaaattccaacaaaatgagaaaggctaatactgtcaaaatatta

SEQ ID NO: 156789 - DNA, 74 bp, Homo sapiens
ttgctttgaccattcatgcaaattccaacaaaatgagaaaggctaatactgtcaaaatattactaagaaaatag

SEQ ID NO: 156790 - DNA, 73 bp, Homo sapiens
gaccattcatgcaaattccaacaaaatgagaaaggctaatactgtcaaaatattactaagaaaatagttttga

SEQ ID NO: 156791 - DNA, 75 bp, Homo sapiens
ttccaacaaaatgagaaaggctaatactgtcaaaatattactaagaaaatagttttgatctcacagatgacctga

SEQ ID NO: 156792 - DNA, 75 bp, Homo sapiens
atgagaaaggctaatactgtcaaaatattactaagaaaatagttttgatctcacagatgacctgaaagggtctca

SEQ ID NO: 156793 - DNA, 72 bp, Homo sapiens
actgtcaaaatattactaagaaaatagttttgatctcacagatgacctgaaagggtctcagagaaccttggg

SEQ ID NO: 156794 - DNA, 73 bp, Homo sapiens
tattactaagaaaatagttttgatctcacagatgacctgaaagggtctcagagaaccttgggggttcatggac

SEQ ID NO: 156795 - DNA, 75 bp, Homo sapiens
aaaatagttttgatctcacagatgacctgaaagggtctcagagaaccttgggggttcatggactgcagtttatga

SEQ ID NO: 156796 - DNA, 76 bp, Homo sapiens
atgacctgaaagggtctcagagaaccttgggggttcatggactgcagtttatgagctgctgccctagaatgtttag

SEQ ID NO: 156797 - DNA, 76 bp, Homo sapiens
aagggtctcagagaaccttgggggttcatggactgcagtttatgagctgctgccctagaatgtttagtgatgagtt

SEQ ID NO: 156798 - DNA, 76 bp, Homo sapiens
accttgggggttcatggactgcagtttatgagctgctgccctagaatgtttagtgatgagttttagggctgattta

SEQ ID NO: 156799 - DNA, 76 bp, Homo sapiens
gggttcatggactgcagtttatgagctgctgccctagaatgtttagtgatgagttttagggctgatttaaaaaata

SEQ ID NO: 156800 - DNA, 75 bp, Homo sapiens
cagtttatgagctgctgccctagaatgtttagtgatgagttttagggctgatttaaaaaatatgtgtgttctaag

SEQ ID NO: 156801 - DNA, 75 bp, Homo sapiens
gctgctgccctagaatgtttagtgatgagttttagggctgatttaaaaaatatgtgtgttctaaggtagatatta

SEQ ID NO: 156802 - DNA, 71 bp, Homo sapiens
agtgatgagttttagggctgatttaaaaaatatgtgtgttctaaggtagatattatgtggttttccaagta

SEQ ID NO: 156803 - DNA, 69 bp, Homo sapiens
gagttttagggctgatttaaaaaatatgtgtgttctaaggtagatattatgtggttttccaagtaaggc

SEQ ID NO: 156804 - DNA, 69 bp, Homo sapiens
gatttaaaaaatatgtgtgttctaaggtagatattatgtggttttccaagtaaggctataatataaacg

SEQ ID NO: 156805 - DNA, 71 bp, Homo sapiens
tatgtgtgttctaaggtagatattatgtggttttccaagtaaggctataatataaacgtataatatttaaa

SEQ ID NO: 156806 - DNA, 69 bp, Homo sapiens
gtgttctaaggtagatattatgtggttttccaagtaaggctataatataaacgtataatatttaaaatg

SEQ ID NO: 156807 - DNA, 71 bp, Homo sapiens
gatattatgtggttttccaagtaaggctataatataaacgtataatatttaaaatgtaaacatagggctca

SEQ ID NO: 156808 - DNA, 70 bp, Homo sapiens
gttttccaagtaaggctataatataaacgtataatatttaaaatgtaaacatagggctcattattatgga

SEQ ID NO: 156809 - DNA, 72 bp, Homo sapiens
caagtaaggctataatataaacgtataatatttaaaatgtaaacatagggctcattattatggaagtataca

SEQ ID NO: 156810 - DNA, 72 bp, Homo sapiens
tataatataaacgtataatatttaaaatgtaaacatagggctcattattatggaagtatacatttcaacatt

SEQ ID NO: 156811 - DNA, 72 bp, Homo sapiens
cgtataatatttaaaatgtaaacatagggctcattattatggaagtatacatttcaacatttattttacgca

SEQ ID NO: 156812 - DNA, 73 bp, Homo sapiens
aaatgtaaacatagggctcattattatggaagtatacatttcaacatttattttacgcattatatattttctg

SEQ ID NO: 156813 - DNA, 73 bp, Homo sapiens
aaacatagggctcattattatggaagtatacatttcaacatttattttacgcattatatattttctgtattta

SEQ ID NO: 156814 - DNA, 74 bp, Homo sapiens
ctcattattatggaagtatacatttcaacatttattttacgcattatatattttctgtatttataaatgcctcc

SEQ ID NO: 156815 - DNA, 71 bp, Homo sapiens
tggaagtatacatttcaacatttattttacgcattatatattttctgtatttataaatgcctccttttaat

SEQ ID NO: 156816 - DNA, 75 bp, Homo sapiens
tttacgcattatatattttctgtatttataaatgcctccttttaatttttagttatcagtgctaagatgcacaca

SEQ ID NO: 156817 - DNA, 73 bp, Homo sapiens
ctgtatttataaatgcctccttttaatttttagttatcagtgctaagatgcacacatttacatttttgtgact

SEQ ID NO: 156818 - DNA, 75 bp, Homo sapiens
aatgcctccttttaatttttagttatcagtgctaagatgcacacatttacatttttgtgacttgagaatactggc

SEQ ID NO: 156819 - DNA, 77 bp, Homo sapiens
tttaatttttagttatcagtgctaagatgcacacatttacatttttgtgacttgagaatactggccacaagctatta

SEQ ID NO: 156820 - DNA, 81 bp, Homo sapiens
tgctaagatgcacacatttacatttttgtgacttgagaatactggccacaagctattagagtgatgaccatcaagttttat

SEQ ID NO: 156821 - DNA, 77 bp, Homo sapiens
acacatttacatttttgtgacttgagaatactggccacaagctattagagtgatgaccatcaagttttattacttga

SEQ ID NO: 156822 - DNA, 76 bp, Homo sapiens
atttttgtgacttgagaatactggccacaagctattagagtgatgaccatcaagttttattacttgaattcactcg

SEQ ID NO: 156823 - DNA, 78 bp, Homo sapiens
cttgagaatactggccacaagctattagagtgatgaccatcaagttttattacttgaattcactcgggatgtgaccta

SEQ ID NO: 156824 - DNA, 75 bp, Homo sapiens
aagctattagagtgatgaccatcaagttttattacttgaattcactcgggatgtgacctaagccacacctactta

SEQ ID NO: 156825 - DNA, 76 bp, Homo sapiens
tgatgaccatcaagttttattacttgaattcactcgggatgtgacctaagccacacctacttatgggacattttca

SEQ ID NO: 156826 - DNA, 71 bp, Homo sapiens
atcaagttttattacttgaattcactcgggatgtgacctaagccacacctacttatgggacattttcaagt

SEQ ID NO: 156827 - DNA, 73 bp, Homo sapiens
ttattacttgaattcactcgggatgtgacctaagccacacctacttatgggacattttcaagttctacttata

SEQ ID NO: 156828 - DNA, 75 bp, Homo sapiens
atgtgacctaagccacacctacttatgggacattttcaagttctacttatagatcttgtagttcagggagcagtg

SEQ ID NO: 156829 - DNA, 76 bp, Homo sapiens
ccacacctacttatgggacattttcaagttctacttatagatcttgtagttcagggagcagtggcgtctcatgtat

SEQ ID NO: 156830 - DNA, 81 bp, Homo sapiens
ttttcaagttctacttatagatcttgtagttcagggagcagtggcgtctcatgtattcagcacaatgtggagttatgctgt

SEQ ID NO: 156831 - DNA, 80 bp, Homo sapiens
aagttctacttatagatcttgtagttcagggagcagtggcgtctcatgtattcagcacaatgtggagttatgctgttgtt

SEQ ID NO: 156832 - DNA, 81 bp, Homo sapiens
gtagttcagggagcagtggcgtctcatgtattcagcacaatgtggagttatgctgttgtttaatgtggcttaggccttctg

SEQ ID NO: 156833 - DNA, 81 bp, Homo sapiens
agtggcgtctcatgtattcagcacaatgtggagttatgctgttgtttaatgtggcttaggccttctggcacttgtctgccc

SEQ ID NO: 156834 - DNA, 75 bp, Homo sapiens
agttatgctgttgtttaatgtggcttaggccttctggcacttgtctgccccttcagtctccgtctcccaaatata

SEQ ID NO: 156835 - DNA, 73 bp, Homo sapiens
tgttgtttaatgtggcttaggccttctggcacttgtctgccccttcagtctccgtctcccaaatataaactct

SEQ ID NO: 156836 - DNA, 75 bp, Homo sapiens
taatgtggcttaggccttctggcacttgtctgccccttcagtctccgtctcccaaatataaactcttgagttagc

SEQ ID NO: 156837 - DNA, 73 bp, Homo sapiens
acttgtctgccccttcagtctccgtctcccaaatataaactcttgagttagccaaccatcggctgtgtaaaga

SEQ ID NO: 156838 - DNA, 71 bp, Homo sapiens
cttcagtctccgtctcccaaatataaactcttgagttagccaaccatcggctgtgtaaagacgtctttttc

SEQ ID NO: 156839 - DNA, 71 bp, Homo sapiens
tccgtctcccaaatataaactcttgagttagccaaccatcggctgtgtaaagacgtctttttctcctacta

SEQ ID NO: 156840 - DNA, 69 bp, Homo sapiens
aaatataaactcttgagttagccaaccatcggctgtgtaaagacgtctttttctcctactatgtttagt

SEQ ID NO: 156841 - DNA, 69 bp, Homo sapiens
aactcttgagttagccaaccatcggctgtgtaaagacgtctttttctcctactatgtttagttgtattt

SEQ ID NO: 156842 - DNA, 68 bp, Homo sapiens
caaccatcggctgtgtaaagacgtctttttctcctactatgtttagttgtattttcccttggcttatt

SEQ ID NO: 156843 - DNA, 69 bp, Homo sapiens
gctgtgtaaagacgtctttttctcctactatgtttagttgtattttcccttggcttatttcctgagaaa

SEQ ID NO: 156844 - DNA, 69 bp, Homo sapiens
aagacgtctttttctcctactatgtttagttgtattttcccttggcttatttcctgagaaacagacaca

SEQ ID NO: 156845 - DNA, 71 bp, Homo sapiens
gtttagttgtattttcccttggcttatttcctgagaaacagacacacaaacacagacagtattttatgttc

SEQ ID NO: 156846 - DNA, 74 bp, Homo sapiens
tattttcccttggcttatttcctgagaaacagacacacaaacacagacagtattttatgttctaagaccaatca

SEQ ID NO: 156847 - DNA, 78 bp, Homo sapiens
tggcttatttcctgagaaacagacacacaaacacagacagtattttatgttctaagaccaatcacgcacatatggatt

SEQ ID NO: 156848 - DNA, 76 bp, Homo sapiens
atttcctgagaaacagacacacaaacacagacagtattttatgttctaagaccaatcacgcacatatggattttta

SEQ ID NO: 156849 - DNA, 75 bp, Homo sapiens
gacacacaaacacagacagtattttatgttctaagaccaatcacgcacatatggatttttaatacttcaaaataa

SEQ ID NO: 156850 - DNA, 75 bp, Homo sapiens
caaacacagacagtattttatgttctaagaccaatcacgcacatatggatttttaatacttcaaaataatatgtg

SEQ ID NO: 156851 - DNA, 75 bp, Homo sapiens
cagtattttatgttctaagaccaatcacgcacatatggatttttaatacttcaaaataatatgtggatatattaa

SEQ ID NO: 156852 - DNA, 72 bp, Homo sapiens
ctaagaccaatcacgcacatatggatttttaatacttcaaaataatatgtggatatattaaaaaaatacgtg

SEQ ID NO: 156853 - DNA, 71 bp, Homo sapiens
aatacttcaaaataatatgtggatatattaaaaaaatacgtgtagtaaaaacaaaatgtcagagtactgca

SEQ ID NO: 156854 - DNA, 72 bp, Homo sapiens
tcaaaataatatgtggatatattaaaaaaatacgtgtagtaaaaacaaaatgtcagagtactgcatttatat

SEQ ID NO: 156855 - DNA, 73 bp, Homo sapiens
ggatatattaaaaaaatacgtgtagtaaaaacaaaatgtcagagtactgcatttatatttaagattagcatca

SEQ ID NO: 156856 - DNA, 71 bp, Homo sapiens
aaaaaatacgtgtagtaaaaacaaaatgtcagagtactgcatttatatttaagattagcatcacttaagat

SEQ ID NO: 156857 - DNA, 72 bp, Homo sapiens
atacgtgtagtaaaaacaaaatgtcagagtactgcatttatatttaagattagcatcacttaagattagttt

SEQ ID NO: 156858 - DNA, 75 bp, Homo sapiens
acaaaatgtcagagtactgcatttatatttaagattagcatcacttaagattagttttatttctacgtagtggca

SEQ ID NO: 156859 - DNA, 74 bp, Homo sapiens
gtcagagtactgcatttatatttaagattagcatcacttaagattagttttatttctacgtagtggcaccttgt

SEQ ID NO: 156860 - DNA, 74 bp, Homo sapiens
ctgcatttatatttaagattagcatcacttaagattagttttatttctacgtagtggcaccttgttttgcacaa

SEQ ID NO: 156861 - DNA, 73 bp, Homo sapiens
ttaagattagcatcacttaagattagttttatttctacgtagtggcaccttgttttgcacaaaatatattgtg

SEQ ID NO: 156862 - DNA, 72 bp, Homo sapiens
agcatcacttaagattagttttatttctacgtagtggcaccttgttttgcacaaaatatattgtgttgttaa

SEQ ID NO: 156863 - DNA, 75 bp, Homo sapiens
cgtagtggcaccttgttttgcacaaaatatattgtgttgttaatttatggatgagtgcaaatgcattttgagttt

SEQ ID NO: 156864 - DNA, 74 bp, Homo sapiens
ccttgttttgcacaaaatatattgtgttgttaatttatggatgagtgcaaatgcattttgagtttttaagtcac

SEQ ID NO: 156865 - DNA, 73 bp, Homo sapiens
caaaatatattgtgttgttaatttatggatgagtgcaaatgcattttgagtttttaagtcaccaatttaattg

SEQ ID NO: 156866 - DNA, 75 bp, Homo sapiens
gtgttgttaatttatggatgagtgcaaatgcattttgagtttttaagtcaccaatttaattgttatagatagcat

SEQ ID NO: 156867 - DNA, 73 bp, Homo sapiens
gcattttgagtttttaagtcaccaatttaattgttatagatagcattactaaactattatgatggtacacaat

SEQ ID NO: 156868 - DNA, 70 bp, Homo sapiens
ttaagtcaccaatttaattgttatagatagcattactaaactattatgatggtacacaatttttaaccgt

SEQ ID NO: 156869 - DNA, 75 bp, Homo sapiens
caatttaattgttatagatagcattactaaactattatgatggtacacaatttttaaccgtttagtgcatcatgc

SEQ ID NO: 156870 - DNA, 76 bp, Homo sapiens
gttatagatagcattactaaactattatgatggtacacaatttttaaccgtttagtgcatcatgcttattagcaaa

SEQ ID NO: 156871 - DNA, 76 bp, Homo sapiens
gatagcattactaaactattatgatggtacacaatttttaaccgtttagtgcatcatgcttattagcaaacattgt

SEQ ID NO: 156872 - DNA, 72 bp, Homo sapiens
ctaaactattatgatggtacacaatttttaaccgtttagtgcatcatgcttattagcaaacattgttttaat

SEQ ID NO: 156873 - DNA, 74 bp, Homo sapiens
atgatggtacacaatttttaaccgtttagtgcatcatgcttattagcaaacattgttttaatttatcagaacaa

SEQ ID NO: 156874 - DNA, 74 bp, Homo sapiens
caatttttaaccgtttagtgcatcatgcttattagcaaacattgttttaatttatcagaacaatataatacaga

SEQ ID NO: 156875 - DNA, 74 bp, Homo sapiens
ccgtttagtgcatcatgcttattagcaaacattgttttaatttatcagaacaatataatacagataaaaaattg

SEQ ID NO: 156876 - DNA, 76 bp, Homo sapiens
gcatcatgcttattagcaaacattgttttaatttatcagaacaatataatacagataaaaaattgtagttggtgaa

SEQ ID NO: 156877 - DNA, 73 bp, Homo sapiens
gcaaacattgttttaatttatcagaacaatataatacagataaaaaattgtagttggtgaatatatgaatttg

SEQ ID NO: 156878 - DNA, 73 bp, Homo sapiens
gttttaatttatcagaacaatataatacagataaaaaattgtagttggtgaatatatgaatttgtaatgattc

SEQ ID NO: 156879 - DNA, 76 bp, Homo sapiens
tcagaacaatataatacagataaaaaattgtagttggtgaatatatgaatttgtaatgattcttttgtaaagcagc

SEQ ID NO: 156880 - DNA, 78 bp, Homo sapiens
ttgtagttggtgaatatatgaatttgtaatgattcttttgtaaagcagctaagctttcgttgattcagaactctgcca

SEQ ID NO: 156881 - DNA, 77 bp, Homo sapiens
aatatatgaatttgtaatgattcttttgtaaagcagctaagctttcgttgattcagaactctgccaggagtaccatg

SEQ ID NO: 156882 - DNA, 76 bp, Homo sapiens
ttgtaatgattcttttgtaaagcagctaagctttcgttgattcagaactctgccaggagtaccatggacagtgttt

SEQ ID NO: 156883 - DNA, 75 bp, Homo sapiens
taaagcagctaagctttcgttgattcagaactctgccaggagtaccatggacagtgtttttactgaatttaatgt

SEQ ID NO: 156884 - DNA, 75 bp, Homo sapiens
tgattcagaactctgccaggagtaccatggacagtgtttttactgaatttaatgtttatgacctcgaatatttaa

SEQ ID NO: 156885 - DNA, 68 bp, Homo sapiens
ggagtaccatggacagtgtttttactgaatttaatgtttatgacctcgaatatttaaaaatgtgtttt

SEQ ID NO: 156886 - DNA, 66 bp, Homo sapiens
ggacagtgtttttactgaatttaatgtttatgacctcgaatatttaaaaatgtgtttttaatttaa

SEQ ID NO: 156887 - DNA, 68 bp, Homo sapiens
ctgaatttaatgtttatgacctcgaatatttaaaaatgtgtttttaatttaagattggcaaaggtgac

SEQ ID NO: 156888 - DNA, 71 bp, Homo sapiens
tgtttatgacctcgaatatttaaaaatgtgtttttaatttaagattggcaaaggtgacttcagtgagttca

SEQ ID NO: 156889 - DNA, 71 bp, Homo sapiens
gacctcgaatatttaaaaatgtgtttttaatttaagattggcaaaggtgacttcagtgagttcatagtaca

SEQ ID NO: 156890 - DNA, 68 bp, Homo sapiens
aaaaatgtgtttttaatttaagattggcaaaggtgacttcagtgagttcatagtacaattaaagtggt

SEQ ID NO: 156891 - DNA, 70 bp, Homo sapiens
gtttttaatttaagattggcaaaggtgacttcagtgagttcatagtacaattaaagtggtttttgtgaca

SEQ ID NO: 156892 - DNA, 72 bp, Homo sapiens
aagattggcaaaggtgacttcagtgagttcatagtacaattaaagtggtttttgtgacaaacttgctgattt

SEQ ID NO: 156893 - DNA, 71 bp, Homo sapiens
ggcaaaggtgacttcagtgagttcatagtacaattaaagtggtttttgtgacaaacttgctgattttaatt

SEQ ID NO: 156894 - DNA, 69 bp, Homo sapiens
acttcagtgagttcatagtacaattaaagtggtttttgtgacaaacttgctgattttaatttataaaaa

SEQ ID NO: 156895 - DNA, 67 bp, Homo sapiens
gttcatagtacaattaaagtggtttttgtgacaaacttgctgattttaatttataaaaaatatattt

SEQ ID NO: 156896 - DNA, 71 bp, Homo sapiens
aaaaatatattttattaccttcatgacattgttagttttgagaatatgaaggacagtgaaattaagactag

SEQ ID NO: 156897 - DNA, 73 bp, Homo sapiens
tttattaccttcatgacattgttagttttgagaatatgaaggacagtgaaattaagactagtaaatcaggaaa

SEQ ID NO: 156898 - DNA, 72 bp, Homo sapiens
accttcatgacattgttagttttgagaatatgaaggacagtgaaattaagactagtaaatcaggaaaaacat

SEQ ID NO: 156899 - DNA, 69 bp, Homo sapiens
acattgttagttttgagaatatgaaggacagtgaaattaagactagtaaatcaggaaaaacattaaaaa

SEQ ID NO: 156900 - DNA, 75 bp, Homo sapiens
cattaaaaaatatttatgatatggcttatttttaaagtatattcttgcaaatatgattagacatgaaggagctag

SEQ ID NO: 156901 - DNA, 79 bp, Homo sapiens
tatttatgatatggcttatttttaaagtatattcttgcaaatatgattagacatgaaggagctagtatgtttgcttcac

SEQ ID NO: 156902 - DNA, 79 bp, Homo sapiens
atgatatggcttatttttaaagtatattcttgcaaatatgattagacatgaaggagctagtatgtttgcttcactatag

SEQ ID NO: 156903 - DNA, 78 bp, Homo sapiens
tttaaagtatattcttgcaaatatgattagacatgaaggagctagtatgtttgcttcactatagtaagatacatttaa

SEQ ID NO: 156904 - DNA, 77 bp, Homo sapiens
agtatattcttgcaaatatgattagacatgaaggagctagtatgtttgcttcactatagtaagatacatttaaaaaa

SEQ ID NO: 156905 - DNA, 71 bp, Homo sapiens
taaaaaatatttgcttctttccattattcaaatatgcttattttagagcatttggaaaatacaaacagaaa

SEQ ID NO: 156906 - DNA, 73 bp, Homo sapiens
ttgcttctttccattattcaaatatgcttattttagagcatttggaaaatacaaacagaaatgaaggtaacaa

SEQ ID NO: 156907 - DNA, 72 bp, Homo sapiens
tccattattcaaatatgcttattttagagcatttggaaaatacaaacagaaatgaaggtaacaaattaccta

SEQ ID NO: 156908 - DNA, 72 bp, Homo sapiens
aatatgcttattttagagcatttggaaaatacaaacagaaatgaaggtaacaaattacctagtgttctgcca

SEQ ID NO: 156909 - DNA, 73 bp, Homo sapiens
gcttattttagagcatttggaaaatacaaacagaaatgaaggtaacaaattacctagtgttctgccatctgaa

SEQ ID NO: 156910 - DNA, 74 bp, Homo sapiens
gcatttggaaaatacaaacagaaatgaaggtaacaaattacctagtgttctgccatctgaagaaatgagttgct

SEQ ID NO: 156911 - DNA, 73 bp, Homo sapiens
tacaaacagaaatgaaggtaacaaattacctagtgttctgccatctgaagaaatgagttgcttttcaggcttt

SEQ ID NO: 156912 - DNA, 71 bp, Homo sapiens
cagaaatgaaggtaacaaattacctagtgttctgccatctgaagaaatgagttgcttttcaggcttttttt

SEQ ID NO: 156913 - DNA, 70 bp, Homo sapiens
ttattttattttggaaaaaagtttgcgtgtatgtttagctgtatctgcttattagttgtttacatcttta

SEQ ID NO: 156914 - DNA, 74 bp, Homo sapiens
gtttgcgtgtatgtttagctgtatctgcttattagttgtttacatctttagtactgaatcgtgtttcttaacca

SEQ ID NO: 156915 - DNA, 77 bp, Homo sapiens
cgtgtatgtttagctgtatctgcttattagttgtttacatctttagtactgaatcgtgtttcttaaccagccatgca

SEQ ID NO: 156916 - DNA, 78 bp, Homo sapiens
gtatctgcttattagttgtttacatctttagtactgaatcgtgtttcttaaccagccatgcatctgtcaggaatctag

SEQ ID NO: 156917 - DNA, 74 bp, Homo sapiens
cttattagttgtttacatctttagtactgaatcgtgtttcttaaccagccatgcatctgtcaggaatctagttt

SEQ ID NO: 156918 - DNA, 75 bp, Homo sapiens
ttgtttacatctttagtactgaatcgtgtttcttaaccagccatgcatctgtcaggaatctagtttttaaagtca

SEQ ID NO: 156919 - DNA, 73 bp, Homo sapiens
tttagtactgaatcgtgtttcttaaccagccatgcatctgtcaggaatctagtttttaaagtcacctaagtta

SEQ ID NO: 156920 - DNA, 74 bp, Homo sapiens
aatcgtgtttcttaaccagccatgcatctgtcaggaatctagtttttaaagtcacctaagttattctgatagta

SEQ ID NO: 156921 - DNA, 79 bp, Homo sapiens
ccatgcatctgtcaggaatctagtttttaaagtcacctaagttattctgatagtaattgtaatacatcacatgtagtga

SEQ ID NO: 156922 - DNA, 77 bp, Homo sapiens
caggaatctagtttttaaagtcacctaagttattctgatagtaattgtaatacatcacatgtagtgaacacatgtga

SEQ ID NO: 156923 - DNA, 80 bp, Homo sapiens
tttaaagtcacctaagttattctgatagtaattgtaatacatcacatgtagtgaacacatgtgatatatacctgacatta

SEQ ID NO: 156924 - DNA, 82 bp, Homo sapiens
cacctaagttattctgatagtaattgtaatacatcacatgtagtgaacacatgtgatatatacctgacattagtgtaaatgc

SEQ ID NO: 156925 - DNA, 85 bp, Homo sapiens
tctgatagtaattgtaatacatcacatgtagtgaacacatgtgatatatacctgacattagtgtaaatgctttgtgtatgttatc

SEQ ID NO: 156926 - DNA, 82 bp, Homo sapiens
tagtaattgtaatacatcacatgtagtgaacacatgtgatatatacctgacattagtgtaaatgctttgtgtatgttatctt

SEQ ID NO: 156927 - DNA, 80 bp, Homo sapiens
catcacatgtagtgaacacatgtgatatatacctgacattagtgtaaatgctttgtgtatgttatctttttacgttctcc

SEQ ID NO: 156928 - DNA, 79 bp, Homo sapiens
atgtagtgaacacatgtgatatatacctgacattagtgtaaatgctttgtgtatgttatctttttacgttctcctgtga

SEQ ID NO: 156929 - DNA, 76 bp, Homo sapiens
tgtgatatatacctgacattagtgtaaatgctttgtgtatgttatctttttacgttctcctgtgaggtatgtcctt

SEQ ID NO: 156930 - DNA, 74 bp, Homo sapiens
atatacctgacattagtgtaaatgctttgtgtatgttatctttttacgttctcctgtgaggtatgtccttttgc

SEQ ID NO: 156931 - DNA, 74 bp, Homo sapiens
aatgctttgtgtatgttatctttttacgttctcctgtgaggtatgtccttttgctgttcccatttctggatgaa

SEQ ID NO: 156932 - DNA, 71 bp, Homo sapiens
atgttatctttttacgttctcctgtgaggtatgtccttttgctgttcccatttctggatgaagaacccaag

SEQ ID NO: 156933 - DNA, 72 bp, Homo sapiens
tttttacgttctcctgtgaggtatgtccttttgctgttcccatttctggatgaagaacccaaggcacaggga

SEQ ID NO: 156934 - DNA, 73 bp, Homo sapiens
tcctgtgaggtatgtccttttgctgttcccatttctggatgaagaacccaaggcacagggagattaaataact

SEQ ID NO: 156935 - DNA, 73 bp, Homo sapiens
tgtccttttgctgttcccatttctggatgaagaacccaaggcacagggagattaaataacttgcttcagggta

SEQ ID NO: 156936 - DNA, 73 bp, Homo sapiens
tgttcccatttctggatgaagaacccaaggcacagggagattaaataacttgcttcagggtatgcaaaactag

SEQ ID NO: 156937 - DNA, 73 bp, Homo sapiens
atttctggatgaagaacccaaggcacagggagattaaataacttgcttcagggtatgcaaaactagtaagcca

SEQ ID NO: 156938 - DNA, 74 bp, Homo sapiens
aagaacccaaggcacagggagattaaataacttgcttcagggtatgcaaaactagtaagccacagagcagtgat

SEQ ID NO: 156939 - DNA, 75 bp, Homo sapiens
acagggagattaaataacttgcttcagggtatgcaaaactagtaagccacagagcagtgattggaacccagatcc

SEQ ID NO: 156940 - DNA, 78 bp, Homo sapiens
taaataacttgcttcagggtatgcaaaactagtaagccacagagcagtgattggaacccagatcctctgactctggaa

SEQ ID NO: 156941 - DNA, 76 bp, Homo sapiens
aacttgcttcagggtatgcaaaactagtaagccacagagcagtgattggaacccagatcctctgactctggaacct

SEQ ID NO: 156942 - DNA, 77 bp, Homo sapiens
tagtaagccacagagcagtgattggaacccagatcctctgactctggaaccttctcttaagcactatgtttgtaaaa

SEQ ID NO: 156943 - DNA, 74 bp, Homo sapiens
agagcagtgattggaacccagatcctctgactctggaaccttctcttaagcactatgtttgtaaaatccaaaaa

SEQ ID NO: 156944 - DNA, 70 bp, Homo sapiens
attggaacccagatcctctgactctggaaccttctcttaagcactatgtttgtaaaatccaaaaatttaa

SEQ ID NO: 156945 - DNA, 74 bp, Homo sapiens
gatcctctgactctggaaccttctcttaagcactatgtttgtaaaatccaaaaatttaaggtcactgcaatgaa

SEQ ID NO: 156946 - DNA, 70 bp, Homo sapiens
actctggaaccttctcttaagcactatgtttgtaaaatccaaaaatttaaggtcactgcaatgaaaccag

SEQ ID NO: 156947 - DNA, 70 bp, Homo sapiens
gaaccttctcttaagcactatgtttgtaaaatccaaaaatttaaggtcactgcaatgaaaccagtgtttg

SEQ ID NO: 156948 - DNA, 70 bp, Homo sapiens
gcactatgtttgtaaaatccaaaaatttaaggtcactgcaatgaaaccagtgtttggaagttttatagga

SEQ ID NO: 156949 - DNA, 66 bp, Homo sapiens
gtttgtaaaatccaaaaatttaaggtcactgcaatgaaaccagtgtttggaagttttataggaaaa

SEQ ID NO: 156950 - DNA, 69 bp, Homo sapiens
caaaaatttaaggtcactgcaatgaaaccagtgtttggaagttttataggaaaataatatccaagtaga

SEQ ID NO: 156951 - DNA, 70 bp, Homo sapiens
ggtcactgcaatgaaaccagtgtttggaagttttataggaaaataatatccaagtagaaaatttggaatg

SEQ ID NO: 156952 - DNA, 69 bp, Homo sapiens
tgcaatgaaaccagtgtttggaagttttataggaaaataatatccaagtagaaaatttggaatgtaatt

SEQ ID NO: 156953 - DNA, 67 bp, Homo sapiens
ccagtgtttggaagttttataggaaaataatatccaagtagaaaatttggaatgtaattttcaggaa

SEQ ID NO: 156954 - DNA, 70 bp, Homo sapiens
ggaaaataatatccaagtagaaaatttggaatgtaattttcaggaagaaccacaggcataatgtaataaa

SEQ ID NO: 156955 - DNA, 72 bp, Homo sapiens
tccaagtagaaaatttggaatgtaattttcaggaagaaccacaggcataatgtaataaaacatctcttctgt

SEQ ID NO: 156956 - DNA, 74 bp, Homo sapiens
tttggaatgtaattttcaggaagaaccacaggcataatgtaataaaacatctcttctgttttatttggatcata

SEQ ID NO: 156957 - DNA, 76 bp, Homo sapiens
aattttcaggaagaaccacaggcataatgtaataaaacatctcttctgttttatttggatcatatacttatgtgca

SEQ ID NO: 156958 - DNA, 78 bp, Homo sapiens
caggaagaaccacaggcataatgtaataaaacatctcttctgttttatttggatcatatacttatgtgcatatatatt

SEQ ID NO: 156959 - DNA, 76 bp, Homo sapiens
gcatatatatttatttcatacataaatacatgatgtattgattttcatctagactttttaaagccctattataatt

SEQ ID NO: 156960 - DNA, 76 bp, Homo sapiens
atttcatacataaatacatgatgtattgattttcatctagactttttaaagccctattataattttatcattgtga

SEQ ID NO: 156961 - DNA, 76 bp, Homo sapiens
cataaatacatgatgtattgattttcatctagactttttaaagccctattataattttatcattgtgatagtagat

SEQ ID NO: 156962 - DNA, 76 bp, Homo sapiens
taaatacatgatgtattgattttcatctagactttttaaagccctattataattttatcattgtgatagtagattc

SEQ ID NO: 156963 - DNA, 76 bp, Homo sapiens
catgatgtattgattttcatctagactttttaaagccctattataattttatcattgtgatagtagattctgtgtt

SEQ ID NO: 156964 - DNA, 73 bp, Homo sapiens
tttcatctagactttttaaagccctattataattttatcattgtgatagtagattctgtgttttgtagccaag

SEQ ID NO: 156965 - DNA, 76 bp, Homo sapiens
ttaaagccctattataattttatcattgtgatagtagattctgtgttttgtagccaaggtgacacatgccatattt

SEQ ID NO: 156966 - DNA, 76 bp, Homo sapiens
cattgtgatagtagattctgtgttttgtagccaaggtgacacatgccatattttattttgtaactatatacaaacc

SEQ ID NO: 156967 - DNA, 74 bp, Homo sapiens
gtagattctgtgttttgtagccaaggtgacacatgccatattttattttgtaactatatacaaaccttgtatct

SEQ ID NO: 156968 - DNA, 77 bp, Homo sapiens
gccaaggtgacacatgccatattttattttgtaactatatacaaaccttgtatcttatatagcatccagaaattgga

SEQ ID NO: 156969 - DNA, 78 bp, Homo sapiens
catgccatattttattttgtaactatatacaaaccttgtatcttatatagcatccagaaattggaatatgaatgagga

SEQ ID NO: 156970 - DNA, 77 bp, Homo sapiens
ttattttgtaactatatacaaaccttgtatcttatatagcatccagaaattggaatatgaatgaggagttcagtgaa

SEQ ID NO: 156971 - DNA, 79 bp, Homo sapiens
actatatacaaaccttgtatcttatatagcatccagaaattggaatatgaatgaggagttcagtgaagaagtcttcata

SEQ ID NO: 156972 - DNA, 80 bp, Homo sapiens
atacaaaccttgtatcttatatagcatccagaaattggaatatgaatgaggagttcagtgaagaagtcttcatagcttca

SEQ ID NO: 156973 - DNA, 80 bp, Homo sapiens
atcttatatagcatccagaaattggaatatgaatgaggagttcagtgaagaagtcttcatagcttcactgattactttct

SEQ ID NO: 156974 - DNA, 78 bp, Homo sapiens
atccagaaattggaatatgaatgaggagttcagtgaagaagtcttcatagcttcactgattactttcttaggcctata

SEQ ID NO: 156975 - DNA, 76 bp, Homo sapiens
aattggaatatgaatgaggagttcagtgaagaagtcttcatagcttcactgattactttcttaggcctataggaaa

SEQ ID NO: 156976 - DNA, 75 bp, Homo sapiens
aatatgaatgaggagttcagtgaagaagtcttcatagcttcactgattactttcttaggcctataggaaagaaag

SEQ ID NO: 156977 - DNA, 76 bp, Homo sapiens
tatgaatgaggagttcagtgaagaagtcttcatagcttcactgattactttcttaggcctataggaaagaaaggag

SEQ ID NO: 156978 - DNA, 73 bp, Homo sapiens
aggagttcagtgaagaagtcttcatagcttcactgattactttcttaggcctataggaaagaaaggaggtcaa

SEQ ID NO: 156979 - DNA, 74 bp, Homo sapiens
ttcagtgaagaagtcttcatagcttcactgattactttcttaggcctataggaaagaaaggaggtcaagaccta

SEQ ID NO: 156980 - DNA, 71 bp, Homo sapiens
agaagtcttcatagcttcactgattactttcttaggcctataggaaagaaaggaggtcaagacctacccaa

SEQ ID NO: 156981 - DNA, 72 bp, Homo sapiens
ttcatagcttcactgattactttcttaggcctataggaaagaaaggaggtcaagacctacccaaggttcaga

SEQ ID NO: 156982 - DNA, 72 bp, Homo sapiens
atagcttcactgattactttcttaggcctataggaaagaaaggaggtcaagacctacccaaggttcagatgc

SEQ ID NO: 156983 - DNA, 83 bp, Homo sapiens
aagacctacccaaggttcagatgcctttttgacagcattggctgtgacgctgcgcttgtggagatcgttgtgcctgctcatgc

SEQ ID NO: 156984 - DNA, 87 bp, Homo sapiens
tacccaaggttcagatgcctttttgacagcattggctgtgacgctgcgcttgtggagatcgttgtgcctgctcatgccatctcgcca

SEQ ID NO: 156985 - DNA, 88 bp, Homo sapiens
agatgcctttttgacagcattggctgtgacgctgcgcttgtggagatcgttgtgcctgctcatgccatctcgccatctcgcttagtcc

SEQ ID NO: 156986 - DNA, 88 bp, Homo sapiens
ttttgacagcattggctgtgacgctgcgcttgtggagatcgttgtgcctgctcatgccatctcgccatctcgcttagtccctgtcctc

SEQ ID NO: 156987 - DNA, 85 bp, Homo sapiens
attggctgtgacgctgcgcttgtggagatcgttgtgcctgctcatgccatctcgccatctcgcttagtccctgtcctcttactgg

SEQ ID NO: 156988 - DNA, 83 bp, Homo sapiens
tggagatcgttgtgcctgctcatgccatctcgccatctcgcttagtccctgtcctcttactgggcttcctcttggtgctgcct

SEQ ID NO: 156989 - DNA, 84 bp, Homo sapiens
ttgtgcctgctcatgccatctcgccatctcgcttagtccctgtcctcttactgggcttcctcttggtgctgccttgcctgactc

SEQ ID NO: 156990 - DNA, 83 bp, Homo sapiens
atgccatctcgccatctcgcttagtccctgtcctcttactgggcttcctcttggtgctgccttgcctgactctgctctggatg

SEQ ID NO: 156991 - DNA, 80 bp, Homo sapiens
ccatctcgcttagtccctgtcctcttactgggcttcctcttggtgctgccttgcctgactctgctctggatgttgcccta

SEQ ID NO: 156992 - DNA, 79 bp, Homo sapiens
tgtcctcttactgggcttcctcttggtgctgccttgcctgactctgctctggatgttgccctagcccttccctggtctg

SEQ ID NO: 156993 - DNA, 79 bp, Homo sapiens
gcttcctcttggtgctgccttgcctgactctgctctggatgttgccctagcccttccctggtctgtgcttacaattaaa

SEQ ID NO: 156994 - DNA, 78 bp, Homo sapiens
ttggtgctgccttgcctgactctgctctggatgttgccctagcccttccctggtctgtgcttacaattaaacaataaa

SEQ ID NO: 156995 - DNA, 74 bp, Homo sapiens
ccttgcctgactctgctctggatgttgccctagcccttccctggtctgtgcttacaattaaacaataaacaaaa

SEQ ID NO: 156996 - DNA, 73 bp, Homo sapiens
actctgctctggatgttgccctagcccttccctggtctgtgcttacaattaaacaataaacaaaatgtgttta

SEQ ID NO: 156997 - DNA, 72 bp, Homo sapiens
atgttgccctagcccttccctggtctgtgcttacaattaaacaataaacaaaatgtgtttattctgtgactc

SEQ ID NO: 156998 - DNA, 74 bp, Homo sapiens
tggtctgtgcttacaattaaacaataaacaaaatgtgtttattctgtgactcttggagactctggttctcctta

SEQ ID NO: 156999 - DNA, 74 bp, Homo sapiens
ttacaattaaacaataaacaaaatgtgtttattctgtgactcttggagactctggttctccttactgccatcac

SEQ ID NO: 157000 - DNA, 73 bp, Homo sapiens
aataaacaaaatgtgtttattctgtgactcttggagactctggttctccttactgccatcactcagttaattt

SEQ ID NO: 157001 - DNA, 76 bp, Homo sapiens
aaatgtgtttattctgtgactcttggagactctggttctccttactgccatcactcagttaattttgtgtcataaa

SEQ ID NO: 157002 - DNA, 75 bp, Homo sapiens
ttattctgtgactcttggagactctggttctccttactgccatcactcagttaattttgtgtcataaagttttat

SEQ ID NO: 157003 - DNA, 71 bp, Homo sapiens
tccttactgccatcactcagttaattttgtgtcataaagttttatttacacattaactagcaatttttccc

SEQ ID NO: 157004 - DNA, 71 bp, Homo sapiens
ccatcactcagttaattttgtgtcataaagttttatttacacattaactagcaatttttccccagataaca

SEQ ID NO: 157005 - DNA, 68 bp, Homo sapiens
gttaattttgtgtcataaagttttatttacacattaactagcaatttttccccagataacatttgaat

SEQ ID NO: 157006 - DNA, 68 bp, Homo sapiens
taaagttttatttacacattaactagcaatttttccccagataacatttgaattttaacaatcttcga

SEQ ID NO: 157007 - DNA, 69 bp, Homo sapiens
tttacacattaactagcaatttttccccagataacatttgaattttaacaatcttcgagaggttatctt

SEQ ID NO: 157008 - DNA, 69 bp, Homo sapiens
cattaactagcaatttttccccagataacatttgaattttaacaatcttcgagaggttatctttattac

SEQ ID NO: 157009 - DNA, 69 bp, Homo sapiens
ttttccccagataacatttgaattttaacaatcttcgagaggttatctttattaccaacagttcctcaa

SEQ ID NO: 157010 - DNA, 71 bp, Homo sapiens
cccagataacatttgaattttaacaatcttcgagaggttatctttattaccaacagttcctcaacatctac

SEQ ID NO: 157011 - DNA, 73 bp, Homo sapiens
gaattttaacaatcttcgagaggttatctttattaccaacagttcctcaacatctactgaacaaatacttgca

SEQ ID NO: 157012 - DNA, 73 bp, Homo sapiens
aacaatcttcgagaggttatctttattaccaacagttcctcaacatctactgaacaaatacttgcatttccaa

SEQ ID NO: 157013 - DNA, 72 bp, Homo sapiens
cgagaggttatctttattaccaacagttcctcaacatctactgaacaaatacttgcatttccaaatgaaaag

SEQ ID NO: 157014 - DNA, 75 bp, Homo sapiens
tttattaccaacagttcctcaacatctactgaacaaatacttgcatttccaaatgaaaagggtgaatctcagaca

SEQ ID NO: 157015 - DNA, 77 bp, Homo sapiens
gttcctcaacatctactgaacaaatacttgcatttccaaatgaaaagggtgaatctcagacacagtggcctgttgta

SEQ ID NO: 157016 - DNA, 75 bp, Homo sapiens
atctactgaacaaatacttgcatttccaaatgaaaagggtgaatctcagacacagtggcctgttgtaccttctta

SEQ ID NO: 157017 - DNA, 78 bp, Homo sapiens
aaatgaaaagggtgaatctcagacacagtggcctgttgtaccttcttacatcctacagcccatcttctctggtgatga

SEQ ID NO: 157018 - DNA, 74 bp, Homo sapiens
taccttcttacatcctacagcccatcttctctggtgatgagcctttgtttttccttcttgtaagaaacagtgaa

SEQ ID NO: 157019 - DNA, 75 bp, Homo sapiens
tcctacagcccatcttctctggtgatgagcctttgtttttccttcttgtaagaaacagtgaagcttggcgagtaa

SEQ ID NO: 157020 - DNA, 71 bp, Homo sapiens
tgatgagcctttgtttttccttcttgtaagaaacagtgaagcttggcgagtaaccctggaggaggtttcta

SEQ ID NO: 157021 - DNA, 68 bp, Homo sapiens
tgtttttccttcttgtaagaaacagtgaagcttggcgagtaaccctggaggaggtttctaggtaggaa

SEQ ID NO: 157022 - DNA, 69 bp, Homo sapiens
tcttgtaagaaacagtgaagcttggcgagtaaccctggaggaggtttctaggtaggaagttaggaatat

SEQ ID NO: 157023 - DNA, 66 bp, Homo sapiens
aagaaacagtgaagcttggcgagtaaccctggaggaggtttctaggtaggaagttaggaatatttt

SEQ ID NO: 157024 - DNA, 69 bp, Homo sapiens
aagcttggcgagtaaccctggaggaggtttctaggtaggaagttaggaatatttttctttcatgaatca

SEQ ID NO: 157025 - DNA, 72 bp, Homo sapiens
taaccctggaggaggtttctaggtaggaagttaggaatatttttctttcatgaatcatgggtgctctgaata

SEQ ID NO: 157026 - DNA, 73 bp, Homo sapiens
ctaggtaggaagttaggaatatttttctttcatgaatcatgggtgctctgaatatttgattttaagaaccaca

SEQ ID NO: 157027 - DNA, 77 bp, Homo sapiens
taggaatatttttctttcatgaatcatgggtgctctgaatatttgattttaagaaccacatattagcctacctgata

SEQ ID NO: 157028 - DNA, 81 bp, Homo sapiens
tttctttcatgaatcatgggtgctctgaatatttgattttaagaaccacatattagcctacctgatattgtgatgagaata

SEQ ID NO: 157029 - DNA, 81 bp, Homo sapiens
ttcatgaatcatgggtgctctgaatatttgattttaagaaccacatattagcctacctgatattgtgatgagaataaacta

SEQ ID NO: 157030 - DNA, 77 bp, Homo sapiens
atttgattttaagaaccacatattagcctacctgatattgtgatgagaataaactaagactactcactctgctagtg

SEQ ID NO: 157031 - DNA, 77 bp, Homo sapiens
ttttaagaaccacatattagcctacctgatattgtgatgagaataaactaagactactcactctgctagtgttgtaa

SEQ ID NO: 157032 - DNA, 82 bp, Homo sapiens
tattagcctacctgatattgtgatgagaataaactaagactactcactctgctagtgttgtaagatgcttagatgcaggtaa

SEQ ID NO: 157033 - DNA, 81 bp, Homo sapiens
tacctgatattgtgatgagaataaactaagactactcactctgctagtgttgtaagatgcttagatgcaggtaacttcaat

SEQ ID NO: 157034 - DNA, 78 bp, Homo sapiens
aataaactaagactactcactctgctagtgttgtaagatgcttagatgcaggtaacttcaattgctcacccattatat

SEQ ID NO: 157035 - DNA, 78 bp, Homo sapiens
aagactactcactctgctagtgttgtaagatgcttagatgcaggtaacttcaattgctcacccattatattttcctta

SEQ ID NO: 157036 - DNA, 76 bp, Homo sapiens
tgctagtgttgtaagatgcttagatgcaggtaacttcaattgctcacccattatattttccttatttctatcggtt

SEQ ID NO: 157037 - DNA, 76 bp, Homo sapiens
tgtaagatgcttagatgcaggtaacttcaattgctcacccattatattttccttatttctatcggtttaatgtagc

SEQ ID NO: 157038 - DNA, 73 bp, Homo sapiens
ttagatgcaggtaacttcaattgctcacccattatattttccttatttctatcggtttaatgtagcgtttgcc

SEQ ID NO: 157039 - DNA, 70 bp, Homo sapiens
ggtaacttcaattgctcacccattatattttccttatttctatcggtttaatgtagcgtttgcctttaga

SEQ ID NO: 157040 - DNA, 71 bp, Homo sapiens
aattgctcacccattatattttccttatttctatcggtttaatgtagcgtttgcctttagattcttgtggc

SEQ ID NO: 157041 - DNA, 70 bp, Homo sapiens
cccattatattttccttatttctatcggtttaatgtagcgtttgcctttagattcttgtggccaatattc

SEQ ID NO: 157042 - DNA, 72 bp, Homo sapiens
tttccttatttctatcggtttaatgtagcgtttgcctttagattcttgtggccaatattcttgcataaaata

SEQ ID NO: 157043 - DNA, 71 bp, Homo sapiens
ctatcggtttaatgtagcgtttgcctttagattcttgtggccaatattcttgcataaaatataatttaact

SEQ ID NO: 157044 - DNA, 71 bp, Homo sapiens
taatgtagcgtttgcctttagattcttgtggccaatattcttgcataaaatataatttaacttcaaaaact

SEQ ID NO: 157045 - DNA, 67 bp, Homo sapiens
tttgcctttagattcttgtggccaatattcttgcataaaatataatttaacttcaaaaacttttttt

SEQ ID NO: 157046 - DNA, 71 bp, Homo sapiens
ttttttttttaaccaagtggcacccaaccatgaagtgctacctgtttataatttgtgtagctgctgaacag

SEQ ID NO: 157047 - DNA, 77 bp, Homo sapiens
ttaaccaagtggcacccaaccatgaagtgctacctgtttataatttgtgtagctgctgaacagtagcttctgataaa

SEQ ID NO: 157048 - DNA, 78 bp, Homo sapiens
cacccaaccatgaagtgctacctgtttataatttgtgtagctgctgaacagtagcttctgataaatcagtaatgttaa

SEQ ID NO: 157049 - DNA, 77 bp, Homo sapiens
aaccatgaagtgctacctgtttataatttgtgtagctgctgaacagtagcttctgataaatcagtaatgttaacatt

SEQ ID NO: 157050 - DNA, 77 bp, Homo sapiens
gctacctgtttataatttgtgtagctgctgaacagtagcttctgataaatcagtaatgttaacattttattagtgta

SEQ ID NO: 157051 - DNA, 79 bp, Homo sapiens
atttgtgtagctgctgaacagtagcttctgataaatcagtaatgttaacattttattagtgtaatggcatcttagacat

SEQ ID NO: 157052 - DNA, 79 bp, Homo sapiens
tgtagctgctgaacagtagcttctgataaatcagtaatgttaacattttattagtgtaatggcatcttagacattttat

SEQ ID NO: 157053 - DNA, 74 bp, Homo sapiens
gaacagtagcttctgataaatcagtaatgttaacattttattagtgtaatggcatcttagacattttattttag

SEQ ID NO: 157054 - DNA, 75 bp, Homo sapiens
tctgataaatcagtaatgttaacattttattagtgtaatggcatcttagacattttattttagtatgtaattaca

SEQ ID NO: 157055 - DNA, 74 bp, Homo sapiens
cagtaatgttaacattttattagtgtaatggcatcttagacattttattttagtatgtaattacaaatgcatgt

SEQ ID NO: 157056 - DNA, 74 bp, Homo sapiens
taacattttattagtgtaatggcatcttagacattttattttagtatgtaattacaaatgcatgtttttgagaa

SEQ ID NO: 157057 - DNA, 74 bp, Homo sapiens
cattttattagtgtaatggcatcttagacattttattttagtatgtaattacaaatgcatgtttttgagaaaca

SEQ ID NO: 157058 - DNA, 74 bp, Homo sapiens
ggcatcttagacattttattttagtatgtaattacaaatgcatgtttttgagaaacacttcagattttacatta

SEQ ID NO: 157059 - DNA, 72 bp, Homo sapiens
agacattttattttagtatgtaattacaaatgcatgtttttgagaaacacttcagattttacattaaatgta

SEQ ID NO: 157060 - DNA, 72 bp, Homo sapiens
ttattttagtatgtaattacaaatgcatgtttttgagaaacacttcagattttacattaaatgtaatggaaa

SEQ ID NO: 157061 - DNA, 73 bp, Homo sapiens
ttagtatgtaattacaaatgcatgtttttgagaaacacttcagattttacattaaatgtaatggaaattattg

SEQ ID NO: 157062 - DNA, 73 bp, Homo sapiens
tgtaattacaaatgcatgtttttgagaaacacttcagattttacattaaatgtaatggaaattattgttttca

SEQ ID NO: 157063 - DNA, 78 bp, Homo sapiens
tgcatgtttttgagaaacacttcagattttacattaaatgtaatggaaattattgttttcatgaactgatgcctatga

SEQ ID NO: 157064 - DNA, 77 bp, Homo sapiens
tgagaaacacttcagattttacattaaatgtaatggaaattattgttttcatgaactgatgcctatgaacagcaaac

SEQ ID NO: 157065 - DNA, 74 bp, Homo sapiens
cattaaatgtaatggaaattattgttttcatgaactgatgcctatgaacagcaaacgtttcggaaatagttatg

SEQ ID NO: 157066 - DNA, 76 bp, Homo sapiens
taatggaaattattgttttcatgaactgatgcctatgaacagcaaacgtttcggaaatagttatgtgcctgtttca

SEQ ID NO: 157067 - DNA, 76 bp, Homo sapiens
attgttttcatgaactgatgcctatgaacagcaaacgtttcggaaatagttatgtgcctgtttcatgggccgagaa

SEQ ID NO: 157068 - DNA, 77 bp, Homo sapiens
atgaactgatgcctatgaacagcaaacgtttcggaaatagttatgtgcctgtttcatgggccgagaagcatgggaaa

SEQ ID NO: 157069 - DNA, 74 bp, Homo sapiens
atgcctatgaacagcaaacgtttcggaaatagttatgtgcctgtttcatgggccgagaagcatgggaaattgtt

SEQ ID NO: 157070 - DNA, 72 bp, Homo sapiens
aacagcaaacgtttcggaaatagttatgtgcctgtttcatgggccgagaagcatgggaaattgtttctgttg

SEQ ID NO: 157071 - DNA, 67 bp, Homo sapiens
ttttttttccagtaatggcttagccctattaaaattatggacatttaaacatttttcttcaattgta

SEQ ID NO: 157072 - DNA, 69 bp, Homo sapiens
ttccagtaatggcttagccctattaaaattatggacatttaaacatttttcttcaattgtagggattta

SEQ ID NO: 157073 - DNA, 71 bp, Homo sapiens
tggcttagccctattaaaattatggacatttaaacatttttcttcaattgtagggatttatatgaggataa

SEQ ID NO: 157074 - DNA, 73 bp, Homo sapiens
taaaattatggacatttaaacatttttcttcaattgtagggatttatatgaggataatgtacttattcattca

SEQ ID NO: 157075 - DNA, 73 bp, Homo sapiens
ggacatttaaacatttttcttcaattgtagggatttatatgaggataatgtacttattcattcagactggtat

SEQ ID NO: 157076 - DNA, 76 bp, Homo sapiens
catttttcttcaattgtagggatttatatgaggataatgtacttattcattcagactggtatttattgagagcctg

SEQ ID NO: 157077 - DNA, 79 bp, Homo sapiens
atttatatgaggataatgtacttattcattcagactggtatttattgagagcctgttaggagtcagactttgtcagaga

SEQ ID NO: 157078 - DNA, 78 bp, Homo sapiens
acttattcattcagactggtatttattgagagcctgttaggagtcagactttgtcagagatgaaggaatgaagtaatc

SEQ ID NO: 157079 - DNA, 81 bp, Homo sapiens
attcagactggtatttattgagagcctgttaggagtcagactttgtcagagatgaaggaatgaagtaatctgtgatctcaa

SEQ ID NO: 157080 - DNA, 80 bp, Homo sapiens
tttattgagagcctgttaggagtcagactttgtcagagatgaaggaatgaagtaatctgtgatctcaagggaggaagtga

SEQ ID NO: 157081 - DNA, 78 bp, Homo sapiens
agcctgttaggagtcagactttgtcagagatgaaggaatgaagtaatctgtgatctcaagggaggaagtgaacaatta

SEQ ID NO: 157082 - DNA, 77 bp, Homo sapiens
ttaggagtcagactttgtcagagatgaaggaatgaagtaatctgtgatctcaagggaggaagtgaacaattacctaa

SEQ ID NO: 157083 - DNA, 81 bp, Homo sapiens
tgtcagagatgaaggaatgaagtaatctgtgatctcaagggaggaagtgaacaattacctaatgagcttgctgtgccttaa

SEQ ID NO: 157084 - DNA, 78 bp, Homo sapiens
atgaaggaatgaagtaatctgtgatctcaagggaggaagtgaacaattacctaatgagcttgctgtgccttaagaaga

SEQ ID NO: 157085 - DNA, 77 bp, Homo sapiens
aatgaagtaatctgtgatctcaagggaggaagtgaacaattacctaatgagcttgctgtgccttaagaagagggagc

SEQ ID NO: 157086 - DNA, 78 bp, Homo sapiens
tgatctcaagggaggaagtgaacaattacctaatgagcttgctgtgccttaagaagagggagcggtaactggcactga

SEQ ID NO: 157087 - DNA, 75 bp, Homo sapiens
aagggaggaagtgaacaattacctaatgagcttgctgtgccttaagaagagggagcggtaactggcactgagatc

SEQ ID NO: 157088 - DNA, 75 bp, Homo sapiens
aacaattacctaatgagcttgctgtgccttaagaagagggagcggtaactggcactgagatctggggcttgacgt

SEQ ID NO: 157089 - DNA, 78 bp, Homo sapiens
tacctaatgagcttgctgtgccttaagaagagggagcggtaactggcactgagatctggggcttgacgttgactccta

SEQ ID NO: 157090 - DNA, 77 bp, Homo sapiens
aatgagcttgctgtgccttaagaagagggagcggtaactggcactgagatctggggcttgacgttgactcctagccc

SEQ ID NO: 157091 - DNA, 76 bp, Homo sapiens
ctgtgccttaagaagagggagcggtaactggcactgagatctggggcttgacgttgactcctagccctcccactca

SEQ ID NO: 157092 - DNA, 76 bp, Homo sapiens
ttaagaagagggagcggtaactggcactgagatctggggcttgacgttgactcctagccctcccactcagtacatg

SEQ ID NO: 157093 - DNA, 76 bp, Homo sapiens
agaagagggagcggtaactggcactgagatctggggcttgacgttgactcctagccctcccactcagtacatgtgt

SEQ ID NO: 157094 - DNA, 76 bp, Homo sapiens
cggtaactggcactgagatctggggcttgacgttgactcctagccctcccactcagtacatgtgttcctttctgtc

SEQ ID NO: 157095 - DNA, 76 bp, Homo sapiens
tgagatctggggcttgacgttgactcctagccctcccactcagtacatgtgttcctttctgtctccatttccacgt

SEQ ID NO: 157096 - DNA, 78 bp, Homo sapiens
actcagtacatgtgttcctttctgtctccatttccacgttcactcattgagtggtcatccactatatgtaagttttgc

SEQ ID NO: 157097 - DNA, 81 bp, Homo sapiens
ttcctttctgtctccatttccacgttcactcattgagtggtcatccactatatgtaagttttgctgagcatgtgacactta

SEQ ID NO: 157098 - DNA, 84 bp, Homo sapiens
tgtctccatttccacgttcactcattgagtggtcatccactatatgtaagttttgctgagcatgtgacacttaattgacacatg

SEQ ID NO: 157099 - DNA, 81 bp, Homo sapiens
atttccacgttcactcattgagtggtcatccactatatgtaagttttgctgagcatgtgacacttaattgacacatggtct

SEQ ID NO: 157100 - DNA, 80 bp, Homo sapiens
actcattgagtggtcatccactatatgtaagttttgctgagcatgtgacacttaattgacacatggtctttttctcaaaa

SEQ ID NO: 157101 - DNA, 77 bp, Homo sapiens
actatatgtaagttttgctgagcatgtgacacttaattgacacatggtctttttctcaaaaagctcccatttcagta

SEQ ID NO: 157102 - DNA, 77 bp, Homo sapiens
ttttgctgagcatgtgacacttaattgacacatggtctttttctcaaaaagctcccatttcagtatgggagataaat

SEQ ID NO: 157103 - DNA, 73 bp, Homo sapiens
atgtgacacttaattgacacatggtctttttctcaaaaagctcccatttcagtatgggagataaattggggaa

SEQ ID NO: 157104 - DNA, 70 bp, Homo sapiens
cacttaattgacacatggtctttttctcaaaaagctcccatttcagtatgggagataaattggggaaaaa

SEQ ID NO: 157105 - DNA, 71 bp, Homo sapiens
tggtctttttctcaaaaagctcccatttcagtatgggagataaattggggaaaaatggcagtagtatggta

SEQ ID NO: 157106 - DNA, 70 bp, Homo sapiens
ttttctcaaaaagctcccatttcagtatgggagataaattggggaaaaatggcagtagtatggtaaatac

SEQ ID NO: 157107 - DNA, 70 bp, Homo sapiens
tttcagtatgggagataaattggggaaaaatggcagtagtatggtaaatactctatttgggtggtgggaa

SEQ ID NO: 157108 - DNA, 71 bp, Homo sapiens
ataaattggggaaaaatggcagtagtatggtaaatactctatttgggtggtgggaatcaggcacatggtta

SEQ ID NO: 157109 - DNA, 74 bp, Homo sapiens
aaaaatggcagtagtatggtaaatactctatttgggtggtgggaatcaggcacatggttacagactggagtctc

SEQ ID NO: 157110 - DNA, 76 bp, Homo sapiens
agtagtatggtaaatactctatttgggtggtgggaatcaggcacatggttacagactggagtctctagatgagaag

SEQ ID NO: 157111 - DNA, 78 bp, Homo sapiens
tctatttgggtggtgggaatcaggcacatggttacagactggagtctctagatgagaaggaatattctatggggaaga

SEQ ID NO: 157112 - DNA, 77 bp, Homo sapiens
tgggaatcaggcacatggttacagactggagtctctagatgagaaggaatattctatggggaagaggggaccggcat

SEQ ID NO: 157113 - DNA, 79 bp, Homo sapiens
aggcacatggttacagactggagtctctagatgagaaggaatattctatggggaagaggggaccggcattcctgcagca

SEQ ID NO: 157114 - DNA, 80 bp, Homo sapiens
gttacagactggagtctctagatgagaaggaatattctatggggaagaggggaccggcattcctgcagcagagatgtgtc

SEQ ID NO: 157115 - DNA, 79 bp, Homo sapiens
aagaggggaccggcattcctgcagcagagatgtgtcctctttgtacccattgtgtgtacacactgtactagcacagtgg

SEQ ID NO: 157116 - DNA, 86 bp, Homo sapiens
cggcattcctgcagcagagatgtgtcctctttgtacccattgtgtgtacacactgtactagcacagtggtgccgcgctgagcaaga

SEQ ID NO: 157117 - DNA, 87 bp, Homo sapiens
ttcctgcagcagagatgtgtcctctttgtacccattgtgtgtacacactgtactagcacagtggtgccgcgctgagcaagaggagca

SEQ ID NO: 157118 - DNA, 89 bp, Homo sapiens
attgtgtgtacacactgtactagcacagtggtgccgcgctgagcaagaggagcactgcagctgcggcagaatctcattgtggtggaaga

SEQ ID NO: 157119 - DNA, 90 bp, Homo sapiens
gtacacactgtactagcacagtggtgccgcgctgagcaagaggagcactgcagctgcggcagaatctcattgtggtggaagacaggcaca

SEQ ID NO: 157120 - DNA, 93 bp, Homo sapiens
tactagcacagtggtgccgcgctgagcaagaggagcactgcagctgcggcagaatctcattgtggtggaagacaggcacagcaagcaagcaga

SEQ ID NO: 157121 - DNA, 92 bp, Homo sapiens
gtggtgccgcgctgagcaagaggagcactgcagctgcggcagaatctcattgtggtggaagacaggcacagcaagcaagcagagtgtgttca

SEQ ID NO: 157122 - DNA, 90 bp, Homo sapiens
agcaagaggagcactgcagctgcggcagaatctcattgtggtggaagacaggcacagcaagcaagcagagtgtgttcagggctgtgaaga

SEQ ID NO: 157123 - DNA, 83 bp, Homo sapiens
agctgcggcagaatctcattgtggtggaagacaggcacagcaagcaagcagagtgtgttcagggctgtgaagaggggagaccc

SEQ ID NO: 157124 - DNA, 80 bp, Homo sapiens
tgtggtggaagacaggcacagcaagcaagcagagtgtgttcagggctgtgaagaggggagacccggtaggtagctcatgg

SEQ ID NO: 157125 - DNA, 77 bp, Homo sapiens
gcacagcaagcaagcagagtgtgttcagggctgtgaagaggggagacccggtaggtagctcatgggcggtggacctt

SEQ ID NO: 157126 - DNA, 74 bp, Homo sapiens
aagcaagcagagtgtgttcagggctgtgaagaggggagacccggtaggtagctcatgggcggtggacctttcca

SEQ ID NO: 157127 - DNA, 73 bp, Homo sapiens
tgtgttcagggctgtgaagaggggagacccggtaggtagctcatgggcggtggacctttccaggatttgtcaa

SEQ ID NO: 157128 - DNA, 71 bp, Homo sapiens
ctgtgaagaggggagacccggtaggtagctcatgggcggtggacctttccaggatttgtcaagtcagggaa

SEQ ID NO: 157129 - DNA, 71 bp, Homo sapiens
gggagacccggtaggtagctcatgggcggtggacctttccaggatttgtcaagtcagggaagcttaactga

SEQ ID NO: 157130 - DNA, 72 bp, Homo sapiens
ggtaggtagctcatgggcggtggacctttccaggatttgtcaagtcagggaagcttaactgagttcatttta

SEQ ID NO: 157131 - DNA, 73 bp, Homo sapiens
tcatgggcggtggacctttccaggatttgtcaagtcagggaagcttaactgagttcattttaggaagtgatgt

SEQ ID NO: 157132 - DNA, 73 bp, Homo sapiens
tggacctttccaggatttgtcaagtcagggaagcttaactgagttcattttaggaagtgatgtttattctgaa

SEQ ID NO: 157133 - DNA, 72 bp, Homo sapiens
aggatttgtcaagtcagggaagcttaactgagttcattttaggaagtgatgtttattctgaatcctgaaaaa

SEQ ID NO: 157134 - DNA, 72 bp, Homo sapiens
gtcaagtcagggaagcttaactgagttcattttaggaagtgatgtttattctgaatcctgaaaaatttgtag

SEQ ID NO: 157135 - DNA, 71 bp, Homo sapiens
actgagttcattttaggaagtgatgtttattctgaatcctgaaaaatttgtaggaaatagctgggcaaagg

SEQ ID NO: 157136 - DNA, 68 bp, Homo sapiens
attttaggaagtgatgtttattctgaatcctgaaaaatttgtaggaaatagctgggcaaaggggtaag

SEQ ID NO: 157137 - DNA, 69 bp, Homo sapiens
tgtttattctgaatcctgaaaaatttgtaggaaatagctgggcaaaggggtaaggcttgagaccttatt

SEQ ID NO: 157138 - DNA, 68 bp, Homo sapiens
ttctgaatcctgaaaaatttgtaggaaatagctgggcaaaggggtaaggcttgagaccttatttaaaa

SEQ ID NO: 157139 - DNA, 66 bp, Homo sapiens
aatttgtaggaaatagctgggcaaaggggtaaggcttgagaccttatttaaaaacattcaatttgg

SEQ ID NO: 157140 - DNA, 69 bp, Homo sapiens
taggaaatagctgggcaaaggggtaaggcttgagaccttatttaaaaacattcaatttggttgaatctg

SEQ ID NO: 157141 - DNA, 75 bp, Homo sapiens
gcaaaggggtaaggcttgagaccttatttaaaaacattcaatttggttgaatctgtgcgcagacatgtgtgaata

SEQ ID NO: 157142 - DNA, 77 bp, Homo sapiens
agaccttatttaaaaacattcaatttggttgaatctgtgcgcagacatgtgtgaatatgcaggcccattttgtggct

SEQ ID NO: 157143 - DNA, 81 bp, Homo sapiens
aaaaacattcaatttggttgaatctgtgcgcagacatgtgtgaatatgcaggcccattttgtggcttgcagattgtactgt

SEQ ID NO: 157144 - DNA, 84 bp, Homo sapiens
gttgaatctgtgcgcagacatgtgtgaatatgcaggcccattttgtggcttgcagattgtactgttcctcgttattcactgtcc

SEQ ID NO: 157145 - DNA, 80 bp, Homo sapiens
agacatgtgtgaatatgcaggcccattttgtggcttgcagattgtactgttcctcgttattcactgtcctccttgtaaga

SEQ ID NO: 157146 - DNA, 79 bp, Homo sapiens
tgaatatgcaggcccattttgtggcttgcagattgtactgttcctcgttattcactgtcctccttgtaagaggattata

SEQ ID NO: 157147 - DNA, 75 bp, Homo sapiens
gcccattttgtggcttgcagattgtactgttcctcgttattcactgtcctccttgtaagaggattatatggcctt

SEQ ID NO: 157148 - DNA, 75 bp, Homo sapiens
ttgtggcttgcagattgtactgttcctcgttattcactgtcctccttgtaagaggattatatggcctttgccctt

SEQ ID NO: 157149 - DNA, 74 bp, Homo sapiens
agattgtactgttcctcgttattcactgtcctccttgtaagaggattatatggcctttgcccttttgacatcaa

SEQ ID NO: 157150 - DNA, 73 bp, Homo sapiens
actgttcctcgttattcactgtcctccttgtaagaggattatatggcctttgcccttttgacatcaagtttga

SEQ ID NO: 157151 - DNA, 74 bp, Homo sapiens
gttattcactgtcctccttgtaagaggattatatggcctttgcccttttgacatcaagtttgaccatgtgactt

SEQ ID NO: 157152 - DNA, 74 bp, Homo sapiens
gtcctccttgtaagaggattatatggcctttgcccttttgacatcaagtttgaccatgtgactttctttggcca

SEQ ID NO: 157153 - DNA, 76 bp, Homo sapiens
taagaggattatatggcctttgcccttttgacatcaagtttgaccatgtgactttctttggccagtgacagatacg

SEQ ID NO: 157154 - DNA, 77 bp, Homo sapiens
atatggcctttgcccttttgacatcaagtttgaccatgtgactttctttggccagtgacagatacggtttctgagca

SEQ ID NO: 157155 - DNA, 78 bp, Homo sapiens
ttttgacatcaagtttgaccatgtgactttctttggccagtgacagatacggtttctgagcagaagcttgaagtccat

SEQ ID NO: 157156 - DNA, 79 bp, Homo sapiens
acatcaagtttgaccatgtgactttctttggccagtgacagatacggtttctgagcagaagcttgaagtccatttcatg

SEQ ID NO: 157157 - DNA, 77 bp, Homo sapiens
tttctttggccagtgacagatacggtttctgagcagaagcttgaagtccatttcatggttctgtcattgcctttttc

SEQ ID NO: 157158 - DNA, 79 bp, Homo sapiens
agtgacagatacggtttctgagcagaagcttgaagtccatttcatggttctgtcattgcctttttctgtcatccgtgaa

SEQ ID NO: 157159 - DNA, 79 bp, Homo sapiens
atacggtttctgagcagaagcttgaagtccatttcatggttctgtcattgcctttttctgtcatccgtgaatcagtgtg

SEQ ID NO: 157160 - DNA, 82 bp, Homo sapiens
ctgagcagaagcttgaagtccatttcatggttctgtcattgcctttttctgtcatccgtgaatcagtgtgtcccatgctggg

SEQ ID NO: 157161 - DNA, 80 bp, Homo sapiens
aagtccatttcatggttctgtcattgcctttttctgtcatccgtgaatcagtgtgtcccatgctggggctcattcttgaa

SEQ ID NO: 157162 - DNA, 81 bp, Homo sapiens
tttcatggttctgtcattgcctttttctgtcatccgtgaatcagtgtgtcccatgctggggctcattcttgaaccatagta

SEQ ID NO: 157163 - DNA, 83 bp, Homo sapiens
tcattgcctttttctgtcatccgtgaatcagtgtgtcccatgctggggctcattcttgaaccatagtaccagaatgaagatga

SEQ ID NO: 157164 - DNA, 86 bp, Homo sapiens
tcattcttgaaccatagtaccagaatgaagatgactagatcagagctccagctactcacagaatgatatgttattgtgagaaagaa

SEQ ID NO: 157165 - DNA, 85 bp, Homo sapiens
ttgaaccatagtaccagaatgaagatgactagatcagagctccagctactcacagaatgatatgttattgtgagaaagaaataca

SEQ ID NO: 157166 - DNA, 84 bp, Homo sapiens
agaatgaagatgactagatcagagctccagctactcacagaatgatatgttattgtgagaaagaaatacagctttgttgttgta

SEQ ID NO: 157167 - DNA, 84 bp, Homo sapiens
atgactagatcagagctccagctactcacagaatgatatgttattgtgagaaagaaatacagctttgttgttgtaagctgctaa

SEQ ID NO: 157168 - DNA, 83 bp, Homo sapiens
atcagagctccagctactcacagaatgatatgttattgtgagaaagaaatacagctttgttgttgtaagctgctaagatcttg

SEQ ID NO: 157169 - DNA, 80 bp, Homo sapiens
ctactcacagaatgatatgttattgtgagaaagaaatacagctttgttgttgtaagctgctaagatcttggggccatgtg

SEQ ID NO: 157170 - DNA, 78 bp, Homo sapiens
aatgatatgttattgtgagaaagaaatacagctttgttgttgtaagctgctaagatcttggggccatgtgttttcata

SEQ ID NO: 157171 - DNA, 81 bp, Homo sapiens
tatgttattgtgagaaagaaatacagctttgttgttgtaagctgctaagatcttggggccatgtgttttcatagcatcatg

SEQ ID NO: 157172 - DNA, 80 bp, Homo sapiens
aaagaaatacagctttgttgttgtaagctgctaagatcttggggccatgtgttttcatagcatcatgttgtgactgagaa

SEQ ID NO: 157173 - DNA, 82 bp, Homo sapiens
agctttgttgttgtaagctgctaagatcttggggccatgtgttttcatagcatcatgttgtgactgagaagagtactatatg

SEQ ID NO: 157174 - DNA, 84 bp, Homo sapiens
gttgttgtaagctgctaagatcttggggccatgtgttttcatagcatcatgttgtgactgagaagagtactatatgtgtgtctg

SEQ ID NO: 157175 - DNA, 76 bp, Homo sapiens
tgtgtacatgcaagtgtacatactagttggtttggggctgaggagccagttgccagttatgaaaccaaaggtgtaa

SEQ ID NO: 157176 - DNA, 73 bp, Homo sapiens
tactagttggtttggggctgaggagccagttgccagttatgaaaccaaaggtgtaaatcatggtcagttctta

SEQ ID NO: 157177 - DNA, 74 bp, Homo sapiens
ttggggctgaggagccagttgccagttatgaaaccaaaggtgtaaatcatggtcagttcttatgggccttgtaa

SEQ ID NO: 157178 - DNA, 73 bp, Homo sapiens
ggagccagttgccagttatgaaaccaaaggtgtaaatcatggtcagttcttatgggccttgtaagccaagtta

SEQ ID NO: 157179 - DNA, 71 bp, Homo sapiens
agttgccagttatgaaaccaaaggtgtaaatcatggtcagttcttatgggccttgtaagccaagttaagaa

SEQ ID NO: 157180 - DNA, 71 bp, Homo sapiens
aaaccaaaggtgtaaatcatggtcagttcttatgggccttgtaagccaagttaagaacattcaagatgaaa

SEQ ID NO: 157181 - DNA, 74 bp, Homo sapiens
aaaggtgtaaatcatggtcagttcttatgggccttgtaagccaagttaagaacattcaagatgaaagaacatga

SEQ ID NO: 157182 - DNA, 74 bp, Homo sapiens
atggtcagttcttatgggccttgtaagccaagttaagaacattcaagatgaaagaacatgaggaggttgacagt

SEQ ID NO: 157183 - DNA, 76 bp, Homo sapiens
gttcttatgggccttgtaagccaagttaagaacattcaagatgaaagaacatgaggaggttgacagttcagatgga

SEQ ID NO: 157184 - DNA, 76 bp, Homo sapiens
ccttgtaagccaagttaagaacattcaagatgaaagaacatgaggaggttgacagttcagatggacctccctggca

SEQ ID NO: 157185 - DNA, 77 bp, Homo sapiens
aagttaagaacattcaagatgaaagaacatgaggaggttgacagttcagatggacctccctggcagccgagtctgtg

SEQ ID NO: 157186 - DNA, 78 bp, Homo sapiens
aacattcaagatgaaagaacatgaggaggttgacagttcagatggacctccctggcagccgagtctgtggagtgaagg

SEQ ID NO: 157187 - DNA, 73 bp, Homo sapiens
atgaggaggttgacagttcagatggacctccctggcagccgagtctgtggagtgaagggagggaagttaaaaa

SEQ ID NO: 157188 - DNA, 73 bp, Homo sapiens
agttcagatggacctccctggcagccgagtctgtggagtgaagggagggaagttaaaaacattcgagatgaaa

SEQ ID NO: 157189 - DNA, 74 bp, Homo sapiens
atggacctccctggcagccgagtctgtggagtgaagggagggaagttaaaaacattcgagatgaaagaatgtga

SEQ ID NO: 157190 - DNA, 73 bp, Homo sapiens
cagccgagtctgtggagtgaagggagggaagttaaaaacattcgagatgaaagaatgtgaggaagtttgcagt

SEQ ID NO: 157191 - DNA, 74 bp, Homo sapiens
agtctgtggagtgaagggagggaagttaaaaacattcgagatgaaagaatgtgaggaagtttgcagttcagatg

SEQ ID NO: 157192 - DNA, 71 bp, Homo sapiens
aagggagggaagttaaaaacattcgagatgaaagaatgtgaggaagtttgcagttcagatggacctccgtg

SEQ ID NO: 157193 - DNA, 78 bp, Homo sapiens
aaagaatgtgaggaagtttgcagttcagatggacctccgtggcatctgagtctgtggagtgaagggagggcacgcttg

SEQ ID NO: 157194 - DNA, 79 bp, Homo sapiens
tgtgaggaagtttgcagttcagatggacctccgtggcatctgagtctgtggagtgaagggagggcacgcttggaggcgg

SEQ ID NO: 157195 - DNA, 78 bp, Homo sapiens
tttgcagttcagatggacctccgtggcatctgagtctgtggagtgaagggagggcacgcttggaggcggggccttcag

SEQ ID NO: 157196 - DNA, 75 bp, Homo sapiens
agatggacctccgtggcatctgagtctgtggagtgaagggagggcacgcttggaggcggggccttcaggccttcc

SEQ ID NO: 157197 - DNA, 81 bp, Homo sapiens
gcatctgagtctgtggagtgaagggagggcacgcttggaggcggggccttcaggccttcctgcgcttgtgtctgtgagata

SEQ ID NO: 157198 - DNA, 76 bp, Homo sapiens
agtctgtggagtgaagggagggcacgcttggaggcggggccttcaggccttcctgcgcttgtgtctgtgagataaa

SEQ ID NO: 157199 - DNA, 74 bp, Homo sapiens
aagggagggcacgcttggaggcggggccttcaggccttcctgcgcttgtgtctgtgagataaaggcctgaacta

SEQ ID NO: 157200 - DNA, 72 bp, Homo sapiens
aggcggggccttcaggccttcctgcgcttgtgtctgtgagataaaggcctgaactaaggtaacagggaagga

SEQ ID NO: 157201 - DNA, 73 bp, Homo sapiens
ccttcaggccttcctgcgcttgtgtctgtgagataaaggcctgaactaaggtaacagggaaggagaaaatgaa

SEQ ID NO: 157202 - DNA, 73 bp, Homo sapiens
tgcgcttgtgtctgtgagataaaggcctgaactaaggtaacagggaaggagaaaatgaaactgaaggaggtaa

SEQ ID NO: 157203 - DNA, 70 bp, Homo sapiens
tctgtgagataaaggcctgaactaaggtaacagggaaggagaaaatgaaactgaaggaggtaaactggaa

SEQ ID NO: 157204 - DNA, 70 bp, Homo sapiens
taacagggaaggagaaaatgaaactgaaggaggtaaactggaatttggagactgacgaggagagaaagga

SEQ ID NO: 157205 - DNA, 68 bp, Homo sapiens
aaactgaaggaggtaaactggaatttggagactgacgaggagagaaaggaaagcattccagggaaacc

SEQ ID NO: 157206 - DNA, 66 bp, Homo sapiens
ggtaaactggaatttggagactgacgaggagagaaaggaaagcattccagggaaaccccagttttt

SEQ ID NO: 157207 - DNA, 68 bp, Homo sapiens
aatttggagactgacgaggagagaaaggaaagcattccagggaaaccccagttttttgcttggctact

SEQ ID NO: 157208 - DNA, 68 bp, Homo sapiens
agactgacgaggagagaaaggaaagcattccagggaaaccccagttttttgcttggctactttgggta

SEQ ID NO: 157209 - DNA, 69 bp, Homo sapiens
gaaaggaaagcattccagggaaaccccagttttttgcttggctactttgggtaggtgatggtgtcatta

SEQ ID NO: 157210 - DNA, 70 bp, Homo sapiens
cattccagggaaaccccagttttttgcttggctactttgggtaggtgatggtgtcattaaccagaatcaa

SEQ ID NO: 157211 - DNA, 69 bp, Homo sapiens
aaaccccagttttttgcttggctactttgggtaggtgatggtgtcattaaccagaatcaaaaatgtcag

SEQ ID NO: 157212 - DNA, 73 bp, Homo sapiens
tttttgcttggctactttgggtaggtgatggtgtcattaaccagaatcaaaaatgtcagtggtagattagatt

SEQ ID NO: 157213 - DNA, 74 bp, Homo sapiens
cttggctactttgggtaggtgatggtgtcattaaccagaatcaaaaatgtcagtggtagattagatttgagtgg

SEQ ID NO: 157214 - DNA, 72 bp, Homo sapiens
gatggtgtcattaaccagaatcaaaaatgtcagtggtagattagatttgagtggggaaataaaaagttctct

SEQ ID NO: 157215 - DNA, 72 bp, Homo sapiens
ccagaatcaaaaatgtcagtggtagattagatttgagtggggaaataaaaagttctctttgagatacaccaa

SEQ ID NO: 157216 - DNA, 70 bp, Homo sapiens
aaatgtcagtggtagattagatttgagtggggaaataaaaagttctctttgagatacaccaaatttgagg

SEQ ID NO: 157217 - DNA, 70 bp, Homo sapiens
ggtagattagatttgagtggggaaataaaaagttctctttgagatacaccaaatttgaggtacttgtgga

SEQ ID NO: 157218 - DNA, 72 bp, Homo sapiens
ggaaataaaaagttctctttgagatacaccaaatttgaggtacttgtggatttcccagaggcatcctacata

SEQ ID NO: 157219 - DNA, 73 bp, Homo sapiens
aaaagttctctttgagatacaccaaatttgaggtacttgtggatttcccagaggcatcctacataggcactta

SEQ ID NO: 157220 - DNA, 77 bp, Homo sapiens
tctttgagatacaccaaatttgaggtacttgtggatttcccagaggcatcctacataggcacttaggaagagagcca

SEQ ID NO: 157221 - DNA, 74 bp, Homo sapiens
accaaatttgaggtacttgtggatttcccagaggcatcctacataggcacttaggaagagagccaggggattca

SEQ ID NO: 157222 - DNA, 76 bp, Homo sapiens
atttcccagaggcatcctacataggcacttaggaagagagccaggggattcagggtgattgtgtaggtagcaggta

SEQ ID NO: 157223 - DNA, 77 bp, Homo sapiens
tacataggcacttaggaagagagccaggggattcagggtgattgtgtaggtagcaggtagccaaggcgtagaggaga

SEQ ID NO: 157224 - DNA, 74 bp, Homo sapiens
acttaggaagagagccaggggattcagggtgattgtgtaggtagcaggtagccaaggcgtagaggagactacaa

SEQ ID NO: 157225 - DNA, 71 bp, Homo sapiens
agccaggggattcagggtgattgtgtaggtagcaggtagccaaggcgtagaggagactacaaggaaaaagt

SEQ ID NO: 157226 - DNA, 73 bp, Homo sapiens
attgtgtaggtagcaggtagccaaggcgtagaggagactacaaggaaaaagttgtgtgaagagagacaagaac

SEQ ID NO: 157227 - DNA, 71 bp, Homo sapiens
aggtagccaaggcgtagaggagactacaaggaaaaagttgtgtgaagagagacaagaacctaggacagaaa

SEQ ID NO: 157228 - DNA, 72 bp, Homo sapiens
aaggcgtagaggagactacaaggaaaaagttgtgtgaagagagacaagaacctaggacagaaagcctgagaa

SEQ ID NO: 157229 - DNA, 72 bp, Homo sapiens
aaggaaaaagttgtgtgaagagagacaagaacctaggacagaaagcctgagaacaaaatatcttgtgggctg

SEQ ID NO: 157230 - DNA, 72 bp, Homo sapiens
agttgtgtgaagagagacaagaacctaggacagaaagcctgagaacaaaatatcttgtgggctggggaaggg

SEQ ID NO: 157231 - DNA, 71 bp, Homo sapiens
agagacaagaacctaggacagaaagcctgagaacaaaatatcttgtgggctggggaaggggaactggctaa

SEQ ID NO: 157232 - DNA, 70 bp, Homo sapiens
aacctaggacagaaagcctgagaacaaaatatcttgtgggctggggaaggggaactggctaagtgtactg

SEQ ID NO: 157233 - DNA, 70 bp, Homo sapiens
agaaagcctgagaacaaaatatcttgtgggctggggaaggggaactggctaagtgtactggaagggaatg

SEQ ID NO: 157234 - DNA, 70 bp, Homo sapiens
aacaaaatatcttgtgggctggggaaggggaactggctaagtgtactggaagggaatgggcatagaagtc

SEQ ID NO: 157235 - DNA, 71 bp, Homo sapiens
ttgtgggctggggaaggggaactggctaagtgtactggaagggaatgggcatagaagtccaatacaggaaa

SEQ ID NO: 157236 - DNA, 67 bp, Homo sapiens
gggaaggggaactggctaagtgtactggaagggaatgggcatagaagtccaatacaggaaaaaaaaa

SEQ ID NO: 157237 - DNA, 69 bp, Homo sapiens
ggaaaaaaaaaatactgtacaacgatgtcagatcaggagaggaaagtttagaaagtgtcacctactaaa

SEQ ID NO: 157238 - DNA, 70 bp, Homo sapiens
aaaaatactgtacaacgatgtcagatcaggagaggaaagtttagaaagtgtcacctactaaacttcgtcc

SEQ ID NO: 157239 - DNA, 74 bp, Homo sapiens
aacgatgtcagatcaggagaggaaagtttagaaagtgtcacctactaaacttcgtcctccatgatcttgcttta

SEQ ID NO: 157240 - DNA, 70 bp, Homo sapiens
agatcaggagaggaaagtttagaaagtgtcacctactaaacttcgtcctccatgatcttgctttaaagtt

SEQ ID NO: 157241 - DNA, 69 bp, Homo sapiens
gagaggaaagtttagaaagtgtcacctactaaacttcgtcctccatgatcttgctttaaagtttgttaa

SEQ ID NO: 157242 - DNA, 70 bp, Homo sapiens
gtttagaaagtgtcacctactaaacttcgtcctccatgatcttgctttaaagtttgttaaattgcattta

SEQ ID NO: 157243 - DNA, 70 bp, Homo sapiens
gaaagtgtcacctactaaacttcgtcctccatgatcttgctttaaagtttgttaaattgcatttaattta

SEQ ID NO: 157244 - DNA, 69 bp, Homo sapiens
gtcacctactaaacttcgtcctccatgatcttgctttaaagtttgttaaattgcatttaatttaatttc

SEQ ID NO: 157245 - DNA, 70 bp, Homo sapiens
ctaaacttcgtcctccatgatcttgctttaaagtttgttaaattgcatttaatttaatttctactctctg

SEQ ID NO: 157246 - DNA, 72 bp, Homo sapiens
cttcgtcctccatgatcttgctttaaagtttgttaaattgcatttaatttaatttctactctctggtcttgc

SEQ ID NO: 157247 - DNA, 73 bp, Homo sapiens
cgtcctccatgatcttgctttaaagtttgttaaattgcatttaatttaatttctactctctggtcttgcttca

SEQ ID NO: 157248 - DNA, 73 bp, Homo sapiens
cctccatgatcttgctttaaagtttgttaaattgcatttaatttaatttctactctctggtcttgcttcatag

SEQ ID NO: 157249 - DNA, 70 bp, Homo sapiens
gatcttgctttaaagtttgttaaattgcatttaatttaatttctactctctggtcttgcttcatagtttt

SEQ ID NO: 157250 - DNA, 68 bp, Homo sapiens
cttgctttaaagtttgttaaattgcatttaatttaatttctactctctggtcttgcttcatagttttt

SEQ ID NO: 157251 - DNA, 69 bp, Homo sapiens
gtttgttaaattgcatttaatttaatttctactctctggtcttgcttcatagttttttcggtatcctct

SEQ ID NO: 157252 - DNA, 70 bp, Homo sapiens
aattgcatttaatttaatttctactctctggtcttgcttcatagttttttcggtatcctcttaaatgccc

SEQ ID NO: 157253 - DNA, 68 bp, Homo sapiens
atttaatttctactctctggtcttgcttcatagttttttcggtatcctcttaaatgccccccttccta

SEQ ID NO: 157254 - DNA, 72 bp, Homo sapiens
ttctactctctggtcttgcttcatagttttttcggtatcctcttaaatgccccccttcctagcattctgtaa

SEQ ID NO: 157255 - DNA, 69 bp, Homo sapiens
tcttgcttcatagttttttcggtatcctcttaaatgccccccttcctagcattctgtaaagtttcctat

SEQ ID NO: 157256 - DNA, 67 bp, Homo sapiens
ttcatagttttttcggtatcctcttaaatgccccccttcctagcattctgtaaagtttcctattctt

SEQ ID NO: 157257 - DNA, 73 bp, Homo sapiens
ttttcggtatcctcttaaatgccccccttcctagcattctgtaaagtttcctattctttgatcatctgtgatg

SEQ ID NO: 157258 - DNA, 77 bp, Homo sapiens
ttaaatgccccccttcctagcattctgtaaagtttcctattctttgatcatctgtgatgtccataatatatcagtta

SEQ ID NO: 157259 - DNA, 78 bp, Homo sapiens
ccttcctagcattctgtaaagtttcctattctttgatcatctgtgatgtccataatatatcagttagagtgtttcaat

SEQ ID NO: 157260 - DNA, 80 bp, Homo sapiens
agcattctgtaaagtttcctattctttgatcatctgtgatgtccataatatatcagttagagtgtttcaatttatgttgc

SEQ ID NO: 157261 - DNA, 77 bp, Homo sapiens
gtaaagtttcctattctttgatcatctgtgatgtccataatatatcagttagagtgtttcaatttatgttgctaatt

SEQ ID NO: 157262 - DNA, 70 bp, Homo sapiens
ttttttttttctactactggaaacatttttatgattgttatctattttattacttcaagagcgctctgga

SEQ ID NO: 157263 - DNA, 76 bp, Homo sapiens
tttctactactggaaacatttttatgattgttatctattttattacttcaagagcgctctggattctcaccgatgc

SEQ ID NO: 157264 - DNA, 74 bp, Homo sapiens
ggaaacatttttatgattgttatctattttattacttcaagagcgctctggattctcaccgatgcctttcttct

SEQ ID NO: 157265 - DNA, 76 bp, Homo sapiens
tttttatgattgttatctattttattacttcaagagcgctctggattctcaccgatgcctttcttcttttgagatc

SEQ ID NO: 157266 - DNA, 76 bp, Homo sapiens
ttatctattttattacttcaagagcgctctggattctcaccgatgcctttcttcttttgagatcccattcctctgg

SEQ ID NO: 157267 - DNA, 77 bp, Homo sapiens
tttattacttcaagagcgctctggattctcaccgatgcctttcttcttttgagatcccattcctctgggactttgca

SEQ ID NO: 157268 - DNA, 78 bp, Homo sapiens
aagagcgctctggattctcaccgatgcctttcttcttttgagatcccattcctctgggactttgcagctgccctttca

SEQ ID NO: 157269 - DNA, 76 bp, Homo sapiens
attctcaccgatgcctttcttcttttgagatcccattcctctgggactttgcagctgccctttcattccttctgtc

SEQ ID NO: 157270 - DNA, 74 bp, Homo sapiens
atgcctttcttcttttgagatcccattcctctgggactttgcagctgccctttcattccttctgtcttacttcc

SEQ ID NO: 157271 - DNA, 73 bp, Homo sapiens
ttcttcttttgagatcccattcctctgggactttgcagctgccctttcattccttctgtcttacttcccttcc

SEQ ID NO: 157272 - DNA, 73 bp, Homo sapiens
agatcccattcctctgggactttgcagctgccctttcattccttctgtcttacttcccttcctctctgtcctt

SEQ ID NO: 157273 - DNA, 73 bp, Homo sapiens
tcctctgggactttgcagctgccctttcattccttctgtcttacttcccttcctctctgtcctttcttcttac

SEQ ID NO: 157274 - DNA, 73 bp, Homo sapiens
tttgcagctgccctttcattccttctgtcttacttcccttcctctctgtcctttcttcttacctcccattcac

SEQ ID NO: 157275 - DNA, 71 bp, Homo sapiens
ctttcattccttctgtcttacttcccttcctctctgtcctttcttcttacctcccattcactcatctttgg

SEQ ID NO: 157276 - DNA, 71 bp, Homo sapiens
ttctgtcttacttcccttcctctctgtcctttcttcttacctcccattcactcatctttgggcttttctct

SEQ ID NO: 157277 - DNA, 70 bp, Homo sapiens
ttcccttcctctctgtcctttcttcttacctcccattcactcatctttgggcttttctcttctgttaaaa

SEQ ID NO: 157278 - DNA, 71 bp, Homo sapiens
tctgtcctttcttcttacctcccattcactcatctttgggcttttctcttctgttaaaaggcactcaggtt

SEQ ID NO: 157279 - DNA, 68 bp, Homo sapiens
tacctcccattcactcatctttgggcttttctcttctgttaaaaggcactcaggttttgttttttaat

SEQ ID NO: 157280 - DNA, 67 bp, Homo sapiens
aaaaaaaaactttgctaaagttttgtaactcttcatgttttgtctcatcattcattaaacaaacatt

SEQ ID NO: 157281 - DNA, 72 bp, Homo sapiens
tttgctaaagttttgtaactcttcatgttttgtctcatcattcattaaacaaacatttctactccaacttac

SEQ ID NO: 157282 - DNA, 75 bp, Homo sapiens
ttttgtaactcttcatgttttgtctcatcattcattaaacaaacatttctactccaacttactgcaggaattatc

SEQ ID NO: 157283 - DNA, 74 bp, Homo sapiens
tcttcatgttttgtctcatcattcattaaacaaacatttctactccaacttactgcaggaattatccctttccc

SEQ ID NO: 157284 - DNA, 72 bp, Homo sapiens
ttcattaaacaaacatttctactccaacttactgcaggaattatccctttcccccatctactcctgactcat

SEQ ID NO: 157285 - DNA, 70 bp, Homo sapiens
aaacaaacatttctactccaacttactgcaggaattatccctttcccccatctactcctgactcatttaa

SEQ ID NO: 157286 - DNA, 70 bp, Homo sapiens
tttctactccaacttactgcaggaattatccctttcccccatctactcctgactcatttaacccttgcct

SEQ ID NO: 157287 - DNA, 71 bp, Homo sapiens
acttactgcaggaattatccctttcccccatctactcctgactcatttaacccttgcctttcttgcttcta

SEQ ID NO: 157288 - DNA, 68 bp, Homo sapiens
aattatccctttcccccatctactcctgactcatttaacccttgcctttcttgcttctatccccaaaa

SEQ ID NO: 157289 - DNA, 71 bp, Homo sapiens
ctttcccccatctactcctgactcatttaacccttgcctttcttgcttctatccccaaaacactgctagaa

SEQ ID NO: 157290 - DNA, 74 bp, Homo sapiens
tactcctgactcatttaacccttgcctttcttgcttctatccccaaaacactgctagaactgcctttcttgata

SEQ ID NO: 157291 - DNA, 71 bp, Homo sapiens
atttaacccttgcctttcttgcttctatccccaaaacactgctagaactgcctttcttgatagccttgatt

SEQ ID NO: 157292 - DNA, 75 bp, Homo sapiens
tgcctttcttgcttctatccccaaaacactgctagaactgcctttcttgatagccttgatttcctgattaccaaa

SEQ ID NO: 157293 - DNA, 74 bp, Homo sapiens
ttcttgcttctatccccaaaacactgctagaactgcctttcttgatagccttgatttcctgattaccaaaacca

SEQ ID NO: 157294 - DNA, 73 bp, Homo sapiens
ttctatccccaaaacactgctagaactgcctttcttgatagccttgatttcctgattaccaaaaccagttgcc

SEQ ID NO: 157295 - DNA, 73 bp, Homo sapiens
cccaaaacactgctagaactgcctttcttgatagccttgatttcctgattaccaaaaccagttgcccactgtg

SEQ ID NO: 157296 - DNA, 74 bp, Homo sapiens
tgctagaactgcctttcttgatagccttgatttcctgattaccaaaaccagttgcccactgtgggaccataaaa

SEQ ID NO: 157297 - DNA, 70 bp, Homo sapiens
cctttcttgatagccttgatttcctgattaccaaaaccagttgcccactgtgggaccataaaaggcttta

SEQ ID NO: 157298 - DNA, 70 bp, Homo sapiens
tttcttgatagccttgatttcctgattaccaaaaccagttgcccactgtgggaccataaaaggctttatt

SEQ ID NO: 157299 - DNA, 71 bp, Homo sapiens
ttgatagccttgatttcctgattaccaaaaccagttgcccactgtgggaccataaaaggctttatttacca

SEQ ID NO: 157300 - DNA, 67 bp, Homo sapiens
ttgatttcctgattaccaaaaccagttgcccactgtgggaccataaaaggctttatttaccaccctt

SEQ ID NO: 157301 - DNA, 65 bp, Homo sapiens
atttcctgattaccaaaaccagttgcccactgtgggaccataaaaggctttatttaccacccttt

SEQ ID NO: 157302 - DNA, 62 bp, Homo sapiens
aaaaccagttgcccactgtgggaccataaaaggctttatttaccaccctttttttttcttgg

SEQ ID NO: 157303 - DNA, 66 bp, Homo sapiens
cactgtgggaccataaaaggctttatttaccaccctttttttttcttggtaatgatactagcctct

SEQ ID NO: 157304 - DNA, 67 bp, Homo sapiens
gaccataaaaggctttatttaccaccctttttttttcttggtaatgatactagcctctttctggagc

SEQ ID NO: 157305 - DNA, 67 bp, Homo sapiens
ggctttatttaccaccctttttttttcttggtaatgatactagcctctttctggagctattctttcc

SEQ ID NO: 157306 - DNA, 68 bp, Homo sapiens
tttaccaccctttttttttcttggtaatgatactagcctctttctggagctattctttccttatctcc

SEQ ID NO: 157307 - DNA, 78 bp, Homo sapiens
tagcctctttctggagctattctttccttatctcccttagttgactccattttgctcatgtctcaggacagtgtgtat

SEQ ID NO: 157308 - DNA, 79 bp, Homo sapiens
tttctggagctattctttccttatctcccttagttgactccattttgctcatgtctcaggacagtgtgtattgtaatgc

SEQ ID NO: 157309 - DNA, 81 bp, Homo sapiens
ttatctcccttagttgactccattttgctcatgtctcaggacagtgtgtattgtaatgctggattcttgatgttcttctac

SEQ ID NO: 157310 - DNA, 83 bp, Homo sapiens
gactccattttgctcatgtctcaggacagtgtgtattgtaatgctggattcttgatgttcttctactcattctctcaattaaa

SEQ ID NO: 157311 - DNA, 80 bp, Homo sapiens
attttgctcatgtctcaggacagtgtgtattgtaatgctggattcttgatgttcttctactcattctctcaattaaaaaa

SEQ ID NO: 157312 - DNA, 79 bp, Homo sapiens
tcaggacagtgtgtattgtaatgctggattcttgatgttcttctactcattctctcaattaaaaaatgccccataatta

SEQ ID NO: 157313 - DNA, 76 bp, Homo sapiens
gtgtattgtaatgctggattcttgatgttcttctactcattctctcaattaaaaaatgccccataattaactatgg

SEQ ID NO: 157314 - DNA, 76 bp, Homo sapiens
ttgtaatgctggattcttgatgttcttctactcattctctcaattaaaaaatgccccataattaactatggggcca

SEQ ID NO: 157315 - DNA, 74 bp, Homo sapiens
attcttgatgttcttctactcattctctcaattaaaaaatgccccataattaactatggggccacaatcctgag

SEQ ID NO: 157316 - DNA, 74 bp, Homo sapiens
tgttcttctactcattctctcaattaaaaaatgccccataattaactatggggccacaatcctgaggtcaagga

SEQ ID NO: 157317 - DNA, 74 bp, Homo sapiens
attctctcaattaaaaaatgccccataattaactatggggccacaatcctgaggtcaaggaggcacattgataa

SEQ ID NO: 157318 - DNA, 74 bp, Homo sapiens
aattaaaaaatgccccataattaactatggggccacaatcctgaggtcaaggaggcacattgataatgactcta

SEQ ID NO: 157319 - DNA, 79 bp, Homo sapiens
cccataattaactatggggccacaatcctgaggtcaaggaggcacattgataatgactctagctgacataatatactta

SEQ ID NO: 157320 - DNA, 80 bp, Homo sapiens
attaactatggggccacaatcctgaggtcaaggaggcacattgataatgactctagctgacataatatacttagcattta

SEQ ID NO: 157321 - DNA, 81 bp, Homo sapiens
ggtcaaggaggcacattgataatgactctagctgacataatatacttagcatttattgacttcaaactgtgtatgcttatt

SEQ ID NO: 157322 - DNA, 82 bp, Homo sapiens
aggaggcacattgataatgactctagctgacataatatacttagcatttattgacttcaaactgtgtatgcttatttagata

SEQ ID NO: 157323 - DNA, 78 bp, Homo sapiens
tagctgacataatatacttagcatttattgacttcaaactgtgtatgcttatttagatatttaaaaatttggctggca

SEQ ID NO: 157324 - DNA, 76 bp, Homo sapiens
actgtgtatgcttatttagatatttaaaaatttggctggcattcctgggtcacagtatatactctgcaagatgggt

SEQ ID NO: 157325 - DNA, 78 bp, Homo sapiens
ttagatatttaaaaatttggctggcattcctgggtcacagtatatactctgcaagatgggttgatggagagcctgatt

SEQ ID NO: 157326 - DNA, 78 bp, Homo sapiens
ttaaaaatttggctggcattcctgggtcacagtatatactctgcaagatgggttgatggagagcctgatttcgtggta

SEQ ID NO: 157327 - DNA, 82 bp, Homo sapiens
tttggctggcattcctgggtcacagtatatactctgcaagatgggttgatggagagcctgatttcgtggtagctgctattta

SEQ ID NO: 157328 - DNA, 80 bp, Homo sapiens
attcctgggtcacagtatatactctgcaagatgggttgatggagagcctgatttcgtggtagctgctatttactgggctg

SEQ ID NO: 157329 - DNA, 80 bp, Homo sapiens
tctgcaagatgggttgatggagagcctgatttcgtggtagctgctatttactgggctgtcttccttcctctcctccacta

SEQ ID NO: 157330 - DNA, 78 bp, Homo sapiens
ttgatggagagcctgatttcgtggtagctgctatttactgggctgtcttccttcctctcctccactaggatgtattat

SEQ ID NO: 157331 - DNA, 77 bp, Homo sapiens
agcctgatttcgtggtagctgctatttactgggctgtcttccttcctctcctccactaggatgtattatttcacata

SEQ ID NO: 157332 - DNA, 76 bp, Homo sapiens
ctatttactgggctgtcttccttcctctcctccactaggatgtattatttcacatacttggtttcatctcactatg

SEQ ID NO: 157333 - DNA, 81 bp, Homo sapiens
cttcctctcctccactaggatgtattatttcacatacttggtttcatctcactatgttgacatattgctttcatcacagaa

SEQ ID NO: 157334 - DNA, 85 bp, Homo sapiens
tccactaggatgtattatttcacatacttggtttcatctcactatgttgacatattgctttcatcacagaatctggactgcatat

SEQ ID NO: 157335 - DNA, 85 bp, Homo sapiens
taggatgtattatttcacatacttggtttcatctcactatgttgacatattgctttcatcacagaatctggactgcatatttcta

SEQ ID NO: 157336 - DNA, 84 bp, Homo sapiens
gtttcatctcactatgttgacatattgctttcatcacagaatctggactgcatatttctaggtgaagtaatctaggtgatgatt

SEQ ID NO: 157337 - DNA, 82 bp, Homo sapiens
actatgttgacatattgctttcatcacagaatctggactgcatatttctaggtgaagtaatctaggtgatgatttacctata

SEQ ID NO: 157338 - DNA, 76 bp, Homo sapiens
acagaatctggactgcatatttctaggtgaagtaatctaggtgatgatttacctatactaaaatccagtattgatt

SEQ ID NO: 157339 - DNA, 74 bp, Homo sapiens
gactgcatatttctaggtgaagtaatctaggtgatgatttacctatactaaaatccagtattgattttcaattt

SEQ ID NO: 157340 - DNA, 73 bp, Homo sapiens
ctaggtgaagtaatctaggtgatgatttacctatactaaaatccagtattgattttcaattttagattggcag

SEQ ID NO: 157341 - DNA, 77 bp, Homo sapiens
tctaggtgatgatttacctatactaaaatccagtattgattttcaattttagattggcagtcaattgagaatattgc

SEQ ID NO: 157342 - DNA, 78 bp, Homo sapiens
gtgatgatttacctatactaaaatccagtattgattttcaattttagattggcagtcaattgagaatattgctcagga

SEQ ID NO: 157343 - DNA, 77 bp, Homo sapiens
acctatactaaaatccagtattgattttcaattttagattggcagtcaattgagaatattgctcaggaaatgctggc

SEQ ID NO: 157344 - DNA, 77 bp, Homo sapiens
aaatccagtattgattttcaattttagattggcagtcaattgagaatattgctcaggaaatgctggcttttgctgtt

SEQ ID NO: 157345 - DNA, 76 bp, Homo sapiens
attttcaattttagattggcagtcaattgagaatattgctcaggaaatgctggcttttgctgtttttcaagtcctc

SEQ ID NO: 157346 - DNA, 77 bp, Homo sapiens
attttagattggcagtcaattgagaatattgctcaggaaatgctggcttttgctgtttttcaagtcctctgccttgg

SEQ ID NO: 157347 - DNA, 76 bp, Homo sapiens
agtcaattgagaatattgctcaggaaatgctggcttttgctgtttttcaagtcctctgccttggtggttgtcttta

SEQ ID NO: 157348 - DNA, 72 bp, Homo sapiens
ggaaatgctggcttttgctgtttttcaagtcctctgccttggtggttgtctttagcatctccagtaaagttt

SEQ ID NO: 157349 - DNA, 70 bp, Homo sapiens
gcttttgctgtttttcaagtcctctgccttggtggttgtctttagcatctccagtaaagttttataaaaa

SEQ ID NO: 157350 - DNA, 71 bp, Homo sapiens
tttttcaagtcctctgccttggtggttgtctttagcatctccagtaaagttttataaaaacacatgagctt

SEQ ID NO: 157351 - DNA, 72 bp, Homo sapiens
gtcctctgccttggtggttgtctttagcatctccagtaaagttttataaaaacacatgagcttttagtcatt

SEQ ID NO: 157352 - DNA, 73 bp, Homo sapiens
gtctttagcatctccagtaaagttttataaaaacacatgagcttttagtcatttgctactatctgtaaataaa

SEQ ID NO: 157353 - DNA, 73 bp, Homo sapiens
catctccagtaaagttttataaaaacacatgagcttttagtcatttgctactatctgtaaataaaggtctaca

SEQ ID NO: 157354 - DNA, 68 bp, Homo sapiens
aaagttttataaaaacacatgagcttttagtcatttgctactatctgtaaataaaggtctacaaaaaa

SEQ ID NO: 157355 - DNA, 67 bp, Homo sapiens
aaaacacatgagcttttagtcatttgctactatctgtaaataaaggtctacaaaaaaaaactaaaac

SEQ ID NO: 157356 - DNA, 68 bp, Homo sapiens
ttgctactatctgtaaataaaggtctacaaaaaaaaactaaaactatgtttgattttggtggccagtc

SEQ ID NO: 157357 - DNA, 66 bp, Homo sapiens
ctgtaaataaaggtctacaaaaaaaaactaaaactatgtttgattttggtggccagtcttggaaga

SEQ ID NO: 157358 - DNA, 68 bp, Homo sapiens
ggtctacaaaaaaaaactaaaactatgtttgattttggtggccagtcttggaagagaggaattgagga

SEQ ID NO: 157359 - DNA, 68 bp, Homo sapiens
aaaaaactaaaactatgtttgattttggtggccagtcttggaagagaggaattgaggaaatacagtag

SEQ ID NO: 157360 - DNA, 72 bp, Homo sapiens
taaaactatgtttgattttggtggccagtcttggaagagaggaattgaggaaatacagtagttaatgagtag

SEQ ID NO: 157361 - DNA, 76 bp, Homo sapiens
tgtttgattttggtggccagtcttggaagagaggaattgaggaaatacagtagttaatgagtagtggcataggata

SEQ ID NO: 157362 - DNA, 74 bp, Homo sapiens
gccagtcttggaagagaggaattgaggaaatacagtagttaatgagtagtggcataggataggggaggaaaata

SEQ ID NO: 157363 - DNA, 72 bp, Homo sapiens
tcttggaagagaggaattgaggaaatacagtagttaatgagtagtggcataggataggggaggaaaataaat

SEQ ID NO: 157364 - DNA, 75 bp, Homo sapiens
tagttaatgagtagtggcataggataggggaggaaaataaattgaatcctggagtttcagtaggaatcaagtgca

SEQ ID NO: 157365 - DNA, 71 bp, Homo sapiens
ataggggaggaaaataaattgaatcctggagtttcagtaggaatcaagtgcacttgggtagctgacaaagt

SEQ ID NO: 157366 - DNA, 73 bp, Homo sapiens
aataaattgaatcctggagtttcagtaggaatcaagtgcacttgggtagctgacaaagttgggatttgactta

SEQ ID NO: 157367 - DNA, 76 bp, Homo sapiens
attgaatcctggagtttcagtaggaatcaagtgcacttgggtagctgacaaagttgggatttgacttattgctcca

SEQ ID NO: 157368 - DNA, 76 bp, Homo sapiens
acttgggtagctgacaaagttgggatttgacttattgctccagtattctctcttagattagcctatgtgcaaatat

SEQ ID NO: 157369 - DNA, 76 bp, Homo sapiens
ttgggatttgacttattgctccagtattctctcttagattagcctatgtgcaaatattacctccacatcgtaaact

SEQ ID NO: 157370 - DNA, 77 bp, Homo sapiens
ttattgctccagtattctctcttagattagcctatgtgcaaatattacctccacatcgtaaacttgattggtctctt

SEQ ID NO: 157371 - DNA, 76 bp, Homo sapiens
agtattctctcttagattagcctatgtgcaaatattacctccacatcgtaaacttgattggtctctttgcttctag

SEQ ID NO: 157372 - DNA, 78 bp, Homo sapiens
tcttagattagcctatgtgcaaatattacctccacatcgtaaacttgattggtctctttgcttctagtccattctata

SEQ ID NO: 157373 - DNA, 77 bp, Homo sapiens
attagcctatgtgcaaatattacctccacatcgtaaacttgattggtctctttgcttctagtccattctatactcaa

SEQ ID NO: 157374 - DNA, 76 bp, Homo sapiens
gcaaatattacctccacatcgtaaacttgattggtctctttgcttctagtccattctatactcaaatgttacatta

SEQ ID NO: 157375 - DNA, 75 bp, Homo sapiens
aacttgattggtctctttgcttctagtccattctatactcaaatgttacattaatgtccccaatatttcatcacc

SEQ ID NO: 157376 - DNA, 76 bp, Homo sapiens
attggtctctttgcttctagtccattctatactcaaatgttacattaatgtccccaatatttcatcacctggagga

SEQ ID NO: 157377 - DNA, 77 bp, Homo sapiens
ttctagtccattctatactcaaatgttacattaatgtccccaatatttcatcacctggaggactccagactgctaaa

SEQ ID NO: 157378 - DNA, 77 bp, Homo sapiens
tccattctatactcaaatgttacattaatgtccccaatatttcatcacctggaggactccagactgctaaaatgccc

SEQ ID NO: 157379 - DNA, 75 bp, Homo sapiens
ttacattaatgtccccaatatttcatcacctggaggactccagactgctaaaatgcccctttagcaattcctgac

SEQ ID NO: 157380 - DNA, 75 bp, Homo sapiens
caatatttcatcacctggaggactccagactgctaaaatgcccctttagcaattcctgacctcttctccctacaa

SEQ ID NO: 157381 - DNA, 76 bp, Homo sapiens
tcacctggaggactccagactgctaaaatgcccctttagcaattcctgacctcttctccctacaatatgagaagaa

SEQ ID NO: 157382 - DNA, 73 bp, Homo sapiens
tgctaaaatgcccctttagcaattcctgacctcttctccctacaatatgagaagaaaaagttgctgtagggaa

SEQ ID NO: 157383 - DNA, 70 bp, Homo sapiens
aattcctgacctcttctccctacaatatgagaagaaaaagttgctgtagggaaatctactaaaagtcaag

SEQ ID NO: 157384 - DNA, 73 bp, Homo sapiens
ctcttctccctacaatatgagaagaaaaagttgctgtagggaaatctactaaaagtcaaggatgtgacagtat

SEQ ID NO: 157385 - DNA, 75 bp, Homo sapiens
tagggaaatctactaaaagtcaaggatgtgacagtattcctcactgaattaagcactaagtataagagagctatt

SEQ ID NO: 157386 - DNA, 76 bp, Homo sapiens
ctactaaaagtcaaggatgtgacagtattcctcactgaattaagcactaagtataagagagctattttattgctaa

SEQ ID NO: 157387 - DNA, 80 bp, Homo sapiens
aaggatgtgacagtattcctcactgaattaagcactaagtataagagagctattttattgctaagattgatgaatgggca

SEQ ID NO: 157388 - DNA, 79 bp, Homo sapiens
gtattcctcactgaattaagcactaagtataagagagctattttattgctaagattgatgaatgggcattagtacattg

SEQ ID NO: 157389 - DNA, 80 bp, Homo sapiens
cactgaattaagcactaagtataagagagctattttattgctaagattgatgaatgggcattagtacattgttaatgcac

SEQ ID NO: 157390 - DNA, 77 bp, Homo sapiens
gcactaagtataagagagctattttattgctaagattgatgaatgggcattagtacattgttaatgcacttaaaagg

SEQ ID NO: 157391 - DNA, 77 bp, Homo sapiens
agagagctattttattgctaagattgatgaatgggcattagtacattgttaatgcacttaaaagggtattgcactaa

SEQ ID NO: 157392 - DNA, 77 bp, Homo sapiens
tttattgctaagattgatgaatgggcattagtacattgttaatgcacttaaaagggtattgcactaaacttgagctc

SEQ ID NO: 157393 - DNA, 76 bp, Homo sapiens
ctaagattgatgaatgggcattagtacattgttaatgcacttaaaagggtattgcactaaacttgagctctttgag

SEQ ID NO: 157394 - DNA, 76 bp, Homo sapiens
atgaatgggcattagtacattgttaatgcacttaaaagggtattgcactaaacttgagctctttgaggacagagac

SEQ ID NO: 157395 - DNA, 75 bp, Homo sapiens
attagtacattgttaatgcacttaaaagggtattgcactaaacttgagctctttgaggacagagaccaggctgtg

SEQ ID NO: 157396 - DNA, 76 bp, Homo sapiens
ttgttaatgcacttaaaagggtattgcactaaacttgagctctttgaggacagagaccaggctgtgtggtcttcca

SEQ ID NO: 157397 - DNA, 74 bp, Homo sapiens
acttaaaagggtattgcactaaacttgagctctttgaggacagagaccaggctgtgtggtcttccagaggagga

SEQ ID NO: 157398 - DNA, 83 bp, Homo sapiens
tattgcactaaacttgagctctttgaggacagagaccaggctgtgtggtcttccagaggaggacacaatgtgcacagtggata

SEQ ID NO: 157399 - DNA, 83 bp, Homo sapiens
tgtgtggtcttccagaggaggacacaatgtgcacagtggataattgaagaatgcatgcattaagaaattaatgaaagttgatc

SEQ ID NO: 157400 - DNA, 80 bp, Homo sapiens
agaggaggacacaatgtgcacagtggataattgaagaatgcatgcattaagaaattaatgaaagttgatcggtaaggaca

SEQ ID NO: 157401 - DNA, 81 bp, Homo sapiens
acaatgtgcacagtggataattgaagaatgcatgcattaagaaattaatgaaagttgatcggtaaggacataactgtcata

SEQ ID NO: 157402 - DNA, 81 bp, Homo sapiens
tgcacagtggataattgaagaatgcatgcattaagaaattaatgaaagttgatcggtaaggacataactgtcatacacaaa

SEQ ID NO: 157403 - DNA, 80 bp, Homo sapiens
ttgaagaatgcatgcattaagaaattaatgaaagttgatcggtaaggacataactgtcatacacaaactcagcacagtaa

SEQ ID NO: 157404 - DNA, 78 bp, Homo sapiens
gcatgcattaagaaattaatgaaagttgatcggtaaggacataactgtcatacacaaactcagcacagtaaatttgaa

SEQ ID NO: 157405 - DNA, 73 bp, Homo sapiens
gaaattaatgaaagttgatcggtaaggacataactgtcatacacaaactcagcacagtaaatttgaagacttt

SEQ ID NO: 157406 - DNA, 73 bp, Homo sapiens
aatgaaagttgatcggtaaggacataactgtcatacacaaactcagcacagtaaatttgaagacttttattta

SEQ ID NO: 157407 - DNA, 73 bp, Homo sapiens
gatcggtaaggacataactgtcatacacaaactcagcacagtaaatttgaagacttttatttaaagctttgaa

SEQ ID NO: 157408 - DNA, 72 bp, Homo sapiens
acataactgtcatacacaaactcagcacagtaaatttgaagacttttatttaaagctttgaaagtctggccc

SEQ ID NO: 157409 - DNA, 72 bp, Homo sapiens
gtcatacacaaactcagcacagtaaatttgaagacttttatttaaagctttgaaagtctggccccttgctgg

SEQ ID NO: 157410 - DNA, 69 bp, Homo sapiens
atttgaagacttttatttaaagctttgaaagtctggccccttgctgggcttgtgtagatttctttagaa

SEQ ID NO: 157411 - DNA, 69 bp, Homo sapiens
ttttatttaaagctttgaaagtctggccccttgctgggcttgtgtagatttctttagaaataggataac

SEQ ID NO: 157412 - DNA, 72 bp, Homo sapiens
taaagctttgaaagtctggccccttgctgggcttgtgtagatttctttagaaataggataacttacagcaaa

SEQ ID NO: 157413 - DNA, 69 bp, Homo sapiens
aaagtctggccccttgctgggcttgtgtagatttctttagaaataggataacttacagcaaaaatttat

SEQ ID NO: 157414 - DNA, 73 bp, Homo sapiens
gggcttgtgtagatttctttagaaataggataacttacagcaaaaatttattaaatataagtagctcattgca

SEQ ID NO: 157415 - DNA, 76 bp, Homo sapiens
tctttagaaataggataacttacagcaaaaatttattaaatataagtagctcattgcagatattcatgatttggta

SEQ ID NO: 157416 - DNA, 77 bp, Homo sapiens
taggataacttacagcaaaaatttattaaatataagtagctcattgcagatattcatgatttggtagtacattgtaa

SEQ ID NO: 157417 - DNA, 78 bp, Homo sapiens
atttattaaatataagtagctcattgcagatattcatgatttggtagtacattgtaagaaataatagatttattctga

SEQ ID NO: 157418 - DNA, 84 bp, Homo sapiens
aatataagtagctcattgcagatattcatgatttggtagtacattgtaagaaataatagatttattctgagaatatgctgctgc

SEQ ID NO: 157419 - DNA, 83 bp, Homo sapiens
agctcattgcagatattcatgatttggtagtacattgtaagaaataatagatttattctgagaatatgctgctgcttttcacc

SEQ ID NO: 157420 - DNA, 81 bp, Homo sapiens
gcagatattcatgatttggtagtacattgtaagaaataatagatttattctgagaatatgctgctgcttttcacctggtac

SEQ ID NO: 157421 - DNA, 79 bp, Homo sapiens
gatttggtagtacattgtaagaaataatagatttattctgagaatatgctgctgcttttcacctggtactataatctgc

SEQ ID NO: 157422 - DNA, 80 bp, Homo sapiens
agtacattgtaagaaataatagatttattctgagaatatgctgctgcttttcacctggtactataatctgctcatataat

SEQ ID NO: 157423 - DNA, 79 bp, Homo sapiens
gatttattctgagaatatgctgctgcttttcacctggtactataatctgctcatataattagaaccttttgtgttaaca

SEQ ID NO: 157424 - DNA, 79 bp, Homo sapiens
gagaatatgctgctgcttttcacctggtactataatctgctcatataattagaaccttttgtgttaacatttcaatatc

SEQ ID NO: 157425 - DNA, 77 bp, Homo sapiens
ctgctgcttttcacctggtactataatctgctcatataattagaaccttttgtgttaacatttcaatatctgactaa

SEQ ID NO: 157426 - DNA, 73 bp, Homo sapiens
atctgctcatataattagaaccttttgtgttaacatttcaatatctgactaaaggagaaacaccttgggatag

SEQ ID NO: 157427 - DNA, 69 bp, Homo sapiens
ataattagaaccttttgtgttaacatttcaatatctgactaaaggagaaacaccttgggatagttaggc

SEQ ID NO: 157428 - DNA, 70 bp, Homo sapiens
aaccttttgtgttaacatttcaatatctgactaaaggagaaacaccttgggatagttaggctgttgaaga

SEQ ID NO: 157429 - DNA, 72 bp, Homo sapiens
taacatttcaatatctgactaaaggagaaacaccttgggatagttaggctgttgaagactaatgtaagcttt

SEQ ID NO: 157430 - DNA, 70 bp, Homo sapiens
taaaggagaaacaccttgggatagttaggctgttgaagactaatgtaagctttttcaggtgggcagtaac

SEQ ID NO: 157431 - DNA, 70 bp, Homo sapiens
acaccttgggatagttaggctgttgaagactaatgtaagctttttcaggtgggcagtaactgacctgttt

SEQ ID NO: 157432 - DNA, 65 bp, Homo sapiens
actaatgtaagctttttcaggtgggcagtaactgacctgttttactcaaagggaaacttaagttt

SEQ ID NO: 157433 - DNA, 69 bp, Homo sapiens
tttttcaggtgggcagtaactgacctgttttactcaaagggaaacttaagttttatagcaagagatatg

SEQ ID NO: 157434 - DNA, 71 bp, Homo sapiens
ggcagtaactgacctgttttactcaaagggaaacttaagttttatagcaagagatatggagagcttgtatt

SEQ ID NO: 157435 - DNA, 71 bp, Homo sapiens
ctgacctgttttactcaaagggaaacttaagttttatagcaagagatatggagagcttgtatttattaaga

SEQ ID NO: 157436 - DNA, 73 bp, Homo sapiens
tactcaaagggaaacttaagttttatagcaagagatatggagagcttgtatttattaagatttatgtggataa

SEQ ID NO: 157437 - DNA, 70 bp, Homo sapiens
aagggaaacttaagttttatagcaagagatatggagagcttgtatttattaagatttatgtggataaaat

SEQ ID NO: 157438 - DNA, 71 bp, Homo sapiens
gttttatagcaagagatatggagagcttgtatttattaagatttatgtggataaaatttagttcgtgtttt

SEQ ID NO: 157439 - DNA, 73 bp, Homo sapiens
gcaagagatatggagagcttgtatttattaagatttatgtggataaaatttagttcgtgttttttgaattgag

SEQ ID NO: 157440 - DNA, 71 bp, Homo sapiens
tggagagcttgtatttattaagatttatgtggataaaatttagttcgtgttttttgaattgagtctgtagg

SEQ ID NO: 157441 - DNA, 68 bp, Homo sapiens
ttattaagatttatgtggataaaatttagttcgtgttttttgaattgagtctgtagggtaaatttgaa

SEQ ID NO: 157442 - DNA, 67 bp, Homo sapiens
ttatgtggataaaatttagttcgtgttttttgaattgagtctgtagggtaaatttgaaggtctccct

SEQ ID NO: 157443 - DNA, 69 bp, Homo sapiens
ttagttcgtgttttttgaattgagtctgtagggtaaatttgaaggtctccctttctcctctgaattcta

SEQ ID NO: 157444 - DNA, 74 bp, Homo sapiens
tttttgaattgagtctgtagggtaaatttgaaggtctccctttctcctctgaattctagctatccagacatagc

SEQ ID NO: 157445 - DNA, 74 bp, Homo sapiens
tctgtagggtaaatttgaaggtctccctttctcctctgaattctagctatccagacatagccactgtaaggaat

SEQ ID NO: 157446 - DNA, 73 bp, Homo sapiens
aaggtctccctttctcctctgaattctagctatccagacatagccactgtaaggaatttttacagtgtgtctt

SEQ ID NO: 157447 - DNA, 73 bp, Homo sapiens
ctttctcctctgaattctagctatccagacatagccactgtaaggaatttttacagtgtgtctttcccagttt

SEQ ID NO: 157448 - DNA, 74 bp, Homo sapiens
aattctagctatccagacatagccactgtaaggaatttttacagtgtgtctttcccagttttgctcttgtagac

SEQ ID NO: 157449 - DNA, 72 bp, Homo sapiens
atagccactgtaaggaatttttacagtgtgtctttcccagttttgctcttgtagactcaaaaatgaagtgtg

SEQ ID NO: 157450 - DNA, 75 bp, Homo sapiens
ttacaggaatgcaccattgtagcacagctgtatttgaattttgttttacaaaaattggatcgtaggatatacact

SEQ ID NO: 157451 - DNA, 76 bp, Homo sapiens
gcaccattgtagcacagctgtatttgaattttgttttacaaaaattggatcgtaggatatacacttttctgcaaca

SEQ ID NO: 157452 - DNA, 75 bp, Homo sapiens
attgtagcacagctgtatttgaattttgttttacaaaaattggatcgtaggatatacacttttctgcaacatgct

SEQ ID NO: 157453 - DNA, 72 bp, Homo sapiens
agctgtatttgaattttgttttacaaaaattggatcgtaggatatacacttttctgcaacatgctttattaa

SEQ ID NO: 157454 - DNA, 72 bp, Homo sapiens
ttgttttacaaaaattggatcgtaggatatacacttttctgcaacatgctttattaaagaaattctcccata

SEQ ID NO: 157455 - DNA, 73 bp, Homo sapiens
acaaaaattggatcgtaggatatacacttttctgcaacatgctttattaaagaaattctcccatatttctata

SEQ ID NO: 157456 - DNA, 73 bp, Homo sapiens
tggatcgtaggatatacacttttctgcaacatgctttattaaagaaattctcccatatttctataaaacaaaa

SEQ ID NO: 157457 - DNA, 73 bp, Homo sapiens
gatatacacttttctgcaacatgctttattaaagaaattctcccatatttctataaaacaaaagtatgtataa

SEQ ID NO: 157458 - DNA, 73 bp, Homo sapiens
ttctgcaacatgctttattaaagaaattctcccatatttctataaaacaaaagtatgtataaatataattatc

SEQ ID NO: 157459 - DNA, 68 bp, Homo sapiens
atgctttattaaagaaattctcccatatttctataaaacaaaagtatgtataaatataattatctttt

SEQ ID NO: 157460 - DNA, 71 bp, Homo sapiens
aattctcccatatttctataaaacaaaagtatgtataaatataattatctttttagtagctgtataatcca

SEQ ID NO: 157461 - DNA, 72 bp, Homo sapiens
ctataaaacaaaagtatgtataaatataattatctttttagtagctgtataatccatgtagtaatcattttc

SEQ ID NO: 157462 - DNA, 74 bp, Homo sapiens
atgtataaatataattatctttttagtagctgtataatccatgtagtaatcattttcttaactattaatgaaca

SEQ ID NO: 157463 - DNA, 73 bp, Homo sapiens
ataattatctttttagtagctgtataatccatgtagtaatcattttcttaactattaatgaacactttgactg

SEQ ID NO: 157464 - DNA, 73 bp, Homo sapiens
tttttagtagctgtataatccatgtagtaatcattttcttaactattaatgaacactttgactgtttccacag

SEQ ID NO: 157465 - DNA, 75 bp, Homo sapiens
gtagctgtataatccatgtagtaatcattttcttaactattaatgaacactttgactgtttccacagtacactgt

SEQ ID NO: 157466 - DNA, 76 bp, Homo sapiens
ccatgtagtaatcattttcttaactattaatgaacactttgactgtttccacagtacactgtttcagtaatgctgc

SEQ ID NO: 157467 - DNA, 76 bp, Homo sapiens
ctgctatgaacatttttatacacatatctttctatacttgggtatttccataaaatagattcctatgagtgcaatt

SEQ ID NO: 157468 - DNA, 76 bp, Homo sapiens
gaacatttttatacacatatctttctatacttgggtatttccataaaatagattcctatgagtgcaatttgagtca

SEQ ID NO: 157469 - DNA, 76 bp, Homo sapiens
cacatatctttctatacttgggtatttccataaaatagattcctatgagtgcaatttgagtcaaaggctgtacttg

SEQ ID NO: 157470 - DNA, 74 bp, Homo sapiens
ctttctatacttgggtatttccataaaatagattcctatgagtgcaatttgagtcaaaggctgtacttgttgaa

SEQ ID NO: 157471 - DNA, 75 bp, Homo sapiens
gggtatttccataaaatagattcctatgagtgcaatttgagtcaaaggctgtacttgttgaaaatattgatagac

SEQ ID NO: 157472 - DNA, 75 bp, Homo sapiens
ccataaaatagattcctatgagtgcaatttgagtcaaaggctgtacttgttgaaaatattgatagactaccaagt

SEQ ID NO: 157473 - DNA, 77 bp, Homo sapiens
tagattcctatgagtgcaatttgagtcaaaggctgtacttgttgaaaatattgatagactaccaagttattattcaa

SEQ ID NO: 157474 - DNA, 73 bp, Homo sapiens
gagtgcaatttgagtcaaaggctgtacttgttgaaaatattgatagactaccaagttattattcaaaaggtag

SEQ ID NO: 157475 - DNA, 70 bp, Homo sapiens
ttgagtcaaaggctgtacttgttgaaaatattgatagactaccaagttattattcaaaaggtagggggcc

SEQ ID NO: 157476 - DNA, 74 bp, Homo sapiens
ttgatagactaccaagttattattcaaaaggtagggggccctccagtttatgctgccactgttgtgactatgac

SEQ ID NO: 157477 - DNA, 70 bp, Homo sapiens
gttattattcaaaaggtagggggccctccagtttatgctgccactgttgtgactatgaccctttacctaa

SEQ ID NO: 157478 - DNA, 72 bp, Homo sapiens
aaaaggtagggggccctccagtttatgctgccactgttgtgactatgaccctttacctaacactgcatatta

SEQ ID NO: 157479 - DNA, 74 bp, Homo sapiens
gggccctccagtttatgctgccactgttgtgactatgaccctttacctaacactgcatattatgaattaaactt

SEQ ID NO: 157480 - DNA, 73 bp, Homo sapiens
ccactgttgtgactatgaccctttacctaacactgcatattatgaattaaacttttcagtctgacaggtaaaa

SEQ ID NO: 157481 - DNA, 72 bp, Homo sapiens
gttgtgactatgaccctttacctaacactgcatattatgaattaaacttttcagtctgacaggtaaaaagta

SEQ ID NO: 157482 - DNA, 73 bp, Homo sapiens
tgaccctttacctaacactgcatattatgaattaaacttttcagtctgacaggtaaaaagtaatgtgtcattg

SEQ ID NO: 157483 - DNA, 71 bp, Homo sapiens
cctaacactgcatattatgaattaaacttttcagtctgacaggtaaaaagtaatgtgtcattggttttaaa

SEQ ID NO: 157484 - DNA, 68 bp, Homo sapiens
tatgaattaaacttttcagtctgacaggtaaaaagtaatgtgtcattggttttaaaatttgtaattcc

SEQ ID NO: 157485 - DNA, 68 bp, Homo sapiens
acttttcagtctgacaggtaaaaagtaatgtgtcattggttttaaaatttgtaattccttattcattg

SEQ ID NO: 157486 - DNA, 74 bp, Homo sapiens
tctgacaggtaaaaagtaatgtgtcattggttttaaaatttgtaattccttattcattgttgagaatgagcatc

SEQ ID NO: 157487 - DNA, 70 bp, Homo sapiens
aggtaaaaagtaatgtgtcattggttttaaaatttgtaattccttattcattgttgagaatgagcatcct

SEQ ID NO: 157488 - DNA, 70 bp, Homo sapiens
aatgtgtcattggttttaaaatttgtaattccttattcattgttgagaatgagcatccttttcttttctt

SEQ ID NO: 157489 - DNA, 81 bp, Homo sapiens
agattacagacacgagccactgcacttagcagggcatctttcatgaatgtttcttgccatctttattttctttctatgtga

SEQ ID NO: 157490 - DNA, 80 bp, Homo sapiens
cacgagccactgcacttagcagggcatctttcatgaatgtttcttgccatctttattttctttctatgtgaagtgcctgt

SEQ ID NO: 157491 - DNA, 78 bp, Homo sapiens
gccactgcacttagcagggcatctttcatgaatgtttcttgccatctttattttctttctatgtgaagtgcctgtttt

SEQ ID NO: 157492 - DNA, 77 bp, Homo sapiens
actgcacttagcagggcatctttcatgaatgtttcttgccatctttattttctttctatgtgaagtgcctgtttttc

SEQ ID NO: 157493 - DNA, 78 bp, Homo sapiens
ttagcagggcatctttcatgaatgtttcttgccatctttattttctttctatgtgaagtgcctgtttttctgtcaaga

SEQ ID NO: 157494 - DNA, 75 bp, Homo sapiens
agggcatctttcatgaatgtttcttgccatctttattttctttctatgtgaagtgcctgtttttctgtcaagaaa

SEQ ID NO: 157495 - DNA, 73 bp, Homo sapiens
ctttcatgaatgtttcttgccatctttattttctttctatgtgaagtgcctgtttttctgtcaagaaatttgt

SEQ ID NO: 157496 - DNA, 74 bp, Homo sapiens
tcatgaatgtttcttgccatctttattttctttctatgtgaagtgcctgtttttctgtcaagaaatttgtttta

SEQ ID NO: 157497 - DNA, 73 bp, Homo sapiens
ttcttgccatctttattttctttctatgtgaagtgcctgtttttctgtcaagaaatttgttttattctcgtca

SEQ ID NO: 157498 - DNA, 72 bp, Homo sapiens
cttgccatctttattttctttctatgtgaagtgcctgtttttctgtcaagaaatttgttttattctcgtcaa

SEQ ID NO: 157499 - DNA, 70 bp, Homo sapiens
ttttctttctatgtgaagtgcctgtttttctgtcaagaaatttgttttattctcgtcaatttttatggaa

SEQ ID NO: 157500 - DNA, 69 bp, Homo sapiens
ctatgtgaagtgcctgtttttctgtcaagaaatttgttttattctcgtcaatttttatggaaaatcctt

SEQ ID NO: 157501 - DNA, 66 bp, Homo sapiens
aagtgcctgtttttctgtcaagaaatttgttttattctcgtcaatttttatggaaaatccttttta

SEQ ID NO: 157502 - DNA, 65 bp, Homo sapiens
ttttctgtcaagaaatttgttttattctcgtcaatttttatggaaaatcctttttaaataaacat

SEQ ID NO: 157503 - DNA, 65 bp, Homo sapiens
tttgttttattctcgtcaatttttatggaaaatcctttttaaataaacattttgatgttttactg

SEQ ID NO: 157504 - DNA, 66 bp, Homo sapiens
tttattctcgtcaatttttatggaaaatcctttttaaataaacattttgatgttttactgtgttta

SEQ ID NO: 157505 - DNA, 64 bp, Homo sapiens
ttttatggaaaatcctttttaaataaacattttgatgttttactgtgtttataaatagtttttc

SEQ ID NO: 157506 - DNA, 66 bp, Homo sapiens
aatcctttttaaataaacattttgatgttttactgtgtttataaatagtttttcctactcagtcat

SEQ ID NO: 157507 - DNA, 69 bp, Homo sapiens
aaataaacattttgatgttttactgtgtttataaatagtttttcctactcagtcattttggtcttctga

SEQ ID NO: 157508 - DNA, 70 bp, Homo sapiens
cattttgatgttttactgtgtttataaatagtttttcctactcagtcattttggtcttctgattttatgg

SEQ ID NO: 157509 - DNA, 70 bp, Homo sapiens
ttactgtgtttataaatagtttttcctactcagtcattttggtcttctgattttatggtatttttgctat

SEQ ID NO: 157510 - DNA, 70 bp, Homo sapiens
gtttataaatagtttttcctactcagtcattttggtcttctgattttatggtatttttgctattaaatga

SEQ ID NO: 157511 - DNA, 70 bp, Homo sapiens
tagtttttcctactcagtcattttggtcttctgattttatggtatttttgctattaaatgaatatttctt

SEQ ID NO: 157512 - DNA, 65 bp, Homo sapiens
ccacgcctggcctaaatgaatatttcttaatactttgttttcttatttttaggggacttgaaatt

SEQ ID NO: 157513 - DNA, 65 bp, Homo sapiens
tggcctaaatgaatatttcttaatactttgttttcttatttttaggggacttgaaatttaactaa

SEQ ID NO: 157514 - DNA, 66 bp, Homo sapiens
tttcttaatactttgttttcttatttttaggggacttgaaatttaactaaaaagactgagtgagca

SEQ ID NO: 157515 - DNA, 64 bp, Homo sapiens
ctttgttttcttatttttaggggacttgaaatttaactaaaaagactgagtgagcacttatttt

SEQ ID NO: 157516 - DNA, 64 bp, Homo sapiens
tcttatttttaggggacttgaaatttaactaaaaagactgagtgagcacttattttttaaaacc

SEQ ID NO: 157517 - DNA, 65 bp, Homo sapiens
gggacttgaaatttaactaaaaagactgagtgagcacttattttttaaaacccaaaatatcttag

SEQ ID NO: 157518 - DNA, 67 bp, Homo sapiens
atttaactaaaaagactgagtgagcacttattttttaaaacccaaaatatcttagtgtattagtctg

SEQ ID NO: 157519 - DNA, 75 bp, Homo sapiens
aaccatatcacttgagttacagcggatagcttggaccccattccttttacatctagtaggtagcagtttatcaga

SEQ ID NO: 157520 - DNA, 76 bp, Homo sapiens
tatcacttgagttacagcggatagcttggaccccattccttttacatctagtaggtagcagtttatcagagcttgg

SEQ ID NO: 157521 - DNA, 71 bp, Homo sapiens
agcggatagcttggaccccattccttttacatctagtaggtagcagtttatcagagcttgggcggtctttt

SEQ ID NO: 157522 - DNA, 70 bp, Homo sapiens
cggatagcttggaccccattccttttacatctagtaggtagcagtttatcagagcttgggcggtcttttt

SEQ ID NO: 157523 - DNA, 69 bp, Homo sapiens
atagcttggaccccattccttttacatctagtaggtagcagtttatcagagcttgggcggtcttttttt

SEQ ID NO: 157524 - DNA, 68 bp, Homo sapiens
ttggaccccattccttttacatctagtaggtagcagtttatcagagcttgggcggtcttttttttcct

SEQ ID NO: 157525 - DNA, 68 bp, Homo sapiens
ttccttttacatctagtaggtagcagtttatcagagcttgggcggtcttttttttccttaaatgaggt

SEQ ID NO: 157526 - DNA, 69 bp, Homo sapiens
ttttacatctagtaggtagcagtttatcagagcttgggcggtcttttttttccttaaatgaggttcaaa

SEQ ID NO: 157527 - DNA, 69 bp, Homo sapiens
tctagtaggtagcagtttatcagagcttgggcggtcttttttttccttaaatgaggttcaaatttatta

SEQ ID NO: 157528 - DNA, 67 bp, Homo sapiens
ggtagcagtttatcagagcttgggcggtcttttttttccttaaatgaggttcaaatttattaaactc

SEQ ID NO: 157529 - DNA, 70 bp, Homo sapiens
gcagtttatcagagcttgggcggtcttttttttccttaaatgaggttcaaatttattaaactctctgtga

SEQ ID NO: 157530 - DNA, 70 bp, Homo sapiens
ttatcagagcttgggcggtcttttttttccttaaatgaggttcaaatttattaaactctctgtgactgga

SEQ ID NO: 157531 - DNA, 69 bp, Homo sapiens
agagcttgggcggtcttttttttccttaaatgaggttcaaatttattaaactctctgtgactggactgc

SEQ ID NO: 157532 - DNA, 69 bp, Homo sapiens
ggtcttttttttccttaaatgaggttcaaatttattaaactctctgtgactggactgcgtggtatcgaa

SEQ ID NO: 157533 - DNA, 70 bp, Homo sapiens
tttttccttaaatgaggttcaaatttattaaactctctgtgactggactgcgtggtatcgaaagaagcct

SEQ ID NO: 157534 - DNA, 75 bp, Homo sapiens
tattaaactctctgtgactggactgcgtggtatcgaaagaagccttggatgtaggtttgttaatgagatctttaa

SEQ ID NO: 157535 - DNA, 74 bp, Homo sapiens
aactctctgtgactggactgcgtggtatcgaaagaagccttggatgtaggtttgttaatgagatctttaaatgt

SEQ ID NO: 157536 - DNA, 74 bp, Homo sapiens
tggactgcgtggtatcgaaagaagccttggatgtaggtttgttaatgagatctttaaatgttgactagtttaga

SEQ ID NO: 157537 - DNA, 71 bp, Homo sapiens
cgtggtatcgaaagaagccttggatgtaggtttgttaatgagatctttaaatgttgactagtttagatgtt

SEQ ID NO: 157538 - DNA, 70 bp, Homo sapiens
tggatgtaggtttgttaatgagatctttaaatgttgactagtttagatgttttaagttcctaatttttca

SEQ ID NO: 157539 - DNA, 69 bp, Homo sapiens
agatctttaaatgttgactagtttagatgttttaagttcctaatttttcatatgactacaaaaatacta

SEQ ID NO: 157540 - DNA, 67 bp, Homo sapiens
atgttgactagtttagatgttttaagttcctaatttttcatatgactacaaaaatactaaaataatt

SEQ ID NO: 157541 - DNA, 68 bp, Homo sapiens
ttagatgttttaagttcctaatttttcatatgactacaaaaatactaaaataattttacttcagtgac

SEQ ID NO: 157542 - DNA, 71 bp, Homo sapiens
gttcctaatttttcatatgactacaaaaatactaaaataattttacttcagtgactttgagaagattctca

SEQ ID NO: 157543 - DNA, 71 bp, Homo sapiens
tttttcatatgactacaaaaatactaaaataattttacttcagtgactttgagaagattctcaaaatgaac

SEQ ID NO: 157544 - DNA, 70 bp, Homo sapiens
atgactacaaaaatactaaaataattttacttcagtgactttgagaagattctcaaaatgaactataggg

SEQ ID NO: 157545 - DNA, 67 bp, Homo sapiens
aatactaaaataattttacttcagtgactttgagaagattctcaaaatgaactataggggtgttttt

SEQ ID NO: 157546 - DNA, 67 bp, Homo sapiens
attttacttcagtgactttgagaagattctcaaaatgaactataggggtgtttttttctgttttggg

SEQ ID NO: 157547 - DNA, 70 bp, Homo sapiens
cagtgactttgagaagattctcaaaatgaactataggggtgtttttttctgttttggggataaatgaaca

SEQ ID NO: 157548 - DNA, 69 bp, Homo sapiens
tttgagaagattctcaaaatgaactataggggtgtttttttctgttttggggataaatgaacataaaca

SEQ ID NO: 157549 - DNA, 62 bp, Homo sapiens
ataggggtgtttttttctgttttggggataaatgaacataaacaaaactccccgaaaaccag

SEQ ID NO: 157550 - DNA, 64 bp, Homo sapiens
ttttttctgttttggggataaatgaacataaacaaaactccccgaaaaccagtgcgtgaacttt

SEQ ID NO: 157551 - DNA, 64 bp, Homo sapiens
ctgttttggggataaatgaacataaacaaaactccccgaaaaccagtgcgtgaacttttaaaag

SEQ ID NO: 157552 - DNA, 65 bp, Homo sapiens
aatgaacataaacaaaactccccgaaaaccagtgcgtgaacttttaaaagttcaaaaataagcca

SEQ ID NO: 157553 - DNA, 67 bp, Homo sapiens
cccgaaaaccagtgcgtgaacttttaaaagttcaaaaataagccatgagctttgtagaaattagcct

SEQ ID NO: 157554 - DNA, 71 bp, Homo sapiens
ccagtgcgtgaacttttaaaagttcaaaaataagccatgagctttgtagaaattagccttactgatagttg

SEQ ID NO: 157555 - DNA, 72 bp, Homo sapiens
gttcaaaaataagccatgagctttgtagaaattagccttactgatagttgtaaatagttaaggttgtctgat

SEQ ID NO: 157556 - DNA, 71 bp, Homo sapiens
agccatgagctttgtagaaattagccttactgatagttgtaaatagttaaggttgtctgattacttaaaac

SEQ ID NO: 157557 - DNA, 71 bp, Homo sapiens
gagctttgtagaaattagccttactgatagttgtaaatagttaaggttgtctgattacttaaaacttctca

SEQ ID NO: 157558 - DNA, 68 bp, Homo sapiens
agaaattagccttactgatagttgtaaatagttaaggttgtctgattacttaaaacttctcattaact

SEQ ID NO: 157559 - DNA, 67 bp, Homo sapiens
cttactgatagttgtaaatagttaaggttgtctgattacttaaaacttctcattaactttttatttg

SEQ ID NO: 157560 - DNA, 69 bp, Homo sapiens
gttgtaaatagttaaggttgtctgattacttaaaacttctcattaactttttatttgttgtgatgtata

SEQ ID NO: 157561 - DNA, 70 bp, Homo sapiens
aaggttgtctgattacttaaaacttctcattaactttttatttgttgtgatgtatatttatgaaatggct

SEQ ID NO: 157562 - DNA, 69 bp, Homo sapiens
tctgattacttaaaacttctcattaactttttatttgttgtgatgtatatttatgaaatggcttttttt

SEQ ID NO: 157563 - DNA, 68 bp, Homo sapiens
taaaacttctcattaactttttatttgttgtgatgtatatttatgaaatggctttttttttcagttta

SEQ ID NO: 157564 - DNA, 70 bp, Homo sapiens
actttttatttgttgtgatgtatatttatgaaatggctttttttttcagtttatttccacaaacatcaca

SEQ ID NO: 157565 - DNA, 72 bp, Homo sapiens
tatttgttgtgatgtatatttatgaaatggctttttttttcagtttatttccacaaacatcacagtaaagaa

SEQ ID NO: 157566 - DNA, 71 bp, Homo sapiens
gatgtatatttatgaaatggctttttttttcagtttatttccacaaacatcacagtaaagaaaataattga

SEQ ID NO: 157567 - DNA, 67 bp, Homo sapiens
aatggctttttttttcagtttatttccacaaacatcacagtaaagaaaataattgaagattgaaaaa

SEQ ID NO: 157568 - DNA, 69 bp, Homo sapiens
tttcagtttatttccacaaacatcacagtaaagaaaataattgaagattgaaaaaagtataatatttaa

SEQ ID NO: 157569 - DNA, 67 bp, Homo sapiens
ttatttccacaaacatcacagtaaagaaaataattgaagattgaaaaaagtataatatttaaaaaaa

SEQ ID NO: 157570 - DNA, 74 bp, Homo sapiens
tttttttttcaatgtatcttagagaatcttctatgagatttgggggaggagtataggatgtctaggaaatggca

SEQ ID NO: 157571 - DNA, 76 bp, Homo sapiens
ttttcaatgtatcttagagaatcttctatgagatttgggggaggagtataggatgtctaggaaatggcattttcag

SEQ ID NO: 157572 - DNA, 75 bp, Homo sapiens
tagagaatcttctatgagatttgggggaggagtataggatgtctaggaaatggcattttcaggggagttaatcta

SEQ ID NO: 157573 - DNA, 73 bp, Homo sapiens
aatcttctatgagatttgggggaggagtataggatgtctaggaaatggcattttcaggggagttaatctatta

SEQ ID NO: 157574 - DNA, 73 bp, Homo sapiens
ttctatgagatttgggggaggagtataggatgtctaggaaatggcattttcaggggagttaatctattagaaa

SEQ ID NO: 157575 - DNA, 71 bp, Homo sapiens
agatttgggggaggagtataggatgtctaggaaatggcattttcaggggagttaatctattagaaaagtca

SEQ ID NO: 157576 - DNA, 71 bp, Homo sapiens
atttgggggaggagtataggatgtctaggaaatggcattttcaggggagttaatctattagaaaagtcata

SEQ ID NO: 157577 - DNA, 71 bp, Homo sapiens
gggaggagtataggatgtctaggaaatggcattttcaggggagttaatctattagaaaagtcataattaaa

SEQ ID NO: 157578 - DNA, 71 bp, Homo sapiens
gaggagtataggatgtctaggaaatggcattttcaggggagttaatctattagaaaagtcataattaaaac

SEQ ID NO: 157579 - DNA, 72 bp, Homo sapiens
gtataggatgtctaggaaatggcattttcaggggagttaatctattagaaaagtcataattaaaactctgag

SEQ ID NO: 157580 - DNA, 71 bp, Homo sapiens
ggatgtctaggaaatggcattttcaggggagttaatctattagaaaagtcataattaaaactctgagttag

SEQ ID NO: 157581 - DNA, 71 bp, Homo sapiens
gaaatggcattttcaggggagttaatctattagaaaagtcataattaaaactctgagttagtagaaatcaa

SEQ ID NO: 157582 - DNA, 70 bp, Homo sapiens
ggcattttcaggggagttaatctattagaaaagtcataattaaaactctgagttagtagaaatcaaatat

SEQ ID NO: 157583 - DNA, 70 bp, Homo sapiens
gggagttaatctattagaaaagtcataattaaaactctgagttagtagaaatcaaatattgtttaatata

SEQ ID NO: 157584 - DNA, 72 bp, Homo sapiens
tagaaaagtcataattaaaactctgagttagtagaaatcaaatattgtttaatataattcgtcaactgaatc

SEQ ID NO: 157585 - DNA, 73 bp, Homo sapiens
cataattaaaactctgagttagtagaaatcaaatattgtttaatataattcgtcaactgaatctgcgttaaga

SEQ ID NO: 157586 - DNA, 73 bp, Homo sapiens
agttagtagaaatcaaatattgtttaatataattcgtcaactgaatctgcgttaagacattcaataattgtat

SEQ ID NO: 157587 - DNA, 74 bp, Homo sapiens
caaatattgtttaatataattcgtcaactgaatctgcgttaagacattcaataattgtattattgttttgccag

SEQ ID NO: 157588 - DNA, 77 bp, Homo sapiens
ctgaatctgcgttaagacattcaataattgtattattgttttgccagtttagttatttgattgatgcaaacctgtca

SEQ ID NO: 157589 - DNA, 76 bp, Homo sapiens
gttaagacattcaataattgtattattgttttgccagtttagttatttgattgatgcaaacctgtcatctgtacaa

SEQ ID NO: 157590 - DNA, 73 bp, Homo sapiens
caataattgtattattgttttgccagtttagttatttgattgatgcaaacctgtcatctgtacaataaaaaaa

SEQ ID NO: 157591 - DNA, 75 bp, Homo sapiens
ttgttttgccagtttagttatttgattgatgcaaacctgtcatctgtacaataaaaaaatagtgaggtatgtcta

SEQ ID NO: 157592 - DNA, 78 bp, Homo sapiens
gccagtttagttatttgattgatgcaaacctgtcatctgtacaataaaaaaatagtgaggtatgtctatactctgtca

SEQ ID NO: 157593 - DNA, 76 bp, Homo sapiens
gttatttgattgatgcaaacctgtcatctgtacaataaaaaaatagtgaggtatgtctatactctgtcagtttgtt

SEQ ID NO: 157594 - DNA, 75 bp, Homo sapiens
ttgatgcaaacctgtcatctgtacaataaaaaaatagtgaggtatgtctatactctgtcagtttgtttaatttta

SEQ ID NO: 157595 - DNA, 73 bp, Homo sapiens
cctgtcatctgtacaataaaaaaatagtgaggtatgtctatactctgtcagtttgtttaattttaaagctgaa

SEQ ID NO: 157596 - DNA, 69 bp, Homo sapiens
gtacaataaaaaaatagtgaggtatgtctatactctgtcagtttgtttaattttaaagctgaaagttaa

SEQ ID NO: 157597 - DNA, 69 bp, Homo sapiens
tagtgaggtatgtctatactctgtcagtttgtttaattttaaagctgaaagttaaattttagaacgctt

SEQ ID NO: 157598 - DNA, 70 bp, Homo sapiens
tatgtctatactctgtcagtttgtttaattttaaagctgaaagttaaattttagaacgcttttcatttgc

SEQ ID NO: 157599 - DNA, 66 bp, Homo sapiens
tactctgtcagtttgtttaattttaaagctgaaagttaaattttagaacgcttttcatttgctttt

SEQ ID NO: 157600 - DNA, 63 bp, Homo sapiens
tttaattttaaagctgaaagttaaattttagaacgcttttcatttgcttttttaccgtaagtg

SEQ ID NO: 157601 - DNA, 66 bp, Homo sapiens
taaagctgaaagttaaattttagaacgcttttcatttgcttttttaccgtaagtgggagcagcttt

SEQ ID NO: 157602 - DNA, 66 bp, Homo sapiens
gttaaattttagaacgcttttcatttgcttttttaccgtaagtgggagcagcttttaacttcacga

SEQ ID NO: 157603 - DNA, 66 bp, Homo sapiens
ttttagaacgcttttcatttgcttttttaccgtaagtgggagcagcttttaacttcacgaaaacca

SEQ ID NO: 157604 - DNA, 67 bp, Homo sapiens
tttttaccgtaagtgggagcagcttttaacttcacgaaaaccactctcctcaaagtcattaaagact

SEQ ID NO: 157605 - DNA, 76 bp, Homo sapiens
taagtgggagcagcttttaacttcacgaaaaccactctcctcaaagtcattaaagactttcatgctgacacatcca

SEQ ID NO: 157606 - DNA, 73 bp, Homo sapiens
cttttaacttcacgaaaaccactctcctcaaagtcattaaagactttcatgctgacacatccagtcgtttatc

SEQ ID NO: 157607 - DNA, 78 bp, Homo sapiens
aacttcacgaaaaccactctcctcaaagtcattaaagactttcatgctgacacatccagtcgtttatcttctgatgca

SEQ ID NO: 157608 - DNA, 84 bp, Homo sapiens
aaaccactctcctcaaagtcattaaagactttcatgctgacacatccagtcgtttatcttctgatgcagcagcagttgatcaca

SEQ ID NO: 157609 - DNA, 85 bp, Homo sapiens
aagtcattaaagactttcatgctgacacatccagtcgtttatcttctgatgcagcagcagttgatcacatcttccatcaaattct

SEQ ID NO: 157610 - DNA, 84 bp, Homo sapiens
attaaagactttcatgctgacacatccagtcgtttatcttctgatgcagcagcagttgatcacatcttccatcaaattcttcct

SEQ ID NO: 157611 - DNA, 88 bp, Homo sapiens
ttcatgctgacacatccagtcgtttatcttctgatgcagcagcagttgatcacatcttccatcaaattcttccttcacttggtcttca

SEQ ID NO: 157612 - DNA, 84 bp, Homo sapiens
tttatcttctgatgcagcagcagttgatcacatcttccatcaaattcttccttcacttggtcttcaggactggcctgttgccca

SEQ ID NO: 157613 - DNA, 82 bp, Homo sapiens
atgcagcagcagttgatcacatcttccatcaaattcttccttcacttggtcttcaggactggcctgttgcccagacctcagg

SEQ ID NO: 157614 - DNA, 78 bp, Homo sapiens
agttgatcacatcttccatcaaattcttccttcacttggtcttcaggactggcctgttgcccagacctcagggtctga

SEQ ID NO: 157615 - DNA, 76 bp, Homo sapiens
atcttccatcaaattcttccttcacttggtcttcaggactggcctgttgcccagacctcagggtctgatcccaata

SEQ ID NO: 157616 - DNA, 74 bp, Homo sapiens
attcttccttcacttggtcttcaggactggcctgttgcccagacctcagggtctgatcccaatacacactcttt

SEQ ID NO: 157617 - DNA, 75 bp, Homo sapiens
tcttcaggactggcctgttgcccagacctcagggtctgatcccaatacacactcttttctccacttattccctag

SEQ ID NO: 157618 - DNA, 71 bp, Homo sapiens
ccagacctcagggtctgatcccaatacacactcttttctccacttattccctaggtgaaatatttcatttt

SEQ ID NO: 157619 - DNA, 69 bp, Homo sapiens
agggtctgatcccaatacacactcttttctccacttattccctaggtgaaatatttcatttttgtggtt

SEQ ID NO: 157620 - DNA, 69 bp, Homo sapiens
atcccaatacacactcttttctccacttattccctaggtgaaatatttcatttttgtggttttaagtgc

SEQ ID NO: 157621 - DNA, 70 bp, Homo sapiens
cactcttttctccacttattccctaggtgaaatatttcatttttgtggttttaagtgctaatatattcca

SEQ ID NO: 157622 - DNA, 69 bp, Homo sapiens
aggtgaaatatttcatttttgtggttttaagtgctaatatattccaaatttacatctctaagtttggcc

SEQ ID NO: 157623 - DNA, 71 bp, Homo sapiens
tttgtggttttaagtgctaatatattccaaatttacatctctaagtttggcccttgttctgaacttcagcc

SEQ ID NO: 157624 - DNA, 74 bp, Homo sapiens
tttaagtgctaatatattccaaatttacatctctaagtttggcccttgttctgaacttcagccccatatagcca

SEQ ID NO: 157625 - DNA, 76 bp, Homo sapiens
tattccaaatttacatctctaagtttggcccttgttctgaacttcagccccatatagccagtccctcatatctcta

SEQ ID NO: 157626 - DNA, 81 bp, Homo sapiens
cttgttctgaacttcagccccatatagccagtccctcatatctctatttaggtgcactctaggcatctcaaagtgagcctg

SEQ ID NO: 157627 - DNA, 79 bp, Homo sapiens
atatagccagtccctcatatctctatttaggtgcactctaggcatctcaaagtgagcctgtccaaaactaaactctgat

SEQ ID NO: 157628 - DNA, 77 bp, Homo sapiens
agtccctcatatctctatttaggtgcactctaggcatctcaaagtgagcctgtccaaaactaaactctgatttccca

SEQ ID NO: 157629 - DNA, 78 bp, Homo sapiens
atatctctatttaggtgcactctaggcatctcaaagtgagcctgtccaaaactaaactctgatttcccaccactgcac

SEQ ID NO: 157630 - DNA, 80 bp, Homo sapiens
tttaggtgcactctaggcatctcaaagtgagcctgtccaaaactaaactctgatttcccaccactgcactctcatcggca

SEQ ID NO: 157631 - DNA, 82 bp, Homo sapiens
tctaggcatctcaaagtgagcctgtccaaaactaaactctgatttcccaccactgcactctcatcggcaccgcactctcatc

SEQ ID NO: 157632 - DNA, 81 bp, Homo sapiens
tgtccaaaactaaactctgatttcccaccactgcactctcatcggcaccgcactctcatctgcttcttcttcagccctctc

SEQ ID NO: 157633 - DNA, 84 bp, Homo sapiens
tgcactctcatcggcaccgcactctcatctgcttcttcttcagccctctcctaagtcttagtgaacagcagctcactttaccaa

SEQ ID NO: 157634 - DNA, 81 bp, Homo sapiens
actctcatctgcttcttcttcagccctctcctaagtcttagtgaacagcagctcactttaccaattgctaatgtccacagc

SEQ ID NO: 157635 - DNA, 79 bp, Homo sapiens
cttcttcttcagccctctcctaagtcttagtgaacagcagctcactttaccaattgctaatgtccacagcctggcattc

SEQ ID NO: 157636 - DNA, 80 bp, Homo sapiens
ttcagccctctcctaagtcttagtgaacagcagctcactttaccaattgctaatgtccacagcctggcattcttctggat

SEQ ID NO: 157637 - DNA, 78 bp, Homo sapiens
tcctaagtcttagtgaacagcagctcactttaccaattgctaatgtccacagcctggcattcttctggattcctttct

SEQ ID NO: 157638 - DNA, 80 bp, Homo sapiens
cttagtgaacagcagctcactttaccaattgctaatgtccacagcctggcattcttctggattcctttcttcctctcaga

SEQ ID NO: 157639 - DNA, 81 bp, Homo sapiens
ctcactttaccaattgctaatgtccacagcctggcattcttctggattcctttcttcctctcagaccatgatcatatctaa

SEQ ID NO: 157640 - DNA, 81 bp, Homo sapiens
tttaccaattgctaatgtccacagcctggcattcttctggattcctttcttcctctcagaccatgatcatatctaatctta

SEQ ID NO: 157641 - DNA, 86 bp, Homo sapiens
ctaatgtccacagcctggcattcttctggattcctttcttcctctcagaccatgatcatatctaatcttagcagcagattctgtca

SEQ ID NO: 157642 - DNA, 85 bp, Homo sapiens
ctggcattcttctggattcctttcttcctctcagaccatgatcatatctaatcttagcagcagattctgtcagctctactttcaa

SEQ ID NO: 157643 - DNA, 82 bp, Homo sapiens
attcttctggattcctttcttcctctcagaccatgatcatatctaatcttagcagcagattctgtcagctctactttcaaaa

SEQ ID NO: 157644 - DNA, 80 bp, Homo sapiens
attcctttcttcctctcagaccatgatcatatctaatcttagcagcagattctgtcagctctactttcaaaatattttta

SEQ ID NO: 157645 - DNA, 81 bp, Homo sapiens
tcctctcagaccatgatcatatctaatcttagcagcagattctgtcagctctactttcaaaatatttttataatttaacca

SEQ ID NO: 157646 - DNA, 77 bp, Homo sapiens
gatcatatctaatcttagcagcagattctgtcagctctactttcaaaatatttttataatttaaccacttttcacca

SEQ ID NO: 157647 - DNA, 70 bp, Homo sapiens
ttcaaaatatttttataatttaaccacttttcaccatctttgcttcttactactgaattaatccaggcta

SEQ ID NO: 157648 - DNA, 72 bp, Homo sapiens
ttttataatttaaccacttttcaccatctttgcttcttactactgaattaatccaggctaacttcatatctc

SEQ ID NO: 157649 - DNA, 72 bp, Homo sapiens
taatttaaccacttttcaccatctttgcttcttactactgaattaatccaggctaacttcatatctcccacc

SEQ ID NO: 157650 - DNA, 74 bp, Homo sapiens
ttcaccatctttgcttcttactactgaattaatccaggctaacttcatatctcccacctgggttgttccagtaa

SEQ ID NO: 157651 - DNA, 72 bp, Homo sapiens
tttgcttcttactactgaattaatccaggctaacttcatatctcccacctgggttgttccagtaacctctta

SEQ ID NO: 157652 - DNA, 71 bp, Homo sapiens
tactgaattaatccaggctaacttcatatctcccacctgggttgttccagtaacctcttacttagtcttaa

SEQ ID NO: 157653 - DNA, 67 bp, Homo sapiens
ctaacttcatatctcccacctgggttgttccagtaacctcttacttagtcttaatttatttcccttg

SEQ ID NO: 157654 - DNA, 67 bp, Homo sapiens
atatctcccacctgggttgttccagtaacctcttacttagtcttaatttatttcccttgtctgcctt

SEQ ID NO: 157655 - DNA, 67 bp, Homo sapiens
tgggttgttccagtaacctcttacttagtcttaatttatttcccttgtctgcctttgcccccttaca

SEQ ID NO: 157656 - DNA, 68 bp, Homo sapiens
taacctcttacttagtcttaatttatttcccttgtctgcctttgcccccttacagtctgtttcctaca

SEQ ID NO: 157657 - DNA, 71 bp, Homo sapiens
tcttacttagtcttaatttatttcccttgtctgcctttgcccccttacagtctgtttcctacacagacata

SEQ ID NO: 157658 - DNA, 70 bp, Homo sapiens
ttaatttatttcccttgtctgcctttgcccccttacagtctgtttcctacacagacatacacttctaaac

SEQ ID NO: 157659 - DNA, 70 bp, Homo sapiens
cttgtctgcctttgcccccttacagtctgtttcctacacagacatacacttctaaaccttaagttaaata

SEQ ID NO: 157660 - DNA, 68 bp, Homo sapiens
cctttgcccccttacagtctgtttcctacacagacatacacttctaaaccttaagttaaataatgtaa

SEQ ID NO: 157661 - DNA, 73 bp, Homo sapiens
tacagtctgtttcctacacagacatacacttctaaaccttaagttaaataatgtaatgtttctattcagactc

SEQ ID NO: 157662 - DNA, 69 bp, Homo sapiens
taagttaaataatgtaatgtttctattcagactccccaatttttttttaatcactcagtgtaccttgac

SEQ ID NO: 157663 - DNA, 69 bp, Homo sapiens
taatgtaatgtttctattcagactccccaatttttttttaatcactcagtgtaccttgacctacaaacc

SEQ ID NO: 157664 - DNA, 67 bp, Homo sapiens
gtttctattcagactccccaatttttttttaatcactcagtgtaccttgacctacaaaccttattcc

SEQ ID NO: 157665 - DNA, 67 bp, Homo sapiens
tcagactccccaatttttttttaatcactcagtgtaccttgacctacaaaccttattcctaataccg

SEQ ID NO: 157666 - DNA, 65 bp, Homo sapiens
tttttttaatcactcagtgtaccttgacctacaaaccttattcctaataccgttttttcactttc

SEQ ID NO: 157667 - DNA, 71 bp, Homo sapiens
ttaatcactcagtgtaccttgacctacaaaccttattcctaataccgttttttcactttctcattctgcta

SEQ ID NO: 157668 - DNA, 70 bp, Homo sapiens
agtgtaccttgacctacaaaccttattcctaataccgttttttcactttctcattctgctatagccacaa

SEQ ID NO: 157669 - DNA, 72 bp, Homo sapiens
tacaaaccttattcctaataccgttttttcactttctcattctgctatagccacaaggggcctgcttgctat

SEQ ID NO: 157670 - DNA, 74 bp, Homo sapiens
ttattcctaataccgttttttcactttctcattctgctatagccacaaggggcctgcttgctatttgtcagtta

SEQ ID NO: 157671 - DNA, 75 bp, Homo sapiens
aataccgttttttcactttctcattctgctatagccacaaggggcctgcttgctatttgtcagttatgccaacca

SEQ ID NO: 157672 - DNA, 80 bp, Homo sapiens
ctttctcattctgctatagccacaaggggcctgcttgctatttgtcagttatgccaaccaggattctgcctgggatctta

SEQ ID NO: 157673 - DNA, 78 bp, Homo sapiens
attctgctatagccacaaggggcctgcttgctatttgtcagttatgccaaccaggattctgcctgggatcttagtact

SEQ ID NO: 157674 - DNA, 76 bp, Homo sapiens
atagccacaaggggcctgcttgctatttgtcagttatgccaaccaggattctgcctgggatcttagtacttgttcc

SEQ ID NO: 157675 - DNA, 76 bp, Homo sapiens
ctgcttgctatttgtcagttatgccaaccaggattctgcctgggatcttagtacttgttccctgggcttagaatgt

SEQ ID NO: 157676 - DNA, 73 bp, Homo sapiens
ctatttgtcagttatgccaaccaggattctgcctgggatcttagtacttgttccctgggcttagaatgttctt

SEQ ID NO: 157677 - DNA, 73 bp, Homo sapiens
tatgccaaccaggattctgcctgggatcttagtacttgttccctgggcttagaatgttctttccctacaatta

SEQ ID NO: 157678 - DNA, 71 bp, Homo sapiens
aggattctgcctgggatcttagtacttgttccctgggcttagaatgttctttccctacaattaggctttgc

SEQ ID NO: 157679 - DNA, 72 bp, Homo sapiens
tccctgggcttagaatgttctttccctacaattaggctttgctcaagtatcctagaagtctttgttgattta

SEQ ID NO: 157680 - DNA, 72 bp, Homo sapiens
gaatgttctttccctacaattaggctttgctcaagtatcctagaagtctttgttgatttaccctatgtgaaa

SEQ ID NO: 157681 - DNA, 71 bp, Homo sapiens
attaggctttgctcaagtatcctagaagtctttgttgatttaccctatgtgaaactgtgggggtagcactt

SEQ ID NO: 157682 - DNA, 72 bp, Homo sapiens
tttgctcaagtatcctagaagtctttgttgatttaccctatgtgaaactgtgggggtagcactttggtgaaa

SEQ ID NO: 157683 - DNA, 71 bp, Homo sapiens
tctttgttgatttaccctatgtgaaactgtgggggtagcactttggtgaaacaggagctcctccctaaatg

SEQ ID NO: 157684 - DNA, 70 bp, Homo sapiens
atttaccctatgtgaaactgtgggggtagcactttggtgaaacaggagctcctccctaaatggcaagctt

SEQ ID NO: 157685 - DNA, 69 bp, Homo sapiens
aaactgtgggggtagcactttggtgaaacaggagctcctccctaaatggcaagctttttgaataccttg

SEQ ID NO: 157686 - DNA, 72 bp, Homo sapiens
gtagcactttggtgaaacaggagctcctccctaaatggcaagctttttgaataccttggcttgagtttattc

SEQ ID NO: 157687 - DNA, 71 bp, Homo sapiens
ttggtgaaacaggagctcctccctaaatggcaagctttttgaataccttggcttgagtttattcgtaacta

SEQ ID NO: 157688 - DNA, 74 bp, Homo sapiens
gagctcctccctaaatggcaagctttttgaataccttggcttgagtttattcgtaactatcatggtcacatttc

SEQ ID NO: 157689 - DNA, 71 bp, Homo sapiens
cctccctaaatggcaagctttttgaataccttggcttgagtttattcgtaactatcatggtcacatttctt

SEQ ID NO: 157690 - DNA, 75 bp, Homo sapiens
aagctttttgaataccttggcttgagtttattcgtaactatcatggtcacatttctttgacaacatgttccatgc

SEQ ID NO: 157691 - DNA, 81 bp, Homo sapiens
ttgagtttattcgtaactatcatggtcacatttctttgacaacatgttccatgcctagcagtgattcaggcattacaacca

SEQ ID NO: 157692 - DNA, 82 bp, Homo sapiens
tattcgtaactatcatggtcacatttctttgacaacatgttccatgcctagcagtgattcaggcattacaaccagtctctta

SEQ ID NO: 157693 - DNA, 81 bp, Homo sapiens
actatcatggtcacatttctttgacaacatgttccatgcctagcagtgattcaggcattacaaccagtctcttatttcatt

SEQ ID NO: 157694 - DNA, 79 bp, Homo sapiens
agcagtgattcaggcattacaaccagtctcttatttcatttgattcccacatcagcaaaggatatattactattattta

SEQ ID NO: 157695 - DNA, 73 bp, Homo sapiens
caaccagtctcttatttcatttgattcccacatcagcaaaggatatattactattatttacatttcttttagt

SEQ ID NO: 157696 - DNA, 74 bp, Homo sapiens
tttcatttgattcccacatcagcaaaggatatattactattatttacatttcttttagttaaatagtgtccaga

SEQ ID NO: 157697 - DNA, 72 bp, Homo sapiens
ttgattcccacatcagcaaaggatatattactattatttacatttcttttagttaaatagtgtccagaaagt

SEQ ID NO: 157698 - DNA, 67 bp, Homo sapiens
ggatatattactattatttacatttcttttagttaaatagtgtccagaaagtttaaggaattaagag

SEQ ID NO: 157699 - DNA, 68 bp, Homo sapiens
atttacatttcttttagttaaatagtgtccagaaagtttaaggaattaagagttacagacatagcgaa

SEQ ID NO: 157700 - DNA, 66 bp, Homo sapiens
aaatagtgtccagaaagtttaaggaattaagagttacagacatagcgaaagggttttctttctccc

SEQ ID NO: 157701 - DNA, 66 bp, Homo sapiens
agaaagtttaaggaattaagagttacagacatagcgaaagggttttctttctccctttctgcctcc

SEQ ID NO: 157702 - DNA, 67 bp, Homo sapiens
taaggaattaagagttacagacatagcgaaagggttttctttctccctttctgcctcccccaagaaa

SEQ ID NO: 157703 - DNA, 68 bp, Homo sapiens
ttaagagttacagacatagcgaaagggttttctttctccctttctgcctcccccaagaaaactactga

SEQ ID NO: 157704 - DNA, 67 bp, Homo sapiens
atagcgaaagggttttctttctccctttctgcctcccccaagaaaactactgacgtgaaacttcata

SEQ ID NO: 157705 - DNA, 70 bp, Homo sapiens
ggttttctttctccctttctgcctcccccaagaaaactactgacgtgaaacttcatatgagtagatatag

SEQ ID NO: 157706 - DNA, 71 bp, Homo sapiens
ttctccctttctgcctcccccaagaaaactactgacgtgaaacttcatatgagtagatatagtttatttaa

SEQ ID NO: 157707 - DNA, 74 bp, Homo sapiens
tgcctcccccaagaaaactactgacgtgaaacttcatatgagtagatatagtttatttaacagctttgcattat

SEQ ID NO: 157708 - DNA, 74 bp, Homo sapiens
agaaaactactgacgtgaaacttcatatgagtagatatagtttatttaacagctttgcattattctgttgtccg

SEQ ID NO: 157709 - DNA, 78 bp, Homo sapiens
ctgacgtgaaacttcatatgagtagatatagtttatttaacagctttgcattattctgttgtccgtattctatctctg

SEQ ID NO: 157710 - DNA, 78 bp, Homo sapiens
acttcatatgagtagatatagtttatttaacagctttgcattattctgttgtccgtattctatctctgtccctatcca

SEQ ID NO: 157711 - DNA, 78 bp, Homo sapiens
atgagtagatatagtttatttaacagctttgcattattctgttgtccgtattctatctctgtccctatccagagatta

SEQ ID NO: 157712 - DNA, 74 bp, Homo sapiens
agtttatttaacagctttgcattattctgttgtccgtattctatctctgtccctatccagagattaataaattg

SEQ ID NO: 157713 - DNA, 75 bp, Homo sapiens
tatctctgtccctatccagagattaataaattgtatatacttttccacagttacaaatgtggatttaatgaacag

SEQ ID NO: 157714 - DNA, 73 bp, Homo sapiens
gagattaataaattgtatatacttttccacagttacaaatgtggatttaatgaacagtcttgtccatgttttc

SEQ ID NO: 157715 - DNA, 76 bp, Homo sapiens
tgtatatacttttccacagttacaaatgtggatttaatgaacagtcttgtccatgttttcttctgtactgatgtaa

SEQ ID NO: 157716 - DNA, 74 bp, Homo sapiens
cagttacaaatgtggatttaatgaacagtcttgtccatgttttcttctgtactgatgtaaaatttttaggatga

SEQ ID NO: 157717 - DNA, 72 bp, Homo sapiens
ggatttaatgaacagtcttgtccatgttttcttctgtactgatgtaaaatttttaggatgaatacctagaag

SEQ ID NO: 157718 - DNA, 72 bp, Homo sapiens
gaacagtcttgtccatgttttcttctgtactgatgtaaaatttttaggatgaatacctagaagtggaatatt

SEQ ID NO: 157719 - DNA, 73 bp, Homo sapiens
gtccatgttttcttctgtactgatgtaaaatttttaggatgaatacctagaagtggaatatttagattcagat

SEQ ID NO: 157720 - DNA, 70 bp, Homo sapiens
ttttcttctgtactgatgtaaaatttttaggatgaatacctagaagtggaatatttagattcagattttt

SEQ ID NO: 157721 - DNA, 71 bp, Homo sapiens
ctgatgtaaaatttttaggatgaatacctagaagtggaatatttagattcagattttttaggtcctgcaaa

SEQ ID NO: 157722 - DNA, 72 bp, Homo sapiens
ttttaggatgaatacctagaagtggaatatttagattcagattttttaggtcctgcaaaattgatcttggaa

SEQ ID NO: 157723 - DNA, 71 bp, Homo sapiens
gaagtggaatatttagattcagattttttaggtcctgcaaaattgatcttggaaatggttctaccaattta

SEQ ID NO: 157724 - DNA, 72 bp, Homo sapiens
tagattcagattttttaggtcctgcaaaattgatcttggaaatggttctaccaatttatattccaaacttca

SEQ ID NO: 157725 - DNA, 74 bp, Homo sapiens
ttgatcttggaaatggttctaccaatttatattccaaacttcagtcttcaccctcctcaatatattcagatttg

SEQ ID NO: 157726 - DNA, 76 bp, Homo sapiens
tggaaatggttctaccaatttatattccaaacttcagtcttcaccctcctcaatatattcagatttgttgatatgc

SEQ ID NO: 157727 - DNA, 76 bp, Homo sapiens
ccaatttatattccaaacttcagtcttcaccctcctcaatatattcagatttgttgatatgctctaaagtatttga

SEQ ID NO: 157728 - DNA, 76 bp, Homo sapiens
ttatattccaaacttcagtcttcaccctcctcaatatattcagatttgttgatatgctctaaagtatttgaaataa

SEQ ID NO: 157729 - DNA, 75 bp, Homo sapiens
aacttcagtcttcaccctcctcaatatattcagatttgttgatatgctctaaagtatttgaaataataatttcaa

SEQ ID NO: 157730 - DNA, 73 bp, Homo sapiens
caccctcctcaatatattcagatttgttgatatgctctaaagtatttgaaataataatttcaatttgttaccc

SEQ ID NO: 157731 - DNA, 72 bp, Homo sapiens
atattcagatttgttgatatgctctaaagtatttgaaataataatttcaatttgttaccctgatttccgtcg

SEQ ID NO: 157732 - DNA, 74 bp, Homo sapiens
gatttgttgatatgctctaaagtatttgaaataataatttcaatttgttaccctgatttccgtcggtgagcatg

SEQ ID NO: 157733 - DNA, 74 bp, Homo sapiens
gatatgctctaaagtatttgaaataataatttcaatttgttaccctgatttccgtcggtgagcatgttttcata

SEQ ID NO: 157734 - DNA, 74 bp, Homo sapiens
gtatttgaaataataatttcaatttgttaccctgatttccgtcggtgagcatgttttcatatgttcatctagcc

SEQ ID NO: 157735 - DNA, 73 bp, Homo sapiens
taataatttcaatttgttaccctgatttccgtcggtgagcatgttttcatatgttcatctagcctttacttcc

SEQ ID NO: 157736 - DNA, 72 bp, Homo sapiens
tgatttccgtcggtgagcatgttttcatatgttcatctagcctttacttccctttaattggatttctctttt

SEQ ID NO: 157737 - DNA, 74 bp, Homo sapiens
tcggtgagcatgttttcatatgttcatctagcctttacttccctttaattggatttctcttttttacagactca

SEQ ID NO: 157738 - DNA, 73 bp, Homo sapiens
catatgttcatctagcctttacttccctttaattggatttctcttttttacagactcagctgtgtattaaaca

SEQ ID NO: 157739 - DNA, 70 bp, Homo sapiens
acttccctttaattggatttctcttttttacagactcagctgtgtattaaacagaatgttcattttgtat

SEQ ID NO: 157740 - DNA, 75 bp, Homo sapiens
ggatttctcttttttacagactcagctgtgtattaaacagaatgttcattttgtattattgtatagtacaatgat

SEQ ID NO: 157741 - DNA, 77 bp, Homo sapiens
ttttacagactcagctgtgtattaaacagaatgttcattttgtattattgtatagtacaatgattactgattgttta

SEQ ID NO: 157742 - DNA, 80 bp, Homo sapiens
cagactcagctgtgtattaaacagaatgttcattttgtattattgtatagtacaatgattactgattgtttagtctgcca

SEQ ID NO: 157743 - DNA, 79 bp, Homo sapiens
gtgtattaaacagaatgttcattttgtattattgtatagtacaatgattactgattgtttagtctgccatactgctgga

SEQ ID NO: 157744 - DNA, 75 bp, Homo sapiens
attttgtattattgtatagtacaatgattactgattgtttagtctgccatactgctggaactgggtgttttccac

SEQ ID NO: 157745 - DNA, 74 bp, Homo sapiens
tatagtacaatgattactgattgtttagtctgccatactgctggaactgggtgttttccacccttatttttata

SEQ ID NO: 157746 - DNA, 75 bp, Homo sapiens
tacaatgattactgattgtttagtctgccatactgctggaactgggtgttttccacccttatttttatacagcag

SEQ ID NO: 157747 - DNA, 76 bp, Homo sapiens
actgattgtttagtctgccatactgctggaactgggtgttttccacccttatttttatacagcaggatgagacgca

SEQ ID NO: 157748 - DNA, 79 bp, Homo sapiens
tgccatactgctggaactgggtgttttccacccttatttttatacagcaggatgagacgcagtgccgcatagtggttga

SEQ ID NO: 157749 - DNA, 76 bp, Homo sapiens
tactgctggaactgggtgttttccacccttatttttatacagcaggatgagacgcagtgccgcatagtggttgaaa

SEQ ID NO: 157750 - DNA, 75 bp, Homo sapiens
gtgttttccacccttatttttatacagcaggatgagacgcagtgccgcatagtggttgaaagtgacttgtttcaa

SEQ ID NO: 157751 - DNA, 76 bp, Homo sapiens
acccttatttttatacagcaggatgagacgcagtgccgcatagtggttgaaagtgacttgtttcaaaattgccaga

SEQ ID NO: 157752 - DNA, 78 bp, Homo sapiens
atttttatacagcaggatgagacgcagtgccgcatagtggttgaaagtgacttgtttcaaaattgccagagtatgaat

SEQ ID NO: 157753 - DNA, 79 bp, Homo sapiens
gatgagacgcagtgccgcatagtggttgaaagtgacttgtttcaaaattgccagagtatgaattctggcccactggtat

SEQ ID NO: 157754 - DNA, 77 bp, Homo sapiens
agtgccgcatagtggttgaaagtgacttgtttcaaaattgccagagtatgaattctggcccactggtattagctctg

SEQ ID NO: 157755 - DNA, 77 bp, Homo sapiens
atagtggttgaaagtgacttgtttcaaaattgccagagtatgaattctggcccactggtattagctctgtgaacatg

SEQ ID NO: 157756 - DNA, 76 bp, Homo sapiens
aaagtgacttgtttcaaaattgccagagtatgaattctggcccactggtattagctctgtgaacatggtccactta

SEQ ID NO: 157757 - DNA, 78 bp, Homo sapiens
ttcaaaattgccagagtatgaattctggcccactggtattagctctgtgaacatggtccacttacttgatcttcctta

SEQ ID NO: 157758 - DNA, 77 bp, Homo sapiens
aattgccagagtatgaattctggcccactggtattagctctgtgaacatggtccacttacttgatcttccttaggcc

SEQ ID NO: 157759 - DNA, 74 bp, Homo sapiens
tatgaattctggcccactggtattagctctgtgaacatggtccacttacttgatcttccttaggccccgtttct

SEQ ID NO: 157760 - DNA, 75 bp, Homo sapiens
tagctctgtgaacatggtccacttacttgatcttccttaggccccgtttcttcatctgtaagacaggaacagtaa

SEQ ID NO: 157761 - DNA, 71 bp, Homo sapiens
aacatggtccacttacttgatcttccttaggccccgtttcttcatctgtaagacaggaacagtaataatac

SEQ ID NO: 157762 - DNA, 70 bp, Homo sapiens
tccacttacttgatcttccttaggccccgtttcttcatctgtaagacaggaacagtaataatacctacct

SEQ ID NO: 157763 - DNA, 72 bp, Homo sapiens
tttcttcatctgtaagacaggaacagtaataatacctaccttatggggttgttgtgaaaattggagtagata

SEQ ID NO: 157764 - DNA, 71 bp, Homo sapiens
tgtaagacaggaacagtaataatacctaccttatggggttgttgtgaaaattggagtagataacgcataaa

SEQ ID NO: 157765 - DNA, 69 bp, Homo sapiens
gacaggaacagtaataatacctaccttatggggttgttgtgaaaattggagtagataacgcataaaaag

SEQ ID NO: 157766 - DNA, 69 bp, Homo sapiens
aatacctaccttatggggttgttgtgaaaattggagtagataacgcataaaaagtacttattagcacaa

SEQ ID NO: 157767 - DNA, 71 bp, Homo sapiens
accttatggggttgttgtgaaaattggagtagataacgcataaaaagtacttattagcacaatgtttagca

SEQ ID NO: 157768 - DNA, 74 bp, Homo sapiens
gttgttgtgaaaattggagtagataacgcataaaaagtacttattagcacaatgtttagcataaggcaggcatt

SEQ ID NO: 157769 - DNA, 75 bp, Homo sapiens
gtgaaaattggagtagataacgcataaaaagtacttattagcacaatgtttagcataaggcaggcatttatactg

SEQ ID NO: 157770 - DNA, 74 bp, Homo sapiens
aaattggagtagataacgcataaaaagtacttattagcacaatgtttagcataaggcaggcatttatactgttg

SEQ ID NO: 157771 - DNA, 75 bp, Homo sapiens
ttggagtagataacgcataaaaagtacttattagcacaatgtttagcataaggcaggcatttatactgttgttat

SEQ ID NO: 157772 - DNA, 78 bp, Homo sapiens
cgcataaaaagtacttattagcacaatgtttagcataaggcaggcatttatactgttgttatttgtagtgcattgtca

SEQ ID NO: 157773 - DNA, 78 bp, Homo sapiens
aaagtacttattagcacaatgtttagcataaggcaggcatttatactgttgttatttgtagtgcattgtcatcattag

SEQ ID NO: 157774 - DNA, 77 bp, Homo sapiens
cacaatgtttagcataaggcaggcatttatactgttgttatttgtagtgcattgtcatcattagtatttgtgggttt

SEQ ID NO: 157775 - DNA, 76 bp, Homo sapiens
acaatgtttagcataaggcaggcatttatactgttgttatttgtagtgcattgtcatcattagtatttgtgggttt

SEQ ID NO: 157776 - DNA, 71 bp, Homo sapiens
actgttgttatttgtagtgcattgtcatcattagtatttgtgggttttttctttcccttgattttatatgt

SEQ ID NO: 157777 - DNA, 74 bp, Homo sapiens
ttgtagtgcattgtcatcattagtatttgtgggttttttctttcccttgattttatatgtttatctttgtatca

SEQ ID NO: 157778 - DNA, 70 bp, Homo sapiens
tagtatttgtgggttttttctttcccttgattttatatgtttatctttgtatcatgtaatgtaacttgtg

SEQ ID NO: 157779 - DNA, 68 bp, Homo sapiens
tttgtgggttttttctttcccttgattttatatgtttatctttgtatcatgtaatgtaacttgtgggg

SEQ ID NO: 157780 - DNA, 71 bp, Homo sapiens
ttctttcccttgattttatatgtttatctttgtatcatgtaatgtaacttgtggggggggagagatttcca

SEQ ID NO: 157781 - DNA, 72 bp, Homo sapiens
ttttatatgtttatctttgtatcatgtaatgtaacttgtggggggggagagatttccagcaacatgtttagg

SEQ ID NO: 157782 - DNA, 71 bp, Homo sapiens
tttatctttgtatcatgtaatgtaacttgtggggggggagagatttccagcaacatgtttaggtttagtat

SEQ ID NO: 157783 - DNA, 72 bp, Homo sapiens
tttgtatcatgtaatgtaacttgtggggggggagagatttccagcaacatgtttaggtttagtattgtatgt

SEQ ID NO: 157784 - DNA, 72 bp, Homo sapiens
gggggggagagatttccagcaacatgtttaggtttagtattgtatgttctaggttgactctgcattcttgtt

SEQ ID NO: 157785 - DNA, 73 bp, Homo sapiens
agatttccagcaacatgtttaggtttagtattgtatgttctaggttgactctgcattcttgtttgttgccgtt

SEQ ID NO: 157786 - DNA, 72 bp, Homo sapiens
gcaacatgtttaggtttagtattgtatgttctaggttgactctgcattcttgtttgttgccgtttcttattt

SEQ ID NO: 157787 - DNA, 70 bp, Homo sapiens
gtttaggtttagtattgtatgttctaggttgactctgcattcttgtttgttgccgtttcttattttgtgt

SEQ ID NO: 157788 - DNA, 75 bp, Homo sapiens
gtattgtatgttctaggttgactctgcattcttgtttgttgccgtttcttattttgtgttcaattatagctagaa

SEQ ID NO: 157789 - DNA, 75 bp, Homo sapiens
tctaggttgactctgcattcttgtttgttgccgtttcttattttgtgttcaattatagctagaaatgatagtacc

SEQ ID NO: 157790 - DNA, 75 bp, Homo sapiens
gactctgcattcttgtttgttgccgtttcttattttgtgttcaattatagctagaaatgatagtaccttcttcaa

SEQ ID NO: 157791 - DNA, 74 bp, Homo sapiens
tcaattatagctagaaatgatagtaccttcttcaaaagtatccttatatgagatttttttgaacagtgtaatgt

SEQ ID NO: 157792 - DNA, 71 bp, Homo sapiens
ctagaaatgatagtaccttcttcaaaagtatccttatatgagatttttttgaacagtgtaatgttataaaa

SEQ ID NO: 157793 - DNA, 70 bp, Homo sapiens
ccttcttcaaaagtatccttatatgagatttttttgaacagtgtaatgttataaaaacccaatcagtgat

SEQ ID NO: 157794 - DNA, 69 bp, Homo sapiens
tccttatatgagatttttttgaacagtgtaatgttataaaaacccaatcagtgattttgaggtttttgt

SEQ ID NO: 157795 - DNA, 68 bp, Homo sapiens
tttttgaacagtgtaatgttataaaaacccaatcagtgattttgaggtttttgtttcatggaacttta

SEQ ID NO: 157796 - DNA, 70 bp, Homo sapiens
gaacagtgtaatgttataaaaacccaatcagtgattttgaggtttttgtttcatggaactttacacatct

SEQ ID NO: 157797 - DNA, 71 bp, Homo sapiens
ataaaaacccaatcagtgattttgaggtttttgtttcatggaactttacacatcttaccatattcttatca

SEQ ID NO: 157798 - DNA, 74 bp, Homo sapiens
tttgaggtttttgtttcatggaactttacacatcttaccatattcttatcatattctgtatccctgtctttgag

SEQ ID NO: 157799 - DNA, 78 bp, Homo sapiens
tttgtttcatggaactttacacatcttaccatattcttatcatattctgtatccctgtctttgagttcatgcctattg

SEQ ID NO: 157800 - DNA, 79 bp, Homo sapiens
gaactttacacatcttaccatattcttatcatattctgtatccctgtctttgagttcatgcctattgtgtattccatta

SEQ ID NO: 157801 - DNA, 78 bp, Homo sapiens
acatcttaccatattcttatcatattctgtatccctgtctttgagttcatgcctattgtgtattccattacttaccta

SEQ ID NO: 157802 - DNA, 76 bp, Homo sapiens
accatattcttatcatattctgtatccctgtctttgagttcatgcctattgtgtattccattacttacctaaagaa

SEQ ID NO: 157803 - DNA, 74 bp, Homo sapiens
ctgtatccctgtctttgagttcatgcctattgtgtattccattacttacctaaagaatttgtttcagaatgtac

SEQ ID NO: 157804 - DNA, 72 bp, Homo sapiens
gtctttgagttcatgcctattgtgtattccattacttacctaaagaatttgtttcagaatgtactttttaga

SEQ ID NO: 157805 - DNA, 73 bp, Homo sapiens
catgcctattgtgtattccattacttacctaaagaatttgtttcagaatgtactttttagaaatctatatgtg

SEQ ID NO: 157806 - DNA, 72 bp, Homo sapiens
tattccattacttacctaaagaatttgtttcagaatgtactttttagaaatctatatgtgtatgtgttagcc

SEQ ID NO: 157807 - DNA, 72 bp, Homo sapiens
tacttacctaaagaatttgtttcagaatgtactttttagaaatctatatgtgtatgtgttagcctaggatat

SEQ ID NO: 157808 - DNA, 72 bp, Homo sapiens
agaatttgtttcagaatgtactttttagaaatctatatgtgtatgtgttagcctaggatatttatttaacag

SEQ ID NO: 157809 - DNA, 77 bp, Homo sapiens
tcagaatgtactttttagaaatctatatgtgtatgtgttagcctaggatatttatttaacagtatagaagattctca

SEQ ID NO: 157810 - DNA, 74 bp, Homo sapiens
ctatatgtgtatgtgttagcctaggatatttatttaacagtatagaagattctcaaaaacaggagttaagagta

SEQ ID NO: 157811 - DNA, 73 bp, Homo sapiens
gcctaggatatttatttaacagtatagaagattctcaaaaacaggagttaagagtattattctagtgaacaga

SEQ ID NO: 157812 - DNA, 73 bp, Homo sapiens
tatttaacagtatagaagattctcaaaaacaggagttaagagtattattctagtgaacagagtgtttccataa

SEQ ID NO: 157813 - DNA, 71 bp, Homo sapiens
aacagtatagaagattctcaaaaacaggagttaagagtattattctagtgaacagagtgtttccataaaat

SEQ ID NO: 157814 - DNA, 72 bp, Homo sapiens
tctcaaaaacaggagttaagagtattattctagtgaacagagtgtttccataaaattaaatgagaatctact

SEQ ID NO: 157815 - DNA, 74 bp, Homo sapiens
caggagttaagagtattattctagtgaacagagtgtttccataaaattaaatgagaatctacttcactgattgg

SEQ ID NO: 157816 - DNA, 75 bp, Homo sapiens
ctagtgaacagagtgtttccataaaattaaatgagaatctacttcactgattggttcttttcaccatgattctgt

SEQ ID NO: 157817 - DNA, 75 bp, Homo sapiens
acagagtgtttccataaaattaaatgagaatctacttcactgattggttcttttcaccatgattctgttttgcaa

SEQ ID NO: 157818 - DNA, 74 bp, Homo sapiens
ccataaaattaaatgagaatctacttcactgattggttcttttcaccatgattctgttttgcaaagagaattaa

SEQ ID NO: 157819 - DNA, 73 bp, Homo sapiens
aatgagaatctacttcactgattggttcttttcaccatgattctgttttgcaaagagaattaattaagaaaac

SEQ ID NO: 157820 - DNA, 73 bp, Homo sapiens
tctacttcactgattggttcttttcaccatgattctgttttgcaaagagaattaattaagaaaacttaattga

SEQ ID NO: 157821 - DNA, 72 bp, Homo sapiens
tggttcttttcaccatgattctgttttgcaaagagaattaattaagaaaacttaattgaacagtgagctggt

SEQ ID NO: 157822 - DNA, 75 bp, Homo sapiens
caccatgattctgttttgcaaagagaattaattaagaaaacttaattgaacagtgagctggtttcattagtgtca

SEQ ID NO: 157823 - DNA, 69 bp, Homo sapiens
aattaagaaaacttaattgaacagtgagctggtttcattagtgtcacttttcctgtcgaggttctaggt

SEQ ID NO: 157824 - DNA, 68 bp, Homo sapiens
aaaacttaattgaacagtgagctggtttcattagtgtcacttttcctgtcgaggttctaggttccttt

SEQ ID NO: 157825 - DNA, 70 bp, Homo sapiens
tggtttcattagtgtcacttttcctgtcgaggttctaggttccttttgtaagttactactgataagaatc

SEQ ID NO: 157826 - DNA, 69 bp, Homo sapiens
ttagtgtcacttttcctgtcgaggttctaggttccttttgtaagttactactgataagaatcctcctaa

SEQ ID NO: 157827 - DNA, 69 bp, Homo sapiens
cttttcctgtcgaggttctaggttccttttgtaagttactactgataagaatcctcctaaacagcttga

SEQ ID NO: 157828 - DNA, 72 bp, Homo sapiens
cttttgtaagttactactgataagaatcctcctaaacagcttgacctcctttcagaagtccgtgtgctgatt

SEQ ID NO: 157829 - DNA, 75 bp, Homo sapiens
taagttactactgataagaatcctcctaaacagcttgacctcctttcagaagtccgtgtgctgatttacacagct

SEQ ID NO: 157830 - DNA, 72 bp, Homo sapiens
ataagaatcctcctaaacagcttgacctcctttcagaagtccgtgtgctgatttacacagcttacctttttg

SEQ ID NO: 157831 - DNA, 70 bp, Homo sapiens
atcctcctaaacagcttgacctcctttcagaagtccgtgtgctgatttacacagcttacctttttgtttt

SEQ ID NO: 157832 - DNA, 73 bp, Homo sapiens
ttgacctcctttcagaagtccgtgtgctgatttacacagcttacctttttgtttttctcatgcctggtactaa

SEQ ID NO: 157833 - DNA, 75 bp, Homo sapiens
tttcagaagtccgtgtgctgatttacacagcttacctttttgtttttctcatgcctggtactaagtgacattcca

SEQ ID NO: 157834 - DNA, 75 bp, Homo sapiens
aagtccgtgtgctgatttacacagcttacctttttgtttttctcatgcctggtactaagtgacattccaatctgc

SEQ ID NO: 157835 - DNA, 75 bp, Homo sapiens
tttacacagcttacctttttgtttttctcatgcctggtactaagtgacattccaatctgctgtagtcatttggta

SEQ ID NO: 157836 - DNA, 75 bp, Homo sapiens
ttacctttttgtttttctcatgcctggtactaagtgacattccaatctgctgtagtcatttggtaatgcaaagag

SEQ ID NO: 157837 - DNA, 78 bp, Homo sapiens
ttgtttttctcatgcctggtactaagtgacattccaatctgctgtagtcatttggtaatgcaaagagtgaaactggaa

SEQ ID NO: 157838 - DNA, 80 bp, Homo sapiens
tctcatgcctggtactaagtgacattccaatctgctgtagtcatttggtaatgcaaagagtgaaactggaagggtaggca

SEQ ID NO: 157839 - DNA, 73 bp, Homo sapiens
acattccaatctgctgtagtcatttggtaatgcaaagagtgaaactggaagggtaggcaggaggtaccggttg

SEQ ID NO: 157840 - DNA, 74 bp, Homo sapiens
tgtagtcatttggtaatgcaaagagtgaaactggaagggtaggcaggaggtaccggttggcaccaaatatgcag

SEQ ID NO: 157841 - DNA, 75 bp, Homo sapiens
aaagagtgaaactggaagggtaggcaggaggtaccggttggcaccaaatatgcagttcaagatcactcatgatac

SEQ ID NO: 157842 - DNA, 75 bp, Homo sapiens
aaactggaagggtaggcaggaggtaccggttggcaccaaatatgcagttcaagatcactcatgataccagggaga

SEQ ID NO: 157843 - DNA, 80 bp, Homo sapiens
taggcaggaggtaccggttggcaccaaatatgcagttcaagatcactcatgataccagggagagaatgtcaaatacttga

SEQ ID NO: 157844 - DNA, 79 bp, Homo sapiens
taccggttggcaccaaatatgcagttcaagatcactcatgataccagggagagaatgtcaaatacttgaaccagaacaa

SEQ ID NO: 157845 - DNA, 79 bp, Homo sapiens
caccaaatatgcagttcaagatcactcatgataccagggagagaatgtcaaatacttgaaccagaacaacacattgttt

SEQ ID NO: 157846 - DNA, 78 bp, Homo sapiens
aatatgcagttcaagatcactcatgataccagggagagaatgtcaaatacttgaaccagaacaacacattgttttagt

SEQ ID NO: 157847 - DNA, 76 bp, Homo sapiens
tcaagatcactcatgataccagggagagaatgtcaaatacttgaaccagaacaacacattgttttagtttgtaaaa

SEQ ID NO: 157848 - DNA, 71 bp, Homo sapiens
ggagagaatgtcaaatacttgaaccagaacaacacattgttttagtttgtaaaattccagttataaggcag

SEQ ID NO: 157849 - DNA, 71 bp, Homo sapiens
caaatacttgaaccagaacaacacattgttttagtttgtaaaattccagttataaggcagtaatagtcatg

SEQ ID NO: 157850 - DNA, 70 bp, Homo sapiens
caacacattgttttagtttgtaaaattccagttataaggcagtaatagtcatgttactctacctcaaaat

SEQ ID NO: 157851 - DNA, 68 bp, Homo sapiens
gttttagtttgtaaaattccagttataaggcagtaatagtcatgttactctacctcaaaattattttc

SEQ ID NO: 157852 - DNA, 70 bp, Homo sapiens
gtaaaattccagttataaggcagtaatagtcatgttactctacctcaaaattattttctttctcatttgt

SEQ ID NO: 157853 - DNA, 72 bp, Homo sapiens
taaggcagtaatagtcatgttactctacctcaaaattattttctttctcatttgttcttttcacctctgtcc

SEQ ID NO: 157854 - DNA, 69 bp, Homo sapiens
aatagtcatgttactctacctcaaaattattttctttctcatttgttcttttcacctctgtcccaaccc

SEQ ID NO: 157855 - DNA, 67 bp, Homo sapiens
atgttactctacctcaaaattattttctttctcatttgttcttttcacctctgtcccaacccccctc

SEQ ID NO: 157856 - DNA, 71 bp, Homo sapiens
tcaaaattattttctttctcatttgttcttttcacctctgtcccaacccccctctcgctcatggatgtgtt

SEQ ID NO: 157857 - DNA, 75 bp, Homo sapiens
ttctttctcatttgttcttttcacctctgtcccaacccccctctcgctcatggatgtgttttgtgtgaaatgtga

SEQ ID NO: 157858 - DNA, 74 bp, Homo sapiens
tcccaacccccctctcgctcatggatgtgttttgtgtgaaatgtgaaaggtcttaagatagtggaggcttgaaa

SEQ ID NO: 157859 - DNA, 70 bp, Homo sapiens
gtgttttgtgtgaaatgtgaaaggtcttaagatagtggaggcttgaaaaaactgcctgtgttttaaaatg

SEQ ID NO: 157860 - DNA, 70 bp, Homo sapiens
aaatgtgaaaggtcttaagatagtggaggcttgaaaaaactgcctgtgttttaaaatgtgcttgtgtttg

SEQ ID NO: 157861 - DNA, 73 bp, Homo sapiens
tggaggcttgaaaaaactgcctgtgttttaaaatgtgcttgtgtttgtttcctaatgcagtactttgaagata

SEQ ID NO: 157862 - DNA, 71 bp, Homo sapiens
gcttgaaaaaactgcctgtgttttaaaatgtgcttgtgtttgtttcctaatgcagtactttgaagatattt

SEQ ID NO: 157863 - DNA, 70 bp, Homo sapiens
ctgcctgtgttttaaaatgtgcttgtgtttgtttcctaatgcagtactttgaagatattttaggtttagg

SEQ ID NO: 157864 - DNA, 69 bp, Homo sapiens
aaaatgtgcttgtgtttgtttcctaatgcagtactttgaagatattttaggtttaggtaagttgcttta

SEQ ID NO: 157865 - DNA, 67 bp, Homo sapiens
gcttgtgtttgtttcctaatgcagtactttgaagatattttaggtttaggtaagttgctttaagttt

SEQ ID NO: 157866 - DNA, 64 bp, Homo sapiens
gtttcctaatgcagtactttgaagatattttaggtttaggtaagttgctttaagtttttttttc

SEQ ID NO: 157867 - DNA, 67 bp, Homo sapiens
ttaagtttttttttcttaattggagtaggttgagtgctgtgaattcaatttttagtgtactataaaa

SEQ ID NO: 157868 - DNA, 73 bp, Homo sapiens
ttttcttaattggagtaggttgagtgctgtgaattcaatttttagtgtactataaaaagatagatggaagcac

SEQ ID NO: 157869 - DNA, 76 bp, Homo sapiens
tggagtaggttgagtgctgtgaattcaatttttagtgtactataaaaagatagatggaagcactttgattatagga

SEQ ID NO: 157870 - DNA, 73 bp, Homo sapiens
aggttgagtgctgtgaattcaatttttagtgtactataaaaagatagatggaagcactttgattataggaagt

SEQ ID NO: 157871 - DNA, 73 bp, Homo sapiens
tttagtgtactataaaaagatagatggaagcactttgattataggaagtttctttgaatcatttgctatagtt

SEQ ID NO: 157872 - DNA, 74 bp, Homo sapiens
gtactataaaaagatagatggaagcactttgattataggaagtttctttgaatcatttgctatagtttgagtgt

SEQ ID NO: 157873 - DNA, 73 bp, Homo sapiens
tataggaagtttctttgaatcatttgctatagtttgagtgtttactttaatgtgaaactcactgtaaatccaa

SEQ ID NO: 157874 - DNA, 77 bp, Homo sapiens
tctttgaatcatttgctatagtttgagtgtttactttaatgtgaaactcactgtaaatccaagtaaatgctgatcta

SEQ ID NO: 157875 - DNA, 75 bp, Homo sapiens
catttgctatagtttgagtgtttactttaatgtgaaactcactgtaaatccaagtaaatgctgatctaccaatgt

SEQ ID NO: 157876 - DNA, 76 bp, Homo sapiens
ctatagtttgagtgtttactttaatgtgaaactcactgtaaatccaagtaaatgctgatctaccaatgttcatgta

SEQ ID NO: 157877 - DNA, 80 bp, Homo sapiens
gtgaaactcactgtaaatccaagtaaatgctgatctaccaatgttcatgtatataatttgtatggtacattatcttcatc

SEQ ID NO: 157878 - DNA, 80 bp, Homo sapiens
actcactgtaaatccaagtaaatgctgatctaccaatgttcatgtatataatttgtatggtacattatcttcatcgttca

SEQ ID NO: 157879 - DNA, 80 bp, Homo sapiens
ctcactgtaaatccaagtaaatgctgatctaccaatgttcatgtatataatttgtatggtacattatcttcatcgttcaa

SEQ ID NO: 157880 - DNA, 78 bp, Homo sapiens
ctgtaaatccaagtaaatgctgatctaccaatgttcatgtatataatttgtatggtacattatcttcatcgttcaaat

SEQ ID NO: 157881 - DNA, 77 bp, Homo sapiens
caagtaaatgctgatctaccaatgttcatgtatataatttgtatggtacattatcttcatcgttcaaatttagaacc

SEQ ID NO: 157882 - DNA, 77 bp, Homo sapiens
gtaaatgctgatctaccaatgttcatgtatataatttgtatggtacattatcttcatcgttcaaatttagaaccttc

SEQ ID NO: 157883 - DNA, 78 bp, Homo sapiens
tgctgatctaccaatgttcatgtatataatttgtatggtacattatcttcatcgttcaaatttagaaccttcttatta

SEQ ID NO: 157884 - DNA, 76 bp, Homo sapiens
tgatctaccaatgttcatgtatataatttgtatggtacattatcttcatcgttcaaatttagaaccttcttattat

SEQ ID NO: 157885 - DNA, 75 bp, Homo sapiens
ccaatgttcatgtatataatttgtatggtacattatcttcatcgttcaaatttagaaccttcttattatttcaca

SEQ ID NO: 157886 - DNA, 74 bp, Homo sapiens
catgtatataatttgtatggtacattatcttcatcgttcaaatttagaaccttcttattatttcacatacttaa

SEQ ID NO: 157887 - DNA, 72 bp, Homo sapiens
taatttgtatggtacattatcttcatcgttcaaatttagaaccttcttattatttcacatacttaaagaaga

SEQ ID NO: 157888 - DNA, 74 bp, Homo sapiens
tacattatcttcatcgttcaaatttagaaccttcttattatttcacatacttaaagaagaatcttagttgcaga

SEQ ID NO: 157889 - DNA, 73 bp, Homo sapiens
cttcatcgttcaaatttagaaccttcttattatttcacatacttaaagaagaatcttagttgcagattcaaga

SEQ ID NO: 157890 - DNA, 73 bp, Homo sapiens
gttcaaatttagaaccttcttattatttcacatacttaaagaagaatcttagttgcagattcaagatgaagat

SEQ ID NO: 157891 - DNA, 73 bp, Homo sapiens
agaaccttcttattatttcacatacttaaagaagaatcttagttgcagattcaagatgaagattataaaacat

SEQ ID NO: 157892 - DNA, 72 bp, Homo sapiens
tttcacatacttaaagaagaatcttagttgcagattcaagatgaagattataaaacattttcttgggttttc

SEQ ID NO: 157893 - DNA, 70 bp, Homo sapiens
gatgaagattataaaacattttcttgggttttctttcagtattataattttgaggctgaatttaagaaca

SEQ ID NO: 157894 - DNA, 67 bp, Homo sapiens
taaaacattttcttgggttttctttcagtattataattttgaggctgaatttaagaacatggttatt

SEQ ID NO: 157895 - DNA, 71 bp, Homo sapiens
tcttgggttttctttcagtattataattttgaggctgaatttaagaacatggttattttctgtagacacca

SEQ ID NO: 157896 - DNA, 70 bp, Homo sapiens
ttctttcagtattataattttgaggctgaatttaagaacatggttattttctgtagacaccaaaacattt

SEQ ID NO: 157897 - DNA, 70 bp, Homo sapiens
cagtattataattttgaggctgaatttaagaacatggttattttctgtagacaccaaaacattttataat

SEQ ID NO: 157898 - DNA, 71 bp, Homo sapiens
gaggctgaatttaagaacatggttattttctgtagacaccaaaacattttataattttgtgtataggttga

SEQ ID NO: 157899 - DNA, 69 bp, Homo sapiens
ttaagaacatggttattttctgtagacaccaaaacattttataattttgtgtataggttgatttgggta

SEQ ID NO: 157900 - DNA, 71 bp, Homo sapiens
catggttattttctgtagacaccaaaacattttataattttgtgtataggttgatttgggtagatcagtta

SEQ ID NO: 157901 - DNA, 75 bp, Homo sapiens
tctgtagacaccaaaacattttataattttgtgtataggttgatttgggtagatcagttatatcactggaaatga

SEQ ID NO: 157902 - DNA, 73 bp, Homo sapiens
caaaacattttataattttgtgtataggttgatttgggtagatcagttatatcactggaaatgatttcaactc

SEQ ID NO: 157903 - DNA, 75 bp, Homo sapiens
ataattttgtgtataggttgatttgggtagatcagttatatcactggaaatgatttcaactctcagaaattgtat

SEQ ID NO: 157904 - DNA, 75 bp, Homo sapiens
ggttgatttgggtagatcagttatatcactggaaatgatttcaactctcagaaattgtatttcaacaatataatt

SEQ ID NO: 157905 - DNA, 75 bp, Homo sapiens
ggtagatcagttatatcactggaaatgatttcaactctcagaaattgtatttcaacaatataattttttattgtg

SEQ ID NO: 157906 - DNA, 73 bp, Homo sapiens
gcccagctaatttcaacaatagaatttgaaatatgtatagtgccattctattttttctacaaagtttgatggt

SEQ ID NO: 157907 - DNA, 73 bp, Homo sapiens
tcaacaatagaatttgaaatatgtatagtgccattctattttttctacaaagtttgatggttttcatttttca

SEQ ID NO: 157908 - DNA, 73 bp, Homo sapiens
gaatttgaaatatgtatagtgccattctattttttctacaaagtttgatggttttcatttttcacgtcatata

SEQ ID NO: 157909 - DNA, 74 bp, Homo sapiens
aaatatgtatagtgccattctattttttctacaaagtttgatggttttcatttttcacgtcatatatacagatc

SEQ ID NO: 157910 - DNA, 74 bp, Homo sapiens
gtgccattctattttttctacaaagtttgatggttttcatttttcacgtcatatatacagatctttaatatata

SEQ ID NO: 157911 - DNA, 72 bp, Homo sapiens
tttctacaaagtttgatggttttcatttttcacgtcatatatacagatctttaatatatactctgttatttt

SEQ ID NO: 157912 - DNA, 72 bp, Homo sapiens
acaaagtttgatggttttcatttttcacgtcatatatacagatctttaatatatactctgttattttttgct

SEQ ID NO: 157913 - DNA, 71 bp, Homo sapiens
ggttttcatttttcacgtcatatatacagatctttaatatatactctgttattttttgcttttgtatttag

SEQ ID NO: 157914 - DNA, 74 bp, Homo sapiens
cacgtcatatatacagatctttaatatatactctgttattttttgcttttgtatttagttttgctagagatagg

SEQ ID NO: 157915 - DNA, 72 bp, Homo sapiens
catatatacagatctttaatatatactctgttattttttgcttttgtatttagttttgctagagataggttt

SEQ ID NO: 157916 - DNA, 70 bp, Homo sapiens
tctttaatatatactctgttattttttgcttttgtatttagttttgctagagataggttttttatacaca

SEQ ID NO: 157917 - DNA, 72 bp, Homo sapiens
gcaggtttgttacctaggtaaatgtatatcataggagtttgttgtactgattattttatcaaccaggtatta

SEQ ID NO: 157918 - DNA, 74 bp, Homo sapiens
tttttctgatcttatttcttcttccaccctccaccctccagtgggtcccaatgtgttgttcgcctctatgcaca

SEQ ID NO: 157919 - DNA, 71 bp, Homo sapiens
ttatttcttcttccaccctccaccctccagtgggtcccaatgtgttgttcgcctctatgcacacccacctt

SEQ ID NO: 157920 - DNA, 71 bp, Homo sapiens
ttccaccctccaccctccagtgggtcccaatgtgttgttcgcctctatgcacacccaccttttcaactagt

SEQ ID NO: 157921 - DNA, 73 bp, Homo sapiens
tccaccctccagtgggtcccaatgtgttgttcgcctctatgcacacccaccttttcaactagttcttgtgtaa

SEQ ID NO: 157922 - DNA, 75 bp, Homo sapiens
atgtgttgttcgcctctatgcacacccaccttttcaactagttcttgtgtaagtgtaggcagttgagaatttgta

SEQ ID NO: 157923 - DNA, 75 bp, Homo sapiens
ttcgcctctatgcacacccaccttttcaactagttcttgtgtaagtgtaggcagttgagaatttgtagacaggaa

SEQ ID NO: 157924 - DNA, 70 bp, Homo sapiens
acacccaccttttcaactagttcttgtgtaagtgtaggcagttgagaatttgtagacaggaagtaatatt

SEQ ID NO: 157925 - DNA, 72 bp, Homo sapiens
caccttttcaactagttcttgtgtaagtgtaggcagttgagaatttgtagacaggaagtaatatttatcaag

SEQ ID NO: 157926 - DNA, 78 bp, Homo sapiens
actagttcttgtgtaagtgtaggcagttgagaatttgtagacaggaagtaatatttatcaagtgcctcatatgtggca

SEQ ID NO: 157927 - DNA, 77 bp, Homo sapiens
taagtgtaggcagttgagaatttgtagacaggaagtaatatttatcaagtgcctcatatgtggcaggttcctttata

SEQ ID NO: 157928 - DNA, 78 bp, Homo sapiens
agttgagaatttgtagacaggaagtaatatttatcaagtgcctcatatgtggcaggttcctttatatagtgtgaatca

SEQ ID NO: 157929 - DNA, 76 bp, Homo sapiens
aatttgtagacaggaagtaatatttatcaagtgcctcatatgtggcaggttcctttatatagtgtgaatcagttag

SEQ ID NO: 157930 - DNA, 74 bp, Homo sapiens
aagtaatatttatcaagtgcctcatatgtggcaggttcctttatatagtgtgaatcagttagtaaccaccaaac

SEQ ID NO: 157931 - DNA, 76 bp, Homo sapiens
ttatcaagtgcctcatatgtggcaggttcctttatatagtgtgaatcagttagtaaccaccaaaccctgtgaaata

SEQ ID NO: 157932 - DNA, 75 bp, Homo sapiens
agtgcctcatatgtggcaggttcctttatatagtgtgaatcagttagtaaccaccaaaccctgtgaaatagtagc

SEQ ID NO: 157933 - DNA, 70 bp, Homo sapiens
gcaggttcctttatatagtgtgaatcagttagtaaccaccaaaccctgtgaaatagtagcccctccactt

SEQ ID NO: 157934 - DNA, 70 bp, Homo sapiens
tagtgtgaatcagttagtaaccaccaaaccctgtgaaatagtagcccctccactttatagacagggaact

SEQ ID NO: 157935 - DNA, 71 bp, Homo sapiens
accaaaccctgtgaaatagtagcccctccactttatagacagggaacttgagagaactcaagtgtttggca

SEQ ID NO: 157936 - DNA, 74 bp, Homo sapiens
ccctccactttatagacagggaacttgagagaactcaagtgtttggcacagattcatgtgggtattaagtgaaa

SEQ ID NO: 157937 - DNA, 72 bp, Homo sapiens
gaacttgagagaactcaagtgtttggcacagattcatgtgggtattaagtgaaagtaaaattaagtgggatt

SEQ ID NO: 157938 - DNA, 70 bp, Homo sapiens
gaactcaagtgtttggcacagattcatgtgggtattaagtgaaagtaaaattaagtgggattttacccaa

SEQ ID NO: 157939 - DNA, 70 bp, Homo sapiens
aagtgtttggcacagattcatgtgggtattaagtgaaagtaaaattaagtgggattttacccaatgtctg

SEQ ID NO: 157940 - DNA, 70 bp, Homo sapiens
acagattcatgtgggtattaagtgaaagtaaaattaagtgggattttacccaatgtctggctgtttccaa

SEQ ID NO: 157941 - DNA, 70 bp, Homo sapiens
atgtgggtattaagtgaaagtaaaattaagtgggattttacccaatgtctggctgtttccaaggctctgc

SEQ ID NO: 157942 - DNA, 74 bp, Homo sapiens
taaaattaagtgggattttacccaatgtctggctgtttccaaggctctgcctcacttgctttttgtatgacaca

SEQ ID NO: 157943 - DNA, 76 bp, Homo sapiens
attttacccaatgtctggctgtttccaaggctctgcctcacttgctttttgtatgacacacctgttgcttgttgag

SEQ ID NO: 157944 - DNA, 80 bp, Homo sapiens
aatgtctggctgtttccaaggctctgcctcacttgctttttgtatgacacacctgttgcttgttgagtgtaagcaagcta

SEQ ID NO: 157945 - DNA, 79 bp, Homo sapiens
tttccaaggctctgcctcacttgctttttgtatgacacacctgttgcttgttgagtgtaagcaagctatgtttggcttc

SEQ ID NO: 157946 - DNA, 81 bp, Homo sapiens
tctgcctcacttgctttttgtatgacacacctgttgcttgttgagtgtaagcaagctatgtttggcttctgatgttaaata

SEQ ID NO: 157947 - DNA, 79 bp, Homo sapiens
ttgctttttgtatgacacacctgttgcttgttgagtgtaagcaagctatgtttggcttctgatgttaaataattcatta

SEQ ID NO: 157948 - DNA, 79 bp, Homo sapiens
ttttgtatgacacacctgttgcttgttgagtgtaagcaagctatgtttggcttctgatgttaaataattcattatccat

SEQ ID NO: 157949 - DNA, 77 bp, Homo sapiens
ctgttgcttgttgagtgtaagcaagctatgtttggcttctgatgttaaataattcattatccattttcagaaccaaa

SEQ ID NO: 157950 - DNA, 76 bp, Homo sapiens
gcttgttgagtgtaagcaagctatgtttggcttctgatgttaaataattcattatccattttcagaaccaaagttc

SEQ ID NO: 157951 - DNA, 74 bp, Homo sapiens
ctatgtttggcttctgatgttaaataattcattatccattttcagaaccaaagttcttgagtttttgtagcgca

SEQ ID NO: 157952 - DNA, 71 bp, Homo sapiens
cttctgatgttaaataattcattatccattttcagaaccaaagttcttgagtttttgtagcgcatttttaa

SEQ ID NO: 157953 - DNA, 66 bp, Homo sapiens
aaataattcattatccattttcagaaccaaagttcttgagtttttgtagcgcatttttaaaaaaaa

SEQ ID NO: 157954 - DNA, 67 bp, Homo sapiens
tgtagcgcatttttaaaaaaaacaggtttactttattttgcacttaatagttggtaattataactga

SEQ ID NO: 157955 - DNA, 63 bp, Homo sapiens
ttttaaaaaaaacaggtttactttattttgcacttaatagttggtaattataactgaattatt

SEQ ID NO: 157956 - DNA, 68 bp, Homo sapiens
aaaacaggtttactttattttgcacttaatagttggtaattataactgaattattttcatattacaca

SEQ ID NO: 157957 - DNA, 71 bp, Homo sapiens
tactttattttgcacttaatagttggtaattataactgaattattttcatattacacattttttagcgtga

SEQ ID NO: 157958 - DNA, 70 bp, Homo sapiens
gttggtaattataactgaattattttcatattacacattttttagcgtgaaaattttcaaacacaaatga

SEQ ID NO: 157959 - DNA, 71 bp, Homo sapiens
attttcatattacacattttttagcgtgaaaattttcaaacacaaatgaaactcattccctagacttcaca

SEQ ID NO: 157960 - DNA, 70 bp, Homo sapiens
tacacattttttagcgtgaaaattttcaaacacaaatgaaactcattccctagacttcacaattttcagt

SEQ ID NO: 157961 - DNA, 70 bp, Homo sapiens
tttagcgtgaaaattttcaaacacaaatgaaactcattccctagacttcacaattttcagtttgtcgttc

SEQ ID NO: 157962 - DNA, 68 bp, Homo sapiens
caaacacaaatgaaactcattccctagacttcacaattttcagtttgtcgttcttaattttgttgttt

SEQ ID NO: 157963 - DNA, 69 bp, Homo sapiens
gaaactcattccctagacttcacaattttcagtttgtcgttcttaattttgttgtttttaggtgcactg

SEQ ID NO: 157964 - DNA, 69 bp, Homo sapiens
tcacaattttcagtttgtcgttcttaattttgttgtttttaggtgcactgttttttaaagcagatccta

SEQ ID NO: 157965 - DNA, 67 bp, Homo sapiens
taattttgttgtttttaggtgcactgttttttaaagcagatcctaaaacccgtcatgttatttcttc

SEQ ID NO: 157966 - DNA, 71 bp, Homo sapiens
tttaaagcagatcctaaaacccgtcatgttatttcttccctacttcagtgtgcatctaacaaaaattcaac

SEQ ID NO: 157967 - DNA, 74 bp, Homo sapiens
atcctaaaacccgtcatgttatttcttccctacttcagtgtgcatctaacaaaaattcaaccatcatgcaataa

SEQ ID NO: 157968 - DNA, 76 bp, Homo sapiens
aaacccgtcatgttatttcttccctacttcagtgtgcatctaacaaaaattcaaccatcatgcaataatctcatta

SEQ ID NO: 157969 - DNA, 76 bp, Homo sapiens
gttatttcttccctacttcagtgtgcatctaacaaaaattcaaccatcatgcaataatctcattaacaaaattagc

SEQ ID NO: 157970 - DNA, 76 bp, Homo sapiens
ccctacttcagtgtgcatctaacaaaaattcaaccatcatgcaataatctcattaacaaaattagccagaattctt

SEQ ID NO: 157971 - DNA, 78 bp, Homo sapiens
gtgtgcatctaacaaaaattcaaccatcatgcaataatctcattaacaaaattagccagaattctttgttattatctg

SEQ ID NO: 157972 - DNA, 74 bp, Homo sapiens
aaaattcaaccatcatgcaataatctcattaacaaaattagccagaattctttgttattatctgttattcggtc

SEQ ID NO: 157973 - DNA, 79 bp, Homo sapiens
tcaaccatcatgcaataatctcattaacaaaattagccagaattctttgttattatctgttattcggtccatactgaga

SEQ ID NO: 157974 - DNA, 75 bp, Homo sapiens
gcaataatctcattaacaaaattagccagaattctttgttattatctgttattcggtccatactgagattcccta

SEQ ID NO: 157975 - DNA, 74 bp, Homo sapiens
aacaaaattagccagaattctttgttattatctgttattcggtccatactgagattccctatatctctcaagaa

SEQ ID NO: 157976 - DNA, 75 bp, Homo sapiens
ttagccagaattctttgttattatctgttattcggtccatactgagattccctatatctctcaagaatgtggttt

SEQ ID NO: 157977 - DNA, 74 bp, Homo sapiens
ctttgttattatctgttattcggtccatactgagattccctatatctctcaagaatgtggttttgcagttaatt

SEQ ID NO: 157978 - DNA, 75 bp, Homo sapiens
attatctgttattcggtccatactgagattccctatatctctcaagaatgtggttttgcagttaatttatttgaa

SEQ ID NO: 157979 - DNA, 76 bp, Homo sapiens
tattcggtccatactgagattccctatatctctcaagaatgtggttttgcagttaatttatttgaattggaatcca

SEQ ID NO: 157980 - DNA, 74 bp, Homo sapiens
tccctatatctctcaagaatgtggttttgcagttaatttatttgaattggaatccaaacaagggccacacatta

SEQ ID NO: 157981 - DNA, 72 bp, Homo sapiens
tctcaagaatgtggttttgcagttaatttatttgaattggaatccaaacaagggccacacattatatttact

SEQ ID NO: 157982 - DNA, 71 bp, Homo sapiens
ggttttgcagttaatttatttgaattggaatccaaacaagggccacacattatatttacttctcctacatc

SEQ ID NO: 157983 - DNA, 72 bp, Homo sapiens
gaattggaatccaaacaagggccacacattatatttacttctcctacatctcttttaatctagagcgtttat

SEQ ID NO: 157984 - DNA, 75 bp, Homo sapiens
atccaaacaagggccacacattatatttacttctcctacatctcttttaatctagagcgtttatttcatgccata

SEQ ID NO: 157985 - DNA, 73 bp, Homo sapiens
atttacttctcctacatctcttttaatctagagcgtttatttcatgccatacactttgaaaatattgggctac

SEQ ID NO: 157986 - DNA, 73 bp, Homo sapiens
ctcctacatctcttttaatctagagcgtttatttcatgccatacactttgaaaatattgggctactttttctg

SEQ ID NO: 157987 - DNA, 76 bp, Homo sapiens
tatttcatgccatacactttgaaaatattgggctactttttctgtagaacatctctgttctagacttacctgtatc

SEQ ID NO: 157988 - DNA, 73 bp, Homo sapiens
gccatacactttgaaaatattgggctactttttctgtagaacatctctgttctagacttacctgtatctttta

SEQ ID NO: 157989 - DNA, 70 bp, Homo sapiens
aaaatattgggctactttttctgtagaacatctctgttctagacttacctgtatcttttacagggtggta

SEQ ID NO: 157990 - DNA, 72 bp, Homo sapiens
tactttttctgtagaacatctctgttctagacttacctgtatcttttacagggtggtagtggtttgacatgt

SEQ ID NO: 157991 - DNA, 74 bp, Homo sapiens
tttctgtagaacatctctgttctagacttacctgtatcttttacagggtggtagtggtttgacatgtttctcta

SEQ ID NO: 157992 - DNA, 72 bp, Homo sapiens
acatctctgttctagacttacctgtatcttttacagggtggtagtggtttgacatgtttctctagctttaaa

SEQ ID NO: 157993 - DNA, 70 bp, Homo sapiens
acttacctgtatcttttacagggtggtagtggtttgacatgtttctctagctttaaaggcttgaatggat

SEQ ID NO: 157994 - DNA, 72 bp, Homo sapiens
tatcttttacagggtggtagtggtttgacatgtttctctagctttaaaggcttgaatggattcaggtccaat

SEQ ID NO: 157995 - DNA, 73 bp, Homo sapiens
ttacagggtggtagtggtttgacatgtttctctagctttaaaggcttgaatggattcaggtccaattgttgga

SEQ ID NO: 157996 - DNA, 74 bp, Homo sapiens
tagtggtttgacatgtttctctagctttaaaggcttgaatggattcaggtccaattgttggacaaggctttata

SEQ ID NO: 157997 - DNA, 75 bp, Homo sapiens
gtttctctagctttaaaggcttgaatggattcaggtccaattgttggacaaggctttataagcagtgctgtgtat

SEQ ID NO: 157998 - DNA, 78 bp, Homo sapiens
ttgaatggattcaggtccaattgttggacaaggctttataagcagtgctgtgtatttcatattgaatcccattagaag

SEQ ID NO: 157999 - DNA, 76 bp, Homo sapiens
attcaggtccaattgttggacaaggctttataagcagtgctgtgtatttcatattgaatcccattagaaggtcaag

SEQ ID NO: 158000 - DNA, 78 bp, Homo sapiens
taagcagtgctgtgtatttcatattgaatcccattagaaggtcaagtggtgacagcccctgtactgtcaagttcctta

SEQ ID NO: 158001 - DNA, 75 bp, Homo sapiens
attagaaggtcaagtggtgacagcccctgtactgtcaagttccttatcactgtttcattcggagatctttgtcta

SEQ ID NO: 158002 - DNA, 76 bp, Homo sapiens
tcaagtggtgacagcccctgtactgtcaagttccttatcactgtttcattcggagatctttgtctaaatcagttaa

SEQ ID NO: 158003 - DNA, 75 bp, Homo sapiens
acagcccctgtactgtcaagttccttatcactgtttcattcggagatctttgtctaaatcagttaatggctacaa

SEQ ID NO: 158004 - DNA, 74 bp, Homo sapiens
tactgtcaagttccttatcactgtttcattcggagatctttgtctaaatcagttaatggctacaaaatggcgtt

SEQ ID NO: 158005 - DNA, 71 bp, Homo sapiens
aagttccttatcactgtttcattcggagatctttgtctaaatcagttaatggctacaaaatggcgtttttc

SEQ ID NO: 158006 - DNA, 73 bp, Homo sapiens
atcactgtttcattcggagatctttgtctaaatcagttaatggctacaaaatggcgtttttctaattccatta

SEQ ID NO: 158007 - DNA, 71 bp, Homo sapiens
cattcggagatctttgtctaaatcagttaatggctacaaaatggcgtttttctaattccattatttctctt

SEQ ID NO: 158008 - DNA, 71 bp, Homo sapiens
gtctaaatcagttaatggctacaaaatggcgtttttctaattccattatttctctttacatttattggctg

SEQ ID NO: 158009 - DNA, 71 bp, Homo sapiens
atcagttaatggctacaaaatggcgtttttctaattccattatttctctttacatttattggctggaattc

SEQ ID NO: 158010 - DNA, 69 bp, Homo sapiens
tggctacaaaatggcgtttttctaattccattatttctctttacatttattggctggaattctttaaaa

SEQ ID NO: 158011 - DNA, 72 bp, Homo sapiens
tggcgtttttctaattccattatttctctttacatttattggctggaattctttaaaagatatgtagacata

SEQ ID NO: 158012 - DNA, 74 bp, Homo sapiens
attccattatttctctttacatttattggctggaattctttaaaagatatgtagacataaattctgagctcctg

SEQ ID NO: 158013 - DNA, 75 bp, Homo sapiens
tctctttacatttattggctggaattctttaaaagatatgtagacataaattctgagctcctgtattgcttattt

SEQ ID NO: 158014 - DNA, 75 bp, Homo sapiens
acatttattggctggaattctttaaaagatatgtagacataaattctgagctcctgtattgcttattttccagag

SEQ ID NO: 158015 - DNA, 75 bp, Homo sapiens
gctggaattctttaaaagatatgtagacataaattctgagctcctgtattgcttattttccagagtaaggagttg

SEQ ID NO: 158016 - DNA, 76 bp, Homo sapiens
atatgtagacataaattctgagctcctgtattgcttattttccagagtaaggagttggttgctctagttaccttca

SEQ ID NO: 158017 - DNA, 75 bp, Homo sapiens
taaattctgagctcctgtattgcttattttccagagtaaggagttggttgctctagttaccttcagtgctaacat

SEQ ID NO: 158018 - DNA, 73 bp, Homo sapiens
tcctgtattgcttattttccagagtaaggagttggttgctctagttaccttcagtgctaacattgattttgtt

SEQ ID NO: 158019 - DNA, 72 bp, Homo sapiens
ttgcttattttccagagtaaggagttggttgctctagttaccttcagtgctaacattgattttgttttgttg

SEQ ID NO: 158020 - DNA, 70 bp, Homo sapiens
agtaaggagttggttgctctagttaccttcagtgctaacattgattttgttttgttggtgttctcatttt

SEQ ID NO: 158021 - DNA, 70 bp, Homo sapiens
agttggttgctctagttaccttcagtgctaacattgattttgttttgttggtgttctcatttttctttgg

SEQ ID NO: 158022 - DNA, 74 bp, Homo sapiens
gctctagttaccttcagtgctaacattgattttgttttgttggtgttctcatttttctttggtataatgagctg

SEQ ID NO: 158023 - DNA, 72 bp, Homo sapiens
ccttcagtgctaacattgattttgttttgttggtgttctcatttttctttggtataatgagctggtggattt

SEQ ID NO: 158024 - DNA, 73 bp, Homo sapiens
cattgattttgttttgttggtgttctcatttttctttggtataatgagctggtggatttttatgtattccatg

SEQ ID NO: 158025 - DNA, 73 bp, Homo sapiens
gttctcatttttctttggtataatgagctggtggatttttatgtattccatgtttcagtaacttgaggtcatt

SEQ ID NO: 158026 - DNA, 75 bp, Homo sapiens
tttctttggtataatgagctggtggatttttatgtattccatgtttcagtaacttgaggtcatttctgctggtat

SEQ ID NO: 158027 - DNA, 79 bp, Homo sapiens
tataatgagctggtggatttttatgtattccatgtttcagtaacttgaggtcatttctgctggtattcagattgtccca

SEQ ID NO: 158028 - DNA, 76 bp, Homo sapiens
tggatttttatgtattccatgtttcagtaacttgaggtcatttctgctggtattcagattgtcccaaatttgtcca

SEQ ID NO: 158029 - DNA, 78 bp, Homo sapiens
tatgtattccatgtttcagtaacttgaggtcatttctgctggtattcagattgtcccaaatttgtccagctgcagttt

SEQ ID NO: 158030 - DNA, 75 bp, Homo sapiens
atgtttcagtaacttgaggtcatttctgctggtattcagattgtcccaaatttgtccagctgcagtttttggttg

SEQ ID NO: 158031 - DNA, 74 bp, Homo sapiens
atttctgctggtattcagattgtcccaaatttgtccagctgcagtttttggttggctagagggttcttttgata

SEQ ID NO: 158032 - DNA, 74 bp, Homo sapiens
tattcagattgtcccaaatttgtccagctgcagtttttggttggctagagggttcttttgatatgagttagtct

SEQ ID NO: 158033 - DNA, 73 bp, Homo sapiens
ttgtcccaaatttgtccagctgcagtttttggttggctagagggttcttttgatatgagttagtctttgagaa

SEQ ID NO: 158034 - DNA, 71 bp, Homo sapiens
aaatttgtccagctgcagtttttggttggctagagggttcttttgatatgagttagtctttgagaacttcc

SEQ ID NO: 158035 - DNA, 71 bp, Homo sapiens
cagtttttggttggctagagggttcttttgatatgagttagtctttgagaacttccttgttttccagcata

SEQ ID NO: 158036 - DNA, 72 bp, Homo sapiens
tttggttggctagagggttcttttgatatgagttagtctttgagaacttccttgttttccagcataacaaga

SEQ ID NO: 158037 - DNA, 73 bp, Homo sapiens
ggttcttttgatatgagttagtctttgagaacttccttgttttccagcataacaagatgtcccaaactcatct

SEQ ID NO: 158038 - DNA, 75 bp, Homo sapiens
ttttgatatgagttagtctttgagaacttccttgttttccagcataacaagatgtcccaaactcatcttgtacat

SEQ ID NO: 158039 - DNA, 74 bp, Homo sapiens
ttagtctttgagaacttccttgttttccagcataacaagatgtcccaaactcatcttgtacattttctgaccta

SEQ ID NO: 158040 - DNA, 73 bp, Homo sapiens
acttccttgttttccagcataacaagatgtcccaaactcatcttgtacattttctgacctagacctggattaa

SEQ ID NO: 158041 - DNA, 75 bp, Homo sapiens
ttgttttccagcataacaagatgtcccaaactcatcttgtacattttctgacctagacctggattaagccatttc

SEQ ID NO: 158042 - DNA, 75 bp, Homo sapiens
ataacaagatgtcccaaactcatcttgtacattttctgacctagacctggattaagccatttctccaagtagctg

SEQ ID NO: 158043 - DNA, 73 bp, Homo sapiens
tcccaaactcatcttgtacattttctgacctagacctggattaagccatttctccaagtagctgtggtttctt

SEQ ID NO: 158044 - DNA, 72 bp, Homo sapiens
tcttgtacattttctgacctagacctggattaagccatttctccaagtagctgtggtttcttttagtggtat

SEQ ID NO: 158045 - DNA, 71 bp, Homo sapiens
tacattttctgacctagacctggattaagccatttctccaagtagctgtggtttcttttagtggtatttaa

SEQ ID NO: 158046 - DNA, 72 bp, Homo sapiens
tagacctggattaagccatttctccaagtagctgtggtttcttttagtggtatttaagagactacagtctaa

SEQ ID NO: 158047 - DNA, 73 bp, Homo sapiens
atttctccaagtagctgtggtttcttttagtggtatttaagagactacagtctaagtgctagagatgttcatt

SEQ ID NO: 158048 - DNA, 74 bp, Homo sapiens
gctgtggtttcttttagtggtatttaagagactacagtctaagtgctagagatgttcatttttacagattgttg

SEQ ID NO: 158049 - DNA, 74 bp, Homo sapiens
tggtatttaagagactacagtctaagtgctagagatgttcatttttacagattgttgtttgcttctgggccttt

SEQ ID NO: 158050 - DNA, 73 bp, Homo sapiens
tctaagtgctagagatgttcatttttacagattgttgtttgcttctgggccttttcagtgggaaaaactagga

SEQ ID NO: 158051 - DNA, 70 bp, Homo sapiens
gatgttcatttttacagattgttgtttgcttctgggccttttcagtgggaaaaactaggaggtatttata

SEQ ID NO: 158052 - DNA, 68 bp, Homo sapiens
tttacagattgttgtttgcttctgggccttttcagtgggaaaaactaggaggtatttatattttgtgg

SEQ ID NO: 158053 - DNA, 67 bp, Homo sapiens
cttctgggccttttcagtgggaaaaactaggaggtatttatattttgtggggagaaaaatctgtata

SEQ ID NO: 158054 - DNA, 70 bp, Homo sapiens
tcagtgggaaaaactaggaggtatttatattttgtggggagaaaaatctgtatatttctactgatgtttc

SEQ ID NO: 158055 - DNA, 68 bp, Homo sapiens
gggaaaaactaggaggtatttatattttgtggggagaaaaatctgtatatttctactgatgtttccaa

SEQ ID NO: 158056 - DNA, 74 bp, Homo sapiens
gtatttatattttgtggggagaaaaatctgtatatttctactgatgtttccaattcagaatggccttgtatggc

SEQ ID NO: 158057 - DNA, 73 bp, Homo sapiens
tttgtggggagaaaaatctgtatatttctactgatgtttccaattcagaatggccttgtatggcttttactta

SEQ ID NO: 158058 - DNA, 72 bp, Homo sapiens
gggagaaaaatctgtatatttctactgatgtttccaattcagaatggccttgtatggcttttacttaattta

SEQ ID NO: 158059 - DNA, 71 bp, Homo sapiens
atctgtatatttctactgatgtttccaattcagaatggccttgtatggcttttacttaatttatttaattt

SEQ ID NO: 158060 - DNA, 71 bp, Homo sapiens
ctgatgtttccaattcagaatggccttgtatggcttttacttaatttatttaattttatatctcttttctc

SEQ ID NO: 158061 - DNA, 72 bp, Homo sapiens
tccaattcagaatggccttgtatggcttttacttaatttatttaattttatatctcttttctcttacattga

SEQ ID NO: 158062 - DNA, 70 bp, Homo sapiens
ttatttaattttatatctcttttctcttacattgaaaaccttgtcactgtataaacacaactacctgttg

SEQ ID NO: 158063 - DNA, 74 bp, Homo sapiens
ttatatctcttttctcttacattgaaaaccttgtcactgtataaacacaactacctgttggctttattgtatca

SEQ ID NO: 158064 - DNA, 73 bp, Homo sapiens
ctcttttctcttacattgaaaaccttgtcactgtataaacacaactacctgttggctttattgtatcatatag

SEQ ID NO: 158065 - DNA, 74 bp, Homo sapiens
cattgaaaaccttgtcactgtataaacacaactacctgttggctttattgtatcatatagttattattacaaca

SEQ ID NO: 158066 - DNA, 75 bp, Homo sapiens
accttgtcactgtataaacacaactacctgttggctttattgtatcatatagttattattacaacatattgccag

SEQ ID NO: 158067 - DNA, 76 bp, Homo sapiens
ctacctgttggctttattgtatcatatagttattattacaacatattgccagtattattactaacaacaggatatc

SEQ ID NO: 158068 - DNA, 78 bp, Homo sapiens
ggctttattgtatcatatagttattattacaacatattgccagtattattactaacaacaggatatctgaatgggcat

SEQ ID NO: 158069 - DNA, 73 bp, Homo sapiens
atagttattattacaacatattgccagtattattactaacaacaggatatctgaatgggcatttaaaaaattc

SEQ ID NO: 158070 - DNA, 77 bp, Homo sapiens
tgccagtattattactaacaacaggatatctgaatgggcatttaaaaaattctgcaaaattatttgcagatactgac

SEQ ID NO: 158071 - DNA, 76 bp, Homo sapiens
actaacaacaggatatctgaatgggcatttaaaaaattctgcaaaattatttgcagatactgacttgtcagtagac

SEQ ID NO: 158072 - DNA, 78 bp, Homo sapiens
aacaggatatctgaatgggcatttaaaaaattctgcaaaattatttgcagatactgacttgtcagtagactagtctgc

SEQ ID NO: 158073 - DNA, 79 bp, Homo sapiens
tctgaatgggcatttaaaaaattctgcaaaattatttgcagatactgacttgtcagtagactagtctgctggcaattta

SEQ ID NO: 158074 - DNA, 76 bp, Homo sapiens
tgggcatttaaaaaattctgcaaaattatttgcagatactgacttgtcagtagactagtctgctggcaatttaaag

SEQ ID NO: 158075 - DNA, 77 bp, Homo sapiens
ggcatttaaaaaattctgcaaaattatttgcagatactgacttgtcagtagactagtctgctggcaatttaaagtca

SEQ ID NO: 158076 - DNA, 76 bp, Homo sapiens
aaaattctgcaaaattatttgcagatactgacttgtcagtagactagtctgctggcaatttaaagtcaaaagctgt

SEQ ID NO: 158077 - DNA, 76 bp, Homo sapiens
caaaattatttgcagatactgacttgtcagtagactagtctgctggcaatttaaagtcaaaagctgttgtccaaaa

SEQ ID NO: 158078 - DNA, 77 bp, Homo sapiens
aaattatttgcagatactgacttgtcagtagactagtctgctggcaatttaaagtcaaaagctgttgtccaaaatca

SEQ ID NO: 158079 - DNA, 80 bp, Homo sapiens
ttatttgcagatactgacttgtcagtagactagtctgctggcaatttaaagtcaaaagctgttgtccaaaatcactcaga

SEQ ID NO: 158080 - DNA, 76 bp, Homo sapiens
agatactgacttgtcagtagactagtctgctggcaatttaaagtcaaaagctgttgtccaaaatcactcagaaaaa

SEQ ID NO: 158081 - DNA, 75 bp, Homo sapiens
atactgacttgtcagtagactagtctgctggcaatttaaagtcaaaagctgttgtccaaaatcactcagaaaaaa

SEQ ID NO: 158082 - DNA, 73 bp, Homo sapiens
acttgtcagtagactagtctgctggcaatttaaagtcaaaagctgttgtccaaaatcactcagaaaaaaatct

SEQ ID NO: 158083 - DNA, 73 bp, Homo sapiens
ctagtctgctggcaatttaaagtcaaaagctgttgtccaaaatcactcagaaaaaaatcttttttctgtatgc

SEQ ID NO: 158084 - DNA, 75 bp, Homo sapiens
tgctggcaatttaaagtcaaaagctgttgtccaaaatcactcagaaaaaaatcttttttctgtatgctaatatga

SEQ ID NO: 158085 - DNA, 75 bp, Homo sapiens
gctgttgtccaaaatcactcagaaaaaaatcttttttctgtatgctaatatgaccaacttgatagagagttaaga

SEQ ID NO: 158086 - DNA, 76 bp, Homo sapiens
atcactcagaaaaaaatcttttttctgtatgctaatatgaccaacttgatagagagttaagactcattcatttcag

SEQ ID NO: 158087 - DNA, 72 bp, Homo sapiens
aaaaaatcttttttctgtatgctaatatgaccaacttgatagagagttaagactcattcatttcagtttgtt

SEQ ID NO: 158088 - DNA, 77 bp, Homo sapiens
ttttctgtatgctaatatgaccaacttgatagagagttaagactcattcatttcagtttgttttatgtttccagcga

SEQ ID NO: 158089 - DNA, 78 bp, Homo sapiens
tgtatgctaatatgaccaacttgatagagagttaagactcattcatttcagtttgttttatgtttccagcgattgtct

SEQ ID NO: 158090 - DNA, 71 bp, Homo sapiens
gatagagagttaagactcattcatttcagtttgttttatgtttccagcgattgtctttttttgttaaatag

SEQ ID NO: 158091 - DNA, 71 bp, Homo sapiens
gactcattcatttcagtttgttttatgtttccagcgattgtctttttttgttaaatagttacatggttcca

SEQ ID NO: 158092 - DNA, 72 bp, Homo sapiens
tcatttcagtttgttttatgtttccagcgattgtctttttttgttaaatagttacatggttccagagctgaa

SEQ ID NO: 158093 - DNA, 72 bp, Homo sapiens
gttttatgtttccagcgattgtctttttttgttaaatagttacatggttccagagctgaaactgtgtgataa

SEQ ID NO: 158094 - DNA, 72 bp, Homo sapiens
gtttccagcgattgtctttttttgttaaatagttacatggttccagagctgaaactgtgtgataaagtacat

SEQ ID NO: 158095 - DNA, 70 bp, Homo sapiens
gtctttttttgttaaatagttacatggttccagagctgaaactgtgtgataaagtacatttagaaaagct

SEQ ID NO: 158096 - DNA, 76 bp, Homo sapiens
tgttaaatagttacatggttccagagctgaaactgtgtgataaagtacatttagaaaagctttgcttccatcttga

SEQ ID NO: 158097 - DNA, 76 bp, Homo sapiens
tagttacatggttccagagctgaaactgtgtgataaagtacatttagaaaagctttgcttccatcttgattatgtt

SEQ ID NO: 158098 - DNA, 74 bp, Homo sapiens
gttccagagctgaaactgtgtgataaagtacatttagaaaagctttgcttccatcttgattatgttttggtttg

SEQ ID NO: 158099 - DNA, 75 bp, Homo sapiens
aactgtgtgataaagtacatttagaaaagctttgcttccatcttgattatgttttggtttgttcatgcatggaag

SEQ ID NO: 158100 - DNA, 76 bp, Homo sapiens
aagtacatttagaaaagctttgcttccatcttgattatgttttggtttgttcatgcatggaaggcatctctttgaa

SEQ ID NO: 158101 - DNA, 77 bp, Homo sapiens
atttagaaaagctttgcttccatcttgattatgttttggtttgttcatgcatggaaggcatctctttgaagatgtaa

SEQ ID NO: 158102 - DNA, 77 bp, Homo sapiens
tttgcttccatcttgattatgttttggtttgttcatgcatggaaggcatctctttgaagatgtaaccaaatacaggt

SEQ ID NO: 158103 - DNA, 77 bp, Homo sapiens
tatgttttggtttgttcatgcatggaaggcatctctttgaagatgtaaccaaatacaggttgtgtgtttgtgtcctg

SEQ ID NO: 158104 - DNA, 79 bp, Homo sapiens
tttgttcatgcatggaaggcatctctttgaagatgtaaccaaatacaggttgtgtgtttgtgtcctgtcttttcatata

SEQ ID NO: 158105 - DNA, 80 bp, Homo sapiens
atgtaaccaaatacaggttgtgtgtttgtgtcctgtcttttcatataatagatgcttatgacacatgctgttgtgcgttg

SEQ ID NO: 158106 - DNA, 79 bp, Homo sapiens
aatacaggttgtgtgtttgtgtcctgtcttttcatataatagatgcttatgacacatgctgttgtgcgttgtgcttttt

SEQ ID NO: 158107 - DNA, 89 bp, Homo sapiens
tataatagatgcttatgacacatgctgttgtgcgttgtgcttttttcacttaactgtgtatcttatgcatcatgccatatcacagtata

SEQ ID NO: 158108 - DNA, 88 bp, Homo sapiens
tagatgcttatgacacatgctgttgtgcgttgtgcttttttcacttaactgtgtatcttatgcatcatgccatatcacagtataaaga

SEQ ID NO: 158109 - DNA, 83 bp, Homo sapiens
acacatgctgttgtgcgttgtgcttttttcacttaactgtgtatcttatgcatcatgccatatcacagtataaagagttttgc

SEQ ID NO: 158110 - DNA, 80 bp, Homo sapiens
tgttgtgcgttgtgcttttttcacttaactgtgtatcttatgcatcatgccatatcacagtataaagagttttgccctaa

SEQ ID NO: 158111 - DNA, 78 bp, Homo sapiens
ttttttcacttaactgtgtatcttatgcatcatgccatatcacagtataaagagttttgccctaactcttaatggcac

SEQ ID NO: 158112 - DNA, 77 bp, Homo sapiens
ttaactgtgtatcttatgcatcatgccatatcacagtataaagagttttgccctaactcttaatggcaccgttttat

SEQ ID NO: 158113 - DNA, 80 bp, Homo sapiens
tatcttatgcatcatgccatatcacagtataaagagttttgccctaactcttaatggcaccgttttattccactcagtga

SEQ ID NO: 158114 - DNA, 76 bp, Homo sapiens
atcatgccatatcacagtataaagagttttgccctaactcttaatggcaccgttttattccactcagtgaatatac

SEQ ID NO: 158115 - DNA, 73 bp, Homo sapiens
tatcacagtataaagagttttgccctaactcttaatggcaccgttttattccactcagtgaatatacgagaat

SEQ ID NO: 158116 - DNA, 70 bp, Homo sapiens
tttgccctaactcttaatggcaccgttttattccactcagtgaatatacgagaattttttcaaccagttc

SEQ ID NO: 158117 - DNA, 71 bp, Homo sapiens
accgttttattccactcagtgaatatacgagaattttttcaaccagttccctactgctggatcattttcaa

SEQ ID NO: 158118 - DNA, 73 bp, Homo sapiens
ttccactcagtgaatatacgagaattttttcaaccagttccctactgctggatcattttcaaacatttgcttt

SEQ ID NO: 158119 - DNA, 74 bp, Homo sapiens
tttttcaaccagttccctactgctggatcattttcaaacatttgcttttataaacattgccacagtgaatagcc

SEQ ID NO: 158120 - DNA, 74 bp, Homo sapiens
gatcattttcaaacatttgcttttataaacattgccacagtgaatagcctttcgcatttcatatgtattttttt

SEQ ID NO: 158121 - DNA, 73 bp, Homo sapiens
tttgcttttataaacattgccacagtgaatagcctttcgcatttcatatgtattttttttagtgtatctttgg

SEQ ID NO: 158122 - DNA, 77 bp, Homo sapiens
tataaacattgccacagtgaatagcctttcgcatttcatatgtattttttttagtgtatctttggtatagatccaca

SEQ ID NO: 158123 - DNA, 76 bp, Homo sapiens
ccacagtgaatagcctttcgcatttcatatgtattttttttagtgtatctttggtatagatccacaagagaattgc

SEQ ID NO: 158124 - DNA, 77 bp, Homo sapiens
tgaatagcctttcgcatttcatatgtattttttttagtgtatctttggtatagatccacaagagaattgctgtttca

SEQ ID NO: 158125 - DNA, 77 bp, Homo sapiens
cgcatttcatatgtattttttttagtgtatctttggtatagatccacaagagaattgctgtttcaaaatgtacatga

SEQ ID NO: 158126 - DNA, 74 bp, Homo sapiens
gtattttttttagtgtatctttggtatagatccacaagagaattgctgtttcaaaatgtacatgagtatctaat

SEQ ID NO: 158127 - DNA, 76 bp, Homo sapiens
ttagtgtatctttggtatagatccacaagagaattgctgtttcaaaatgtacatgagtatctaattttaccaaatg

SEQ ID NO: 158128 - DNA, 79 bp, Homo sapiens
tggtatagatccacaagagaattgctgtttcaaaatgtacatgagtatctaattttaccaaatgttgccaaattctgca

SEQ ID NO: 158129 - DNA, 76 bp, Homo sapiens
atccacaagagaattgctgtttcaaaatgtacatgagtatctaattttaccaaatgttgccaaattctgcaccttg

SEQ ID NO: 158130 - DNA, 71 bp, Homo sapiens
gtttcaaaatgtacatgagtatctaattttaccaaatgttgccaaattctgcaccttgggtatatactttt

SEQ ID NO: 158131 - DNA, 69 bp, Homo sapiens
gtacatgagtatctaattttaccaaatgttgccaaattctgcaccttgggtatatacttttttttcccc

SEQ ID NO: 158132 - DNA, 68 bp, Homo sapiens
taccaaatgttgccaaattctgcaccttgggtatatacttttttttccccttcagccccacaaaaaga

SEQ ID NO: 158133 - DNA, 65 bp, Homo sapiens
aaattctgcaccttgggtatatacttttttttccccttcagccccacaaaaagactggtttcaaa

SEQ ID NO: 158134 - DNA, 64 bp, Homo sapiens
cttgggtatatacttttttttccccttcagccccacaaaaagactggtttcaaaccttcagatt

SEQ ID NO: 158135 - DNA, 64 bp, Homo sapiens
tacttttttttccccttcagccccacaaaaagactggtttcaaaccttcagatttttgccaatt

SEQ ID NO: 158136 - DNA, 65 bp, Homo sapiens
tttttccccttcagccccacaaaaagactggtttcaaaccttcagatttttgccaatttgggtgt

SEQ ID NO: 158137 - DNA, 69 bp, Homo sapiens
ggtttcaaaccttcagatttttgccaatttgggtgttgaaaaatggcattttactattagtattgtcta

SEQ ID NO: 158138 - DNA, 68 bp, Homo sapiens
cttcagatttttgccaatttgggtgttgaaaaatggcattttactattagtattgtctattttaaagt

SEQ ID NO: 158139 - DNA, 69 bp, Homo sapiens
tgccaatttgggtgttgaaaaatggcattttactattagtattgtctattttaaagttgttttattgtg

SEQ ID NO: 158140 - DNA, 67 bp, Homo sapiens
gggtgttgaaaaatggcattttactattagtattgtctattttaaagttgttttattgtgggtgagg

SEQ ID NO: 158141 - DNA, 69 bp, Homo sapiens
tggcattttactattagtattgtctattttaaagttgttttattgtgggtgaggttgttcatctttttg

SEQ ID NO: 158142 - DNA, 68 bp, Homo sapiens
ttactattagtattgtctattttaaagttgttttattgtgggtgaggttgttcatctttttgtgtatt

SEQ ID NO: 158143 - DNA, 68 bp, Homo sapiens
tctattttaaagttgttttattgtgggtgaggttgttcatctttttgtgtatttaagggccgattcac

SEQ ID NO: 158144 - DNA, 70 bp, Homo sapiens
agttgttttattgtgggtgaggttgttcatctttttgtgtatttaagggccgattcactactttgtatgc

SEQ ID NO: 158145 - DNA, 73 bp, Homo sapiens
ttttattgtgggtgaggttgttcatctttttgtgtatttaagggccgattcactactttgtatgctgcctgaa

SEQ ID NO: 158146 - DNA, 70 bp, Homo sapiens
ggtgaggttgttcatctttttgtgtatttaagggccgattcactactttgtatgctgcctgaaggttttt

SEQ ID NO: 158147 - DNA, 70 bp, Homo sapiens
tgtgtatttaagggccgattcactactttgtatgctgcctgaaggtttttttgggtgcccatttttctat

SEQ ID NO: 158148 - DNA, 69 bp, Homo sapiens
tactttgtatgctgcctgaaggtttttttgggtgcccatttttctattgggttattggttcgttcttca

SEQ ID NO: 158149 - DNA, 64 bp, Homo sapiens
gaaggtttttttgggtgcccatttttctattgggttattggttcgttcttcacaaattttagaa

SEQ ID NO: 158150 - DNA, 66 bp, Homo sapiens
ttttctattgggttattggttcgttcttcacaaattttagaaactctttatctgttaaagaaatta

SEQ ID NO: 158151 - DNA, 66 bp, Homo sapiens
tgggttattggttcgttcttcacaaattttagaaactctttatctgttaaagaaattatatttctt

SEQ ID NO: 158152 - DNA, 67 bp, Homo sapiens
cacaaattttagaaactctttatctgttaaagaaattatatttctttctgtgaaacaagttggaaat

SEQ ID NO: 158153 - DNA, 65 bp, Homo sapiens
gaaactctttatctgttaaagaaattatatttctttctgtgaaacaagttggaaatttttttccc

SEQ ID NO: 158154 - DNA, 65 bp, Homo sapiens
ctgttaaagaaattatatttctttctgtgaaacaagttggaaatttttttcccccagtgtgttac

SEQ ID NO: 158155 - DNA, 66 bp, Homo sapiens
ttatatttctttctgtgaaacaagttggaaatttttttcccccagtgtgttacttgtcttggtact

SEQ ID NO: 158156 - DNA, 66 bp, Homo sapiens
ttctgtgaaacaagttggaaatttttttcccccagtgtgttacttgtcttggtactttacctattg

SEQ ID NO: 158157 - DNA, 65 bp, Homo sapiens
caagttggaaatttttttcccccagtgtgttacttgtcttggtactttacctattgtgtgctttt

SEQ ID NO: 158158 - DNA, 65 bp, Homo sapiens
ggaaatttttttcccccagtgtgttacttgtcttggtactttacctattgtgtgctttttgaatt

SEQ ID NO: 158159 - DNA, 69 bp, Homo sapiens
cccagtgtgttacttgtcttggtactttacctattgtgtgctttttgaattttttgtgatatcaaagtt

SEQ ID NO: 158160 - DNA, 69 bp, Homo sapiens
gtgttacttgtcttggtactttacctattgtgtgctttttgaattttttgtgatatcaaagttttacat

SEQ ID NO: 158161 - DNA, 70 bp, Homo sapiens
gtgtgctttttgaattttttgtgatatcaaagttttacattgtcaaacttattaacatttctttaattga

SEQ ID NO: 158162 - DNA, 69 bp, Homo sapiens
tttttgtgatatcaaagttttacattgtcaaacttattaacatttctttaattgactttggatttcaag

SEQ ID NO: 158163 - DNA, 71 bp, Homo sapiens
gtgatatcaaagttttacattgtcaaacttattaacatttctttaattgactttggatttcaagtcatggt

SEQ ID NO: 158164 - DNA, 70 bp, Homo sapiens
ttacattgtcaaacttattaacatttctttaattgactttggatttcaagtcatggttaggaagcttttc

SEQ ID NO: 158165 - DNA, 70 bp, Homo sapiens
catttctttaattgactttggatttcaagtcatggttaggaagcttttcttatttctaagttttcatgga

SEQ ID NO: 158166 - DNA, 68 bp, Homo sapiens
ctttggatttcaagtcatggttaggaagcttttcttatttctaagttttcatggagtttatccatttt

SEQ ID NO: 158167 - DNA, 69 bp, Homo sapiens
gtcatggttaggaagcttttcttatttctaagttttcatggagtttatccattttttcttgtacttgtg

SEQ ID NO: 158168 - DNA, 67 bp, Homo sapiens
aggaagcttttcttatttctaagttttcatggagtttatccattttttcttgtacttgtgttgtttc

SEQ ID NO: 158169 - DNA, 69 bp, Homo sapiens
ttttcatggagtttatccattttttcttgtacttgtgttgtttcttttttgtatcccttgaccatttga

SEQ ID NO: 158170 - DNA, 67 bp, Homo sapiens
atggagtttatccattttttcttgtacttgtgttgtttcttttttgtatcccttgaccatttgaaat

SEQ ID NO: 158171 - DNA, 68 bp, Homo sapiens
tttttcttgtacttgtgttgtttcttttttgtatcccttgaccatttgaaatttatcttaatgtacag

SEQ ID NO: 158172 - DNA, 74 bp, Homo sapiens
tacttgtgttgtttcttttttgtatcccttgaccatttgaaatttatcttaatgtacagtgtgatgtatagatc

SEQ ID NO: 158173 - DNA, 72 bp, Homo sapiens
gtttcttttttgtatcccttgaccatttgaaatttatcttaatgtacagtgtgatgtatagatccagttttc

SEQ ID NO: 158174 - DNA, 75 bp, Homo sapiens
tttgtatcccttgaccatttgaaatttatcttaatgtacagtgtgatgtatagatccagttttctctttgccgtc

SEQ ID NO: 158175 - DNA, 77 bp, Homo sapiens
ttgaccatttgaaatttatcttaatgtacagtgtgatgtatagatccagttttctctttgccgtctgtctgtcccaa

SEQ ID NO: 158176 - DNA, 78 bp, Homo sapiens
tcttaatgtacagtgtgatgtatagatccagttttctctttgccgtctgtctgtcccaacacatttatgaagaacttc

SEQ ID NO: 158177 - DNA, 75 bp, Homo sapiens
agtgtgatgtatagatccagttttctctttgccgtctgtctgtcccaacacatttatgaagaacttcgtcttttc

SEQ ID NO: 158178 - DNA, 75 bp, Homo sapiens
tatagatccagttttctctttgccgtctgtctgtcccaacacatttatgaagaacttcgtcttttccacactgat

SEQ ID NO: 158179 - DNA, 74 bp, Homo sapiens
ttttctctttgccgtctgtctgtcccaacacatttatgaagaacttcgtcttttccacactgatttgagaccca

SEQ ID NO: 158180 - DNA, 74 bp, Homo sapiens
tctgtctgtcccaacacatttatgaagaacttcgtcttttccacactgatttgagacccacctaaaagtctaga

SEQ ID NO: 158181 - DNA, 69 bp, Homo sapiens
ccaacacatttatgaagaacttcgtcttttccacactgatttgagacccacctaaaagtctagactttt

SEQ ID NO: 158182 - DNA, 70 bp, Homo sapiens
agaacttcgtcttttccacactgatttgagacccacctaaaagtctagactttttctttcatttatgtca

SEQ ID NO: 158183 - DNA, 70 bp, Homo sapiens
tccacactgatttgagacccacctaaaagtctagactttttctttcatttatgtcaaggtggtgttttaa

SEQ ID NO: 158184 - DNA, 69 bp, Homo sapiens
ctgatttgagacccacctaaaagtctagactttttctttcatttatgtcaaggtggtgttttaaataga

SEQ ID NO: 158185 - DNA, 65 bp, Homo sapiens
aagtctagactttttctttcatttatgtcaaggtggtgttttaaatagagatttttatagttttt

SEQ ID NO: 158186 - DNA, 67 bp, Homo sapiens
ctttcatttatgtcaaggtggtgttttaaatagagatttttatagtttttttaaacatctagtaggc

SEQ ID NO: 158187 - DNA, 69 bp, Homo sapiens
tatgtcaaggtggtgttttaaatagagatttttatagtttttttaaacatctagtaggctgacccttca

SEQ ID NO: 158188 - DNA, 67 bp, Homo sapiens
ggtggtgttttaaatagagatttttatagtttttttaaacatctagtaggctgacccttcatattta

SEQ ID NO: 158189 - DNA, 68 bp, Homo sapiens
tagagatttttatagtttttttaaacatctagtaggctgacccttcatatttataattcttcttttcc

SEQ ID NO: 158190 - DNA, 72 bp, Homo sapiens
tatagtttttttaaacatctagtaggctgacccttcatatttataattcttcttttcctggattgctctgga

SEQ ID NO: 158191 - DNA, 73 bp, Homo sapiens
ttttaaacatctagtaggctgacccttcatatttataattcttcttttcctggattgctctggatttcttgct

SEQ ID NO: 158192 - DNA, 73 bp, Homo sapiens
atctagtaggctgacccttcatatttataattcttcttttcctggattgctctggatttcttgcttattttcc

SEQ ID NO: 158193 - DNA, 74 bp, Homo sapiens
gctgacccttcatatttataattcttcttttcctggattgctctggatttcttgcttattttcctcataggaaa

SEQ ID NO: 158194 - DNA, 72 bp, Homo sapiens
catatttataattcttcttttcctggattgctctggatttcttgcttattttcctcataggaaataaaatct

SEQ ID NO: 158195 - DNA, 71 bp, Homo sapiens
tcttcttttcctggattgctctggatttcttgcttattttcctcataggaaataaaatcttttaaattagc

SEQ ID NO: 158196 - DNA, 63 bp, Homo sapiens
accaacaaaaccattgtatttttagttactgttttcttaaatttataaattaagtgtgtaact

SEQ ID NO: 158197 - DNA, 64 bp, Homo sapiens
caaaaccattgtatttttagttactgttttcttaaatttataaattaagtgtgtaacttgattt

SEQ ID NO: 158198 - DNA, 65 bp, Homo sapiens
tcttaaatttataaattaagtgtgtaacttgatttttttcagaagaaaataagcaaaaggttttg

SEQ ID NO: 158199 - DNA, 67 bp, Homo sapiens
tataaattaagtgtgtaacttgatttttttcagaagaaaataagcaaaaggttttgttaatattaca

SEQ ID NO: 158200 - DNA, 67 bp, Homo sapiens
cttgatttttttcagaagaaaataagcaaaaggttttgttaatattacaagagaaattctgttttga

SEQ ID NO: 158201 - DNA, 66 bp, Homo sapiens
cagaagaaaataagcaaaaggttttgttaatattacaagagaaattctgttttgaaaaacaaactg

SEQ ID NO: 158202 - DNA, 71 bp, Homo sapiens
agcaaaaggttttgttaatattacaagagaaattctgttttgaaaaacaaactgttcaatgatgatattca

SEQ ID NO: 158203 - DNA, 73 bp, Homo sapiens
tttgttaatattacaagagaaattctgttttgaaaaacaaactgttcaatgatgatattcagtgtaatttgac

SEQ ID NO: 158204 - DNA, 73 bp, Homo sapiens
ttacaagagaaattctgttttgaaaaacaaactgttcaatgatgatattcagtgtaatttgacttcaaatttg

SEQ ID NO: 158205 - DNA, 74 bp, Homo sapiens
aattctgttttgaaaaacaaactgttcaatgatgatattcagtgtaatttgacttcaaatttgtcttcatgtcc

SEQ ID NO: 158206 - DNA, 77 bp, Homo sapiens
tgaaaaacaaactgttcaatgatgatattcagtgtaatttgacttcaaatttgtcttcatgtccttgataactataa

SEQ ID NO: 158207 - DNA, 75 bp, Homo sapiens
aacaaactgttcaatgatgatattcagtgtaatttgacttcaaatttgtcttcatgtccttgataactataattt

SEQ ID NO: 158208 - DNA, 76 bp, Homo sapiens
tgatgatattcagtgtaatttgacttcaaatttgtcttcatgtccttgataactataattttttgttgaaattgag

SEQ ID NO: 158209 - DNA, 72 bp, Homo sapiens
tcagtgtaatttgacttcaaatttgtcttcatgtccttgataactataattttttgttgaaattgagtttag

SEQ ID NO: 158210 - DNA, 72 bp, Homo sapiens
ttgacttcaaatttgtcttcatgtccttgataactataattttttgttgaaattgagtttagttgacacagt

SEQ ID NO: 158211 - DNA, 71 bp, Homo sapiens
tcatgtccttgataactataattttttgttgaaattgagtttagttgacacagttttcaaggtattctagt

SEQ ID NO: 158212 - DNA, 66 bp, Homo sapiens
actataattttttgttgaaattgagtttagttgacacagttttcaaggtattctagtttacttaag

SEQ ID NO: 158213 - DNA, 70 bp, Homo sapiens
tttgttgaaattgagtttagttgacacagttttcaaggtattctagtttacttaagtatttgaagtgaca

SEQ ID NO: 158214 - DNA, 71 bp, Homo sapiens
aattgagtttagttgacacagttttcaaggtattctagtttacttaagtatttgaagtgacatggaattca

SEQ ID NO: 158215 - DNA, 71 bp, Homo sapiens
agttgacacagttttcaaggtattctagtttacttaagtatttgaagtgacatggaattcataaattaatc

SEQ ID NO: 158216 - DNA, 68 bp, Homo sapiens
acagttttcaaggtattctagtttacttaagtatttgaagtgacatggaattcataaattaatctttt

SEQ ID NO: 158217 - DNA, 67 bp, Homo sapiens
aggtattctagtttacttaagtatttgaagtgacatggaattcataaattaatcttttttaaaacta

SEQ ID NO: 158218 - DNA, 69 bp, Homo sapiens
tacttaagtatttgaagtgacatggaattcataaattaatcttttttaaaactattaaaatgaatacag

SEQ ID NO: 158219 - DNA, 71 bp, Homo sapiens
gtatttgaagtgacatggaattcataaattaatcttttttaaaactattaaaatgaatacagttgtgataa

SEQ ID NO: 158220 - DNA, 69 bp, Homo sapiens
tgacatggaattcataaattaatcttttttaaaactattaaaatgaatacagttgtgataaattgtttt

SEQ ID NO: 158221 - DNA, 68 bp, Homo sapiens
aaattaatcttttttaaaactattaaaatgaatacagttgtgataaattgtttttcgtgtgcttgaca

SEQ ID NO: 158222 - DNA, 71 bp, Homo sapiens
tttttaaaactattaaaatgaatacagttgtgataaattgtttttcgtgtgcttgacaatactgatctagt

SEQ ID NO: 158223 - DNA, 73 bp, Homo sapiens
ctattaaaatgaatacagttgtgataaattgtttttcgtgtgcttgacaatactgatctagttaattggacgg

SEQ ID NO: 158224 - DNA, 75 bp, Homo sapiens
tgataaattgtttttcgtgtgcttgacaatactgatctagttaattggacggttgaactacttgttgaaatgagc

SEQ ID NO: 158225 - DNA, 77 bp, Homo sapiens
gtgtgcttgacaatactgatctagttaattggacggttgaactacttgttgaaatgagccaagttgtctcctgcctc

SEQ ID NO: 158226 - DNA, 74 bp, Homo sapiens
aatactgatctagttaattggacggttgaactacttgttgaaatgagccaagttgtctcctgcctccaggagta

SEQ ID NO: 158227 - DNA, 73 bp, Homo sapiens
tagttaattggacggttgaactacttgttgaaatgagccaagttgtctcctgcctccaggagtaccttggcaa

SEQ ID NO: 158228 - DNA, 72 bp, Homo sapiens
acggttgaactacttgttgaaatgagccaagttgtctcctgcctccaggagtaccttggcaaatgtcttctt

SEQ ID NO: 158229 - DNA, 72 bp, Homo sapiens
aactacttgttgaaatgagccaagttgtctcctgcctccaggagtaccttggcaaatgtcttctttcttaaa

SEQ ID NO: 158230 - DNA, 69 bp, Homo sapiens
tttttaaaaattatatatcagaagataagtttaatcttacaaaacgaagtagtaagcctggccacatta

SEQ ID NO: 158231 - DNA, 71 bp, Homo sapiens
attatatatcagaagataagtttaatcttacaaaacgaagtagtaagcctggccacattacttagtgaaaa

SEQ ID NO: 158232 - DNA, 67 bp, Homo sapiens
gaagataagtttaatcttacaaaacgaagtagtaagcctggccacattacttagtgaaaaaagtagg

SEQ ID NO: 158233 - DNA, 70 bp, Homo sapiens
ttaatcttacaaaacgaagtagtaagcctggccacattacttagtgaaaaaagtaggtgagttcagaatc

SEQ ID NO: 158234 - DNA, 72 bp, Homo sapiens
aaaacgaagtagtaagcctggccacattacttagtgaaaaaagtaggtgagttcagaatccactctgcatta

SEQ ID NO: 158235 - DNA, 74 bp, Homo sapiens
aagtagtaagcctggccacattacttagtgaaaaaagtaggtgagttcagaatccactctgcattactgaccaa

SEQ ID NO: 158236 - DNA, 71 bp, Homo sapiens
acttagtgaaaaaagtaggtgagttcagaatccactctgcattactgaccaaaagttaagtctttgtgaat

SEQ ID NO: 158237 - DNA, 72 bp, Homo sapiens
aaaagtaggtgagttcagaatccactctgcattactgaccaaaagttaagtctttgtgaattgaacttattc

SEQ ID NO: 158238 - DNA, 75 bp, Homo sapiens
agttcagaatccactctgcattactgaccaaaagttaagtctttgtgaattgaacttattcttgcagtttggtca

SEQ ID NO: 158239 - DNA, 70 bp, Homo sapiens
attactgaccaaaagttaagtctttgtgaattgaacttattcttgcagtttggtcaggtccagtcacctt

SEQ ID NO: 158240 - DNA, 69 bp, Homo sapiens
accaaaagttaagtctttgtgaattgaacttattcttgcagtttggtcaggtccagtcacctttcttat

SEQ ID NO: 158241 - DNA, 69 bp, Homo sapiens
attgaacttattcttgcagtttggtcaggtccagtcacctttcttatttaatttaaaatgaggattccc

SEQ ID NO: 158242 - DNA, 69 bp, Homo sapiens
ttcttgcagtttggtcaggtccagtcacctttcttatttaatttaaaatgaggattccccccttagcta

SEQ ID NO: 158243 - DNA, 71 bp, Homo sapiens
tttggtcaggtccagtcacctttcttatttaatttaaaatgaggattccccccttagctagcattcattga

SEQ ID NO: 158244 - DNA, 70 bp, Homo sapiens
agtcacctttcttatttaatttaaaatgaggattccccccttagctagcattcattgactttgagagtac

SEQ ID NO: 158245 - DNA, 72 bp, Homo sapiens
ttcttatttaatttaaaatgaggattccccccttagctagcattcattgactttgagagtactagaacagcc

SEQ ID NO: 158246 - DNA, 73 bp, Homo sapiens
tttaaaatgaggattccccccttagctagcattcattgactttgagagtactagaacagcctggtttattcta

SEQ ID NO: 158247 - DNA, 74 bp, Homo sapiens
attccccccttagctagcattcattgactttgagagtactagaacagcctggtttattctagacagtaggaaga

SEQ ID NO: 158248 - DNA, 78 bp, Homo sapiens
ttagctagcattcattgactttgagagtactagaacagcctggtttattctagacagtaggaagatagcttatagctt

SEQ ID NO: 158249 - DNA, 75 bp, Homo sapiens
ttgagagtactagaacagcctggtttattctagacagtaggaagatagcttatagctttaacaactgtggttgat

SEQ ID NO: 158250 - DNA, 75 bp, Homo sapiens
tagacagtaggaagatagcttatagctttaacaactgtggttgatttttctcggagctggaataacatcaggaat

SEQ ID NO: 158251 - DNA, 74 bp, Homo sapiens
taggaagatagcttatagctttaacaactgtggttgatttttctcggagctggaataacatcaggaattttaga

SEQ ID NO: 158252 - DNA, 74 bp, Homo sapiens
ttaacaactgtggttgatttttctcggagctggaataacatcaggaattttagactccagtggtcacttagcta

SEQ ID NO: 158253 - DNA, 75 bp, Homo sapiens
gttgatttttctcggagctggaataacatcaggaattttagactccagtggtcacttagctacaccaaatagtga

SEQ ID NO: 158254 - DNA, 76 bp, Homo sapiens
tcggagctggaataacatcaggaattttagactccagtggtcacttagctacaccaaatagtgacctgaatgttta

SEQ ID NO: 158255 - DNA, 73 bp, Homo sapiens
aataacatcaggaattttagactccagtggtcacttagctacaccaaatagtgacctgaatgtttagacaagg

SEQ ID NO: 158256 - DNA, 73 bp, Homo sapiens
gaattttagactccagtggtcacttagctacaccaaatagtgacctgaatgtttagacaagggcctgtattat

SEQ ID NO: 158257 - DNA, 73 bp, Homo sapiens
gtcacttagctacaccaaatagtgacctgaatgtttagacaagggcctgtattatttaaacctcaggattgta

SEQ ID NO: 158258 - DNA, 73 bp, Homo sapiens
tacaccaaatagtgacctgaatgtttagacaagggcctgtattatttaaacctcaggattgtagtggataata

SEQ ID NO: 158259 - DNA, 72 bp, Homo sapiens
tgacctgaatgtttagacaagggcctgtattatttaaacctcaggattgtagtggataatacaacactttta

SEQ ID NO: 158260 - DNA, 70 bp, Homo sapiens
tgaatgtttagacaagggcctgtattatttaaacctcaggattgtagtggataatacaacacttttaggg

SEQ ID NO: 158261 - DNA, 69 bp, Homo sapiens
caagggcctgtattatttaaacctcaggattgtagtggataatacaacacttttagggtaaaattctgc

SEQ ID NO: 158262 - DNA, 69 bp, Homo sapiens
tatttaaacctcaggattgtagtggataatacaacacttttagggtaaaattctgctttaagcaaattg

SEQ ID NO: 158263 - DNA, 75 bp, Homo sapiens
gtagtggataatacaacacttttagggtaaaattctgctttaagcaaattgtgttcacttgtgatgcatcattac

SEQ ID NO: 158264 - DNA, 75 bp, Homo sapiens
atacaacacttttagggtaaaattctgctttaagcaaattgtgttcacttgtgatgcatcattacttttctgaga

SEQ ID NO: 158265 - DNA, 78 bp, Homo sapiens
tagggtaaaattctgctttaagcaaattgtgttcacttgtgatgcatcattacttttctgagaaatgataagtcatag

SEQ ID NO: 158266 - DNA, 80 bp, Homo sapiens
attctgctttaagcaaattgtgttcacttgtgatgcatcattacttttctgagaaatgataagtcatagtacagtagtcc

SEQ ID NO: 158267 - DNA, 79 bp, Homo sapiens
tttaagcaaattgtgttcacttgtgatgcatcattacttttctgagaaatgataagtcatagtacagtagtcccaccta

SEQ ID NO: 158268 - DNA, 80 bp, Homo sapiens
cttgtgatgcatcattacttttctgagaaatgataagtcatagtacagtagtcccacctatccactggttcactttctga

SEQ ID NO: 158269 - DNA, 76 bp, Homo sapiens
agaaatgataagtcatagtacagtagtcccacctatccactggttcactttctgaggttacagttagccaggatca

SEQ ID NO: 158270 - DNA, 75 bp, Homo sapiens
ataagtcatagtacagtagtcccacctatccactggttcactttctgaggttacagttagccaggatcaactgtg

SEQ ID NO: 158271 - DNA, 76 bp, Homo sapiens
gtacagtagtcccacctatccactggttcactttctgaggttacagttagccaggatcaactgtggtcagaacata

SEQ ID NO: 158272 - DNA, 74 bp, Homo sapiens
acctatccactggttcactttctgaggttacagttagccaggatcaactgtggtcagaacatacgaaatggaaa

SEQ ID NO: 158273 - DNA, 73 bp, Homo sapiens
tggttcactttctgaggttacagttagccaggatcaactgtggtcagaacatacgaaatggaaaatccaaaaa

SEQ ID NO: 158274 - DNA, 71 bp, Homo sapiens
actttctgaggttacagttagccaggatcaactgtggtcagaacatacgaaatggaaaatccaaaaataaa

SEQ ID NO: 158275 - DNA, 71 bp, Homo sapiens
ggttacagttagccaggatcaactgtggtcagaacatacgaaatggaaaatccaaaaataaacaactaata

SEQ ID NO: 158276 - DNA, 74 bp, Homo sapiens
gccaggatcaactgtggtcagaacatacgaaatggaaaatccaaaaataaacaactaatatgtttcgaattgca

SEQ ID NO: 158277 - DNA, 72 bp, Homo sapiens
actgtggtcagaacatacgaaatggaaaatccaaaaataaacaactaatatgtttcgaattgcatgacagtt

SEQ ID NO: 158278 - DNA, 72 bp, Homo sapiens
gaacatacgaaatggaaaatccaaaaataaacaactaatatgtttcgaattgcatgacagtttaaatagtga

SEQ ID NO: 158279 - DNA, 72 bp, Homo sapiens
ggaaaatccaaaaataaacaactaatatgtttcgaattgcatgacagtttaaatagtgatgaaacctctggc

SEQ ID NO: 158280 - DNA, 76 bp, Homo sapiens
aaataaacaactaatatgtttcgaattgcatgacagtttaaatagtgatgaaacctctggctgtccagctatgttc

SEQ ID NO: 158281 - DNA, 76 bp, Homo sapiens
aacaactaatatgtttcgaattgcatgacagtttaaatagtgatgaaacctctggctgtccagctatgttccaccc

SEQ ID NO: 158282 - DNA, 79 bp, Homo sapiens
atgtttcgaattgcatgacagtttaaatagtgatgaaacctctggctgtccagctatgttccacccgggatgtgaatca

SEQ ID NO: 158283 - DNA, 79 bp, Homo sapiens
tttaaatagtgatgaaacctctggctgtccagctatgttccacccgggatgtgaatcatccctttgtctgtcatctcca

SEQ ID NO: 158284 - DNA, 81 bp, Homo sapiens
aaacctctggctgtccagctatgttccacccgggatgtgaatcatccctttgtctgtcatctccatgctgtatatgcctgt

SEQ ID NO: 158285 - DNA, 86 bp, Homo sapiens
tggctgtccagctatgttccacccgggatgtgaatcatccctttgtctgtcatctccatgctgtatatgcctgttagtcacatata

SEQ ID NO: 158286 - DNA, 85 bp, Homo sapiens
tatgttccacccgggatgtgaatcatccctttgtctgtcatctccatgctgtatatgcctgttagtcacatatagctgcctcatt

SEQ ID NO: 158287 - DNA, 86 bp, Homo sapiens
acccgggatgtgaatcatccctttgtctgtcatctccatgctgtatatgcctgttagtcacatatagctgcctcatttatcagata

SEQ ID NO: 158288 - DNA, 93 bp, Homo sapiens
atcatccctttgtctgtcatctccatgctgtatatgcctgttagtcacatatagctgcctcatttatcagatagactgctgcgctgccacaga

SEQ ID NO: 158289 - DNA, 92 bp, Homo sapiens
ttgtctgtcatctccatgctgtatatgcctgttagtcacatatagctgcctcatttatcagatagactgctgcgctgccacagaacttgtgt

SEQ ID NO: 158290 - DNA, 90 bp, Homo sapiens
atctccatgctgtatatgcctgttagtcacatatagctgcctcatttatcagatagactgctgcgctgccacagaacttgtgttcaagta

SEQ ID NO: 158291 - DNA, 87 bp, Homo sapiens
tatatgcctgttagtcacatatagctgcctcatttatcagatagactgctgcgctgccacagaacttgtgttcaagtagcgcttatt

SEQ ID NO: 158292 - DNA, 84 bp, Homo sapiens
ttagtcacatatagctgcctcatttatcagatagactgctgcgctgccacagaacttgtgttcaagtagcgcttattttactta

SEQ ID NO: 158293 - DNA, 81 bp, Homo sapiens
acatatagctgcctcatttatcagatagactgctgcgctgccacagaacttgtgttcaagtagcgcttattttacttaagg

SEQ ID NO: 158294 - DNA, 81 bp, Homo sapiens
tcatttatcagatagactgctgcgctgccacagaacttgtgttcaagtagcgcttattttacttaagggccacaaaatgca

SEQ ID NO: 158295 - DNA, 79 bp, Homo sapiens
atcagatagactgctgcgctgccacagaacttgtgttcaagtagcgcttattttacttaagggccacaaaatgcaagag

SEQ ID NO: 158296 - DNA, 79 bp, Homo sapiens
tgcgctgccacagaacttgtgttcaagtagcgcttattttacttaagggccacaaaatgcaagaggggtgatgctgaca

SEQ ID NO: 158297 - DNA, 74 bp, Homo sapiens
agaacttgtgttcaagtagcgcttattttacttaagggccacaaaatgcaagaggggtgatgctgacatattgt

SEQ ID NO: 158298 - DNA, 75 bp, Homo sapiens
ttgtgttcaagtagcgcttattttacttaagggccacaaaatgcaagaggggtgatgctgacatattgttataac

SEQ ID NO: 158299 - DNA, 73 bp, Homo sapiens
ttttacttaagggccacaaaatgcaagaggggtgatgctgacatattgttataactgttctagtttattattg

SEQ ID NO: 158300 - DNA, 69 bp, Homo sapiens
aatctcttactgtgcttaatttataaactttattatagctttgtatgtataggagaaaaaaacctgtag

SEQ ID NO: 158301 - DNA, 72 bp, Homo sapiens
ctgtgcttaatttataaactttattatagctttgtatgtataggagaaaaaaacctgtagtatatatagagc

SEQ ID NO: 158302 - DNA, 72 bp, Homo sapiens
ttataaactttattatagctttgtatgtataggagaaaaaaacctgtagtatatatagagctttgtgctagt

SEQ ID NO: 158303 - DNA, 78 bp, Homo sapiens
tattatagctttgtatgtataggagaaaaaaacctgtagtatatatagagctttgtgctagttgccatagcagacgtc

SEQ ID NO: 158304 - DNA, 78 bp, Homo sapiens
tagctttgtatgtataggagaaaaaaacctgtagtatatatagagctttgtgctagttgccatagcagacgtccagtg

SEQ ID NO: 158305 - DNA, 75 bp, Homo sapiens
tgtataggagaaaaaaacctgtagtatatatagagctttgtgctagttgccatagcagacgtccagtggggtggg

SEQ ID NO: 158306 - DNA, 73 bp, Homo sapiens
aaaaacctgtagtatatatagagctttgtgctagttgccatagcagacgtccagtggggtggggggtcttgga

SEQ ID NO: 158307 - DNA, 76 bp, Homo sapiens
tagtatatatagagctttgtgctagttgccatagcagacgtccagtggggtggggggtcttggaacatgttcccta

SEQ ID NO: 158308 - DNA, 75 bp, Homo sapiens
tagagctttgtgctagttgccatagcagacgtccagtggggtggggggtcttggaacatgttccctacagataag

SEQ ID NO: 158309 - DNA, 71 bp, Homo sapiens
tagttgccatagcagacgtccagtggggtggggggtcttggaacatgttccctacagataagggggaacta

SEQ ID NO: 158310 - DNA, 70 bp, Homo sapiens
atagcagacgtccagtggggtggggggtcttggaacatgttccctacagataagggggaactactataca

SEQ ID NO: 158311 - DNA, 68 bp, Homo sapiens
agtggggtggggggtcttggaacatgttccctacagataagggggaactactatacacattatggttg

SEQ ID NO: 158312 - DNA, 70 bp, Homo sapiens
gggtcttggaacatgttccctacagataagggggaactactatacacattatggttggaaggctttgaac

SEQ ID NO: 158313 - DNA, 69 bp, Homo sapiens
aacatgttccctacagataagggggaactactatacacattatggttggaaggctttgaactagaaaag

SEQ ID NO: 158314 - DNA, 70 bp, Homo sapiens
ctacagataagggggaactactatacacattatggttggaaggctttgaactagaaaagtgaagtataat

SEQ ID NO: 158315 - DNA, 74 bp, Homo sapiens
ctatacacattatggttggaaggctttgaactagaaaagtgaagtataattctttatgtgcacatactcttagg

SEQ ID NO: 158316 - DNA, 73 bp, Homo sapiens
cattatggttggaaggctttgaactagaaaagtgaagtataattctttatgtgcacatactcttaggtactat

SEQ ID NO: 158317 - DNA, 72 bp, Homo sapiens
tggaaggctttgaactagaaaagtgaagtataattctttatgtgcacatactcttaggtactattaaattgg

SEQ ID NO: 158318 - DNA, 72 bp, Homo sapiens
tagaaaagtgaagtataattctttatgtgcacatactcttaggtactattaaattggtagttaagtcttggc

SEQ ID NO: 158319 - DNA, 73 bp, Homo sapiens
gtgaagtataattctttatgtgcacatactcttaggtactattaaattggtagttaagtcttggcctactcta

SEQ ID NO: 158320 - DNA, 71 bp, Homo sapiens
ctttatgtgcacatactcttaggtactattaaattggtagttaagtcttggcctactctaatttactatag

SEQ ID NO: 158321 - DNA, 68 bp, Homo sapiens
aaattggtagttaagtcttggcctactctaatttactatagtatttggctagaaattgggtaattcac

SEQ ID NO: 158322 - DNA, 68 bp, Homo sapiens
ggtagttaagtcttggcctactctaatttactatagtatttggctagaaattgggtaattcactcttt

SEQ ID NO: 158323 - DNA, 69 bp, Homo sapiens
cttggcctactctaatttactatagtatttggctagaaattgggtaattcactcttttatagaaagaac

SEQ ID NO: 158324 - DNA, 71 bp, Homo sapiens
atttactatagtatttggctagaaattgggtaattcactcttttatagaaagaactataggtcactggata

SEQ ID NO: 158325 - DNA, 74 bp, Homo sapiens
ctatagtatttggctagaaattgggtaattcactcttttatagaaagaactataggtcactggatagccatgta

SEQ ID NO: 158326 - DNA, 73 bp, Homo sapiens
ggctagaaattgggtaattcactcttttatagaaagaactataggtcactggatagccatgtatttgaagaaa

SEQ ID NO: 158327 - DNA, 75 bp, Homo sapiens
tgggtaattcactcttttatagaaagaactataggtcactggatagccatgtatttgaagaaagtaacatactga

SEQ ID NO: 158328 - DNA, 76 bp, Homo sapiens
ctcttttatagaaagaactataggtcactggatagccatgtatttgaagaaagtaacatactgatgaaatatgtag

SEQ ID NO: 158329 - DNA, 79 bp, Homo sapiens
tagaaagaactataggtcactggatagccatgtatttgaagaaagtaacatactgatgaaatatgtagttcctactgca

SEQ ID NO: 158330 - DNA, 82 bp, Homo sapiens
tataggtcactggatagccatgtatttgaagaaagtaacatactgatgaaatatgtagttcctactgcactgtgctaggtgc

SEQ ID NO: 158331 - DNA, 81 bp, Homo sapiens
atagccatgtatttgaagaaagtaacatactgatgaaatatgtagttcctactgcactgtgctaggtgcttttgtgcatac

SEQ ID NO: 158332 - DNA, 81 bp, Homo sapiens
tactgatgaaatatgtagttcctactgcactgtgctaggtgcttttgtgcatactgtctcatttaattctccaccgtaaca

SEQ ID NO: 158333 - DNA, 79 bp, Homo sapiens
tactgcactgtgctaggtgcttttgtgcatactgtctcatttaattctccaccgtaacatggagaagttggtactgtta

SEQ ID NO: 158334 - DNA, 75 bp, Homo sapiens
taggtgcttttgtgcatactgtctcatttaattctccaccgtaacatggagaagttggtactgttatctccattt

SEQ ID NO: 158335 - DNA, 75 bp, Homo sapiens
ttttgtgcatactgtctcatttaattctccaccgtaacatggagaagttggtactgttatctccatttttataca

SEQ ID NO: 158336 - DNA, 74 bp, Homo sapiens
gtctcatttaattctccaccgtaacatggagaagttggtactgttatctccatttttatacaagaggtatctga

SEQ ID NO: 158337 - DNA, 72 bp, Homo sapiens
atttaattctccaccgtaacatggagaagttggtactgttatctccatttttatacaagaggtatctgaggc

SEQ ID NO: 158338 - DNA, 74 bp, Homo sapiens
atggagaagttggtactgttatctccatttttatacaagaggtatctgaggctgaataccagacaaggctaaaa

SEQ ID NO: 158339 - DNA, 73 bp, Homo sapiens
ctgttatctccatttttatacaagaggtatctgaggctgaataccagacaaggctaaaacagaaactttcaat

SEQ ID NO: 158340 - DNA, 74 bp, Homo sapiens
tctccatttttatacaagaggtatctgaggctgaataccagacaaggctaaaacagaaactttcaatttgtgaa

SEQ ID NO: 158341 - DNA, 73 bp, Homo sapiens
tatctgaggctgaataccagacaaggctaaaacagaaactttcaatttgtgaaaaaggagtgttttagtgtca

SEQ ID NO: 158342 - DNA, 73 bp, Homo sapiens
gctgaataccagacaaggctaaaacagaaactttcaatttgtgaaaaaggagtgttttagtgtcatatatata

SEQ ID NO: 158343 - DNA, 72 bp, Homo sapiens
agacaaggctaaaacagaaactttcaatttgtgaaaaaggagtgttttagtgtcatatatatatgacaaata

SEQ ID NO: 158344 - DNA, 73 bp, Homo sapiens
cagaaactttcaatttgtgaaaaaggagtgttttagtgtcatatatatatgacaaatatatttattaagcctg

SEQ ID NO: 158345 - DNA, 72 bp, Homo sapiens
caatttgtgaaaaaggagtgttttagtgtcatatatatatgacaaatatatttattaagcctgttttatgtt

SEQ ID NO: 158346 - DNA, 75 bp, Homo sapiens
gtgttttagtgtcatatatatatgacaaatatatttattaagcctgttttatgtttgagggaaattgggtgcata

SEQ ID NO: 158347 - DNA, 69 bp, Homo sapiens
gacaaatatatttattaagcctgttttatgtttgagggaaattgggtgcataaaaaggactatttttga

SEQ ID NO: 158348 - DNA, 68 bp, Homo sapiens
aagcctgttttatgtttgagggaaattgggtgcataaaaaggactatttttgagcttttgtacatatt

SEQ ID NO: 158349 - DNA, 71 bp, Homo sapiens
ttgggtgcataaaaaggactatttttgagcttttgtacatatttataaaattgtatagttttgttgtcaca

SEQ ID NO: 158350 - DNA, 76 bp, Homo sapiens
tgcataaaaaggactatttttgagcttttgtacatatttataaaattgtatagttttgttgtcacatatgatggca

SEQ ID NO: 158351 - DNA, 76 bp, Homo sapiens
ggactatttttgagcttttgtacatatttataaaattgtatagttttgttgtcacatatgatggcatatatttata

SEQ ID NO: 158352 - DNA, 80 bp, Homo sapiens
tgagcttttgtacatatttataaaattgtatagttttgttgtcacatatgatggcatatatttatatatcttaatggata

SEQ ID NO: 158353 - DNA, 77 bp, Homo sapiens
atttataaaattgtatagttttgttgtcacatatgatggcatatatttatatatcttaatggataatttttgaagca

SEQ ID NO: 158354 - DNA, 80 bp, Homo sapiens
ttgtatagttttgttgtcacatatgatggcatatatttatatatcttaatggataatttttgaagcatcactttgtaaga

SEQ ID NO: 158355 - DNA, 79 bp, Homo sapiens
gttttgttgtcacatatgatggcatatatttatatatcttaatggataatttttgaagcatcactttgtaagaaagatg

SEQ ID NO: 158356 - DNA, 73 bp, Homo sapiens
atatatttatatatcttaatggataatttttgaagcatcactttgtaagaaagatgtttactacacagtaaaa

SEQ ID NO: 158357 - DNA, 71 bp, Homo sapiens
ttatatatcttaatggataatttttgaagcatcactttgtaagaaagatgtttactacacagtaaaaagtt

SEQ ID NO: 158358 - DNA, 69 bp, Homo sapiens
ggataatttttgaagcatcactttgtaagaaagatgtttactacacagtaaaaagtttaaaagcaatgt

SEQ ID NO: 158359 - DNA, 69 bp, Homo sapiens
ttgaagcatcactttgtaagaaagatgtttactacacagtaaaaagtttaaaagcaatgttaacctcgt

SEQ ID NO: 158360 - DNA, 69 bp, Homo sapiens
gaaagatgtttactacacagtaaaaagtttaaaagcaatgttaacctcgttatttatactcacactgta

SEQ ID NO: 158361 - DNA, 68 bp, Homo sapiens
aaaagtttaaaagcaatgttaacctcgttatttatactcacactgtaaaaaactgaactgttcatgga

SEQ ID NO: 158362 - DNA, 73 bp, Homo sapiens
aaagcaatgttaacctcgttatttatactcacactgtaaaaaactgaactgttcatggaaatgtttgctatga

SEQ ID NO: 158363 - DNA, 71 bp, Homo sapiens
gttaacctcgttatttatactcacactgtaaaaaactgaactgttcatggaaatgtttgctatgattacgg

SEQ ID NO: 158364 - DNA, 75 bp, Homo sapiens
tatttatactcacactgtaaaaaactgaactgttcatggaaatgtttgctatgattacggtaagatggaagagga

SEQ ID NO: 158365 - DNA, 74 bp, Homo sapiens
cactgtaaaaaactgaactgttcatggaaatgtttgctatgattacggtaagatggaagaggaaagtatcttga

SEQ ID NO: 158366 - DNA, 73 bp, Homo sapiens
aactgaactgttcatggaaatgtttgctatgattacggtaagatggaagaggaaagtatcttgaggcttaaaa

SEQ ID NO: 158367 - DNA, 75 bp, Homo sapiens
ttcatggaaatgtttgctatgattacggtaagatggaagaggaaagtatcttgaggcttaaaagctgtgtaattc

SEQ ID NO: 158368 - DNA, 73 bp, Homo sapiens
tatgattacggtaagatggaagaggaaagtatcttgaggcttaaaagctgtgtaattccattcgtaggaacca

SEQ ID NO: 158369 - DNA, 73 bp, Homo sapiens
agatggaagaggaaagtatcttgaggcttaaaagctgtgtaattccattcgtaggaaccagtatggcttacta

SEQ ID NO: 158370 - DNA, 71 bp, Homo sapiens
aagaggaaagtatcttgaggcttaaaagctgtgtaattccattcgtaggaaccagtatggcttactaaata

SEQ ID NO: 158371 - DNA, 74 bp, Homo sapiens
tatcttgaggcttaaaagctgtgtaattccattcgtaggaaccagtatggcttactaaatacagtgttgtcatt

SEQ ID NO: 158372 - DNA, 73 bp, Homo sapiens
ttaaaagctgtgtaattccattcgtaggaaccagtatggcttactaaatacagtgttgtcatttcctgtgaaa

SEQ ID NO: 158373 - DNA, 77 bp, Homo sapiens
tgtgtaattccattcgtaggaaccagtatggcttactaaatacagtgttgtcatttcctgtgaaagagagagcgaga

SEQ ID NO: 158374 - DNA, 76 bp, Homo sapiens
attcgtaggaaccagtatggcttactaaatacagtgttgtcatttcctgtgaaagagagagcgagagataggatgg

SEQ ID NO: 158375 - DNA, 76 bp, Homo sapiens
ttactaaatacagtgttgtcatttcctgtgaaagagagagcgagagataggatgggggtggggatagttgatatta

SEQ ID NO: 158376 - DNA, 80 bp, Homo sapiens
tacagtgttgtcatttcctgtgaaagagagagcgagagataggatgggggtggggatagttgatattagagagtgagaga

SEQ ID NO: 158377 - DNA, 75 bp, Homo sapiens
gagagagcgagagataggatgggggtggggatagttgatattagagagtgagagagagggttaccaggtttgtag

SEQ ID NO: 158378 - DNA, 71 bp, Homo sapiens
tgggggtggggatagttgatattagagagtgagagagagggttaccaggtttgtagttcagggaagtgcct

SEQ ID NO: 158379 - DNA, 75 bp, Homo sapiens
atagttgatattagagagtgagagagagggttaccaggtttgtagttcagggaagtgccttagtcataatgtatc

SEQ ID NO: 158380 - DNA, 74 bp, Homo sapiens
ttaccaggtttgtagttcagggaagtgccttagtcataatgtatctggactatatcaaggacttcaataatgtt

SEQ ID NO: 158381 - DNA, 74 bp, Homo sapiens
aggtttgtagttcagggaagtgccttagtcataatgtatctggactatatcaaggacttcaataatgtttttca

SEQ ID NO: 158382 - DNA, 74 bp, Homo sapiens
ggaagtgccttagtcataatgtatctggactatatcaaggacttcaataatgtttttcaccacgttattgtgtt

SEQ ID NO: 158383 - DNA, 72 bp, Homo sapiens
gtatctggactatatcaaggacttcaataatgtttttcaccacgttattgtgtttaagggctggatctaaaa

SEQ ID NO: 158384 - DNA, 70 bp, Homo sapiens
ggactatatcaaggacttcaataatgtttttcaccacgttattgtgtttaagggctggatctaaaataat

SEQ ID NO: 158385 - DNA, 70 bp, Homo sapiens
caaggacttcaataatgtttttcaccacgttattgtgtttaagggctggatctaaaataattagatgaag

SEQ ID NO: 158386 - DNA, 70 bp, Homo sapiens
atgtttttcaccacgttattgtgtttaagggctggatctaaaataattagatgaagtagaaaccagttga

SEQ ID NO: 158387 - DNA, 71 bp, Homo sapiens
ttcaccacgttattgtgtttaagggctggatctaaaataattagatgaagtagaaaccagttgattagttg

SEQ ID NO: 158388 - DNA, 71 bp, Homo sapiens
gtgtttaagggctggatctaaaataattagatgaagtagaaaccagttgattagttgtactcaaagactgt

SEQ ID NO: 158389 - DNA, 72 bp, Homo sapiens
gggctggatctaaaataattagatgaagtagaaaccagttgattagttgtactcaaagactgtttaacagat

SEQ ID NO: 158390 - DNA, 72 bp, Homo sapiens
aataattagatgaagtagaaaccagttgattagttgtactcaaagactgtttaacagatttttgccaagcag

SEQ ID NO: 158391 - DNA, 71 bp, Homo sapiens
gattagttgtactcaaagactgtttaacagatttttgccaagcaggagaaatgttacttggtaaactaaca

SEQ ID NO: 158392 - DNA, 70 bp, Homo sapiens
actgtttaacagatttttgccaagcaggagaaatgttacttggtaaactaacatgaaaatgacttgggaa

SEQ ID NO: 158393 - DNA, 68 bp, Homo sapiens
agatttttgccaagcaggagaaatgttacttggtaaactaacatgaaaatgacttgggaattttaatt

SEQ ID NO: 158394 - DNA, 69 bp, Homo sapiens
ggtaaactaacatgaaaatgacttgggaattttaattttactggctagatagttccctgtcactagatt

SEQ ID NO: 158395 - DNA, 70 bp, Homo sapiens
taattttactggctagatagttccctgtcactagatttttttcagggggttcttaagttgaagtctatga

SEQ ID NO: 158396 - DNA, 72 bp, Homo sapiens
tccctgtcactagatttttttcagggggttcttaagttgaagtctatgagtatcattcatggggcctttgaa

SEQ ID NO: 158397 - DNA, 70 bp, Homo sapiens
actagatttttttcagggggttcttaagttgaagtctatgagtatcattcatggggcctttgaacttgga

SEQ ID NO: 158398 - DNA, 71 bp, Homo sapiens
tttttcagggggttcttaagttgaagtctatgagtatcattcatggggcctttgaacttggatgagagggg

SEQ ID NO: 158399 - DNA, 74 bp, Homo sapiens
ttcttaagttgaagtctatgagtatcattcatggggcctttgaacttggatgagagggggattacatttgtatt

SEQ ID NO: 158400 - DNA, 74 bp, Homo sapiens
aagtctatgagtatcattcatggggcctttgaacttggatgagagggggattacatttgtatttccaataaata

SEQ ID NO: 158401 - DNA, 74 bp, Homo sapiens
tatcattcatggggcctttgaacttggatgagagggggattacatttgtatttccaataaatacatccttatta

SEQ ID NO: 158402 - DNA, 72 bp, Homo sapiens
gggcctttgaacttggatgagagggggattacatttgtatttccaataaatacatccttattaatgataatg

SEQ ID NO: 158403 - DNA, 74 bp, Homo sapiens
gaacttggatgagagggggattacatttgtatttccaataaatacatccttattaatgataatgtagcattttc

SEQ ID NO: 158404 - DNA, 77 bp, Homo sapiens
tgagagggggattacatttgtatttccaataaatacatccttattaatgataatgtagcattttcttcactcatgag

SEQ ID NO: 158405 - DNA, 77 bp, Homo sapiens
acatttgtatttccaataaatacatccttattaatgataatgtagcattttcttcactcatgagtttattatactga

SEQ ID NO: 158406 - DNA, 79 bp, Homo sapiens
ttaatgataatgtagcattttcttcactcatgagtttattatactgattacttcaaaatccgagctgtatgaacctgaa

SEQ ID NO: 158407 - DNA, 78 bp, Homo sapiens
ctcatgagtttattatactgattacttcaaaatccgagctgtatgaacctgaaccaactgtagatcttatgtaatatg

SEQ ID NO: 158408 - DNA, 75 bp, Homo sapiens
gattacttcaaaatccgagctgtatgaacctgaaccaactgtagatcttatgtaatatgttaataaagaagcact

SEQ ID NO: 158409 - DNA, 76 bp, Homo sapiens
ccgagctgtatgaacctgaaccaactgtagatcttatgtaatatgttaataaagaagcacttatattactacattc

SEQ ID NO: 158410 - DNA, 74 bp, Homo sapiens
gtatgaacctgaaccaactgtagatcttatgtaatatgttaataaagaagcacttatattactacattctaggt

SEQ ID NO: 158411 - DNA, 74 bp, Homo sapiens
gaaccaactgtagatcttatgtaatatgttaataaagaagcacttatattactacattctaggttttacagata

SEQ ID NO: 158412 - DNA, 72 bp, Homo sapiens
gtagatcttatgtaatatgttaataaagaagcacttatattactacattctaggttttacagatattttagt

SEQ ID NO: 158413 - DNA, 70 bp, Homo sapiens
atatgttaataaagaagcacttatattactacattctaggttttacagatattttagttatgttttaatg

SEQ ID NO: 158414 - DNA, 70 bp, Homo sapiens
aagaagcacttatattactacattctaggttttacagatattttagttatgttttaatgtagtcctttga

SEQ ID NO: 158415 - DNA, 71 bp, Homo sapiens
gcacttatattactacattctaggttttacagatattttagttatgttttaatgtagtcctttgagaacca

SEQ ID NO: 158416 - DNA, 71 bp, Homo sapiens
cattctaggttttacagatattttagttatgttttaatgtagtcctttgagaaccaactcatagccttcac

SEQ ID NO: 158417 - DNA, 73 bp, Homo sapiens
gttttacagatattttagttatgttttaatgtagtcctttgagaaccaactcatagccttcactagatgtcca

SEQ ID NO: 158418 - DNA, 75 bp, Homo sapiens
atattttagttatgttttaatgtagtcctttgagaaccaactcatagccttcactagatgtccaaacagtgcatg

SEQ ID NO: 158419 - DNA, 78 bp, Homo sapiens
tgttttaatgtagtcctttgagaaccaactcatagccttcactagatgtccaaacagtgcatggcaaaatcagttata

SEQ ID NO: 158420 - DNA, 77 bp, Homo sapiens
atgtagtcctttgagaaccaactcatagccttcactagatgtccaaacagtgcatggcaaaatcagttataccccta

SEQ ID NO: 158421 - DNA, 77 bp, Homo sapiens
agaaccaactcatagccttcactagatgtccaaacagtgcatggcaaaatcagttatacccctagactagatagttg

SEQ ID NO: 158422 - DNA, 77 bp, Homo sapiens
aactcatagccttcactagatgtccaaacagtgcatggcaaaatcagttatacccctagactagatagttggcttta

SEQ ID NO: 158423 - DNA, 75 bp, Homo sapiens
ctagatgtccaaacagtgcatggcaaaatcagttatacccctagactagatagttggctttagggttctgtgtta

SEQ ID NO: 158424 - DNA, 75 bp, Homo sapiens
aaacagtgcatggcaaaatcagttatacccctagactagatagttggctttagggttctgtgttatgtacatgtg

SEQ ID NO: 158425 - DNA, 75 bp, Homo sapiens
tggcaaaatcagttatacccctagactagatagttggctttagggttctgtgttatgtacatgtgtacgaatata

SEQ ID NO: 158426 - DNA, 74 bp, Homo sapiens
tcagttatacccctagactagatagttggctttagggttctgtgttatgtacatgtgtacgaatatagtattta

SEQ ID NO: 158427 - DNA, 74 bp, Homo sapiens
ccctagactagatagttggctttagggttctgtgttatgtacatgtgtacgaatatagtatttaaagattatga

SEQ ID NO: 158428 - DNA, 74 bp, Homo sapiens
ggctttagggttctgtgttatgtacatgtgtacgaatatagtatttaaagattatgattgagttataaacataa

SEQ ID NO: 158429 - DNA, 79 bp, Homo sapiens
tctgtgttatgtacatgtgtacgaatatagtatttaaagattatgattgagttataaacataatctttaatcacagatg

SEQ ID NO: 158430 - DNA, 79 bp, Homo sapiens
gtacatgtgtacgaatatagtatttaaagattatgattgagttataaacataatctttaatcacagatgtgataattgc

SEQ ID NO: 158431 - DNA, 74 bp, Homo sapiens
acgaatatagtatttaaagattatgattgagttataaacataatctttaatcacagatgtgataattgcttttt

SEQ ID NO: 158432 - DNA, 76 bp, Homo sapiens
gtatttaaagattatgattgagttataaacataatctttaatcacagatgtgataattgcttttttgtcatgaggg

SEQ ID NO: 158433 - DNA, 75 bp, Homo sapiens
attatgattgagttataaacataatctttaatcacagatgtgataattgcttttttgtcatgagggtttaaaatg

SEQ ID NO: 158434 - DNA, 71 bp, Homo sapiens
agttataaacataatctttaatcacagatgtgataattgcttttttgtcatgagggtttaaaatgttttta

SEQ ID NO: 158435 - DNA, 73 bp, Homo sapiens
atctttaatcacagatgtgataattgcttttttgtcatgagggtttaaaatgtttttaattgattatctttca

SEQ ID NO: 158436 - DNA, 72 bp, Homo sapiens
cacagatgtgataattgcttttttgtcatgagggtttaaaatgtttttaattgattatctttcaaatttcca

SEQ ID NO: 158437 - DNA, 70 bp, Homo sapiens
attgcttttttgtcatgagggtttaaaatgtttttaattgattatctttcaaatttccagtgtatgtctg

SEQ ID NO: 158438 - DNA, 71 bp, Homo sapiens
ttgtcatgagggtttaaaatgtttttaattgattatctttcaaatttccagtgtatgtctgtgtgggtagt

SEQ ID NO: 158439 - DNA, 69 bp, Homo sapiens
atgtttttaattgattatctttcaaatttccagtgtatgtctgtgtgggtagttatttaaaaagagtta

SEQ ID NO: 158440 - DNA, 69 bp, Homo sapiens
tcaaatttccagtgtatgtctgtgtgggtagttatttaaaaagagttaaacatttttaagagtactgtg

SEQ ID NO: 158441 - DNA, 67 bp, Homo sapiens
ccagtgtatgtctgtgtgggtagttatttaaaaagagttaaacatttttaagagtactgtggggaaa

SEQ ID NO: 158442 - DNA, 63 bp, Homo sapiens
ttatttaaaaagagttaaacatttttaagagtactgtggggaaaactttcactttttgatccc

SEQ ID NO: 158443 - DNA, 68 bp, Homo sapiens
gagttaaacatttttaagagtactgtggggaaaactttcactttttgatcccctttccataatgctga

SEQ ID NO: 158444 - DNA, 68 bp, Homo sapiens
catttttaagagtactgtggggaaaactttcactttttgatcccctttccataatgctgactaagagt

SEQ ID NO: 158445 - DNA, 72 bp, Homo sapiens
tttcactttttgatcccctttccataatgctgactaagagtttgggtagatttctaattccagtgaagtcca

SEQ ID NO: 158446 - DNA, 78 bp, Homo sapiens
ccctttccataatgctgactaagagtttgggtagatttctaattccagtgaagtccagcagcagagcactgatttcac

SEQ ID NO: 158447 - DNA, 80 bp, Homo sapiens
ataatgctgactaagagtttgggtagatttctaattccagtgaagtccagcagcagagcactgatttcacttgctttgaa

SEQ ID NO: 158448 - DNA, 79 bp, Homo sapiens
gtagatttctaattccagtgaagtccagcagcagagcactgatttcacttgctttgaaagttggcagggttatggctta

SEQ ID NO: 158449 - DNA, 78 bp, Homo sapiens
tttctaattccagtgaagtccagcagcagagcactgatttcacttgctttgaaagttggcagggttatggcttacaaa

SEQ ID NO: 158450 - DNA, 83 bp, Homo sapiens
agtgaagtccagcagcagagcactgatttcacttgctttgaaagttggcagggttatggcttacaaatgtgtagctgctgtga

SEQ ID NO: 158451 - DNA, 82 bp, Homo sapiens
tgatttcacttgctttgaaagttggcagggttatggcttacaaatgtgtagctgctgtgagcagatgattgttaagtagata

SEQ ID NO: 158452 - DNA, 80 bp, Homo sapiens
aaagttggcagggttatggcttacaaatgtgtagctgctgtgagcagatgattgttaagtagataatgttggcagttata

SEQ ID NO: 158453 - DNA, 78 bp, Homo sapiens
ttacaaatgtgtagctgctgtgagcagatgattgttaagtagataatgttggcagttataactggggcaatttaaaaa

SEQ ID NO: 158454 - DNA, 77 bp, Homo sapiens
ctgctgtgagcagatgattgttaagtagataatgttggcagttataactggggcaatttaaaaagtatgttggcttg

SEQ ID NO: 158455 - DNA, 72 bp, Homo sapiens
cagatgattgttaagtagataatgttggcagttataactggggcaatttaaaaagtatgttggcttgttggt

SEQ ID NO: 158456 - DNA, 72 bp, Homo sapiens
ttaagtagataatgttggcagttataactggggcaatttaaaaagtatgttggcttgttggttttcacagca

SEQ ID NO: 158457 - DNA, 72 bp, Homo sapiens
taatgttggcagttataactggggcaatttaaaaagtatgttggcttgttggttttcacagcaggctgtgtt

SEQ ID NO: 158458 - DNA, 72 bp, Homo sapiens
agttataactggggcaatttaaaaagtatgttggcttgttggttttcacagcaggctgtgttttctggcaga

SEQ ID NO: 158459 - DNA, 71 bp, Homo sapiens
gggcaatttaaaaagtatgttggcttgttggttttcacagcaggctgtgttttctggcagagaattttgtt

SEQ ID NO: 158460 - DNA, 70 bp, Homo sapiens
atttaaaaagtatgttggcttgttggttttcacagcaggctgtgttttctggcagagaattttgttttat

SEQ ID NO: 158461 - DNA, 72 bp, Homo sapiens
atgttggcttgttggttttcacagcaggctgtgttttctggcagagaattttgttttatttataacatttag

SEQ ID NO: 158462 - DNA, 70 bp, Homo sapiens
gttttcacagcaggctgtgttttctggcagagaattttgttttatttataacatttaggtgtttgggtac

SEQ ID NO: 158463 - DNA, 70 bp, Homo sapiens
caggctgtgttttctggcagagaattttgttttatttataacatttaggtgtttgggtactggatggatt

SEQ ID NO: 158464 - DNA, 69 bp, Homo sapiens
tgtgttttctggcagagaattttgttttatttataacatttaggtgtttgggtactggatggatttttg

SEQ ID NO: 158465 - DNA, 69 bp, Homo sapiens
ggcagagaattttgttttatttataacatttaggtgtttgggtactggatggatttttgttagagttca

SEQ ID NO: 158466 - DNA, 68 bp, Homo sapiens
tttatttataacatttaggtgtttgggtactggatggatttttgttagagttcataaaaagggagatc

SEQ ID NO: 158467 - DNA, 72 bp, Homo sapiens
ttataacatttaggtgtttgggtactggatggatttttgttagagttcataaaaagggagatctgtgcaatc

SEQ ID NO: 158468 - DNA, 74 bp, Homo sapiens
taggtgtttgggtactggatggatttttgttagagttcataaaaagggagatctgtgcaatcgtgtgctttctc

SEQ ID NO: 158469 - DNA, 72 bp, Homo sapiens
ggatttttgttagagttcataaaaagggagatctgtgcaatcgtgtgctttctctctgttttgttagttttc

SEQ ID NO: 158470 - DNA, 73 bp, Homo sapiens
ttcataaaaagggagatctgtgcaatcgtgtgctttctctctgttttgttagttttcttaagtccagaaatat

SEQ ID NO: 158471 - DNA, 71 bp, Homo sapiens
aaaagggagatctgtgcaatcgtgtgctttctctctgttttgttagttttcttaagtccagaaatattttg

SEQ ID NO: 158472 - DNA, 67 bp, Homo sapiens
ctgttttgttagttttcttaagtccagaaatattttgttctttgcttggaagatgaccttttcccac

SEQ ID NO: 158473 - DNA, 69 bp, Homo sapiens
tagttttcttaagtccagaaatattttgttctttgcttggaagatgaccttttcccactttcagtgaac

SEQ ID NO: 158474 - DNA, 69 bp, Homo sapiens
ttaagtccagaaatattttgttctttgcttggaagatgaccttttcccactttcagtgaacttggtctt

SEQ ID NO: 158475 - DNA, 72 bp, Homo sapiens
tattttgttctttgcttggaagatgaccttttcccactttcagtgaacttggtctttctcagatttggtgaa

SEQ ID NO: 158476 - DNA, 74 bp, Homo sapiens
tctttgcttggaagatgaccttttcccactttcagtgaacttggtctttctcagatttggtgaataagcattaa

SEQ ID NO: 158477 - DNA, 73 bp, Homo sapiens
aagatgaccttttcccactttcagtgaacttggtctttctcagatttggtgaataagcattaagatgtacttc

SEQ ID NO: 158478 - DNA, 74 bp, Homo sapiens
ttttcccactttcagtgaacttggtctttctcagatttggtgaataagcattaagatgtacttctagtacagtg

SEQ ID NO: 158479 - DNA, 73 bp, Homo sapiens
actttcagtgaacttggtctttctcagatttggtgaataagcattaagatgtacttctagtacagtggttggt

SEQ ID NO: 158480 - DNA, 75 bp, Homo sapiens
aacttggtctttctcagatttggtgaataagcattaagatgtacttctagtacagtggttggttcacattacaca

SEQ ID NO: 158481 - DNA, 79 bp, Homo sapiens
agatttggtgaataagcattaagatgtacttctagtacagtggttggttcacattacacagttgtgcattgctgtgtgt

SEQ ID NO: 158482 - DNA, 80 bp, Homo sapiens
aataagcattaagatgtacttctagtacagtggttggttcacattacacagttgtgcattgctgtgtgttaagcttatgc

SEQ ID NO: 158483 - DNA, 77 bp, Homo sapiens
aagatgtacttctagtacagtggttggttcacattacacagttgtgcattgctgtgtgttaagcttatgcctttatt

SEQ ID NO: 158484 - DNA, 78 bp, Homo sapiens
ttctagtacagtggttggttcacattacacagttgtgcattgctgtgtgttaagcttatgcctttattttcagacaaa

SEQ ID NO: 158485 - DNA, 75 bp, Homo sapiens
agtggttggttcacattacacagttgtgcattgctgtgtgttaagcttatgcctttattttcagacaaaaattta

SEQ ID NO: 158486 - DNA, 74 bp, Homo sapiens
acacagttgtgcattgctgtgtgttaagcttatgcctttattttcagacaaaaatttaacgaagtcatttgatt

SEQ ID NO: 158487 - DNA, 71 bp, Homo sapiens
gctgtgtgttaagcttatgcctttattttcagacaaaaatttaacgaagtcatttgattttaaagaccaca

SEQ ID NO: 158488 - DNA, 71 bp, Homo sapiens
gcctttattttcagacaaaaatttaacgaagtcatttgattttaaagaccacatgtacacatgaaggtgta

SEQ ID NO: 158489 - DNA, 69 bp, Homo sapiens
cagacaaaaatttaacgaagtcatttgattttaaagaccacatgtacacatgaaggtgtaaattctttt

SEQ ID NO: 158490 - DNA, 71 bp, Homo sapiens
tttaacgaagtcatttgattttaaagaccacatgtacacatgaaggtgtaaattctttttctagaattgga

SEQ ID NO: 158491 - DNA, 75 bp, Homo sapiens
taaagaccacatgtacacatgaaggtgtaaattctttttctagaattggattgtgtttgctaagttgctctcagt

SEQ ID NO: 158492 - DNA, 78 bp, Homo sapiens
ttctagaattggattgtgtttgctaagttgctctcagttgcttgtttgccagtttacattgccggcaacagaataata

SEQ ID NO: 158493 - DNA, 79 bp, Homo sapiens
ttgtgtttgctaagttgctctcagttgcttgtttgccagtttacattgccggcaacagaataatagtgccctgtgtgta

SEQ ID NO: 158494 - DNA, 78 bp, Homo sapiens
tttgctaagttgctctcagttgcttgtttgccagtttacattgccggcaacagaataatagtgccctgtgtgtaagtc

SEQ ID NO: 158495 - DNA, 77 bp, Homo sapiens
tctcagttgcttgtttgccagtttacattgccggcaacagaataatagtgccctgtgtgtaagtccatactttactg

SEQ ID NO: 158496 - DNA, 76 bp, Homo sapiens
ttgtttgccagtttacattgccggcaacagaataatagtgccctgtgtgtaagtccatactttactgtgctcattt

SEQ ID NO: 158497 - DNA, 74 bp, Homo sapiens
ccggcaacagaataatagtgccctgtgtgtaagtccatactttactgtgctcattttataaatgaggaaaccaa

SEQ ID NO: 158498 - DNA, 72 bp, Homo sapiens
agaataatagtgccctgtgtgtaagtccatactttactgtgctcattttataaatgaggaaaccaaggttaa

SEQ ID NO: 158499 - DNA, 66 bp, Homo sapiens
attttataaatgaggaaaccaaggttaaagacaaagcaaattgattgaatttttagagaaaattat

SEQ ID NO: 158500 - DNA, 67 bp, Homo sapiens
tgaggaaaccaaggttaaagacaaagcaaattgattgaatttttagagaaaattattttgtggtcgg

SEQ ID NO: 158501 - DNA, 68 bp, Homo sapiens
gacaaagcaaattgattgaatttttagagaaaattattttgtggtcgggaaggtcagaaaattctaag

SEQ ID NO: 158502 - DNA, 68 bp, Homo sapiens
gcaaattgattgaatttttagagaaaattattttgtggtcgggaaggtcagaaaattctaaggtaatg

SEQ ID NO: 158503 - DNA, 67 bp, Homo sapiens
aattattttgtggtcgggaaggtcagaaaattctaaggtaatggaattagtgctaatagaaaactgg

SEQ ID NO: 158504 - DNA, 68 bp, Homo sapiens
gggaaggtcagaaaattctaaggtaatggaattagtgctaatagaaaactgggtttctaggagcttta

SEQ ID NO: 158505 - DNA, 70 bp, Homo sapiens
aattctaaggtaatggaattagtgctaatagaaaactgggtttctaggagctttataggaatgaggagtg

SEQ ID NO: 158506 - DNA, 70 bp, Homo sapiens
aggtaatggaattagtgctaatagaaaactgggtttctaggagctttataggaatgaggagtgggaggaa

SEQ ID NO: 158507 - DNA, 70 bp, Homo sapiens
attagtgctaatagaaaactgggtttctaggagctttataggaatgaggagtgggaggaaagggctagga

SEQ ID NO: 158508 - DNA, 66 bp, Homo sapiens
aaactgggtttctaggagctttataggaatgaggagtgggaggaaagggctaggaagacggtttct

SEQ ID NO: 158509 - DNA, 70 bp, Homo sapiens
tttctaggagctttataggaatgaggagtgggaggaaagggctaggaagacggtttcttgggaatgaata

SEQ ID NO: 158510 - DNA, 69 bp, Homo sapiens
ctttataggaatgaggagtgggaggaaagggctaggaagacggtttcttgggaatgaatacagtggaaa

SEQ ID NO: 158511 - DNA, 70 bp, Homo sapiens
aatgaggagtgggaggaaagggctaggaagacggtttcttgggaatgaatacagtggaaagaatgttagc

SEQ ID NO: 158512 - DNA, 69 bp, Homo sapiens
aggaaagggctaggaagacggtttcttgggaatgaatacagtggaaagaatgttagcctggtgaagaaa

SEQ ID NO: 158513 - DNA, 69 bp, Homo sapiens
agggctaggaagacggtttcttgggaatgaatacagtggaaagaatgttagcctggtgaagaaatttta

SEQ ID NO: 158514 - DNA, 69 bp, Homo sapiens
gtttcttgggaatgaatacagtggaaagaatgttagcctggtgaagaaattttatggccgttcttgttt

SEQ ID NO: 158515 - DNA, 68 bp, Homo sapiens
ttgggaatgaatacagtggaaagaatgttagcctggtgaagaaattttatggccgttcttgttttttt

SEQ ID NO: 158516 - DNA, 67 bp, Homo sapiens
tttttctttttcaaatgcttccaggtatattatttgtcttgtaaaaattttaggtaatgaaatacat

SEQ ID NO: 158517 - DNA, 71 bp, Homo sapiens
tcaaatgcttccaggtatattatttgtcttgtaaaaattttaggtaatgaaatacatttcatttcaaatag

SEQ ID NO: 158518 - DNA, 70 bp, Homo sapiens
tatttgtcttgtaaaaattttaggtaatgaaatacatttcatttcaaatagtgttcttgaagtattagga

SEQ ID NO: 158519 - DNA, 69 bp, Homo sapiens
gtcttgtaaaaattttaggtaatgaaatacatttcatttcaaatagtgttcttgaagtattaggattta

SEQ ID NO: 158520 - DNA, 72 bp, Homo sapiens
taggtaatgaaatacatttcatttcaaatagtgttcttgaagtattaggatttaaaaatagtgttcatagaa

SEQ ID NO: 158521 - DNA, 71 bp, Homo sapiens
aatacatttcatttcaaatagtgttcttgaagtattaggatttaaaaatagtgttcatagaaaagatttca

SEQ ID NO: 158522 - DNA, 70 bp, Homo sapiens
catttcaaatagtgttcttgaagtattaggatttaaaaatagtgttcatagaaaagatttcaaaagccca

SEQ ID NO: 158523 - DNA, 70 bp, Homo sapiens
atagtgttcttgaagtattaggatttaaaaatagtgttcatagaaaagatttcaaaagcccatattcaaa

SEQ ID NO: 158524 - DNA, 69 bp, Homo sapiens
cttgaagtattaggatttaaaaatagtgttcatagaaaagatttcaaaagcccatattcaaatatttct

SEQ ID NO: 158525 - DNA, 70 bp, Homo sapiens
ggatttaaaaatagtgttcatagaaaagatttcaaaagcccatattcaaatatttcttctgtcctctacc

SEQ ID NO: 158526 - DNA, 70 bp, Homo sapiens
gaaaagatttcaaaagcccatattcaaatatttcttctgtcctctacctaaagctgttaacaccttaatg

SEQ ID NO: 158527 - DNA, 69 bp, Homo sapiens
caaaagcccatattcaaatatttcttctgtcctctacctaaagctgttaacaccttaatgttaagtagg

SEQ ID NO: 158528 - DNA, 71 bp, Homo sapiens
ccatattcaaatatttcttctgtcctctacctaaagctgttaacaccttaatgttaagtaggtcaaatggc

SEQ ID NO: 158529 - DNA, 70 bp, Homo sapiens
tcctctacctaaagctgttaacaccttaatgttaagtaggtcaaatggctattgccgccaggttgttttg

SEQ ID NO: 158530 - DNA, 72 bp, Homo sapiens
taaagctgttaacaccttaatgttaagtaggtcaaatggctattgccgccaggttgttttgtgtactagcaa

SEQ ID NO: 158531 - DNA, 72 bp, Homo sapiens
ttaacaccttaatgttaagtaggtcaaatggctattgccgccaggttgttttgtgtactagcaactggtgtg

SEQ ID NO: 158532 - DNA, 75 bp, Homo sapiens
aatgttaagtaggtcaaatggctattgccgccaggttgttttgtgtactagcaactggtgtgtgttgaaggcaca

SEQ ID NO: 158533 - DNA, 72 bp, Homo sapiens
tattgccgccaggttgttttgtgtactagcaactggtgtgtgttgaaggcacagctgtattttttttaacct

SEQ ID NO: 158534 - DNA, 73 bp, Homo sapiens
ttgttttgtgtactagcaactggtgtgtgttgaaggcacagctgtattttttttaacctttgcacatattttg

SEQ ID NO: 158535 - DNA, 75 bp, Homo sapiens
ttgtgtactagcaactggtgtgtgttgaaggcacagctgtattttttttaacctttgcacatattttgtagacac

SEQ ID NO: 158536 - DNA, 75 bp, Homo sapiens
tggtgtgtgttgaaggcacagctgtattttttttaacctttgcacatattttgtagacaccagcataagaaataa

SEQ ID NO: 158537 - DNA, 73 bp, Homo sapiens
gtgttgaaggcacagctgtattttttttaacctttgcacatattttgtagacaccagcataagaaataaattg

SEQ ID NO: 158538 - DNA, 76 bp, Homo sapiens
gcacagctgtattttttttaacctttgcacatattttgtagacaccagcataagaaataaattggttgtgtgcatg

SEQ ID NO: 158539 - DNA, 75 bp, Homo sapiens
ttttaacctttgcacatattttgtagacaccagcataagaaataaattggttgtgtgcatgtgtaacaaagtgga

SEQ ID NO: 158540 - DNA, 78 bp, Homo sapiens
tgcacatattttgtagacaccagcataagaaataaattggttgtgtgcatgtgtaacaaagtggacagtccgtcagtt

SEQ ID NO: 158541 - DNA, 75 bp, Homo sapiens
atattttgtagacaccagcataagaaataaattggttgtgtgcatgtgtaacaaagtggacagtccgtcagtttc

SEQ ID NO: 158542 - DNA, 75 bp, Homo sapiens
cagcataagaaataaattggttgtgtgcatgtgtaacaaagtggacagtccgtcagtttcctccatggggagtag

SEQ ID NO: 158543 - DNA, 72 bp, Homo sapiens
aaataaattggttgtgtgcatgtgtaacaaagtggacagtccgtcagtttcctccatggggagtaggaattg

SEQ ID NO: 158544 - DNA, 73 bp, Homo sapiens
atgtgtaacaaagtggacagtccgtcagtttcctccatggggagtaggaattggtgatctgtttgaagttagc

SEQ ID NO: 158545 - DNA, 70 bp, Homo sapiens
aaagtggacagtccgtcagtttcctccatggggagtaggaattggtgatctgtttgaagttagcgttgtt

SEQ ID NO: 158546 - DNA, 73 bp, Homo sapiens
gtccgtcagtttcctccatggggagtaggaattggtgatctgtttgaagttagcgttgttttgctactggcta

SEQ ID NO: 158547 - DNA, 73 bp, Homo sapiens
gtttcctccatggggagtaggaattggtgatctgtttgaagttagcgttgttttgctactggctaggacatgg

SEQ ID NO: 158548 - DNA, 73 bp, Homo sapiens
agtaggaattggtgatctgtttgaagttagcgttgttttgctactggctaggacatgggtttcgtctaagtgc

SEQ ID NO: 158549 - DNA, 74 bp, Homo sapiens
attggtgatctgtttgaagttagcgttgttttgctactggctaggacatgggtttcgtctaagtgctaaccata

SEQ ID NO: 158550 - DNA, 74 bp, Homo sapiens
ttttgctactggctaggacatgggtttcgtctaagtgctaaccatagaagaaaagtaaattgtgcatggttgac

SEQ ID NO: 158551 - DNA, 71 bp, Homo sapiens
taggacatgggtttcgtctaagtgctaaccatagaagaaaagtaaattgtgcatggttgacctatttaagt

SEQ ID NO: 158552 - DNA, 69 bp, Homo sapiens
gggtttcgtctaagtgctaaccatagaagaaaagtaaattgtgcatggttgacctatttaagttttaga

SEQ ID NO: 158553 - DNA, 74 bp, Homo sapiens
tgctaaccatagaagaaaagtaaattgtgcatggttgacctatttaagttttagaaagaatgattctgattagc

SEQ ID NO: 158554 - DNA, 74 bp, Homo sapiens
catagaagaaaagtaaattgtgcatggttgacctatttaagttttagaaagaatgattctgattagctttatca

SEQ ID NO: 158555 - DNA, 71 bp, Homo sapiens
agtaaattgtgcatggttgacctatttaagttttagaaagaatgattctgattagctttatcaaaaggagg

SEQ ID NO: 158556 - DNA, 70 bp, Homo sapiens
gtgcatggttgacctatttaagttttagaaagaatgattctgattagctttatcaaaaggaggtttaggg

SEQ ID NO: 158557 - DNA, 70 bp, Homo sapiens
agttttagaaagaatgattctgattagctttatcaaaaggaggtttagggttgtcctggtgaatttctgc

SEQ ID NO: 158558 - DNA, 74 bp, Homo sapiens
aatgattctgattagctttatcaaaaggaggtttagggttgtcctggtgaatttctgctggcttggagaataca

SEQ ID NO: 158559 - DNA, 73 bp, Homo sapiens
ttagctttatcaaaaggaggtttagggttgtcctggtgaatttctgctggcttggagaatacagccagttgat

SEQ ID NO: 158560 - DNA, 70 bp, Homo sapiens
aaaaggaggtttagggttgtcctggtgaatttctgctggcttggagaatacagccagttgattgttagtt

SEQ ID NO: 158561 - DNA, 76 bp, Homo sapiens
ttgtcctggtgaatttctgctggcttggagaatacagccagttgattgttagttttattaatgaaatactgatatt

SEQ ID NO: 158562 - DNA, 74 bp, Homo sapiens
gaatttctgctggcttggagaatacagccagttgattgttagttttattaatgaaatactgatatttaaaagaa

SEQ ID NO: 158563 - DNA, 72 bp, Homo sapiens
ggcttggagaatacagccagttgattgttagttttattaatgaaatactgatatttaaaagaaaatctccac

SEQ ID NO: 158564 - DNA, 70 bp, Homo sapiens
gaatacagccagttgattgttagttttattaatgaaatactgatatttaaaagaaaatctccacctttaa

SEQ ID NO: 158565 - DNA, 67 bp, Homo sapiens
agttgattgttagttttattaatgaaatactgatatttaaaagaaaatctccacctttaattcttta

SEQ ID NO: 158566 - DNA, 70 bp, Homo sapiens
ttattaatgaaatactgatatttaaaagaaaatctccacctttaattctttatttcttatattgactcta

SEQ ID NO: 158567 - DNA, 69 bp, Homo sapiens
aatactgatatttaaaagaaaatctccacctttaattctttatttcttatattgactctaataatttca

SEQ ID NO: 158568 - DNA, 69 bp, Homo sapiens
tttaaaagaaaatctccacctttaattctttatttcttatattgactctaataatttcacaatgtagct

SEQ ID NO: 158569 - DNA, 70 bp, Homo sapiens
gaaaatctccacctttaattctttatttcttatattgactctaataatttcacaatgtagcttggttttg

SEQ ID NO: 158570 - DNA, 69 bp, Homo sapiens
ccacctttaattctttatttcttatattgactctaataatttcacaatgtagcttggttttgttattgt

SEQ ID NO: 158571 - DNA, 68 bp, Homo sapiens
tttttttttagttttggatcattgtattcttttgataagcatgaaaagaattttgttttggagttgac

SEQ ID NO: 158572 - DNA, 71 bp, Homo sapiens
ggatcattgtattcttttgataagcatgaaaagaattttgttttggagttgacctaaagcagtttttctgt

SEQ ID NO: 158573 - DNA, 71 bp, Homo sapiens
tttgataagcatgaaaagaattttgttttggagttgacctaaagcagtttttctgtttcagtaatcattgg

SEQ ID NO: 158574 - DNA, 72 bp, Homo sapiens
gcatgaaaagaattttgttttggagttgacctaaagcagtttttctgtttcagtaatcattggtgataatat

SEQ ID NO: 158575 - DNA, 75 bp, Homo sapiens
tggagttgacctaaagcagtttttctgtttcagtaatcattggtgataatatttctcagggaaaagtgtgtatca

SEQ ID NO: 158576 - DNA, 73 bp, Homo sapiens
gacctaaagcagtttttctgtttcagtaatcattggtgataatatttctcagggaaaagtgtgtatcaaggta

SEQ ID NO: 158577 - DNA, 73 bp, Homo sapiens
ttctgtttcagtaatcattggtgataatatttctcagggaaaagtgtgtatcaaggtaaatgtttaccaaaca

SEQ ID NO: 158578 - DNA, 72 bp, Homo sapiens
tcagtaatcattggtgataatatttctcagggaaaagtgtgtatcaaggtaaatgtttaccaaacaaagttg

SEQ ID NO: 158579 - DNA, 70 bp, Homo sapiens
gtgataatatttctcagggaaaagtgtgtatcaaggtaaatgtttaccaaacaaagttgttttcctggca

SEQ ID NO: 158580 - DNA, 69 bp, Homo sapiens
ttctcagggaaaagtgtgtatcaaggtaaatgtttaccaaacaaagttgttttcctggcaggagaaata

SEQ ID NO: 158581 - DNA, 65 bp, Homo sapiens
tcaaggtaaatgtttaccaaacaaagttgttttcctggcaggagaaataaccattaaggaaaggt

SEQ ID NO: 158582 - DNA, 64 bp, Homo sapiens
atgtttaccaaacaaagttgttttcctggcaggagaaataaccattaaggaaaggtttccttcc

SEQ ID NO: 158583 - DNA, 64 bp, Homo sapiens
caaacaaagttgttttcctggcaggagaaataaccattaaggaaaggtttccttccctttgaat

SEQ ID NO: 158584 - DNA, 66 bp, Homo sapiens
gttttcctggcaggagaaataaccattaaggaaaggtttccttccctttgaattaaattattgaga

SEQ ID NO: 158585 - DNA, 71 bp, Homo sapiens
ggcaggagaaataaccattaaggaaaggtttccttccctttgaattaaattattgagacatactgagatga

SEQ ID NO: 158586 - DNA, 74 bp, Homo sapiens
taaccattaaggaaaggtttccttccctttgaattaaattattgagacatactgagatgagcattgtacgctga

SEQ ID NO: 158587 - DNA, 76 bp, Homo sapiens
aaaggtttccttccctttgaattaaattattgagacatactgagatgagcattgtacgctgactgtactgatgaag

SEQ ID NO: 158588 - DNA, 84 bp, Homo sapiens
tccctttgaattaaattattgagacatactgagatgagcattgtacgctgactgtactgatgaagtgatcataggcagttatta

SEQ ID NO: 158589 - DNA, 84 bp, Homo sapiens
ttaaattattgagacatactgagatgagcattgtacgctgactgtactgatgaagtgatcataggcagttattatcttacctat

SEQ ID NO: 158590 - DNA, 85 bp, Homo sapiens
ttattgagacatactgagatgagcattgtacgctgactgtactgatgaagtgatcataggcagttattatcttacctattctaaa

SEQ ID NO: 158591 - DNA, 82 bp, Homo sapiens
atactgagatgagcattgtacgctgactgtactgatgaagtgatcataggcagttattatcttacctattctaaatagaaac

SEQ ID NO: 158592 - DNA, 78 bp, Homo sapiens
agcattgtacgctgactgtactgatgaagtgatcataggcagttattatcttacctattctaaatagaaacttctttc

SEQ ID NO: 158593 - DNA, 76 bp, Homo sapiens
cgctgactgtactgatgaagtgatcataggcagttattatcttacctattctaaatagaaacttctttctgaaaac

SEQ ID NO: 158594 - DNA, 76 bp, Homo sapiens
gatgaagtgatcataggcagttattatcttacctattctaaatagaaacttctttctgaaaacgtgctgcttccaa

SEQ ID NO: 158595 - DNA, 75 bp, Homo sapiens
tgatcataggcagttattatcttacctattctaaatagaaacttctttctgaaaacgtgctgcttccaagtaagc

SEQ ID NO: 158596 - DNA, 72 bp, Homo sapiens
cagttattatcttacctattctaaatagaaacttctttctgaaaacgtgctgcttccaagtaagctcttcat

SEQ ID NO: 158597 - DNA, 70 bp, Homo sapiens
cctattctaaatagaaacttctttctgaaaacgtgctgcttccaagtaagctcttcatttaggtattaag

SEQ ID NO: 158598 - DNA, 72 bp, Homo sapiens
atagaaacttctttctgaaaacgtgctgcttccaagtaagctcttcatttaggtattaagtacctacagcaa

SEQ ID NO: 158599 - DNA, 72 bp, Homo sapiens
ttctttctgaaaacgtgctgcttccaagtaagctcttcatttaggtattaagtacctacagcaatgcttttt

SEQ ID NO: 158600 - DNA, 69 bp, Homo sapiens
tttttttagaaacctttgtctttgtaagattataactaggttggctgcaacatattagactattaattc

SEQ ID NO: 158601 - DNA, 72 bp, Homo sapiens
aacctttgtctttgtaagattataactaggttggctgcaacatattagactattaattctgcccttgagact

SEQ ID NO: 158602 - DNA, 74 bp, Homo sapiens
ctttgtaagattataactaggttggctgcaacatattagactattaattctgcccttgagactttatggctgtt

SEQ ID NO: 158603 - DNA, 75 bp, Homo sapiens
aagattataactaggttggctgcaacatattagactattaattctgcccttgagactttatggctgtttattata

SEQ ID NO: 158604 - DNA, 73 bp, Homo sapiens
ctaggttggctgcaacatattagactattaattctgcccttgagactttatggctgtttattataaatttaag

SEQ ID NO: 158605 - DNA, 73 bp, Homo sapiens
catattagactattaattctgcccttgagactttatggctgtttattataaatttaagttttgctttccagca

SEQ ID NO: 158606 - DNA, 71 bp, Homo sapiens
agactattaattctgcccttgagactttatggctgtttattataaatttaagttttgctttccagcattct

SEQ ID NO: 158607 - DNA, 74 bp, Homo sapiens
gcccttgagactttatggctgtttattataaatttaagttttgctttccagcattcttatcaattgagaacaga

SEQ ID NO: 158608 - DNA, 74 bp, Homo sapiens
ctttatggctgtttattataaatttaagttttgctttccagcattcttatcaattgagaacagacaaccacagc

SEQ ID NO: 158609 - DNA, 75 bp, Homo sapiens
aatttaagttttgctttccagcattcttatcaattgagaacagacaaccacagctggcagaattaggtcttgtta

SEQ ID NO: 158610 - DNA, 80 bp, Homo sapiens
ttttgctttccagcattcttatcaattgagaacagacaaccacagctggcagaattaggtcttgttattgggcatcttga

SEQ ID NO: 158611 - DNA, 80 bp, Homo sapiens
agcattcttatcaattgagaacagacaaccacagctggcagaattaggtcttgttattgggcatcttgactcatatttgt

SEQ ID NO: 158612 - DNA, 78 bp, Homo sapiens
ttatcaattgagaacagacaaccacagctggcagaattaggtcttgttattgggcatcttgactcatatttgttttta

SEQ ID NO: 158613 - DNA, 76 bp, Homo sapiens
agaacagacaaccacagctggcagaattaggtcttgttattgggcatcttgactcatatttgtttttattgttata

SEQ ID NO: 158614 - DNA, 80 bp, Homo sapiens
acagctggcagaattaggtcttgttattgggcatcttgactcatatttgtttttattgttatatgcagagcattgtattg

SEQ ID NO: 158615 - DNA, 78 bp, Homo sapiens
aattaggtcttgttattgggcatcttgactcatatttgtttttattgttatatgcagagcattgtattggatcctgag

SEQ ID NO: 158616 - DNA, 79 bp, Homo sapiens
ttgttattgggcatcttgactcatatttgtttttattgttatatgcagagcattgtattggatcctgagggaggaccta

SEQ ID NO: 158617 - DNA, 77 bp, Homo sapiens
ttgactcatatttgtttttattgttatatgcagagcattgtattggatcctgagggaggacctagaatagggaataa

SEQ ID NO: 158618 - DNA, 73 bp, Homo sapiens
ttgtttttattgttatatgcagagcattgtattggatcctgagggaggacctagaatagggaataaaagaggt

SEQ ID NO: 158619 - DNA, 73 bp, Homo sapiens
tttattgttatatgcagagcattgtattggatcctgagggaggacctagaatagggaataaaagaggtttcct

SEQ ID NO: 158620 - DNA, 75 bp, Homo sapiens
tgttatatgcagagcattgtattggatcctgagggaggacctagaatagggaataaaagaggtttccttgtccca

SEQ ID NO: 158621 - DNA, 70 bp, Homo sapiens
ttgtattggatcctgagggaggacctagaatagggaataaaagaggtttccttgtcccagaaaagctata

SEQ ID NO: 158622 - DNA, 70 bp, Homo sapiens
ctagaatagggaataaaagaggtttccttgtcccagaaaagctatattctagtgggagagactgtaaaga

SEQ ID NO: 158623 - DNA, 68 bp, Homo sapiens
gaataaaagaggtttccttgtcccagaaaagctatattctagtgggagagactgtaaagaagaaaact

SEQ ID NO: 158624 - DNA, 69 bp, Homo sapiens
aaagaggtttccttgtcccagaaaagctatattctagtgggagagactgtaaagaagaaaacttctcat

SEQ ID NO: 158625 - DNA, 75 bp, Homo sapiens
aaagctatattctagtgggagagactgtaaagaagaaaacttctcattgttgagcacttacctgtgtgtgaggta

SEQ ID NO: 158626 - DNA, 78 bp, Homo sapiens
tagtgggagagactgtaaagaagaaaacttctcattgttgagcacttacctgtgtgtgaggtagcatgagttgcttta

SEQ ID NO: 158627 - DNA, 77 bp, Homo sapiens
agagactgtaaagaagaaaacttctcattgttgagcacttacctgtgtgtgaggtagcatgagttgctttatatatt

SEQ ID NO: 158628 - DNA, 76 bp, Homo sapiens
agaagaaaacttctcattgttgagcacttacctgtgtgtgaggtagcatgagttgctttatatattttgtttaatc

SEQ ID NO: 158629 - DNA, 77 bp, Homo sapiens
acttctcattgttgagcacttacctgtgtgtgaggtagcatgagttgctttatatattttgtttaatcctcaaaaca

SEQ ID NO: 158630 - DNA, 75 bp, Homo sapiens
ttgagcacttacctgtgtgtgaggtagcatgagttgctttatatattttgtttaatcctcaaaacaagcttgttt

SEQ ID NO: 158631 - DNA, 73 bp, Homo sapiens
acctgtgtgtgaggtagcatgagttgctttatatattttgtttaatcctcaaaacaagcttgttttcatttta

SEQ ID NO: 158632 - DNA, 72 bp, Homo sapiens
tgctttatatattttgtttaatcctcaaaacaagcttgttttcattttataaagtggagatttgagttcaca

SEQ ID NO: 158633 - DNA, 69 bp, Homo sapiens
attttgtttaatcctcaaaacaagcttgttttcattttataaagtggagatttgagttcacatagactt

SEQ ID NO: 158634 - DNA, 71 bp, Homo sapiens
atcctcaaaacaagcttgttttcattttataaagtggagatttgagttcacatagactttaaataactcac

SEQ ID NO: 158635 - DNA, 74 bp, Homo sapiens
caagcttgttttcattttataaagtggagatttgagttcacatagactttaaataactcactcaaggatgtggc

SEQ ID NO: 158636 - DNA, 77 bp, Homo sapiens
ttcattttataaagtggagatttgagttcacatagactttaaataactcactcaaggatgtggctgtcatgttgaaa

SEQ ID NO: 158637 - DNA, 78 bp, Homo sapiens
tttataaagtggagatttgagttcacatagactttaaataactcactcaaggatgtggctgtcatgttgaaatgtgaa

SEQ ID NO: 158638 - DNA, 79 bp, Homo sapiens
ttaaataactcactcaaggatgtggctgtcatgttgaaatgtgaacctgttcatgtcctgttgcagccccccagatgtt

SEQ ID NO: 158639 - DNA, 83 bp, Homo sapiens
atgttgaaatgtgaacctgttcatgtcctgttgcagccccccagatgtttctgctgcactgtaggacagacagatgtctagac

SEQ ID NO: 158640 - DNA, 82 bp, Homo sapiens
aatgtgaacctgttcatgtcctgttgcagccccccagatgtttctgctgcactgtaggacagacagatgtctagacgtggtg

SEQ ID NO: 158641 - DNA, 84 bp, Homo sapiens
ttcatgtcctgttgcagccccccagatgtttctgctgcactgtaggacagacagatgtctagacgtggtggatgaggttgatta

SEQ ID NO: 158642 - DNA, 84 bp, Homo sapiens
ttgcagccccccagatgtttctgctgcactgtaggacagacagatgtctagacgtggtggatgaggttgattaggcactgtgtg

SEQ ID NO: 158643 - DNA, 84 bp, Homo sapiens
tttctgctgcactgtaggacagacagatgtctagacgtggtggatgaggttgattaggcactgtgtggggcgtgagctgcctcg

SEQ ID NO: 158644 - DNA, 80 bp, Homo sapiens
agatgtctagacgtggtggatgaggttgattaggcactgtgtggggcgtgagctgcctcggagtccctcgtgagcaggaa

SEQ ID NO: 158645 - DNA, 79 bp, Homo sapiens
ctagacgtggtggatgaggttgattaggcactgtgtggggcgtgagctgcctcggagtccctcgtgagcaggaagaata

SEQ ID NO: 158646 - DNA, 78 bp, Homo sapiens
atgaggttgattaggcactgtgtggggcgtgagctgcctcggagtccctcgtgagcaggaagaatacttgtatttgaa

SEQ ID NO: 158647 - DNA, 78 bp, Homo sapiens
attaggcactgtgtggggcgtgagctgcctcggagtccctcgtgagcaggaagaatacttgtatttgaatgccaggcc

SEQ ID NO: 158648 - DNA, 79 bp, Homo sapiens
tgtgtggggcgtgagctgcctcggagtccctcgtgagcaggaagaatacttgtatttgaatgccaggcctgtctaggta

SEQ ID NO: 158649 - DNA, 79 bp, Homo sapiens
gctgcctcggagtccctcgtgagcaggaagaatacttgtatttgaatgccaggcctgtctaggtaggtgatggtctcaa

SEQ ID NO: 158650 - DNA, 77 bp, Homo sapiens
agtccctcgtgagcaggaagaatacttgtatttgaatgccaggcctgtctaggtaggtgatggtctcaagtcaccaa

SEQ ID NO: 158651 - DNA, 77 bp, Homo sapiens
tgagcaggaagaatacttgtatttgaatgccaggcctgtctaggtaggtgatggtctcaagtcaccaacaatttctt

SEQ ID NO: 158652 - DNA, 77 bp, Homo sapiens
tatttgaatgccaggcctgtctaggtaggtgatggtctcaagtcaccaacaatttctttctctcatttaaccattca

SEQ ID NO: 158653 - DNA, 76 bp, Homo sapiens
atgccaggcctgtctaggtaggtgatggtctcaagtcaccaacaatttctttctctcatttaaccattcattcatt

SEQ ID NO: 158654 - DNA, 75 bp, Homo sapiens
tgtctaggtaggtgatggtctcaagtcaccaacaatttctttctctcatttaaccattcattcatttgtttcttc

SEQ ID NO: 158655 - DNA, 73 bp, Homo sapiens
ggtgatggtctcaagtcaccaacaatttctttctctcatttaaccattcattcatttgtttcttctggaactt

SEQ ID NO: 158656 - DNA, 71 bp, Homo sapiens
gtcaccaacaatttctttctctcatttaaccattcattcatttgtttcttctggaacttttcttgtacctg

SEQ ID NO: 158657 - DNA, 73 bp, Homo sapiens
tttctttctctcatttaaccattcattcatttgtttcttctggaacttttcttgtacctgttgtaagatcaga

SEQ ID NO: 158658 - DNA, 73 bp, Homo sapiens
ttctctcatttaaccattcattcatttgtttcttctggaacttttcttgtacctgttgtaagatcagagaaaa

SEQ ID NO: 158659 - DNA, 72 bp, Homo sapiens
ttgtttcttctggaacttttcttgtacctgttgtaagatcagagaaaaataattagtgtcaaactcccagca

SEQ ID NO: 158660 - DNA, 77 bp, Homo sapiens
tggaacttttcttgtacctgttgtaagatcagagaaaaataattagtgtcaaactcccagcagagcatggtgatgta

SEQ ID NO: 158661 - DNA, 77 bp, Homo sapiens
ttttcttgtacctgttgtaagatcagagaaaaataattagtgtcaaactcccagcagagcatggtgatgtaggcagg

SEQ ID NO: 158662 - DNA, 78 bp, Homo sapiens
ttgtaagatcagagaaaaataattagtgtcaaactcccagcagagcatggtgatgtaggcaggtctggggccagttaa

SEQ ID NO: 158663 - DNA, 79 bp, Homo sapiens
agagaaaaataattagtgtcaaactcccagcagagcatggtgatgtaggcaggtctggggccagttaatgctggctgta

SEQ ID NO: 158664 - DNA, 79 bp, Homo sapiens
aaaataattagtgtcaaactcccagcagagcatggtgatgtaggcaggtctggggccagttaatgctggctgtacctca

SEQ ID NO: 158665 - DNA, 85 bp, Homo sapiens
tgtcaaactcccagcagagcatggtgatgtaggcaggtctggggccagttaatgctggctgtacctcagccctgctgctgggcaa

SEQ ID NO: 158666 - DNA, 84 bp, Homo sapiens
agcagagcatggtgatgtaggcaggtctggggccagttaatgctggctgtacctcagccctgctgctgggcaagctaggtgttg

SEQ ID NO: 158667 - DNA, 80 bp, Homo sapiens
atggtgatgtaggcaggtctggggccagttaatgctggctgtacctcagccctgctgctgggcaagctaggtgttggtgg

SEQ ID NO: 158668 - DNA, 78 bp, Homo sapiens
aggtctggggccagttaatgctggctgtacctcagccctgctgctgggcaagctaggtgttggtggtcagtgtacttc

SEQ ID NO: 158669 - DNA, 78 bp, Homo sapiens
ccagttaatgctggctgtacctcagccctgctgctgggcaagctaggtgttggtggtcagtgtacttctttggacctc

SEQ ID NO: 158670 - DNA, 75 bp, Homo sapiens
tgtacctcagccctgctgctgggcaagctaggtgttggtggtcagtgtacttctttggacctcccctcctctccc

SEQ ID NO: 158671 - DNA, 73 bp, Homo sapiens
ctgctgggcaagctaggtgttggtggtcagtgtacttctttggacctcccctcctctccccaaccctctgcac

SEQ ID NO: 158672 - DNA, 69 bp, Homo sapiens
ggtgttggtggtcagtgtacttctttggacctcccctcctctccccaaccctctgcacccctcctctcc

SEQ ID NO: 158673 - DNA, 67 bp, Homo sapiens
ctcctctccccaaccctctgcacccctcctctcccctcccttcatacccagttttcaggtttaggaa

SEQ ID NO: 158674 - DNA, 67 bp, Homo sapiens
caaccctctgcacccctcctctcccctcccttcatacccagttttcaggtttaggaacttgatttta

SEQ ID NO: 158675 - DNA, 67 bp, Homo sapiens
cacccctcctctcccctcccttcatacccagttttcaggtttaggaacttgattttatccatttgac

SEQ ID NO: 158676 - DNA, 68 bp, Homo sapiens
ctcccctcccttcatacccagttttcaggtttaggaacttgattttatccatttgactagttttgata

SEQ ID NO: 158677 - DNA, 69 bp, Homo sapiens
ctcccttcatacccagttttcaggtttaggaacttgattttatccatttgactagttttgataagattc

SEQ ID NO: 158678 - DNA, 69 bp, Homo sapiens
acccagttttcaggtttaggaacttgattttatccatttgactagttttgataagattctgtggaatta

SEQ ID NO: 158679 - DNA, 73 bp, Homo sapiens
caggtttaggaacttgattttatccatttgactagttttgataagattctgtggaattattcacaacagccaa

SEQ ID NO: 158680 - DNA, 76 bp, Homo sapiens
cttgattttatccatttgactagttttgataagattctgtggaattattcacaacagccaaacatgattggcaaaa

SEQ ID NO: 158681 - DNA, 78 bp, Homo sapiens
ccatttgactagttttgataagattctgtggaattattcacaacagccaaacatgattggcaaaataattgagcagaa

SEQ ID NO: 158682 - DNA, 79 bp, Homo sapiens
tagttttgataagattctgtggaattattcacaacagccaaacatgattggcaaaataattgagcagaatgttaatctg

SEQ ID NO: 158683 - DNA, 77 bp, Homo sapiens
gattctgtggaattattcacaacagccaaacatgattggcaaaataattgagcagaatgttaatctgtttattaagg

SEQ ID NO: 158684 - DNA, 76 bp, Homo sapiens
gtggaattattcacaacagccaaacatgattggcaaaataattgagcagaatgttaatctgtttattaagggaata

SEQ ID NO: 158685 - DNA, 76 bp, Homo sapiens
cacaacagccaaacatgattggcaaaataattgagcagaatgttaatctgtttattaagggaatattctgggaaca

SEQ ID NO: 158686 - DNA, 75 bp, Homo sapiens
catgattggcaaaataattgagcagaatgttaatctgtttattaagggaatattctgggaacaggtattaataca

SEQ ID NO: 158687 - DNA, 72 bp, Homo sapiens
ggcaaaataattgagcagaatgttaatctgtttattaagggaatattctgggaacaggtattaatacattct

SEQ ID NO: 158688 - DNA, 75 bp, Homo sapiens
gagcagaatgttaatctgtttattaagggaatattctgggaacaggtattaatacattcttgtgtgatgtcaaac

SEQ ID NO: 158689 - DNA, 74 bp, Homo sapiens
gggaacaggtattaatacattcttgtgtgatgtcaaactaaattaatatttattaacatgtagtgcaaatgaaa

SEQ ID NO: 158690 - DNA, 75 bp, Homo sapiens
tacattcttgtgtgatgtcaaactaaattaatatttattaacatgtagtgcaaatgaaatatactaaaacatagt

SEQ ID NO: 158691 - DNA, 75 bp, Homo sapiens
tgtgatgtcaaactaaattaatatttattaacatgtagtgcaaatgaaatatactaaaacatagttttcataggc

SEQ ID NO: 158692 - DNA, 72 bp, Homo sapiens
tgtcaaactaaattaatatttattaacatgtagtgcaaatgaaatatactaaaacatagttttcataggctt

SEQ ID NO: 158693 - DNA, 72 bp, Homo sapiens
atatttattaacatgtagtgcaaatgaaatatactaaaacatagttttcataggctttatttaggcttggta

SEQ ID NO: 158694 - DNA, 72 bp, Homo sapiens
aacatgtagtgcaaatgaaatatactaaaacatagttttcataggctttatttaggcttggtagaacctgga

SEQ ID NO: 158695 - DNA, 71 bp, Homo sapiens
gtgcaaatgaaatatactaaaacatagttttcataggctttatttaggcttggtagaacctggaacattgt

SEQ ID NO: 158696 - DNA, 69 bp, Homo sapiens
atatactaaaacatagttttcataggctttatttaggcttggtagaacctggaacattgtttccaggaa

SEQ ID NO: 158697 - DNA, 69 bp, Homo sapiens
catagttttcataggctttatttaggcttggtagaacctggaacattgtttccaggaatactcttactt

SEQ ID NO: 158698 - DNA, 70 bp, Homo sapiens
ataggctttatttaggcttggtagaacctggaacattgtttccaggaatactcttacttttctatacaca

SEQ ID NO: 158699 - DNA, 72 bp, Homo sapiens
ttatttaggcttggtagaacctggaacattgtttccaggaatactcttacttttctatacacaggaatgcta

SEQ ID NO: 158700 - DNA, 76 bp, Homo sapiens
ttggtagaacctggaacattgtttccaggaatactcttacttttctatacacaggaatgctactgcctgatgagga

SEQ ID NO: 158701 - DNA, 76 bp, Homo sapiens
aacattgtttccaggaatactcttacttttctatacacaggaatgctactgcctgatgaggacaccagtatctcct

SEQ ID NO: 158702 - DNA, 74 bp, Homo sapiens
tcttacttttctatacacaggaatgctactgcctgatgaggacaccagtatctccttactcccttgggtttctt

SEQ ID NO: 158703 - DNA, 72 bp, Homo sapiens
cttttctatacacaggaatgctactgcctgatgaggacaccagtatctccttactcccttgggtttcttttt

SEQ ID NO: 158704 - DNA, 70 bp, Homo sapiens
tcttttttttctctctttgatctcttaacattttatgtaaggtaagtagctgggccacattggtaataaa

SEQ ID NO: 158705 - DNA, 72 bp, Homo sapiens
tttctctctttgatctcttaacattttatgtaaggtaagtagctgggccacattggtaataaagattttatg

SEQ ID NO: 158706 - DNA, 71 bp, Homo sapiens
tctcttaacattttatgtaaggtaagtagctgggccacattggtaataaagattttatgtttgcagtttcc

SEQ ID NO: 158707 - DNA, 68 bp, Homo sapiens
acattttatgtaaggtaagtagctgggccacattggtaataaagattttatgtttgcagtttcctttt

SEQ ID NO: 158708 - DNA, 68 bp, Homo sapiens
aggtaagtagctgggccacattggtaataaagattttatgtttgcagtttccttttttacagtgaagg

SEQ ID NO: 158709 - DNA, 69 bp, Homo sapiens
cattggtaataaagattttatgtttgcagtttccttttttacagtgaagggcagtaatttatatgtaag

SEQ ID NO: 158710 - DNA, 70 bp, Homo sapiens
gattttatgtttgcagtttccttttttacagtgaagggcagtaatttatatgtaaggaattttcatgaag

SEQ ID NO: 158711 - DNA, 69 bp, Homo sapiens
gtttgcagtttccttttttacagtgaagggcagtaatttatatgtaaggaattttcatgaaggtgactt

SEQ ID NO: 158712 - DNA, 69 bp, Homo sapiens
ccttttttacagtgaagggcagtaatttatatgtaaggaattttcatgaaggtgactttaagtggattc

SEQ ID NO: 158713 - DNA, 71 bp, Homo sapiens
acagtgaagggcagtaatttatatgtaaggaattttcatgaaggtgactttaagtggattctcctcttttc

SEQ ID NO: 158714 - DNA, 69 bp, Homo sapiens
gggcagtaatttatatgtaaggaattttcatgaaggtgactttaagtggattctcctcttttccctgtt

SEQ ID NO: 158715 - DNA, 70 bp, Homo sapiens
aaggtgactttaagtggattctcctcttttccctgtttgtctttatcagctcattctggattctttcctt

SEQ ID NO: 158716 - DNA, 76 bp, Homo sapiens
taagtggattctcctcttttccctgtttgtctttatcagctcattctggattctttcctttgtgttgctgatgtta

SEQ ID NO: 158717 - DNA, 77 bp, Homo sapiens
ttccctgtttgtctttatcagctcattctggattctttcctttgtgttgctgatgttaatgggcattccctctcacc

SEQ ID NO: 158718 - DNA, 82 bp, Homo sapiens
tttatcagctcattctggattctttcctttgtgttgctgatgttaatgggcattccctctcacccttgccagccacagatga

SEQ ID NO: 158719 - DNA, 78 bp, Homo sapiens
attctttcctttgtgttgctgatgttaatgggcattccctctcacccttgccagccacagatgatgcttctgtttttc

SEQ ID NO: 158720 - DNA, 78 bp, Homo sapiens
tgttgctgatgttaatgggcattccctctcacccttgccagccacagatgatgcttctgtttttcttttggttcttta

SEQ ID NO: 158721 - DNA, 75 bp, Homo sapiens
atgttaatgggcattccctctcacccttgccagccacagatgatgcttctgtttttcttttggttctttaatatc

SEQ ID NO: 158722 - DNA, 73 bp, Homo sapiens
attccctctcacccttgccagccacagatgatgcttctgtttttcttttggttctttaatatctggtaatttg

SEQ ID NO: 158723 - DNA, 71 bp, Homo sapiens
acccttgccagccacagatgatgcttctgtttttcttttggttctttaatatctggtaatttggaattatt

SEQ ID NO: 158724 - DNA, 74 bp, Homo sapiens
gccagccacagatgatgcttctgtttttcttttggttctttaatatctggtaatttggaattatttgttggcaa

SEQ ID NO: 158725 - DNA, 69 bp, Homo sapiens
tttcttttggttctttaatatctggtaatttggaattatttgttggcaattctcagggaaactggtgct

SEQ ID NO: 158726 - DNA, 69 bp, Homo sapiens
ggttctttaatatctggtaatttggaattatttgttggcaattctcagggaaactggtgcttttgtatt

SEQ ID NO: 158727 - DNA, 72 bp, Homo sapiens
atatctggtaatttggaattatttgttggcaattctcagggaaactggtgcttttgtatttcttgtcatcct

SEQ ID NO: 158728 - DNA, 71 bp, Homo sapiens
aatttggaattatttgttggcaattctcagggaaactggtgcttttgtatttcttgtcatcctttggtaca

SEQ ID NO: 158729 - DNA, 73 bp, Homo sapiens
ttatttgttggcaattctcagggaaactggtgcttttgtatttcttgtcatcctttggtacatctggcctgtt

SEQ ID NO: 158730 - DNA, 75 bp, Homo sapiens
attctcagggaaactggtgcttttgtatttcttgtcatcctttggtacatctggcctgttttattctgatcacaa

SEQ ID NO: 158731 - DNA, 74 bp, Homo sapiens
aactggtgcttttgtatttcttgtcatcctttggtacatctggcctgttttattctgatcacaactaatgtaaa

SEQ ID NO: 158732 - DNA, 73 bp, Homo sapiens
ttgtatttcttgtcatcctttggtacatctggcctgttttattctgatcacaactaatgtaaaactattttgt

SEQ ID NO: 158733 - DNA, 74 bp, Homo sapiens
tttcttgtcatcctttggtacatctggcctgttttattctgatcacaactaatgtaaaactattttgttagcaa

SEQ ID NO: 158734 - DNA, 74 bp, Homo sapiens
gttttattctgatcacaactaatgtaaaactattttgttagcaaaatgattgagtactatggagattaattgct

SEQ ID NO: 158735 - DNA, 70 bp, Homo sapiens
gtaaaactattttgttagcaaaatgattgagtactatggagattaattgcttttttgctttaacttcttg

SEQ ID NO: 158736 - DNA, 73 bp, Homo sapiens
gcaaaatgattgagtactatggagattaattgcttttttgctttaacttcttgtataagggtgagcctttgga

SEQ ID NO: 158737 - DNA, 70 bp, Homo sapiens
agtactatggagattaattgcttttttgctttaacttcttgtataagggtgagcctttggagaagcctgg

SEQ ID NO: 158738 - DNA, 66 bp, Homo sapiens
ttaattgcttttttgctttaacttcttgtataagggtgagcctttggagaagcctgggggtagttt

SEQ ID NO: 158739 - DNA, 69 bp, Homo sapiens
ttttgctttaacttcttgtataagggtgagcctttggagaagcctgggggtagttttgccaatgaatat

SEQ ID NO: 158740 - DNA, 68 bp, Homo sapiens
ctttaacttcttgtataagggtgagcctttggagaagcctgggggtagttttgccaatgaatatttta

SEQ ID NO: 158741 - DNA, 69 bp, Homo sapiens
tataagggtgagcctttggagaagcctgggggtagttttgccaatgaatattttagagactattaggtt

SEQ ID NO: 158742 - DNA, 68 bp, Homo sapiens
cctttggagaagcctgggggtagttttgccaatgaatattttagagactattaggtttagtataaaga

SEQ ID NO: 158743 - DNA, 70 bp, Homo sapiens
gagaagcctgggggtagttttgccaatgaatattttagagactattaggtttagtataaagatggtttca

SEQ ID NO: 158744 - DNA, 68 bp, Homo sapiens
gggtagttttgccaatgaatattttagagactattaggtttagtataaagatggtttcagggtggtag

SEQ ID NO: 158745 - DNA, 71 bp, Homo sapiens
gccaatgaatattttagagactattaggtttagtataaagatggtttcagggtggtagtgtgaaagtattg

SEQ ID NO: 158746 - DNA, 70 bp, Homo sapiens
tttagagactattaggtttagtataaagatggtttcagggtggtagtgtgaaagtattggaatcctggaa

SEQ ID NO: 158747 - DNA, 69 bp, Homo sapiens
gactattaggtttagtataaagatggtttcagggtggtagtgtgaaagtattggaatcctggaataaaa

SEQ ID NO: 158748 - DNA, 72 bp, Homo sapiens
atggtttcagggtggtagtgtgaaagtattggaatcctggaataaaaatacagctcccatgataaaatctta

SEQ ID NO: 158749 - DNA, 70 bp, Homo sapiens
agggtggtagtgtgaaagtattggaatcctggaataaaaatacagctcccatgataaaatcttaaattta

SEQ ID NO: 158750 - DNA, 72 bp, Homo sapiens
tgtgaaagtattggaatcctggaataaaaatacagctcccatgataaaatcttaaatttatacagctaaatt

SEQ ID NO: 158751 - DNA, 69 bp, Homo sapiens
ggaataaaaatacagctcccatgataaaatcttaaatttatacagctaaatttgtatagaaatttttgt

SEQ ID NO: 158752 - DNA, 66 bp, Homo sapiens
aaaatcttaaatttatacagctaaatttgtatagaaatttttgttttctaaagtgccattttagga

SEQ ID NO: 158753 - DNA, 67 bp, Homo sapiens
atttatacagctaaatttgtatagaaatttttgttttctaaagtgccattttaggagtccgtggaag

SEQ ID NO: 158754 - DNA, 65 bp, Homo sapiens
ctaaatttgtatagaaatttttgttttctaaagtgccattttaggagtccgtggaagggggtagc

SEQ ID NO: 158755 - DNA, 70 bp, Homo sapiens
tatagaaatttttgttttctaaagtgccattttaggagtccgtggaagggggtagcggcagatgcttgaa

SEQ ID NO: 158756 - DNA, 72 bp, Homo sapiens
ttgttttctaaagtgccattttaggagtccgtggaagggggtagcggcagatgcttgaatgattccaagagg

SEQ ID NO: 158757 - DNA, 75 bp, Homo sapiens
ttctaaagtgccattttaggagtccgtggaagggggtagcggcagatgcttgaatgattccaagaggtacagcca

SEQ ID NO: 158758 - DNA, 76 bp, Homo sapiens
ccattttaggagtccgtggaagggggtagcggcagatgcttgaatgattccaagaggtacagccagcagatgtggg

SEQ ID NO: 158759 - DNA, 77 bp, Homo sapiens
cgtggaagggggtagcggcagatgcttgaatgattccaagaggtacagccagcagatgtggggagaacgaaggtgaa

SEQ ID NO: 158760 - DNA, 78 bp, Homo sapiens
gggtagcggcagatgcttgaatgattccaagaggtacagccagcagatgtggggagaacgaaggtgaaggaaagctgg

SEQ ID NO: 158761 - DNA, 79 bp, Homo sapiens
agatgcttgaatgattccaagaggtacagccagcagatgtggggagaacgaaggtgaaggaaagctggggagacagtgc

SEQ ID NO: 158762 - DNA, 76 bp, Homo sapiens
aatgattccaagaggtacagccagcagatgtggggagaacgaaggtgaaggaaagctggggagacagtgcgtagga

SEQ ID NO: 158763 - DNA, 76 bp, Homo sapiens
agccagcagatgtggggagaacgaaggtgaaggaaagctggggagacagtgcgtaggacgtggtcagcacagtacc

SEQ ID NO: 158764 - DNA, 75 bp, Homo sapiens
ggagaacgaaggtgaaggaaagctggggagacagtgcgtaggacgtggtcagcacagtacctggcacataggcgg

SEQ ID NO: 158765 - DNA, 76 bp, Homo sapiens
acgaaggtgaaggaaagctggggagacagtgcgtaggacgtggtcagcacagtacctggcacataggcggtgagcg

SEQ ID NO: 158766 - DNA, 80 bp, Homo sapiens
agctggggagacagtgcgtaggacgtggtcagcacagtacctggcacataggcggtgagcgtggcctgtcattaatatta

SEQ ID NO: 158767 - DNA, 77 bp, Homo sapiens
agcacagtacctggcacataggcggtgagcgtggcctgtcattaatattacctaagactcacaggtttatagtgtag

SEQ ID NO: 158768 - DNA, 78 bp, Homo sapiens
ctggcacataggcggtgagcgtggcctgtcattaatattacctaagactcacaggtttatagtgtaggagcatgtttc

SEQ ID NO: 158769 - DNA, 79 bp, Homo sapiens
ataggcggtgagcgtggcctgtcattaatattacctaagactcacaggtttatagtgtaggagcatgtttcgcatgcat

SEQ ID NO: 158770 - DNA, 77 bp, Homo sapiens
gtggcctgtcattaatattacctaagactcacaggtttatagtgtaggagcatgtttcgcatgcatttttagttata

SEQ ID NO: 158771 - DNA, 75 bp, Homo sapiens
ctgtcattaatattacctaagactcacaggtttatagtgtaggagcatgtttcgcatgcatttttagttataaag

SEQ ID NO: 158772 - DNA, 71 bp, Homo sapiens
attacctaagactcacaggtttatagtgtaggagcatgtttcgcatgcatttttagttataaaggtttggt

SEQ ID NO: 158773 - DNA, 69 bp, Homo sapiens
gactcacaggtttatagtgtaggagcatgtttcgcatgcatttttagttataaaggtttggtttttttt

SEQ ID NO: 158774 - DNA, 70 bp, Homo sapiens
caccgtgcccggcagttataaaggttttagggttgccagactaacatagagatggacatgtttaaaagga

SEQ ID NO: 158775 - DNA, 70 bp, Homo sapiens
cggcagttataaaggttttagggttgccagactaacatagagatggacatgtttaaaaggatgtcaggtt

SEQ ID NO: 158776 - DNA, 71 bp, Homo sapiens
tataaaggttttagggttgccagactaacatagagatggacatgtttaaaaggatgtcaggtttgctttgt

SEQ ID NO: 158777 - DNA, 73 bp, Homo sapiens
tttagggttgccagactaacatagagatggacatgtttaaaaggatgtcaggtttgctttgtttgttacttga

SEQ ID NO: 158778 - DNA, 73 bp, Homo sapiens
ctaacatagagatggacatgtttaaaaggatgtcaggtttgctttgtttgttacttgacccagaccagactaa

SEQ ID NO: 158779 - DNA, 72 bp, Homo sapiens
tagagatggacatgtttaaaaggatgtcaggtttgctttgtttgttacttgacccagaccagactaagaggt

SEQ ID NO: 158780 - DNA, 70 bp, Homo sapiens
tttaaaaggatgtcaggtttgctttgtttgttacttgacccagaccagactaagaggttgttgatagaat

SEQ ID NO: 158781 - DNA, 73 bp, Homo sapiens
aaggatgtcaggtttgctttgtttgttacttgacccagaccagactaagaggttgttgatagaatttctgaga

SEQ ID NO: 158782 - DNA, 76 bp, Homo sapiens
ttgctttgtttgttacttgacccagaccagactaagaggttgttgatagaatttctgagagacagcaggactccta

SEQ ID NO: 158783 - DNA, 76 bp, Homo sapiens
tttgtttgttacttgacccagaccagactaagaggttgttgatagaatttctgagagacagcaggactcctactca

SEQ ID NO: 158784 - DNA, 77 bp, Homo sapiens
gtttgttacttgacccagaccagactaagaggttgttgatagaatttctgagagacagcaggactcctactcatgta

SEQ ID NO: 158785 - DNA, 78 bp, Homo sapiens
ttgacccagaccagactaagaggttgttgatagaatttctgagagacagcaggactcctactcatgtagctcccattt

SEQ ID NO: 158786 - DNA, 78 bp, Homo sapiens
acccagaccagactaagaggttgttgatagaatttctgagagacagcaggactcctactcatgtagctcccattttgc

SEQ ID NO: 158787 - DNA, 77 bp, Homo sapiens
actaagaggttgttgatagaatttctgagagacagcaggactcctactcatgtagctcccattttgccaactcttta

SEQ ID NO: 158788 - DNA, 77 bp, Homo sapiens
ggttgttgatagaatttctgagagacagcaggactcctactcatgtagctcccattttgccaactctttaagctttc

SEQ ID NO: 158789 - DNA, 79 bp, Homo sapiens
ttgatagaatttctgagagacagcaggactcctactcatgtagctcccattttgccaactctttaagctttctcaggtc

SEQ ID NO: 158790 - DNA, 79 bp, Homo sapiens
agaatttctgagagacagcaggactcctactcatgtagctcccattttgccaactctttaagctttctcaggtctcgca

SEQ ID NO: 158791 - DNA, 76 bp, Homo sapiens
agagacagcaggactcctactcatgtagctcccattttgccaactctttaagctttctcaggtctcgcacccaaaa

SEQ ID NO: 158792 - DNA, 75 bp, Homo sapiens
agcaggactcctactcatgtagctcccattttgccaactctttaagctttctcaggtctcgcacccaaaactatg

SEQ ID NO: 158793 - DNA, 73 bp, Homo sapiens
tcatgtagctcccattttgccaactctttaagctttctcaggtctcgcacccaaaactatggccctcctttac

SEQ ID NO: 158794 - DNA, 71 bp, Homo sapiens
caactctttaagctttctcaggtctcgcacccaaaactatggccctcctttactccagaatctatgggtaa

SEQ ID NO: 158795 - DNA, 71 bp, Homo sapiens
taagctttctcaggtctcgcacccaaaactatggccctcctttactccagaatctatgggtaagtgttgtt

SEQ ID NO: 158796 - DNA, 72 bp, Homo sapiens
aggtctcgcacccaaaactatggccctcctttactccagaatctatgggtaagtgttgtttctgaacataca

SEQ ID NO: 158797 - DNA, 73 bp, Homo sapiens
ccaaaactatggccctcctttactccagaatctatgggtaagtgttgtttctgaacatacatgctcatttatt

SEQ ID NO: 158798 - DNA, 74 bp, Homo sapiens
actatggccctcctttactccagaatctatgggtaagtgttgtttctgaacatacatgctcatttattttgtat

SEQ ID NO: 158799 - DNA, 75 bp, Homo sapiens
cagaatctatgggtaagtgttgtttctgaacatacatgctcatttattttgtattttctcttggtatagtgggta

SEQ ID NO: 158800 - DNA, 74 bp, Homo sapiens
agtgttgtttctgaacatacatgctcatttattttgtattttctcttggtatagtgggtaacaagacaccctga

SEQ ID NO: 158801 - DNA, 78 bp, Homo sapiens
tctgaacatacatgctcatttattttgtattttctcttggtatagtgggtaacaagacaccctgagcaagcactataa

SEQ ID NO: 158802 - DNA, 74 bp, Homo sapiens
atgctcatttattttgtattttctcttggtatagtgggtaacaagacaccctgagcaagcactataaagtttca

SEQ ID NO: 158803 - DNA, 72 bp, Homo sapiens
attttgtattttctcttggtatagtgggtaacaagacaccctgagcaagcactataaagtttcagggctaga

SEQ ID NO: 158804 - DNA, 74 bp, Homo sapiens
tttctcttggtatagtgggtaacaagacaccctgagcaagcactataaagtttcagggctagaaatgtgcctta

SEQ ID NO: 158805 - DNA, 75 bp, Homo sapiens
tatagtgggtaacaagacaccctgagcaagcactataaagtttcagggctagaaatgtgccttactgtctcactt

SEQ ID NO: 158806 - DNA, 72 bp, Homo sapiens
gggtaacaagacaccctgagcaagcactataaagtttcagggctagaaatgtgccttactgtctcacttttt

SEQ ID NO: 158807 - DNA, 72 bp, Homo sapiens
acaccctgagcaagcactataaagtttcagggctagaaatgtgccttactgtctcacttttttgttttgatt

SEQ ID NO: 158808 - DNA, 71 bp, Homo sapiens
caagcactataaagtttcagggctagaaatgtgccttactgtctcacttttttgttttgattttcataagt

SEQ ID NO: 158809 - DNA, 69 bp, Homo sapiens
ggctagaaatgtgccttactgtctcacttttttgttttgattttcataagtttgtatggttgttaaccc

SEQ ID NO: 158810 - DNA, 69 bp, Homo sapiens
gccttactgtctcacttttttgttttgattttcataagtttgtatggttgttaaccctgttctaataca

SEQ ID NO: 158811 - DNA, 66 bp, Homo sapiens
cacttttttgttttgattttcataagtttgtatggttgttaaccctgttctaatacaggttaagtg

SEQ ID NO: 158812 - DNA, 69 bp, Homo sapiens
gttttgattttcataagtttgtatggttgttaaccctgttctaatacaggttaagtgtctctaacttga

SEQ ID NO: 158813 - DNA, 69 bp, Homo sapiens
ttcataagtttgtatggttgttaaccctgttctaatacaggttaagtgtctctaacttgaaaacctgaa

SEQ ID NO: 158814 - DNA, 74 bp, Homo sapiens
tgttaaccctgttctaatacaggttaagtgtctctaacttgaaaacctgaaatatgacatgctccaaaatctga

SEQ ID NO: 158815 - DNA, 75 bp, Homo sapiens
ttctaatacaggttaagtgtctctaacttgaaaacctgaaatatgacatgctccaaaatctgaaatgttttgagc

SEQ ID NO: 158816 - DNA, 76 bp, Homo sapiens
aggttaagtgtctctaacttgaaaacctgaaatatgacatgctccaaaatctgaaatgttttgagcgccaacatga

SEQ ID NO: 158817 - DNA, 81 bp, Homo sapiens
aaaacctgaaatatgacatgctccaaaatctgaaatgttttgagcgccaacatgacactcaaaggagaaatgcatattgca

SEQ ID NO: 158818 - DNA, 84 bp, Homo sapiens
aatatgacatgctccaaaatctgaaatgttttgagcgccaacatgacactcaaaggagaaatgcatattgcagcatttcagatt

SEQ ID NO: 158819 - DNA, 85 bp, Homo sapiens
aaaatctgaaatgttttgagcgccaacatgacactcaaaggagaaatgcatattgcagcatttcagatttcagattctcagatca

SEQ ID NO: 158820 - DNA, 88 bp, Homo sapiens
aaatgttttgagcgccaacatgacactcaaaggagaaatgcatattgcagcatttcagatttcagattctcagatcagacatgctgaa

SEQ ID NO: 158821 - DNA, 92 bp, Homo sapiens
cgccaacatgacactcaaaggagaaatgcatattgcagcatttcagatttcagattctcagatcagacatgctgaagtgtatcatgcaaata

SEQ ID NO: 158822 - DNA, 92 bp, Homo sapiens
acatgacactcaaaggagaaatgcatattgcagcatttcagatttcagattctcagatcagacatgctgaagtgtatcatgcaaatattcca

SEQ ID NO: 158823 - DNA, 73 bp, Homo sapiens
tattccaaaatctgcaaatactcaaaattcaaaatagttctggttccaagcattttgaataaagtattctcaa

SEQ ID NO: 158824 - DNA, 74 bp, Homo sapiens
tctgcaaatactcaaaattcaaaatagttctggttccaagcattttgaataaagtattctcaacctgtatccca

SEQ ID NO: 158825 - DNA, 70 bp, Homo sapiens
caaaatagttctggttccaagcattttgaataaagtattctcaacctgtatcccatttctcctatttttc

SEQ ID NO: 158826 - DNA, 70 bp, Homo sapiens
agttctggttccaagcattttgaataaagtattctcaacctgtatcccatttctcctatttttcttcaaa

SEQ ID NO: 158827 - DNA, 70 bp, Homo sapiens
ccaagcattttgaataaagtattctcaacctgtatcccatttctcctatttttcttcaaataagtacttc

SEQ ID NO: 158828 - DNA, 70 bp, Homo sapiens
gaataaagtattctcaacctgtatcccatttctcctatttttcttcaaataagtacttcttagttcatac

SEQ ID NO: 158829 - DNA, 69 bp, Homo sapiens
tcccatttctcctatttttcttcaaataagtacttcttagttcatacttattagtcaaaaagaggctag

SEQ ID NO: 158830 - DNA, 68 bp, Homo sapiens
cttcaaataagtacttcttagttcatacttattagtcaaaaagaggctagtggattggggaaaattaa

SEQ ID NO: 158831 - DNA, 67 bp, Homo sapiens
agtacttcttagttcatacttattagtcaaaaagaggctagtggattggggaaaattaaagaaaggc

SEQ ID NO: 158832 - DNA, 71 bp, Homo sapiens
agttcatacttattagtcaaaaagaggctagtggattggggaaaattaaagaaaggcttcattcagtgtga

SEQ ID NO: 158833 - DNA, 70 bp, Homo sapiens
aaaagaggctagtggattggggaaaattaaagaaaggcttcattcagtgtgatgggctttgaggaccaaa

SEQ ID NO: 158834 - DNA, 71 bp, Homo sapiens
gattggggaaaattaaagaaaggcttcattcagtgtgatgggctttgaggaccaaatggtttgacttttga

SEQ ID NO: 158835 - DNA, 72 bp, Homo sapiens
aaattaaagaaaggcttcattcagtgtgatgggctttgaggaccaaatggtttgacttttgagaacatgaaa

SEQ ID NO: 158836 - DNA, 76 bp, Homo sapiens
attcagtgtgatgggctttgaggaccaaatggtttgacttttgagaacatgaaagccattgcaaaatgtaaagcca

SEQ ID NO: 158837 - DNA, 74 bp, Homo sapiens
atgggctttgaggaccaaatggtttgacttttgagaacatgaaagccattgcaaaatgtaaagccaaggaatga

SEQ ID NO: 158838 - DNA, 75 bp, Homo sapiens
ttttgagaacatgaaagccattgcaaaatgtaaagccaaggaatgatgtgttgtgacttagtttgaacaggactt

SEQ ID NO: 158839 - DNA, 73 bp, Homo sapiens
aaagccattgcaaaatgtaaagccaaggaatgatgtgttgtgacttagtttgaacaggactttggttggattc

SEQ ID NO: 158840 - DNA, 71 bp, Homo sapiens
aaaatgtaaagccaaggaatgatgtgttgtgacttagtttgaacaggactttggttggattctgggtgtat

SEQ ID NO: 158841 - DNA, 74 bp, Homo sapiens
taaagccaaggaatgatgtgttgtgacttagtttgaacaggactttggttggattctgggtgtattttgatgga

SEQ ID NO: 158842 - DNA, 76 bp, Homo sapiens
aatgatgtgttgtgacttagtttgaacaggactttggttggattctgggtgtattttgatggatcagatgtggaac

SEQ ID NO: 158843 - DNA, 73 bp, Homo sapiens
acttagtttgaacaggactttggttggattctgggtgtattttgatggatcagatgtggaaccaaggatgact

SEQ ID NO: 158844 - DNA, 75 bp, Homo sapiens
ttgaacaggactttggttggattctgggtgtattttgatggatcagatgtggaaccaaggatgactttagttgaa

SEQ ID NO: 158845 - DNA, 76 bp, Homo sapiens
tggttggattctgggtgtattttgatggatcagatgtggaaccaaggatgactttagttgaacaactgaatcttta

SEQ ID NO: 158846 - DNA, 76 bp, Homo sapiens
ttctgggtgtattttgatggatcagatgtggaaccaaggatgactttagttgaacaactgaatctttaatcttgct

SEQ ID NO: 158847 - DNA, 78 bp, Homo sapiens
tattttgatggatcagatgtggaaccaaggatgactttagttgaacaactgaatctttaatcttgcttgagacagtaa

SEQ ID NO: 158848 - DNA, 76 bp, Homo sapiens
tcagatgtggaaccaaggatgactttagttgaacaactgaatctttaatcttgcttgagacagtaaaagtgaccta

SEQ ID NO: 158849 - DNA, 72 bp, Homo sapiens
accaaggatgactttagttgaacaactgaatctttaatcttgcttgagacagtaaaagtgacctaggagtta

SEQ ID NO: 158850 - DNA, 73 bp, Homo sapiens
ggatgactttagttgaacaactgaatctttaatcttgcttgagacagtaaaagtgacctaggagttagaaata

SEQ ID NO: 158851 - DNA, 73 bp, Homo sapiens
agttgaacaactgaatctttaatcttgcttgagacagtaaaagtgacctaggagttagaaatattctctggaa

SEQ ID NO: 158852 - DNA, 69 bp, Homo sapiens
agacagtaaaagtgacctaggagttagaaatattctctggaatttttgttgggagttgtgctttttctg

SEQ ID NO: 158853 - DNA, 70 bp, Homo sapiens
acctaggagttagaaatattctctggaatttttgttgggagttgtgctttttctgtgtgcaaggaaataa

SEQ ID NO: 158854 - DNA, 70 bp, Homo sapiens
gttagaaatattctctggaatttttgttgggagttgtgctttttctgtgtgcaaggaaataatgggaaag

SEQ ID NO: 158855 - DNA, 72 bp, Homo sapiens
atattctctggaatttttgttgggagttgtgctttttctgtgtgcaaggaaataatgggaaaggacatccca

SEQ ID NO: 158856 - DNA, 71 bp, Homo sapiens
aatttttgttgggagttgtgctttttctgtgtgcaaggaaataatgggaaaggacatcccacagttgtgag

SEQ ID NO: 158857 - DNA, 78 bp, Homo sapiens
agttgtgctttttctgtgtgcaaggaaataatgggaaaggacatcccacagttgtgagtgtcagcccacattgcagta

SEQ ID NO: 158858 - DNA, 77 bp, Homo sapiens
ataatgggaaaggacatcccacagttgtgagtgtcagcccacattgcagtagatgatacctgtggaggggatacctt

SEQ ID NO: 158859 - DNA, 79 bp, Homo sapiens
aaggacatcccacagttgtgagtgtcagcccacattgcagtagatgatacctgtggaggggatacctttggctggaata

SEQ ID NO: 158860 - DNA, 78 bp, Homo sapiens
agttgtgagtgtcagcccacattgcagtagatgatacctgtggaggggatacctttggctggaataccaatgtgcttt

SEQ ID NO: 158861 - DNA, 78 bp, Homo sapiens
agtgtcagcccacattgcagtagatgatacctgtggaggggatacctttggctggaataccaatgtgctttttctcta

SEQ ID NO: 158862 - DNA, 75 bp, Homo sapiens
attgcagtagatgatacctgtggaggggatacctttggctggaataccaatgtgctttttctctagaggtaagat

SEQ ID NO: 158863 - DNA, 75 bp, Homo sapiens
tagatgatacctgtggaggggatacctttggctggaataccaatgtgctttttctctagaggtaagattttgaga

SEQ ID NO: 158864 - DNA, 71 bp, Homo sapiens
gaggggatacctttggctggaataccaatgtgctttttctctagaggtaagattttgagacaaatctaaaa

SEQ ID NO: 158865 - DNA, 74 bp, Homo sapiens
ctttggctggaataccaatgtgctttttctctagaggtaagattttgagacaaatctaaaatgcgttcattgat

SEQ ID NO: 158866 - DNA, 76 bp, Homo sapiens
tggaataccaatgtgctttttctctagaggtaagattttgagacaaatctaaaatgcgttcattgattatgggcaa

SEQ ID NO: 158867 - DNA, 74 bp, Homo sapiens
gtgctttttctctagaggtaagattttgagacaaatctaaaatgcgttcattgattatgggcaagtagttcatt

SEQ ID NO: 158868 - DNA, 74 bp, Homo sapiens
tttctctagaggtaagattttgagacaaatctaaaatgcgttcattgattatgggcaagtagttcatttagaaa

SEQ ID NO: 158869 - DNA, 73 bp, Homo sapiens
gattttgagacaaatctaaaatgcgttcattgattatgggcaagtagttcatttagaaaattagttacaacta

SEQ ID NO: 158870 - DNA, 72 bp, Homo sapiens
gagacaaatctaaaatgcgttcattgattatgggcaagtagttcatttagaaaattagttacaactattagg

SEQ ID NO: 158871 - DNA, 70 bp, Homo sapiens
gccattgaaaataatggcaaaacccacaattttgcaccaacataatatattcttcaaaaattaagagttt

SEQ ID NO: 158872 - DNA, 70 bp, Homo sapiens
aacccacaattttgcaccaacataatatattcttcaaaaattaagagttttcatttattcacattaatgg

SEQ ID NO: 158873 - DNA, 70 bp, Homo sapiens
cataatatattcttcaaaaattaagagttttcatttattcacattaatggttgggaccaacatttccctc

SEQ ID NO: 158874 - DNA, 69 bp, Homo sapiens
atattcttcaaaaattaagagttttcatttattcacattaatggttgggaccaacatttccctcttgct

SEQ ID NO: 158875 - DNA, 67 bp, Homo sapiens
cttcaaaaattaagagttttcatttattcacattaatggttgggaccaacatttccctcttgctttt

SEQ ID NO: 158876 - DNA, 67 bp, Homo sapiens
taagagttttcatttattcacattaatggttgggaccaacatttccctcttgctttttaaaaggaac

SEQ ID NO: 158877 - DNA, 68 bp, Homo sapiens
catttattcacattaatggttgggaccaacatttccctcttgctttttaaaaggaacttgttcattta

SEQ ID NO: 158878 - DNA, 67 bp, Homo sapiens
attcacattaatggttgggaccaacatttccctcttgctttttaaaaggaacttgttcatttaggct

SEQ ID NO: 158879 - DNA, 66 bp, Homo sapiens
cacattaatggttgggaccaacatttccctcttgctttttaaaaggaacttgttcatttaggcttt

SEQ ID NO: 158880 - DNA, 66 bp, Homo sapiens
ttaatggttgggaccaacatttccctcttgctttttaaaaggaacttgttcatttaggcttttgac

SEQ ID NO: 158881 - DNA, 65 bp, Homo sapiens
atttccctcttgctttttaaaaggaacttgttcatttaggcttttgacccttggagctggaaagg

SEQ ID NO: 158882 - DNA, 69 bp, Homo sapiens
acttgttcatttaggcttttgacccttggagctggaaagggacctcacgggcagtacaggcacggactt

SEQ ID NO: 158883 - DNA, 70 bp, Homo sapiens
atttaggcttttgacccttggagctggaaagggacctcacgggcagtacaggcacggactttggagtctg

SEQ ID NO: 158884 - DNA, 72 bp, Homo sapiens
ttttgacccttggagctggaaagggacctcacgggcagtacaggcacggactttggagtctggtggatctgg

SEQ ID NO: 158885 - DNA, 73 bp, Homo sapiens
agctggaaagggacctcacgggcagtacaggcacggactttggagtctggtggatctgggtcttaactctgga

SEQ ID NO: 158886 - DNA, 74 bp, Homo sapiens
aaagggacctcacgggcagtacaggcacggactttggagtctggtggatctgggtcttaactctggatctgcca

SEQ ID NO: 158887 - DNA, 80 bp, Homo sapiens
gcagtacaggcacggactttggagtctggtggatctgggtcttaactctggatctgccacataccagctcgagcaccgaa

SEQ ID NO: 158888 - DNA, 78 bp, Homo sapiens
cacggactttggagtctggtggatctgggtcttaactctggatctgccacataccagctcgagcaccgaactcaactc

SEQ ID NO: 158889 - DNA, 81 bp, Homo sapiens
tggatctgggtcttaactctggatctgccacataccagctcgagcaccgaactcaactctatgagtttggacaactagatc

SEQ ID NO: 158890 - DNA, 80 bp, Homo sapiens
gtcttaactctggatctgccacataccagctcgagcaccgaactcaactctatgagtttggacaactagatcttgaaata

SEQ ID NO: 158891 - DNA, 78 bp, Homo sapiens
gatctgccacataccagctcgagcaccgaactcaactctatgagtttggacaactagatcttgaaatagggttaaata

SEQ ID NO: 158892 - DNA, 74 bp, Homo sapiens
ataccagctcgagcaccgaactcaactctatgagtttggacaactagatcttgaaatagggttaaataatagta

SEQ ID NO: 158893 - DNA, 74 bp, Homo sapiens
agctcgagcaccgaactcaactctatgagtttggacaactagatcttgaaatagggttaaataatagtatctgt

SEQ ID NO: 158894 - DNA, 77 bp, Homo sapiens
gaactcaactctatgagtttggacaactagatcttgaaatagggttaaataatagtatctgttgagctgcattctta

SEQ ID NO: 158895 - DNA, 77 bp, Homo sapiens
tgagtttggacaactagatcttgaaatagggttaaataatagtatctgttgagctgcattcttataaatattgagtg

SEQ ID NO: 158896 - DNA, 78 bp, Homo sapiens
ggacaactagatcttgaaatagggttaaataatagtatctgttgagctgcattcttataaatattgagtgtcatggtg

SEQ ID NO: 158897 - DNA, 79 bp, Homo sapiens
agatcttgaaatagggttaaataatagtatctgttgagctgcattcttataaatattgagtgtcatggtgtgcctacca

SEQ ID NO: 158898 - DNA, 82 bp, Homo sapiens
taatagtatctgttgagctgcattcttataaatattgagtgtcatggtgtgcctaccacttgccaaggaccaatagatgtta

SEQ ID NO: 158899 - DNA, 83 bp, Homo sapiens
ttgagctgcattcttataaatattgagtgtcatggtgtgcctaccacttgccaaggaccaatagatgttagctgttgataaca

SEQ ID NO: 158900 - DNA, 80 bp, Homo sapiens
cttataaatattgagtgtcatggtgtgcctaccacttgccaaggaccaatagatgttagctgttgataacatcatctatt

SEQ ID NO: 158901 - DNA, 81 bp, Homo sapiens
atggtgtgcctaccacttgccaaggaccaatagatgttagctgttgataacatcatctatttgacagccattatttcatac

SEQ ID NO: 158902 - DNA, 81 bp, Homo sapiens
taccacttgccaaggaccaatagatgttagctgttgataacatcatctatttgacagccattatttcatacgtgacacagg

SEQ ID NO: 158903 - DNA, 78 bp, Homo sapiens
ataacatcatctatttgacagccattatttcatacgtgacacaggtgaggcaaagagaaattgttagtaacttgttca

SEQ ID NO: 158904 - DNA, 76 bp, Homo sapiens
tatttgacagccattatttcatacgtgacacaggtgaggcaaagagaaattgttagtaacttgttcaaagtcagaa

SEQ ID NO: 158905 - DNA, 72 bp, Homo sapiens
gtgacacaggtgaggcaaagagaaattgttagtaacttgttcaaagtcagaaatgaaacttgaagactaaaa

SEQ ID NO: 158906 - DNA, 69 bp, Homo sapiens
ggtgaggcaaagagaaattgttagtaacttgttcaaagtcagaaatgaaacttgaagactaaaaaccca

SEQ ID NO: 158907 - DNA, 71 bp, Homo sapiens
gagaaattgttagtaacttgttcaaagtcagaaatgaaacttgaagactaaaaacccatctctctacatta

SEQ ID NO: 158908 - DNA, 73 bp, Homo sapiens
gttagtaacttgttcaaagtcagaaatgaaacttgaagactaaaaacccatctctctacattagtctcagatg

SEQ ID NO: 158909 - DNA, 78 bp, Homo sapiens
ttgttcaaagtcagaaatgaaacttgaagactaaaaacccatctctctacattagtctcagatgtttatgatgaagca

SEQ ID NO: 158910 - DNA, 76 bp, Homo sapiens
gtcagaaatgaaacttgaagactaaaaacccatctctctacattagtctcagatgtttatgatgaagcatttttta

SEQ ID NO: 158911 - DNA, 71 bp, Homo sapiens
aaacttgaagactaaaaacccatctctctacattagtctcagatgtttatgatgaagcattttttaaaaaa

SEQ ID NO: 158912 - DNA, 74 bp, Homo sapiens
aaacccatctctctacattagtctcagatgtttatgatgaagcattttttaaaaaagtgaacagacttcctcat

SEQ ID NO: 158913 - DNA, 76 bp, Homo sapiens
catctctctacattagtctcagatgtttatgatgaagcattttttaaaaaagtgaacagacttcctcatttattat

SEQ ID NO: 158914 - DNA, 67 bp, Homo sapiens
tttttaaaaaagtgaacagacttcctcatttattattacaaaaagtgaatccttttcagaatgttgt

SEQ ID NO: 158915 - DNA, 69 bp, Homo sapiens
cagacttcctcatttattattacaaaaagtgaatccttttcagaatgttgttttccaaaaatgtaccat

SEQ ID NO: 158916 - DNA, 66 bp, Homo sapiens
tacaaaaagtgaatccttttcagaatgttgttttccaaaaatgtaccattttgttttcttttagga

SEQ ID NO: 158917 - DNA, 66 bp, Homo sapiens
ccttttcagaatgttgttttccaaaaatgtaccattttgttttcttttaggatttggagttccatg

SEQ ID NO: 158918 - DNA, 71 bp, Homo sapiens
cagaatgttgttttccaaaaatgtaccattttgttttcttttaggatttggagttccatggagtgatgaga

SEQ ID NO: 158919 - DNA, 68 bp, Homo sapiens
gttttccaaaaatgtaccattttgttttcttttaggatttggagttccatggagtgatgagattttat

SEQ ID NO: 158920 - DNA, 73 bp, Homo sapiens
taccattttgttttcttttaggatttggagttccatggagtgatgagattttattttcaagataaagctgctg

SEQ ID NO: 158921 - DNA, 74 bp, Homo sapiens
tttcttttaggatttggagttccatggagtgatgagattttattttcaagataaagctgctggaaactttgcaa

SEQ ID NO: 158922 - DNA, 75 bp, Homo sapiens
tcttttaggatttggagttccatggagtgatgagattttattttcaagataaagctgctggaaactttgcaacaa

SEQ ID NO: 158923 - DNA, 76 bp, Homo sapiens
ttccatggagtgatgagattttattttcaagataaagctgctggaaactttgcaacaaaatgtattcgggtctcta

SEQ ID NO: 158924 - DNA, 75 bp, Homo sapiens
agtgatgagattttattttcaagataaagctgctggaaactttgcaacaaaatgtattcgggtctctagtactgc

SEQ ID NO: 158925 - DNA, 73 bp, Homo sapiens
agattttattttcaagataaagctgctggaaactttgcaacaaaatgtattcgggtctctagtactgccacca

SEQ ID NO: 158926 - DNA, 74 bp, Homo sapiens
tttattttcaagataaagctgctggaaactttgcaacaaaatgtattcgggtctctagtactgccaccactcaa

SEQ ID NO: 158927 - DNA, 76 bp, Homo sapiens
tttcaagataaagctgctggaaactttgcaacaaaatgtattcgggtctctagtactgccaccactcaagatgtaa

SEQ ID NO: 158928 - DNA, 75 bp, Homo sapiens
ataaagctgctggaaactttgcaacaaaatgtattcgggtctctagtactgccaccactcaagatgtaatcgaaa

SEQ ID NO: 158929 - DNA, 73 bp, Homo sapiens
aacaaaatgtattcgggtctctagtactgccaccactcaagatgtaatcgaaacgctcgcggagaaatttcga

SEQ ID NO: 158930 - DNA, 77 bp, Homo sapiens
tattcgggtctctagtactgccaccactcaagatgtaatcgaaacgctcgcggagaaatttcgacctgatatgcgaa

SEQ ID NO: 158931 - DNA, 79 bp, Homo sapiens
aagatgtaatcgaaacgctcgcggagaaatttcgacctgatatgcgaatgctgtcctctcccaagtattcactctatga

SEQ ID NO: 158932 - DNA, 81 bp, Homo sapiens
aaacgctcgcggagaaatttcgacctgatatgcgaatgctgtcctctcccaagtattcactctatgaagtgcatgtcagcg

SEQ ID NO: 158933 - DNA, 83 bp, Homo sapiens
agaaatttcgacctgatatgcgaatgctgtcctctcccaagtattcactctatgaagtgcatgtcagcggaggtcagtgtata

SEQ ID NO: 158934 - DNA, 84 bp, Homo sapiens
ttcgacctgatatgcgaatgctgtcctctcccaagtattcactctatgaagtgcatgtcagcggaggtcagtgtatacaggaag

SEQ ID NO: 158935 - DNA, 83 bp, Homo sapiens
tatgcgaatgctgtcctctcccaagtattcactctatgaagtgcatgtcagcggaggtcagtgtatacaggaagggtttgcta

SEQ ID NO: 158936 - DNA, 82 bp, Homo sapiens
ctctcccaagtattcactctatgaagtgcatgtcagcggaggtcagtgtatacaggaagggtttgctagaggcatgacctga

SEQ ID NO: 158937 - DNA, 82 bp, Homo sapiens
aagtattcactctatgaagtgcatgtcagcggaggtcagtgtatacaggaagggtttgctagaggcatgacctgacctgtga

SEQ ID NO: 158938 - DNA, 83 bp, Homo sapiens
actctatgaagtgcatgtcagcggaggtcagtgtatacaggaagggtttgctagaggcatgacctgacctgtgaagagacagc

SEQ ID NO: 158939 - DNA, 79 bp, Homo sapiens
atgtcagcggaggtcagtgtatacaggaagggtttgctagaggcatgacctgacctgtgaagagacagcttgtccaggg

SEQ ID NO: 158940 - DNA, 78 bp, Homo sapiens
aggtcagtgtatacaggaagggtttgctagaggcatgacctgacctgtgaagagacagcttgtccagggtcattgtgg

SEQ ID NO: 158941 - DNA, 79 bp, Homo sapiens
aagggtttgctagaggcatgacctgacctgtgaagagacagcttgtccagggtcattgtggtcatgtcaggtttactgc

SEQ ID NO: 158942 - DNA, 82 bp, Homo sapiens
tagaggcatgacctgacctgtgaagagacagcttgtccagggtcattgtggtcatgtcaggtttactgctcgtctccatctt

SEQ ID NO: 158943 - DNA, 79 bp, Homo sapiens
tgacctgtgaagagacagcttgtccagggtcattgtggtcatgtcaggtttactgctcgtctccatctttcttctcttt

SEQ ID NO: 158944 - DNA, 76 bp, Homo sapiens
aagagacagcttgtccagggtcattgtggtcatgtcaggtttactgctcgtctccatctttcttctcttttggtgg

SEQ ID NO: 158945 - DNA, 76 bp, Homo sapiens
tgtccagggtcattgtggtcatgtcaggtttactgctcgtctccatctttcttctcttttggtgggtaggagagta

SEQ ID NO: 158946 - DNA, 78 bp, Homo sapiens
attgtggtcatgtcaggtttactgctcgtctccatctttcttctcttttggtgggtaggagagtagctggcaggctga

SEQ ID NO: 158947 - DNA, 75 bp, Homo sapiens
atgtcaggtttactgctcgtctccatctttcttctcttttggtgggtaggagagtagctggcaggctgagaaaac

SEQ ID NO: 158948 - DNA, 74 bp, Homo sapiens
tttactgctcgtctccatctttcttctcttttggtgggtaggagagtagctggcaggctgagaaaactgtttta

SEQ ID NO: 158949 - DNA, 74 bp, Homo sapiens
tccatctttcttctcttttggtgggtaggagagtagctggcaggctgagaaaactgttttatgtctgggaagtg

SEQ ID NO: 158950 - DNA, 73 bp, Homo sapiens
ttctcttttggtgggtaggagagtagctggcaggctgagaaaactgttttatgtctgggaagtgttcttataa

SEQ ID NO: 158951 - DNA, 72 bp, Homo sapiens
ttttggtgggtaggagagtagctggcaggctgagaaaactgttttatgtctgggaagtgttcttataaatcc

SEQ ID NO: 158952 - DNA, 77 bp, Homo sapiens
agagtagctggcaggctgagaaaactgttttatgtctgggaagtgttcttataaatccctggcacatatatctgttg

SEQ ID NO: 158953 - DNA, 75 bp, Homo sapiens
caggctgagaaaactgttttatgtctgggaagtgttcttataaatccctggcacatatatctgttggaagttaga

SEQ ID NO: 158954 - DNA, 77 bp, Homo sapiens
gggaagtgttcttataaatccctggcacatatatctgttggaagttagaatgaatatattaattttgcatatgctta

SEQ ID NO: 158955 - DNA, 78 bp, Homo sapiens
tcttataaatccctggcacatatatctgttggaagttagaatgaatatattaattttgcatatgcttatttctccaaa

SEQ ID NO: 158956 - DNA, 77 bp, Homo sapiens
ctggcacatatatctgttggaagttagaatgaatatattaattttgcatatgcttatttctccaaagataagtaacg

SEQ ID NO: 158957 - DNA, 75 bp, Homo sapiens
tatatctgttggaagttagaatgaatatattaattttgcatatgcttatttctccaaagataagtaacgttacat

SEQ ID NO: 158958 - DNA, 76 bp, Homo sapiens
ttagaatgaatatattaattttgcatatgcttatttctccaaagataagtaacgttacatttatccaacatatctg

SEQ ID NO: 158959 - DNA, 77 bp, Homo sapiens
tatattaattttgcatatgcttatttctccaaagataagtaacgttacatttatccaacatatctgggtgtcacata

SEQ ID NO: 158960 - DNA, 78 bp, Homo sapiens
tttgcatatgcttatttctccaaagataagtaacgttacatttatccaacatatctgggtgtcacatacattgtgtag

SEQ ID NO: 158961 - DNA, 76 bp, Homo sapiens
ttatttctccaaagataagtaacgttacatttatccaacatatctgggtgtcacatacattgtgtagtatgctacc

SEQ ID NO: 158962 - DNA, 76 bp, Homo sapiens
aaagataagtaacgttacatttatccaacatatctgggtgtcacatacattgtgtagtatgctacctgctttttga

SEQ ID NO: 158963 - DNA, 77 bp, Homo sapiens
taagtaacgttacatttatccaacatatctgggtgtcacatacattgtgtagtatgctacctgctttttgagaatgt

SEQ ID NO: 158964 - DNA, 79 bp, Homo sapiens
atttatccaacatatctgggtgtcacatacattgtgtagtatgctacctgctttttgagaatgttttatgtggctctta

SEQ ID NO: 158965 - DNA, 79 bp, Homo sapiens
gggtgtcacatacattgtgtagtatgctacctgctttttgagaatgttttatgtggctcttatgtagagattataataa

SEQ ID NO: 158966 - DNA, 78 bp, Homo sapiens
cattgtgtagtatgctacctgctttttgagaatgttttatgtggctcttatgtagagattataataattgtaacacag

SEQ ID NO: 158967 - DNA, 76 bp, Homo sapiens
gtatgctacctgctttttgagaatgttttatgtggctcttatgtagagattataataattgtaacacagttaaata

SEQ ID NO: 158968 - DNA, 75 bp, Homo sapiens
ctgctttttgagaatgttttatgtggctcttatgtagagattataataattgtaacacagttaaatattatatag

SEQ ID NO: 158969 - DNA, 77 bp, Homo sapiens
gttttatgtggctcttatgtagagattataataattgtaacacagttaaatattatataggtatgagtcatcaatct

SEQ ID NO: 158970 - DNA, 80 bp, Homo sapiens
atgtggctcttatgtagagattataataattgtaacacagttaaatattatataggtatgagtcatcaatcttgctgtaa

SEQ ID NO: 158971 - DNA, 77 bp, Homo sapiens
gtagagattataataattgtaacacagttaaatattatataggtatgagtcatcaatcttgctgtaatatttttgcc

SEQ ID NO: 158972 - DNA, 76 bp, Homo sapiens
ataattgtaacacagttaaatattatataggtatgagtcatcaatcttgctgtaatatttttgccttctgaaacaa

SEQ ID NO: 158973 - DNA, 77 bp, Homo sapiens
tgtaacacagttaaatattatataggtatgagtcatcaatcttgctgtaatatttttgccttctgaaacaatacatt

SEQ ID NO: 158974 - DNA, 77 bp, Homo sapiens
tattatataggtatgagtcatcaatcttgctgtaatatttttgccttctgaaacaatacattttcattattctttgg

SEQ ID NO: 158975 - DNA, 76 bp, Homo sapiens
ataggtatgagtcatcaatcttgctgtaatatttttgccttctgaaacaatacattttcattattctttgggaata

SEQ ID NO: 158976 - DNA, 73 bp, Homo sapiens
gtcatcaatcttgctgtaatatttttgccttctgaaacaatacattttcattattctttgggaataatttagg

SEQ ID NO: 158977 - DNA, 71 bp, Homo sapiens
gctgtaatatttttgccttctgaaacaatacattttcattattctttgggaataatttagggtatgtatct

SEQ ID NO: 158978 - DNA, 69 bp, Homo sapiens
ttgccttctgaaacaatacattttcattattctttgggaataatttagggtatgtatcttaaggaaacc

SEQ ID NO: 158979 - DNA, 68 bp, Homo sapiens
gaaacaatacattttcattattctttgggaataatttagggtatgtatcttaaggaaacctccttatg

SEQ ID NO: 158980 - DNA, 68 bp, Homo sapiens
cattttcattattctttgggaataatttagggtatgtatcttaaggaaacctccttatgtatttagta

SEQ ID NO: 158981 - DNA, 69 bp, Homo sapiens
tctttgggaataatttagggtatgtatcttaaggaaacctccttatgtatttagtaatttctgcttgta

SEQ ID NO: 158982 - DNA, 69 bp, Homo sapiens
ggaataatttagggtatgtatcttaaggaaacctccttatgtatttagtaatttctgcttgtattaaca

SEQ ID NO: 158983 - DNA, 69 bp, Homo sapiens
gggtatgtatcttaaggaaacctccttatgtatttagtaatttctgcttgtattaacattagaaatttc

SEQ ID NO: 158984 - DNA, 70 bp, Homo sapiens
tcttaaggaaacctccttatgtatttagtaatttctgcttgtattaacattagaaatttctgaaaatatc

SEQ ID NO: 158985 - DNA, 75 bp, Homo sapiens
cctccttatgtatttagtaatttctgcttgtattaacattagaaatttctgaaaatatcttatatagcaatatca

SEQ ID NO: 158986 - DNA, 77 bp, Homo sapiens
ttctgcttgtattaacattagaaatttctgaaaatatcttatatagcaatatcaaatgacaactaaaattagactga

SEQ ID NO: 158987 - DNA, 76 bp, Homo sapiens
tgtattaacattagaaatttctgaaaatatcttatatagcaatatcaaatgacaactaaaattagactgattaaga

SEQ ID NO: 158988 - DNA, 74 bp, Homo sapiens
gaaatttctgaaaatatcttatatagcaatatcaaatgacaactaaaattagactgattaagaaatgtggaaat

SEQ ID NO: 158989 - DNA, 74 bp, Homo sapiens
aatatcttatatagcaatatcaaatgacaactaaaattagactgattaagaaatgtggaaatttaggtaagtgc

SEQ ID NO: 158990 - DNA, 77 bp, Homo sapiens
tatagcaatatcaaatgacaactaaaattagactgattaagaaatgtggaaatttaggtaagtgccatggcttatgc

SEQ ID NO: 158991 - DNA, 74 bp, Homo sapiens
aatatcaaatgacaactaaaattagactgattaagaaatgtggaaatttaggtaagtgccatggcttatgcctg

SEQ ID NO: 158992 - DNA, 66 bp, Homo sapiens
ttaaattttttcattggtgttttggaaatgttgagtaacctgttttaataaaatacagattacagt

SEQ ID NO: 158993 - DNA, 72 bp, Homo sapiens
tcattggtgttttggaaatgttgagtaacctgttttaataaaatacagattacagttggtgcagcaaataaa

SEQ ID NO: 158994 - DNA, 70 bp, Homo sapiens
ggtgttttggaaatgttgagtaacctgttttaataaaatacagattacagttggtgcagcaaataaagga

SEQ ID NO: 158995 - DNA, 74 bp, Homo sapiens
aatgttgagtaacctgttttaataaaatacagattacagttggtgcagcaaataaaggatttatgtatagcaca

SEQ ID NO: 158996 - DNA, 73 bp, Homo sapiens
ctgttttaataaaatacagattacagttggtgcagcaaataaaggatttatgtatagcacaaacctaatttga

SEQ ID NO: 158997 - DNA, 72 bp, Homo sapiens
aaatacagattacagttggtgcagcaaataaaggatttatgtatagcacaaacctaatttgaatacctcttt

SEQ ID NO: 158998 - DNA, 73 bp, Homo sapiens
tacagttggtgcagcaaataaaggatttatgtatagcacaaacctaatttgaatacctcttttaagttccatc

SEQ ID NO: 158999 - DNA, 75 bp, Homo sapiens
tggtgcagcaaataaaggatttatgtatagcacaaacctaatttgaatacctcttttaagttccatccacagatc

SEQ ID NO: 159000 - DNA, 69 bp, Homo sapiens
aataaaggatttatgtatagcacaaacctaatttgaatacctcttttaagttccatccacagatctttt

SEQ ID NO: 159001 - DNA, 69 bp, Homo sapiens
tttatgtatagcacaaacctaatttgaatacctcttttaagttccatccacagatcttttttgaacctt

SEQ ID NO: 159002 - DNA, 65 bp, Homo sapiens
gcacaaacctaatttgaatacctcttttaagttccatccacagatcttttttgaacctttttttt

SEQ ID NO: 159003 - DNA, 66 bp, Homo sapiens
tttttttttttactcaaaaaatactgctttctttgtacatatgaaaatagactaaagtgtttgtaa

SEQ ID NO: 159004 - DNA, 72 bp, Homo sapiens
tactcaaaaaatactgctttctttgtacatatgaaaatagactaaagtgtttgtaatatgtgggattttcag

SEQ ID NO: 159005 - DNA, 73 bp, Homo sapiens
atactgctttctttgtacatatgaaaatagactaaagtgtttgtaatatgtgggattttcaggtgtgactaaa

SEQ ID NO: 159006 - DNA, 72 bp, Homo sapiens
gctttctttgtacatatgaaaatagactaaagtgtttgtaatatgtgggattttcaggtgtgactaaatcct

SEQ ID NO: 159007 - DNA, 71 bp, Homo sapiens
catatgaaaatagactaaagtgtttgtaatatgtgggattttcaggtgtgactaaatcctttttccctcag

SEQ ID NO: 159008 - DNA, 70 bp, Homo sapiens
gactaaagtgtttgtaatatgtgggattttcaggtgtgactaaatcctttttccctcagtagtatgtaag

SEQ ID NO: 159009 - DNA, 71 bp, Homo sapiens
tttgtaatatgtgggattttcaggtgtgactaaatcctttttccctcagtagtatgtaagtcaggccattt

SEQ ID NO: 159010 - DNA, 70 bp, Homo sapiens
atatgtgggattttcaggtgtgactaaatcctttttccctcagtagtatgtaagtcaggccattttttgt

SEQ ID NO: 159011 - DNA, 68 bp, Homo sapiens
ttgttgtttgtttactttttttcttaaggttatcatcttcatcattaatgccaaaactaaatttaaca

SEQ ID NO: 159012 - DNA, 68 bp, Homo sapiens
tgtttactttttttcttaaggttatcatcttcatcattaatgccaaaactaaatttaacaatagaggg

SEQ ID NO: 159013 - DNA, 68 bp, Homo sapiens
actttttttcttaaggttatcatcttcatcattaatgccaaaactaaatttaacaatagagggtgttc

SEQ ID NO: 159014 - DNA, 70 bp, Homo sapiens
ttttcttaaggttatcatcttcatcattaatgccaaaactaaatttaacaatagagggtgttctcaattt

SEQ ID NO: 159015 - DNA, 71 bp, Homo sapiens
aaggttatcatcttcatcattaatgccaaaactaaatttaacaatagagggtgttctcaattttgggtgat

SEQ ID NO: 159016 - DNA, 72 bp, Homo sapiens
catcttcatcattaatgccaaaactaaatttaacaatagagggtgttctcaattttgggtgatttttctgaa

SEQ ID NO: 159017 - DNA, 73 bp, Homo sapiens
tcatcattaatgccaaaactaaatttaacaatagagggtgttctcaattttgggtgatttttctgaagctgag

SEQ ID NO: 159018 - DNA, 69 bp, Homo sapiens
tgccaaaactaaatttaacaatagagggtgttctcaattttgggtgatttttctgaagctgagtttttc

SEQ ID NO: 159019 - DNA, 66 bp, Homo sapiens
aaatttaacaatagagggtgttctcaattttgggtgatttttctgaagctgagtttttcctttacc

SEQ ID NO: 159020 - DNA, 67 bp, Homo sapiens
aacaatagagggtgttctcaattttgggtgatttttctgaagctgagtttttcctttaccttagaat

SEQ ID NO: 159021 - DNA, 66 bp, Homo sapiens
gggtgttctcaattttgggtgatttttctgaagctgagtttttcctttaccttagaatttttgtaa

SEQ ID NO: 159022 - DNA, 66 bp, Homo sapiens
tgggtgatttttctgaagctgagtttttcctttaccttagaatttttgtaaataggttacaaagaa

SEQ ID NO: 159023 - DNA, 66 bp, Homo sapiens
gatttttctgaagctgagtttttcctttaccttagaatttttgtaaataggttacaaagaagaata

SEQ ID NO: 159024 - DNA, 67 bp, Homo sapiens
gctgagtttttcctttaccttagaatttttgtaaataggttacaaagaagaataaaatctctctcac

SEQ ID NO: 159025 - DNA, 65 bp, Homo sapiens
cctttaccttagaatttttgtaaataggttacaaagaagaataaaatctctctcacttccacctt

SEQ ID NO: 159026 - DNA, 65 bp, Homo sapiens
cttagaatttttgtaaataggttacaaagaagaataaaatctctctcacttccaccttttttttc

SEQ ID NO: 159027 - DNA, 76 bp, Homo sapiens
tgctgttcagttagttgaatactgtcgagtgtgaagtctgaataatatgtaagattggagtttgaggtctaaaaat

SEQ ID NO: 159028 - DNA, 76 bp, Homo sapiens
cagttagttgaatactgtcgagtgtgaagtctgaataatatgtaagattggagtttgaggtctaaaaattggatga

SEQ ID NO: 159029 - DNA, 75 bp, Homo sapiens
gttagttgaatactgtcgagtgtgaagtctgaataatatgtaagattggagtttgaggtctaaaaattggatgaa

SEQ ID NO: 159030 - DNA, 76 bp, Homo sapiens
ttgaatactgtcgagtgtgaagtctgaataatatgtaagattggagtttgaggtctaaaaattggatgaatttgat

SEQ ID NO: 159031 - DNA, 73 bp, Homo sapiens
tcgagtgtgaagtctgaataatatgtaagattggagtttgaggtctaaaaattggatgaatttgattttttaa

SEQ ID NO: 159032 - DNA, 69 bp, Homo sapiens
gtctgaataatatgtaagattggagtttgaggtctaaaaattggatgaatttgattttttaaagaaaag

SEQ ID NO: 159033 - DNA, 67 bp, Homo sapiens
gaataatatgtaagattggagtttgaggtctaaaaattggatgaatttgattttttaaagaaaaggg

SEQ ID NO: 159034 - DNA, 67 bp, Homo sapiens
tgtaagattggagtttgaggtctaaaaattggatgaatttgattttttaaagaaaagggtgaaaaca

SEQ ID NO: 159035 - DNA, 66 bp, Homo sapiens
taagattggagtttgaggtctaaaaattggatgaatttgattttttaaagaaaagggtgaaaacaa

SEQ ID NO: 159036 - DNA, 63 bp, Homo sapiens
aggtctaaaaattggatgaatttgattttttaaagaaaagggtgaaaacaaaaagatggttaa

SEQ ID NO: 159037 - DNA, 64 bp, Homo sapiens
attggatgaatttgattttttaaagaaaagggtgaaaacaaaaagatggttaaagaagaaggaa

SEQ ID NO: 159038 - DNA, 62 bp, Homo sapiens
ttttttaaagaaaagggtgaaaacaaaaagatggttaaagaagaaggaaatagtgtcttccc

SEQ ID NO: 159039 - DNA, 65 bp, Homo sapiens
aaaagatggttaaagaagaaggaaatagtgtcttccccactccctcaggtacccttccacacctt

SEQ ID NO: 159040 - DNA, 68 bp, Homo sapiens
cccactccctcaggtacccttccacacctttgggcttaaagtgctggttttttttcaccagtgcctca

SEQ ID NO: 159041 - DNA, 70 bp, Homo sapiens
tcaggtacccttccacacctttgggcttaaagtgctggttttttttcaccagtgcctcaggtatgaggaa

SEQ ID NO: 159042 - DNA, 69 bp, Homo sapiens
ccttccacacctttgggcttaaagtgctggttttttttcaccagtgcctcaggtatgaggaaagcccta

SEQ ID NO: 159043 - DNA, 74 bp, Homo sapiens
tttgggcttaaagtgctggttttttttcaccagtgcctcaggtatgaggaaagccctagcatgcaggttctcag

SEQ ID NO: 159044 - DNA, 74 bp, Homo sapiens
ttaaagtgctggttttttttcaccagtgcctcaggtatgaggaaagccctagcatgcaggttctcagtcttttc

SEQ ID NO: 159045 - DNA, 74 bp, Homo sapiens
tttttcaccagtgcctcaggtatgaggaaagccctagcatgcaggttctcagtcttttctgggttacagaaacc

SEQ ID NO: 159046 - DNA, 76 bp, Homo sapiens
agtgcctcaggtatgaggaaagccctagcatgcaggttctcagtcttttctgggttacagaaaccttagcgtctca

SEQ ID NO: 159047 - DNA, 74 bp, Homo sapiens
tatgaggaaagccctagcatgcaggttctcagtcttttctgggttacagaaaccttagcgtctcagtcattttt

SEQ ID NO: 159048 - DNA, 72 bp, Homo sapiens
aaagccctagcatgcaggttctcagtcttttctgggttacagaaaccttagcgtctcagtcattttttaata

SEQ ID NO: 159049 - DNA, 73 bp, Homo sapiens
atgcaggttctcagtcttttctgggttacagaaaccttagcgtctcagtcattttttaataatggcaccgcta

SEQ ID NO: 159050 - DNA, 71 bp, Homo sapiens
agtcttttctgggttacagaaaccttagcgtctcagtcattttttaataatggcaccgctaggccagagga

SEQ ID NO: 159051 - DNA, 71 bp, Homo sapiens
tgggttacagaaaccttagcgtctcagtcattttttaataatggcaccgctaggccagaggaaatacctaa

SEQ ID NO: 159052 - DNA, 69 bp, Homo sapiens
aaaccttagcgtctcagtcattttttaataatggcaccgctaggccagaggaaatacctaatagtccgt

SEQ ID NO: 159053 - DNA, 71 bp, Homo sapiens
tctcagtcattttttaataatggcaccgctaggccagaggaaatacctaatagtccgtttcattaagtagt

SEQ ID NO: 159054 - DNA, 71 bp, Homo sapiens
tttttaataatggcaccgctaggccagaggaaatacctaatagtccgtttcattaagtagttagattcaga

SEQ ID NO: 159055 - DNA, 71 bp, Homo sapiens
aataatggcaccgctaggccagaggaaatacctaatagtccgtttcattaagtagttagattcagacaggt

SEQ ID NO: 159056 - DNA, 68 bp, Homo sapiens
aggccagaggaaatacctaatagtccgtttcattaagtagttagattcagacaggtttagtaagtgtt

SEQ ID NO: 159057 - DNA, 70 bp, Homo sapiens
tagtccgtttcattaagtagttagattcagacaggtttagtaagtgtttaacagtgaacagttaggtaga

SEQ ID NO: 159058 - DNA, 69 bp, Homo sapiens
cgtttcattaagtagttagattcagacaggtttagtaagtgtttaacagtgaacagttaggtagatgtt

SEQ ID NO: 159059 - DNA, 72 bp, Homo sapiens
taagtgtttaacagtgaacagttaggtagatgtttgaaaaatagtacacataaaatgatggaaaactgaagc

SEQ ID NO: 159060 - DNA, 72 bp, Homo sapiens
gtttaacagtgaacagttaggtagatgtttgaaaaatagtacacataaaatgatggaaaactgaagctttca

SEQ ID NO: 159061 - DNA, 71 bp, Homo sapiens
gaacagttaggtagatgtttgaaaaatagtacacataaaatgatggaaaactgaagctttcattttattct

SEQ ID NO: 159062 - DNA, 78 bp, Homo sapiens
tgtttgaaaaatagtacacataaaatgatggaaaactgaagctttcattttattcttaatcacagctgctgtctgctg

SEQ ID NO: 159063 - DNA, 77 bp, Homo sapiens
aaaaatagtacacataaaatgatggaaaactgaagctttcattttattcttaatcacagctgctgtctgctgggaca

SEQ ID NO: 159064 - DNA, 79 bp, Homo sapiens
acataaaatgatggaaaactgaagctttcattttattcttaatcacagctgctgtctgctgggacagttgtgcctcttg

SEQ ID NO: 159065 - DNA, 77 bp, Homo sapiens
atggaaaactgaagctttcattttattcttaatcacagctgctgtctgctgggacagttgtgcctcttgggcctttc

SEQ ID NO: 159066 - DNA, 79 bp, Homo sapiens
aagctttcattttattcttaatcacagctgctgtctgctgggacagttgtgcctcttgggcctttccgagctcctcaga

SEQ ID NO: 159067 - DNA, 77 bp, Homo sapiens
attttattcttaatcacagctgctgtctgctgggacagttgtgcctcttgggcctttccgagctcctcagaccctgg

SEQ ID NO: 159068 - DNA, 79 bp, Homo sapiens
ttaatcacagctgctgtctgctgggacagttgtgcctcttgggcctttccgagctcctcagaccctgggagccctgact

SEQ ID NO: 159069 - DNA, 77 bp, Homo sapiens
tgtctgctgggacagttgtgcctcttgggcctttccgagctcctcagaccctgggagccctgacttcttgtccatgt

SEQ ID NO: 159070 - DNA, 76 bp, Homo sapiens
tttccgagctcctcagaccctgggagccctgacttcttgtccatgttgattttcagagagtactgcttgtttatta

SEQ ID NO: 159071 - DNA, 76 bp, Homo sapiens
tcctcagaccctgggagccctgacttcttgtccatgttgattttcagagagtactgcttgtttattacagcgttac

SEQ ID NO: 159072 - DNA, 73 bp, Homo sapiens
tgggagccctgacttcttgtccatgttgattttcagagagtactgcttgtttattacagcgttacggaaaacc

SEQ ID NO: 159073 - DNA, 74 bp, Homo sapiens
tgacttcttgtccatgttgattttcagagagtactgcttgtttattacagcgttacggaaaacccagctttgta

SEQ ID NO: 159074 - DNA, 74 bp, Homo sapiens
cttgtccatgttgattttcagagagtactgcttgtttattacagcgttacggaaaacccagctttgtatgtatg

SEQ ID NO: 159075 - DNA, 75 bp, Homo sapiens
attttcagagagtactgcttgtttattacagcgttacggaaaacccagctttgtatgtatgtgatgccgacagaa

SEQ ID NO: 159076 - DNA, 78 bp, Homo sapiens
ttgtttattacagcgttacggaaaacccagctttgtatgtatgtgatgccgacagaagagacgctgtgcagtttgctg

SEQ ID NO: 159077 - DNA, 81 bp, Homo sapiens
acagcgttacggaaaacccagctttgtatgtatgtgatgccgacagaagagacgctgtgcagtttgctgtggtccagcagc

SEQ ID NO: 159078 - DNA, 80 bp, Homo sapiens
aaaacccagctttgtatgtatgtgatgccgacagaagagacgctgtgcagtttgctgtggtccagcagccacccgaacca

SEQ ID NO: 159079 - DNA, 83 bp, Homo sapiens
tatgtgatgccgacagaagagacgctgtgcagtttgctgtggtccagcagccacccgaaccagttcttttggtgtctggcaca

SEQ ID NO: 159080 - DNA, 79 bp, Homo sapiens
gaagagacgctgtgcagtttgctgtggtccagcagccacccgaaccagttcttttggtgtctggcacatgcaccttgtt

SEQ ID NO: 159081 - DNA, 80 bp, Homo sapiens
tgtgcagtttgctgtggtccagcagccacccgaaccagttcttttggtgtctggcacatgcaccttgtttctcttgaata

SEQ ID NO: 159082 - DNA, 77 bp, Homo sapiens
tttgctgtggtccagcagccacccgaaccagttcttttggtgtctggcacatgcaccttgtttctcttgaatattta

SEQ ID NO: 159083 - DNA, 74 bp, Homo sapiens
acccgaaccagttcttttggtgtctggcacatgcaccttgtttctcttgaatatttaaatgctcctcagtgccc

SEQ ID NO: 159084 - DNA, 75 bp, Homo sapiens
agttcttttggtgtctggcacatgcaccttgtttctcttgaatatttaaatgctcctcagtgccctggggtcacc

SEQ ID NO: 159085 - DNA, 79 bp, Homo sapiens
acatgcaccttgtttctcttgaatatttaaatgctcctcagtgccctggggtcacctcagcacgtttgcataccgcagc

SEQ ID NO: 159086 - DNA, 79 bp, Homo sapiens
tctcttgaatatttaaatgctcctcagtgccctggggtcacctcagcacgtttgcataccgcagccctagtgagctaaa

SEQ ID NO: 159087 - DNA, 75 bp, Homo sapiens
ctggggtcacctcagcacgtttgcataccgcagccctagtgagctaaagccccagccccaaaccttcagccacca

SEQ ID NO: 159088 - DNA, 77 bp, Homo sapiens
tttgcataccgcagccctagtgagctaaagccccagccccaaaccttcagccaccagggaagctctgcatctattct

SEQ ID NO: 159089 - DNA, 75 bp, Homo sapiens
cagccctagtgagctaaagccccagccccaaaccttcagccaccagggaagctctgcatctattctttttatata

SEQ ID NO: 159090 - DNA, 75 bp, Homo sapiens
tagtgagctaaagccccagccccaaaccttcagccaccagggaagctctgcatctattctttttatatagtccaa

SEQ ID NO: 159091 - DNA, 74 bp, Homo sapiens
cccagccccaaaccttcagccaccagggaagctctgcatctattctttttatatagtccaagtctttgtgtgaa

SEQ ID NO: 159092 - DNA, 75 bp, Homo sapiens
aaaccttcagccaccagggaagctctgcatctattctttttatatagtccaagtctttgtgtgaattcagtagga

SEQ ID NO: 159093 - DNA, 74 bp, Homo sapiens
caccagggaagctctgcatctattctttttatatagtccaagtctttgtgtgaattcagtaggaaacataaaaa

SEQ ID NO: 159094 - DNA, 77 bp, Homo sapiens
gaagctctgcatctattctttttatatagtccaagtctttgtgtgaattcagtaggaaacataaaaaaggatcatgc

SEQ ID NO: 159095 - DNA, 74 bp, Homo sapiens
gcatctattctttttatatagtccaagtctttgtgtgaattcagtaggaaacataaaaaaggatcatgctactt

SEQ ID NO: 159096 - DNA, 71 bp, Homo sapiens
atatagtccaagtctttgtgtgaattcagtaggaaacataaaaaaggatcatgctactttaaaaacgtgaa

SEQ ID NO: 159097 - DNA, 70 bp, Homo sapiens
agtctttgtgtgaattcagtaggaaacataaaaaaggatcatgctactttaaaaacgtgaatgaaaccac

SEQ ID NO: 159098 - DNA, 72 bp, Homo sapiens
gtgtgaattcagtaggaaacataaaaaaggatcatgctactttaaaaacgtgaatgaaaccactaaggcaga

SEQ ID NO: 159099 - DNA, 71 bp, Homo sapiens
cagtaggaaacataaaaaaggatcatgctactttaaaaacgtgaatgaaaccactaaggcagaagagatct

SEQ ID NO: 159100 - DNA, 71 bp, Homo sapiens
aaaaaggatcatgctactttaaaaacgtgaatgaaaccactaaggcagaagagatcttaaatgcgtaaaga

SEQ ID NO: 159101 - DNA, 72 bp, Homo sapiens
atgctactttaaaaacgtgaatgaaaccactaaggcagaagagatcttaaatgcgtaaagattacagtagga

SEQ ID NO: 159102 - DNA, 69 bp, Homo sapiens
actttaaaaacgtgaatgaaaccactaaggcagaagagatcttaaatgcgtaaagattacagtaggacc

SEQ ID NO: 159103 - DNA, 70 bp, Homo sapiens
aatgaaaccactaaggcagaagagatcttaaatgcgtaaagattacagtaggacccagttccctctttac

SEQ ID NO: 159104 - DNA, 71 bp, Homo sapiens
aagagatcttaaatgcgtaaagattacagtaggacccagttccctctttaccttcagtgcctactcacact

SEQ ID NO: 159105 - DNA, 72 bp, Homo sapiens
ttaaatgcgtaaagattacagtaggacccagttccctctttaccttcagtgcctactcacacttgctttaga

SEQ ID NO: 159106 - DNA, 74 bp, Homo sapiens
taaagattacagtaggacccagttccctctttaccttcagtgcctactcacacttgctttagaatatctcagcc

SEQ ID NO: 159107 - DNA, 74 bp, Homo sapiens
taggacccagttccctctttaccttcagtgcctactcacacttgctttagaatatctcagccctcttcttgctt

SEQ ID NO: 159108 - DNA, 72 bp, Homo sapiens
agttccctctttaccttcagtgcctactcacacttgctttagaatatctcagccctcttcttgctttacttt

SEQ ID NO: 159109 - DNA, 79 bp, Homo sapiens
ttcagtgcctactcacacttgctttagaatatctcagccctcttcttgctttacttttatgatgtatacataattgtta

SEQ ID NO: 159110 - DNA, 76 bp, Homo sapiens
cacttgctttagaatatctcagccctcttcttgctttacttttatgatgtatacataattgttaatggtagttctc

SEQ ID NO: 159111 - DNA, 75 bp, Homo sapiens
atctcagccctcttcttgctttacttttatgatgtatacataattgttaatggtagttctctaaaagttgcactc

SEQ ID NO: 159112 - DNA, 74 bp, Homo sapiens
gccctcttcttgctttacttttatgatgtatacataattgttaatggtagttctctaaaagttgcactctgaag

SEQ ID NO: 159113 - DNA, 75 bp, Homo sapiens
gctttacttttatgatgtatacataattgttaatggtagttctctaaaagttgcactctgaaggattttcatcta

SEQ ID NO: 159114 - DNA, 72 bp, Homo sapiens
gatgtatacataattgttaatggtagttctctaaaagttgcactctgaaggattttcatctagtaaaaattt

SEQ ID NO: 159115 - DNA, 72 bp, Homo sapiens
acataattgttaatggtagttctctaaaagttgcactctgaaggattttcatctagtaaaaattttgcaaca

SEQ ID NO: 159116 - DNA, 71 bp, Homo sapiens
tggtagttctctaaaagttgcactctgaaggattttcatctagtaaaaattttgcaacaagaacgatttgg

SEQ ID NO: 159117 - DNA, 70 bp, Homo sapiens
gttctctaaaagttgcactctgaaggattttcatctagtaaaaattttgcaacaagaacgatttggtaat

SEQ ID NO: 159118 - DNA, 70 bp, Homo sapiens
gttgcactctgaaggattttcatctagtaaaaattttgcaacaagaacgatttggtaattttggtttatg

SEQ ID NO: 159119 - DNA, 69 bp, Homo sapiens
tttgcaacaagaacgatttggtaattttggtttatggaaggaattcagacttactgttctatccctaat

SEQ ID NO: 159120 - DNA, 67 bp, Homo sapiens
gaacgatttggtaattttggtttatggaaggaattcagacttactgttctatccctaatttttactg

SEQ ID NO: 159121 - DNA, 66 bp, Homo sapiens
atttggtaattttggtttatggaaggaattcagacttactgttctatccctaatttttactgtggt

SEQ ID NO: 159122 - DNA, 66 bp, Homo sapiens
tttggtttatggaaggaattcagacttactgttctatccctaatttttactgtggttttaacttct

SEQ ID NO: 159123 - DNA, 67 bp, Homo sapiens
ggaaggaattcagacttactgttctatccctaatttttactgtggttttaacttcttatattttcag

SEQ ID NO: 159124 - DNA, 68 bp, Homo sapiens
cagacttactgttctatccctaatttttactgtggttttaacttcttatattttcagttgataaaata

SEQ ID NO: 159125 - DNA, 67 bp, Homo sapiens
gttctatccctaatttttactgtggttttaacttcttatattttcagttgataaaataattatccaa

SEQ ID NO: 159126 - DNA, 64 bp, Homo sapiens
taatttttactgtggttttaacttcttatattttcagttgataaaataattatccaaaattttt

SEQ ID NO: 159127 - DNA, 66 bp, Homo sapiens
tgtggttttaacttcttatattttcagttgataaaataattatccaaaattttttatttctgtatt

SEQ ID NO: 159128 - DNA, 70 bp, Homo sapiens
tcttatattttcagttgataaaataattatccaaaattttttatttctgtattttgataactagcatttc

SEQ ID NO: 159129 - DNA, 70 bp, Homo sapiens
ttcagttgataaaataattatccaaaattttttatttctgtattttgataactagcatttctattgtttc

SEQ ID NO: 159130 - DNA, 69 bp, Homo sapiens
ataattatccaaaattttttatttctgtattttgataactagcatttctattgtttctattacggacta

SEQ ID NO: 159131 - DNA, 69 bp, Homo sapiens
tatccaaaattttttatttctgtattttgataactagcatttctattgtttctattacggactaattct

SEQ ID NO: 159132 - DNA, 67 bp, Homo sapiens
tttttatttctgtattttgataactagcatttctattgtttctattacggactaattcttttttttc

SEQ ID NO: 159133 - DNA, 76 bp, Homo sapiens
ccaccgcgcccggttacatgataattctctagctagtctcatggcctcctatttttaccagcctccttgtagcata

SEQ ID NO: 159134 - DNA, 78 bp, Homo sapiens
cggttacatgataattctctagctagtctcatggcctcctatttttaccagcctccttgtagcatatcctgtatataa

SEQ ID NO: 159135 - DNA, 78 bp, Homo sapiens
acatgataattctctagctagtctcatggcctcctatttttaccagcctccttgtagcatatcctgtatataattacc

SEQ ID NO: 159136 - DNA, 77 bp, Homo sapiens
tctagctagtctcatggcctcctatttttaccagcctccttgtagcatatcctgtatataattacctggataatctt

SEQ ID NO: 159137 - DNA, 75 bp, Homo sapiens
atggcctcctatttttaccagcctccttgtagcatatcctgtatataattacctggataatctttgtcaacacta

SEQ ID NO: 159138 - DNA, 74 bp, Homo sapiens
ctcctatttttaccagcctccttgtagcatatcctgtatataattacctggataatctttgtcaacactattag

SEQ ID NO: 159139 - DNA, 80 bp, Homo sapiens
agcctccttgtagcatatcctgtatataattacctggataatctttgtcaacactattagtagtactgtcaatatcatca

SEQ ID NO: 159140 - DNA, 80 bp, Homo sapiens
cttgtagcatatcctgtatataattacctggataatctttgtcaacactattagtagtactgtcaatatcatcattgttg

SEQ ID NO: 159141 - DNA, 82 bp, Homo sapiens
gtatataattacctggataatctttgtcaacactattagtagtactgtcaatatcatcattgttgtcatcattatggtgtca

SEQ ID NO: 159142 - DNA, 79 bp, Homo sapiens
aattacctggataatctttgtcaacactattagtagtactgtcaatatcatcattgttgtcatcattatggtgtcattt

SEQ ID NO: 159143 - DNA, 78 bp, Homo sapiens
atctttgtcaacactattagtagtactgtcaatatcatcattgttgtcatcattatggtgtcattttttatggggagg

SEQ ID NO: 159144 - DNA, 78 bp, Homo sapiens
gtcaacactattagtagtactgtcaatatcatcattgttgtcatcattatggtgtcattttttatggggagggtggtg

SEQ ID NO: 159145 - DNA, 76 bp, Homo sapiens
ttagtagtactgtcaatatcatcattgttgtcatcattatggtgtcattttttatggggagggtggtggtaaacta

SEQ ID NO: 159146 - DNA, 69 bp, Homo sapiens
tcatcattatggtgtcattttttatggggagggtggtggtaaactattgctcatttaaaatttaaattt

SEQ ID NO: 159147 - DNA, 69 bp, Homo sapiens
gggtggtggtaaactattgctcatttaaaatttaaatttttggcatagcattgaaagtgctttttcaaa

SEQ ID NO: 159148 - DNA, 70 bp, Homo sapiens
attgctcatttaaaatttaaatttttggcatagcattgaaagtgctttttcaaattaatagttctcttcc

SEQ ID NO: 159149 - DNA, 73 bp, Homo sapiens
taaatttttggcatagcattgaaagtgctttttcaaattaatagttctcttcccctgcgtgaggctgtagtaa

SEQ ID NO: 159150 - DNA, 73 bp, Homo sapiens
atagcattgaaagtgctttttcaaattaatagttctcttcccctgcgtgaggctgtagtaagacccttgtgcc

SEQ ID NO: 159151 - DNA, 71 bp, Homo sapiens
aaagtgctttttcaaattaatagttctcttcccctgcgtgaggctgtagtaagacccttgtgccgtcacca

SEQ ID NO: 159152 - DNA, 73 bp, Homo sapiens
tttttcaaattaatagttctcttcccctgcgtgaggctgtagtaagacccttgtgccgtcaccatgctgttac

SEQ ID NO: 159153 - DNA, 78 bp, Homo sapiens
taatagttctcttcccctgcgtgaggctgtagtaagacccttgtgccgtcaccatgctgttactgcctctctttctga

SEQ ID NO: 159154 - DNA, 78 bp, Homo sapiens
cctgcgtgaggctgtagtaagacccttgtgccgtcaccatgctgttactgcctctctttctgacagttttctggaaca

SEQ ID NO: 159155 - DNA, 75 bp, Homo sapiens
aggctgtagtaagacccttgtgccgtcaccatgctgttactgcctctctttctgacagttttctggaacaacctg

SEQ ID NO: 159156 - DNA, 75 bp, Homo sapiens
atgctgttactgcctctctttctgacagttttctggaacaacctgtgcttatcctttccttcaagggctgacctg

SEQ ID NO: 159157 - DNA, 74 bp, Homo sapiens
cctctctttctgacagttttctggaacaacctgtgcttatcctttccttcaagggctgacctggtcatatagtc

SEQ ID NO: 159158 - DNA, 74 bp, Homo sapiens
tttctggaacaacctgtgcttatcctttccttcaagggctgacctggtcatatagtctctgggcatcttttcgt

SEQ ID NO: 159159 - DNA, 74 bp, Homo sapiens
ctgtgcttatcctttccttcaagggctgacctggtcatatagtctctgggcatcttttcgttgaataacctaac

SEQ ID NO: 159160 - DNA, 72 bp, Homo sapiens
cctttccttcaagggctgacctggtcatatagtctctgggcatcttttcgttgaataacctaaccaaagtga

SEQ ID NO: 159161 - DNA, 74 bp, Homo sapiens
ttcaagggctgacctggtcatatagtctctgggcatcttttcgttgaataacctaaccaaagtgatcgtttgta

SEQ ID NO: 159162 - DNA, 75 bp, Homo sapiens
acctggtcatatagtctctgggcatcttttcgttgaataacctaaccaaagtgatcgtttgtactgcctcatcta

SEQ ID NO: 159163 - DNA, 73 bp, Homo sapiens
atatagtctctgggcatcttttcgttgaataacctaaccaaagtgatcgtttgtactgcctcatctagtgttt

SEQ ID NO: 159164 - DNA, 72 bp, Homo sapiens
tgggcatcttttcgttgaataacctaaccaaagtgatcgtttgtactgcctcatctagtgtttttattgtaa

SEQ ID NO: 159165 - DNA, 71 bp, Homo sapiens
cgttgaataacctaaccaaagtgatcgtttgtactgcctcatctagtgtttttattgtaatatattattac

SEQ ID NO: 159166 - DNA, 74 bp, Homo sapiens
taacctaaccaaagtgatcgtttgtactgcctcatctagtgtttttattgtaatatattattactaatacagca

SEQ ID NO: 159167 - DNA, 74 bp, Homo sapiens
gtgatcgtttgtactgcctcatctagtgtttttattgtaatatattattactaatacagcaaagtactgttttc

SEQ ID NO: 159168 - DNA, 76 bp, Homo sapiens
tgtactgcctcatctagtgtttttattgtaatatattattactaatacagcaaagtactgttttccagagatagta

SEQ ID NO: 159169 - DNA, 75 bp, Homo sapiens
ctcatctagtgtttttattgtaatatattattactaatacagcaaagtactgttttccagagatagtatctgtaa

SEQ ID NO: 159170 - DNA, 71 bp, Homo sapiens
tttttattgtaatatattattactaatacagcaaagtactgttttccagagatagtatctgtaaaaggccc

SEQ ID NO: 159171 - DNA, 71 bp, Homo sapiens
tattattactaatacagcaaagtactgttttccagagatagtatctgtaaaaggccccttagaaaaacaca

SEQ ID NO: 159172 - DNA, 70 bp, Homo sapiens
ttactaatacagcaaagtactgttttccagagatagtatctgtaaaaggccccttagaaaaacacattta

SEQ ID NO: 159173 - DNA, 68 bp, Homo sapiens
gcaaagtactgttttccagagatagtatctgtaaaaggccccttagaaaaacacatttaaaactggga

SEQ ID NO: 159174 - DNA, 70 bp, Homo sapiens
ttttccagagatagtatctgtaaaaggccccttagaaaaacacatttaaaactgggatcaaagctgaatg

SEQ ID NO: 159175 - DNA, 72 bp, Homo sapiens
atagtatctgtaaaaggccccttagaaaaacacatttaaaactgggatcaaagctgaatgtggtagcatgta

SEQ ID NO: 159176 - DNA, 71 bp, Homo sapiens
tgtaaaaggccccttagaaaaacacatttaaaactgggatcaaagctgaatgtggtagcatgtacctatag

SEQ ID NO: 159177 - DNA, 76 bp, Homo sapiens
ccttagaaaaacacatttaaaactgggatcaaagctgaatgtggtagcatgtacctatagtcacagctactcaaga

SEQ ID NO: 159178 - DNA, 76 bp, Homo sapiens
catagtgagaccctcatctggaatcaaattttatagtaaatgctgacagcatttggagacctttgttagaaaaaca

SEQ ID NO: 159179 - DNA, 74 bp, Homo sapiens
tgagaccctcatctggaatcaaattttatagtaaatgctgacagcatttggagacctttgttagaaaaacaaag

SEQ ID NO: 159180 - DNA, 75 bp, Homo sapiens
tctggaatcaaattttatagtaaatgctgacagcatttggagacctttgttagaaaaacaaagtgtatctcatat

SEQ ID NO: 159181 - DNA, 76 bp, Homo sapiens
tttatagtaaatgctgacagcatttggagacctttgttagaaaaacaaagtgtatctcatatttatcatttattgc

SEQ ID NO: 159182 - DNA, 76 bp, Homo sapiens
ttatagtaaatgctgacagcatttggagacctttgttagaaaaacaaagtgtatctcatatttatcatttattgct

SEQ ID NO: 159183 - DNA, 78 bp, Homo sapiens
tgctgacagcatttggagacctttgttagaaaaacaaagtgtatctcatatttatcatttattgcttcaaatatggac

SEQ ID NO: 159184 - DNA, 73 bp, Homo sapiens
gagacctttgttagaaaaacaaagtgtatctcatatttatcatttattgcttcaaatatggactaattgaaaa

SEQ ID NO: 159185 - DNA, 71 bp, Homo sapiens
agaaaaacaaagtgtatctcatatttatcatttattgcttcaaatatggactaattgaaaaaacaaagact

SEQ ID NO: 159186 - DNA, 74 bp, Homo sapiens
tgtatctcatatttatcatttattgcttcaaatatggactaattgaaaaaacaaagacttaatcttgggttgtc

SEQ ID NO: 159187 - DNA, 71 bp, Homo sapiens
tttatcatttattgcttcaaatatggactaattgaaaaaacaaagacttaatcttgggttgtctttcttga

SEQ ID NO: 159188 - DNA, 70 bp, Homo sapiens
attgcttcaaatatggactaattgaaaaaacaaagacttaatcttgggttgtctttcttgactttctgtg

SEQ ID NO: 159189 - DNA, 70 bp, Homo sapiens
atatggactaattgaaaaaacaaagacttaatcttgggttgtctttcttgactttctgtgtgactgttgg

SEQ ID NO: 159190 - DNA, 70 bp, Homo sapiens
attgaaaaaacaaagacttaatcttgggttgtctttcttgactttctgtgtgactgttggggtgtgatta

SEQ ID NO: 159191 - DNA, 71 bp, Homo sapiens
aaaaacaaagacttaatcttgggttgtctttcttgactttctgtgtgactgttggggtgtgattatgaaga

SEQ ID NO: 159192 - DNA, 74 bp, Homo sapiens
cttaatcttgggttgtctttcttgactttctgtgtgactgttggggtgtgattatgaagagcactttgagttta

SEQ ID NO: 159193 - DNA, 76 bp, Homo sapiens
tgtctttcttgactttctgtgtgactgttggggtgtgattatgaagagcactttgagtttaggacttgaaccagta

SEQ ID NO: 159194 - DNA, 75 bp, Homo sapiens
actttctgtgtgactgttggggtgtgattatgaagagcactttgagtttaggacttgaaccagtatttctcagaa

SEQ ID NO: 159195 - DNA, 76 bp, Homo sapiens
tgtgactgttggggtgtgattatgaagagcactttgagtttaggacttgaaccagtatttctcagaacgtcttcca

SEQ ID NO: 159196 - DNA, 74 bp, Homo sapiens
ggtgtgattatgaagagcactttgagtttaggacttgaaccagtatttctcagaacgtcttccagtccttggaa

SEQ ID NO: 159197 - DNA, 75 bp, Homo sapiens
tgattatgaagagcactttgagtttaggacttgaaccagtatttctcagaacgtcttccagtccttggaaaatca

SEQ ID NO: 159198 - DNA, 73 bp, Homo sapiens
attatgaagagcactttgagtttaggacttgaaccagtatttctcagaacgtcttccagtccttggaaaatca

SEQ ID NO: 159199 - DNA, 72 bp, Homo sapiens
aagagcactttgagtttaggacttgaaccagtatttctcagaacgtcttccagtccttggaaaatcacatct

SEQ ID NO: 159200 - DNA, 74 bp, Homo sapiens
tttgagtttaggacttgaaccagtatttctcagaacgtcttccagtccttggaaaatcacatctttctcttgca

SEQ ID NO: 159201 - DNA, 73 bp, Homo sapiens
tttaggacttgaaccagtatttctcagaacgtcttccagtccttggaaaatcacatctttctcttgcaaggag

SEQ ID NO: 159202 - DNA, 77 bp, Homo sapiens
ttgaaccagtatttctcagaacgtcttccagtccttggaaaatcacatctttctcttgcaaggagtctatgttatca

SEQ ID NO: 159203 - DNA, 78 bp, Homo sapiens
gtatttctcagaacgtcttccagtccttggaaaatcacatctttctcttgcaaggagtctatgttatcatcatcctta

SEQ ID NO: 159204 - DNA, 79 bp, Homo sapiens
tttctcagaacgtcttccagtccttggaaaatcacatctttctcttgcaaggagtctatgttatcatcatccttatcag

SEQ ID NO: 159205 - DNA, 78 bp, Homo sapiens
agaacgtcttccagtccttggaaaatcacatctttctcttgcaaggagtctatgttatcatcatccttatcagttgtc

SEQ ID NO: 159206 - DNA, 78 bp, Homo sapiens
tccttggaaaatcacatctttctcttgcaaggagtctatgttatcatcatccttatcagttgtctctttagttattaa

SEQ ID NO: 159207 - DNA, 78 bp, Homo sapiens
gaaaatcacatctttctcttgcaaggagtctatgttatcatcatccttatcagttgtctctttagttattaattggtc

SEQ ID NO: 159208 - DNA, 80 bp, Homo sapiens
caaggagtctatgttatcatcatccttatcagttgtctctttagttattaattggtctgtctgatcctcatttatcattg

SEQ ID NO: 159209 - DNA, 79 bp, Homo sapiens
tatgttatcatcatccttatcagttgtctctttagttattaattggtctgtctgatcctcatttatcattggccgagtt

SEQ ID NO: 159210 - DNA, 78 bp, Homo sapiens
atccttatcagttgtctctttagttattaattggtctgtctgatcctcatttatcattggccgagtttgtgcttgatg

SEQ ID NO: 159211 - DNA, 76 bp, Homo sapiens
ttgtctctttagttattaattggtctgtctgatcctcatttatcattggccgagtttgtgcttgatggagttttta

SEQ ID NO: 159212 - DNA, 78 bp, Homo sapiens
tttagttattaattggtctgtctgatcctcatttatcattggccgagtttgtgcttgatggagtttttactatcatca

SEQ ID NO: 159213 - DNA, 83 bp, Homo sapiens
taattggtctgtctgatcctcatttatcattggccgagtttgtgcttgatggagtttttactatcatcagcattgtgcaatct

SEQ ID NO: 159214 - DNA, 79 bp, Homo sapiens
gtctgatcctcatttatcattggccgagtttgtgcttgatggagtttttactatcatcagcattgtgcaatcttttttt

SEQ ID NO: 159215 - DNA, 83 bp, Homo sapiens
gctggtattataggtgtgagtccagccagcatcgtgcagtcttgtccttttctgcaaagtatagcagtttgcagtttgtgtga

SEQ ID NO: 159216 - DNA, 83 bp, Homo sapiens
tataggtgtgagtccagccagcatcgtgcagtcttgtccttttctgcaaagtatagcagtttgcagtttgtgtgacagggcac

SEQ ID NO: 159217 - DNA, 85 bp, Homo sapiens
agtccagccagcatcgtgcagtcttgtccttttctgcaaagtatagcagtttgcagtttgtgtgacagggcactgtcatatgcat

SEQ ID NO: 159218 - DNA, 85 bp, Homo sapiens
atcgtgcagtcttgtccttttctgcaaagtatagcagtttgcagtttgtgtgacagggcactgtcatatgcattctgactgtgag

SEQ ID NO: 159219 - DNA, 84 bp, Homo sapiens
agtcttgtccttttctgcaaagtatagcagtttgcagtttgtgtgacagggcactgtcatatgcattctgactgtgaggtgatg

SEQ ID NO: 159220 - DNA, 86 bp, Homo sapiens
cttttctgcaaagtatagcagtttgcagtttgtgtgacagggcactgtcatatgcattctgactgtgaggtgatgtgactgatggg

SEQ ID NO: 159221 - DNA, 87 bp, Homo sapiens
aaagtatagcagtttgcagtttgtgtgacagggcactgtcatatgcattctgactgtgaggtgatgtgactgatggggtgctgggca

SEQ ID NO: 159222 - DNA, 88 bp, Homo sapiens
agtttgcagtttgtgtgacagggcactgtcatatgcattctgactgtgaggtgatgtgactgatggggtgctgggcagtgggcagagc

SEQ ID NO: 159223 - DNA, 90 bp, Homo sapiens
tgacagggcactgtcatatgcattctgactgtgaggtgatgtgactgatggggtgctgggcagtgggcagagctggacagggagtgatgt

SEQ ID NO: 159224 - DNA, 88 bp, Homo sapiens
actgtcatatgcattctgactgtgaggtgatgtgactgatggggtgctgggcagtgggcagagctggacagggagtgatgtttggata

SEQ ID NO: 159225 - DNA, 86 bp, Homo sapiens
atatgcattctgactgtgaggtgatgtgactgatggggtgctgggcagtgggcagagctggacagggagtgatgtttggataggga

SEQ ID NO: 159226 - DNA, 84 bp, Homo sapiens
attctgactgtgaggtgatgtgactgatggggtgctgggcagtgggcagagctggacagggagtgatgtttggatagggagtca

SEQ ID NO: 159227 - DNA, 83 bp, Homo sapiens
tgtgaggtgatgtgactgatggggtgctgggcagtgggcagagctggacagggagtgatgtttggatagggagtcagtgattt

SEQ ID NO: 159228 - DNA, 81 bp, Homo sapiens
gtgatgtgactgatggggtgctgggcagtgggcagagctggacagggagtgatgtttggatagggagtcagtgattttatt

SEQ ID NO: 159229 - DNA, 79 bp, Homo sapiens
atgtgactgatggggtgctgggcagtgggcagagctggacagggagtgatgtttggatagggagtcagtgattttattt

SEQ ID NO: 159230 - DNA, 76 bp, Homo sapiens
ctgggcagtgggcagagctggacagggagtgatgtttggatagggagtcagtgattttattttatggtgaatttta

SEQ ID NO: 159231 - DNA, 74 bp, Homo sapiens
cagtgggcagagctggacagggagtgatgtttggatagggagtcagtgattttattttatggtgaattttactt

SEQ ID NO: 159232 - DNA, 72 bp, Homo sapiens
agagctggacagggagtgatgtttggatagggagtcagtgattttattttatggtgaattttactttcctta

SEQ ID NO: 159233 - DNA, 72 bp, Homo sapiens
tggacagggagtgatgtttggatagggagtcagtgattttattttatggtgaattttactttccttactcaa

SEQ ID NO: 159234 - DNA, 72 bp, Homo sapiens
ggagtgatgtttggatagggagtcagtgattttattttatggtgaattttactttccttactcaactctgaa

SEQ ID NO: 159235 - DNA, 70 bp, Homo sapiens
atagggagtcagtgattttattttatggtgaattttactttccttactcaactctgaaagtgctgggtct

SEQ ID NO: 159236 - DNA, 72 bp, Homo sapiens
cagtgattttattttatggtgaattttactttccttactcaactctgaaagtgctgggtcttgtgttactga

SEQ ID NO: 159237 - DNA, 71 bp, Homo sapiens
attttatggtgaattttactttccttactcaactctgaaagtgctgggtcttgtgttactgatattcaggt

SEQ ID NO: 159238 - DNA, 77 bp, Homo sapiens
ttccttactcaactctgaaagtgctgggtcttgtgttactgatattcaggttacagagcattcctgtaacagatgtt

SEQ ID NO: 159239 - DNA, 77 bp, Homo sapiens
aactctgaaagtgctgggtcttgtgttactgatattcaggttacagagcattcctgtaacagatgtttctgaaagag

SEQ ID NO: 159240 - DNA, 75 bp, Homo sapiens
gtcttgtgttactgatattcaggttacagagcattcctgtaacagatgtttctgaaagaggcatttctaaaaaaa

SEQ ID NO: 159241 - DNA, 72 bp, Homo sapiens
actgatattcaggttacagagcattcctgtaacagatgtttctgaaagaggcatttctaaaaaaaaactaaa

SEQ ID NO: 159242 - DNA, 71 bp, Homo sapiens
ggttacagagcattcctgtaacagatgtttctgaaagaggcatttctaaaaaaaaactaaaattctgccaa

SEQ ID NO: 159243 - DNA, 71 bp, Homo sapiens
gcattcctgtaacagatgtttctgaaagaggcatttctaaaaaaaaactaaaattctgccaaattgtacac

SEQ ID NO: 159244 - DNA, 67 bp, Homo sapiens
gatgtttctgaaagaggcatttctaaaaaaaaactaaaattctgccaaattgtacactaaaaggtag

SEQ ID NO: 159245 - DNA, 66 bp, Homo sapiens
tctgaaagaggcatttctaaaaaaaaactaaaattctgccaaattgtacactaaaaggtagggact

SEQ ID NO: 159246 - DNA, 64 bp, Homo sapiens
tctaaaaaaaaactaaaattctgccaaattgtacactaaaaggtagggactttaagataaagaa

SEQ ID NO: 159247 - DNA, 64 bp, Homo sapiens
aaactaaaattctgccaaattgtacactaaaaggtagggactttaagataaagaaagatttggg

SEQ ID NO: 159248 - DNA, 69 bp, Homo sapiens
tctgccaaattgtacactaaaaggtagggactttaagataaagaaagatttgggtaggtcactcaatac

SEQ ID NO: 159249 - DNA, 66 bp, Homo sapiens
attgtacactaaaaggtagggactttaagataaagaaagatttgggtaggtcactcaatacctgtt

SEQ ID NO: 159250 - DNA, 67 bp, Homo sapiens
aggtagggactttaagataaagaaagatttgggtaggtcactcaatacctgtttaaatttgtagcac

SEQ ID NO: 159251 - DNA, 70 bp, Homo sapiens
ggactttaagataaagaaagatttgggtaggtcactcaatacctgtttaaatttgtagcactggctcaaa

SEQ ID NO: 159252 - DNA, 71 bp, Homo sapiens
ataaagaaagatttgggtaggtcactcaatacctgtttaaatttgtagcactggctcaaagaacagttgaa

SEQ ID NO: 159253 - DNA, 75 bp, Homo sapiens
actcaatacctgtttaaatttgtagcactggctcaaagaacagttgaaggtttgagcagagtgaatggatttctc

SEQ ID NO: 159254 - DNA, 75 bp, Homo sapiens
gtttaaatttgtagcactggctcaaagaacagttgaaggtttgagcagagtgaatggatttctccgagcgacaag

SEQ ID NO: 159255 - DNA, 76 bp, Homo sapiens
aatttgtagcactggctcaaagaacagttgaaggtttgagcagagtgaatggatttctccgagcgacaaggagaat

SEQ ID NO: 159256 - DNA, 76 bp, Homo sapiens
agaacagttgaaggtttgagcagagtgaatggatttctccgagcgacaaggagaattcctggggaatgtagcctga

SEQ ID NO: 159257 - DNA, 76 bp, Homo sapiens
aaggtttgagcagagtgaatggatttctccgagcgacaaggagaattcctggggaatgtagcctgagttgtgtgtg

SEQ ID NO: 159258 - DNA, 78 bp, Homo sapiens
tgaatggatttctccgagcgacaaggagaattcctggggaatgtagcctgagttgtgtgtggggcttgcagcgtcaaa

SEQ ID NO: 159259 - DNA, 79 bp, Homo sapiens
acaaggagaattcctggggaatgtagcctgagttgtgtgtggggcttgcagcgtcaaatctgttgccagctcctgcttc

SEQ ID NO: 159260 - DNA, 78 bp, Homo sapiens
aattcctggggaatgtagcctgagttgtgtgtggggcttgcagcgtcaaatctgttgccagctcctgcttccttagtg

SEQ ID NO: 159261 - DNA, 80 bp, Homo sapiens
aatgtagcctgagttgtgtgtggggcttgcagcgtcaaatctgttgccagctcctgcttccttagtgttctccagcctag

SEQ ID NO: 159262 - DNA, 80 bp, Homo sapiens
tggggcttgcagcgtcaaatctgttgccagctcctgcttccttagtgttctccagcctaggatgggtgtcttggccagta

SEQ ID NO: 159263 - DNA, 78 bp, Homo sapiens
aaatctgttgccagctcctgcttccttagtgttctccagcctaggatgggtgtcttggccagtaggagcaggtccatc

SEQ ID NO: 159264 - DNA, 77 bp, Homo sapiens
tcctgcttccttagtgttctccagcctaggatgggtgtcttggccagtaggagcaggtccatccttcagtgccgcct

SEQ ID NO: 159265 - DNA, 74 bp, Homo sapiens
tccttagtgttctccagcctaggatgggtgtcttggccagtaggagcaggtccatccttcagtgccgccttttt

SEQ ID NO: 159266 - DNA, 75 bp, Homo sapiens
gttctccagcctaggatgggtgtcttggccagtaggagcaggtccatccttcagtgccgccttttttccacagct

SEQ ID NO: 159267 - DNA, 74 bp, Homo sapiens
atgggtgtcttggccagtaggagcaggtccatccttcagtgccgccttttttccacagcttccagcgaccgtag

SEQ ID NO: 159268 - DNA, 77 bp, Homo sapiens
tcttggccagtaggagcaggtccatccttcagtgccgccttttttccacagcttccagcgaccgtaggcctctgtga

SEQ ID NO: 159269 - DNA, 74 bp, Homo sapiens
agtaggagcaggtccatccttcagtgccgccttttttccacagcttccagcgaccgtaggcctctgtgaggtgg

SEQ ID NO: 159270 - DNA, 77 bp, Homo sapiens
ggtccatccttcagtgccgccttttttccacagcttccagcgaccgtaggcctctgtgaggtggtcaggctgtgtga

SEQ ID NO: 159271 - DNA, 77 bp, Homo sapiens
agtgccgccttttttccacagcttccagcgaccgtaggcctctgtgaggtggtcaggctgtgtgaggctctcacgga

SEQ ID NO: 159272 - DNA, 76 bp, Homo sapiens
tttttccacagcttccagcgaccgtaggcctctgtgaggtggtcaggctgtgtgaggctctcacggagaccctccg

SEQ ID NO: 159273 - DNA, 74 bp, Homo sapiens
acggagaccctccgtggagtaccatgttcctgataagtgtgcctgggaggcttgctaatgaaagaagtaatata

SEQ ID NO: 159274 - DNA, 76 bp, Homo sapiens
tccgtggagtaccatgttcctgataagtgtgcctgggaggcttgctaatgaaagaagtaatataccaaacataata

SEQ ID NO: 159275 - DNA, 74 bp, Homo sapiens
agtaccatgttcctgataagtgtgcctgggaggcttgctaatgaaagaagtaatataccaaacataatacttta

SEQ ID NO: 159276 - DNA, 74 bp, Homo sapiens
ttcctgataagtgtgcctgggaggcttgctaatgaaagaagtaatataccaaacataatactttacataagaaa

SEQ ID NO: 159277 - DNA, 72 bp, Homo sapiens
gcctgggaggcttgctaatgaaagaagtaatataccaaacataatactttacataagaaaagtgatggtaac

SEQ ID NO: 159278 - DNA, 71 bp, Homo sapiens
ggcttgctaatgaaagaagtaatataccaaacataatactttacataagaaaagtgatggtaactttatgg

SEQ ID NO: 159279 - DNA, 69 bp, Homo sapiens
tataccaaacataatactttacataagaaaagtgatggtaactttatggtggaagggagaggtaagtgt

SEQ ID NO: 159280 - DNA, 69 bp, Homo sapiens
acataatactttacataagaaaagtgatggtaactttatggtggaagggagaggtaagtgttgaagtgg

SEQ ID NO: 159281 - DNA, 68 bp, Homo sapiens
tttacataagaaaagtgatggtaactttatggtggaagggagaggtaagtgttgaagtgggcaaattt

SEQ ID NO: 159282 - DNA, 68 bp, Homo sapiens
aaaagtgatggtaactttatggtggaagggagaggtaagtgttgaagtgggcaaattttggagacaag

SEQ ID NO: 159283 - DNA, 77 bp, Homo sapiens
tggtggaagggagaggtaagtgttgaagtgggcaaattttggagacaaggatcagatgcacagagacaggaagaata

SEQ ID NO: 159284 - DNA, 81 bp, Homo sapiens
gtaagtgttgaagtgggcaaattttggagacaaggatcagatgcacagagacaggaagaatagtgcagtcatcacttccaa

SEQ ID NO: 159285 - DNA, 83 bp, Homo sapiens
ttgaagtgggcaaattttggagacaaggatcagatgcacagagacaggaagaatagtgcagtcatcacttccaagactggtga

SEQ ID NO: 159286 - DNA, 84 bp, Homo sapiens
aaattttggagacaaggatcagatgcacagagacaggaagaatagtgcagtcatcacttccaagactggtgagggctgctgcca

SEQ ID NO: 159287 - DNA, 87 bp, Homo sapiens
agacaaggatcagatgcacagagacaggaagaatagtgcagtcatcacttccaagactggtgagggctgctgccatcgctttgtgtg

SEQ ID NO: 159288 - DNA, 83 bp, Homo sapiens
aagaatagtgcagtcatcacttccaagactggtgagggctgctgccatcgctttgtgtggggtataacattaatgtgatgaga

SEQ ID NO: 159289 - DNA, 82 bp, Homo sapiens
atcacttccaagactggtgagggctgctgccatcgctttgtgtggggtataacattaatgtgatgagaacaatctcatagaa

SEQ ID NO: 159290 - DNA, 82 bp, Homo sapiens
aagactggtgagggctgctgccatcgctttgtgtggggtataacattaatgtgatgagaacaatctcatagaatcagtggaa

SEQ ID NO: 159291 - DNA, 82 bp, Homo sapiens
agggctgctgccatcgctttgtgtggggtataacattaatgtgatgagaacaatctcatagaatcagtggaacttctgtgtg

SEQ ID NO: 159292 - DNA, 80 bp, Homo sapiens
catcgctttgtgtggggtataacattaatgtgatgagaacaatctcatagaatcagtggaacttctgtgtggtattaaca

SEQ ID NO: 159293 - DNA, 79 bp, Homo sapiens
tttgtgtggggtataacattaatgtgatgagaacaatctcatagaatcagtggaacttctgtgtggtattaacattatg

SEQ ID NO: 159294 - DNA, 78 bp, Homo sapiens
ggtataacattaatgtgatgagaacaatctcatagaatcagtggaacttctgtgtggtattaacattatgtccttatt

SEQ ID NO: 159295 - DNA, 81 bp, Homo sapiens
taatgtgatgagaacaatctcatagaatcagtggaacttctgtgtggtattaacattatgtccttattttccagttgcata

SEQ ID NO: 159296 - DNA, 79 bp, Homo sapiens
agaacaatctcatagaatcagtggaacttctgtgtggtattaacattatgtccttattttccagttgcatatgagataa

SEQ ID NO: 159297 - DNA, 78 bp, Homo sapiens
gaatcagtggaacttctgtgtggtattaacattatgtccttattttccagttgcatatgagataatttgatttacaga

SEQ ID NO: 159298 - DNA, 76 bp, Homo sapiens
gtggaacttctgtgtggtattaacattatgtccttattttccagttgcatatgagataatttgatttacagaaata

SEQ ID NO: 159299 - DNA, 76 bp, Homo sapiens
gtgtggtattaacattatgtccttattttccagttgcatatgagataatttgatttacagaaataagcttttagca

SEQ ID NO: 159300 - DNA, 75 bp, Homo sapiens
cattatgtccttattttccagttgcatatgagataatttgatttacagaaataagcttttagcaaaaaccatgta

SEQ ID NO: 159301 - DNA, 72 bp, Homo sapiens
ccttattttccagttgcatatgagataatttgatttacagaaataagcttttagcaaaaaccatgtatactt

SEQ ID NO: 159302 - DNA, 73 bp, Homo sapiens
atgagataatttgatttacagaaataagcttttagcaaaaaccatgtatactttttttcttattgcatgtata

SEQ ID NO: 159303 - DNA, 71 bp, Homo sapiens
gatttacagaaataagcttttagcaaaaaccatgtatactttttttcttattgcatgtatatttctcttat

SEQ ID NO: 159304 - DNA, 72 bp, Homo sapiens
gcaaaaaccatgtatactttttttcttattgcatgtatatttctcttattttcccagttagatctaaatgag

SEQ ID NO: 159305 - DNA, 72 bp, Homo sapiens
gtatactttttttcttattgcatgtatatttctcttattttcccagttagatctaaatgagggaattgcctc

SEQ ID NO: 159306 - DNA, 76 bp, Homo sapiens
ttttcttattgcatgtatatttctcttattttcccagttagatctaaatgagggaattgcctctgttcagtgtctg

SEQ ID NO: 159307 - DNA, 80 bp, Homo sapiens
tattgcatgtatatttctcttattttcccagttagatctaaatgagggaattgcctctgttcagtgtctggcactggata

SEQ ID NO: 159308 - DNA, 77 bp, Homo sapiens
tctcttattttcccagttagatctaaatgagggaattgcctctgttcagtgtctggcactggatatgtggtaataaa

SEQ ID NO: 159309 - DNA, 78 bp, Homo sapiens
tattttcccagttagatctaaatgagggaattgcctctgttcagtgtctggcactggatatgtggtaataaacataca

SEQ ID NO: 159310 - DNA, 79 bp, Homo sapiens
ttagatctaaatgagggaattgcctctgttcagtgtctggcactggatatgtggtaataaacatacagtagcaacaaaa

SEQ ID NO: 159311 - DNA, 77 bp, Homo sapiens
agggaattgcctctgttcagtgtctggcactggatatgtggtaataaacatacagtagcaacaaaatgttgaattaa

SEQ ID NO: 159312 - DNA, 77 bp, Homo sapiens
ttgcctctgttcagtgtctggcactggatatgtggtaataaacatacagtagcaacaaaatgttgaattaattaaaa

SEQ ID NO: 159313 - DNA, 75 bp, Homo sapiens
cagtgtctggcactggatatgtggtaataaacatacagtagcaacaaaatgttgaattaattaaaacaaatgatt

SEQ ID NO: 159314 - DNA, 73 bp, Homo sapiens
gcactggatatgtggtaataaacatacagtagcaacaaaatgttgaattaattaaaacaaatgattttacatt

SEQ ID NO: 159315 - DNA, 71 bp, Homo sapiens
tgtggtaataaacatacagtagcaacaaaatgttgaattaattaaaacaaatgattttacattttgaacaa

SEQ ID NO: 159316 - DNA, 75 bp, Homo sapiens
catacagtagcaacaaaatgttgaattaattaaaacaaatgattttacattttgaacaatacatttcagtctgca

SEQ ID NO: 159317 - DNA, 72 bp, Homo sapiens
caaaatgttgaattaattaaaacaaatgattttacattttgaacaatacatttcagtctgcaagtaggtgct

SEQ ID NO: 159318 - DNA, 73 bp, Homo sapiens
gttgaattaattaaaacaaatgattttacattttgaacaatacatttcagtctgcaagtaggtgctttgtcta

SEQ ID NO: 159319 - DNA, 77 bp, Homo sapiens
tttacattttgaacaatacatttcagtctgcaagtaggtgctttgtctataaaattaaatgtatatcagaatgcttg

SEQ ID NO: 159320 - DNA, 79 bp, Homo sapiens
catttcagtctgcaagtaggtgctttgtctataaaattaaatgtatatcagaatgcttgtattagctagttctatgaaa

SEQ ID NO: 159321 - DNA, 78 bp, Homo sapiens
gtctgcaagtaggtgctttgtctataaaattaaatgtatatcagaatgcttgtattagctagttctatgaaataacca

SEQ ID NO: 159322 - DNA, 77 bp, Homo sapiens
ggtgctttgtctataaaattaaatgtatatcagaatgcttgtattagctagttctatgaaataaccatagcttattc

SEQ ID NO: 159323 - DNA, 73 bp, Homo sapiens
ctataaaattaaatgtatatcagaatgcttgtattagctagttctatgaaataaccatagcttattctttttt

SEQ ID NO: 159324 - DNA, 77 bp, Homo sapiens
atgtatatcagaatgcttgtattagctagttctatgaaataaccatagcttattctttttttcatttcatgttttga

SEQ ID NO: 159325 - DNA, 75 bp, Homo sapiens
cagaatgcttgtattagctagttctatgaaataaccatagcttattctttttttcatttcatgttttgaagaaga

SEQ ID NO: 159326 - DNA, 73 bp, Homo sapiens
tagctagttctatgaaataaccatagcttattctttttttcatttcatgttttgaagaagaaagaagattgga

SEQ ID NO: 159327 - DNA, 76 bp, Homo sapiens
tctatgaaataaccatagcttattctttttttcatttcatgttttgaagaagaaagaagattggatatagatgaga

SEQ ID NO: 159328 - DNA, 72 bp, Homo sapiens
ttctttttttcatttcatgttttgaagaagaaagaagattggatatagatgagaaacctctagttgtacaac

SEQ ID NO: 159329 - DNA, 75 bp, Homo sapiens
catttcatgttttgaagaagaaagaagattggatatagatgagaaacctctagttgtacaactgaattggaacaa

SEQ ID NO: 159330 - DNA, 75 bp, Homo sapiens
tttgaagaagaaagaagattggatatagatgagaaacctctagttgtacaactgaattggaacaaagatgatcgg

SEQ ID NO: 159331 - DNA, 75 bp, Homo sapiens
aaagaagattggatatagatgagaaacctctagttgtacaactgaattggaacaaagatgatcgggaaggcagat

SEQ ID NO: 159332 - DNA, 76 bp, Homo sapiens
ttggatatagatgagaaacctctagttgtacaactgaattggaacaaagatgatcgggaaggcagatttgttctta

SEQ ID NO: 159333 - DNA, 76 bp, Homo sapiens
tagatgagaaacctctagttgtacaactgaattggaacaaagatgatcgggaaggcagatttgttcttaagaatga

SEQ ID NO: 159334 - DNA, 76 bp, Homo sapiens
tacaactgaattggaacaaagatgatcgggaaggcagatttgttcttaagaatgagaatgacgccattcctcctaa

SEQ ID NO: 159335 - DNA, 74 bp, Homo sapiens
attggaacaaagatgatcgggaaggcagatttgttcttaagaatgagaatgacgccattcctcctaaggtagga

SEQ ID NO: 159336 - DNA, 71 bp, Homo sapiens
atcgggaaggcagatttgttcttaagaatgagaatgacgccattcctcctaaggtaggaaccctcagtatt

SEQ ID NO: 159337 - DNA, 81 bp, Homo sapiens
ttatgtgattctgcatagtagtcaatatggtgataatgttactttcatcagaaggctcaaagtaatggacctgaaaagcag

SEQ ID NO: 159338 - DNA, 75 bp, Homo sapiens
atagtagtcaatatggtgataatgttactttcatcagaaggctcaaagtaatggacctgaaaagcaggaaaaaga

SEQ ID NO: 159339 - DNA, 73 bp, Homo sapiens
gtcaatatggtgataatgttactttcatcagaaggctcaaagtaatggacctgaaaagcaggaaaaagaaggg

SEQ ID NO: 159340 - DNA, 71 bp, Homo sapiens
taatgttactttcatcagaaggctcaaagtaatggacctgaaaagcaggaaaaagaaggggttatccagaa

SEQ ID NO: 159341 - DNA, 70 bp, Homo sapiens
actttcatcagaaggctcaaagtaatggacctgaaaagcaggaaaaagaaggggttatccagaacttcaa

SEQ ID NO: 159342 - DNA, 70 bp, Homo sapiens
ctcaaagtaatggacctgaaaagcaggaaaaagaaggggttatccagaacttcaagagaactctctcaaa

SEQ ID NO: 159343 - DNA, 69 bp, Homo sapiens
agtaatggacctgaaaagcaggaaaaagaaggggttatccagaacttcaagagaactctctcaaagaaa

SEQ ID NO: 159344 - DNA, 74 bp, Homo sapiens
aaaaaagaagagagaaaaagaggcattgcgacaggcatctgataaagatgatagacctttccaaggggaggatg

SEQ ID NO: 159345 - DNA, 76 bp, Homo sapiens
agagaaaaagaggcattgcgacaggcatctgataaagatgatagacctttccaaggggaggatgtgtaagtcagtt

SEQ ID NO: 159346 - DNA, 76 bp, Homo sapiens
aaaagaggcattgcgacaggcatctgataaagatgatagacctttccaaggggaggatgtgtaagtcagttttgga

SEQ ID NO: 159347 - DNA, 75 bp, Homo sapiens
ttgcgacaggcatctgataaagatgatagacctttccaaggggaggatgtgtaagtcagttttggaaatgttccc

SEQ ID NO: 159348 - DNA, 70 bp, Homo sapiens
atctgataaagatgatagacctttccaaggggaggatgtgtaagtcagttttggaaatgttcccctttct

SEQ ID NO: 159349 - DNA, 70 bp, Homo sapiens
tttggtatttttttttcttacagtgaaaattctcgactggctgctgaggtttacaaagacatgccggaaa

SEQ ID NO: 159350 - DNA, 73 bp, Homo sapiens
ttttcttacagtgaaaattctcgactggctgctgaggtttacaaagacatgccggaaaccagctttactcgaa

SEQ ID NO: 159351 - DNA, 73 bp, Homo sapiens
gtgaaaattctcgactggctgctgaggtttacaaagacatgccggaaaccagctttactcgaaccatttctaa

SEQ ID NO: 159352 - DNA, 74 bp, Homo sapiens
aattctcgactggctgctgaggtttacaaagacatgccggaaaccagctttactcgaaccatttctaatcctga

SEQ ID NO: 159353 - DNA, 73 bp, Homo sapiens
tgctgaggtttacaaagacatgccggaaaccagctttactcgaaccatttctaatcctgaggtggttatgaaa

SEQ ID NO: 159354 - DNA, 70 bp, Homo sapiens
tttacaaagacatgccggaaaccagctttactcgaaccatttctaatcctgaggtggttatgaaacgacg

SEQ ID NO: 159355 - DNA, 71 bp, Homo sapiens
atgccggaaaccagctttactcgaaccatttctaatcctgaggtggttatgaaacgacggaggcagcaaaa

SEQ ID NO: 159356 - DNA, 70 bp, Homo sapiens
aaaccagctttactcgaaccatttctaatcctgaggtggttatgaaacgacggaggcagcaaaaattgga

SEQ ID NO: 159357 - DNA, 72 bp, Homo sapiens
gaaccatttctaatcctgaggtggttatgaaacgacggaggcagcaaaaattggaaaagagaatgcaggaat

SEQ ID NO: 159358 - DNA, 71 bp, Homo sapiens
atttctaatcctgaggtggttatgaaacgacggaggcagcaaaaattggaaaagagaatgcaggaatttcg

SEQ ID NO: 159359 - DNA, 73 bp, Homo sapiens
aggtggttatgaaacgacggaggcagcaaaaattggaaaagagaatgcaggaatttcggagctcagatgggcg

SEQ ID NO: 159360 - DNA, 77 bp, Homo sapiens
tatgaaacgacggaggcagcaaaaattggaaaagagaatgcaggaatttcggagctcagatgggcggcctgattcag

SEQ ID NO: 159361 - DNA, 76 bp, Homo sapiens
gcagcaaaaattggaaaagagaatgcaggaatttcggagctcagatgggcggcctgattcaggtacaacttggtat

SEQ ID NO: 159362 - DNA, 72 bp, Homo sapiens
aattggaaaagagaatgcaggaatttcggagctcagatgggcggcctgattcaggtacaacttggtattttt

SEQ ID NO: 159363 - DNA, 74 bp, Homo sapiens
aaagagaatgcaggaatttcggagctcagatgggcggcctgattcaggtacaacttggtattttttctctgttc

SEQ ID NO: 159364 - DNA, 75 bp, Homo sapiens
ctggcataaagtaagttgtactcaaagatgtcaaaatgttttttcaggtggaacattgagaatttatgcagatag

SEQ ID NO: 159365 - DNA, 73 bp, Homo sapiens
taaagtaagttgtactcaaagatgtcaaaatgttttttcaggtggaacattgagaatttatgcagatagttta

SEQ ID NO: 159366 - DNA, 73 bp, Homo sapiens
tgtactcaaagatgtcaaaatgttttttcaggtggaacattgagaatttatgcagatagtttaaaaccaaata

SEQ ID NO: 159367 - DNA, 72 bp, Homo sapiens
gatgtcaaaatgttttttcaggtggaacattgagaatttatgcagatagtttaaaaccaaatattccctaca

SEQ ID NO: 159368 - DNA, 75 bp, Homo sapiens
tttcaggtggaacattgagaatttatgcagatagtttaaaaccaaatattccctacaagacaatcctgctgtcta

SEQ ID NO: 159369 - DNA, 75 bp, Homo sapiens
aacattgagaatttatgcagatagtttaaaaccaaatattccctacaagacaatcctgctgtctactacagatcc

SEQ ID NO: 159370 - DNA, 75 bp, Homo sapiens
aatttatgcagatagtttaaaaccaaatattccctacaagacaatcctgctgtctactacagatcctgcagactt

SEQ ID NO: 159371 - DNA, 77 bp, Homo sapiens
atagtttaaaaccaaatattccctacaagacaatcctgctgtctactacagatcctgcagactttgctgtggctgaa

SEQ ID NO: 159372 - DNA, 78 bp, Homo sapiens
ttaaaaccaaatattccctacaagacaatcctgctgtctactacagatcctgcagactttgctgtggctgaagcttta

SEQ ID NO: 159373 - DNA, 81 bp, Homo sapiens
atattccctacaagacaatcctgctgtctactacagatcctgcagactttgctgtggctgaagctttagagaagtatggtc

SEQ ID NO: 159374 - DNA, 79 bp, Homo sapiens
acaatcctgctgtctactacagatcctgcagactttgctgtggctgaagctttagagaagtatggtctggaaaaagaaa

SEQ ID NO: 159375 - DNA, 76 bp, Homo sapiens
tgtctactacagatcctgcagactttgctgtggctgaagctttagagaagtatggtctggaaaaagaaaaccctaa

SEQ ID NO: 159376 - DNA, 75 bp, Homo sapiens
tacagatcctgcagactttgctgtggctgaagctttagagaagtatggtctggaaaaagaaaaccctaaggatta

SEQ ID NO: 159377 - DNA, 73 bp, Homo sapiens
agactttgctgtggctgaagctttagagaagtatggtctggaaaaagaaaaccctaaggattactgcatcgcc

SEQ ID NO: 159378 - DNA, 71 bp, Homo sapiens
tgtggctgaagctttagagaagtatggtctggaaaaagaaaaccctaaggattactgcatcgcccgggtaa

SEQ ID NO: 159379 - DNA, 67 bp, Homo sapiens
ttagagaagtatggtctggaaaaagaaaaccctaaggattactgcatcgcccgggtaaggaacttta

SEQ ID NO: 159380 - DNA, 66 bp, Homo sapiens
aagtatggtctggaaaaagaaaaccctaaggattactgcatcgcccgggtaaggaactttatcaaa

SEQ ID NO: 159381 - DNA, 65 bp, Homo sapiens
aaaaagaaaaccctaaggattactgcatcgcccgggtaaggaactttatcaaatcagtagttctt

SEQ ID NO: 159382 - DNA, 69 bp, Homo sapiens
atttttgtttttttaggttatgcttcctcctggagcccagcattctgatgaaaagggtgctaaagaaat

SEQ ID NO: 159383 - DNA, 78 bp, Homo sapiens
tttttaggttatgcttcctcctggagcccagcattctgatgaaaagggtgctaaagaaattattcttgatgatgatga

SEQ ID NO: 159384 - DNA, 80 bp, Homo sapiens
ttatgcttcctcctggagcccagcattctgatgaaaagggtgctaaagaaattattcttgatgatgatgagtgtccttta

SEQ ID NO: 159385 - DNA, 80 bp, Homo sapiens
tcctggagcccagcattctgatgaaaagggtgctaaagaaattattcttgatgatgatgagtgtcctttacaaatcttca

SEQ ID NO: 159386 - DNA, 78 bp, Homo sapiens
cattctgatgaaaagggtgctaaagaaattattcttgatgatgatgagtgtcctttacaaatcttcagggaatggcca

SEQ ID NO: 159387 - DNA, 76 bp, Homo sapiens
atgaaaagggtgctaaagaaattattcttgatgatgatgagtgtcctttacaaatcttcagggaatggccaagtga

SEQ ID NO: 159388 - DNA, 75 bp, Homo sapiens
taaagaaattattcttgatgatgatgagtgtcctttacaaatcttcagggaatggccaagtgacaaaggtagtaa

SEQ ID NO: 159389 - DNA, 74 bp, Homo sapiens
attcttgatgatgatgagtgtcctttacaaatcttcagggaatggccaagtgacaaaggtagtaaccttattaa

SEQ ID NO: 159390 - DNA, 71 bp, Homo sapiens
atgatgagtgtcctttacaaatcttcagggaatggccaagtgacaaaggtagtaaccttattaaaggatta

SEQ ID NO: 159391 - DNA, 68 bp, Homo sapiens
tcctttacaaatcttcagggaatggccaagtgacaaaggtagtaaccttattaaaggattacttacac

SEQ ID NO: 159392 - DNA, 78 bp, Homo sapiens
atcctgaccaacctgagtctgcctgatgatttcccatgctgctgttctagggattttagtctttcagttgaagaggag

SEQ ID NO: 159393 - DNA, 78 bp, Homo sapiens
aacctgagtctgcctgatgatttcccatgctgctgttctagggattttagtctttcagttgaagaggaggccaccaga

SEQ ID NO: 159394 - DNA, 78 bp, Homo sapiens
tgatgatttcccatgctgctgttctagggattttagtctttcagttgaagaggaggccaccagaccacatcccaaaga

SEQ ID NO: 159395 - DNA, 74 bp, Homo sapiens
catgctgctgttctagggattttagtctttcagttgaagaggaggccaccagaccacatcccaaagaaaaccaa

SEQ ID NO: 159396 - DNA, 70 bp, Homo sapiens
tgttctagggattttagtctttcagttgaagaggaggccaccagaccacatcccaaagaaaaccaagaaa

SEQ ID NO: 159397 - DNA, 69 bp, Homo sapiens
attttagtctttcagttgaagaggaggccaccagaccacatcccaaagaaaaccaagaaacacttggaa

SEQ ID NO: 159398 - DNA, 72 bp, Homo sapiens
tctttcagttgaagaggaggccaccagaccacatcccaaagaaaaccaagaaacacttggaaggcaagacac

SEQ ID NO: 159399 - DNA, 68 bp, Homo sapiens
aggaggccaccagaccacatcccaaagaaaaccaagaaacacttggaaggcaagacacccaagggaaa

SEQ ID NO: 159400 - DNA, 69 bp, Homo sapiens
ccaccagaccacatcccaaagaaaaccaagaaacacttggaaggcaagacacccaagggaaaggagaga

SEQ ID NO: 159401 - DNA, 68 bp, Homo sapiens
atcccaaagaaaaccaagaaacacttggaaggcaagacacccaagggaaaggagagagctgacgggtc

SEQ ID NO: 159402 - DNA, 71 bp, Homo sapiens
aaaaccaagaaacacttggaaggcaagacacccaagggaaaggagagagctgacgggtctggctatggctc

SEQ ID NO: 159403 - DNA, 71 bp, Homo sapiens
aaacacttggaaggcaagacacccaagggaaaggagagagctgacgggtctggctatggctccacccttcc

SEQ ID NO: 159404 - DNA, 72 bp, Homo sapiens
aaggcaagacacccaagggaaaggagagagctgacgggtctggctatggctccacccttcctccggagaagc

SEQ ID NO: 159405 - DNA, 73 bp, Homo sapiens
agggaaaggagagagctgacgggtctggctatggctccacccttcctccggagaagctgccctatttagtaga

SEQ ID NO: 159406 - DNA, 73 bp, Homo sapiens
aaggagagagctgacgggtctggctatggctccacccttcctccggagaagctgccctatttagtagagttaa

SEQ ID NO: 159407 - DNA, 72 bp, Homo sapiens
gggtctggctatggctccacccttcctccggagaagctgccctatttagtagagttaagcccaggtgagaaa

SEQ ID NO: 159408 - DNA, 73 bp, Homo sapiens
tatggctccacccttcctccggagaagctgccctatttagtagagttaagcccaggtgagaaaactggtcaca

SEQ ID NO: 159409 - DNA, 73 bp, Homo sapiens
ccttcctccggagaagctgccctatttagtagagttaagcccaggtgagaaaactggtcacaccagcacacat

SEQ ID NO: 159410 - DNA, 82 bp, Homo sapiens
tattccgcgtgttctgcatggtctctctcctgctgatgctgccttcacctgggtcctggcatgtgtcttaaccccagggaga

SEQ ID NO: 159411 - DNA, 81 bp, Homo sapiens
ttctgcatggtctctctcctgctgatgctgccttcacctgggtcctggcatgtgtcttaaccccagggagaaggaatcact

SEQ ID NO: 159412 - DNA, 79 bp, Homo sapiens
tctctcctgctgatgctgccttcacctgggtcctggcatgtgtcttaaccccagggagaaggaatcactttgcctacta

SEQ ID NO: 159413 - DNA, 78 bp, Homo sapiens
tgatgctgccttcacctgggtcctggcatgtgtcttaaccccagggagaaggaatcactttgcctactacaactatca

SEQ ID NO: 159414 - DNA, 74 bp, Homo sapiens
ttcacctgggtcctggcatgtgtcttaaccccagggagaaggaatcactttgcctactacaactatcacactta

SEQ ID NO: 159415 - DNA, 73 bp, Homo sapiens
tcctggcatgtgtcttaaccccagggagaaggaatcactttgcctactacaactatcacacttacgaaggtaa

SEQ ID NO: 159416 - DNA, 74 bp, Homo sapiens
tgtcttaaccccagggagaaggaatcactttgcctactacaactatcacacttacgaaggtaatgctatgctta

SEQ ID NO: 159417 - DNA, 73 bp, Homo sapiens
ccagggagaaggaatcactttgcctactacaactatcacacttacgaaggtaatgctatgcttactactactt

SEQ ID NO: 159418 - DNA, 72 bp, Homo sapiens
aaggaatcactttgcctactacaactatcacacttacgaaggtaatgctatgcttactactacttttataac

SEQ ID NO: 159419 - DNA, 72 bp, Homo sapiens
actttgcctactacaactatcacacttacgaaggtaatgctatgcttactactacttttataactaaagcac

SEQ ID NO: 159420 - DNA, 74 bp, Homo sapiens
caactatcacacttacgaaggtaatgctatgcttactactacttttataactaaagcactaatagaacctcatg

SEQ ID NO: 159421 - DNA, 74 bp, Homo sapiens
cacttacgaaggtaatgctatgcttactactacttttataactaaagcactaatagaacctcatgggcagaata

SEQ ID NO: 159422 - DNA, 79 bp, Homo sapiens
acagtaatattagactttgcaaatagagctgtcttccttctcttctcacagatggttctgactctagagataagccaaa

SEQ ID NO: 159423 - DNA, 79 bp, Homo sapiens
tattagactttgcaaatagagctgtcttccttctcttctcacagatggttctgactctagagataagccaaagctttac

SEQ ID NO: 159424 - DNA, 77 bp, Homo sapiens
atagagctgtcttccttctcttctcacagatggttctgactctagagataagccaaagctttaccgccttcagttaa

SEQ ID NO: 159425 - DNA, 74 bp, Homo sapiens
cttccttctcttctcacagatggttctgactctagagataagccaaagctttaccgccttcagttaagtgttac

SEQ ID NO: 159426 - DNA, 75 bp, Homo sapiens
ttctcttctcacagatggttctgactctagagataagccaaagctttaccgccttcagttaagtgttactgaagt

SEQ ID NO: 159427 - DNA, 72 bp, Homo sapiens
atggttctgactctagagataagccaaagctttaccgccttcagttaagtgttactgaagttgggacagaaa

SEQ ID NO: 159428 - DNA, 70 bp, Homo sapiens
actctagagataagccaaagctttaccgccttcagttaagtgttactgaagttgggacagaaaagttgga

SEQ ID NO: 159429 - DNA, 71 bp, Homo sapiens
taagccaaagctttaccgccttcagttaagtgttactgaagttgggacagaaaagttggatgacaactcta

SEQ ID NO: 159430 - DNA, 71 bp, Homo sapiens
agctttaccgccttcagttaagtgttactgaagttgggacagaaaagttggatgacaactctatccaggta

SEQ ID NO: 159431 - DNA, 74 bp, Homo sapiens
ttcagttaagtgttactgaagttgggacagaaaagttggatgacaactctatccaggtacgtagtctgagcttc

SEQ ID NO: 159432 - DNA, 76 bp, Homo sapiens
aagtgttactgaagttgggacagaaaagttggatgacaactctatccaggtacgtagtctgagcttcctgctgcaa

SEQ ID NO: 159433 - DNA, 78 bp, Homo sapiens
aagttgggacagaaaagttggatgacaactctatccaggtacgtagtctgagcttcctgctgcaactctgacattcca

SEQ ID NO: 159434 - DNA, 71 bp, Homo sapiens
aatgctgtgaacttcatgatgggagtttctttggtttccttcggtttccagttgtttggcccaggaattca

SEQ ID NO: 159435 - DNA, 70 bp, Homo sapiens
acttcatgatgggagtttctttggtttccttcggtttccagttgtttggcccaggaattcagccccatca

SEQ ID NO: 159436 - DNA, 68 bp, Homo sapiens
agtttctttggtttccttcggtttccagttgtttggcccaggaattcagccccatcactgtgacctta

SEQ ID NO: 159437 - DNA, 71 bp, Homo sapiens
ttggtttccttcggtttccagttgtttggcccaggaattcagccccatcactgtgaccttaccaacatgga

SEQ ID NO: 159438 - DNA, 76 bp, Homo sapiens
gtttccagttgtttggcccaggaattcagccccatcactgtgaccttaccaacatggatggagtggtcactgtgac

SEQ ID NO: 159439 - DNA, 78 bp, Homo sapiens
tttggcccaggaattcagccccatcactgtgaccttaccaacatggatggagtggtcactgtgacgcccagaagtatg

SEQ ID NO: 159440 - DNA, 78 bp, Homo sapiens
aattcagccccatcactgtgaccttaccaacatggatggagtggtcactgtgacgcccagaagtatggacgcagaaac

SEQ ID NO: 159441 - DNA, 78 bp, Homo sapiens
catcactgtgaccttaccaacatggatggagtggtcactgtgacgcccagaagtatggacgcagaaacctacgtggaa

SEQ ID NO: 159442 - DNA, 77 bp, Homo sapiens
tgtgaccttaccaacatggatggagtggtcactgtgacgcccagaagtatggacgcagaaacctacgtggaaggcca

SEQ ID NO: 159443 - DNA, 79 bp, Homo sapiens
aacatggatggagtggtcactgtgacgcccagaagtatggacgcagaaacctacgtggaaggccagcgcatctcagaaa

SEQ ID NO: 159444 - DNA, 78 bp, Homo sapiens
atggagtggtcactgtgacgcccagaagtatggacgcagaaacctacgtggaaggccagcgcatctcagaaaccacca

SEQ ID NO: 159445 - DNA, 83 bp, Homo sapiens
tgacgcccagaagtatggacgcagaaacctacgtggaaggccagcgcatctcagaaaccaccatgctgcagagtggcatgaaa

SEQ ID NO: 159446 - DNA, 81 bp, Homo sapiens
aagtatggacgcagaaacctacgtggaaggccagcgcatctcagaaaccaccatgctgcagagtggcatgaaagtgcagtt

SEQ ID NO: 159447 - DNA, 80 bp, Homo sapiens
acgcagaaacctacgtggaaggccagcgcatctcagaaaccaccatgctgcagagtggcatgaaagtgcagtttggggcg

SEQ ID NO: 159448 - DNA, 82 bp, Homo sapiens
tacgtggaaggccagcgcatctcagaaaccaccatgctgcagagtggcatgaaagtgcagtttggggcgtcccatgtattta

SEQ ID NO: 159449 - DNA, 79 bp, Homo sapiens
aaggccagcgcatctcagaaaccaccatgctgcagagtggcatgaaagtgcagtttggggcgtcccatgtatttaagtt

SEQ ID NO: 159450 - DNA, 77 bp, Homo sapiens
atctcagaaaccaccatgctgcagagtggcatgaaagtgcagtttggggcgtcccatgtatttaagtttgtggaccc

SEQ ID NO: 159451 - DNA, 76 bp, Homo sapiens
aaccaccatgctgcagagtggcatgaaagtgcagtttggggcgtcccatgtatttaagtttgtggaccccagtcag

SEQ ID NO: 159452 - DNA, 78 bp, Homo sapiens
gagtggcatgaaagtgcagtttggggcgtcccatgtatttaagtttgtggaccccagtcaggatcatgctcttgcaaa

SEQ ID NO: 159453 - DNA, 74 bp, Homo sapiens
aaagtgcagtttggggcgtcccatgtatttaagtttgtggaccccagtcaggatcatgctcttgcaaaaagatc

SEQ ID NO: 159454 - DNA, 75 bp, Homo sapiens
agtttggggcgtcccatgtatttaagtttgtggaccccagtcaggatcatgctcttgcaaaaagatctgtggatg

SEQ ID NO: 159455 - DNA, 78 bp, Homo sapiens
ccatgtatttaagtttgtggaccccagtcaggatcatgctcttgcaaaaagatctgtggatggaggcctgatggttaa

SEQ ID NO: 159456 - DNA, 77 bp, Homo sapiens
tatttaagtttgtggaccccagtcaggatcatgctcttgcaaaaagatctgtggatggaggcctgatggttaagggc

SEQ ID NO: 159457 - DNA, 76 bp, Homo sapiens
accccagtcaggatcatgctcttgcaaaaagatctgtggatggaggcctgatggttaagggcccaagacataaacc

SEQ ID NO: 159458 - DNA, 76 bp, Homo sapiens
ggatcatgctcttgcaaaaagatctgtggatggaggcctgatggttaagggcccaagacataaacctgggtaaata

SEQ ID NO: 159459 - DNA, 73 bp, Homo sapiens
tcttgcaaaaagatctgtggatggaggcctgatggttaagggcccaagacataaacctgggtaaatagattaa

SEQ ID NO: 159460 - DNA, 69 bp, Homo sapiens
aaaaagatctgtggatggaggcctgatggttaagggcccaagacataaacctgggtaaatagattaacc

SEQ ID NO: 159461 - DNA, 67 bp, Homo sapiens
atggaggcctgatggttaagggcccaagacataaacctgggtaaatagattaaccctaagatttaaa

SEQ ID NO: 159462 - DNA, 65 bp, Homo sapiens
cctgatggttaagggcccaagacataaacctgggtaaatagattaaccctaagatttaaaatgtt

SEQ ID NO: 159463 - DNA, 76 bp, Homo sapiens
aagaagagactatgcctgtcattggaatgttattaagtcagtgtgtttcttgttttatcccatcagaattgttcag

SEQ ID NO: 159464 - DNA, 75 bp, Homo sapiens
ctgtcattggaatgttattaagtcagtgtgtttcttgttttatcccatcagaattgttcaggagacaacttttga

SEQ ID NO: 159465 - DNA, 72 bp, Homo sapiens
ggaatgttattaagtcagtgtgtttcttgttttatcccatcagaattgttcaggagacaacttttgatttgg

SEQ ID NO: 159466 - DNA, 74 bp, Homo sapiens
tattaagtcagtgtgtttcttgttttatcccatcagaattgttcaggagacaacttttgatttgggaggagata

SEQ ID NO: 159467 - DNA, 74 bp, Homo sapiens
gtttcttgttttatcccatcagaattgttcaggagacaacttttgatttgggaggagatattcatagtgggaca

SEQ ID NO: 159468 - DNA, 76 bp, Homo sapiens
ttttatcccatcagaattgttcaggagacaacttttgatttgggaggagatattcatagtgggacagcattaccga

SEQ ID NO: 159469 - DNA, 75 bp, Homo sapiens
agaattgttcaggagacaacttttgatttgggaggagatattcatagtgggacagcattaccgacaagcaaggta

SEQ ID NO: 159470 - DNA, 73 bp, Homo sapiens
aggagacaacttttgatttgggaggagatattcatagtgggacagcattaccgacaagcaaggtaggtaatta

SEQ ID NO: 159471 - DNA, 73 bp, Homo sapiens
aacttttgatttgggaggagatattcatagtgggacagcattaccgacaagcaaggtaggtaattatggatta

SEQ ID NO: 159472 - DNA, 75 bp, Homo sapiens
tttgggaggagatattcatagtgggacagcattaccgacaagcaaggtaggtaattatggattacctgatagaag

SEQ ID NO: 159473 - DNA, 78 bp, Homo sapiens
atattcatagtgggacagcattaccgacaagcaaggtaggtaattatggattacctgatagaagtgtgcttgctatag

SEQ ID NO: 159474 - DNA, 79 bp, Homo sapiens
ttggtctgtgtgaggttctaaacccgttgtgctttctctccatgtagagcaccactaggctggacagcgacagagtgtc

SEQ ID NO: 159475 - DNA, 80 bp, Homo sapiens
tgaggttctaaacccgttgtgctttctctccatgtagagcaccactaggctggacagcgacagagtgtcgtctgcctcta

SEQ ID NO: 159476 - DNA, 82 bp, Homo sapiens
taaacccgttgtgctttctctccatgtagagcaccactaggctggacagcgacagagtgtcgtctgcctctagcacagccga

SEQ ID NO: 159477 - DNA, 83 bp, Homo sapiens
ctttctctccatgtagagcaccactaggctggacagcgacagagtgtcgtctgcctctagcacagccgagcggggaatggtga

SEQ ID NO: 159478 - DNA, 85 bp, Homo sapiens
atgtagagcaccactaggctggacagcgacagagtgtcgtctgcctctagcacagccgagcggggaatggtgaagccgatgatca

SEQ ID NO: 159479 - DNA, 83 bp, Homo sapiens
accactaggctggacagcgacagagtgtcgtctgcctctagcacagccgagcggggaatggtgaagccgatgatcagagtaga

SEQ ID NO: 159480 - DNA, 86 bp, Homo sapiens
tggacagcgacagagtgtcgtctgcctctagcacagccgagcggggaatggtgaagccgatgatcagagtagaacagcagccagat

SEQ ID NO: 159481 - DNA, 85 bp, Homo sapiens
acagagtgtcgtctgcctctagcacagccgagcggggaatggtgaagccgatgatcagagtagaacagcagccagattatcgcag

SEQ ID NO: 159482 - DNA, 85 bp, Homo sapiens
tcgtctgcctctagcacagccgagcggggaatggtgaagccgatgatcagagtagaacagcagccagattatcgcaggcaagaaa

SEQ ID NO: 159483 - DNA, 84 bp, Homo sapiens
tctagcacagccgagcggggaatggtgaagccgatgatcagagtagaacagcagccagattatcgcaggcaagaaagcaggtag

SEQ ID NO: 159484 - DNA, 81 bp, Homo sapiens
cggggaatggtgaagccgatgatcagagtagaacagcagccagattatcgcaggcaagaaagcaggtaggaaacacatcat

SEQ ID NO: 159485 - DNA, 82 bp, Homo sapiens
aatggtgaagccgatgatcagagtagaacagcagccagattatcgcaggcaagaaagcaggtaggaaacacatcatttttca

SEQ ID NO: 159486 - DNA, 81 bp, Homo sapiens
atgatcagagtagaacagcagccagattatcgcaggcaagaaagcaggtaggaaacacatcatttttcaatggtgaaagta

SEQ ID NO: 159487 - DNA, 78 bp, Homo sapiens
agtagaacagcagccagattatcgcaggcaagaaagcaggtaggaaacacatcatttttcaatggtgaaagtactgaa

SEQ ID NO: 159488 - DNA, 76 bp, Homo sapiens
tacacaggttgtcagtaatattgttagccatgtgaccttattttaagtgatgtcagctttcttcttttagaacaca

SEQ ID NO: 159489 - DNA, 75 bp, Homo sapiens
agtaatattgttagccatgtgaccttattttaagtgatgtcagctttcttcttttagaacacaggatgcttctgg

SEQ ID NO: 159490 - DNA, 79 bp, Homo sapiens
agccatgtgaccttattttaagtgatgtcagctttcttcttttagaacacaggatgcttctgggcctgagctgatacta

SEQ ID NO: 159491 - DNA, 77 bp, Homo sapiens
accttattttaagtgatgtcagctttcttcttttagaacacaggatgcttctgggcctgagctgatactacctgcaa

SEQ ID NO: 159492 - DNA, 80 bp, Homo sapiens
ttttaagtgatgtcagctttcttcttttagaacacaggatgcttctgggcctgagctgatactacctgcaagcattgaat

SEQ ID NO: 159493 - DNA, 77 bp, Homo sapiens
agctttcttcttttagaacacaggatgcttctgggcctgagctgatactacctgcaagcattgaattcagggaaagt

SEQ ID NO: 159494 - DNA, 78 bp, Homo sapiens
ttttagaacacaggatgcttctgggcctgagctgatactacctgcaagcattgaattcagggaaagttgtgagtaatt

SEQ ID NO: 159495 - DNA, 79 bp, Homo sapiens
aacacaggatgcttctgggcctgagctgatactacctgcaagcattgaattcagggaaagttgtgagtaatttcagatt

SEQ ID NO: 159496 - DNA, 81 bp, Homo sapiens
tgggcctgagctgatactacctgcaagcattgaattcagggaaagttgtgagtaatttcagatttcattgtcaatgaatta

SEQ ID NO: 159497 - DNA, 78 bp, Homo sapiens
agctgatactacctgcaagcattgaattcagggaaagttgtgagtaatttcagatttcattgtcaatgaattatttct

SEQ ID NO: 159498 - DNA, 78 bp, Homo sapiens
actacctgcaagcattgaattcagggaaagttgtgagtaatttcagatttcattgtcaatgaattatttcttgatcca

SEQ ID NO: 159499 - DNA, 77 bp, Homo sapiens
gcattgaattcagggaaagttgtgagtaatttcagatttcattgtcaatgaattatttcttgatccattttactcca

SEQ ID NO: 159500 - DNA, 76 bp, Homo sapiens
ttccacagctgaagattcatttttgtctgccattataaattatactaatagctctacagtccactttaagttgtcc

SEQ ID NO: 159501 - DNA, 75 bp, Homo sapiens
gctgaagattcatttttgtctgccattataaattatactaatagctctacagtccactttaagttgtcccctaca

SEQ ID NO: 159502 - DNA, 74 bp, Homo sapiens
catttttgtctgccattataaattatactaatagctctacagtccactttaagttgtcccctacatatgtatta

SEQ ID NO: 159503 - DNA, 76 bp, Homo sapiens
cattataaattatactaatagctctacagtccactttaagttgtcccctacatatgtattatatatggcatgccgg

SEQ ID NO: 159504 - DNA, 76 bp, Homo sapiens
aattatactaatagctctacagtccactttaagttgtcccctacatatgtattatatatggcatgccggtatgtat

SEQ ID NO: 159505 - DNA, 78 bp, Homo sapiens
tctacagtccactttaagttgtcccctacatatgtattatatatggcatgccggtatgtattgtccaaccagtacaga

SEQ ID NO: 159506 - DNA, 78 bp, Homo sapiens
actttaagttgtcccctacatatgtattatatatggcatgccggtatgtattgtccaaccagtacagacctgacatca

SEQ ID NO: 159507 - DNA, 79 bp, Homo sapiens
aagttgtcccctacatatgtattatatatggcatgccggtatgtattgtccaaccagtacagacctgacatcagcccta

SEQ ID NO: 159508 - DNA, 85 bp, Homo sapiens
tatgtattatatatggcatgccggtatgtattgtccaaccagtacagacctgacatcagccctacagagcgcacacataaagtca

SEQ ID NO: 159509 - DNA, 85 bp, Homo sapiens
attatatatggcatgccggtatgtattgtccaaccagtacagacctgacatcagccctacagagcgcacacataaagtcattgca

SEQ ID NO: 159510 - DNA, 81 bp, Homo sapiens
ccggtatgtattgtccaaccagtacagacctgacatcagccctacagagcgcacacataaagtcattgcagtcgtcaacaa

SEQ ID NO: 159511 - DNA, 85 bp, Homo sapiens
aaccagtacagacctgacatcagccctacagagcgcacacataaagtcattgcagtcgtcaacaagatggtgagcatgatggagg

SEQ ID NO: 159512 - DNA, 87 bp, Homo sapiens
tgacatcagccctacagagcgcacacataaagtcattgcagtcgtcaacaagatggtgagcatgatggagggtgtcatccaggtacg

SEQ ID NO: 159513 - DNA, 83 bp, Homo sapiens
ccctacagagcgcacacataaagtcattgcagtcgtcaacaagatggtgagcatgatggagggtgtcatccaggtacgttcca

SEQ ID NO: 159514 - DNA, 83 bp, Homo sapiens
agagcgcacacataaagtcattgcagtcgtcaacaagatggtgagcatgatggagggtgtcatccaggtacgttccagccggc

SEQ ID NO: 159515 - DNA, 83 bp, Homo sapiens
ataaagtcattgcagtcgtcaacaagatggtgagcatgatggagggtgtcatccaggtacgttccagccggccagccatgctc

SEQ ID NO: 159516 - DNA, 84 bp, Homo sapiens
ttgcagtcgtcaacaagatggtgagcatgatggagggtgtcatccaggtacgttccagccggccagccatgctcctccagtgat

SEQ ID NO: 159517 - DNA, 81 bp, Homo sapiens
agatggtgagcatgatggagggtgtcatccaggtacgttccagccggccagccatgctcctccagtgattgtggttgtaat

SEQ ID NO: 159518 - DNA, 81 bp, Homo sapiens
catgatggagggtgtcatccaggtacgttccagccggccagccatgctcctccagtgattgtggttgtaattgctaagcca

SEQ ID NO: 159519 - DNA, 80 bp, Homo sapiens
ggtgtcatccaggtacgttccagccggccagccatgctcctccagtgattgtggttgtaattgctaagccagtgaattca

SEQ ID NO: 159520 - DNA, 77 bp, Homo sapiens
aggtacgttccagccggccagccatgctcctccagtgattgtggttgtaattgctaagccagtgaattcagcttctt

SEQ ID NO: 159521 - DNA, 78 bp, Homo sapiens
agccatgctcctccagtgattgtggttgtaattgctaagccagtgaattcagcttctttaaggcttctcatttggtta

SEQ ID NO: 159522 - DNA, 75 bp, Homo sapiens
tccagtgattgtggttgtaattgctaagccagtgaattcagcttctttaaggcttctcatttggttacaagattt

SEQ ID NO: 159523 - DNA, 72 bp, Homo sapiens
gattgtggttgtaattgctaagccagtgaattcagcttctttaaggcttctcatttggttacaagatttttt

SEQ ID NO: 159524 - DNA, 71 bp, Homo sapiens
gtaattgctaagccagtgaattcagcttctttaaggcttctcatttggttacaagatttttttctaaaata

SEQ ID NO: 159525 - DNA, 67 bp, Homo sapiens
aagccagtgaattcagcttctttaaggcttctcatttggttacaagatttttttctaaaataaaagt

SEQ ID NO: 159526 - DNA, 68 bp, Homo sapiens
taaaataaaagttatgtaaatattgtaggaaaatgtataactttaaagagttgaaaggaaatgcaagc

SEQ ID NO: 159527 - DNA, 66 bp, Homo sapiens
aaagttatgtaaatattgtaggaaaatgtataactttaaagagttgaaaggaaatgcaagcttttt

SEQ ID NO: 159528 - DNA, 67 bp, Homo sapiens
gtaaatattgtaggaaaatgtataactttaaagagttgaaaggaaatgcaagcttttttctattttg

SEQ ID NO: 159529 - DNA, 65 bp, Homo sapiens
aggaaaatgtataactttaaagagttgaaaggaaatgcaagcttttttctattttgttttccctg

SEQ ID NO: 159530 - DNA, 67 bp, Homo sapiens
taactttaaagagttgaaaggaaatgcaagcttttttctattttgttttccctgtaaaacttcagca

SEQ ID NO: 159531 - DNA, 69 bp, Homo sapiens
gagttgaaaggaaatgcaagcttttttctattttgttttccctgtaaaacttcagcataagtgaagtta

SEQ ID NO: 159532 - DNA, 68 bp, Homo sapiens
ggaaatgcaagcttttttctattttgttttccctgtaaaacttcagcataagtgaagttaacttgtag

SEQ ID NO: 159533 - DNA, 69 bp, Homo sapiens
ttttctattttgttttccctgtaaaacttcagcataagtgaagttaacttgtagtaatagttgtgagaa

SEQ ID NO: 159534 - DNA, 72 bp, Homo sapiens
tttgttttccctgtaaaacttcagcataagtgaagttaacttgtagtaatagttgtgagaaagtgctgagac

SEQ ID NO: 159535 - DNA, 74 bp, Homo sapiens
tgtaaaacttcagcataagtgaagttaacttgtagtaatagttgtgagaaagtgctgagactgttgtgggcttt

SEQ ID NO: 159536 - DNA, 73 bp, Homo sapiens
agcataagtgaagttaacttgtagtaatagttgtgagaaagtgctgagactgttgtgggcttttgtagaattt

SEQ ID NO: 159537 - DNA, 71 bp, Homo sapiens
aacttgtagtaatagttgtgagaaagtgctgagactgttgtgggcttttgtagaattttttctgtaaataa

SEQ ID NO: 159538 - DNA, 73 bp, Homo sapiens
agttgtgagaaagtgctgagactgttgtgggcttttgtagaattttttctgtaaataatttgttgagatgaag

SEQ ID NO: 159539 - DNA, 74 bp, Homo sapiens
agaaagtgctgagactgttgtgggcttttgtagaattttttctgtaaataatttgttgagatgaagttcatata

SEQ ID NO: 159540 - DNA, 72 bp, Homo sapiens
gagactgttgtgggcttttgtagaattttttctgtaaataatttgttgagatgaagttcatataatattaac

SEQ ID NO: 159541 - DNA, 71 bp, Homo sapiens
tgggcttttgtagaattttttctgtaaataatttgttgagatgaagttcatataatattaaccattttgaa

SEQ ID NO: 159542 - DNA, 74 bp, Homo sapiens
ttttttctgtaaataatttgttgagatgaagttcatataatattaaccattttgaagtgaacaattcagtcgca

SEQ ID NO: 159543 - DNA, 77 bp, Homo sapiens
ctgtaaataatttgttgagatgaagttcatataatattaaccattttgaagtgaacaattcagtcgcatttggtgca

SEQ ID NO: 159544 - DNA, 79 bp, Homo sapiens
tttgttgagatgaagttcatataatattaaccattttgaagtgaacaattcagtcgcatttggtgcattcacagtgttg

SEQ ID NO: 159545 - DNA, 79 bp, Homo sapiens
tataatattaaccattttgaagtgaacaattcagtcgcatttggtgcattcacagtgttgtgcagccaccacccctgtc

SEQ ID NO: 159546 - DNA, 76 bp, Homo sapiens
attttgaagtgaacaattcagtcgcatttggtgcattcacagtgttgtgcagccaccacccctgtcggttccaaaa

SEQ ID NO: 159547 - DNA, 77 bp, Homo sapiens
aacaattcagtcgcatttggtgcattcacagtgttgtgcagccaccacccctgtcggttccaaaacgtctccatcac

SEQ ID NO: 159548 - DNA, 80 bp, Homo sapiens
gtcgcatttggtgcattcacagtgttgtgcagccaccacccctgtcggttccaaaacgtctccatcacctcagagcgata

SEQ ID NO: 159549 - DNA, 78 bp, Homo sapiens
tgcattcacagtgttgtgcagccaccacccctgtcggttccaaaacgtctccatcacctcagagcgatacccctcaag

SEQ ID NO: 159550 - DNA, 73 bp, Homo sapiens
agtgttgtgcagccaccacccctgtcggttccaaaacgtctccatcacctcagagcgatacccctcaagtagt

SEQ ID NO: 159551 - DNA, 70 bp, Homo sapiens
agccaccacccctgtcggttccaaaacgtctccatcacctcagagcgatacccctcaagtagttcctggg

SEQ ID NO: 159552 - DNA, 68 bp, Homo sapiens
ccctgtcggttccaaaacgtctccatcacctcagagcgatacccctcaagtagttcctggggtttttc

SEQ ID NO: 159553 - DNA, 68 bp, Homo sapiens
gttccaaaacgtctccatcacctcagagcgatacccctcaagtagttcctggggtttttctcttcccc

SEQ ID NO: 159554 - DNA, 68 bp, Homo sapiens
tccatcacctcagagcgatacccctcaagtagttcctggggtttttctcttcccccgttccctggtaa

SEQ ID NO: 159555 - DNA, 64 bp, Homo sapiens
agagcgatacccctcaagtagttcctggggtttttctcttcccccgttccctggtaacgccttc

SEQ ID NO: 159556 - DNA, 62 bp, Homo sapiens
cctcaagtagttcctggggtttttctcttcccccgttccctggtaacgccttcttagacttt

SEQ ID NO: 159557 - DNA, 62 bp, Homo sapiens
tttttctcttcccccgttccctggtaacgccttcttagactttttaaaaatggttctcaaaa

SEQ ID NO: 159558 - DNA, 65 bp, Homo sapiens
ccccgttccctggtaacgccttcttagactttttaaaaatggttctcaaaagtcacttgctcctg

SEQ ID NO: 159559 - DNA, 71 bp, Homo sapiens
tggtaacgccttcttagactttttaaaaatggttctcaaaagtcacttgctcctgtgtaatgagcctagac

SEQ ID NO: 159560 - DNA, 71 bp, Homo sapiens
ttcttagactttttaaaaatggttctcaaaagtcacttgctcctgtgtaatgagcctagacgttggtagta

SEQ ID NO: 159561 - DNA, 70 bp, Homo sapiens
ttttaaaaatggttctcaaaagtcacttgctcctgtgtaatgagcctagacgttggtagtaattgggctt

SEQ ID NO: 159562 - DNA, 72 bp, Homo sapiens
aaaatggttctcaaaagtcacttgctcctgtgtaatgagcctagacgttggtagtaattgggctttttgata

SEQ ID NO: 159563 - DNA, 76 bp, Homo sapiens
aaagtcacttgctcctgtgtaatgagcctagacgttggtagtaattgggctttttgatagcacatgtgtaggtgta

SEQ ID NO: 159564 - DNA, 77 bp, Homo sapiens
tcctgtgtaatgagcctagacgttggtagtaattgggctttttgatagcacatgtgtaggtgtaatggacattgtaa

SEQ ID NO: 159565 - DNA, 76 bp, Homo sapiens
taatgagcctagacgttggtagtaattgggctttttgatagcacatgtgtaggtgtaatggacattgtaacatact

SEQ ID NO: 159566 - DNA, 74 bp, Homo sapiens
acgttggtagtaattgggctttttgatagcacatgtgtaggtgtaatggacattgtaacatacttctcacttaa

SEQ ID NO: 159567 - DNA, 75 bp, Homo sapiens
gtagtaattgggctttttgatagcacatgtgtaggtgtaatggacattgtaacatacttctcacttaaaatgaaa

SEQ ID NO: 159568 - DNA, 76 bp, Homo sapiens
agcacatgtgtaggtgtaatggacattgtaacatacttctcacttaaaatgaaattctgtcataaacctgttttca

SEQ ID NO: 159569 - DNA, 71 bp, Homo sapiens
gtaggtgtaatggacattgtaacatacttctcacttaaaatgaaattctgtcataaacctgttttcaaaat

SEQ ID NO: 159570 - DNA, 69 bp, Homo sapiens
aacatacttctcacttaaaatgaaattctgtcataaacctgttttcaaaatttcagaagataaaggtat

SEQ ID NO: 159571 - DNA, 69 bp, Homo sapiens
taaaatgaaattctgtcataaacctgttttcaaaatttcagaagataaaggtattttgttggtagaatg

SEQ ID NO: 159572 - DNA, 69 bp, Homo sapiens
ttctgtcataaacctgttttcaaaatttcagaagataaaggtattttgttggtagaatggtttgactcc

SEQ ID NO: 159573 - DNA, 65 bp, Homo sapiens
aacctgttttcaaaatttcagaagataaaggtattttgttggtagaatggtttgactcctttacg

SEQ ID NO: 159574 - DNA, 67 bp, Homo sapiens
caaaatttcagaagataaaggtattttgttggtagaatggtttgactcctttacgtactttctgtcc

SEQ ID NO: 159575 - DNA, 78 bp, Homo sapiens
ataagtaatacaacagctggactgaacagctcataacactcattcagcaactgagacatgcagtactaaaaccctttt

SEQ ID NO: 159576 - DNA, 83 bp, Homo sapiens
taatacaacagctggactgaacagctcataacactcattcagcaactgagacatgcagtactaaaaccctttttgactgtgca

SEQ ID NO: 159577 - DNA, 78 bp, Homo sapiens
actgaacagctcataacactcattcagcaactgagacatgcagtactaaaaccctttttgactgtgcaacctttatcg

SEQ ID NO: 159578 - DNA, 79 bp, Homo sapiens
tcataacactcattcagcaactgagacatgcagtactaaaaccctttttgactgtgcaacctttatcggcatttcataa

SEQ ID NO: 159579 - DNA, 76 bp, Homo sapiens
acactcattcagcaactgagacatgcagtactaaaaccctttttgactgtgcaacctttatcggcatttcataatt

SEQ ID NO: 159580 - DNA, 76 bp, Homo sapiens
aactgagacatgcagtactaaaaccctttttgactgtgcaacctttatcggcatttcataatttctgcttaatgca

SEQ ID NO: 159581 - DNA, 75 bp, Homo sapiens
acatgcagtactaaaaccctttttgactgtgcaacctttatcggcatttcataatttctgcttaatgcacttcag

SEQ ID NO: 159582 - DNA, 76 bp, Homo sapiens
taaaaccctttttgactgtgcaacctttatcggcatttcataatttctgcttaatgcacttcagtgtggatatgaa

SEQ ID NO: 159583 - DNA, 78 bp, Homo sapiens
actgtgcaacctttatcggcatttcataatttctgcttaatgcacttcagtgtggatatgaaatgacaaaagttctgt

SEQ ID NO: 159584 - DNA, 76 bp, Homo sapiens
caacctttatcggcatttcataatttctgcttaatgcacttcagtgtggatatgaaatgacaaaagttctgtttct

SEQ ID NO: 159585 - DNA, 77 bp, Homo sapiens
cggcatttcataatttctgcttaatgcacttcagtgtggatatgaaatgacaaaagttctgtttcttctctttatta

SEQ ID NO: 159586 - DNA, 75 bp, Homo sapiens
tttctgcttaatgcacttcagtgtggatatgaaatgacaaaagttctgtttcttctctttattatttatccttgg

SEQ ID NO: 159587 - DNA, 73 bp, Homo sapiens
cttaatgcacttcagtgtggatatgaaatgacaaaagttctgtttcttctctttattatttatccttggttcc

SEQ ID NO: 159588 - DNA, 72 bp, Homo sapiens
gtgtggatatgaaatgacaaaagttctgtttcttctctttattatttatccttggttcctattctttggatc

SEQ ID NO: 159589 - DNA, 72 bp, Homo sapiens
gaaatgacaaaagttctgtttcttctctttattatttatccttggttcctattctttggatctcatctgagg

SEQ ID NO: 159590 - DNA, 71 bp, Homo sapiens
aaaagttctgtttcttctctttattatttatccttggttcctattctttggatctcatctgaggttgcctg

SEQ ID NO: 159591 - DNA, 77 bp, Homo sapiens
tttcttctctttattatttatccttggttcctattctttggatctcatctgaggttgcctggcctgcacatgtggtc

SEQ ID NO: 159592 - DNA, 80 bp, Homo sapiens
ttatttatccttggttcctattctttggatctcatctgaggttgcctggcctgcacatgtggtcgggagaggatgtgata

SEQ ID NO: 159593 - DNA, 83 bp, Homo sapiens
ttggttcctattctttggatctcatctgaggttgcctggcctgcacatgtggtcgggagaggatgtgatagatcagtacttga

SEQ ID NO: 159594 - DNA, 87 bp, Homo sapiens
tattctttggatctcatctgaggttgcctggcctgcacatgtggtcgggagaggatgtgatagatcagtacttgatactgagttgca

SEQ ID NO: 159595 - DNA, 87 bp, Homo sapiens
atctcatctgaggttgcctggcctgcacatgtggtcgggagaggatgtgatagatcagtacttgatactgagttgcatggtgtccaa

SEQ ID NO: 159596 - DNA, 86 bp, Homo sapiens
gttgcctggcctgcacatgtggtcgggagaggatgtgatagatcagtacttgatactgagttgcatggtgtccaagccagtgacta

SEQ ID NO: 159597 - DNA, 86 bp, Homo sapiens
ctgcacatgtggtcgggagaggatgtgatagatcagtacttgatactgagttgcatggtgtccaagccagtgactacaagtatcag

SEQ ID NO: 159598 - DNA, 82 bp, Homo sapiens
atgtggtcgggagaggatgtgatagatcagtacttgatactgagttgcatggtgtccaagccagtgactacaagtatcaggg

SEQ ID NO: 159599 - DNA, 82 bp, Homo sapiens
aggatgtgatagatcagtacttgatactgagttgcatggtgtccaagccagtgactacaagtatcagggtggctgtgggtaa

SEQ ID NO: 159600 - DNA, 82 bp, Homo sapiens
tagatcagtacttgatactgagttgcatggtgtccaagccagtgactacaagtatcagggtggctgtgggtaaccatggata

SEQ ID NO: 159601 - DNA, 81 bp, Homo sapiens
gtacttgatactgagttgcatggtgtccaagccagtgactacaagtatcagggtggctgtgggtaaccatggatacatgta

SEQ ID NO: 159602 - DNA, 84 bp, Homo sapiens
ttgcatggtgtccaagccagtgactacaagtatcagggtggctgtgggtaaccatggatacatgtatgtatactgcacagacta

SEQ ID NO: 159603 - DNA, 82 bp, Homo sapiens
tccaagccagtgactacaagtatcagggtggctgtgggtaaccatggatacatgtatgtatactgcacagactaccagataa

SEQ ID NO: 159604 - DNA, 83 bp, Homo sapiens
tgactacaagtatcagggtggctgtgggtaaccatggatacatgtatgtatactgcacagactaccagataatgcacggtcta

SEQ ID NO: 159605 - DNA, 81 bp, Homo sapiens
gtaaccatggatacatgtatgtatactgcacagactaccagataatgcacggtctacaatttggtgttatattatttgata

SEQ ID NO: 159606 - DNA, 81 bp, Homo sapiens
acatgtatgtatactgcacagactaccagataatgcacggtctacaatttggtgttatattatttgatatctccatttctc

SEQ ID NO: 159607 - DNA, 78 bp, Homo sapiens
actaccagataatgcacggtctacaatttggtgttatattatttgatatctccatttctccgctgattccatctataa

SEQ ID NO: 159608 - DNA, 79 bp, Homo sapiens
cagataatgcacggtctacaatttggtgttatattatttgatatctccatttctccgctgattccatctataaattgta

SEQ ID NO: 159609 - DNA, 77 bp, Homo sapiens
cggtctacaatttggtgttatattatttgatatctccatttctccgctgattccatctataaattgtagctaactga

SEQ ID NO: 159610 - DNA, 85 bp, Homo sapiens
gtgttatattatttgatatctccatttctccgctgattccatctataaattgtagctaactgaatccatatgtctatgtgcatga

SEQ ID NO: 159611 - DNA, 85 bp, Homo sapiens
tattatttgatatctccatttctccgctgattccatctataaattgtagctaactgaatccatatgtctatgtgcatgaatccta

SEQ ID NO: 159612 - DNA, 83 bp, Homo sapiens
atatctccatttctccgctgattccatctataaattgtagctaactgaatccatatgtctatgtgcatgaatcctaagaaata

SEQ ID NO: 159613 - DNA, 82 bp, Homo sapiens
cgctgattccatctataaattgtagctaactgaatccatatgtctatgtgcatgaatcctaagaaatagttgcagtggttat

SEQ ID NO: 159614 - DNA, 79 bp, Homo sapiens
ccatctataaattgtagctaactgaatccatatgtctatgtgcatgaatcctaagaaatagttgcagtggttatttact

SEQ ID NO: 159615 - DNA, 78 bp, Homo sapiens
taaattgtagctaactgaatccatatgtctatgtgcatgaatcctaagaaatagttgcagtggttatttacttcccat

SEQ ID NO: 159616 - DNA, 82 bp, Homo sapiens
ctaactgaatccatatgtctatgtgcatgaatcctaagaaatagttgcagtggttatttacttcccattgctatgtatgcac

SEQ ID NO: 159617 - DNA, 79 bp, Homo sapiens
tatgtctatgtgcatgaatcctaagaaatagttgcagtggttatttacttcccattgctatgtatgcacccaaattatt

SEQ ID NO: 159618 - DNA, 75 bp, Homo sapiens
tcctaagaaatagttgcagtggttatttacttcccattgctatgtatgcacccaaattattttgcaaatatctgg

SEQ ID NO: 159619 - DNA, 76 bp, Homo sapiens
ttcccattgctatgtatgcacccaaattattttgcaaatatctggtatctgtggtaaataccttggtgaaatggga

SEQ ID NO: 159620 - DNA, 73 bp, Homo sapiens
atgtatgcacccaaattattttgcaaatatctggtatctgtggtaaataccttggtgaaatgggaaggtactg

SEQ ID NO: 159621 - DNA, 72 bp, Homo sapiens
aaattattttgcaaatatctggtatctgtggtaaataccttggtgaaatgggaaggtactggtctatcttca

SEQ ID NO: 159622 - DNA, 74 bp, Homo sapiens
ttttgcaaatatctggtatctgtggtaaataccttggtgaaatgggaaggtactggtctatcttcagcagcttt

SEQ ID NO: 159623 - DNA, 74 bp, Homo sapiens
gtatctgtggtaaataccttggtgaaatgggaaggtactggtctatcttcagcagcttttcaagagcattcctt

SEQ ID NO: 159624 - DNA, 72 bp, Homo sapiens
gtaaataccttggtgaaatgggaaggtactggtctatcttcagcagcttttcaagagcattcctttatattt

SEQ ID NO: 159625 - DNA, 72 bp, Homo sapiens
accttggtgaaatgggaaggtactggtctatcttcagcagcttttcaagagcattcctttatatttttatta

SEQ ID NO: 159626 - DNA, 70 bp, Homo sapiens
aatgggaaggtactggtctatcttcagcagcttttcaagagcattcctttatatttttattacttttgtt

SEQ ID NO: 159627 - DNA, 73 bp, Homo sapiens
actggtctatcttcagcagcttttcaagagcattcctttatatttttattacttttgtttattctctgttgct

SEQ ID NO: 159628 - DNA, 73 bp, Homo sapiens
cagcagcttttcaagagcattcctttatatttttattacttttgtttattctctgttgcttatggaagtgtgt

SEQ ID NO: 159629 - DNA, 75 bp, Homo sapiens
tcaagagcattcctttatatttttattacttttgtttattctctgttgcttatggaagtgtgttctgtctacaga

SEQ ID NO: 159630 - DNA, 73 bp, Homo sapiens
gcattcctttatatttttattacttttgtttattctctgttgcttatggaagtgtgttctgtctacagaaaca

SEQ ID NO: 159631 - DNA, 74 bp, Homo sapiens
tttattacttttgtttattctctgttgcttatggaagtgtgttctgtctacagaaacagaagaatattgcaggg

SEQ ID NO: 159632 - DNA, 76 bp, Homo sapiens
ttttgtttattctctgttgcttatggaagtgtgttctgtctacagaaacagaagaatattgcaggggcacttgcct

SEQ ID NO: 159633 - DNA, 81 bp, Homo sapiens
ttatggaagtgtgttctgtctacagaaacagaagaatattgcaggggcacttgccttctggatggcaaatgcatctgaact

SEQ ID NO: 159634 - DNA, 82 bp, Homo sapiens
tgttctgtctacagaaacagaagaatattgcaggggcacttgccttctggatggcaaatgcatctgaacttctcaacttcat

SEQ ID NO: 159635 - DNA, 81 bp, Homo sapiens
acagaagaatattgcaggggcacttgccttctggatggcaaatgcatctgaacttctcaacttcattaagcaagaccgaga

SEQ ID NO: 159636 - DNA, 79 bp, Homo sapiens
attgcaggggcacttgccttctggatggcaaatgcatctgaacttctcaacttcattaagcaagaccgagaccttagtc

SEQ ID NO: 159637 - DNA, 79 bp, Homo sapiens
acttgccttctggatggcaaatgcatctgaacttctcaacttcattaagcaagaccgagaccttagtcggatcacactg

SEQ ID NO: 159638 - DNA, 77 bp, Homo sapiens
attaagcaagaccgagaccttagtcggatcacactggatgctcaagatgttttagcacatttggttcaaatggcatt

SEQ ID NO: 159639 - DNA, 76 bp, Homo sapiens
ttagtcggatcacactggatgctcaagatgttttagcacatttggttcaaatggcatttaagtaaggaacacattt

SEQ ID NO: 159640 - DNA, 74 bp, Homo sapiens
tcaagatgttttagcacatttggttcaaatggcatttaagtaaggaacacatttttgaaggcggcactactcta

SEQ ID NO: 159641 - DNA, 82 bp, Homo sapiens
tgacaatagctgtctgtcatgctaagattacttaaattgtctatgtattttcagatacttggttcactgtcttcaatcagaa

SEQ ID NO: 159642 - DNA, 79 bp, Homo sapiens
tgtctgtcatgctaagattacttaaattgtctatgtattttcagatacttggttcactgtcttcaatcagaacttaata

SEQ ID NO: 159643 - DNA, 77 bp, Homo sapiens
gattacttaaattgtctatgtattttcagatacttggttcactgtcttcaatcagaacttaataattacatgccagc

SEQ ID NO: 159644 - DNA, 79 bp, Homo sapiens
attgtctatgtattttcagatacttggttcactgtcttcaatcagaacttaataattacatgccagcctttctagatga

SEQ ID NO: 159645 - DNA, 78 bp, Homo sapiens
tattttcagatacttggttcactgtcttcaatcagaacttaataattacatgccagcctttctagatgaccctgaaga

SEQ ID NO: 159646 - DNA, 77 bp, Homo sapiens
agatacttggttcactgtcttcaatcagaacttaataattacatgccagcctttctagatgaccctgaagagaacag

SEQ ID NO: 159647 - DNA, 78 bp, Homo sapiens
actgtcttcaatcagaacttaataattacatgccagcctttctagatgaccctgaagagaacagtctgcaacgaccaa

SEQ ID NO: 159648 - DNA, 77 bp, Homo sapiens
ttcaatcagaacttaataattacatgccagcctttctagatgaccctgaagagaacagtctgcaacgaccaaaaata

SEQ ID NO: 159649 - DNA, 73 bp, Homo sapiens
aacttaataattacatgccagcctttctagatgaccctgaagagaacagtctgcaacgaccaaaaataggtta

SEQ ID NO: 159650 - DNA, 76 bp, Homo sapiens
ttacatgccagcctttctagatgaccctgaagagaacagtctgcaacgaccaaaaataggttaggatgttttctga

SEQ ID NO: 159651 - DNA, 75 bp, Homo sapiens
ttctagatgaccctgaagagaacagtctgcaacgaccaaaaataggttaggatgttttctgactgtctccctcta

SEQ ID NO: 159652 - DNA, 73 bp, Homo sapiens
atgaccctgaagagaacagtctgcaacgaccaaaaataggttaggatgttttctgactgtctccctctatccc

SEQ ID NO: 159653 - DNA, 88 bp, Homo sapiens
ctggatgacattttgctcctcttgtcctctcaccctgtctgggcagatgatgtgctgcacacgctcacaggagccatgtccttgctac

SEQ ID NO: 159654 - DNA, 88 bp, Homo sapiens
attttgctcctcttgtcctctcaccctgtctgggcagatgatgtgctgcacacgctcacaggagccatgtccttgctacgacgctgca

SEQ ID NO: 159655 - DNA, 91 bp, Homo sapiens
tcctcttgtcctctcaccctgtctgggcagatgatgtgctgcacacgctcacaggagccatgtccttgctacgacgctgcagagtcaatgc

SEQ ID NO: 159656 - DNA, 91 bp, Homo sapiens
tcaccctgtctgggcagatgatgtgctgcacacgctcacaggagccatgtccttgctacgacgctgcagagtcaatgccgccctgaccatc

SEQ ID NO: 159657 - DNA, 92 bp, Homo sapiens
tctgggcagatgatgtgctgcacacgctcacaggagccatgtccttgctacgacgctgcagagtcaatgccgccctgaccatccagctcttc

SEQ ID NO: 159658 - DNA, 92 bp, Homo sapiens
atgatgtgctgcacacgctcacaggagccatgtccttgctacgacgctgcagagtcaatgccgccctgaccatccagctcttctctcagctc

SEQ ID NO: 159659 - DNA, 85 bp, Homo sapiens
acgctcacaggagccatgtccttgctacgacgctgcagagtcaatgccgccctgaccatccagctcttctctcagctcttccact

SEQ ID NO: 159660 - DNA, 86 bp, Homo sapiens
aggagccatgtccttgctacgacgctgcagagtcaatgccgccctgaccatccagctcttctctcagctcttccacttcatcaata

SEQ ID NO: 159661 - DNA, 87 bp, Homo sapiens
cttgctacgacgctgcagagtcaatgccgccctgaccatccagctcttctctcagctcttccacttcatcaatatgtggctgttcaa

SEQ ID NO: 159662 - DNA, 87 bp, Homo sapiens
tacgacgctgcagagtcaatgccgccctgaccatccagctcttctctcagctcttccacttcatcaatatgtggctgttcaatagat

SEQ ID NO: 159663 - DNA, 84 bp, Homo sapiens
agagtcaatgccgccctgaccatccagctcttctctcagctcttccacttcatcaatatgtggctgttcaatagattggtgacc

SEQ ID NO: 159664 - DNA, 82 bp, Homo sapiens
cctgaccatccagctcttctctcagctcttccacttcatcaatatgtggctgttcaatagattggtgaccgacccagattcg

SEQ ID NO: 159665 - DNA, 81 bp, Homo sapiens
atccagctcttctctcagctcttccacttcatcaatatgtggctgttcaatagattggtgaccgacccagattcggggctg

SEQ ID NO: 159666 - DNA, 80 bp, Homo sapiens
ctcagctcttccacttcatcaatatgtggctgttcaatagattggtgaccgacccagattcggggctgtgctcccattac

SEQ ID NO: 159667 - DNA, 78 bp, Homo sapiens
tcttccacttcatcaatatgtggctgttcaatagattggtgaccgacccagattcggggctgtgctcccattactggg

SEQ ID NO: 159668 - DNA, 76 bp, Homo sapiens
aatatgtggctgttcaatagattggtgaccgacccagattcggggctgtgctcccattactggggtgcgattatcc

SEQ ID NO: 159669 - DNA, 77 bp, Homo sapiens
tgttcaatagattggtgaccgacccagattcggggctgtgctcccattactggggtgcgattatccgtcagcagttg

SEQ ID NO: 159670 - DNA, 75 bp, Homo sapiens
aatagattggtgaccgacccagattcggggctgtgctcccattactggggtgcgattatccgtcagcagttgggc

SEQ ID NO: 159671 - DNA, 75 bp, Homo sapiens
accgacccagattcggggctgtgctcccattactggggtgcgattatccgtcagcagttgggccatattgaagcc

SEQ ID NO: 159672 - DNA, 78 bp, Homo sapiens
agattcggggctgtgctcccattactggggtgcgattatccgtcagcagttgggccatattgaagcctgggctgagaa

SEQ ID NO: 159673 - DNA, 80 bp, Homo sapiens
tgtgctcccattactggggtgcgattatccgtcagcagttgggccatattgaagcctgggctgagaagcaggggctggaa

SEQ ID NO: 159674 - DNA, 79 bp, Homo sapiens
attactggggtgcgattatccgtcagcagttgggccatattgaagcctgggctgagaagcaggggctggaactggctgc

SEQ ID NO: 159675 - DNA, 83 bp, Homo sapiens
attatccgtcagcagttgggccatattgaagcctgggctgagaagcaggggctggaactggctgcggactgtcatctgagcag

SEQ ID NO: 159676 - DNA, 86 bp, Homo sapiens
gcagttgggccatattgaagcctgggctgagaagcaggggctggaactggctgcggactgtcatctgagcaggatcgtgcaggtga

SEQ ID NO: 159677 - DNA, 88 bp, Homo sapiens
catattgaagcctgggctgagaagcaggggctggaactggctgcggactgtcatctgagcaggatcgtgcaggtgattgctggtgcca

SEQ ID NO: 159678 - DNA, 85 bp, Homo sapiens
aagcctgggctgagaagcaggggctggaactggctgcggactgtcatctgagcaggatcgtgcaggtgattgctggtgccactcc

SEQ ID NO: 159679 - DNA, 87 bp, Homo sapiens
gaagcaggggctggaactggctgcggactgtcatctgagcaggatcgtgcaggtgattgctggtgccactccccagctcatgtgctt

SEQ ID NO: 159680 - DNA, 71 bp, Homo sapiens
aataactttacaagtgtgatattttatgtcctttattcttttacataggcaacgactttgcttaccatgga

SEQ ID NO: 159681 - DNA, 75 bp, Homo sapiens
aagtgtgatattttatgtcctttattcttttacataggcaacgactttgcttaccatggataagtatgcacctga

SEQ ID NO: 159682 - DNA, 76 bp, Homo sapiens
tttatgtcctttattcttttacataggcaacgactttgcttaccatggataagtatgcacctgatgacattccaaa

SEQ ID NO: 159683 - DNA, 76 bp, Homo sapiens
ctttattcttttacataggcaacgactttgcttaccatggataagtatgcacctgatgacattccaaatataaaca

SEQ ID NO: 159684 - DNA, 79 bp, Homo sapiens
tttacataggcaacgactttgcttaccatggataagtatgcacctgatgacattccaaatataaacagcacctgcttta

SEQ ID NO: 159685 - DNA, 75 bp, Homo sapiens
aacgactttgcttaccatggataagtatgcacctgatgacattccaaatataaacagcacctgctttaagttaaa

SEQ ID NO: 159686 - DNA, 78 bp, Homo sapiens
ttgcttaccatggataagtatgcacctgatgacattccaaatataaacagcacctgctttaagttaaattcattacaa

SEQ ID NO: 159687 - DNA, 76 bp, Homo sapiens
gataagtatgcacctgatgacattccaaatataaacagcacctgctttaagttaaattcattacaacttcaagcct

SEQ ID NO: 159688 - DNA, 76 bp, Homo sapiens
gcacctgatgacattccaaatataaacagcacctgctttaagttaaattcattacaacttcaagccttattacaga

SEQ ID NO: 159689 - DNA, 76 bp, Homo sapiens
tccaaatataaacagcacctgctttaagttaaattcattacaacttcaagccttattacagaactatcactgtgca

SEQ ID NO: 159690 - DNA, 76 bp, Homo sapiens
atataaacagcacctgctttaagttaaattcattacaacttcaagccttattacagaactatcactgtgcacctga

SEQ ID NO: 159691 - DNA, 76 bp, Homo sapiens
tgctttaagttaaattcattacaacttcaagccttattacagaactatcactgtgcacctgatgagccttttatcc

SEQ ID NO: 159692 - DNA, 74 bp, Homo sapiens
aagttaaattcattacaacttcaagccttattacagaactatcactgtgcacctgatgagccttttatcccaac

SEQ ID NO: 159693 - DNA, 76 bp, Homo sapiens
attacaacttcaagccttattacagaactatcactgtgcacctgatgagccttttatcccaacggtgagtggatgt

SEQ ID NO: 159694 - DNA, 78 bp, Homo sapiens
aagccttattacagaactatcactgtgcacctgatgagccttttatcccaacggtgagtggatgttgccacattacca

SEQ ID NO: 159695 - DNA, 80 bp, Homo sapiens
ttacagaactatcactgtgcacctgatgagccttttatcccaacggtgagtggatgttgccacattaccacacagtgcgg

SEQ ID NO: 159696 - DNA, 73 bp, Homo sapiens
aggcagtgagcatctctttttaattttgcgtttgttttccaaacaggatcttatagaaaatgtagtgactgtg

SEQ ID NO: 159697 - DNA, 74 bp, Homo sapiens
gtgagcatctctttttaattttgcgtttgttttccaaacaggatcttatagaaaatgtagtgactgtggctgaa

SEQ ID NO: 159698 - DNA, 71 bp, Homo sapiens
ttttaattttgcgtttgttttccaaacaggatcttatagaaaatgtagtgactgtggctgaaaacactgcc

SEQ ID NO: 159699 - DNA, 76 bp, Homo sapiens
ttgcgtttgttttccaaacaggatcttatagaaaatgtagtgactgtggctgaaaacactgccgatgagctggccc

SEQ ID NO: 159700 - DNA, 79 bp, Homo sapiens
tttccaaacaggatcttatagaaaatgtagtgactgtggctgaaaacactgccgatgagctggcccgcagtgatggaag

SEQ ID NO: 159701 - DNA, 80 bp, Homo sapiens
atcttatagaaaatgtagtgactgtggctgaaaacactgccgatgagctggcccgcagtgatggaagggaagtgcagttg

SEQ ID NO: 159702 - DNA, 79 bp, Homo sapiens
aaaatgtagtgactgtggctgaaaacactgccgatgagctggcccgcagtgatggaagggaagtgcagttggaggagga

SEQ ID NO: 159703 - DNA, 85 bp, Homo sapiens
actgtggctgaaaacactgccgatgagctggcccgcagtgatggaagggaagtgcagttggaggaggatcctgatctgcagctgc

SEQ ID NO: 159704 - DNA, 81 bp, Homo sapiens
aaaacactgccgatgagctggcccgcagtgatggaagggaagtgcagttggaggaggatcctgatctgcagctgccgtttc

SEQ ID NO: 159705 - DNA, 82 bp, Homo sapiens
atgagctggcccgcagtgatggaagggaagtgcagttggaggaggatcctgatctgcagctgccgtttcttttgccagaaga

SEQ ID NO: 159706 - DNA, 80 bp, Homo sapiens
cgcagtgatggaagggaagtgcagttggaggaggatcctgatctgcagctgccgtttcttttgccagaagatggttattc

SEQ ID NO: 159707 - DNA, 79 bp, Homo sapiens
gaagggaagtgcagttggaggaggatcctgatctgcagctgccgtttcttttgccagaagatggttattcttgtgatgt

SEQ ID NO: 159708 - DNA, 81 bp, Homo sapiens
aagtgcagttggaggaggatcctgatctgcagctgccgtttcttttgccagaagatggttattcttgtgatgttgtcagaa

SEQ ID NO: 159709 - DNA, 79 bp, Homo sapiens
aggaggatcctgatctgcagctgccgtttcttttgccagaagatggttattcttgtgatgttgtcagaaacattccaaa

SEQ ID NO: 159710 - DNA, 77 bp, Homo sapiens
atctgcagctgccgtttcttttgccagaagatggttattcttgtgatgttgtcagaaacattccaaatggtttacaa

SEQ ID NO: 159711 - DNA, 73 bp, Homo sapiens
tgccgtttcttttgccagaagatggttattcttgtgatgttgtcagaaacattccaaatggtttacaagaatt

SEQ ID NO: 159712 - DNA, 72 bp, Homo sapiens
tttgccagaagatggttattcttgtgatgttgtcagaaacattccaaatggtttacaagaatttttagaccc

SEQ ID NO: 159713 - DNA, 73 bp, Homo sapiens
aagatggttattcttgtgatgttgtcagaaacattccaaatggtttacaagaatttttagaccctctgtgcca

SEQ ID NO: 159714 - DNA, 73 bp, Homo sapiens
ttgtgatgttgtcagaaacattccaaatggtttacaagaatttttagaccctctgtgccagagaggtaaatta

SEQ ID NO: 159715 - DNA, 70 bp, Homo sapiens
gtcagaaacattccaaatggtttacaagaatttttagaccctctgtgccagagaggtaaattagtctaaa

SEQ ID NO: 159716 - DNA, 69 bp, Homo sapiens
aaacattccaaatggtttacaagaatttttagaccctctgtgccagagaggtaaattagtctaaatgcc

SEQ ID NO: 159717 - DNA, 73 bp, Homo sapiens
aatggtttacaagaatttttagaccctctgtgccagagaggtaaattagtctaaatgcctgagtctgagctac

SEQ ID NO: 159718 - DNA, 73 bp, Homo sapiens
atcttgacaagatgtgctttttcacttacaatttgcttgtttcctccttaggattttgcaggttaattcctca

SEQ ID NO: 159719 - DNA, 72 bp, Homo sapiens
atgtgctttttcacttacaatttgcttgtttcctccttaggattttgcaggttaattcctcacacacgttca

SEQ ID NO: 159720 - DNA, 69 bp, Homo sapiens
acttacaatttgcttgtttcctccttaggattttgcaggttaattcctcacacacgttcaccaggtact

SEQ ID NO: 159721 - DNA, 70 bp, Homo sapiens
cttgtttcctccttaggattttgcaggttaattcctcacacacgttcaccaggtacttggacaatatatt

SEQ ID NO: 159722 - DNA, 71 bp, Homo sapiens
ttcctccttaggattttgcaggttaattcctcacacacgttcaccaggtacttggacaatatattttgaag

SEQ ID NO: 159723 - DNA, 74 bp, Homo sapiens
attttgcaggttaattcctcacacacgttcaccaggtacttggacaatatattttgaaggtgcagattatgaaa

SEQ ID NO: 159724 - DNA, 74 bp, Homo sapiens
gttaattcctcacacacgttcaccaggtacttggacaatatattttgaaggtgcagattatgaaagtcaccttc

SEQ ID NO: 159725 - DNA, 77 bp, Homo sapiens
acacacgttcaccaggtacttggacaatatattttgaaggtgcagattatgaaagtcaccttctgcgtgagaacaca

SEQ ID NO: 159726 - DNA, 78 bp, Homo sapiens
aggtacttggacaatatattttgaaggtgcagattatgaaagtcaccttctgcgtgagaacacagagctggcaagtat

SEQ ID NO: 159727 - DNA, 78 bp, Homo sapiens
acaatatattttgaaggtgcagattatgaaagtcaccttctgcgtgagaacacagagctggcaagtattttgagggta

SEQ ID NO: 159728 - DNA, 79 bp, Homo sapiens
tattttgaaggtgcagattatgaaagtcaccttctgcgtgagaacacagagctggcaagtattttgagggtaccatgaa

SEQ ID NO: 159729 - DNA, 78 bp, Homo sapiens
agattatgaaagtcaccttctgcgtgagaacacagagctggcaagtattttgagggtaccatgaagtgaaatggatcc

SEQ ID NO: 159730 - DNA, 73 bp, Homo sapiens
atacagaagcacttccatttcagtcataaaataaacctttgttttcatcctttaggctcagcctctgaggaaa

SEQ ID NO: 159731 - DNA, 71 bp, Homo sapiens
ttccatttcagtcataaaataaacctttgttttcatcctttaggctcagcctctgaggaaagaacctgaaa

SEQ ID NO: 159732 - DNA, 72 bp, Homo sapiens
tttcagtcataaaataaacctttgttttcatcctttaggctcagcctctgaggaaagaacctgaaataatca

SEQ ID NO: 159733 - DNA, 70 bp, Homo sapiens
aaacctttgttttcatcctttaggctcagcctctgaggaaagaacctgaaataatcactgtgaccctaaa

SEQ ID NO: 159734 - DNA, 73 bp, Homo sapiens
ttgttttcatcctttaggctcagcctctgaggaaagaacctgaaataatcactgtgaccctaaaaaagcagaa

SEQ ID NO: 159735 - DNA, 74 bp, Homo sapiens
ttaggctcagcctctgaggaaagaacctgaaataatcactgtgaccctaaaaaagcagaatggaatgggcctta

SEQ ID NO: 159736 - DNA, 73 bp, Homo sapiens
agcctctgaggaaagaacctgaaataatcactgtgaccctaaaaaagcagaatggaatgggccttagcattgt

SEQ ID NO: 159737 - DNA, 74 bp, Homo sapiens
aagaacctgaaataatcactgtgaccctaaaaaagcagaatggaatgggccttagcattgttgcagcaaaggta

SEQ ID NO: 159738 - DNA, 74 bp, Homo sapiens
aaataatcactgtgaccctaaaaaagcagaatggaatgggccttagcattgttgcagcaaaggtaggccaatta

SEQ ID NO: 159739 - DNA, 75 bp, Homo sapiens
tgaccctaaaaaagcagaatggaatgggccttagcattgttgcagcaaaggtaggccaattagtcacgtgcgagt

SEQ ID NO: 159740 - DNA, 76 bp, Homo sapiens
aaaaagcagaatggaatgggccttagcattgttgcagcaaaggtaggccaattagtcacgtgcgagttgttctctc

SEQ ID NO: 159741 - DNA, 76 bp, Homo sapiens
agaatggaatgggccttagcattgttgcagcaaaggtaggccaattagtcacgtgcgagttgttctctccagtctt

SEQ ID NO: 159742 - DNA, 80 bp, Homo sapiens
ctgcatagtgcatttcttacaatatatcttcaatgcagtgttttcgccttgtttttgcaatagggtgctggtcaagataa

SEQ ID NO: 159743 - DNA, 75 bp, Homo sapiens
catttcttacaatatatcttcaatgcagtgttttcgccttgtttttgcaatagggtgctggtcaagataaactag

SEQ ID NO: 159744 - DNA, 76 bp, Homo sapiens
ttacaatatatcttcaatgcagtgttttcgccttgtttttgcaatagggtgctggtcaagataaactaggaatcta

SEQ ID NO: 159745 - DNA, 76 bp, Homo sapiens
atcttcaatgcagtgttttcgccttgtttttgcaatagggtgctggtcaagataaactaggaatctatgtgaagtc

SEQ ID NO: 159746 - DNA, 73 bp, Homo sapiens
tgttttcgccttgtttttgcaatagggtgctggtcaagataaactaggaatctatgtgaagtcggttgtgaaa

SEQ ID NO: 159747 - DNA, 73 bp, Homo sapiens
ccttgtttttgcaatagggtgctggtcaagataaactaggaatctatgtgaagtcggttgtgaaaggaggtgc

SEQ ID NO: 159748 - DNA, 78 bp, Homo sapiens
aatagggtgctggtcaagataaactaggaatctatgtgaagtcggttgtgaaaggaggtgctgcagatgtggtcagta

SEQ ID NO: 159749 - DNA, 79 bp, Homo sapiens
tggtcaagataaactaggaatctatgtgaagtcggttgtgaaaggaggtgctgcagatgtggtcagtatcattttgaaa

SEQ ID NO: 159750 - DNA, 77 bp, Homo sapiens
ataaactaggaatctatgtgaagtcggttgtgaaaggaggtgctgcagatgtggtcagtatcattttgaaagaagta

SEQ ID NO: 159751 - DNA, 78 bp, Homo sapiens
aatctatgtgaagtcggttgtgaaaggaggtgctgcagatgtggtcagtatcattttgaaagaagtacattttcagtg

SEQ ID NO: 159752 - DNA, 78 bp, Homo sapiens
aagtcggttgtgaaaggaggtgctgcagatgtggtcagtatcattttgaaagaagtacattttcagtgtgtcatatat

SEQ ID NO: 159753 - DNA, 78 bp, Homo sapiens
ttcttcctcccgctctctttgctctctacccctaatccatgcacacacctgtggatttgcctaggatggacgtctagc

SEQ ID NO: 159754 - DNA, 85 bp, Homo sapiens
tctctttgctctctacccctaatccatgcacacacctgtggatttgcctaggatggacgtctagctgcaggtgatcagctcctca

SEQ ID NO: 159755 - DNA, 85 bp, Homo sapiens
tctctacccctaatccatgcacacacctgtggatttgcctaggatggacgtctagctgcaggtgatcagctcctcagtgtggatg

SEQ ID NO: 159756 - DNA, 86 bp, Homo sapiens
taatccatgcacacacctgtggatttgcctaggatggacgtctagctgcaggtgatcagctcctcagtgtggatggacgaagtctg

SEQ ID NO: 159757 - DNA, 82 bp, Homo sapiens
acacacctgtggatttgcctaggatggacgtctagctgcaggtgatcagctcctcagtgtggatggacgaagtctggttgga

SEQ ID NO: 159758 - DNA, 82 bp, Homo sapiens
atttgcctaggatggacgtctagctgcaggtgatcagctcctcagtgtggatggacgaagtctggttggactctctcaggaa

SEQ ID NO: 159759 - DNA, 83 bp, Homo sapiens
atggacgtctagctgcaggtgatcagctcctcagtgtggatggacgaagtctggttggactctctcaggaaaggtatcattga

SEQ ID NO: 159760 - DNA, 82 bp, Homo sapiens
tctagctgcaggtgatcagctcctcagtgtggatggacgaagtctggttggactctctcaggaaaggtatcattgatttatt

SEQ ID NO: 159761 - DNA, 83 bp, Homo sapiens
tgatcagctcctcagtgtggatggacgaagtctggttggactctctcaggaaaggtatcattgatttatttgcttgaagcata

SEQ ID NO: 159762 - DNA, 79 bp, Homo sapiens
ctcagtgtggatggacgaagtctggttggactctctcaggaaaggtatcattgatttatttgcttgaagcatagtatta

SEQ ID NO: 159763 - DNA, 76 bp, Homo sapiens
atggacgaagtctggttggactctctcaggaaaggtatcattgatttatttgcttgaagcatagtattagcatttt

SEQ ID NO: 159764 - DNA, 77 bp, Homo sapiens
agcaggcactgcgttttagtctttcttacatgtgtaatcttcttctcctagggcggcagaactcatgacaagaacaa

SEQ ID NO: 159765 - DNA, 78 bp, Homo sapiens
ttttagtctttcttacatgtgtaatcttcttctcctagggcggcagaactcatgacaagaacaagctctgtggtgaca

SEQ ID NO: 159766 - DNA, 80 bp, Homo sapiens
ttacatgtgtaatcttcttctcctagggcggcagaactcatgacaagaacaagctctgtggtgacactggaagtagcaaa

SEQ ID NO: 159767 - DNA, 80 bp, Homo sapiens
tgtgtaatcttcttctcctagggcggcagaactcatgacaagaacaagctctgtggtgacactggaagtagcaaagcagg

SEQ ID NO: 159768 - DNA, 81 bp, Homo sapiens
tcttctcctagggcggcagaactcatgacaagaacaagctctgtggtgacactggaagtagcaaagcagggtgccatctac

SEQ ID NO: 159769 - DNA, 81 bp, Homo sapiens
gcagaactcatgacaagaacaagctctgtggtgacactggaagtagcaaagcagggtgccatctaccacggtctggccacc

SEQ ID NO: 159770 - DNA, 79 bp, Homo sapiens
tgacaagaacaagctctgtggtgacactggaagtagcaaagcagggtgccatctaccacggtctggccacccttctcaa

SEQ ID NO: 159771 - DNA, 79 bp, Homo sapiens
aacaagctctgtggtgacactggaagtagcaaagcagggtgccatctaccacggtctggccacccttctcaatcagcca

SEQ ID NO: 159772 - DNA, 82 bp, Homo sapiens
gtgacactggaagtagcaaagcagggtgccatctaccacggtctggccacccttctcaatcagccatcccccatgatgcaga

SEQ ID NO: 159773 - DNA, 79 bp, Homo sapiens
aagtagcaaagcagggtgccatctaccacggtctggccacccttctcaatcagccatcccccatgatgcagagaagtaa

SEQ ID NO: 159774 - DNA, 78 bp, Homo sapiens
aaagcagggtgccatctaccacggtctggccacccttctcaatcagccatcccccatgatgcagagaagtaaggacca

SEQ ID NO: 159775 - DNA, 76 bp, Homo sapiens
atctaccacggtctggccacccttctcaatcagccatcccccatgatgcagagaagtaaggaccagtagggaaaca

SEQ ID NO: 159776 - DNA, 75 bp, Homo sapiens
gtctggccacccttctcaatcagccatcccccatgatgcagagaagtaaggaccagtagggaaacaacagtgttt

SEQ ID NO: 159777 - DNA, 74 bp, Homo sapiens
gttgaaaataaaatcttaagagatactgaatatgctttgattccagtttcagatcgtcgtggctcaggtaaacc

SEQ ID NO: 159778 - DNA, 73 bp, Homo sapiens
aaatcttaagagatactgaatatgctttgattccagtttcagatcgtcgtggctcaggtaaaccccgaccaaa

SEQ ID NO: 159779 - DNA, 75 bp, Homo sapiens
ttaagagatactgaatatgctttgattccagtttcagatcgtcgtggctcaggtaaaccccgaccaaagagtgaa

SEQ ID NO: 159780 - DNA, 76 bp, Homo sapiens
tatgctttgattccagtttcagatcgtcgtggctcaggtaaaccccgaccaaagagtgaaggctttgagctctata

SEQ ID NO: 159781 - DNA, 72 bp, Homo sapiens
attccagtttcagatcgtcgtggctcaggtaaaccccgaccaaagagtgaaggctttgagctctataataat

SEQ ID NO: 159782 - DNA, 74 bp, Homo sapiens
tttcagatcgtcgtggctcaggtaaaccccgaccaaagagtgaaggctttgagctctataataattcaactcaa

SEQ ID NO: 159783 - DNA, 71 bp, Homo sapiens
gtcgtggctcaggtaaaccccgaccaaagagtgaaggctttgagctctataataattcaactcaaaatggg

SEQ ID NO: 159784 - DNA, 71 bp, Homo sapiens
aggtaaaccccgaccaaagagtgaaggctttgagctctataataattcaactcaaaatgggtctcctgaga

SEQ ID NO: 159785 - DNA, 76 bp, Homo sapiens
accaaagagtgaaggctttgagctctataataattcaactcaaaatgggtctcctgagagtcctcagctgccttgg

SEQ ID NO: 159786 - DNA, 79 bp, Homo sapiens
aggctttgagctctataataattcaactcaaaatgggtctcctgagagtcctcagctgccttgggcagaatatagtgaa

SEQ ID NO: 159787 - DNA, 77 bp, Homo sapiens
tctataataattcaactcaaaatgggtctcctgagagtcctcagctgccttgggcagaatatagtgaaccaaagaaa

SEQ ID NO: 159788 - DNA, 76 bp, Homo sapiens
aataattcaactcaaaatgggtctcctgagagtcctcagctgccttgggcagaatatagtgaaccaaagaaattgc

SEQ ID NO: 159789 - DNA, 82 bp, Homo sapiens
aatgggtctcctgagagtcctcagctgccttgggcagaatatagtgaaccaaagaaattgcctggtgatgacagactgatga

SEQ ID NO: 159790 - DNA, 82 bp, Homo sapiens
tctcctgagagtcctcagctgccttgggcagaatatagtgaaccaaagaaattgcctggtgatgacagactgatgaaaaata

SEQ ID NO: 159791 - DNA, 82 bp, Homo sapiens
tcagctgccttgggcagaatatagtgaaccaaagaaattgcctggtgatgacagactgatgaaaaatagagctgatcaccgt

SEQ ID NO: 159792 - DNA, 79 bp, Homo sapiens
ccttgggcagaatatagtgaaccaaagaaattgcctggtgatgacagactgatgaaaaatagagctgatcaccgttcca

SEQ ID NO: 159793 - DNA, 78 bp, Homo sapiens
agaatatagtgaaccaaagaaattgcctggtgatgacagactgatgaaaaatagagctgatcaccgttccagccccaa

SEQ ID NO: 159794 - DNA, 77 bp, Homo sapiens
aaagaaattgcctggtgatgacagactgatgaaaaatagagctgatcaccgttccagccccaacgtagcaagtaaga

SEQ ID NO: 159795 - DNA, 77 bp, Homo sapiens
cctggtgatgacagactgatgaaaaatagagctgatcaccgttccagccccaacgtagcaagtaagagtgacacttt

SEQ ID NO: 159796 - DNA, 76 bp, Homo sapiens
atgacagactgatgaaaaatagagctgatcaccgttccagccccaacgtagcaagtaagagtgacacttttttgct

SEQ ID NO: 159797 - DNA, 72 bp, Homo sapiens
gaaaaatagagctgatcaccgttccagccccaacgtagcaagtaagagtgacacttttttgcttcctaagta

SEQ ID NO: 159798 - DNA, 72 bp, Homo sapiens
acttttttttttcccccctgacttgagcagatcagcctcctagtcctggagggaaaagtgcatatgcctctg

SEQ ID NO: 159799 - DNA, 79 bp, Homo sapiens
ttcccccctgacttgagcagatcagcctcctagtcctggagggaaaagtgcatatgcctctggaacaacagcgaagata

SEQ ID NO: 159800 - DNA, 82 bp, Homo sapiens
acttgagcagatcagcctcctagtcctggagggaaaagtgcatatgcctctggaacaacagcgaagataacatctgtctcta

SEQ ID NO: 159801 - DNA, 79 bp, Homo sapiens
atcagcctcctagtcctggagggaaaagtgcatatgcctctggaacaacagcgaagataacatctgtctctactggaaa

SEQ ID NO: 159802 - DNA, 81 bp, Homo sapiens
tagtcctggagggaaaagtgcatatgcctctggaacaacagcgaagataacatctgtctctactggaaacctctgcactga

SEQ ID NO: 159803 - DNA, 80 bp, Homo sapiens
agggaaaagtgcatatgcctctggaacaacagcgaagataacatctgtctctactggaaacctctgcactgaggtctgat

SEQ ID NO: 159804 - DNA, 84 bp, Homo sapiens
aagtgcatatgcctctggaacaacagcgaagataacatctgtctctactggaaacctctgcactgaggtctgattgattgataa

SEQ ID NO: 159805 - DNA, 81 bp, Homo sapiens
tctggaacaacagcgaagataacatctgtctctactggaaacctctgcactgaggtctgattgattgataagcaaaaggct

SEQ ID NO: 159806 - DNA, 81 bp, Homo sapiens
agcgaagataacatctgtctctactggaaacctctgcactgaggtctgattgattgataagcaaaaggcttctactgcatt

SEQ ID NO: 159807 - DNA, 72 bp, Homo sapiens
agtctgtatggttgtaaaaagctcactttttttgttcttcacattttacaggagcagacgcctccgcctaga

SEQ ID NO: 159808 - DNA, 72 bp, Homo sapiens
ttgtaaaaagctcactttttttgttcttcacattttacaggagcagacgcctccgcctagacctgaagccta

SEQ ID NO: 159809 - DNA, 71 bp, Homo sapiens
ctcactttttttgttcttcacattttacaggagcagacgcctccgcctagacctgaagcctaccccatccc

SEQ ID NO: 159810 - DNA, 75 bp, Homo sapiens
ttcttcacattttacaggagcagacgcctccgcctagacctgaagcctaccccatccccactcagacgtacacca

SEQ ID NO: 159811 - DNA, 74 bp, Homo sapiens
tttacaggagcagacgcctccgcctagacctgaagcctaccccatccccactcagacgtacaccagagagtatt

SEQ ID NO: 159812 - DNA, 71 bp, Homo sapiens
agacgcctccgcctagacctgaagcctaccccatccccactcagacgtacaccagagagtattttaccttc

SEQ ID NO: 159813 - DNA, 72 bp, Homo sapiens
tccgcctagacctgaagcctaccccatccccactcagacgtacaccagagagtattttaccttcccagcttc

SEQ ID NO: 159814 - DNA, 70 bp, Homo sapiens
acctgaagcctaccccatccccactcagacgtacaccagagagtattttaccttcccagcttccaaatcc

SEQ ID NO: 159815 - DNA, 73 bp, Homo sapiens
ccatccccactcagacgtacaccagagagtattttaccttcccagcttccaaatcccaggatcggatggctcc

SEQ ID NO: 159816 - DNA, 74 bp, Homo sapiens
actcagacgtacaccagagagtattttaccttcccagcttccaaatcccaggatcggatggctcctcctcagaa

SEQ ID NO: 159817 - DNA, 73 bp, Homo sapiens
cgtacaccagagagtattttaccttcccagcttccaaatcccaggatcggatggctcctcctcagaaccagtg

SEQ ID NO: 159818 - DNA, 73 bp, Homo sapiens
agtattttaccttcccagcttccaaatcccaggatcggatggctcctcctcagaaccagtggccaaattatga

SEQ ID NO: 159819 - DNA, 76 bp, Homo sapiens
ttcccagcttccaaatcccaggatcggatggctcctcctcagaaccagtggccaaattatgaggaaaagccacata

SEQ ID NO: 159820 - DNA, 79 bp, Homo sapiens
aaatcccaggatcggatggctcctcctcagaaccagtggccaaattatgaggaaaagccacatatgcacacagatagta

SEQ ID NO: 159821 - DNA, 81 bp, Homo sapiens
atcggatggctcctcctcagaaccagtggccaaattatgaggaaaagccacatatgcacacagatagtaatcattccagta

SEQ ID NO: 159822 - DNA, 82 bp, Homo sapiens
tcctcctcagaaccagtggccaaattatgaggaaaagccacatatgcacacagatagtaatcattccagtattgcaattcag

SEQ ID NO: 159823 - DNA, 79 bp, Homo sapiens
aaccagtggccaaattatgaggaaaagccacatatgcacacagatagtaatcattccagtattgcaattcaggttagaa

SEQ ID NO: 159824 - DNA, 80 bp, Homo sapiens
caaattatgaggaaaagccacatatgcacacagatagtaatcattccagtattgcaattcaggttagaaatcaaagattc

SEQ ID NO: 159825 - DNA, 79 bp, Homo sapiens
ggaaaagccacatatgcacacagatagtaatcattccagtattgcaattcaggttagaaatcaaagattccacacactt

SEQ ID NO: 159826 - DNA, 80 bp, Homo sapiens
acatatgcacacagatagtaatcattccagtattgcaattcaggttagaaatcaaagattccacacacttttctcacctc

SEQ ID NO: 159827 - DNA, 69 bp, Homo sapiens
atataataattctttttctttttgcagcgtgttacacgttcccaagaagaacttcgagaagataaagct

SEQ ID NO: 159828 - DNA, 69 bp, Homo sapiens
ctttttctttttgcagcgtgttacacgttcccaagaagaacttcgagaagataaagcttaccaacttga

SEQ ID NO: 159829 - DNA, 74 bp, Homo sapiens
ttttgcagcgtgttacacgttcccaagaagaacttcgagaagataaagcttaccaacttgagcggcatcgaata

SEQ ID NO: 159830 - DNA, 76 bp, Homo sapiens
tgttacacgttcccaagaagaacttcgagaagataaagcttaccaacttgagcggcatcgaatagaggcagctatg

SEQ ID NO: 159831 - DNA, 75 bp, Homo sapiens
ttcccaagaagaacttcgagaagataaagcttaccaacttgagcggcatcgaatagaggcagctatggaccgaaa

SEQ ID NO: 159832 - DNA, 76 bp, Homo sapiens
aagaacttcgagaagataaagcttaccaacttgagcggcatcgaatagaggcagctatggaccgaaagtctgatag

SEQ ID NO: 159833 - DNA, 79 bp, Homo sapiens
aagataaagcttaccaacttgagcggcatcgaatagaggcagctatggaccgaaagtctgatagtgatatgtggataaa

SEQ ID NO: 159834 - DNA, 83 bp, Homo sapiens
cttaccaacttgagcggcatcgaatagaggcagctatggaccgaaagtctgatagtgatatgtggataaatcagagctcctca

SEQ ID NO: 159835 - DNA, 84 bp, Homo sapiens
agcggcatcgaatagaggcagctatggaccgaaagtctgatagtgatatgtggataaatcagagctcctcactggactccagta

SEQ ID NO: 159836 - DNA, 83 bp, Homo sapiens
tcgaatagaggcagctatggaccgaaagtctgatagtgatatgtggataaatcagagctcctcactggactccagtacctcta

SEQ ID NO: 159837 - DNA, 84 bp, Homo sapiens
tatggaccgaaagtctgatagtgatatgtggataaatcagagctcctcactggactccagtacctctagccaggagcatctgaa

SEQ ID NO: 159838 - DNA, 82 bp, Homo sapiens
aaagtctgatagtgatatgtggataaatcagagctcctcactggactccagtacctctagccaggagcatctgaaccattcc

SEQ ID NO: 159839 - DNA, 82 bp, Homo sapiens
atagtgatatgtggataaatcagagctcctcactggactccagtacctctagccaggagcatctgaaccattcctctaagtc

SEQ ID NO: 159840 - DNA, 80 bp, Homo sapiens
atgtggataaatcagagctcctcactggactccagtacctctagccaggagcatctgaaccattcctctaagtcggtcac

SEQ ID NO: 159841 - DNA, 79 bp, Homo sapiens
atcagagctcctcactggactccagtacctctagccaggagcatctgaaccattcctctaagtcggtcacccctgcttc

SEQ ID NO: 159842 - DNA, 77 bp, Homo sapiens
tggactccagtacctctagccaggagcatctgaaccattcctctaagtcggtcacccctgcttccacactgaccaaa

SEQ ID NO: 159843 - DNA, 76 bp, Homo sapiens
tccagtacctctagccaggagcatctgaaccattcctctaagtcggtcacccctgcttccacactgaccaaaagtg

SEQ ID NO: 159844 - DNA, 74 bp, Homo sapiens
caggagcatctgaaccattcctctaagtcggtcacccctgcttccacactgaccaaaagtggccctggccgttg

SEQ ID NO: 159845 - DNA, 71 bp, Homo sapiens
tgaaccattcctctaagtcggtcacccctgcttccacactgaccaaaagtggccctggccgttggaaaaca

SEQ ID NO: 159846 - DNA, 71 bp, Homo sapiens
attcctctaagtcggtcacccctgcttccacactgaccaaaagtggccctggccgttggaaaacaccagca

SEQ ID NO: 159847 - DNA, 71 bp, Homo sapiens
agtcggtcacccctgcttccacactgaccaaaagtggccctggccgttggaaaacaccagcagccataccg

SEQ ID NO: 159848 - DNA, 72 bp, Homo sapiens
cctgcttccacactgaccaaaagtggccctggccgttggaaaacaccagcagccataccggccacccctgtg

SEQ ID NO: 159849 - DNA, 71 bp, Homo sapiens
acactgaccaaaagtggccctggccgttggaaaacaccagcagccataccggccacccctgtggccgtctc

SEQ ID NO: 159850 - DNA, 71 bp, Homo sapiens
aaagtggccctggccgttggaaaacaccagcagccataccggccacccctgtggccgtctcccagccaatc

SEQ ID NO: 159851 - DNA, 73 bp, Homo sapiens
cgttggaaaacaccagcagccataccggccacccctgtggccgtctcccagccaatccgaacagacctgcctc

SEQ ID NO: 159852 - DNA, 73 bp, Homo sapiens
aaaacaccagcagccataccggccacccctgtggccgtctcccagccaatccgaacagacctgcctccgccac

SEQ ID NO: 159853 - DNA, 71 bp, Homo sapiens
agccataccggccacccctgtggccgtctcccagccaatccgaacagacctgcctccgccacccccgccac

SEQ ID NO: 159854 - DNA, 71 bp, Homo sapiens
acccctgtggccgtctcccagccaatccgaacagacctgcctccgccacccccgccacctccagtccacta

SEQ ID NO: 159855 - DNA, 73 bp, Homo sapiens
cgtctcccagccaatccgaacagacctgcctccgccacccccgccacctccagtccactatgccggtgatttc

SEQ ID NO: 159856 - DNA, 74 bp, Homo sapiens
agccaatccgaacagacctgcctccgccacccccgccacctccagtccactatgccggtgatttcgatggaatg

SEQ ID NO: 159857 - DNA, 74 bp, Homo sapiens
aacagacctgcctccgccacccccgccacctccagtccactatgccggtgatttcgatggaatgtccatggatt

SEQ ID NO: 159858 - DNA, 73 bp, Homo sapiens
acccccgccacctccagtccactatgccggtgatttcgatggaatgtccatggatttgcctctcccaccaccc

SEQ ID NO: 159859 - DNA, 75 bp, Homo sapiens
cagtccactatgccggtgatttcgatggaatgtccatggatttgcctctcccaccacccccttccgccaaccaga

SEQ ID NO: 159860 - DNA, 73 bp, Homo sapiens
actatgccggtgatttcgatggaatgtccatggatttgcctctcccaccacccccttccgccaaccagatagg

SEQ ID NO: 159861 - DNA, 76 bp, Homo sapiens
gtgatttcgatggaatgtccatggatttgcctctcccaccacccccttccgccaaccagatagggctgccgtctgc

SEQ ID NO: 159862 - DNA, 78 bp, Homo sapiens
tggaatgtccatggatttgcctctcccaccacccccttccgccaaccagatagggctgccgtctgcgcaggtggctgc

SEQ ID NO: 159863 - DNA, 77 bp, Homo sapiens
tttgcctctcccaccacccccttccgccaaccagatagggctgccgtctgcgcaggtggctgctgctgaacggagaa

SEQ ID NO: 159864 - DNA, 77 bp, Homo sapiens
tcccaccacccccttccgccaaccagatagggctgccgtctgcgcaggtggctgctgctgaacggagaaagagagaa

SEQ ID NO: 159865 - DNA, 80 bp, Homo sapiens
ccttccgccaaccagatagggctgccgtctgcgcaggtggctgctgctgaacggagaaagagagaagaacatcagcgttg

SEQ ID NO: 159866 - DNA, 81 bp, Homo sapiens
aaccagatagggctgccgtctgcgcaggtggctgctgctgaacggagaaagagagaagaacatcagcgttggtatgagaag

SEQ ID NO: 159867 - DNA, 82 bp, Homo sapiens
tagggctgccgtctgcgcaggtggctgctgctgaacggagaaagagagaagaacatcagcgttggtatgagaaggagaaggc

SEQ ID NO: 159868 - DNA, 79 bp, Homo sapiens
cgcaggtggctgctgctgaacggagaaagagagaagaacatcagcgttggtatgagaaggagaaggcccgcctggagga

SEQ ID NO: 159869 - DNA, 78 bp, Homo sapiens
tgctgctgaacggagaaagagagaagaacatcagcgttggtatgagaaggagaaggcccgcctggaggaggagcggga

SEQ ID NO: 159870 - DNA, 73 bp, Homo sapiens
aacggagaaagagagaagaacatcagcgttggtatgagaaggagaaggcccgcctggaggaggagcgggagag

SEQ ID NO: 159871 - DNA, 74 bp, Homo sapiens
aaagagagaagaacatcagcgttggtatgagaaggagaaggcccgcctggaggaggagcgggagaggaagcgga

SEQ ID NO: 159872 - DNA, 76 bp, Homo sapiens
aacatcagcgttggtatgagaaggagaaggcccgcctggaggaggagcgggagaggaagcggagagagcaggagag

SEQ ID NO: 159873 - DNA, 76 bp, Homo sapiens
aaggagaaggcccgcctggaggaggagcgggagaggaagcggagagagcaggagaggaagttgggccagatgcgca

SEQ ID NO: 159874 - DNA, 76 bp, Homo sapiens
cctggaggaggagcgggagaggaagcggagagagcaggagaggaagttgggccagatgcgcactcagtccttaaac

SEQ ID NO: 159875 - DNA, 76 bp, Homo sapiens
gagcgggagaggaagcggagagagcaggagaggaagttgggccagatgcgcactcagtccttaaaccctgctccgt

SEQ ID NO: 159876 - DNA, 75 bp, Homo sapiens
agaggaagcggagagagcaggagaggaagttgggccagatgcgcactcagtccttaaaccctgctccgttttctc

SEQ ID NO: 159877 - DNA, 78 bp, Homo sapiens
agagcaggagaggaagttgggccagatgcgcactcagtccttaaaccctgctccgttttctcccctgactgcacagca

SEQ ID NO: 159878 - DNA, 77 bp, Homo sapiens
ttgggccagatgcgcactcagtccttaaaccctgctccgttttctcccctgactgcacagcagatgaagcccgaaaa

SEQ ID NO: 159879 - DNA, 73 bp, Homo sapiens
agtccttaaaccctgctccgttttctcccctgactgcacagcagatgaagcccgaaaagccttccacactcca

SEQ ID NO: 159880 - DNA, 77 bp, Homo sapiens
ctgctccgttttctcccctgactgcacagcagatgaagcccgaaaagccttccacactccagcggccacaggaaaca

SEQ ID NO: 159881 - DNA, 77 bp, Homo sapiens
ttttctcccctgactgcacagcagatgaagcccgaaaagccttccacactccagcggccacaggaaacagtcattcg

SEQ ID NO: 159882 - DNA, 83 bp, Homo sapiens
actgcacagcagatgaagcccgaaaagccttccacactccagcggccacaggaaacagtcattcgggagctgcagcctcagca

SEQ ID NO: 159883 - DNA, 80 bp, Homo sapiens
agatgaagcccgaaaagccttccacactccagcggccacaggaaacagtcattcgggagctgcagcctcagcagcagccc

SEQ ID NO: 159884 - DNA, 81 bp, Homo sapiens
aaaagccttccacactccagcggccacaggaaacagtcattcgggagctgcagcctcagcagcagccccgcacgatcgagc

SEQ ID NO: 159885 - DNA, 86 bp, Homo sapiens
acactccagcggccacaggaaacagtcattcgggagctgcagcctcagcagcagccccgcacgatcgagcgcagagacttgcagta

SEQ ID NO: 159886 - DNA, 87 bp, Homo sapiens
ggccacaggaaacagtcattcgggagctgcagcctcagcagcagccccgcacgatcgagcgcagagacttgcagtacattacagtca

SEQ ID NO: 159887 - DNA, 86 bp, Homo sapiens
aggaaacagtcattcgggagctgcagcctcagcagcagccccgcacgatcgagcgcagagacttgcagtacattacagtcagcaaa

SEQ ID NO: 159888 - DNA, 84 bp, Homo sapiens
ctgcagcctcagcagcagccccgcacgatcgagcgcagagacttgcagtacattacagtcagcaaagaggagctttcctcgggg

SEQ ID NO: 159889 - DNA, 78 bp, Homo sapiens
cccgcacgatcgagcgcagagacttgcagtacattacagtcagcaaagaggagctttcctcgggggacagtctgtccc

SEQ ID NO: 159890 - DNA, 75 bp, Homo sapiens
gcagagacttgcagtacattacagtcagcaaagaggagctttcctcgggggacagtctgtcccccgacccgtgga

SEQ ID NO: 159891 - DNA, 72 bp, Homo sapiens
acttgcagtacattacagtcagcaaagaggagctttcctcgggggacagtctgtcccccgacccgtggaagc

SEQ ID NO: 159892 - DNA, 70 bp, Homo sapiens
ttacagtcagcaaagaggagctttcctcgggggacagtctgtcccccgacccgtggaagcgggacgccaa

SEQ ID NO: 159893 - DNA, 67 bp, Homo sapiens
aaagaggagctttcctcgggggacagtctgtcccccgacccgtggaagcgggacgccaaggagaagc

SEQ ID NO: 159894 - DNA, 70 bp, Homo sapiens
agctttcctcgggggacagtctgtcccccgacccgtggaagcgggacgccaaggagaagctggagaagca

SEQ ID NO: 159895 - DNA, 82 bp, Homo sapiens
gacagtctgtcccccgacccgtggaagcgggacgccaaggagaagctggagaagcagcagcagatgcacatcgtggacatgc

SEQ ID NO: 159896 - DNA, 84 bp, Homo sapiens
tctgtcccccgacccgtggaagcgggacgccaaggagaagctggagaagcagcagcagatgcacatcgtggacatgctgagcaa

SEQ ID NO: 159897 - DNA, 85 bp, Homo sapiens
acccgtggaagcgggacgccaaggagaagctggagaagcagcagcagatgcacatcgtggacatgctgagcaaggagatccagga

SEQ ID NO: 159898 - DNA, 89 bp, Homo sapiens
agcgggacgccaaggagaagctggagaagcagcagcagatgcacatcgtggacatgctgagcaaggagatccaggagctccagagcaaa

SEQ ID NO: 159899 - DNA, 88 bp, Homo sapiens
aaggagaagctggagaagcagcagcagatgcacatcgtggacatgctgagcaaggagatccaggagctccagagcaaaccggaccgca

SEQ ID NO: 159900 - DNA, 90 bp, Homo sapiens
gaagcagcagcagatgcacatcgtggacatgctgagcaaggagatccaggagctccagagcaaaccggaccgcagcgccgaggagagcga

SEQ ID NO: 159901 - DNA, 85 bp, Homo sapiens
agcagatgcacatcgtggacatgctgagcaaggagatccaggagctccagagcaaaccggaccgcagcgccgaggagagcgaccg

SEQ ID NO: 159902 - DNA, 83 bp, Homo sapiens
atcgtggacatgctgagcaaggagatccaggagctccagagcaaaccggaccgcagcgccgaggagagcgaccggctgcgcaa

SEQ ID NO: 159903 - DNA, 86 bp, Homo sapiens
acatgctgagcaaggagatccaggagctccagagcaaaccggaccgcagcgccgaggagagcgaccggctgcgcaagctcatgctg

SEQ ID NO: 159904 - DNA, 83 bp, Homo sapiens
aaggagatccaggagctccagagcaaaccggaccgcagcgccgaggagagcgaccggctgcgcaagctcatgctggagtggca

SEQ ID NO: 159905 - DNA, 83 bp, Homo sapiens
agctccagagcaaaccggaccgcagcgccgaggagagcgaccggctgcgcaagctcatgctggagtggcagttccagaagaga

SEQ ID NO: 159906 - DNA, 82 bp, Homo sapiens
agagcaaaccggaccgcagcgccgaggagagcgaccggctgcgcaagctcatgctggagtggcagttccagaagagactcca

SEQ ID NO: 159907 - DNA, 84 bp, Homo sapiens
accgcagcgccgaggagagcgaccggctgcgcaagctcatgctggagtggcagttccagaagagactccaggagtcgaagcaga

SEQ ID NO: 159908 - DNA, 82 bp, Homo sapiens
aggagagcgaccggctgcgcaagctcatgctggagtggcagttccagaagagactccaggagtcgaagcagaaggacgaaga

SEQ ID NO: 159909 - DNA, 82 bp, Homo sapiens
accggctgcgcaagctcatgctggagtggcagttccagaagagactccaggagtcgaagcagaaggacgaagatgacgagga

SEQ ID NO: 159910 - DNA, 81 bp, Homo sapiens
cgcaagctcatgctggagtggcagttccagaagagactccaggagtcgaagcagaaggacgaagatgacgaggaggaggag

SEQ ID NO: 159911 - DNA, 78 bp, Homo sapiens
agttccagaagagactccaggagtcgaagcagaaggacgaagatgacgaggaggaggaggacgatgatgtggacacca

SEQ ID NO: 159912 - DNA, 85 bp, Homo sapiens
agaagagactccaggagtcgaagcagaaggacgaagatgacgaggaggaggaggacgatgatgtggacaccatgctgatcatgca

SEQ ID NO: 159913 - DNA, 86 bp, Homo sapiens
agtcgaagcagaaggacgaagatgacgaggaggaggaggacgatgatgtggacaccatgctgatcatgcagcgcctggaggctgaa

SEQ ID NO: 159914 - DNA, 85 bp, Homo sapiens
aagcagaaggacgaagatgacgaggaggaggaggacgatgatgtggacaccatgctgatcatgcagcgcctggaggctgaacgaa

SEQ ID NO: 159915 - DNA, 84 bp, Homo sapiens
agatgacgaggaggaggaggacgatgatgtggacaccatgctgatcatgcagcgcctggaggctgaacgaagagcgagggtaaa

SEQ ID NO: 159916 - DNA, 81 bp, Homo sapiens
cgaggaggaggaggacgatgatgtggacaccatgctgatcatgcagcgcctggaggctgaacgaagagcgagggtaaaggg

SEQ ID NO: 159917 - DNA, 80 bp, Homo sapiens
aggacgatgatgtggacaccatgctgatcatgcagcgcctggaggctgaacgaagagcgagggtaaaggggggagtgctt

SEQ ID NO: 159918 - DNA, 81 bp, Homo sapiens
atgtggacaccatgctgatcatgcagcgcctggaggctgaacgaagagcgagggtaaaggggggagtgctttggctgtgcc

SEQ ID NO: 159919 - DNA, 81 bp, Homo sapiens
atgctgatcatgcagcgcctggaggctgaacgaagagcgagggtaaaggggggagtgctttggctgtgcccatctgtggtc

SEQ ID NO: 159920 - DNA, 71 bp, Homo sapiens
aggctgaacgaagagcgagggtaaaggggggagtgctttggctgtgcccatctgtggtccctattttagct

SEQ ID NO: 159921 - DNA, 71 bp, Homo sapiens
agggtaaaggggggagtgctttggctgtgcccatctgtggtccctattttagcttctgcgtgtttcccatg

SEQ ID NO: 159922 - DNA, 77 bp, Homo sapiens
tgtgcccatctgtggtccctattttagcttctgcgtgtttcccatggggatagctaggcccctgatcgtgataagga

SEQ ID NO: 159923 - DNA, 73 bp, Homo sapiens
tgtggtccctattttagcttctgcgtgtttcccatggggatagctaggcccctgatcgtgataaggattaaaa

SEQ ID NO: 159924 - DNA, 78 bp, Homo sapiens
ttttttttctttctctgttacctgcagcagactgctatgccagcaatctctgttctagatttggtatgttcttgtttc

SEQ ID NO: 159925 - DNA, 79 bp, Homo sapiens
ttctttctctgttacctgcagcagactgctatgccagcaatctctgttctagatttggtatgttcttgtttctttccct

SEQ ID NO: 159926 - DNA, 77 bp, Homo sapiens
ttacctgcagcagactgctatgccagcaatctctgttctagatttggtatgttcttgtttctttccctttggtactt

SEQ ID NO: 159927 - DNA, 72 bp, Homo sapiens
agactgctatgccagcaatctctgttctagatttggtatgttcttgtttctttccctttggtacttttttcc

SEQ ID NO: 159928 - DNA, 70 bp, Homo sapiens
cagcaatctctgttctagatttggtatgttcttgtttctttccctttggtacttttttcctgtcttgatt

SEQ ID NO: 159929 - DNA, 67 bp, Homo sapiens
ctctgttctagatttggtatgttcttgtttctttccctttggtacttttttcctgtcttgattttct

SEQ ID NO: 159930 - DNA, 65 bp, Homo sapiens
tagatttggtatgttcttgtttctttccctttggtacttttttcctgtcttgattttcttttctt

SEQ ID NO: 159931 - DNA, 80 bp, Homo sapiens
tcttgtgctggtggagtttgtggagggagattaatgtcagcctgttgttagttgcaggacgaggagcggaggcggcagca

SEQ ID NO: 159932 - DNA, 78 bp, Homo sapiens
agtttgtggagggagattaatgtcagcctgttgttagttgcaggacgaggagcggaggcggcagcagcagttagaaga

SEQ ID NO: 159933 - DNA, 81 bp, Homo sapiens
agggagattaatgtcagcctgttgttagttgcaggacgaggagcggaggcggcagcagcagttagaagagatgcgcaagcg

SEQ ID NO: 159934 - DNA, 79 bp, Homo sapiens
ctgttgttagttgcaggacgaggagcggaggcggcagcagcagttagaagagatgcgcaagcgggaagcggaagaccga

SEQ ID NO: 159935 - DNA, 81 bp, Homo sapiens
gttgcaggacgaggagcggaggcggcagcagcagttagaagagatgcgcaagcgggaagcggaagaccgagcgaggcaaga

SEQ ID NO: 159936 - DNA, 80 bp, Homo sapiens
aggagcggaggcggcagcagcagttagaagagatgcgcaagcgggaagcggaagaccgagcgaggcaagaggaagagcgc

SEQ ID NO: 159937 - DNA, 80 bp, Homo sapiens
cagcagcagttagaagagatgcgcaagcgggaagcggaagaccgagcgaggcaagaggaagagcgccggcggcaggagga

SEQ ID NO: 159938 - DNA, 76 bp, Homo sapiens
agttagaagagatgcgcaagcgggaagcggaagaccgagcgaggcaagaggaagagcgccggcggcaggaggagga

SEQ ID NO: 159939 - DNA, 75 bp, Homo sapiens
atgcgcaagcgggaagcggaagaccgagcgaggcaagaggaagagcgccggcggcaggaggaggagcgaacaaaa

SEQ ID NO: 159940 - DNA, 75 bp, Homo sapiens
gaagcggaagaccgagcgaggcaagaggaagagcgccggcggcaggaggaggagcgaacaaaacgagacgctgaa

SEQ ID NO: 159941 - DNA, 73 bp, Homo sapiens
aagaccgagcgaggcaagaggaagagcgccggcggcaggaggaggagcgaacaaaacgagacgctgaagaaaa

SEQ ID NO: 159942 - DNA, 72 bp, Homo sapiens
gcaagaggaagagcgccggcggcaggaggaggagcgaacaaaacgagacgctgaagaaaaggttatggtcct

SEQ ID NO: 159943 - DNA, 69 bp, Homo sapiens
aagagcgccggcggcaggaggaggagcgaacaaaacgagacgctgaagaaaaggttatggtcctttaag

SEQ ID NO: 159944 - DNA, 70 bp, Homo sapiens
ggcaggaggaggagcgaacaaaacgagacgctgaagaaaaggttatggtcctttaagggcagctagaatt

SEQ ID NO: 159945 - DNA, 68 bp, Homo sapiens
aggagcgaacaaaacgagacgctgaagaaaaggttatggtcctttaagggcagctagaattttaccaa

SEQ ID NO: 159946 - DNA, 67 bp, Homo sapiens
aacaaaacgagacgctgaagaaaaggttatggtcctttaagggcagctagaattttaccaagttagc

SEQ ID NO: 159947 - DNA, 68 bp, Homo sapiens
ctgaagaaaaggttatggtcctttaagggcagctagaattttaccaagttagcctgaacgtaatcgat

SEQ ID NO: 159948 - DNA, 68 bp, Homo sapiens
aaaaggttatggtcctttaagggcagctagaattttaccaagttagcctgaacgtaatcgattggctg

SEQ ID NO: 159949 - DNA, 72 bp, Homo sapiens
ctttaagggcagctagaattttaccaagttagcctgaacgtaatcgattggctggggcagagcgggctggaa

SEQ ID NO: 159950 - DNA, 72 bp, Homo sapiens
agctagaattttaccaagttagcctgaacgtaatcgattggctggggcagagcgggctggaagttctgtgtt

SEQ ID NO: 159951 - DNA, 71 bp, Homo sapiens
aattttaccaagttagcctgaacgtaatcgattggctggggcagagcgggctggaagttctgtgtttctta

SEQ ID NO: 159952 - DNA, 73 bp, Homo sapiens
aagttagcctgaacgtaatcgattggctggggcagagcgggctggaagttctgtgtttcttaagaagcacgag

SEQ ID NO: 159953 - DNA, 75 bp, Homo sapiens
aacgtaatcgattggctggggcagagcgggctggaagttctgtgtttcttaagaagcacgaggcagagcagggcc

SEQ ID NO: 159954 - DNA, 76 bp, Homo sapiens
attggctggggcagagcgggctggaagttctgtgtttcttaagaagcacgaggcagagcagggcctggctccccca

SEQ ID NO: 159955 - DNA, 76 bp, Homo sapiens
agagcgggctggaagttctgtgtttcttaagaagcacgaggcagagcagggcctggctcccccagctttgtgattg

SEQ ID NO: 159956 - DNA, 75 bp, Homo sapiens
aagttctgtgtttcttaagaagcacgaggcagagcagggcctggctcccccagctttgtgattggacctgcaact

SEQ ID NO: 159957 - DNA, 75 bp, Homo sapiens
tgtgtttcttaagaagcacgaggcagagcagggcctggctcccccagctttgtgattggacctgcaactttaccc

SEQ ID NO: 159958 - DNA, 77 bp, Homo sapiens
taagaagcacgaggcagagcagggcctggctcccccagctttgtgattggacctgcaactttaccccatctggccca

SEQ ID NO: 159959 - DNA, 73 bp, Homo sapiens
agagcagggcctggctcccccagctttgtgattggacctgcaactttaccccatctggcccacctacctctct

SEQ ID NO: 159960 - DNA, 75 bp, Homo sapiens
ttgtgattggacctgcaactttaccccatctggcccacctacctctcttctggactgtctccagatccccttatc

SEQ ID NO: 159961 - DNA, 73 bp, Homo sapiens
ccacctacctctcttctggactgtctccagatccccttatctgccaagttttgtctccttcaaacttctgaac

SEQ ID NO: 159962 - DNA, 76 bp, Homo sapiens
actgtctccagatccccttatctgccaagttttgtctccttcaaacttctgaactcttgggcgtgtgtagcagtga

SEQ ID NO: 159963 - DNA, 74 bp, Homo sapiens
agatccccttatctgccaagttttgtctccttcaaacttctgaactcttgggcgtgtgtagcagtgagcctctt

SEQ ID NO: 159964 - DNA, 75 bp, Homo sapiens
tatctgccaagttttgtctccttcaaacttctgaactcttgggcgtgtgtagcagtgagcctctttgcaaagggt

SEQ ID NO: 159965 - DNA, 71 bp, Homo sapiens
agttttgtctccttcaaacttctgaactcttgggcgtgtgtagcagtgagcctctttgcaaagggttcgtt

SEQ ID NO: 159966 - DNA, 73 bp, Homo sapiens
aaacttctgaactcttgggcgtgtgtagcagtgagcctctttgcaaagggttcgtttcctcgggcactcatct

SEQ ID NO: 159967 - DNA, 74 bp, Homo sapiens
aactcttgggcgtgtgtagcagtgagcctctttgcaaagggttcgtttcctcgggcactcatctttactgaaca

SEQ ID NO: 159968 - DNA, 78 bp, Homo sapiens
gtgtgtagcagtgagcctctttgcaaagggttcgtttcctcgggcactcatctttactgaacatggcccagcttgtca

SEQ ID NO: 159969 - DNA, 76 bp, Homo sapiens
agtgagcctctttgcaaagggttcgtttcctcgggcactcatctttactgaacatggcccagcttgtcattgtgaa

SEQ ID NO: 159970 - DNA, 76 bp, Homo sapiens
tctttgcaaagggttcgtttcctcgggcactcatctttactgaacatggcccagcttgtcattgtgaaggtgacat

SEQ ID NO: 159971 - DNA, 80 bp, Homo sapiens
ttcctcgggcactcatctttactgaacatggcccagcttgtcattgtgaaggtgacattggttcagtgattgcttaaatg

SEQ ID NO: 159972 - DNA, 80 bp, Homo sapiens
atctttactgaacatggcccagcttgtcattgtgaaggtgacattggttcagtgattgcttaaatggcatgtggaccgtg

SEQ ID NO: 159973 - DNA, 80 bp, Homo sapiens
aacatggcccagcttgtcattgtgaaggtgacattggttcagtgattgcttaaatggcatgtggaccgtgggaagcagta

SEQ ID NO: 159974 - DNA, 80 bp, Homo sapiens
gcttgtcattgtgaaggtgacattggttcagtgattgcttaaatggcatgtggaccgtgggaagcagtaggagcgtagta

SEQ ID NO: 159975 - DNA, 78 bp, Homo sapiens
attgtgaaggtgacattggttcagtgattgcttaaatggcatgtggaccgtgggaagcagtaggagcgtagtaagaca

SEQ ID NO: 159976 - DNA, 79 bp, Homo sapiens
ttcagtgattgcttaaatggcatgtggaccgtgggaagcagtaggagcgtagtaagacagttggctgccattcaacatt

SEQ ID NO: 159977 - DNA, 77 bp, Homo sapiens
cttaaatggcatgtggaccgtgggaagcagtaggagcgtagtaagacagttggctgccattcaacatttcaaataga

SEQ ID NO: 159978 - DNA, 78 bp, Homo sapiens
gaagcagtaggagcgtagtaagacagttggctgccattcaacatttcaaatagatggtttactcaaatcactcacttc

SEQ ID NO: 159979 - DNA, 78 bp, Homo sapiens
taggagcgtagtaagacagttggctgccattcaacatttcaaatagatggtttactcaaatcactcacttctggttga

SEQ ID NO: 159980 - DNA, 77 bp, Homo sapiens
tagtaagacagttggctgccattcaacatttcaaatagatggtttactcaaatcactcacttctggttgatggtaaa

SEQ ID NO: 159981 - DNA, 80 bp, Homo sapiens
ctgccattcaacatttcaaatagatggtttactcaaatcactcacttctggttgatggtaaagagagcagatggcttaga

SEQ ID NO: 159982 - DNA, 76 bp, Homo sapiens
aacatttcaaatagatggtttactcaaatcactcacttctggttgatggtaaagagagcagatggcttagaaaaca

SEQ ID NO: 159983 - DNA, 78 bp, Homo sapiens
aaatagatggtttactcaaatcactcacttctggttgatggtaaagagagcagatggcttagaaaacatgatacagga

SEQ ID NO: 159984 - DNA, 77 bp, Homo sapiens
ttactcaaatcactcacttctggttgatggtaaagagagcagatggcttagaaaacatgatacaggaaaatttagta

SEQ ID NO: 159985 - DNA, 77 bp, Homo sapiens
aatcactcacttctggttgatggtaaagagagcagatggcttagaaaacatgatacaggaaaatttagtatgtaatc

SEQ ID NO: 159986 - DNA, 76 bp, Homo sapiens
ctggttgatggtaaagagagcagatggcttagaaaacatgatacaggaaaatttagtatgtaatccagtaaatatc

SEQ ID NO: 159987 - DNA, 73 bp, Homo sapiens
ggtaaagagagcagatggcttagaaaacatgatacaggaaaatttagtatgtaatccagtaaatatcctaagt

SEQ ID NO: 159988 - DNA, 72 bp, Homo sapiens
agcagatggcttagaaaacatgatacaggaaaatttagtatgtaatccagtaaatatcctaagttatttatt

SEQ ID NO: 159989 - DNA, 73 bp, Homo sapiens
gaaaacatgatacaggaaaatttagtatgtaatccagtaaatatcctaagttatttattttcatgtgtgtgtg

SEQ ID NO: 159990 - DNA, 69 bp, Homo sapiens
gtgtgtttaaatcaagtaacccttttaattgaattttaaaatgacagcgaattttgacattctgagaaa

SEQ ID NO: 159991 - DNA, 70 bp, Homo sapiens
gtaacccttttaattgaattttaaaatgacagcgaattttgacattctgagaaatggggattttgagatg

SEQ ID NO: 159992 - DNA, 74 bp, Homo sapiens
ttttaaaatgacagcgaattttgacattctgagaaatggggattttgagatgtttctctccatatctccctttg

SEQ ID NO: 159993 - DNA, 76 bp, Homo sapiens
attttgacattctgagaaatggggattttgagatgtttctctccatatctccctttgtcctgtgtgtgtggccgac

SEQ ID NO: 159994 - DNA, 76 bp, Homo sapiens
attctgagaaatggggattttgagatgtttctctccatatctccctttgtcctgtgtgtgtggccgacgccctctg

SEQ ID NO: 159995 - DNA, 76 bp, Homo sapiens
agaaatggggattttgagatgtttctctccatatctccctttgtcctgtgtgtgtggccgacgccctctggatgaa

SEQ ID NO: 159996 - DNA, 76 bp, Homo sapiens
aaatggggattttgagatgtttctctccatatctccctttgtcctgtgtgtgtggccgacgccctctggatgaaga

SEQ ID NO: 159997 - DNA, 78 bp, Homo sapiens
attttgagatgtttctctccatatctccctttgtcctgtgtgtgtggccgacgccctctggatgaagaggctgtagcc

SEQ ID NO: 159998 - DNA, 80 bp, Homo sapiens
ttgagatgtttctctccatatctccctttgtcctgtgtgtgtggccgacgccctctggatgaagaggctgtagccgttga

SEQ ID NO: 159999 - DNA, 79 bp, Homo sapiens
atgtttctctccatatctccctttgtcctgtgtgtgtggccgacgccctctggatgaagaggctgtagccgttgagctc

SEQ ID NO: 160000 - DNA, 78 bp, Homo sapiens
tttctctccatatctccctttgtcctgtgtgtgtggccgacgccctctggatgaagaggctgtagccgttgagctccc

SEQ ID NO: 160001 - DNA, 77 bp, Homo sapiens
tttgtcctgtgtgtgtggccgacgccctctggatgaagaggctgtagccgttgagctccctgtgggggcctgtttca

SEQ ID NO: 160002 - DNA, 77 bp, Homo sapiens
tgtgtgtgtggccgacgccctctggatgaagaggctgtagccgttgagctccctgtgggggcctgtttcatcccgag

SEQ ID NO: 160003 - DNA, 76 bp, Homo sapiens
tgtagccgttgagctccctgtgggggcctgtttcatcccgaggggactgcgtgttgctctgtgtggtttgagagaa

SEQ ID NO: 160004 - DNA, 77 bp, Homo sapiens
tccctgtgggggcctgtttcatcccgaggggactgcgtgttgctctgtgtggtttgagagaagctgctcttctctgt

SEQ ID NO: 160005 - DNA, 78 bp, Homo sapiens
tttcatcccgaggggactgcgtgttgctctgtgtggtttgagagaagctgctcttctctgttacttcccttctatgaa

SEQ ID NO: 160006 - DNA, 77 bp, Homo sapiens
tggtttgagagaagctgctcttctctgttacttcccttctatgaaggtagaagctttcagtgttacaacttctgatg

SEQ ID NO: 160007 - DNA, 74 bp, Homo sapiens
agctgctcttctctgttacttcccttctatgaaggtagaagctttcagtgttacaacttctgatggcggaaaat

SEQ ID NO: 160008 - DNA, 71 bp, Homo sapiens
tctctgttacttcccttctatgaaggtagaagctttcagtgttacaacttctgatggcggaaaatttagtt

SEQ ID NO: 160009 - DNA, 69 bp, Homo sapiens
ttacttcccttctatgaaggtagaagctttcagtgttacaacttctgatggcggaaaatttagttttta

SEQ ID NO: 160010 - DNA, 69 bp, Homo sapiens
ctatgaaggtagaagctttcagtgttacaacttctgatggcggaaaatttagtttttattaataattcc

SEQ ID NO: 160011 - DNA, 69 bp, Homo sapiens
agctttcagtgttacaacttctgatggcggaaaatttagtttttattaataattccttcttggatagtc

SEQ ID NO: 160012 - DNA, 69 bp, Homo sapiens
gtgttacaacttctgatggcggaaaatttagtttttattaataattccttcttggatagtctagtgaac

SEQ ID NO: 160013 - DNA, 69 bp, Homo sapiens
gcggaaaatttagtttttattaataattccttcttggatagtctagtgaactatattaatagaacagtg

SEQ ID NO: 160014 - DNA, 73 bp, Homo sapiens
tttattaataattccttcttggatagtctagtgaactatattaatagaacagtgtactgttcacagaaaagaa

SEQ ID NO: 160015 - DNA, 73 bp, Homo sapiens
attccttcttggatagtctagtgaactatattaatagaacagtgtactgttcacagaaaagaacttgtaggga

SEQ ID NO: 160016 - DNA, 72 bp, Homo sapiens
gtctagtgaactatattaatagaacagtgtactgttcacagaaaagaacttgtagggagttttttgtagtga

SEQ ID NO: 160017 - DNA, 73 bp, Homo sapiens
attaatagaacagtgtactgttcacagaaaagaacttgtagggagttttttgtagtgatatgctctattagga

SEQ ID NO: 160018 - DNA, 74 bp, Homo sapiens
agaacagtgtactgttcacagaaaagaacttgtagggagttttttgtagtgatatgctctattaggatacagaa

SEQ ID NO: 160019 - DNA, 75 bp, Homo sapiens
tcacagaaaagaacttgtagggagttttttgtagtgatatgctctattaggatacagaacaatctaagagtaagc

SEQ ID NO: 160020 - DNA, 76 bp, Homo sapiens
agaacttgtagggagttttttgtagtgatatgctctattaggatacagaacaatctaagagtaagcttgatagaca

SEQ ID NO: 160021 - DNA, 80 bp, Homo sapiens
tgtagggagttttttgtagtgatatgctctattaggatacagaacaatctaagagtaagcttgatagacatgatgtgact

SEQ ID NO: 160022 - DNA, 82 bp, Homo sapiens
ttttgtagtgatatgctctattaggatacagaacaatctaagagtaagcttgatagacatgatgtgacttcacttaaatgga

SEQ ID NO: 160023 - DNA, 83 bp, Homo sapiens
tatgctctattaggatacagaacaatctaagagtaagcttgatagacatgatgtgacttcacttaaatggagtagagtgaata

SEQ ID NO: 160024 - DNA, 79 bp, Homo sapiens
agtaagcttgatagacatgatgtgacttcacttaaatggagtagagtgaataatgtaaggacactcacctctgttgaaa

SEQ ID NO: 160025 - DNA, 78 bp, Homo sapiens
atagacatgatgtgacttcacttaaatggagtagagtgaataatgtaaggacactcacctctgttgaaattggtgatt

SEQ ID NO: 160026 - DNA, 78 bp, Homo sapiens
atttctgcattttgtagacctttgccctctaagtttatcatcatattatctgttgaatctgaacagcatttgaagtcc

SEQ ID NO: 160027 - DNA, 77 bp, Homo sapiens
attttgtagacctttgccctctaagtttatcatcatattatctgttgaatctgaacagcatttgaagtcctctcaaa

SEQ ID NO: 160028 - DNA, 80 bp, Homo sapiens
tttgccctctaagtttatcatcatattatctgttgaatctgaacagcatttgaagtcctctcaaagagtttgagctttca

SEQ ID NO: 160029 - DNA, 80 bp, Homo sapiens
tctaagtttatcatcatattatctgttgaatctgaacagcatttgaagtcctctcaaagagtttgagctttcaggattag

SEQ ID NO: 160030 - DNA, 77 bp, Homo sapiens
atattatctgttgaatctgaacagcatttgaagtcctctcaaagagtttgagctttcaggattaggttcccctgtga

SEQ ID NO: 160031 - DNA, 77 bp, Homo sapiens
tgttgaatctgaacagcatttgaagtcctctcaaagagtttgagctttcaggattaggttcccctgtgagtctttca

SEQ ID NO: 160032 - DNA, 74 bp, Homo sapiens
acagcatttgaagtcctctcaaagagtttgagctttcaggattaggttcccctgtgagtctttcacttgtgtaa

SEQ ID NO: 160033 - DNA, 74 bp, Homo sapiens
aaagagtttgagctttcaggattaggttcccctgtgagtctttcacttgtgtaatggtaagtcaacattgatga

SEQ ID NO: 160034 - DNA, 76 bp, Homo sapiens
tttgagctttcaggattaggttcccctgtgagtctttcacttgtgtaatggtaagtcaacattgatgatctttcta

SEQ ID NO: 160035 - DNA, 74 bp, Homo sapiens
attaggttcccctgtgagtctttcacttgtgtaatggtaagtcaacattgatgatctttctaaggaaatcagat

SEQ ID NO: 160036 - DNA, 76 bp, Homo sapiens
ccctgtgagtctttcacttgtgtaatggtaagtcaacattgatgatctttctaaggaaatcagatttacaaaatgc

SEQ ID NO: 160037 - DNA, 79 bp, Homo sapiens
tttcacttgtgtaatggtaagtcaacattgatgatctttctaaggaaatcagatttacaaaatgctgagccgcttgatg

SEQ ID NO: 160038 - DNA, 79 bp, Homo sapiens
ttgtgtaatggtaagtcaacattgatgatctttctaaggaaatcagatttacaaaatgctgagccgcttgatgtctaag

SEQ ID NO: 160039 - DNA, 78 bp, Homo sapiens
taagtcaacattgatgatctttctaaggaaatcagatttacaaaatgctgagccgcttgatgtctaagtgttggtggt

SEQ ID NO: 160040 - DNA, 77 bp, Homo sapiens
attgatgatctttctaaggaaatcagatttacaaaatgctgagccgcttgatgtctaagtgttggtggtttttgctg

SEQ ID NO: 160041 - DNA, 75 bp, Homo sapiens
atctttctaaggaaatcagatttacaaaatgctgagccgcttgatgtctaagtgttggtggtttttgctgttgct

SEQ ID NO: 160042 - DNA, 74 bp, Homo sapiens
ctttctaaggaaatcagatttacaaaatgctgagccgcttgatgtctaagtgttggtggtttttgctgttgctt

SEQ ID NO: 160043 - DNA, 78 bp, Homo sapiens
aaatcagatttacaaaatgctgagccgcttgatgtctaagtgttggtggtttttgctgttgctttgctgttccatgaa

SEQ ID NO: 160044 - DNA, 78 bp, Homo sapiens
aatcagatttacaaaatgctgagccgcttgatgtctaagtgttggtggtttttgctgttgctttgctgttccatgaaa

SEQ ID NO: 160045 - DNA, 78 bp, Homo sapiens
atttacaaaatgctgagccgcttgatgtctaagtgttggtggtttttgctgttgctttgctgttccatgaaagcgctc

SEQ ID NO: 160046 - DNA, 79 bp, Homo sapiens
tacaaaatgctgagccgcttgatgtctaagtgttggtggtttttgctgttgctttgctgttccatgaaagcgctccctg

SEQ ID NO: 160047 - DNA, 80 bp, Homo sapiens
aatgctgagccgcttgatgtctaagtgttggtggtttttgctgttgctttgctgttccatgaaagcgctccctggctgct

SEQ ID NO: 160048 - DNA, 78 bp, Homo sapiens
agccgcttgatgtctaagtgttggtggtttttgctgttgctttgctgttccatgaaagcgctccctggctgcttggag

SEQ ID NO: 160049 - DNA, 78 bp, Homo sapiens
cttgatgtctaagtgttggtggtttttgctgttgctttgctgttccatgaaagcgctccctggctgcttggagggctg

SEQ ID NO: 160050 - DNA, 77 bp, Homo sapiens
taagtgttggtggtttttgctgttgctttgctgttccatgaaagcgctccctggctgcttggagggctgtgcttttc

SEQ ID NO: 160051 - DNA, 80 bp, Homo sapiens
tttttgctgttgctttgctgttccatgaaagcgctccctggctgcttggagggctgtgcttttccaggtcagtgccagct

SEQ ID NO: 160052 - DNA, 82 bp, Homo sapiens
tgttccatgaaagcgctccctggctgcttggagggctgtgcttttccaggtcagtgccagcttggctgtcccaggccgtgca

SEQ ID NO: 160053 - DNA, 80 bp, Homo sapiens
aaagcgctccctggctgcttggagggctgtgcttttccaggtcagtgccagcttggctgtcccaggccgtgcacagtgcc

SEQ ID NO: 160054 - DNA, 81 bp, Homo sapiens
agggctgtgcttttccaggtcagtgccagcttggctgtcccaggccgtgcacagtgcccattgctatagctgggcccagtc

SEQ ID NO: 160055 - DNA, 80 bp, Homo sapiens
cttttccaggtcagtgccagcttggctgtcccaggccgtgcacagtgcccattgctatagctgggcccagtcctggccac

SEQ ID NO: 160056 - DNA, 82 bp, Homo sapiens
tcagtgccagcttggctgtcccaggccgtgcacagtgcccattgctatagctgggcccagtcctggccacgccggagcctcg

SEQ ID NO: 160057 - DNA, 78 bp, Homo sapiens
agcttggctgtcccaggccgtgcacagtgcccattgctatagctgggcccagtcctggccacgccggagcctcggcgg

SEQ ID NO: 160058 - DNA, 76 bp, Homo sapiens
aggccgtgcacagtgcccattgctatagctgggcccagtcctggccacgccggagcctcggcgggggcagctgggt

SEQ ID NO: 160059 - DNA, 80 bp, Homo sapiens
attgctatagctgggcccagtcctggccacgccggagcctcggcgggggcagctgggttgtcacggcagcacagtgcaca

SEQ ID NO: 160060 - DNA, 81 bp, Homo sapiens
ggcccagtcctggccacgccggagcctcggcgggggcagctgggttgtcacggcagcacagtgcacatgcagagaggacca

SEQ ID NO: 160061 - DNA, 81 bp, Homo sapiens
tggccacgccggagcctcggcgggggcagctgggttgtcacggcagcacagtgcacatgcagagaggaccaggccatgttt

SEQ ID NO: 160062 - DNA, 79 bp, Homo sapiens
acgccggagcctcggcgggggcagctgggttgtcacggcagcacagtgcacatgcagagaggaccaggccatgtttttc

SEQ ID NO: 160063 - DNA, 80 bp, Homo sapiens
tgggttgtcacggcagcacagtgcacatgcagagaggaccaggccatgtttttcctgtgctgagaaactcttgggttatt

SEQ ID NO: 160064 - DNA, 77 bp, Homo sapiens
acggcagcacagtgcacatgcagagaggaccaggccatgtttttcctgtgctgagaaactcttgggttatttaattt

SEQ ID NO: 160065 - DNA, 75 bp, Homo sapiens
acagtgcacatgcagagaggaccaggccatgtttttcctgtgctgagaaactcttgggttatttaatttttccaa

SEQ ID NO: 160066 - DNA, 69 bp, Homo sapiens
agagaggaccaggccatgtttttcctgtgctgagaaactcttgggttatttaatttttccaatgtgttt

SEQ ID NO: 160067 - DNA, 69 bp, Homo sapiens
accaggccatgtttttcctgtgctgagaaactcttgggttatttaatttttccaatgtgttttcataac

SEQ ID NO: 160068 - DNA, 72 bp, Homo sapiens
ttttcctgtgctgagaaactcttgggttatttaatttttccaatgtgttttcataactcatgattatttgaa

SEQ ID NO: 160069 - DNA, 73 bp, Homo sapiens
tgtgctgagaaactcttgggttatttaatttttccaatgtgttttcataactcatgattatttgaaatacact

SEQ ID NO: 160070 - DNA, 74 bp, Homo sapiens
taatttttccaatgtgttttcataactcatgattatttgaaatacacttgtgttagtaactgcttctataatta

SEQ ID NO: 160071 - DNA, 75 bp, Homo sapiens
ccaatgtgttttcataactcatgattatttgaaatacacttgtgttagtaactgcttctataattaagtggtcac

SEQ ID NO: 160072 - DNA, 75 bp, Homo sapiens
tcataactcatgattatttgaaatacacttgtgttagtaactgcttctataattaagtggtcactgtaaaaaggc

SEQ ID NO: 160073 - DNA, 69 bp, Homo sapiens
gaaatacacttgtgttagtaactgcttctataattaagtggtcactgtaaaaaggcgaataacctattt

SEQ ID NO: 160074 - DNA, 72 bp, Homo sapiens
ctgcttctataattaagtggtcactgtaaaaaggcgaataacctatttttatatcagaatgtccaaaactca

SEQ ID NO: 160075 - DNA, 70 bp, Homo sapiens
attaagtggtcactgtaaaaaggcgaataacctatttttatatcagaatgtccaaaactcatgggtttgc

SEQ ID NO: 160076 - DNA, 70 bp, Homo sapiens
gtggtcactgtaaaaaggcgaataacctatttttatatcagaatgtccaaaactcatgggtttgctttgt

SEQ ID NO: 160077 - DNA, 72 bp, Homo sapiens
aggcgaataacctatttttatatcagaatgtccaaaactcatgggtttgctttgttatagaaaaatgtgcca

SEQ ID NO: 160078 - DNA, 73 bp, Homo sapiens
cctatttttatatcagaatgtccaaaactcatgggtttgctttgttatagaaaaatgtgccattcatttgttg

SEQ ID NO: 160079 - DNA, 74 bp, Homo sapiens
ttttatatcagaatgtccaaaactcatgggtttgctttgttatagaaaaatgtgccattcatttgttgggtaga

SEQ ID NO: 160080 - DNA, 71 bp, Homo sapiens
gtccaaaactcatgggtttgctttgttatagaaaaatgtgccattcatttgttgggtagaataaagttgtc

SEQ ID NO: 160081 - DNA, 72 bp, Homo sapiens
ctcatgggtttgctttgttatagaaaaatgtgccattcatttgttgggtagaataaagttgtcttgtaattg

SEQ ID NO: 160082 - DNA, 75 bp, Homo sapiens
tgctttgttatagaaaaatgtgccattcatttgttgggtagaataaagttgtcttgtaattgtatctgctcttgg

SEQ ID NO: 160083 - DNA, 73 bp, Homo sapiens
gaaaaatgtgccattcatttgttgggtagaataaagttgtcttgtaattgtatctgctcttggtataactaaa

SEQ ID NO: 160084 - DNA, 71 bp, Homo sapiens
gttgggtagaataaagttgtcttgtaattgtatctgctcttggtataactaaaagaggatattttgatttc

SEQ ID NO: 160085 - DNA, 72 bp, Homo sapiens
tagaataaagttgtcttgtaattgtatctgctcttggtataactaaaagaggatattttgatttcttcctaa

SEQ ID NO: 160086 - DNA, 72 bp, Homo sapiens
cttgtaattgtatctgctcttggtataactaaaagaggatattttgatttcttcctaaaatgttaccaagca

SEQ ID NO: 160087 - DNA, 72 bp, Homo sapiens
ttgtatctgctcttggtataactaaaagaggatattttgatttcttcctaaaatgttaccaagcaactgttc

SEQ ID NO: 160088 - DNA, 70 bp, Homo sapiens
ctcttggtataactaaaagaggatattttgatttcttcctaaaatgttaccaagcaactgttcttcatgt

SEQ ID NO: 160089 - DNA, 70 bp, Homo sapiens
aaagaggatattttgatttcttcctaaaatgttaccaagcaactgttcttcatgttaatactaagattct

SEQ ID NO: 160090 - DNA, 73 bp, Homo sapiens
gttaccaagcaactgttcttcatgttaatactaagattcttgatagttccatttaaaagccacaagaagtcat

SEQ ID NO: 160091 - DNA, 74 bp, Homo sapiens
caagcaactgttcttcatgttaatactaagattcttgatagttccatttaaaagccacaagaagtcattctggt

SEQ ID NO: 160092 - DNA, 74 bp, Homo sapiens
catgttaatactaagattcttgatagttccatttaaaagccacaagaagtcattctggtttattcctcactcca

SEQ ID NO: 160093 - DNA, 71 bp, Homo sapiens
aatactaagattcttgatagttccatttaaaagccacaagaagtcattctggtttattcctcactccaagg

SEQ ID NO: 160094 - DNA, 71 bp, Homo sapiens
attcttgatagttccatttaaaagccacaagaagtcattctggtttattcctcactccaagggaacactta

SEQ ID NO: 160095 - DNA, 70 bp, Homo sapiens
atttaaaagccacaagaagtcattctggtttattcctcactccaagggaacacttactttgtgtagacaa

SEQ ID NO: 160096 - DNA, 73 bp, Homo sapiens
aaagccacaagaagtcattctggtttattcctcactccaagggaacacttactttgtgtagacaagaagatga

SEQ ID NO: 160097 - DNA, 72 bp, Homo sapiens
agtcattctggtttattcctcactccaagggaacacttactttgtgtagacaagaagatgagagtctttcct

SEQ ID NO: 160098 - DNA, 73 bp, Homo sapiens
ttattcctcactccaagggaacacttactttgtgtagacaagaagatgagagtctttccttcaggatttctaa

SEQ ID NO: 160099 - DNA, 74 bp, Homo sapiens
ctcactccaagggaacacttactttgtgtagacaagaagatgagagtctttccttcaggatttctaaacacaga

SEQ ID NO: 160100 - DNA, 75 bp, Homo sapiens
aacacttactttgtgtagacaagaagatgagagtctttccttcaggatttctaaacacagagcaagaagattcaa

SEQ ID NO: 160101 - DNA, 75 bp, Homo sapiens
acaagaagatgagagtctttccttcaggatttctaaacacagagcaagaagattcaatgaaaaattgggctcagg

SEQ ID NO: 160102 - DNA, 74 bp, Homo sapiens
agagtctttccttcaggatttctaaacacagagcaagaagattcaatgaaaaattgggctcagggcagtaattg

SEQ ID NO: 160103 - DNA, 76 bp, Homo sapiens
tcaggatttctaaacacagagcaagaagattcaatgaaaaattgggctcagggcagtaattggggctggcatttat

SEQ ID NO: 160104 - DNA, 75 bp, Homo sapiens
ttctaaacacagagcaagaagattcaatgaaaaattgggctcagggcagtaattggggctggcatttattcttaa

SEQ ID NO: 160105 - DNA, 73 bp, Homo sapiens
agagcaagaagattcaatgaaaaattgggctcagggcagtaattggggctggcatttattcttaagagttttc

SEQ ID NO: 160106 - DNA, 71 bp, Homo sapiens
attcaatgaaaaattgggctcagggcagtaattggggctggcatttattcttaagagttttctccctcaaa

SEQ ID NO: 160107 - DNA, 69 bp, Homo sapiens
aaaaattgggctcagggcagtaattggggctggcatttattcttaagagttttctccctcaaaaggtga

SEQ ID NO: 160108 - DNA, 72 bp, Homo sapiens
ggcagtaattggggctggcatttattcttaagagttttctccctcaaaaggtgaaggagtgacattgcgtat

SEQ ID NO: 160109 - DNA, 73 bp, Homo sapiens
taattggggctggcatttattcttaagagttttctccctcaaaaggtgaaggagtgacattgcgtattcactc

SEQ ID NO: 160110 - DNA, 71 bp, Homo sapiens
gtgtgtgtgtagctctagagggagtagggagaaaatacaggatgaaattgaaaacagggactaacaacttt

SEQ ID NO: 160111 - DNA, 72 bp, Homo sapiens
tgtagctctagagggagtagggagaaaatacaggatgaaattgaaaacagggactaacaacttttcactgaa

SEQ ID NO: 160112 - DNA, 73 bp, Homo sapiens
tagagggagtagggagaaaatacaggatgaaattgaaaacagggactaacaacttttcactgaatgccagcaa

SEQ ID NO: 160113 - DNA, 74 bp, Homo sapiens
gagaaaatacaggatgaaattgaaaacagggactaacaacttttcactgaatgccagcaagctctctaaaatta

SEQ ID NO: 160114 - DNA, 73 bp, Homo sapiens
tacaggatgaaattgaaaacagggactaacaacttttcactgaatgccagcaagctctctaaaattagttttc

SEQ ID NO: 160115 - DNA, 69 bp, Homo sapiens
agggactaacaacttttcactgaatgccagcaagctctctaaaattagttttctttggttgaacaaatt

SEQ ID NO: 160116 - DNA, 72 bp, Homo sapiens
cttttcactgaatgccagcaagctctctaaaattagttttctttggttgaacaaatttacaattcattgtac

SEQ ID NO: 160117 - DNA, 74 bp, Homo sapiens
gccagcaagctctctaaaattagttttctttggttgaacaaatttacaattcattgtacttcatttcacagcat

SEQ ID NO: 160118 - DNA, 72 bp, Homo sapiens
caagctctctaaaattagttttctttggttgaacaaatttacaattcattgtacttcatttcacagcattaa

SEQ ID NO: 160119 - DNA, 73 bp, Homo sapiens
tagttttctttggttgaacaaatttacaattcattgtacttcatttcacagcattaaacatttactcgaggca

SEQ ID NO: 160120 - DNA, 74 bp, Homo sapiens
tggttgaacaaatttacaattcattgtacttcatttcacagcattaaacatttactcgaggcagtttattctgt

SEQ ID NO: 160121 - DNA, 75 bp, Homo sapiens
gaacaaatttacaattcattgtacttcatttcacagcattaaacatttactcgaggcagtttattctgtttgctc

SEQ ID NO: 160122 - DNA, 75 bp, Homo sapiens
acaattcattgtacttcatttcacagcattaaacatttactcgaggcagtttattctgtttgctctttcatcccc

SEQ ID NO: 160123 - DNA, 74 bp, Homo sapiens
tgtacttcatttcacagcattaaacatttactcgaggcagtttattctgtttgctctttcatcccccttcttat

SEQ ID NO: 160124 - DNA, 73 bp, Homo sapiens
tcatttcacagcattaaacatttactcgaggcagtttattctgtttgctctttcatcccccttcttatttact

SEQ ID NO: 160125 - DNA, 71 bp, Homo sapiens
atttcacagcattaaacatttactcgaggcagtttattctgtttgctctttcatcccccttcttatttact

SEQ ID NO: 160126 - DNA, 70 bp, Homo sapiens
cacagcattaaacatttactcgaggcagtttattctgtttgctctttcatcccccttcttatttactttt

SEQ ID NO: 160127 - DNA, 69 bp, Homo sapiens
gcattaaacatttactcgaggcagtttattctgtttgctctttcatcccccttcttatttacttttttc

SEQ ID NO: 160128 - DNA, 69 bp, Homo sapiens
aacatttactcgaggcagtttattctgtttgctctttcatcccccttcttatttacttttttcttgtgc

SEQ ID NO: 160129 - DNA, 70 bp, Homo sapiens
tttactcgaggcagtttattctgtttgctctttcatcccccttcttatttacttttttcttgtgctctaa

SEQ ID NO: 160130 - DNA, 69 bp, Homo sapiens
tcgaggcagtttattctgtttgctctttcatcccccttcttatttacttttttcttgtgctctaaaact

SEQ ID NO: 160131 - DNA, 68 bp, Homo sapiens
gcagtttattctgtttgctctttcatcccccttcttatttacttttttcttgtgctctaaaacttttg

SEQ ID NO: 160132 - DNA, 69 bp, Homo sapiens
tctgtttgctctttcatcccccttcttatttacttttttcttgtgctctaaaacttttgtcaatcttta

SEQ ID NO: 160133 - DNA, 68 bp, Homo sapiens
ctgtttgctctttcatcccccttcttatttacttttttcttgtgctctaaaacttttgtcaatcttta

SEQ ID NO: 160134 - DNA, 67 bp, Homo sapiens
cttcttatttacttttttcttgtgctctaaaacttttgtcaatctttaacaaaactgtgctgttacc

SEQ ID NO: 160135 - DNA, 67 bp, Homo sapiens
tttttcttgtgctctaaaacttttgtcaatctttaacaaaactgtgctgttaccttttttaatgtta

SEQ ID NO: 160136 - DNA, 67 bp, Homo sapiens
tgtgctctaaaacttttgtcaatctttaacaaaactgtgctgttaccttttttaatgttaaaagaat

SEQ ID NO: 160137 - DNA, 66 bp, Homo sapiens
ttaacaaaactgtgctgttaccttttttaatgttaaaagaattttaacactgtcaactgtagtttg

SEQ ID NO: 160138 - DNA, 74 bp, Homo sapiens
ctgtgctgttaccttttttaatgttaaaagaattttaacactgtcaactgtagtttgtgcagatgtatgtcaga

SEQ ID NO: 160139 - DNA, 71 bp, Homo sapiens
tgttaccttttttaatgttaaaagaattttaacactgtcaactgtagtttgtgcagatgtatgtcagaaaa

SEQ ID NO: 160140 - DNA, 76 bp, Homo sapiens
tgttaaaagaattttaacactgtcaactgtagtttgtgcagatgtatgtcagaaaaaaatgtacagtatgtgtcaa

SEQ ID NO: 160141 - DNA, 75 bp, Homo sapiens
aaagaattttaacactgtcaactgtagtttgtgcagatgtatgtcagaaaaaaatgtacagtatgtgtcaaaata

SEQ ID NO: 160142 - DNA, 80 bp, Homo sapiens
ctgtcaactgtagtttgtgcagatgtatgtcagaaaaaaatgtacagtatgtgtcaaaatatatttgaatatcttgttgc

SEQ ID NO: 160143 - DNA, 81 bp, Homo sapiens
ctgtagtttgtgcagatgtatgtcagaaaaaaatgtacagtatgtgtcaaaatatatttgaatatcttgttgctgttgctg

SEQ ID NO: 160144 - DNA, 79 bp, Homo sapiens
gatgtatgtcagaaaaaaatgtacagtatgtgtcaaaatatatttgaatatcttgttgctgttgctgttagttcctggc

SEQ ID NO: 160145 - DNA, 78 bp, Homo sapiens
gtcagaaaaaaatgtacagtatgtgtcaaaatatatttgaatatcttgttgctgttgctgttagttcctggctctcta

SEQ ID NO: 160146 - DNA, 78 bp, Homo sapiens
aatgtacagtatgtgtcaaaatatatttgaatatcttgttgctgttgctgttagttcctggctctctaattttctgtc

SEQ ID NO: 160147 - DNA, 78 bp, Homo sapiens
tatgtgtcaaaatatatttgaatatcttgttgctgttgctgttagttcctggctctctaattttctgtctgttaggga

SEQ ID NO: 160148 - DNA, 74 bp, Homo sapiens
atatttgaatatcttgttgctgttgctgttagttcctggctctctaattttctgtctgttagggagtttcttaa

SEQ ID NO: 160149 - DNA, 71 bp, Homo sapiens
ggctctctaattttctgtctgttagggagtttcttaagatttgaaatacaagttaagaactatggaaagca

SEQ ID NO: 160150 - DNA, 71 bp, Homo sapiens
ctgtctgttagggagtttcttaagatttgaaatacaagttaagaactatggaaagcatatttgttagattg

SEQ ID NO: 160151 - DNA, 69 bp, Homo sapiens
gggagtttcttaagatttgaaatacaagttaagaactatggaaagcatatttgttagattgttactttg

SEQ ID NO: 160152 - DNA, 74 bp, Homo sapiens
tgttcccttctcacctctgacctttgcactcttgtctattcccgcccgcagaggcgacaggaagaagggtatta

SEQ ID NO: 160153 - DNA, 74 bp, Homo sapiens
cctttgcactcttgtctattcccgcccgcagaggcgacaggaagaagggtattacagccgcctggaagccgaga

SEQ ID NO: 160154 - DNA, 77 bp, Homo sapiens
cttgtctattcccgcccgcagaggcgacaggaagaagggtattacagccgcctggaagccgagaggcgcagacagca

SEQ ID NO: 160155 - DNA, 76 bp, Homo sapiens
ccgcccgcagaggcgacaggaagaagggtattacagccgcctggaagccgagaggcgcagacagcacgacgaggcg

SEQ ID NO: 160156 - DNA, 79 bp, Homo sapiens
gacaggaagaagggtattacagccgcctggaagccgagaggcgcagacagcacgacgaggcggcgcgcaggttgctgga

SEQ ID NO: 160157 - DNA, 78 bp, Homo sapiens
agaagggtattacagccgcctggaagccgagaggcgcagacagcacgacgaggcggcgcgcaggttgctggagcccga

SEQ ID NO: 160158 - DNA, 78 bp, Homo sapiens
attacagccgcctggaagccgagaggcgcagacagcacgacgaggcggcgcgcaggttgctggagcccgaggcgcccg

SEQ ID NO: 160159 - DNA, 78 bp, Homo sapiens
aagccgagaggcgcagacagcacgacgaggcggcgcgcaggttgctggagcccgaggcgcccggtctgtgccgccctc

SEQ ID NO: 160160 - DNA, 78 bp, Homo sapiens
agaggcgcagacagcacgacgaggcggcgcgcaggttgctggagcccgaggcgcccggtctgtgccgccctccgcttc

SEQ ID NO: 160161 - DNA, 73 bp, Homo sapiens
acagcacgacgaggcggcgcgcaggttgctggagcccgaggcgcccggtctgtgccgccctccgcttccccgg

SEQ ID NO: 160162 - DNA, 72 bp, Homo sapiens
aggcggcgcgcaggttgctggagcccgaggcgcccggtctgtgccgccctccgcttccccgggactacgagc

SEQ ID NO: 160163 - DNA, 68 bp, Homo sapiens
aggttgctggagcccgaggcgcccggtctgtgccgccctccgcttccccgggactacgagcccccgtc

SEQ ID NO: 160164 - DNA, 67 bp, Homo sapiens
tggagcccgaggcgcccggtctgtgccgccctccgcttccccgggactacgagcccccgtccccgtc

SEQ ID NO: 160165 - DNA, 63 bp, Homo sapiens
cccggtctgtgccgccctccgcttccccgggactacgagcccccgtccccgtcccccgcgccc

SEQ ID NO: 160166 - DNA, 64 bp, Homo sapiens
ctgtgccgccctccgcttccccgggactacgagcccccgtccccgtcccccgcgcccggcgccc

SEQ ID NO: 160167 - DNA, 62 bp, Homo sapiens
ctccgcttccccgggactacgagcccccgtccccgtcccccgcgcccggcgcccctcctccc

SEQ ID NO: 160168 - DNA, 64 bp, Homo sapiens
actacgagcccccgtccccgtcccccgcgcccggcgcccctcctcccccgcctcagcgaaacgc

SEQ ID NO: 160169 - DNA, 65 bp, Homo sapiens
cccgtccccgtcccccgcgcccggcgcccctcctcccccgcctcagcgaaacgcctcctacctca

SEQ ID NO: 160170 - DNA, 67 bp, Homo sapiens
gtcccccgcgcccggcgcccctcctcccccgcctcagcgaaacgcctcctacctcaaaacacaggtc

SEQ ID NO: 160171 - DNA, 68 bp, Homo sapiens
cgcgcccggcgcccctcctcccccgcctcagcgaaacgcctcctacctcaaaacacaggtcctctccc

SEQ ID NO: 160172 - DNA, 72 bp, Homo sapiens
tcctcccccgcctcagcgaaacgcctcctacctcaaaacacaggtcctctcccccgactcgctgttcactgc

SEQ ID NO: 160173 - DNA, 71 bp, Homo sapiens
cctcagcgaaacgcctcctacctcaaaacacaggtcctctcccccgactcgctgttcactgccaagtttgt

SEQ ID NO: 160174 - DNA, 72 bp, Homo sapiens
aaacgcctcctacctcaaaacacaggtcctctcccccgactcgctgttcactgccaagtttgttgcatacaa

SEQ ID NO: 160175 - DNA, 75 bp, Homo sapiens
tcctacctcaaaacacaggtcctctcccccgactcgctgttcactgccaagtttgttgcatacaatgaggaggag

SEQ ID NO: 160176 - DNA, 69 bp, Homo sapiens
tgagtaaagcttagaaataatcaggtactttaacttgtactgtttctttcatggaaaaggaccaaactc

SEQ ID NO: 160177 - DNA, 68 bp, Homo sapiens
gaaataatcaggtactttaacttgtactgtttctttcatggaaaaggaccaaactcttacccaggatc

SEQ ID NO: 160178 - DNA, 69 bp, Homo sapiens
aggtactttaacttgtactgtttctttcatggaaaaggaccaaactcttacccaggatctactggagca

SEQ ID NO: 160179 - DNA, 73 bp, Homo sapiens
taacttgtactgtttctttcatggaaaaggaccaaactcttacccaggatctactggagcagctgttggagcc

SEQ ID NO: 160180 - DNA, 75 bp, Homo sapiens
tttctttcatggaaaaggaccaaactcttacccaggatctactggagcagctgttggagcccatgacgcctgtcg

SEQ ID NO: 160181 - DNA, 75 bp, Homo sapiens
aaaaggaccaaactcttacccaggatctactggagcagctgttggagcccatgacgcctgtcgggatgcaaaaga

SEQ ID NO: 160182 - DNA, 78 bp, Homo sapiens
actcttacccaggatctactggagcagctgttggagcccatgacgcctgtcgggatgcaaaagagaagcgctctaaaa

SEQ ID NO: 160183 - DNA, 79 bp, Homo sapiens
tacccaggatctactggagcagctgttggagcccatgacgcctgtcgggatgcaaaagagaagcgctctaaaaggtatg

SEQ ID NO: 160184 - DNA, 80 bp, Homo sapiens
tggagcagctgttggagcccatgacgcctgtcgggatgcaaaagagaagcgctctaaaaggtatggacggttgcactaga

SEQ ID NO: 160185 - DNA, 76 bp, Homo sapiens
ttggagcccatgacgcctgtcgggatgcaaaagagaagcgctctaaaaggtatggacggttgcactagacgaggaa

SEQ ID NO: 160186 - DNA, 76 bp, Homo sapiens
atgacgcctgtcgggatgcaaaagagaagcgctctaaaaggtatggacggttgcactagacgaggaacttcatctg

SEQ ID NO: 160187 - DNA, 78 bp, Homo sapiens
tgtcgggatgcaaaagagaagcgctctaaaaggtatggacggttgcactagacgaggaacttcatctgtacctgatga

SEQ ID NO: 160188 - DNA, 78 bp, Homo sapiens
ttgtttctagtttgtccagtaatctttgatattgccctcttctgcagccaagatgcagattcacctggaagttctggg

SEQ ID NO: 160189 - DNA, 78 bp, Homo sapiens
ttgtccagtaatctttgatattgccctcttctgcagccaagatgcagattcacctggaagttctggggcccctgaaaa

SEQ ID NO: 160190 - DNA, 78 bp, Homo sapiens
taatctttgatattgccctcttctgcagccaagatgcagattcacctggaagttctggggcccctgaaaacttgacat

SEQ ID NO: 160191 - DNA, 77 bp, Homo sapiens
atattgccctcttctgcagccaagatgcagattcacctggaagttctggggcccctgaaaacttgacattcaaggaa

SEQ ID NO: 160192 - DNA, 77 bp, Homo sapiens
tctgcagccaagatgcagattcacctggaagttctggggcccctgaaaacttgacattcaaggaacgccagcgtctt

SEQ ID NO: 160193 - DNA, 71 bp, Homo sapiens
aagatgcagattcacctggaagttctggggcccctgaaaacttgacattcaaggaacgccagcgtcttttt

SEQ ID NO: 160194 - DNA, 70 bp, Homo sapiens
agattcacctggaagttctggggcccctgaaaacttgacattcaaggaacgccagcgtcttttttcacaa

SEQ ID NO: 160195 - DNA, 70 bp, Homo sapiens
aagttctggggcccctgaaaacttgacattcaaggaacgccagcgtcttttttcacaaggtcaagatgta

SEQ ID NO: 160196 - DNA, 72 bp, Homo sapiens
cctgaaaacttgacattcaaggaacgccagcgtcttttttcacaaggtcaagatgtatccaataaagtgaaa

SEQ ID NO: 160197 - DNA, 72 bp, Homo sapiens
aaacttgacattcaaggaacgccagcgtcttttttcacaaggtcaagatgtatccaataaagtgaaagcttc

SEQ ID NO: 160198 - DNA, 70 bp, Homo sapiens
aaggaacgccagcgtcttttttcacaaggtcaagatgtatccaataaagtgaaagcttctcgtaaattaa

SEQ ID NO: 160199 - DNA, 71 bp, Homo sapiens
cgtcttttttcacaaggtcaagatgtatccaataaagtgaaagcttctcgtaaattaacagaactggagaa

SEQ ID NO: 160200 - DNA, 75 bp, Homo sapiens
tttcacaaggtcaagatgtatccaataaagtgaaagcttctcgtaaattaacagaactggagaatgaactgaaca

SEQ ID NO: 160201 - DNA, 75 bp, Homo sapiens
gtcaagatgtatccaataaagtgaaagcttctcgtaaattaacagaactggagaatgaactgaacacaaagtgaa

SEQ ID NO: 160202 - DNA, 72 bp, Homo sapiens
tatccaataaagtgaaagcttctcgtaaattaacagaactggagaatgaactgaacacaaagtgaaagaaaa

SEQ ID NO: 160203 - DNA, 71 bp, Homo sapiens
ctcgtaaattaacagaactggagaatgaactgaacacaaagtgaaagaaaatgaggagaacactttgtatt

SEQ ID NO: 160204 - DNA, 70 bp, Homo sapiens
acagaactggagaatgaactgaacacaaagtgaaagaaaatgaggagaacactttgtatttaccccaaaa

SEQ ID NO: 160205 - DNA, 70 bp, Homo sapiens
gagaatgaactgaacacaaagtgaaagaaaatgaggagaacactttgtatttaccccaaaatcttttcag

SEQ ID NO: 160206 - DNA, 68 bp, Homo sapiens
ctgaacacaaagtgaaagaaaatgaggagaacactttgtatttaccccaaaatcttttcagttgtggg

SEQ ID NO: 160207 - DNA, 67 bp, Homo sapiens
aaagaaaatgaggagaacactttgtatttaccccaaaatcttttcagttgtgggtttgtaggtgcga

SEQ ID NO: 160208 - DNA, 68 bp, Homo sapiens
aatgaggagaacactttgtatttaccccaaaatcttttcagttgtgggtttgtaggtgcgagtttgaa

SEQ ID NO: 160209 - DNA, 66 bp, Homo sapiens
acactttgtatttaccccaaaatcttttcagttgtgggtttgtaggtgcgagtttgaagaggaaaa

SEQ ID NO: 160210 - DNA, 65 bp, Homo sapiens
tttaccccaaaatcttttcagttgtgggtttgtaggtgcgagtttgaagaggaaaagaggaaggg

SEQ ID NO: 160211 - DNA, 67 bp, Homo sapiens
tcttttcagttgtgggtttgtaggtgcgagtttgaagaggaaaagaggaagggggttatatttctaa

SEQ ID NO: 160212 - DNA, 67 bp, Homo sapiens
tgggtttgtaggtgcgagtttgaagaggaaaagaggaagggggttatatttctaagtgatttacaat

SEQ ID NO: 160213 - DNA, 68 bp, Homo sapiens
tgtaggtgcgagtttgaagaggaaaagaggaagggggttatatttctaagtgatttacaatttctgtt

SEQ ID NO: 160214 - DNA, 67 bp, Homo sapiens
ctaagtgatttacaatttctgtttctaaaattgttgggatttagaaatgtttcaattccaagaaatt

SEQ ID NO: 160215 - DNA, 67 bp, Homo sapiens
tgatttacaatttctgtttctaaaattgttgggatttagaaatgtttcaattccaagaaattttatt

SEQ ID NO: 160216 - DNA, 70 bp, Homo sapiens
ttttattttactttaccatgagattgccatttatgtaatttaaacactgtctagtttcttaattatctaa

SEQ ID NO: 160217 - DNA, 72 bp, Homo sapiens
ctttaccatgagattgccatttatgtaatttaaacactgtctagtttcttaattatctaactcacacgaggg

SEQ ID NO: 160218 - DNA, 72 bp, Homo sapiens
ccatgagattgccatttatgtaatttaaacactgtctagtttcttaattatctaactcacacgagggtaagt

SEQ ID NO: 160219 - DNA, 67 bp, Homo sapiens
ttatgtaatttaaacactgtctagtttcttaattatctaactcacacgagggtaagttttttgttgg

SEQ ID NO: 160220 - DNA, 65 bp, Homo sapiens
gtaatttaaacactgtctagtttcttaattatctaactcacacgagggtaagttttttgttggtt

SEQ ID NO: 160221 - DNA, 65 bp, Homo sapiens
aatttaaacactgtctagtttcttaattatctaactcacacgagggtaagttttttgttggtttc

SEQ ID NO: 160222 - DNA, 65 bp, Homo sapiens
taaacactgtctagtttcttaattatctaactcacacgagggtaagttttttgttggtttctttt

SEQ ID NO: 160223 - DNA, 65 bp, Homo sapiens
ctgtctagtttcttaattatctaactcacacgagggtaagttttttgttggtttcttttttggag

SEQ ID NO: 160224 - DNA, 65 bp, Homo sapiens
gtttcttaattatctaactcacacgagggtaagttttttgttggtttcttttttggagtcctgag

SEQ ID NO: 160225 - DNA, 65 bp, Homo sapiens
attatctaactcacacgagggtaagttttttgttggtttcttttttggagtcctgagttcaaagg

SEQ ID NO: 160226 - DNA, 66 bp, Homo sapiens
tctaactcacacgagggtaagttttttgttggtttcttttttggagtcctgagttcaaaggggaca

SEQ ID NO: 160227 - DNA, 63 bp, Homo sapiens
acgagggtaagttttttgttggtttcttttttggagtcctgagttcaaaggggacagaactaa

SEQ ID NO: 160228 - DNA, 66 bp, Homo sapiens
taagttttttgttggtttcttttttggagtcctgagttcaaaggggacagaactaagggcaggaga

SEQ ID NO: 160229 - DNA, 71 bp, Homo sapiens
tggtttcttttttggagtcctgagttcaaaggggacagaactaagggcaggagaagagaatggatgtgtct

SEQ ID NO: 160230 - DNA, 74 bp, Homo sapiens
tttttggagtcctgagttcaaaggggacagaactaagggcaggagaagagaatggatgtgtcttctctcccatc

SEQ ID NO: 160231 - DNA, 78 bp, Homo sapiens
tgagttcaaaggggacagaactaagggcaggagaagagaatggatgtgtcttctctcccatcttcccctcatcatcga

SEQ ID NO: 160232 - DNA, 77 bp, Homo sapiens
aactaagggcaggagaagagaatggatgtgtcttctctcccatcttcccctcatcatcgaccgaggagcacaaagaa

SEQ ID NO: 160233 - DNA, 77 bp, Homo sapiens
agaagagaatggatgtgtcttctctcccatcttcccctcatcatcgaccgaggagcacaaagaagttctgtttctgt

SEQ ID NO: 160234 - DNA, 75 bp, Homo sapiens
agaatggatgtgtcttctctcccatcttcccctcatcatcgaccgaggagcacaaagaagttctgtttctgtttt

SEQ ID NO: 160235 - DNA, 72 bp, Homo sapiens
tctctcccatcttcccctcatcatcgaccgaggagcacaaagaagttctgtttctgtttttttcagaaactt

SEQ ID NO: 160236 - DNA, 69 bp, Homo sapiens
atcttcccctcatcatcgaccgaggagcacaaagaagttctgtttctgtttttttcagaaactttattt

SEQ ID NO: 160237 - DNA, 73 bp, Homo sapiens
atcatcgaccgaggagcacaaagaagttctgtttctgtttttttcagaaactttattttagctgtcaagcaga

SEQ ID NO: 160238 - DNA, 73 bp, Homo sapiens
aatagcttgaactattcagactattgttggcactgtttagtagtgaccacacgctcttctacccgggaaggaa

SEQ ID NO: 160239 - DNA, 74 bp, Homo sapiens
aactattcagactattgttggcactgtttagtagtgaccacacgctcttctacccgggaaggaacatatgacga

SEQ ID NO: 160240 - DNA, 76 bp, Homo sapiens
agactattgttggcactgtttagtagtgaccacacgctcttctacccgggaaggaacatatgacgacatgctcctc

SEQ ID NO: 160241 - DNA, 75 bp, Homo sapiens
actgtttagtagtgaccacacgctcttctacccgggaaggaacatatgacgacatgctcctcccatgtcccctga

SEQ ID NO: 160242 - DNA, 78 bp, Homo sapiens
tagtagtgaccacacgctcttctacccgggaaggaacatatgacgacatgctcctcccatgtcccctgatggtgtctg

SEQ ID NO: 160243 - DNA, 76 bp, Homo sapiens
acgctcttctacccgggaaggaacatatgacgacatgctcctcccatgtcccctgatggtgtctgttcccacaata

SEQ ID NO: 160244 - DNA, 77 bp, Homo sapiens
tctacccgggaaggaacatatgacgacatgctcctcccatgtcccctgatggtgtctgttcccacaatatccttcta

SEQ ID NO: 160245 - DNA, 81 bp, Homo sapiens
aaggaacatatgacgacatgctcctcccatgtcccctgatggtgtctgttcccacaatatccttctagtctgcatcgtgaa

SEQ ID NO: 160246 - DNA, 82 bp, Homo sapiens
ctgatggtgtctgttcccacaatatccttctagtctgcatcgtgaagtggcttaggccaaagcttcctgtgtgatgacgcac

SEQ ID NO: 160247 - DNA, 81 bp, Homo sapiens
tctgttcccacaatatccttctagtctgcatcgtgaagtggcttaggccaaagcttcctgtgtgatgacgcacgtccgaga

SEQ ID NO: 160248 - DNA, 79 bp, Homo sapiens
agtggcttaggccaaagcttcctgtgtgatgacgcacgtccgagactgttccatctcattcctcgcaaatttgagctct

SEQ ID NO: 160249 - DNA, 82 bp, Homo sapiens
agcttcctgtgtgatgacgcacgtccgagactgttccatctcattcctcgcaaatttgagctcttctgatcaattctaaata

SEQ ID NO: 160250 - DNA, 83 bp, Homo sapiens
tgtgtgatgacgcacgtccgagactgttccatctcattcctcgcaaatttgagctcttctgatcaattctaaatatttgatta

SEQ ID NO: 160251 - DNA, 79 bp, Homo sapiens
atgacgcacgtccgagactgttccatctcattcctcgcaaatttgagctcttctgatcaattctaaatatttgattaat

SEQ ID NO: 160252 - DNA, 76 bp, Homo sapiens
acgtccgagactgttccatctcattcctcgcaaatttgagctcttctgatcaattctaaatatttgattaatttta

SEQ ID NO: 160253 - DNA, 78 bp, Homo sapiens
cgagactgttccatctcattcctcgcaaatttgagctcttctgatcaattctaaatatttgattaattttaattctga

SEQ ID NO: 160254 - DNA, 77 bp, Homo sapiens
ctgttccatctcattcctcgcaaatttgagctcttctgatcaattctaaatatttgattaattttaattctgaaaga

SEQ ID NO: 160255 - DNA, 75 bp, Homo sapiens
ccatctcattcctcgcaaatttgagctcttctgatcaattctaaatatttgattaattttaattctgaaagaaaa

SEQ ID NO: 160256 - DNA, 72 bp, Homo sapiens
cctcgcaaatttgagctcttctgatcaattctaaatatttgattaattttaattctgaaagaaaattttgag

SEQ ID NO: 160257 - DNA, 73 bp, Homo sapiens
tgagctcttctgatcaattctaaatatttgattaattttaattctgaaagaaaattttgaggatttaagctta

SEQ ID NO: 160258 - DNA, 64 bp, Homo sapiens
atttgattaattttaattctgaaagaaaattttgaggatttaagcttaggggattttattttta

SEQ ID NO: 160259 - DNA, 65 bp, Homo sapiens
agaaaattttgaggatttaagcttaggggattttatttttataaataccagattattgttagact

SEQ ID NO: 160260 - DNA, 69 bp, Homo sapiens
tgaggatttaagcttaggggattttatttttataaataccagattattgttagacttaataaatcactg

SEQ ID NO: 160261 - DNA, 67 bp, Homo sapiens
ttaagcttaggggattttatttttataaataccagattattgttagacttaataaatcactgttaaa

SEQ ID NO: 160262 - DNA, 69 bp, Homo sapiens
tttatttttataaataccagattattgttagacttaataaatcactgttaaatttaaagatgacagtta

SEQ ID NO: 160263 - DNA, 69 bp, Homo sapiens
taaataccagattattgttagacttaataaatcactgttaaatttaaagatgacagttaccttggaaag

SEQ ID NO: 160264 - DNA, 69 bp, Homo sapiens
accagattattgttagacttaataaatcactgttaaatttaaagatgacagttaccttggaaagttcac

SEQ ID NO: 160265 - DNA, 70 bp, Homo sapiens
gacttaataaatcactgttaaatttaaagatgacagttaccttggaaagttcactaatacttcgctccaa

SEQ ID NO: 160266 - DNA, 71 bp, Homo sapiens
atcactgttaaatttaaagatgacagttaccttggaaagttcactaatacttcgctccaaggcgtctgtaa

SEQ ID NO: 160267 - DNA, 69 bp, Homo sapiens
aaatttaaagatgacagttaccttggaaagttcactaatacttcgctccaaggcgtctgtaaaagaaga

SEQ ID NO: 160268 - DNA, 72 bp, Homo sapiens
ttaccttggaaagttcactaatacttcgctccaaggcgtctgtaaaagaagatatctttattggagcaatgt

SEQ ID NO: 160269 - DNA, 75 bp, Homo sapiens
aaagttcactaatacttcgctccaaggcgtctgtaaaagaagatatctttattggagcaatgttcatgtgactgg

SEQ ID NO: 160270 - DNA, 78 bp, Homo sapiens
aatacttcgctccaaggcgtctgtaaaagaagatatctttattggagcaatgttcatgtgactgggaatgacagaaga

SEQ ID NO: 160271 - DNA, 79 bp, Homo sapiens
aaggcgtctgtaaaagaagatatctttattggagcaatgttcatgtgactgggaatgacagaagaatgggagatgagta

SEQ ID NO: 160272 - DNA, 78 bp, Homo sapiens
tgtaaaagaagatatctttattggagcaatgttcatgtgactgggaatgacagaagaatgggagatgagtagggaccc

SEQ ID NO: 160273 - DNA, 81 bp, Homo sapiens
agatatctttattggagcaatgttcatgtgactgggaatgacagaagaatgggagatgagtagggacccctcaagcacagc

SEQ ID NO: 160274 - DNA, 81 bp, Homo sapiens
agcaatgttcatgtgactgggaatgacagaagaatgggagatgagtagggacccctcaagcacagctgtcactcagaaatt

SEQ ID NO: 160275 - DNA, 75 bp, Homo sapiens
gaatgacagaagaatgggagatgagtagggacccctcaagcacagctgtcactcagaaattttaaatttgaaaaa

SEQ ID NO: 160276 - DNA, 73 bp, Homo sapiens
agatgagtagggacccctcaagcacagctgtcactcagaaattttaaatttgaaaaagaaatcgattttcatc

SEQ ID NO: 160277 - DNA, 72 bp, Homo sapiens
ctgtcactcagaaattttaaatttgaaaaagaaatcgattttcatctgtatgccgtcaaggaaggaattcag

SEQ ID NO: 160278 - DNA, 73 bp, Homo sapiens
tttaaatttgaaaaagaaatcgattttcatctgtatgccgtcaaggaaggaattcagttacagggcatctgta

SEQ ID NO: 160279 - DNA, 72 bp, Homo sapiens
aaaaagaaatcgattttcatctgtatgccgtcaaggaaggaattcagttacagggcatctgtaacttaaata

SEQ ID NO: 160280 - DNA, 77 bp, Homo sapiens
ttcatctgtatgccgtcaaggaaggaattcagttacagggcatctgtaacttaaatattgtaagaataactcatatg

SEQ ID NO: 160281 - DNA, 73 bp, Homo sapiens
gaaggaattcagttacagggcatctgtaacttaaatattgtaagaataactcatatggaagttcaagctattt

SEQ ID NO: 160282 - DNA, 73 bp, Homo sapiens
catctgtaacttaaatattgtaagaataactcatatggaagttcaagctatttttatactataatagagttat

SEQ ID NO: 160283 - DNA, 70 bp, Homo sapiens
ttaaatattgtaagaataactcatatggaagttcaagctatttttatactataatagagttatttaattt

SEQ ID NO: 160284 - DNA, 71 bp, Homo sapiens
taagaataactcatatggaagttcaagctatttttatactataatagagttatttaattttaatttgttga

SEQ ID NO: 160285 - DNA, 70 bp, Homo sapiens
tcatatggaagttcaagctatttttatactataatagagttatttaattttaatttgttgaattattagt

SEQ ID NO: 160286 - DNA, 70 bp, Homo sapiens
tcaagctatttttatactataatagagttatttaattttaatttgttgaattattagttaccactgtcat

SEQ ID NO: 160287 - DNA, 73 bp, Homo sapiens
tatactataatagagttatttaattttaatttgttgaattattagttaccactgtcatttcttcagctatgga

SEQ ID NO: 160288 - DNA, 77 bp, Homo sapiens
attattagttaccactgtcatttcttcagctatggatatgtggctgatgttggggagacggacctcagtgtgtttta

SEQ ID NO: 160289 - DNA, 79 bp, Homo sapiens
ctgtcatttcttcagctatggatatgtggctgatgttggggagacggacctcagtgtgttttatattgtctggtgttaa

SEQ ID NO: 160290 - DNA, 80 bp, Homo sapiens
ttcttcagctatggatatgtggctgatgttggggagacggacctcagtgtgttttatattgtctggtgttaagatgataa

SEQ ID NO: 160291 - DNA, 77 bp, Homo sapiens
tatggatatgtggctgatgttggggagacggacctcagtgtgttttatattgtctggtgttaagatgataaattact

SEQ ID NO: 160292 - DNA, 73 bp, Homo sapiens
gggagacggacctcagtgtgttttatattgtctggtgttaagatgataaattactttgtgattacaagcaaat

SEQ ID NO: 160293 - DNA, 73 bp, Homo sapiens
ggacctcagtgtgttttatattgtctggtgttaagatgataaattactttgtgattacaagcaaattttctat

SEQ ID NO: 160294 - DNA, 73 bp, Homo sapiens
ttatattgtctggtgttaagatgataaattactttgtgattacaagcaaattttctatttgacaaagcccttg

SEQ ID NO: 160295 - DNA, 72 bp, Homo sapiens
ctggtgttaagatgataaattactttgtgattacaagcaaattttctatttgacaaagcccttggtggagtc

SEQ ID NO: 160296 - DNA, 72 bp, Homo sapiens
gatgataaattactttgtgattacaagcaaattttctatttgacaaagcccttggtggagtccaaatgattt

SEQ ID NO: 160297 - DNA, 71 bp, Homo sapiens
actttgtgattacaagcaaattttctatttgacaaagcccttggtggagtccaaatgatttttctgtacca

SEQ ID NO: 160298 - DNA, 72 bp, Homo sapiens
tacaagcaaattttctatttgacaaagcccttggtggagtccaaatgatttttctgtaccatattgttctct

SEQ ID NO: 160299 - DNA, 72 bp, Homo sapiens
attttctatttgacaaagcccttggtggagtccaaatgatttttctgtaccatattgttctcttacacatac

SEQ ID NO: 160300 - DNA, 74 bp, Homo sapiens
tatttgacaaagcccttggtggagtccaaatgatttttctgtaccatattgttctcttacacatacgtatgtta

SEQ ID NO: 160301 - DNA, 72 bp, Homo sapiens
agcccttggtggagtccaaatgatttttctgtaccatattgttctcttacacatacgtatgttaggaaaata

SEQ ID NO: 160302 - DNA, 74 bp, Homo sapiens
ggagtccaaatgatttttctgtaccatattgttctcttacacatacgtatgttaggaaaataggcacactttca

SEQ ID NO: 160303 - DNA, 74 bp, Homo sapiens
ttttctgtaccatattgttctcttacacatacgtatgttaggaaaataggcacactttcaaagagaatgttctc

SEQ ID NO: 160304 - DNA, 75 bp, Homo sapiens
gtaccatattgttctcttacacatacgtatgttaggaaaataggcacactttcaaagagaatgttctcttacaca

SEQ ID NO: 160305 - DNA, 75 bp, Homo sapiens
tcttacacatacgtatgttaggaaaataggcacactttcaaagagaatgttctcttacacatacgtatgttagga

SEQ ID NO: 160306 - DNA, 73 bp, Homo sapiens
cgtatgttaggaaaataggcacactttcaaagagaatgttctcttacacatacgtatgttaggaaaatagaca

SEQ ID NO: 160307 - DNA, 72 bp, Homo sapiens
gttaggaaaataggcacactttcaaagagaatgttctcttacacatacgtatgttaggaaaatagacacatt

SEQ ID NO: 160308 - DNA, 75 bp, Homo sapiens
taggcacactttcaaagagaatgttctcttacacatacgtatgttaggaaaatagacacattttcaaagagaatg

SEQ ID NO: 160309 - DNA, 75 bp, Homo sapiens
agagaatgttctcttacacatacgtatgttaggaaaatagacacattttcaaagagaatgttctcttacatatgt

SEQ ID NO: 160310 - DNA, 75 bp, Homo sapiens
atgttctcttacacatacgtatgttaggaaaatagacacattttcaaagagaatgttctcttacatatgttagga

SEQ ID NO: 160311 - DNA, 74 bp, Homo sapiens
catacgtatgttaggaaaatagacacattttcaaagagaatgttctcttacatatgttaggaaaataggcacac

SEQ ID NO: 160312 - DNA, 72 bp, Homo sapiens
acacattttcaaagagaatgttctcttacatatgttaggaaaataggcacactttcaaagagaggtataggg

SEQ ID NO: 160313 - DNA, 71 bp, Homo sapiens
caaagagaatgttctcttacatatgttaggaaaataggcacactttcaaagagaggtataggggcttttta

SEQ ID NO: 160314 - DNA, 70 bp, Homo sapiens
aatgttctcttacatatgttaggaaaataggcacactttcaaagagaggtataggggctttttactgcct

SEQ ID NO: 160315 - DNA, 69 bp, Homo sapiens
tatgttaggaaaataggcacactttcaaagagaggtataggggctttttactgccttcgaaatcacttt

SEQ ID NO: 160316 - DNA, 68 bp, Homo sapiens
aggaaaataggcacactttcaaagagaggtataggggctttttactgccttcgaaatcacttttaata

SEQ ID NO: 160317 - DNA, 68 bp, Homo sapiens
ggcacactttcaaagagaggtataggggctttttactgccttcgaaatcacttttaataaaagttgta

SEQ ID NO: 160318 - DNA, 69 bp, Homo sapiens
caaagagaggtataggggctttttactgccttcgaaatcacttttaataaaagttgtatgataaatcat

SEQ ID NO: 160319 - DNA, 70 bp, Homo sapiens
gggctttttactgccttcgaaatcacttttaataaaagttgtatgataaatcattaaaaatgcgagtgta

SEQ ID NO: 160320 - DNA, 67 bp, Homo sapiens
ttcgaaatcacttttaataaaagttgtatgataaatcattaaaaatgcgagtgtaaatatttttttt

SEQ ID NO: 160321 - DNA, 67 bp, Homo sapiens
agttgtatgataaatcattaaaaatgcgagtgtaaatatttttttttacctctatcagggtttttat

SEQ ID NO: 160322 - DNA, 68 bp, Homo sapiens
atcattaaaaatgcgagtgtaaatatttttttttacctctatcagggtttttatttgaaagtgtgctc

SEQ ID NO: 160323 - DNA, 68 bp, Homo sapiens
tgcgagtgtaaatatttttttttacctctatcagggtttttatttgaaagtgtgctcttaccatttcc

SEQ ID NO: 160324 - DNA, 71 bp, Homo sapiens
tttacctctatcagggtttttatttgaaagtgtgctcttaccatttccttgtttgagtaagagagtgaatg

SEQ ID NO: 160325 - DNA, 73 bp, Homo sapiens
tatcagggtttttatttgaaagtgtgctcttaccatttccttgtttgagtaagagagtgaatggttctgagtg

SEQ ID NO: 160326 - DNA, 72 bp, Homo sapiens
ttttatttgaaagtgtgctcttaccatttccttgtttgagtaagagagtgaatggttctgagtgtttaggaa

SEQ ID NO: 160327 - DNA, 77 bp, Homo sapiens
tcttaccatttccttgtttgagtaagagagtgaatggttctgagtgtttaggaaggatttgcttgcttgcagcagaa

SEQ ID NO: 160328 - DNA, 77 bp, Homo sapiens
agtaagagagtgaatggttctgagtgtttaggaaggatttgcttgcttgcagcagaagttctaggaaaagcaggcac

SEQ ID NO: 160329 - DNA, 75 bp, Homo sapiens
aatggttctgagtgtttaggaaggatttgcttgcttgcagcagaagttctaggaaaagcaggcacctcccaaata

SEQ ID NO: 160330 - DNA, 76 bp, Homo sapiens
agtgtttaggaaggatttgcttgcttgcagcagaagttctaggaaaagcaggcacctcccaaatatcttgaggaca

SEQ ID NO: 160331 - DNA, 78 bp, Homo sapiens
aaggatttgcttgcttgcagcagaagttctaggaaaagcaggcacctcccaaatatcttgaggacactggcagcctta

SEQ ID NO: 160332 - DNA, 79 bp, Homo sapiens
ttgcttgcagcagaagttctaggaaaagcaggcacctcccaaatatcttgaggacactggcagccttatggtgactaaa

SEQ ID NO: 160333 - DNA, 74 bp, Homo sapiens
aagttctaggaaaagcaggcacctcccaaatatcttgaggacactggcagccttatggtgactaaatccacact

SEQ ID NO: 160334 - DNA, 73 bp, Homo sapiens
aaaagcaggcacctcccaaatatcttgaggacactggcagccttatggtgactaaatccacactttctttaaa

SEQ ID NO: 160335 - DNA, 77 bp, Homo sapiens
acctcccaaatatcttgaggacactggcagccttatggtgactaaatccacactttctttaaagagatgcagatgaa

SEQ ID NO: 160336 - DNA, 76 bp, Homo sapiens
aaatatcttgaggacactggcagccttatggtgactaaatccacactttctttaaagagatgcagatgaattactt

SEQ ID NO: 160337 - DNA, 76 bp, Homo sapiens
acactggcagccttatggtgactaaatccacactttctttaaagagatgcagatgaattacttttctgttaatata

SEQ ID NO: 160338 - DNA, 76 bp, Homo sapiens
ggcagccttatggtgactaaatccacactttctttaaagagatgcagatgaattacttttctgttaatatatagaa

SEQ ID NO: 160339 - DNA, 75 bp, Homo sapiens
tggtgactaaatccacactttctttaaagagatgcagatgaattacttttctgttaatatatagaaaaatacaca

SEQ ID NO: 160340 - DNA, 77 bp, Homo sapiens
ccacactttctttaaagagatgcagatgaattacttttctgttaatatatagaaaaatacacaggagaacatgcaga

SEQ ID NO: 160341 - DNA, 78 bp, Homo sapiens
ctttaaagagatgcagatgaattacttttctgttaatatatagaaaaatacacaggagaacatgcagatacatgtaaa

SEQ ID NO: 160342 - DNA, 78 bp, Homo sapiens
cttttctgttaatatatagaaaaatacacaggagaacatgcagatacatgtaaatatctacatacagggatatttgta

SEQ ID NO: 160343 - DNA, 81 bp, Homo sapiens
aatatatagaaaaatacacaggagaacatgcagatacatgtaaatatctacatacagggatatttgtatgtgtggttgtga

SEQ ID NO: 160344 - DNA, 79 bp, Homo sapiens
aaaatacacaggagaacatgcagatacatgtaaatatctacatacagggatatttgtatgtgtggttgtgaaacccata

SEQ ID NO: 160345 - DNA, 80 bp, Homo sapiens
atgcagatacatgtaaatatctacatacagggatatttgtatgtgtggttgtgaaacccatacacaagtggatttggcca

SEQ ID NO: 160346 - DNA, 76 bp, Homo sapiens
acatgtaaatatctacatacagggatatttgtatgtgtggttgtgaaacccatacacaagtggatttggccatctt

SEQ ID NO: 160347 - DNA, 77 bp, Homo sapiens
atctacatacagggatatttgtatgtgtggttgtgaaacccatacacaagtggatttggccatctttgggcagtgag

SEQ ID NO: 160348 - DNA, 78 bp, Homo sapiens
tatttgtatgtgtggttgtgaaacccatacacaagtggatttggccatctttgggcagtgaggtcaaatgtgaatatg

SEQ ID NO: 160349 - DNA, 78 bp, Homo sapiens
tatgtgtggttgtgaaacccatacacaagtggatttggccatctttgggcagtgaggtcaaatgtgaatatgtgtaaa

SEQ ID NO: 160350 - DNA, 76 bp, Homo sapiens
ttgtgaaacccatacacaagtggatttggccatctttgggcagtgaggtcaaatgtgaatatgtgtaaaagtgctt

SEQ ID NO: 160351 - DNA, 79 bp, Homo sapiens
tacacaagtggatttggccatctttgggcagtgaggtcaaatgtgaatatgtgtaaaagtgcttttcagaactgcatta

SEQ ID NO: 160352 - DNA, 78 bp, Homo sapiens
tttggccatctttgggcagtgaggtcaaatgtgaatatgtgtaaaagtgcttttcagaactgcattactatgagaaaa

SEQ ID NO: 160353 - DNA, 78 bp, Homo sapiens
atctttgggcagtgaggtcaaatgtgaatatgtgtaaaagtgcttttcagaactgcattactatgagaaaacatcaaa

SEQ ID NO: 160354 - DNA, 78 bp, Homo sapiens
tgaggtcaaatgtgaatatgtgtaaaagtgcttttcagaactgcattactatgagaaaacatcaaaactgctgtagtt

SEQ ID NO: 160355 - DNA, 76 bp, Homo sapiens
gtgaatatgtgtaaaagtgcttttcagaactgcattactatgagaaaacatcaaaactgctgtagttttccatttc

SEQ ID NO: 160356 - DNA, 75 bp, Homo sapiens
atgtgtaaaagtgcttttcagaactgcattactatgagaaaacatcaaaactgctgtagttttccatttctactg

SEQ ID NO: 160357 - DNA, 76 bp, Homo sapiens
tttcagaactgcattactatgagaaaacatcaaaactgctgtagttttccatttctactgtatttcagttgcaacc

SEQ ID NO: 160358 - DNA, 75 bp, Homo sapiens
gaactgcattactatgagaaaacatcaaaactgctgtagttttccatttctactgtatttcagttgcaacctatt

SEQ ID NO: 160359 - DNA, 70 bp, Homo sapiens
gagaaaacatcaaaactgctgtagttttccatttctactgtatttcagttgcaacctatttttaataaac

SEQ ID NO: 160360 - DNA, 71 bp, Homo sapiens
catcaaaactgctgtagttttccatttctactgtatttcagttgcaacctatttttaataaactttgtatg

SEQ ID NO: 160361 - DNA, 70 bp, Homo sapiens
ctgctgtagttttccatttctactgtatttcagttgcaacctatttttaataaactttgtatgtatttaa

SEQ ID NO: 160362 - DNA, 70 bp, Homo sapiens
ccatttctactgtatttcagttgcaacctatttttaataaactttgtatgtatttaagtgtatttgctat

SEQ ID NO: 160363 - DNA, 71 bp, Homo sapiens
tactgtatttcagttgcaacctatttttaataaactttgtatgtatttaagtgtatttgctattgttttga

SEQ ID NO: 160364 - DNA, 70 bp, Homo sapiens
tttaataaactttgtatgtatttaagtgtatttgctattgttttgaaagtgctgacaaagtttatatttg

SEQ ID NO: 160365 - DNA, 74 bp, Homo sapiens
tttaagtgtatttgctattgttttgaaagtgctgacaaagtttatatttgtaacatcagccttcctcgcccatc

SEQ ID NO: 160366 - DNA, 75 bp, Homo sapiens
atttgctattgttttgaaagtgctgacaaagtttatatttgtaacatcagccttcctcgcccatctctttccatc

SEQ ID NO: 160367 - DNA, 76 bp, Homo sapiens
tattgttttgaaagtgctgacaaagtttatatttgtaacatcagccttcctcgcccatctctttccatctgtctct

SEQ ID NO: 160368 - DNA, 76 bp, Homo sapiens
aaagtgctgacaaagtttatatttgtaacatcagccttcctcgcccatctctttccatctgtctcttcttcattaa

SEQ ID NO: 160369 - DNA, 78 bp, Homo sapiens
cttcctcgcccatctctttccatctgtctcttcttcattaaacacttactgagtatgatttctgtgtcaggcagtggt

SEQ ID NO: 160370 - DNA, 76 bp, Homo sapiens
ctttccatctgtctcttcttcattaaacacttactgagtatgatttctgtgtcaggcagtggttttcatttgtggg

SEQ ID NO: 160371 - DNA, 75 bp, Homo sapiens
cccataaggaaatgctatatacacctataagatatcaaatgcaagtgacttaaaacaccagtgatttagatttat

SEQ ID NO: 160372 - DNA, 75 bp, Homo sapiens
gctatatacacctataagatatcaaatgcaagtgacttaaaacaccagtgatttagatttatttttattgacaag

SEQ ID NO: 160373 - DNA, 72 bp, Homo sapiens
atacacctataagatatcaaatgcaagtgacttaaaacaccagtgatttagatttatttttattgacaaggt

SEQ ID NO: 160374 - DNA, 72 bp, Homo sapiens
gatatcaaatgcaagtgacttaaaacaccagtgatttagatttatttttattgacaaggtttataagaacaa

SEQ ID NO: 160375 - DNA, 69 bp, Homo sapiens
atgcaagtgacttaaaacaccagtgatttagatttatttttattgacaaggtttataagaacaaatatt

SEQ ID NO: 160376 - DNA, 68 bp, Homo sapiens
cagtgatttagatttatttttattgacaaggtttataagaacaaatatttaaaatcgaaggccaatta

SEQ ID NO: 160377 - DNA, 67 bp, Homo sapiens
ttatttttattgacaaggtttataagaacaaatatttaaaatcgaaggccaattattaggtctcatt

SEQ ID NO: 160378 - DNA, 70 bp, Homo sapiens
tattgacaaggtttataagaacaaatatttaaaatcgaaggccaattattaggtctcatttagttgctta

SEQ ID NO: 160379 - DNA, 70 bp, Homo sapiens
taagaacaaatatttaaaatcgaaggccaattattaggtctcatttagttgcttattttgttcacttgta

SEQ ID NO: 160380 - DNA, 68 bp, Homo sapiens
tatttaaaatcgaaggccaattattaggtctcatttagttgcttattttgttcacttgtatttacctt

SEQ ID NO: 160381 - DNA, 70 bp, Homo sapiens
tcgaaggccaattattaggtctcatttagttgcttattttgttcacttgtatttacctttccctagtgtc

SEQ ID NO: 160382 - DNA, 71 bp, Homo sapiens
gccaattattaggtctcatttagttgcttattttgttcacttgtatttacctttccctagtgtctgagtaa

SEQ ID NO: 160383 - DNA, 71 bp, Homo sapiens
ggtctcatttagttgcttattttgttcacttgtatttacctttccctagtgtctgagtaactatcaagaaa

SEQ ID NO: 160384 - DNA, 71 bp, Homo sapiens
gttgcttattttgttcacttgtatttacctttccctagtgtctgagtaactatcaagaaacaaacctgtga

SEQ ID NO: 160385 - DNA, 70 bp, Homo sapiens
tgttcacttgtatttacctttccctagtgtctgagtaactatcaagaaacaaacctgtgaaaatacctgt

SEQ ID NO: 160386 - DNA, 70 bp, Homo sapiens
tttacctttccctagtgtctgagtaactatcaagaaacaaacctgtgaaaatacctgttaacattcaaca

SEQ ID NO: 160387 - DNA, 71 bp, Homo sapiens
ctttccctagtgtctgagtaactatcaagaaacaaacctgtgaaaatacctgttaacattcaacatatatt

SEQ ID NO: 160388 - DNA, 79 bp, Homo sapiens
ttttatatatttctgttctatgatgcaaagatatttttcaacacttaattggtgcaacaaatgtgtcattgtgtcataa

SEQ ID NO: 160389 - DNA, 80 bp, Homo sapiens
tttctgttctatgatgcaaagatatttttcaacacttaattggtgcaacaaatgtgtcattgtgtcataaacagcatgtt

SEQ ID NO: 160390 - DNA, 80 bp, Homo sapiens
ttctgttctatgatgcaaagatatttttcaacacttaattggtgcaacaaatgtgtcattgtgtcataaacagcatgttt

SEQ ID NO: 160391 - DNA, 78 bp, Homo sapiens
ctatgatgcaaagatatttttcaacacttaattggtgcaacaaatgtgtcattgtgtcataaacagcatgttttaaaa

SEQ ID NO: 160392 - DNA, 76 bp, Homo sapiens
caaagatatttttcaacacttaattggtgcaacaaatgtgtcattgtgtcataaacagcatgttttaaaattcaga

SEQ ID NO: 160393 - DNA, 76 bp, Homo sapiens
caacacttaattggtgcaacaaatgtgtcattgtgtcataaacagcatgttttaaaattcagatttaataaactga

SEQ ID NO: 160394 - DNA, 76 bp, Homo sapiens
ttggtgcaacaaatgtgtcattgtgtcataaacagcatgttttaaaattcagatttaataaactgatttaagacag

SEQ ID NO: 160395 - DNA, 73 bp, Homo sapiens
aacaaatgtgtcattgtgtcataaacagcatgttttaaaattcagatttaataaactgatttaagacagtaaa

SEQ ID NO: 160396 - DNA, 74 bp, Homo sapiens
tcattgtgtcataaacagcatgttttaaaattcagatttaataaactgatttaagacagtaaatttgaaagaca

SEQ ID NO: 160397 - DNA, 70 bp, Homo sapiens
taaaattcagatttaataaactgatttaagacagtaaatttgaaagacaaaattaagtctcattcaggag

SEQ ID NO: 160398 - DNA, 71 bp, Homo sapiens
cagatttaataaactgatttaagacagtaaatttgaaagacaaaattaagtctcattcaggagtggtccat

SEQ ID NO: 160399 - DNA, 76 bp, Homo sapiens
ctgatttaagacagtaaatttgaaagacaaaattaagtctcattcaggagtggtccattatgttgatcatctagaa

SEQ ID NO: 160400 - DNA, 78 bp, Homo sapiens
gacagtaaatttgaaagacaaaattaagtctcattcaggagtggtccattatgttgatcatctagaatcaacactgat

SEQ ID NO: 160401 - DNA, 78 bp, Homo sapiens
tgaaagacaaaattaagtctcattcaggagtggtccattatgttgatcatctagaatcaacactgattaaccaaactc

SEQ ID NO: 160402 - DNA, 77 bp, Homo sapiens
acaaaattaagtctcattcaggagtggtccattatgttgatcatctagaatcaacactgattaaccaaactctgaaa

SEQ ID NO: 160403 - DNA, 79 bp, Homo sapiens
agtctcattcaggagtggtccattatgttgatcatctagaatcaacactgattaaccaaactctgaaagccaagagccc

SEQ ID NO: 160404 - DNA, 78 bp, Homo sapiens
tggtccattatgttgatcatctagaatcaacactgattaaccaaactctgaaagccaagagccccaactccagagaaa

SEQ ID NO: 160405 - DNA, 78 bp, Homo sapiens
cattatgttgatcatctagaatcaacactgattaaccaaactctgaaagccaagagccccaactccagagaaacatta

SEQ ID NO: 160406 - DNA, 77 bp, Homo sapiens
attatgttgatcatctagaatcaacactgattaaccaaactctgaaagccaagagccccaactccagagaaacatta

SEQ ID NO: 160407 - DNA, 75 bp, Homo sapiens
ttgatcatctagaatcaacactgattaaccaaactctgaaagccaagagccccaactccagagaaacattaaatt

SEQ ID NO: 160408 - DNA, 72 bp, Homo sapiens
atctagaatcaacactgattaaccaaactctgaaagccaagagccccaactccagagaaacattaaatttct

SEQ ID NO: 160409 - DNA, 72 bp, Homo sapiens
tagaatcaacactgattaaccaaactctgaaagccaagagccccaactccagagaaacattaaatttcttta

SEQ ID NO: 160410 - DNA, 70 bp, Homo sapiens
aacactgattaaccaaactctgaaagccaagagccccaactccagagaaacattaaatttctttaatgta

SEQ ID NO: 160411 - DNA, 70 bp, Homo sapiens
cactgattaaccaaactctgaaagccaagagccccaactccagagaaacattaaatttctttaatgtaaa

SEQ ID NO: 160412 - DNA, 67 bp, Homo sapiens
attaaccaaactctgaaagccaagagccccaactccagagaaacattaaatttctttaatgtaaaag

SEQ ID NO: 160413 - DNA, 69 bp, Homo sapiens
ccaaactctgaaagccaagagccccaactccagagaaacattaaatttctttaatgtaaaagtatatta

SEQ ID NO: 160414 - DNA, 68 bp, Homo sapiens
ctctgaaagccaagagccccaactccagagaaacattaaatttctttaatgtaaaagtatattatttt

SEQ ID NO: 160415 - DNA, 68 bp, Homo sapiens
aaagccaagagccccaactccagagaaacattaaatttctttaatgtaaaagtatattatttttgaga

SEQ ID NO: 160416 - DNA, 76 bp, Homo sapiens
cattaaatttctttaatgtaaaagtatattatttttgagacacactttgtcagagacatccacgattgcctgcaca

SEQ ID NO: 160417 - DNA, 82 bp, Homo sapiens
ttttgagacacactttgtcagagacatccacgattgcctgcacattatattctggcattataatctggtactttagtcataa

SEQ ID NO: 160418 - DNA, 82 bp, Homo sapiens
acacactttgtcagagacatccacgattgcctgcacattatattctggcattataatctggtactttagtcataatcgtgaa

SEQ ID NO: 160419 - DNA, 79 bp, Homo sapiens
acgattgcctgcacattatattctggcattataatctggtactttagtcataatcgtgaagctggctaggtttccagta

SEQ ID NO: 160420 - DNA, 79 bp, Homo sapiens
cacattatattctggcattataatctggtactttagtcataatcgtgaagctggctaggtttccagtaaatatcagcat

SEQ ID NO: 160421 - DNA, 76 bp, Homo sapiens
ttataatctggtactttagtcataatcgtgaagctggctaggtttccagtaaatatcagcattttatatgggcaaa

SEQ ID NO: 160422 - DNA, 76 bp, Homo sapiens
gtcataatcgtgaagctggctaggtttccagtaaatatcagcattttatatgggcaaaagcagttaataaaaatca

SEQ ID NO: 160423 - DNA, 74 bp, Homo sapiens
gctggctaggtttccagtaaatatcagcattttatatgggcaaaagcagttaataaaaatcagttcatttactg

SEQ ID NO: 160424 - DNA, 73 bp, Homo sapiens
ctggctaggtttccagtaaatatcagcattttatatgggcaaaagcagttaataaaaatcagttcatttactg

SEQ ID NO: 160425 - DNA, 73 bp, Homo sapiens
ggtttccagtaaatatcagcattttatatgggcaaaagcagttaataaaaatcagttcatttactgtaagcca

SEQ ID NO: 160426 - DNA, 75 bp, Homo sapiens
atatcagcattttatatgggcaaaagcagttaataaaaatcagttcatttactgtaagccaaatgtgcttgtact

SEQ ID NO: 160427 - DNA, 72 bp, Homo sapiens
atatgggcaaaagcagttaataaaaatcagttcatttactgtaagccaaatgtgcttgtacttaatcccacc

SEQ ID NO: 160428 - DNA, 70 bp, Homo sapiens
gcagttaataaaaatcagttcatttactgtaagccaaatgtgcttgtacttaatcccaccctttcccaaa

SEQ ID NO: 160429 - DNA, 68 bp, Homo sapiens
gttaataaaaatcagttcatttactgtaagccaaatgtgcttgtacttaatcccaccctttcccaaag

SEQ ID NO: 160430 - DNA, 68 bp, Homo sapiens
aaatcagttcatttactgtaagccaaatgtgcttgtacttaatcccaccctttcccaaagtttttgaa

SEQ ID NO: 160431 - DNA, 68 bp, Homo sapiens
taagccaaatgtgcttgtacttaatcccaccctttcccaaagtttttgaagctttgataggttgattt

SEQ ID NO: 160432 - DNA, 67 bp, Homo sapiens
aatgtgcttgtacttaatcccaccctttcccaaagtttttgaagctttgataggttgatttttggtc

SEQ ID NO: 160433 - DNA, 66 bp, Homo sapiens
acttaatcccaccctttcccaaagtttttgaagctttgataggttgatttttggtctgtccttata

SEQ ID NO: 160434 - DNA, 67 bp, Homo sapiens
caccctttcccaaagtttttgaagctttgataggttgatttttggtctgtccttatataatataaaa

SEQ ID NO: 160435 - DNA, 69 bp, Homo sapiens
gtttttgaagctttgataggttgatttttggtctgtccttatataatataaaacgtacctacagacact

SEQ ID NO: 160436 - DNA, 69 bp, Homo sapiens
taggttgatttttggtctgtccttatataatataaaacgtacctacagacacttttacagagttaatac

SEQ ID NO: 160437 - DNA, 69 bp, Homo sapiens
tttggtctgtccttatataatataaaacgtacctacagacacttttacagagttaatactaaaattaca

SEQ ID NO: 160438 - DNA, 70 bp, Homo sapiens
tataatataaaacgtacctacagacacttttacagagttaatactaaaattacaaattgatgacactttc

SEQ ID NO: 160439 - DNA, 71 bp, Homo sapiens
aacgtacctacagacacttttacagagttaatactaaaattacaaattgatgacactttcgaggcaaagca

SEQ ID NO: 160440 - DNA, 71 bp, Homo sapiens
cagacacttttacagagttaatactaaaattacaaattgatgacactttcgaggcaaagcagggtaactgt

SEQ ID NO: 160441 - DNA, 69 bp, Homo sapiens
cttttacagagttaatactaaaattacaaattgatgacactttcgaggcaaagcagggtaactgttcct

SEQ ID NO: 160442 - DNA, 72 bp, Homo sapiens
agttaatactaaaattacaaattgatgacactttcgaggcaaagcagggtaactgttccttcagtgttgcca

SEQ ID NO: 160443 - DNA, 75 bp, Homo sapiens
aattacaaattgatgacactttcgaggcaaagcagggtaactgttccttcagtgttgccatcactgaattgactt

SEQ ID NO: 160444 - DNA, 79 bp, Homo sapiens
atgacactttcgaggcaaagcagggtaactgttccttcagtgttgccatcactgaattgactttcactgttccatcata

SEQ ID NO: 160445 - DNA, 77 bp, Homo sapiens
tttcgaggcaaagcagggtaactgttccttcagtgttgccatcactgaattgactttcactgttccatcatactgtt

SEQ ID NO: 160446 - DNA, 78 bp, Homo sapiens
aaagcagggtaactgttccttcagtgttgccatcactgaattgactttcactgttccatcatactgtttggctgaaca

SEQ ID NO: 160447 - DNA, 81 bp, Homo sapiens
aactgttccttcagtgttgccatcactgaattgactttcactgttccatcatactgtttggctgaacactgacattccata

SEQ ID NO: 160448 - DNA, 82 bp, Homo sapiens
tgttgccatcactgaattgactttcactgttccatcatactgtttggctgaacactgacattccatagtctacaactataaa

SEQ ID NO: 160449 - DNA, 80 bp, Homo sapiens
atcactgaattgactttcactgttccatcatactgtttggctgaacactgacattccatagtctacaactataaagatac

SEQ ID NO: 160450 - DNA, 77 bp, Homo sapiens
actttcactgttccatcatactgtttggctgaacactgacattccatagtctacaactataaagatacctacctatg

SEQ ID NO: 160451 - DNA, 77 bp, Homo sapiens
ttccatcatactgtttggctgaacactgacattccatagtctacaactataaagatacctacctatgtgagtttaaa

SEQ ID NO: 160452 - DNA, 76 bp, Homo sapiens
gaacactgacattccatagtctacaactataaagatacctacctatgtgagtttaaaaagtgatctgcacaaaaga

SEQ ID NO: 160453 - DNA, 74 bp, Homo sapiens
gacattccatagtctacaactataaagatacctacctatgtgagtttaaaaagtgatctgcacaaaagaaataa

SEQ ID NO: 160454 - DNA, 69 bp, Homo sapiens
gtctacaactataaagatacctacctatgtgagtttaaaaagtgatctgcacaaaagaaataaaaaaac

SEQ ID NO: 160455 - DNA, 69 bp, Homo sapiens
agatacctacctatgtgagtttaaaaagtgatctgcacaaaagaaataaaaaaactttatatacaacca

SEQ ID NO: 160456 - DNA, 68 bp, Homo sapiens
cctacctatgtgagtttaaaaagtgatctgcacaaaagaaataaaaaaactttatatacaaccaattg

SEQ ID NO: 160457 - DNA, 66 bp, Homo sapiens
tgagtttaaaaagtgatctgcacaaaagaaataaaaaaactttatatacaaccaattgttttttaa

SEQ ID NO: 160458 - DNA, 78 bp, Homo sapiens
aaaatacaaaaataacatctgtcacttttgtcatgctgacaatttgacatatatacacatgcaggagaaaagttccaa

SEQ ID NO: 160459 - DNA, 81 bp, Homo sapiens
aaaaataacatctgtcacttttgtcatgctgacaatttgacatatatacacatgcaggagaaaagttccaattcagtgatc

SEQ ID NO: 160460 - DNA, 84 bp, Homo sapiens
atctgtcacttttgtcatgctgacaatttgacatatatacacatgcaggagaaaagttccaattcagtgatctggacaactgta

SEQ ID NO: 160461 - DNA, 83 bp, Homo sapiens
tcatgctgacaatttgacatatatacacatgcaggagaaaagttccaattcagtgatctggacaactgtagcttgtatatttt

SEQ ID NO: 160462 - DNA, 80 bp, Homo sapiens
ctgacaatttgacatatatacacatgcaggagaaaagttccaattcagtgatctggacaactgtagcttgtatattttta

SEQ ID NO: 160463 - DNA, 80 bp, Homo sapiens
atatacacatgcaggagaaaagttccaattcagtgatctggacaactgtagcttgtatatttttaatatgatggacacac

SEQ ID NO: 160464 - DNA, 81 bp, Homo sapiens
tgcaggagaaaagttccaattcagtgatctggacaactgtagcttgtatatttttaatatgatggacacactgccgctgaa

SEQ ID NO: 160465 - DNA, 76 bp, Homo sapiens
aaaagttccaattcagtgatctggacaactgtagcttgtatatttttaatatgatggacacactgccgctgaattt

SEQ ID NO: 160466 - DNA, 82 bp, Homo sapiens
aattcagtgatctggacaactgtagcttgtatatttttaatatgatggacacactgccgctgaattttcacactgacagaga

SEQ ID NO: 160467 - DNA, 80 bp, Homo sapiens
ctgtagcttgtatatttttaatatgatggacacactgccgctgaattttcacactgacagagatgtgtattcaaaatatt

SEQ ID NO: 160468 - DNA, 80 bp, Homo sapiens
ttttaatatgatggacacactgccgctgaattttcacactgacagagatgtgtattcaaaatatttcatatactaaatac

SEQ ID NO: 160469 - DNA, 82 bp, Homo sapiens
atatgatggacacactgccgctgaattttcacactgacagagatgtgtattcaaaatatttcatatactaaatactacaatc

SEQ ID NO: 160470 - DNA, 82 bp, Homo sapiens
cacactgccgctgaattttcacactgacagagatgtgtattcaaaatatttcatatactaaatactacaatctctgtatgta

SEQ ID NO: 160471 - DNA, 80 bp, Homo sapiens
cactgacagagatgtgtattcaaaatatttcatatactaaatactacaatctctgtatgtataaatcctggtgataatag

SEQ ID NO: 160472 - DNA, 76 bp, Homo sapiens
gatgtgtattcaaaatatttcatatactaaatactacaatctctgtatgtataaatcctggtgataatagtttttg

SEQ ID NO: 160473 - DNA, 75 bp, Homo sapiens
atatttcatatactaaatactacaatctctgtatgtataaatcctggtgataatagtttttgttctacttgatta

SEQ ID NO: 160474 - DNA, 74 bp, Homo sapiens
tactaaatactacaatctctgtatgtataaatcctggtgataatagtttttgttctacttgattaaaagtatgc

SEQ ID NO: 160475 - DNA, 75 bp, Homo sapiens
tacaatctctgtatgtataaatcctggtgataatagtttttgttctacttgattaaaagtatgccttaagcaagc

SEQ ID NO: 160476 - DNA, 74 bp, Homo sapiens
ctctgtatgtataaatcctggtgataatagtttttgttctacttgattaaaagtatgccttaagcaagctaata

SEQ ID NO: 160477 - DNA, 71 bp, Homo sapiens
taatagtttttgttctacttgattaaaagtatgccttaagcaagctaatattaagtgcactaaaaaccaca

SEQ ID NO: 160478 - DNA, 75 bp, Homo sapiens
tgttctacttgattaaaagtatgccttaagcaagctaatattaagtgcactaaaaaccacaacagctcaagaatc

SEQ ID NO: 160479 - DNA, 75 bp, Homo sapiens
cttgattaaaagtatgccttaagcaagctaatattaagtgcactaaaaaccacaacagctcaagaatctatgacc

SEQ ID NO: 160480 - DNA, 76 bp, Homo sapiens
agtatgccttaagcaagctaatattaagtgcactaaaaaccacaacagctcaagaatctatgaccttatataaaga

SEQ ID NO: 160481 - DNA, 75 bp, Homo sapiens
ttaagcaagctaatattaagtgcactaaaaaccacaacagctcaagaatctatgaccttatataaagaaatccaa

SEQ ID NO: 160482 - DNA, 73 bp, Homo sapiens
aatattaagtgcactaaaaaccacaacagctcaagaatctatgaccttatataaagaaatccaaaatgtacaa

SEQ ID NO: 160483 - DNA, 74 bp, Homo sapiens
tgcactaaaaaccacaacagctcaagaatctatgaccttatataaagaaatccaaaatgtacaaaatacaacta

SEQ ID NO: 160484 - DNA, 74 bp, Homo sapiens
cacaacagctcaagaatctatgaccttatataaagaaatccaaaatgtacaaaatacaactataaaagcaagga

SEQ ID NO: 160485 - DNA, 71 bp, Homo sapiens
ctcaagaatctatgaccttatataaagaaatccaaaatgtacaaaatacaactataaaagcaaggaacaat

SEQ ID NO: 160486 - DNA, 73 bp, Homo sapiens
gaccttatataaagaaatccaaaatgtacaaaatacaactataaaagcaaggaacaattaatgccatgcaaga

SEQ ID NO: 160487 - DNA, 70 bp, Homo sapiens
aagaaatccaaaatgtacaaaatacaactataaaagcaaggaacaattaatgccatgcaagattttaaac

SEQ ID NO: 160488 - DNA, 72 bp, Homo sapiens
aatgtacaaaatacaactataaaagcaaggaacaattaatgccatgcaagattttaaactaaaaatggcata

SEQ ID NO: 160489 - DNA, 74 bp, Homo sapiens
caaaatacaactataaaagcaaggaacaattaatgccatgcaagattttaaactaaaaatggcatagaaatgca

SEQ ID NO: 160490 - DNA, 73 bp, Homo sapiens
aaaagcaaggaacaattaatgccatgcaagattttaaactaaaaatggcatagaaatgcaatttaaaacagca

SEQ ID NO: 160491 - DNA, 74 bp, Homo sapiens
caaggaacaattaatgccatgcaagattttaaactaaaaatggcatagaaatgcaatttaaaacagcaaactca

SEQ ID NO: 160492 - DNA, 77 bp, Homo sapiens
tgccatgcaagattttaaactaaaaatggcatagaaatgcaatttaaaacagcaaactcaaattcacataacactca

SEQ ID NO: 160493 - DNA, 74 bp, Homo sapiens
gcaagattttaaactaaaaatggcatagaaatgcaatttaaaacagcaaactcaaattcacataacactcaaga

SEQ ID NO: 160494 - DNA, 75 bp, Homo sapiens
taaaaatggcatagaaatgcaatttaaaacagcaaactcaaattcacataacactcaagataaaaaggtcagcag

SEQ ID NO: 160495 - DNA, 75 bp, Homo sapiens
ggcatagaaatgcaatttaaaacagcaaactcaaattcacataacactcaagataaaaaggtcagcagtaagttc

SEQ ID NO: 160496 - DNA, 72 bp, Homo sapiens
gcaatttaaaacagcaaactcaaattcacataacactcaagataaaaaggtcagcagtaagttctactaacg

SEQ ID NO: 160497 - DNA, 72 bp, Homo sapiens
agcaaactcaaattcacataacactcaagataaaaaggtcagcagtaagttctactaacgttgcttaacaag

SEQ ID NO: 160498 - DNA, 72 bp, Homo sapiens
caaattcacataacactcaagataaaaaggtcagcagtaagttctactaacgttgcttaacaaggatttaga

SEQ ID NO: 160499 - DNA, 70 bp, Homo sapiens
cataacactcaagataaaaaggtcagcagtaagttctactaacgttgcttaacaaggatttagaaaagga

SEQ ID NO: 160500 - DNA, 69 bp, Homo sapiens
gataaaaaggtcagcagtaagttctactaacgttgcttaacaaggatttagaaaaggaaatacattctc

SEQ ID NO: 160501 - DNA, 73 bp, Homo sapiens
acgttgcttaacaaggatttagaaaaggaaatacattctctttgctggtataatggtataaatcagatcttca

SEQ ID NO: 160502 - DNA, 76 bp, Homo sapiens
aaaggaaatacattctctttgctggtataatggtataaatcagatcttcaaatctatgggaacgagtcatcttctc

SEQ ID NO: 160503 - DNA, 79 bp, Homo sapiens
aatacattctctttgctggtataatggtataaatcagatcttcaaatctatgggaacgagtcatcttctctgtcctcta

SEQ ID NO: 160504 - DNA, 79 bp, Homo sapiens
ataatggtataaatcagatcttcaaatctatgggaacgagtcatcttctctgtcctctatctcaagaaattagctgtaa

SEQ ID NO: 160505 - DNA, 79 bp, Homo sapiens
aaatcagatcttcaaatctatgggaacgagtcatcttctctgtcctctatctcaagaaattagctgtaatgaaagagaa

SEQ ID NO: 160506 - DNA, 77 bp, Homo sapiens
ttcaaatctatgggaacgagtcatcttctctgtcctctatctcaagaaattagctgtaatgaaagagaaacattatt

SEQ ID NO: 160507 - DNA, 66 bp, Homo sapiens
acttttgtcttatatttctaaagtcaaacttgaaagactgaaatatttacctcttttacagttgtt

SEQ ID NO: 160508 - DNA, 67 bp, Homo sapiens
ttctaaagtcaaacttgaaagactgaaatatttacctcttttacagttgtttttatgaaatcttttc

SEQ ID NO: 160509 - DNA, 67 bp, Homo sapiens
agtcaaacttgaaagactgaaatatttacctcttttacagttgtttttatgaaatcttttctttcag

SEQ ID NO: 160510 - DNA, 68 bp, Homo sapiens
gactgaaatatttacctcttttacagttgtttttatgaaatcttttctttcagttaaatcataagtag

SEQ ID NO: 160511 - DNA, 67 bp, Homo sapiens
tatttacctcttttacagttgtttttatgaaatcttttctttcagttaaatcataagtaggataatt

SEQ ID NO: 160512 - DNA, 71 bp, Homo sapiens
ttacagttgtttttatgaaatcttttctttcagttaaatcataagtaggataattttcatagacctatgta

SEQ ID NO: 160513 - DNA, 72 bp, Homo sapiens
gttgtttttatgaaatcttttctttcagttaaatcataagtaggataattttcatagacctatgtatagtga

SEQ ID NO: 160514 - DNA, 70 bp, Homo sapiens
gaaatcttttctttcagttaaatcataagtaggataattttcatagacctatgtatagtgaaaaggaaaa

SEQ ID NO: 160515 - DNA, 71 bp, Homo sapiens
tctttcagttaaatcataagtaggataattttcatagacctatgtatagtgaaaaggaaaaataatgttaa

SEQ ID NO: 160516 - DNA, 70 bp, Homo sapiens
aaatcataagtaggataattttcatagacctatgtatagtgaaaaggaaaaataatgttaaaagcagatt

SEQ ID NO: 160517 - DNA, 69 bp, Homo sapiens
ggataattttcatagacctatgtatagtgaaaaggaaaaataatgttaaaagcagattttaaaatccag

SEQ ID NO: 160518 - DNA, 70 bp, Homo sapiens
catagacctatgtatagtgaaaaggaaaaataatgttaaaagcagattttaaaatccagtaatattgtct

SEQ ID NO: 160519 - DNA, 70 bp, Homo sapiens
tatgtatagtgaaaaggaaaaataatgttaaaagcagattttaaaatccagtaatattgtctttgaataa

SEQ ID NO: 160520 - DNA, 70 bp, Homo sapiens
ggaaaaataatgttaaaagcagattttaaaatccagtaatattgtctttgaataaaagcaggaaatctgc

SEQ ID NO: 160521 - DNA, 74 bp, Homo sapiens
tgttaaaagcagattttaaaatccagtaatattgtctttgaataaaagcaggaaatctgctacgtgcaaatagc

SEQ ID NO: 160522 - DNA, 75 bp, Homo sapiens
cagattttaaaatccagtaatattgtctttgaataaaagcaggaaatctgctacgtgcaaatagccacaaccatc

SEQ ID NO: 160523 - DNA, 75 bp, Homo sapiens
ttaaaatccagtaatattgtctttgaataaaagcaggaaatctgctacgtgcaaatagccacaaccatcccaaca

SEQ ID NO: 160524 - DNA, 75 bp, Homo sapiens
atattgtctttgaataaaagcaggaaatctgctacgtgcaaatagccacaaccatcccaacagtactctggttaa

SEQ ID NO: 160525 - DNA, 74 bp, Homo sapiens
aataaaagcaggaaatctgctacgtgcaaatagccacaaccatcccaacagtactctggttaacccatatggaa

SEQ ID NO: 160526 - DNA, 75 bp, Homo sapiens
aagcaggaaatctgctacgtgcaaatagccacaaccatcccaacagtactctggttaacccatatggaattctat

SEQ ID NO: 160527 - DNA, 74 bp, Homo sapiens
tacgtgcaaatagccacaaccatcccaacagtactctggttaacccatatggaattctattccaaatgagtatt

SEQ ID NO: 160528 - DNA, 71 bp, Homo sapiens
aaatagccacaaccatcccaacagtactctggttaacccatatggaattctattccaaatgagtattttaa

SEQ ID NO: 160529 - DNA, 71 bp, Homo sapiens
acaaccatcccaacagtactctggttaacccatatggaattctattccaaatgagtattttaataatattg

SEQ ID NO: 160530 - DNA, 75 bp, Homo sapiens
caacagtactctggttaacccatatggaattctattccaaatgagtattttaataatattgtatatgatgtggaa

SEQ ID NO: 160531 - DNA, 77 bp, Homo sapiens
ctggttaacccatatggaattctattccaaatgagtattttaataatattgtatatgatgtggaaaactagcatgca

SEQ ID NO: 160532 - DNA, 80 bp, Homo sapiens
catatggaattctattccaaatgagtattttaataatattgtatatgatgtggaaaactagcatgcaaacattctcagtg

SEQ ID NO: 160533 - DNA, 80 bp, Homo sapiens
tccaaatgagtattttaataatattgtatatgatgtggaaaactagcatgcaaacattctcagtgttttcaggctgagag

SEQ ID NO: 160534 - DNA, 81 bp, Homo sapiens
gtattttaataatattgtatatgatgtggaaaactagcatgcaaacattctcagtgttttcaggctgagagtctggaatga

SEQ ID NO: 160535 - DNA, 80 bp, Homo sapiens
aatattgtatatgatgtggaaaactagcatgcaaacattctcagtgttttcaggctgagagtctggaatgaattaactaa

SEQ ID NO: 160536 - DNA, 80 bp, Homo sapiens
tatatgatgtggaaaactagcatgcaaacattctcagtgttttcaggctgagagtctggaatgaattaactaaccataaa

SEQ ID NO: 160537 - DNA, 77 bp, Homo sapiens
aaaactagcatgcaaacattctcagtgttttcaggctgagagtctggaatgaattaactaaccataaacaagccaga

SEQ ID NO: 160538 - DNA, 81 bp, Homo sapiens
atgcaaacattctcagtgttttcaggctgagagtctggaatgaattaactaaccataaacaagccagatgtgatggctcac

SEQ ID NO: 160539 - DNA, 71 bp, Homo sapiens
acacccaagaatgaccaataaatactaagggacctcagaagccggccggatcctccgtatactgaacgctg

SEQ ID NO: 160540 - DNA, 71 bp, Homo sapiens
aatgaccaataaatactaagggacctcagaagccggccggatcctccgtatactgaacgctggtcccctga

SEQ ID NO: 160541 - DNA, 69 bp, Homo sapiens
aataaatactaagggacctcagaagccggccggatcctccgtatactgaacgctggtcccctgagtccc

SEQ ID NO: 160542 - DNA, 69 bp, Homo sapiens
tactaagggacctcagaagccggccggatcctccgtatactgaacgctggtcccctgagtccccttatt

SEQ ID NO: 160543 - DNA, 68 bp, Homo sapiens
actaagggacctcagaagccggccggatcctccgtatactgaacgctggtcccctgagtccccttatt

SEQ ID NO: 160544 - DNA, 67 bp, Homo sapiens
aaacaaaaaaccccaacaaacatgggtaaagaaaacatccagatagatcttagataacagaactaag

SEQ ID NO: 160545 - DNA, 72 bp, Homo sapiens
ccccaacaaacatgggtaaagaaaacatccagatagatcttagataacagaactaagttctttatgttggca

SEQ ID NO: 160546 - DNA, 75 bp, Homo sapiens
aaacatgggtaaagaaaacatccagatagatcttagataacagaactaagttctttatgttggcaagtcatctgc

SEQ ID NO: 160547 - DNA, 76 bp, Homo sapiens
agaaaacatccagatagatcttagataacagaactaagttctttatgttggcaagtcatctgccaagtgtctttta

SEQ ID NO: 160548 - DNA, 73 bp, Homo sapiens
agatagatcttagataacagaactaagttctttatgttggcaagtcatctgccaagtgtcttttagggaaaac

SEQ ID NO: 160549 - DNA, 70 bp, Homo sapiens
cttagataacagaactaagttctttatgttggcaagtcatctgccaagtgtcttttagggaaaacttctt

SEQ ID NO: 160550 - DNA, 70 bp, Homo sapiens
aacagaactaagttctttatgttggcaagtcatctgccaagtgtcttttagggaaaacttctttcttctc

SEQ ID NO: 160551 - DNA, 70 bp, Homo sapiens
tttatgttggcaagtcatctgccaagtgtcttttagggaaaacttctttcttctccaacccttgttatta

SEQ ID NO: 160552 - DNA, 72 bp, Homo sapiens
ttggcaagtcatctgccaagtgtcttttagggaaaacttctttcttctccaacccttgttattatccagcac

SEQ ID NO: 160553 - DNA, 70 bp, Homo sapiens
tgccaagtgtcttttagggaaaacttctttcttctccaacccttgttattatccagcaccctacctatga

SEQ ID NO: 160554 - DNA, 69 bp, Homo sapiens
tcttttagggaaaacttctttcttctccaacccttgttattatccagcaccctacctatgattccacaa

SEQ ID NO: 160555 - DNA, 70 bp, Homo sapiens
aaacttctttcttctccaacccttgttattatccagcaccctacctatgattccacaacctgaaaagcaa

SEQ ID NO: 160556 - DNA, 74 bp, Homo sapiens
tttcttctccaacccttgttattatccagcaccctacctatgattccacaacctgaaaagcaatgaactgcttc

SEQ ID NO: 160557 - DNA, 74 bp, Homo sapiens
aacccttgttattatccagcaccctacctatgattccacaacctgaaaagcaatgaactgcttcctctactcca

SEQ ID NO: 160558 - DNA, 79 bp, Homo sapiens
tattatccagcaccctacctatgattccacaacctgaaaagcaatgaactgcttcctctactccactgctcagtccctc

SEQ ID NO: 160559 - DNA, 73 bp, Homo sapiens
attccacaacctgaaaagcaatgaactgcttcctctactccactgctcagtccctccctaaagttaaatccta

SEQ ID NO: 160560 - DNA, 72 bp, Homo sapiens
aatgaactgcttcctctactccactgctcagtccctccctaaagttaaatcctaagacccaggtggtctcaa

SEQ ID NO: 160561 - DNA, 72 bp, Homo sapiens
ttcctctactccactgctcagtccctccctaaagttaaatcctaagacccaggtggtctcaagagtcctgta

SEQ ID NO: 160562 - DNA, 69 bp, Homo sapiens
actgctcagtccctccctaaagttaaatcctaagacccaggtggtctcaagagtcctgtactcctaaaa

SEQ ID NO: 160563 - DNA, 67 bp, Homo sapiens
cctccctaaagttaaatcctaagacccaggtggtctcaagagtcctgtactcctaaaatttgactaa

SEQ ID NO: 160564 - DNA, 67 bp, Homo sapiens
ctaaagttaaatcctaagacccaggtggtctcaagagtcctgtactcctaaaatttgactaaatttc

SEQ ID NO: 160565 - DNA, 69 bp, Homo sapiens
taagacccaggtggtctcaagagtcctgtactcctaaaatttgactaaatttctgccttttgtcaattt

SEQ ID NO: 160566 - DNA, 72 bp, Homo sapiens
tggtctcaagagtcctgtactcctaaaatttgactaaatttctgccttttgtcaattttctcagtcctgtta

SEQ ID NO: 160567 - DNA, 71 bp, Homo sapiens
agagtcctgtactcctaaaatttgactaaatttctgccttttgtcaattttctcagtcctgttatacttgc

SEQ ID NO: 160568 - DNA, 74 bp, Homo sapiens
gtactcctaaaatttgactaaatttctgccttttgtcaattttctcagtcctgttatacttgctgcttgactca

SEQ ID NO: 160569 - DNA, 77 bp, Homo sapiens
ttgactaaatttctgccttttgtcaattttctcagtcctgttatacttgctgcttgactcaggtcctgactctataa

SEQ ID NO: 160570 - DNA, 78 bp, Homo sapiens
aaatttctgccttttgtcaattttctcagtcctgttatacttgctgcttgactcaggtcctgactctataagctcaca

SEQ ID NO: 160571 - DNA, 83 bp, Homo sapiens
ttgtcaattttctcagtcctgttatacttgctgcttgactcaggtcctgactctataagctcacagtctgcaagcaccctgta

SEQ ID NO: 160572 - DNA, 82 bp, Homo sapiens
ttatacttgctgcttgactcaggtcctgactctataagctcacagtctgcaagcaccctgtaggctttacttccactgtata

SEQ ID NO: 160573 - DNA, 82 bp, Homo sapiens
ttgctgcttgactcaggtcctgactctataagctcacagtctgcaagcaccctgtaggctttacttccactgtatagttcag

SEQ ID NO: 160574 - DNA, 78 bp, Homo sapiens
aggtcctgactctataagctcacagtctgcaagcaccctgtaggctttacttccactgtatagttcagggtcagcaac

SEQ ID NO: 160575 - DNA, 75 bp, Homo sapiens
agctcacagtctgcaagcaccctgtaggctttacttccactgtatagttcagggtcagcaactttttctgtaaag

SEQ ID NO: 160576 - DNA, 72 bp, Homo sapiens
agcaccctgtaggctttacttccactgtatagttcagggtcagcaactttttctgtaaagggctagatggta

SEQ ID NO: 160577 - DNA, 71 bp, Homo sapiens
ttacttccactgtatagttcagggtcagcaactttttctgtaaagggctagatggtacaaatagtttcaat

SEQ ID NO: 160578 - DNA, 72 bp, Homo sapiens
tatagttcagggtcagcaactttttctgtaaagggctagatggtacaaatagtttcaattttgccagtcagt

SEQ ID NO: 160579 - DNA, 71 bp, Homo sapiens
gggtcagcaactttttctgtaaagggctagatggtacaaatagtttcaattttgccagtcagtttctactc

SEQ ID NO: 160580 - DNA, 74 bp, Homo sapiens
tttctgtaaagggctagatggtacaaatagtttcaattttgccagtcagtttctactctgccagtcagtttcta

SEQ ID NO: 160581 - DNA, 74 bp, Homo sapiens
aagggctagatggtacaaatagtttcaattttgccagtcagtttctactctgccagtcagtttctactcaacta

SEQ ID NO: 160582 - DNA, 77 bp, Homo sapiens
tacaaatagtttcaattttgccagtcagtttctactctgccagtcagtttctactcaactatgcgttgtagtggcaa

SEQ ID NO: 160583 - DNA, 81 bp, Homo sapiens
tagtttcaattttgccagtcagtttctactctgccagtcagtttctactcaactatgcgttgtagtggcaatgctgccata

SEQ ID NO: 160584 - DNA, 80 bp, Homo sapiens
ccagtcagtttctactctgccagtcagtttctactcaactatgcgttgtagtggcaatgctgccatagacaatagttaaa

SEQ ID NO: 160585 - DNA, 78 bp, Homo sapiens
agtttctactctgccagtcagtttctactcaactatgcgttgtagtggcaatgctgccatagacaatagttaaataaa

SEQ ID NO: 160586 - DNA, 81 bp, Homo sapiens
cagtcagtttctactcaactatgcgttgtagtggcaatgctgccatagacaatagttaaataaatagatgtggctgtatta

SEQ ID NO: 160587 - DNA, 78 bp, Homo sapiens
actatgcgttgtagtggcaatgctgccatagacaatagttaaataaatagatgtggctgtattacaataaaattttgc

SEQ ID NO: 160588 - DNA, 76 bp, Homo sapiens
gtggcaatgctgccatagacaatagttaaataaatagatgtggctgtattacaataaaattttgcttacaaaacca

SEQ ID NO: 160589 - DNA, 74 bp, Homo sapiens
gctgccatagacaatagttaaataaatagatgtggctgtattacaataaaattttgcttacaaaaccaggtgac

SEQ ID NO: 160590 - DNA, 73 bp, Homo sapiens
taaatagatgtggctgtattacaataaaattttgcttacaaaaccaggtgactaagatagaatggatttagcc

SEQ ID NO: 160591 - DNA, 73 bp, Homo sapiens
agatgtggctgtattacaataaaattttgcttacaaaaccaggtgactaagatagaatggatttagcccacag

SEQ ID NO: 160592 - DNA, 74 bp, Homo sapiens
tacaataaaattttgcttacaaaaccaggtgactaagatagaatggatttagcccacaggctgtagtatgccaa

SEQ ID NO: 160593 - DNA, 73 bp, Homo sapiens
tttgcttacaaaaccaggtgactaagatagaatggatttagcccacaggctgtagtatgccaaccctctaaaa

SEQ ID NO: 160594 - DNA, 76 bp, Homo sapiens
tgactaagatagaatggatttagcccacaggctgtagtatgccaaccctctaaaatatagttcatcatttaaatta

SEQ ID NO: 160595 - DNA, 75 bp, Homo sapiens
gatagaatggatttagcccacaggctgtagtatgccaaccctctaaaatatagttcatcatttaaattactctaa

SEQ ID NO: 160596 - DNA, 73 bp, Homo sapiens
tttagcccacaggctgtagtatgccaaccctctaaaatatagttcatcatttaaattactctaattgtttgcc

SEQ ID NO: 160597 - DNA, 70 bp, Homo sapiens
tgtagtatgccaaccctctaaaatatagttcatcatttaaattactctaattgtttgccccgggaggttc

SEQ ID NO: 160598 - DNA, 70 bp, Homo sapiens
tatgccaaccctctaaaatatagttcatcatttaaattactctaattgtttgccccgggaggttccaaga

SEQ ID NO: 160599 - DNA, 64 bp, Homo sapiens
agaaaaaaattgtttgccccttgttctttccctgcaaaaccccaatcccgaattggtctaacca

SEQ ID NO: 160600 - DNA, 65 bp, Homo sapiens
aaaattgtttgccccttgttctttccctgcaaaaccccaatcccgaattggtctaaccactcatt

SEQ ID NO: 160601 - DNA, 66 bp, Homo sapiens
cccttgttctttccctgcaaaaccccaatcccgaattggtctaaccactcatttttctatggttaa

SEQ ID NO: 160602 - DNA, 68 bp, Homo sapiens
ttgttctttccctgcaaaaccccaatcccgaattggtctaaccactcatttttctatggttaagccca

SEQ ID NO: 160603 - DNA, 69 bp, Homo sapiens
tttccctgcaaaaccccaatcccgaattggtctaaccactcatttttctatggttaagcccagactaca

SEQ ID NO: 160604 - DNA, 71 bp, Homo sapiens
cccaatcccgaattggtctaaccactcatttttctatggttaagcccagactacagattgctgtgggaaaa

SEQ ID NO: 160605 - DNA, 71 bp, Homo sapiens
aattggtctaaccactcatttttctatggttaagcccagactacagattgctgtgggaaaataactttgaa

SEQ ID NO: 160606 - DNA, 73 bp, Homo sapiens
gtctaaccactcatttttctatggttaagcccagactacagattgctgtgggaaaataactttgaagagactg

SEQ ID NO: 160607 - DNA, 73 bp, Homo sapiens
atttttctatggttaagcccagactacagattgctgtgggaaaataactttgaagagactggtctcattttca

SEQ ID NO: 160608 - DNA, 78 bp, Homo sapiens
ttaagcccagactacagattgctgtgggaaaataactttgaagagactggtctcattttcagttcatggcattcatct

SEQ ID NO: 160609 - DNA, 78 bp, Homo sapiens
ccagactacagattgctgtgggaaaataactttgaagagactggtctcattttcagttcatggcattcatcttcaaag

SEQ ID NO: 160610 - DNA, 76 bp, Homo sapiens
attgctgtgggaaaataactttgaagagactggtctcattttcagttcatggcattcatcttcaaaggctcctccc

SEQ ID NO: 160611 - DNA, 75 bp, Homo sapiens
aaaataactttgaagagactggtctcattttcagttcatggcattcatcttcaaaggctcctccccctggagctc

SEQ ID NO: 160612 - DNA, 79 bp, Homo sapiens
tttgaagagactggtctcattttcagttcatggcattcatcttcaaaggctcctccccctggagctcccagtcaggctc

SEQ ID NO: 160613 - DNA, 78 bp, Homo sapiens
gtctcattttcagttcatggcattcatcttcaaaggctcctccccctggagctcccagtcaggctctctcctttcatt

SEQ ID NO: 160614 - DNA, 78 bp, Homo sapiens
tttcagttcatggcattcatcttcaaaggctcctccccctggagctcccagtcaggctctctcctttcatttccacca

SEQ ID NO: 160615 - DNA, 76 bp, Homo sapiens
attcatcttcaaaggctcctccccctggagctcccagtcaggctctctcctttcatttccaccaatggcagtttca

SEQ ID NO: 160616 - DNA, 74 bp, Homo sapiens
aaaggctcctccccctggagctcccagtcaggctctctcctttcatttccaccaatggcagtttcatctcctta

SEQ ID NO: 160617 - DNA, 78 bp, Homo sapiens
cccctggagctcccagtcaggctctctcctttcatttccaccaatggcagtttcatctccttattcaagtgtctcaca

SEQ ID NO: 160618 - DNA, 81 bp, Homo sapiens
tggagctcccagtcaggctctctcctttcatttccaccaatggcagtttcatctccttattcaagtgtctcacactgctac

SEQ ID NO: 160619 - DNA, 81 bp, Homo sapiens
gtcaggctctctcctttcatttccaccaatggcagtttcatctccttattcaagtgtctcacactgctactgtcagccaaa

SEQ ID NO: 160620 - DNA, 79 bp, Homo sapiens
tttcatttccaccaatggcagtttcatctccttattcaagtgtctcacactgctactgtcagccaaaaagccattatta

SEQ ID NO: 160621 - DNA, 79 bp, Homo sapiens
atttccaccaatggcagtttcatctccttattcaagtgtctcacactgctactgtcagccaaaaagccattattatgaa

SEQ ID NO: 160622 - DNA, 79 bp, Homo sapiens
atggcagtttcatctccttattcaagtgtctcacactgctactgtcagccaaaaagccattattatgaattccttcaat

SEQ ID NO: 160623 - DNA, 76 bp, Homo sapiens
agtttcatctccttattcaagtgtctcacactgctactgtcagccaaaaagccattattatgaattccttcaattt

SEQ ID NO: 160624 - DNA, 79 bp, Homo sapiens
tttcatctccttattcaagtgtctcacactgctactgtcagccaaaaagccattattatgaattccttcaattttctga

SEQ ID NO: 160625 - DNA, 79 bp, Homo sapiens
ttattcaagtgtctcacactgctactgtcagccaaaaagccattattatgaattccttcaattttctgacagcactttc

SEQ ID NO: 160626 - DNA, 75 bp, Homo sapiens
acactgctactgtcagccaaaaagccattattatgaattccttcaattttctgacagcactttcccctccagttg

SEQ ID NO: 160627 - DNA, 77 bp, Homo sapiens
tgtcagccaaaaagccattattatgaattccttcaattttctgacagcactttcccctccagttgtatctggattca

SEQ ID NO: 160628 - DNA, 75 bp, Homo sapiens
aaaaagccattattatgaattccttcaattttctgacagcactttcccctccagttgtatctggattcatcaatg

SEQ ID NO: 160629 - DNA, 74 bp, Homo sapiens
ttatgaattccttcaattttctgacagcactttcccctccagttgtatctggattcatcaatggttcttaattt

SEQ ID NO: 160630 - DNA, 75 bp, Homo sapiens
attttctgacagcactttcccctccagttgtatctggattcatcaatggttcttaattttgcctccacaggacca

SEQ ID NO: 160631 - DNA, 71 bp, Homo sapiens
actttcccctccagttgtatctggattcatcaatggttcttaattttgcctccacaggaccacccttcacc

SEQ ID NO: 160632 - DNA, 73 bp, Homo sapiens
agttgtatctggattcatcaatggttcttaattttgcctccacaggaccacccttcacctctcctgtaacttc

SEQ ID NO: 160633 - DNA, 73 bp, Homo sapiens
tatctggattcatcaatggttcttaattttgcctccacaggaccacccttcacctctcctgtaacttctcctt

SEQ ID NO: 160634 - DNA, 68 bp, Homo sapiens
atggttcttaattttgcctccacaggaccacccttcacctctcctgtaacttctcctttcccaccaaa

SEQ ID NO: 160635 - DNA, 69 bp, Homo sapiens
tcttaattttgcctccacaggaccacccttcacctctcctgtaacttctcctttcccaccaaattgctt

SEQ ID NO: 160636 - DNA, 69 bp, Homo sapiens
cctccacaggaccacccttcacctctcctgtaacttctcctttcccaccaaattgctttctcccctcca

SEQ ID NO: 160637 - DNA, 66 bp, Homo sapiens
acccttcacctctcctgtaacttctcctttcccaccaaattgctttctcccctccacccctactac

SEQ ID NO: 160638 - DNA, 66 bp, Homo sapiens
tctcctgtaacttctcctttcccaccaaattgctttctcccctccacccctactacccattaaaaa

SEQ ID NO: 160639 - DNA, 64 bp, Homo sapiens
taacttctcctttcccaccaaattgctttctcccctccacccctactacccattaaaaatactt

SEQ ID NO: 160640 - DNA, 66 bp, Homo sapiens
tttcccaccaaattgctttctcccctccacccctactacccattaaaaatactttctcacctactc

SEQ ID NO: 160641 - DNA, 65 bp, Homo sapiens
aaattgctttctcccctccacccctactacccattaaaaatactttctcacctactcccatttac

SEQ ID NO: 160642 - DNA, 65 bp, Homo sapiens
ccctactacccattaaaaatactttctcacctactcccatttacctactattttccttccaaaga

SEQ ID NO: 160643 - DNA, 69 bp, Homo sapiens
aaaaatactttctcacctactcccatttacctactattttccttccaaagacagctgcttgaaacagaa

SEQ ID NO: 160644 - DNA, 70 bp, Homo sapiens
tactttctcacctactcccatttacctactattttccttccaaagacagctgcttgaaacagaagttact

SEQ ID NO: 160645 - DNA, 71 bp, Homo sapiens
acctactattttccttccaaagacagctgcttgaaacagaagttactttgttcattttcctcactattcat

SEQ ID NO: 160646 - DNA, 74 bp, Homo sapiens
tccttccaaagacagctgcttgaaacagaagttactttgttcattttcctcactattcattaataactcttgct

SEQ ID NO: 160647 - DNA, 72 bp, Homo sapiens
acagctgcttgaaacagaagttactttgttcattttcctcactattcattaataactcttgcttttaccacc

SEQ ID NO: 160648 - DNA, 73 bp, Homo sapiens
tgaaacagaagttactttgttcattttcctcactattcattaataactcttgcttttaccaccctatgtcatc

SEQ ID NO: 160649 - DNA, 76 bp, Homo sapiens
tcattttcctcactattcattaataactcttgcttttaccaccctatgtcatcgtctcctaattgcagactccaaa

SEQ ID NO: 160650 - DNA, 74 bp, Homo sapiens
actattcattaataactcttgcttttaccaccctatgtcatcgtctcctaattgcagactccaaaacaggtcag

SEQ ID NO: 160651 - DNA, 75 bp, Homo sapiens
ttgcttttaccaccctatgtcatcgtctcctaattgcagactccaaaacaggtcagttccttctcacctgacctc

SEQ ID NO: 160652 - DNA, 76 bp, Homo sapiens
accctatgtcatcgtctcctaattgcagactccaaaacaggtcagttccttctcacctgacctctccatgttatta

SEQ ID NO: 160653 - DNA, 73 bp, Homo sapiens
atcgtctcctaattgcagactccaaaacaggtcagttccttctcacctgacctctccatgttattaatccctt

SEQ ID NO: 160654 - DNA, 71 bp, Homo sapiens
ctaattgcagactccaaaacaggtcagttccttctcacctgacctctccatgttattaatccctttaaaaa

SEQ ID NO: 160655 - DNA, 68 bp, Homo sapiens
agactccaaaacaggtcagttccttctcacctgacctctccatgttattaatccctttaaaaaattta

SEQ ID NO: 160656 - DNA, 70 bp, Homo sapiens
aggtcagttccttctcacctgacctctccatgttattaatccctttaaaaaatttacatgaaggtattca

SEQ ID NO: 160657 - DNA, 69 bp, Homo sapiens
ccttctcacctgacctctccatgttattaatccctttaaaaaatttacatgaaggtattcacaaaaatc

SEQ ID NO: 160658 - DNA, 69 bp, Homo sapiens
cctctccatgttattaatccctttaaaaaatttacatgaaggtattcacaaaaatccttctaatggaca

SEQ ID NO: 160659 - DNA, 69 bp, Homo sapiens
catgttattaatccctttaaaaaatttacatgaaggtattcacaaaaatccttctaatggacagaacta

SEQ ID NO: 160660 - DNA, 68 bp, Homo sapiens
ctttaaaaaatttacatgaaggtattcacaaaaatccttctaatggacagaactaatttctctttgac

SEQ ID NO: 160661 - DNA, 72 bp, Homo sapiens
atttacatgaaggtattcacaaaaatccttctaatggacagaactaatttctctttgacttcctctccactc

SEQ ID NO: 160662 - DNA, 76 bp, Homo sapiens
ttctaatggacagaactaatttctctttgacttcctctccactccacactgtcattttaatgatgatataactggg

SEQ ID NO: 160663 - DNA, 76 bp, Homo sapiens
aactaatttctctttgacttcctctccactccacactgtcattttaatgatgatataactgggtgtcctgcctctc

SEQ ID NO: 160664 - DNA, 81 bp, Homo sapiens
ttctctttgacttcctctccactccacactgtcattttaatgatgatataactgggtgtcctgcctctctcatctcatcct

SEQ ID NO: 160665 - DNA, 82 bp, Homo sapiens
cacactgtcattttaatgatgatataactgggtgtcctgcctctctcatctcatcctttgctattgcattgttcttaatgtt

SEQ ID NO: 160666 - DNA, 81 bp, Homo sapiens
ttttaatgatgatataactgggtgtcctgcctctctcatctcatcctttgctattgcattgttcttaatgtttctaggata

SEQ ID NO: 160667 - DNA, 79 bp, Homo sapiens
tgatataactgggtgtcctgcctctctcatctcatcctttgctattgcattgttcttaatgtttctaggataactttta

SEQ ID NO: 160668 - DNA, 75 bp, Homo sapiens
aactgggtgtcctgcctctctcatctcatcctttgctattgcattgttcttaatgtttctaggataacttttaaa

SEQ ID NO: 160669 - DNA, 77 bp, Homo sapiens
aaaaatatgattgcgttatgcccctgctaaatctcaataatctacatagcctctgaattcctcatttatttcaggaa

SEQ ID NO: 160670 - DNA, 76 bp, Homo sapiens
ccctgctaaatctcaataatctacatagcctctgaattcctcatttatttcaggaagaaactcaaactctaacatg

SEQ ID NO: 160671 - DNA, 77 bp, Homo sapiens
ctcaataatctacatagcctctgaattcctcatttatttcaggaagaaactcaaactctaacatggcatatttaaga

SEQ ID NO: 160672 - DNA, 78 bp, Homo sapiens
aatctacatagcctctgaattcctcatttatttcaggaagaaactcaaactctaacatggcatatttaagatctgcaa

SEQ ID NO: 160673 - DNA, 76 bp, Homo sapiens
agcctctgaattcctcatttatttcaggaagaaactcaaactctaacatggcatatttaagatctgcaaaactcta

SEQ ID NO: 160674 - DNA, 74 bp, Homo sapiens
cctcatttatttcaggaagaaactcaaactctaacatggcatatttaagatctgcaaaactctaatattttctc

SEQ ID NO: 160675 - DNA, 75 bp, Homo sapiens
caggaagaaactcaaactctaacatggcatatttaagatctgcaaaactctaatattttctcctaacttctgtga

SEQ ID NO: 160676 - DNA, 74 bp, Homo sapiens
aactcaaactctaacatggcatatttaagatctgcaaaactctaatattttctcctaacttctgtgaggacttc

SEQ ID NO: 160677 - DNA, 75 bp, Homo sapiens
ctctaacatggcatatttaagatctgcaaaactctaatattttctcctaacttctgtgaggacttctttccaatc

SEQ ID NO: 160678 - DNA, 75 bp, Homo sapiens
gcatatttaagatctgcaaaactctaatattttctcctaacttctgtgaggacttctttccaatcctagtcttga

SEQ ID NO: 160679 - DNA, 75 bp, Homo sapiens
tgcaaaactctaatattttctcctaacttctgtgaggacttctttccaatcctagtcttgagacatgttgaacta

SEQ ID NO: 160680 - DNA, 73 bp, Homo sapiens
aatattttctcctaacttctgtgaggacttctttccaatcctagtcttgagacatgttgaactaatactattc

SEQ ID NO: 160681 - DNA, 74 bp, Homo sapiens
tcctaacttctgtgaggacttctttccaatcctagtcttgagacatgttgaactaatactattcctttcaatta

SEQ ID NO: 160682 - DNA, 73 bp, Homo sapiens
cttctgtgaggacttctttccaatcctagtcttgagacatgttgaactaatactattcctttcaattattgtt

SEQ ID NO: 160683 - DNA, 71 bp, Homo sapiens
gacttctttccaatcctagtcttgagacatgttgaactaatactattcctttcaattattgttttggttaa

SEQ ID NO: 160684 - DNA, 71 bp, Homo sapiens
ctttccaatcctagtcttgagacatgttgaactaatactattcctttcaattattgttttggttaatgtgt

SEQ ID NO: 160685 - DNA, 71 bp, Homo sapiens
cctagtcttgagacatgttgaactaatactattcctttcaattattgttttggttaatgtgttattgttcc

SEQ ID NO: 160686 - DNA, 72 bp, Homo sapiens
gtcttgagacatgttgaactaatactattcctttcaattattgttttggttaatgtgttattgttcctcaac

SEQ ID NO: 160687 - DNA, 72 bp, Homo sapiens
cttgagacatgttgaactaatactattcctttcaattattgttttggttaatgtgttattgttcctcaactg

SEQ ID NO: 160688 - DNA, 73 bp, Homo sapiens
gacatgttgaactaatactattcctttcaattattgttttggttaatgtgttattgttcctcaactgtataga

SEQ ID NO: 160689 - DNA, 71 bp, Homo sapiens
actaatactattcctttcaattattgttttggttaatgtgttattgttcctcaactgtatagaatgggtga

SEQ ID NO: 160690 - DNA, 74 bp, Homo sapiens
tactattcctttcaattattgttttggttaatgtgttattgttcctcaactgtatagaatgggtgatgctccac

SEQ ID NO: 160691 - DNA, 74 bp, Homo sapiens
ttcctttcaattattgttttggttaatgtgttattgttcctcaactgtatagaatgggtgatgctccactagga

SEQ ID NO: 160692 - DNA, 75 bp, Homo sapiens
tcaattattgttttggttaatgtgttattgttcctcaactgtatagaatgggtgatgctccactaggaaattcag

SEQ ID NO: 160693 - DNA, 74 bp, Homo sapiens
ttgttttggttaatgtgttattgttcctcaactgtatagaatgggtgatgctccactaggaaattcagttaaga

SEQ ID NO: 160694 - DNA, 77 bp, Homo sapiens
ttaatgtgttattgttcctcaactgtatagaatgggtgatgctccactaggaaattcagttaagagctcttccaaga

SEQ ID NO: 160695 - DNA, 77 bp, Homo sapiens
ttattgttcctcaactgtatagaatgggtgatgctccactaggaaattcagttaagagctcttccaagatgcttttc

SEQ ID NO: 160696 - DNA, 75 bp, Homo sapiens
aactgtatagaatgggtgatgctccactaggaaattcagttaagagctcttccaagatgcttttccagattcccc

SEQ ID NO: 160697 - DNA, 76 bp, Homo sapiens
agaatgggtgatgctccactaggaaattcagttaagagctcttccaagatgcttttccagattcccccagcctcaa

SEQ ID NO: 160698 - DNA, 74 bp, Homo sapiens
tccactaggaaattcagttaagagctcttccaagatgcttttccagattcccccagcctcaagtagggtgcttg

SEQ ID NO: 160699 - DNA, 75 bp, Homo sapiens
aaattcagttaagagctcttccaagatgcttttccagattcccccagcctcaagtagggtgcttgttctgtggca

SEQ ID NO: 160700 - DNA, 77 bp, Homo sapiens
taagagctcttccaagatgcttttccagattcccccagcctcaagtagggtgcttgttctgtggcactgcagtacct

SEQ ID NO: 160701 - DNA, 76 bp, Homo sapiens
aagatgcttttccagattcccccagcctcaagtagggtgcttgttctgtggcactgcagtaccttccatattctaa

SEQ ID NO: 160702 - DNA, 76 bp, Homo sapiens
ttttccagattcccccagcctcaagtagggtgcttgttctgtggcactgcagtaccttccatattctaacacagcc

SEQ ID NO: 160703 - DNA, 74 bp, Homo sapiens
aagtagggtgcttgttctgtggcactgcagtaccttccatattctaacacagccctcgcttacaatattttaat

SEQ ID NO: 160704 - DNA, 74 bp, Homo sapiens
ttgttctgtggcactgcagtaccttccatattctaacacagccctcgcttacaatattttaattactaaaatat

SEQ ID NO: 160705 - DNA, 74 bp, Homo sapiens
ctgtggcactgcagtaccttccatattctaacacagccctcgcttacaatattttaattactaaaatatttatc

SEQ ID NO: 160706 - DNA, 72 bp, Homo sapiens
ccatattctaacacagccctcgcttacaatattttaattactaaaatatttatctctttccatcccactaga

SEQ ID NO: 160707 - DNA, 72 bp, Homo sapiens
acacagccctcgcttacaatattttaattactaaaatatttatctctttccatcccactagactgtaagctc

SEQ ID NO: 160708 - DNA, 72 bp, Homo sapiens
gcttacaatattttaattactaaaatatttatctctttccatcccactagactgtaagctcctcttgaaagc

SEQ ID NO: 160709 - DNA, 72 bp, Homo sapiens
aattactaaaatatttatctctttccatcccactagactgtaagctcctcttgaaagctaagtaatggcttc

SEQ ID NO: 160710 - DNA, 74 bp, Homo sapiens
taaaatatttatctctttccatcccactagactgtaagctcctcttgaaagctaagtaatggcttctctggttc

SEQ ID NO: 160711 - DNA, 75 bp, Homo sapiens
tctttccatcccactagactgtaagctcctcttgaaagctaagtaatggcttctctggttccacctgtaacatta

SEQ ID NO: 160712 - DNA, 72 bp, Homo sapiens
atcccactagactgtaagctcctcttgaaagctaagtaatggcttctctggttccacctgtaacattaaaaa

SEQ ID NO: 160713 - DNA, 69 bp, Homo sapiens
gactgtaagctcctcttgaaagctaagtaatggcttctctggttccacctgtaacattaaaaaaaattt

SEQ ID NO: 160714 - DNA, 82 bp, Homo sapiens
gtgagccaccacatctagcttctacctgtaacatttagcccagtgcctgaaatgtagtagagaatcaatgaatggtgaatga

SEQ ID NO: 160715 - DNA, 80 bp, Homo sapiens
accacatctagcttctacctgtaacatttagcccagtgcctgaaatgtagtagagaatcaatgaatggtgaatgaatgaa

SEQ ID NO: 160716 - DNA, 78 bp, Homo sapiens
ttctacctgtaacatttagcccagtgcctgaaatgtagtagagaatcaatgaatggtgaatgaatgaacaaaataata

SEQ ID NO: 160717 - DNA, 78 bp, Homo sapiens
acatttagcccagtgcctgaaatgtagtagagaatcaatgaatggtgaatgaatgaacaaaataataatcaatgtcct

SEQ ID NO: 160718 - DNA, 77 bp, Homo sapiens
agcccagtgcctgaaatgtagtagagaatcaatgaatggtgaatgaatgaacaaaataataatcaatgtcctttaaa

SEQ ID NO: 160719 - DNA, 76 bp, Homo sapiens
cctgaaatgtagtagagaatcaatgaatggtgaatgaatgaacaaaataataatcaatgtcctttaaaaaagcaca

SEQ ID NO: 160720 - DNA, 76 bp, Homo sapiens
gtagagaatcaatgaatggtgaatgaatgaacaaaataataatcaatgtcctttaaaaaagcacagactatttcac

SEQ ID NO: 160721 - DNA, 73 bp, Homo sapiens
gaatggtgaatgaatgaacaaaataataatcaatgtcctttaaaaaagcacagactatttcacttttggtaca

SEQ ID NO: 160722 - DNA, 69 bp, Homo sapiens
caaaataataatcaatgtcctttaaaaaagcacagactatttcacttttggtacattccaaattgtaat

SEQ ID NO: 160723 - DNA, 68 bp, Homo sapiens
taatcaatgtcctttaaaaaagcacagactatttcacttttggtacattccaaattgtaattttattt

SEQ ID NO: 160724 - DNA, 67 bp, Homo sapiens
aaaaaagcacagactatttcacttttggtacattccaaattgtaattttattttaccccaacagaca

SEQ ID NO: 160725 - DNA, 65 bp, Homo sapiens
cacttttggtacattccaaattgtaattttattttaccccaacagacaagtttctaaaatttcca

SEQ ID NO: 160726 - DNA, 67 bp, Homo sapiens
cattccaaattgtaattttattttaccccaacagacaagtttctaaaatttccatagaatccctatg

SEQ ID NO: 160727 - DNA, 70 bp, Homo sapiens
tgtaattttattttaccccaacagacaagtttctaaaatttccatagaatccctatggaatcatattcaa

SEQ ID NO: 160728 - DNA, 71 bp, Homo sapiens
attttaccccaacagacaagtttctaaaatttccatagaatccctatggaatcatattcaagacaaggcca

SEQ ID NO: 160729 - DNA, 71 bp, Homo sapiens
cccaacagacaagtttctaaaatttccatagaatccctatggaatcatattcaagacaaggccactttatt

SEQ ID NO: 160730 - DNA, 74 bp, Homo sapiens
ttctaaaatttccatagaatccctatggaatcatattcaagacaaggccactttatttcctgagaagtattaga

SEQ ID NO: 160731 - DNA, 73 bp, Homo sapiens
aaatttccatagaatccctatggaatcatattcaagacaaggccactttatttcctgagaagtattagaaata

SEQ ID NO: 160732 - DNA, 74 bp, Homo sapiens
gaatccctatggaatcatattcaagacaaggccactttatttcctgagaagtattagaaatattagaaagacgc

SEQ ID NO: 160733 - DNA, 77 bp, Homo sapiens
tcatattcaagacaaggccactttatttcctgagaagtattagaaatattagaaagacgctgcagaagtctgagtta

SEQ ID NO: 160734 - DNA, 73 bp, Homo sapiens
aagacaaggccactttatttcctgagaagtattagaaatattagaaagacgctgcagaagtctgagttaagaa

SEQ ID NO: 160735 - DNA, 74 bp, Homo sapiens
gccactttatttcctgagaagtattagaaatattagaaagacgctgcagaagtctgagttaagaacctaatcta

SEQ ID NO: 160736 - DNA, 78 bp, Homo sapiens
atattagaaagacgctgcagaagtctgagttaagaacctaatctataacagctcatttatcacactaagaagagaata

SEQ ID NO: 160737 - DNA, 79 bp, Homo sapiens
tgcagaagtctgagttaagaacctaatctataacagctcatttatcacactaagaagagaataagacggttcatgagat

SEQ ID NO: 160738 - DNA, 77 bp, Homo sapiens
atctataacagctcatttatcacactaagaagagaataagacggttcatgagattctgcttctttaaactaacataa

SEQ ID NO: 160739 - DNA, 75 bp, Homo sapiens
cactaagaagagaataagacggttcatgagattctgcttctttaaactaacataaactaaggatacatcaataga

SEQ ID NO: 160740 - DNA, 73 bp, Homo sapiens
gagaataagacggttcatgagattctgcttctttaaactaacataaactaaggatacatcaatagaaacaacc

SEQ ID NO: 160741 - DNA, 75 bp, Homo sapiens
acggttcatgagattctgcttctttaaactaacataaactaaggatacatcaatagaaacaacctacagatcaga

SEQ ID NO: 160742 - DNA, 69 bp, Homo sapiens
aaactaacataaactaaggatacatcaatagaaacaacctacagatcagaaaaagtttcctatgtggtt

SEQ ID NO: 160743 - DNA, 72 bp, Homo sapiens
aaactaaggatacatcaatagaaacaacctacagatcagaaaaagtttcctatgtggtttggaatgtgtcac

SEQ ID NO: 160744 - DNA, 72 bp, Homo sapiens
aaggatacatcaatagaaacaacctacagatcagaaaaagtttcctatgtggtttggaatgtgtcactttaa

SEQ ID NO: 160745 - DNA, 70 bp, Homo sapiens
agaaacaacctacagatcagaaaaagtttcctatgtggtttggaatgtgtcactttaattttattcactc

SEQ ID NO: 160746 - DNA, 69 bp, Homo sapiens
aacctacagatcagaaaaagtttcctatgtggtttggaatgtgtcactttaattttattcactctaact

SEQ ID NO: 160747 - DNA, 69 bp, Homo sapiens
tttcctatgtggtttggaatgtgtcactttaattttattcactctaactttattcattttaatgttgtt

SEQ ID NO: 160748 - DNA, 68 bp, Homo sapiens
ggtttggaatgtgtcactttaattttattcactctaactttattcattttaatgttgtttataaaata

SEQ ID NO: 160749 - DNA, 68 bp, Homo sapiens
cactttaattttattcactctaactttattcattttaatgttgtttataaaataactctattaggaca

SEQ ID NO: 160750 - DNA, 71 bp, Homo sapiens
ttattcactctaactttattcattttaatgttgtttataaaataactctattaggacagagactttgacta

SEQ ID NO: 160751 - DNA, 68 bp, Homo sapiens
actctaactttattcattttaatgttgtttataaaataactctattaggacagagactttgactattt

SEQ ID NO: 160752 - DNA, 75 bp, Homo sapiens
aaataactctattaggacagagactttgactattttaagtggtatcccagcacctgtaaggagatctggcatata

SEQ ID NO: 160753 - DNA, 77 bp, Homo sapiens
tattaggacagagactttgactattttaagtggtatcccagcacctgtaaggagatctggcatatagtagttcaata

SEQ ID NO: 160754 - DNA, 73 bp, Homo sapiens
actttgactattttaagtggtatcccagcacctgtaaggagatctggcatatagtagttcaataaatctttct

SEQ ID NO: 160755 - DNA, 75 bp, Homo sapiens
gactattttaagtggtatcccagcacctgtaaggagatctggcatatagtagttcaataaatctttcttcaataa

SEQ ID NO: 160756 - DNA, 78 bp, Homo sapiens
tatcccagcacctgtaaggagatctggcatatagtagttcaataaatctttcttcaataagtgaatgcacgtaagtat

SEQ ID NO: 160757 - DNA, 76 bp, Homo sapiens
cacctgtaaggagatctggcatatagtagttcaataaatctttcttcaataagtgaatgcacgtaagtatttagct

SEQ ID NO: 160758 - DNA, 78 bp, Homo sapiens
ggagatctggcatatagtagttcaataaatctttcttcaataagtgaatgcacgtaagtatttagcttcaaattcaga

SEQ ID NO: 160759 - DNA, 76 bp, Homo sapiens
ggcatatagtagttcaataaatctttcttcaataagtgaatgcacgtaagtatttagcttcaaattcagagataag

SEQ ID NO: 160760 - DNA, 74 bp, Homo sapiens
gttcaataaatctttcttcaataagtgaatgcacgtaagtatttagcttcaaattcagagataagtgaaagaat

SEQ ID NO: 160761 - DNA, 76 bp, Homo sapiens
tcttcaataagtgaatgcacgtaagtatttagcttcaaattcagagataagtgaaagaatttttctagcaaaagca

SEQ ID NO: 160762 - DNA, 73 bp, Homo sapiens
aataagtgaatgcacgtaagtatttagcttcaaattcagagataagtgaaagaatttttctagcaaaagcaaa

SEQ ID NO: 160763 - DNA, 72 bp, Homo sapiens
gcacgtaagtatttagcttcaaattcagagataagtgaaagaatttttctagcaaaagcaaaataatctaaa

SEQ ID NO: 160764 - DNA, 73 bp, Homo sapiens
tatttagcttcaaattcagagataagtgaaagaatttttctagcaaaagcaaaataatctaaacatttgtcta

SEQ ID NO: 160765 - DNA, 72 bp, Homo sapiens
tcagagataagtgaaagaatttttctagcaaaagcaaaataatctaaacatttgtctaattacctttttgca

SEQ ID NO: 160766 - DNA, 71 bp, Homo sapiens
ttttctagcaaaagcaaaataatctaaacatttgtctaattacctttttgcaaatctgtttcattgtgact

SEQ ID NO: 160767 - DNA, 70 bp, Homo sapiens
aaagcaaaataatctaaacatttgtctaattacctttttgcaaatctgtttcattgtgacttcttccaag

SEQ ID NO: 160768 - DNA, 73 bp, Homo sapiens
aatctaaacatttgtctaattacctttttgcaaatctgtttcattgtgacttcttccaagttagcactggcca

SEQ ID NO: 160769 - DNA, 72 bp, Homo sapiens
acatttgtctaattacctttttgcaaatctgtttcattgtgacttcttccaagttagcactggccagtaatt

SEQ ID NO: 160770 - DNA, 71 bp, Homo sapiens
ctaattacctttttgcaaatctgtttcattgtgacttcttccaagttagcactggccagtaatttctttat

SEQ ID NO: 160771 - DNA, 71 bp, Homo sapiens
caaatctgtttcattgtgacttcttccaagttagcactggccagtaatttctttattgtttcctttaactc

SEQ ID NO: 160772 - DNA, 70 bp, Homo sapiens
gtgacttcttccaagttagcactggccagtaatttctttattgtttcctttaactcttcatctgtagggg

SEQ ID NO: 160773 - DNA, 68 bp, Homo sapiens
ttagcactggccagtaatttctttattgtttcctttaactcttcatctgtagggggtttcttcaactt

SEQ ID NO: 160774 - DNA, 64 bp, Homo sapiens
ctttattgtttcctttaactcttcatctgtagggggtttcttcaactttttaattaaaggttca

SEQ ID NO: 160775 - DNA, 69 bp, Homo sapiens
tcctttaactcttcatctgtagggggtttcttcaactttttaattaaaggttcatcatctgaactatcc

SEQ ID NO: 160776 - DNA, 70 bp, Homo sapiens
ctgtagggggtttcttcaactttttaattaaaggttcatcatctgaactatcctcagactcactttctaa

SEQ ID NO: 160777 - DNA, 71 bp, Homo sapiens
ctttttaattaaaggttcatcatctgaactatcctcagactcactttctaaaagtaatataataataataa

SEQ ID NO: 160778 - DNA, 72 bp, Homo sapiens
tatgctatatctttaaagttgctgattaatgttatttctaacataccttttttggaactgttttgattcttc

SEQ ID NO: 160779 - DNA, 68 bp, Homo sapiens
ctttaaagttgctgattaatgttatttctaacataccttttttggaactgttttgattcttcttggtg

SEQ ID NO: 160780 - DNA, 75 bp, Homo sapiens
tgctgattaatgttatttctaacataccttttttggaactgttttgattcttcttggtggtgctgctatctgctt

SEQ ID NO: 160781 - DNA, 72 bp, Homo sapiens
gttatttctaacataccttttttggaactgttttgattcttcttggtggtgctgctatctgctttcttaaca

SEQ ID NO: 160782 - DNA, 72 bp, Homo sapiens
acataccttttttggaactgttttgattcttcttggtggtgctgctatctgctttcttaacattggcacttt

SEQ ID NO: 160783 - DNA, 74 bp, Homo sapiens
ttttggaactgttttgattcttcttggtggtgctgctatctgctttcttaacattggcacttttcacagatttt

SEQ ID NO: 160784 - DNA, 73 bp, Homo sapiens
aactgttttgattcttcttggtggtgctgctatctgctttcttaacattggcacttttcacagattttttact

SEQ ID NO: 160785 - DNA, 73 bp, Homo sapiens
attcttcttggtggtgctgctatctgctttcttaacattggcacttttcacagattttttacttttagaagta

SEQ ID NO: 160786 - DNA, 73 bp, Homo sapiens
gtggtgctgctatctgctttcttaacattggcacttttcacagattttttacttttagaagtagctttctgtt

SEQ ID NO: 160787 - DNA, 69 bp, Homo sapiens
tatctgctttcttaacattggcacttttcacagattttttacttttagaagtagctttctgtttaggtt

SEQ ID NO: 160788 - DNA, 67 bp, Homo sapiens
cattggcacttttcacagattttttacttttagaagtagctttctgtttaggtttttctcttttggc

SEQ ID NO: 160789 - DNA, 67 bp, Homo sapiens
gcacttttcacagattttttacttttagaagtagctttctgtttaggtttttctcttttggctgtct

SEQ ID NO: 160790 - DNA, 65 bp, Homo sapiens
tttttacttttagaagtagctttctgtttaggtttttctcttttggctgtcttttttggtggctg

SEQ ID NO: 160791 - DNA, 66 bp, Homo sapiens
cttttagaagtagctttctgtttaggtttttctcttttggctgtcttttttggtggctgttacaaa

SEQ ID NO: 160792 - DNA, 66 bp, Homo sapiens
gtagctttctgtttaggtttttctcttttggctgtcttttttggtggctgttacaaaagaaagtaa

SEQ ID NO: 160793 - DNA, 67 bp, Homo sapiens
taactctccccatggaaagaaatgatttaaaaatatagtaaaatattttacctcctcttcactttct

SEQ ID NO: 160794 - DNA, 72 bp, Homo sapiens
tggaaagaaatgatttaaaaatatagtaaaatattttacctcctcttcactttctttatcttcatcatctga

SEQ ID NO: 160795 - DNA, 71 bp, Homo sapiens
gatttaaaaatatagtaaaatattttacctcctcttcactttctttatcttcatcatctgaagactcttcc

SEQ ID NO: 160796 - DNA, 70 bp, Homo sapiens
tagtaaaatattttacctcctcttcactttctttatcttcatcatctgaagactcttccttgtttttctt

SEQ ID NO: 160797 - DNA, 74 bp, Homo sapiens
ttttacctcctcttcactttctttatcttcatcatctgaagactcttccttgtttttcttttcatcttcatcac

SEQ ID NO: 160798 - DNA, 78 bp, Homo sapiens
ctcttcactttctttatcttcatcatctgaagactcttccttgtttttcttttcatcttcatcactactagattcatc

SEQ ID NO: 160799 - DNA, 81 bp, Homo sapiens
tctttatcttcatcatctgaagactcttccttgtttttcttttcatcttcatcactactagattcatctgacagaatttca

SEQ ID NO: 160800 - DNA, 80 bp, Homo sapiens
ttcatcatctgaagactcttccttgtttttcttttcatcttcatcactactagattcatctgacagaatttcaggacatt

SEQ ID NO: 160801 - DNA, 75 bp, Homo sapiens
aagactcttccttgtttttcttttcatcttcatcactactagattcatctgacagaatttcaggacatttggttc

SEQ ID NO: 160802 - DNA, 76 bp, Homo sapiens
tgtttttcttttcatcttcatcactactagattcatctgacagaatttcaggacatttggttcgcttagccttcct

SEQ ID NO: 160803 - DNA, 80 bp, Homo sapiens
tttcatcttcatcactactagattcatctgacagaatttcaggacatttggttcgcttagccttccttgccattccagaa

SEQ ID NO: 160804 - DNA, 79 bp, Homo sapiens
ttcatcactactagattcatctgacagaatttcaggacatttggttcgcttagccttccttgccattccagaactgttc

SEQ ID NO: 160805 - DNA, 73 bp, Homo sapiens
attcatctgacagaatttcaggacatttggttcgcttagccttccttgccattccagaactgttccgttcctt

SEQ ID NO: 160806 - DNA, 69 bp, Homo sapiens
acagaatttcaggacatttggttcgcttagccttccttgccattccagaactgttccgttcctttttac

SEQ ID NO: 160807 - DNA, 69 bp, Homo sapiens
tttcaggacatttggttcgcttagccttccttgccattccagaactgttccgttcctttttactgcctt

SEQ ID NO: 160808 - DNA, 68 bp, Homo sapiens
ttcgcttagccttccttgccattccagaactgttccgttcctttttactgcctttgctacaagttttt

SEQ ID NO: 160809 - DNA, 66 bp, Homo sapiens
ccttccttgccattccagaactgttccgttcctttttactgcctttgctacaagtttttttagatt

SEQ ID NO: 160810 - DNA, 69 bp, Homo sapiens
ttgccattccagaactgttccgttcctttttactgcctttgctacaagtttttttagatttcggcaatg

SEQ ID NO: 160811 - DNA, 68 bp, Homo sapiens
aactgttccgttcctttttactgcctttgctacaagtttttttagatttcggcaatggctgcataaaa

SEQ ID NO: 160812 - DNA, 68 bp, Homo sapiens
cgttcctttttactgcctttgctacaagtttttttagatttcggcaatggctgcataaaaatttataa

SEQ ID NO: 160813 - DNA, 71 bp, Homo sapiens
gcctttgctacaagtttttttagatttcggcaatggctgcataaaaatttataaagataacaccaatgagg

SEQ ID NO: 160814 - DNA, 73 bp, Homo sapiens
aaaataaaaattgatcctcactttgccagaaggctttggatgcattaagaaattcaagatcctcttcactagt

SEQ ID NO: 160815 - DNA, 76 bp, Homo sapiens
aaattgatcctcactttgccagaaggctttggatgcattaagaaattcaagatcctcttcactagttcactattta

SEQ ID NO: 160816 - DNA, 77 bp, Homo sapiens
actttgccagaaggctttggatgcattaagaaattcaagatcctcttcactagttcactatttacacctgatctctc

SEQ ID NO: 160817 - DNA, 77 bp, Homo sapiens
aaggctttggatgcattaagaaattcaagatcctcttcactagttcactatttacacctgatctctccaaatcaaga

SEQ ID NO: 160818 - DNA, 79 bp, Homo sapiens
ttggatgcattaagaaattcaagatcctcttcactagttcactatttacacctgatctctccaaatcaagaacctcaca

SEQ ID NO: 160819 - DNA, 77 bp, Homo sapiens
aaattcaagatcctcttcactagttcactatttacacctgatctctccaaatcaagaacctcacagatgctctttaa

SEQ ID NO: 160820 - DNA, 79 bp, Homo sapiens
aagatcctcttcactagttcactatttacacctgatctctccaaatcaagaacctcacagatgctctttaacatggcat

SEQ ID NO: 160821 - DNA, 79 bp, Homo sapiens
tagttcactatttacacctgatctctccaaatcaagaacctcacagatgctctttaacatggcatttctaaatctgaaa

SEQ ID NO: 160822 - DNA, 78 bp, Homo sapiens
tatttacacctgatctctccaaatcaagaacctcacagatgctctttaacatggcatttctaaatctgaaacagaaaa

SEQ ID NO: 160823 - DNA, 76 bp, Homo sapiens
atctctccaaatcaagaacctcacagatgctctttaacatggcatttctaaatctgaaacagaaaatggaagaaac

SEQ ID NO: 160824 - DNA, 73 bp, Homo sapiens
aaatcaagaacctcacagatgctctttaacatggcatttctaaatctgaaacagaaaatggaagaaaccaagg

SEQ ID NO: 160825 - DNA, 68 bp, Homo sapiens
taaacttaaagcatattgatcaaaatacagtatttataaaaataacttactttttcaacatttcttcc

SEQ ID NO: 160826 - DNA, 68 bp, Homo sapiens
taaagcatattgatcaaaatacagtatttataaaaataacttactttttcaacatttcttccttcttt

SEQ ID NO: 160827 - DNA, 68 bp, Homo sapiens
tgatcaaaatacagtatttataaaaataacttactttttcaacatttcttccttctttttatattgga

SEQ ID NO: 160828 - DNA, 65 bp, Homo sapiens
cagtatttataaaaataacttactttttcaacatttcttccttctttttatattggacacttcct

SEQ ID NO: 160829 - DNA, 65 bp, Homo sapiens
aataacttactttttcaacatttcttccttctttttatattggacacttcctttttcaaatggaa

SEQ ID NO: 160830 - DNA, 69 bp, Homo sapiens
ttttcaacatttcttccttctttttatattggacacttcctttttcaaatggaaagccactgaactgac

SEQ ID NO: 160831 - DNA, 70 bp, Homo sapiens
ttcttccttctttttatattggacacttcctttttcaaatggaaagccactgaactgacccacattcttc

SEQ ID NO: 160832 - DNA, 70 bp, Homo sapiens
ctttttatattggacacttcctttttcaaatggaaagccactgaactgacccacattcttctttaatgag

SEQ ID NO: 160833 - DNA, 73 bp, Homo sapiens
tattggacacttcctttttcaaatggaaagccactgaactgacccacattcttctttaatgaggacacctgaa

SEQ ID NO: 160834 - DNA, 71 bp, Homo sapiens
tttttcaaatggaaagccactgaactgacccacattcttctttaatgaggacacctgaaaatgttccttat

SEQ ID NO: 160835 - DNA, 71 bp, Homo sapiens
aaatggaaagccactgaactgacccacattcttctttaatgaggacacctgaaaatgttccttattattaa

SEQ ID NO: 160836 - DNA, 72 bp, Homo sapiens
gccactgaactgacccacattcttctttaatgaggacacctgaaaatgttccttattattaatggtatttat

SEQ ID NO: 160837 - DNA, 70 bp, Homo sapiens
attgtgaagtaatatacaagtaggtttaaagtgtaaaaaggtcttacagtgcctggcctgttgtaaagca

SEQ ID NO: 160838 - DNA, 70 bp, Homo sapiens
taatatacaagtaggtttaaagtgtaaaaaggtcttacagtgcctggcctgttgtaaagcagtttgtgta

SEQ ID NO: 160839 - DNA, 69 bp, Homo sapiens
gtaggtttaaagtgtaaaaaggtcttacagtgcctggcctgttgtaaagcagtttgtgtagatttctaa

SEQ ID NO: 160840 - DNA, 71 bp, Homo sapiens
tgtaaaaaggtcttacagtgcctggcctgttgtaaagcagtttgtgtagatttctaagttcatcggttttc

SEQ ID NO: 160841 - DNA, 71 bp, Homo sapiens
aaggtcttacagtgcctggcctgttgtaaagcagtttgtgtagatttctaagttcatcggttttcttctta

SEQ ID NO: 160842 - DNA, 70 bp, Homo sapiens
agtgcctggcctgttgtaaagcagtttgtgtagatttctaagttcatcggttttcttcttacttagaaaa

SEQ ID NO: 160843 - DNA, 68 bp, Homo sapiens
cctgttgtaaagcagtttgtgtagatttctaagttcatcggttttcttcttacttagaaaaaaatgta

SEQ ID NO: 160844 - DNA, 71 bp, Homo sapiens
gcagtttgtgtagatttctaagttcatcggttttcttcttacttagaaaaaaatgtatcctctcaatttca

SEQ ID NO: 160845 - DNA, 69 bp, Homo sapiens
tttctaagttcatcggttttcttcttacttagaaaaaaatgtatcctctcaatttcacaaagtttctgc

SEQ ID NO: 160846 - DNA, 67 bp, Homo sapiens
catcggttttcttcttacttagaaaaaaatgtatcctctcaatttcacaaagtttctgcccctttcc

SEQ ID NO: 160847 - DNA, 66 bp, Homo sapiens
gttttcttcttacttagaaaaaaatgtatcctctcaatttcacaaagtttctgcccctttcctggg

SEQ ID NO: 160848 - DNA, 64 bp, Homo sapiens
acttagaaaaaaatgtatcctctcaatttcacaaagtttctgcccctttcctggggaaaaaaaa

SEQ ID NO: 160849 - DNA, 71 bp, Homo sapiens
caaatttaggcactttcaccacaaaatgaaaggaagctagaataaacttaccttgtgcaattgtaaatggc

SEQ ID NO: 160850 - DNA, 73 bp, Homo sapiens
tttcaccacaaaatgaaaggaagctagaataaacttaccttgtgcaattgtaaatggctctctctgtaaggaa

SEQ ID NO: 160851 - DNA, 74 bp, Homo sapiens
aaatgaaaggaagctagaataaacttaccttgtgcaattgtaaatggctctctctgtaaggaagagacttgcat

SEQ ID NO: 160852 - DNA, 77 bp, Homo sapiens
agctagaataaacttaccttgtgcaattgtaaatggctctctctgtaaggaagagacttgcattgtcaacctctcta

SEQ ID NO: 160853 - DNA, 74 bp, Homo sapiens
ataaacttaccttgtgcaattgtaaatggctctctctgtaaggaagagacttgcattgtcaacctctctacttt

SEQ ID NO: 160854 - DNA, 74 bp, Homo sapiens
ccttgtgcaattgtaaatggctctctctgtaaggaagagacttgcattgtcaacctctctacttttttcttttc

SEQ ID NO: 160855 - DNA, 73 bp, Homo sapiens
ttgtaaatggctctctctgtaaggaagagacttgcattgtcaacctctctacttttttcttttccctcttgcc

SEQ ID NO: 160856 - DNA, 75 bp, Homo sapiens
tctctctgtaaggaagagacttgcattgtcaacctctctacttttttcttttccctcttgccttccacgatgaga

SEQ ID NO: 160857 - DNA, 72 bp, Homo sapiens
aagagacttgcattgtcaacctctctacttttttcttttccctcttgccttccacgatgagactcttttcta

SEQ ID NO: 160858 - DNA, 69 bp, Homo sapiens
attgtcaacctctctacttttttcttttccctcttgccttccacgatgagactcttttctagaaattaa

SEQ ID NO: 160859 - DNA, 67 bp, Homo sapiens
acctctctacttttttcttttccctcttgccttccacgatgagactcttttctagaaattaatttag

SEQ ID NO: 160860 - DNA, 68 bp, Homo sapiens
tttcttttccctcttgccttccacgatgagactcttttctagaaattaatttagtatttcttaattaa

SEQ ID NO: 160861 - DNA, 66 bp, Homo sapiens
aaaaacttcggtctgaaaaattcatcagttgggatgcgactccccccacctttttcctcctcctcc

SEQ ID NO: 160862 - DNA, 70 bp, Homo sapiens
tcctcctcctcgtcgtcctcgtcctcttcctcctcgctctcctctctgggaccgggcatttcgggttctt

SEQ ID NO: 160863 - DNA, 71 bp, Homo sapiens
tcctcgtcgtcctcgtcctcttcctcctcgctctcctctctgggaccgggcatttcgggttctttctcgga

SEQ ID NO: 160864 - DNA, 70 bp, Homo sapiens
gtcctcttcctcctcgctctcctctctgggaccgggcatttcgggttctttctcggacgcgggctgggtg

SEQ ID NO: 160865 - DNA, 68 bp, Homo sapiens
cttcctcctcgctctcctctctgggaccgggcatttcgggttctttctcggacgcgggctgggtgggg

SEQ ID NO: 160866 - DNA, 66 bp, Homo sapiens
tctcctctctgggaccgggcatttcgggttctttctcggacgcgggctgggtgggggttccctccc

SEQ ID NO: 160867 - DNA, 63 bp, Homo sapiens
ctgggaccgggcatttcgggttctttctcggacgcgggctgggtgggggttccctccccctcc

SEQ ID NO: 160868 - DNA, 65 bp, Homo sapiens
atttcgggttctttctcggacgcgggctgggtgggggttccctccccctccgcagcaggggccga

SEQ ID NO: 160869 - DNA, 71 bp, Homo sapiens
tttctcggacgcgggctgggtgggggttccctccccctccgcagcaggggccgaggcggacatgctgtgaa

SEQ ID NO: 160870 - DNA, 73 bp, Homo sapiens
gggctgggtgggggttccctccccctccgcagcaggggccgaggcggacatgctgtgaacctgcatgcgggaa

SEQ ID NO: 160871 - DNA, 73 bp, Homo sapiens
ggggttccctccccctccgcagcaggggccgaggcggacatgctgtgaacctgcatgcgggaagaaagccgga

SEQ ID NO: 160872 - DNA, 75 bp, Homo sapiens
tccccctccgcagcaggggccgaggcggacatgctgtgaacctgcatgcgggaagaaagccggacgtctcggtcc

SEQ ID NO: 160873 - DNA, 67 bp, Homo sapiens
ccgcggcaggggcgaccgggcctccggcgtcccgaagcagcccttaccgcggatttcggccgccgcg

SEQ ID NO: 160874 - DNA, 70 bp, Homo sapiens
gcgaccgggcctccggcgtcccgaagcagcccttaccgcggatttcggccgccgcgggcctggcacgcga

SEQ ID NO: 160875 - DNA, 71 bp, Homo sapiens
ctccggcgtcccgaagcagcccttaccgcggatttcggccgccgcgggcctggcacgcgagggcacgagga

SEQ ID NO: 160876 - DNA, 71 bp, Homo sapiens
gtcccgaagcagcccttaccgcggatttcggccgccgcgggcctggcacgcgagggcacgaggaggttctg

SEQ ID NO: 160877 - DNA, 70 bp, Homo sapiens
agcccttaccgcggatttcggccgccgcgggcctggcacgcgagggcacgaggaggttctgggaggcggc

SEQ ID NO: 160878 - DNA, 72 bp, Homo sapiens
gatttcggccgccgcgggcctggcacgcgagggcacgaggaggttctgggaggcggcggcggccgacgccga

SEQ ID NO: 160879 - DNA, 71 bp, Homo sapiens
ccgccgcgggcctggcacgcgagggcacgaggaggttctgggaggcggcggcggccgacgccgaggagaag

SEQ ID NO: 160880 - DNA, 74 bp, Homo sapiens
tggcacgcgagggcacgaggaggttctgggaggcggcggcggccgacgccgaggagaaggcgcgcgggccgctg

SEQ ID NO: 160881 - DNA, 74 bp, Homo sapiens
gggcacgaggaggttctgggaggcggcggcggccgacgccgaggagaaggcgcgcgggccgctgtctggcgtga

SEQ ID NO: 160882 - DNA, 74 bp, Homo sapiens
aggaggttctgggaggcggcggcggccgacgccgaggagaaggcgcgcgggccgctgtctggcgtgacgctcgc

SEQ ID NO: 160883 - DNA, 77 bp, Homo sapiens
aggcggcggcggccgacgccgaggagaaggcgcgcgggccgctgtctggcgtgacgctcgcgccgcgcgctcggctc

SEQ ID NO: 160884 - DNA, 78 bp, Homo sapiens
ggccgacgccgaggagaaggcgcgcgggccgctgtctggcgtgacgctcgcgccgcgcgctcggctccccagaatcaa

SEQ ID NO: 160885 - DNA, 77 bp, Homo sapiens
cgaggagaaggcgcgcgggccgctgtctggcgtgacgctcgcgccgcgcgctcggctccccagaatcaacaagattt

SEQ ID NO: 160886 - DNA, 76 bp, Homo sapiens
aaggcgcgcgggccgctgtctggcgtgacgctcgcgccgcgcgctcggctccccagaatcaacaagattttcaaaa

SEQ ID NO: 160887 - DNA, 76 bp, Homo sapiens
gctgtctggcgtgacgctcgcgccgcgcgctcggctccccagaatcaacaagattttcaaaatggcggttcgggaa

SEQ ID NO: 160888 - DNA, 75 bp, Homo sapiens
tggcgtgacgctcgcgccgcgcgctcggctccccagaatcaacaagattttcaaaatggcggttcgggaaggaga

SEQ ID NO: 160889 - DNA, 72 bp, Homo sapiens
ctcgcgccgcgcgctcggctccccagaatcaacaagattttcaaaatggcggttcgggaaggagagcgggaa

SEQ ID NO: 160890 - DNA, 73 bp, Homo sapiens
tcggctccccagaatcaacaagattttcaaaatggcggttcgggaaggagagcgggaatgcggcgaccaatca

SEQ ID NO: 160891 - DNA, 72 bp, Homo sapiens
agaatcaacaagattttcaaaatggcggttcgggaaggagagcgggaatgcggcgaccaatcagggccgcga

SEQ ID NO: 160892 - DNA, 71 bp, Homo sapiens
agattttcaaaatggcggttcgggaaggagagcgggaatgcggcgaccaatcagggccgcgagctgggagt

SEQ ID NO: 160893 - DNA, 84 bp, Homo sapiens
cggcgggcggtgatgtcagggctggtgctgatgctggcggcgcggtgcattgtgggcagctccccgctctgccgctgccgccgc

SEQ ID NO: 160894 - DNA, 85 bp, Homo sapiens
tgatgtcagggctggtgctgatgctggcggcgcggtgcattgtgggcagctccccgctctgccgctgccgccgccgtcgcccaag

SEQ ID NO: 160895 - DNA, 82 bp, Homo sapiens
tggtgctgatgctggcggcgcggtgcattgtgggcagctccccgctctgccgctgccgccgccgtcgcccaaggaggatcgg

SEQ ID NO: 160896 - DNA, 78 bp, Homo sapiens
atgctggcggcgcggtgcattgtgggcagctccccgctctgccgctgccgccgccgtcgcccaaggaggatcggggcc

SEQ ID NO: 160897 - DNA, 73 bp, Homo sapiens
cggtgcattgtgggcagctccccgctctgccgctgccgccgccgtcgcccaaggaggatcggggccgggccgg

SEQ ID NO: 160898 - DNA, 73 bp, Homo sapiens
gcagctccccgctctgccgctgccgccgccgtcgcccaaggaggatcggggccgggccgggccgggatgatcc

SEQ ID NO: 160899 - DNA, 71 bp, Homo sapiens
gctctgccgctgccgccgccgtcgcccaaggaggatcggggccgggccgggccgggatgatccgggtcgga

SEQ ID NO: 160900 - DNA, 67 bp, Homo sapiens
ctgccgccgccgtcgcccaaggaggatcggggccgggccgggccgggatgatccgggtcggaaggcc

SEQ ID NO: 160901 - DNA, 66 bp, Homo sapiens
ccgccgtcgcccaaggaggatcggggccgggccgggccgggatgatccgggtcggaaggccgccgc

SEQ ID NO: 160902 - DNA, 65 bp, Homo sapiens
aaggaggatcggggccgggccgggccgggatgatccgggtcggaaggccgccgccgccggaggga

SEQ ID NO: 160903 - DNA, 66 bp, Homo sapiens
gccgggccgggccgggatgatccgggtcggaaggccgccgccgccggagggagcgggtcacccaac

SEQ ID NO: 160904 - DNA, 69 bp, Homo sapiens
cgggccgggatgatccgggtcggaaggccgccgccgccggagggagcgggtcacccaacgccgcactga

SEQ ID NO: 160905 - DNA, 69 bp, Homo sapiens
atgatccgggtcggaaggccgccgccgccggagggagcgggtcacccaacgccgcactgagccgccccc

SEQ ID NO: 160906 - DNA, 68 bp, Homo sapiens
gtcggaaggccgccgccgccggagggagcgggtcacccaacgccgcactgagccgcccccgccccgcc

SEQ ID NO: 160907 - DNA, 64 bp, Homo sapiens
ccgccggagggagcgggtcacccaacgccgcactgagccgcccccgccccgccccggccccggg

SEQ ID NO: 160908 - DNA, 66 bp, Homo sapiens
agggagcgggtcacccaacgccgcactgagccgcccccgccccgccccggccccgggggatgcgcc

SEQ ID NO: 160909 - DNA, 71 bp, Homo sapiens
tcacccaacgccgcactgagccgcccccgccccgccccggccccgggggatgcgccgccccgagctgctgc

SEQ ID NO: 160910 - DNA, 70 bp, Homo sapiens
cgccgcactgagccgcccccgccccgccccggccccgggggatgcgccgccccgagctgctgcctccgcc

SEQ ID NO: 160911 - DNA, 77 bp, Homo sapiens
gccccggccccgggggatgcgccgccccgagctgctgcctccgccgccgccgcagccgcagccgcagcgggcacaga

SEQ ID NO: 160912 - DNA, 80 bp, Homo sapiens
cccgggggatgcgccgccccgagctgctgcctccgccgccgccgcagccgcagccgcagcgggcacagagcaggtgaggc

SEQ ID NO: 160913 - DNA, 80 bp, Homo sapiens
atgcgccgccccgagctgctgcctccgccgccgccgcagccgcagccgcagcgggcacagagcaggtgaggcggggcggg

SEQ ID NO: 160914 - DNA, 77 bp, Homo sapiens
agctgctgcctccgccgccgccgcagccgcagccgcagcgggcacagagcaggtgaggcggggcggggcgggccggg

SEQ ID NO: 160915 - DNA, 73 bp, Homo sapiens
tccgccgccgccgcagccgcagccgcagcgggcacagagcaggtgaggcggggcggggcgggccggggtcggg

SEQ ID NO: 160916 - DNA, 72 bp, Homo sapiens
ggtggtcctgggtccgcagcccgccctcacaggccctcctcactcccctaggtagatggccccctcagggca

SEQ ID NO: 160917 - DNA, 73 bp, Homo sapiens
tccgcagcccgccctcacaggccctcctcactcccctaggtagatggccccctcagggcaggcccggcggaca

SEQ ID NO: 160918 - DNA, 70 bp, Homo sapiens
ctcacaggccctcctcactcccctaggtagatggccccctcagggcaggcccggcggacacccctccctc

SEQ ID NO: 160919 - DNA, 71 bp, Homo sapiens
ctcctcactcccctaggtagatggccccctcagggcaggcccggcggacacccctccctctggctggcgga

SEQ ID NO: 160920 - DNA, 74 bp, Homo sapiens
ccctaggtagatggccccctcagggcaggcccggcggacacccctccctctggctggcggatgcagtgcctagc

SEQ ID NO: 160921 - DNA, 75 bp, Homo sapiens
ggtagatggccccctcagggcaggcccggcggacacccctccctctggctggcggatgcagtgcctagcggccgc

SEQ ID NO: 160922 - DNA, 74 bp, Homo sapiens
tcagggcaggcccggcggacacccctccctctggctggcggatgcagtgcctagcggccgcccttaaggacgaa

SEQ ID NO: 160923 - DNA, 73 bp, Homo sapiens
ccggcggacacccctccctctggctggcggatgcagtgcctagcggccgcccttaaggacgaaaccaacatga

SEQ ID NO: 160924 - DNA, 73 bp, Homo sapiens
ggacacccctccctctggctggcggatgcagtgcctagcggccgcccttaaggacgaaaccaacatgagtggg

SEQ ID NO: 160925 - DNA, 74 bp, Homo sapiens
ccctctggctggcggatgcagtgcctagcggccgcccttaaggacgaaaccaacatgagtgggggaggggagca

SEQ ID NO: 160926 - DNA, 74 bp, Homo sapiens
atgcagtgcctagcggccgcccttaaggacgaaaccaacatgagtgggggaggggagcaggccgacatcctgcc

SEQ ID NO: 160927 - DNA, 71 bp, Homo sapiens
ctagcggccgcccttaaggacgaaaccaacatgagtgggggaggggagcaggccgacatcctgccggccaa

SEQ ID NO: 160928 - DNA, 71 bp, Homo sapiens
ccttaaggacgaaaccaacatgagtgggggaggggagcaggccgacatcctgccggccaactacgtggtca

SEQ ID NO: 160929 - DNA, 74 bp, Homo sapiens
gaaaccaacatgagtgggggaggggagcaggccgacatcctgccggccaactacgtggtcaaggatcgctggaa

SEQ ID NO: 160930 - DNA, 73 bp, Homo sapiens
aacatgagtgggggaggggagcaggccgacatcctgccggccaactacgtggtcaaggatcgctggaaggtgg

SEQ ID NO: 160931 - DNA, 74 bp, Homo sapiens
aggggagcaggccgacatcctgccggccaactacgtggtcaaggatcgctggaaggtggtgagtgagtgacccg

SEQ ID NO: 160932 - DNA, 74 bp, Homo sapiens
aggccgacatcctgccggccaactacgtggtcaaggatcgctggaaggtggtgagtgagtgacccggcgggaca

SEQ ID NO: 160933 - DNA, 73 bp, Homo sapiens
atcctgccggccaactacgtggtcaaggatcgctggaaggtggtgagtgagtgacccggcgggacagagggag

SEQ ID NO: 160934 - DNA, 74 bp, Homo sapiens
tgttcagcctgatccctgagcaccccctatcccctcatcttcatagctgaaaaagatcgggggcgggggctttg

SEQ ID NO: 160935 - DNA, 75 bp, Homo sapiens
tgatccctgagcaccccctatcccctcatcttcatagctgaaaaagatcgggggcgggggctttggtgagatcta

SEQ ID NO: 160936 - DNA, 73 bp, Homo sapiens
ctgagcaccccctatcccctcatcttcatagctgaaaaagatcgggggcgggggctttggtgagatctacgag

SEQ ID NO: 160937 - DNA, 77 bp, Homo sapiens
tatcccctcatcttcatagctgaaaaagatcgggggcgggggctttggtgagatctacgaggccatggacctgctga

SEQ ID NO: 160938 - DNA, 75 bp, Homo sapiens
ttcatagctgaaaaagatcgggggcgggggctttggtgagatctacgaggccatggacctgctgaccagggagaa

SEQ ID NO: 160939 - DNA, 74 bp, Homo sapiens
ctgaaaaagatcgggggcgggggctttggtgagatctacgaggccatggacctgctgaccagggagaatgtggc

SEQ ID NO: 160940 - DNA, 76 bp, Homo sapiens
gggcgggggctttggtgagatctacgaggccatggacctgctgaccagggagaatgtggccctcaaggtggagtca

SEQ ID NO: 160941 - DNA, 80 bp, Homo sapiens
tttggtgagatctacgaggccatggacctgctgaccagggagaatgtggccctcaaggtggagtcagcccagcagcccaa

SEQ ID NO: 160942 - DNA, 80 bp, Homo sapiens
agatctacgaggccatggacctgctgaccagggagaatgtggccctcaaggtggagtcagcccagcagcccaagcaggtc

SEQ ID NO: 160943 - DNA, 80 bp, Homo sapiens
ccatggacctgctgaccagggagaatgtggccctcaaggtggagtcagcccagcagcccaagcaggtcctcaagatggag

SEQ ID NO: 160944 - DNA, 79 bp, Homo sapiens
acctgctgaccagggagaatgtggccctcaaggtggagtcagcccagcagcccaagcaggtcctcaagatggaggtggc

SEQ ID NO: 160945 - DNA, 78 bp, Homo sapiens
agaatgtggccctcaaggtggagtcagcccagcagcccaagcaggtcctcaagatggaggtggccgtgctcaagaagt

SEQ ID NO: 160946 - DNA, 78 bp, Homo sapiens
cctcaaggtggagtcagcccagcagcccaagcaggtcctcaagatggaggtggccgtgctcaagaagttgcaaggttc

SEQ ID NO: 160947 - DNA, 77 bp, Homo sapiens
aggtggagtcagcccagcagcccaagcaggtcctcaagatggaggtggccgtgctcaagaagttgcaaggttcgggc

SEQ ID NO: 160948 - DNA, 75 bp, Homo sapiens
ccagcagcccaagcaggtcctcaagatggaggtggccgtgctcaagaagttgcaaggttcgggcctcgggcaggg

SEQ ID NO: 160949 - DNA, 73 bp, Homo sapiens
cccaagcaggtcctcaagatggaggtggccgtgctcaagaagttgcaaggttcgggcctcgggcagggggatg

SEQ ID NO: 160950 - DNA, 73 bp, Homo sapiens
tcctcaagatggaggtggccgtgctcaagaagttgcaaggttcgggcctcgggcagggggatgggaaggaaga

SEQ ID NO: 160951 - DNA, 72 bp, Homo sapiens
atcttagggttggaaatgaggaagaaagagtaagagctggaagacctatgtctgtgcccctcagggaaggac

SEQ ID NO: 160952 - DNA, 77 bp, Homo sapiens
aatgaggaagaaagagtaagagctggaagacctatgtctgtgcccctcagggaaggaccatgtgtgcaggttcattg

SEQ ID NO: 160953 - DNA, 79 bp, Homo sapiens
aagaaagagtaagagctggaagacctatgtctgtgcccctcagggaaggaccatgtgtgcaggttcattggctgtggca

SEQ ID NO: 160954 - DNA, 80 bp, Homo sapiens
taagagctggaagacctatgtctgtgcccctcagggaaggaccatgtgtgcaggttcattggctgtggcaggaacgagaa

SEQ ID NO: 160955 - DNA, 78 bp, Homo sapiens
ctatgtctgtgcccctcagggaaggaccatgtgtgcaggttcattggctgtggcaggaacgagaagtttaactatgta

SEQ ID NO: 160956 - DNA, 81 bp, Homo sapiens
tctgtgcccctcagggaaggaccatgtgtgcaggttcattggctgtggcaggaacgagaagtttaactatgtagtgatgca

SEQ ID NO: 160957 - DNA, 80 bp, Homo sapiens
agggaaggaccatgtgtgcaggttcattggctgtggcaggaacgagaagtttaactatgtagtgatgcagctccaggtga

SEQ ID NO: 160958 - DNA, 79 bp, Homo sapiens
accatgtgtgcaggttcattggctgtggcaggaacgagaagtttaactatgtagtgatgcagctccaggtgagtccccg

SEQ ID NO: 160959 - DNA, 77 bp, Homo sapiens
aggttcattggctgtggcaggaacgagaagtttaactatgtagtgatgcagctccaggtgagtccccgtggcccatc

SEQ ID NO: 160960 - DNA, 77 bp, Homo sapiens
ggctgtggcaggaacgagaagtttaactatgtagtgatgcagctccaggtgagtccccgtggcccatcctcgctccc

SEQ ID NO: 160961 - DNA, 75 bp, Homo sapiens
aacgagaagtttaactatgtagtgatgcagctccaggtgagtccccgtggcccatcctcgctcccctctctaaga

SEQ ID NO: 160962 - DNA, 77 bp, Homo sapiens
gtttaactatgtagtgatgcagctccaggtgagtccccgtggcccatcctcgctcccctctctaagagcttgggctg

SEQ ID NO: 160963 - DNA, 73 bp, Homo sapiens
ctgggatgatggctgagggtgagtctaccccccacctccacccccatgcagggccggaacctggccgacctgc

SEQ ID NO: 160964 - DNA, 71 bp, Homo sapiens
ctgagggtgagtctaccccccacctccacccccatgcagggccggaacctggccgacctgcgccgtagcca

SEQ ID NO: 160965 - DNA, 70 bp, Homo sapiens
agtctaccccccacctccacccccatgcagggccggaacctggccgacctgcgccgtagccagccgcgag

SEQ ID NO: 160966 - DNA, 77 bp, Homo sapiens
ctccacccccatgcagggccggaacctggccgacctgcgccgtagccagccgcgaggcaccttcacgctgagcacca

SEQ ID NO: 160967 - DNA, 79 bp, Homo sapiens
atgcagggccggaacctggccgacctgcgccgtagccagccgcgaggcaccttcacgctgagcaccacattgcggctgg

SEQ ID NO: 160968 - DNA, 81 bp, Homo sapiens
ggaacctggccgacctgcgccgtagccagccgcgaggcaccttcacgctgagcaccacattgcggctgggcaagcagatct

SEQ ID NO: 160969 - DNA, 84 bp, Homo sapiens
cgacctgcgccgtagccagccgcgaggcaccttcacgctgagcaccacattgcggctgggcaagcagatcttggagtccatcga

SEQ ID NO: 160970 - DNA, 84 bp, Homo sapiens
ccgtagccagccgcgaggcaccttcacgctgagcaccacattgcggctgggcaagcagatcttggagtccatcgaggccatcca

SEQ ID NO: 160971 - DNA, 84 bp, Homo sapiens
agccgcgaggcaccttcacgctgagcaccacattgcggctgggcaagcagatcttggagtccatcgaggccatccactctgtgg

SEQ ID NO: 160972 - DNA, 84 bp, Homo sapiens
accttcacgctgagcaccacattgcggctgggcaagcagatcttggagtccatcgaggccatccactctgtgggcttcctgcac

SEQ ID NO: 160973 - DNA, 86 bp, Homo sapiens
ctgagcaccacattgcggctgggcaagcagatcttggagtccatcgaggccatccactctgtgggcttcctgcaccgtgacatcaa

SEQ ID NO: 160974 - DNA, 85 bp, Homo sapiens
acattgcggctgggcaagcagatcttggagtccatcgaggccatccactctgtgggcttcctgcaccgtgacatcaagcctgtga

SEQ ID NO: 160975 - DNA, 84 bp, Homo sapiens
ctgggcaagcagatcttggagtccatcgaggccatccactctgtgggcttcctgcaccgtgacatcaagcctgtgagtactgcc

SEQ ID NO: 160976 - DNA, 81 bp, Homo sapiens
agatcttggagtccatcgaggccatccactctgtgggcttcctgcaccgtgacatcaagcctgtgagtactgcccccacac

SEQ ID NO: 160977 - DNA, 80 bp, Homo sapiens
atcgaggccatccactctgtgggcttcctgcaccgtgacatcaagcctgtgagtactgcccccacacgcctctctgttcc

SEQ ID NO: 160978 - DNA, 77 bp, Homo sapiens
agctggggttggggcccccagagctcacagctgctgtctcccccagtcaaactttgccatgggcaggctgccctcca

SEQ ID NO: 160979 - DNA, 78 bp, Homo sapiens
tggggcccccagagctcacagctgctgtctcccccagtcaaactttgccatgggcaggctgccctccacctacaggaa

SEQ ID NO: 160980 - DNA, 83 bp, Homo sapiens
agagctcacagctgctgtctcccccagtcaaactttgccatgggcaggctgccctccacctacaggaagtgctatatgctgga

SEQ ID NO: 160981 - DNA, 80 bp, Homo sapiens
acagctgctgtctcccccagtcaaactttgccatgggcaggctgccctccacctacaggaagtgctatatgctggacttc

SEQ ID NO: 160982 - DNA, 76 bp, Homo sapiens
ccccagtcaaactttgccatgggcaggctgccctccacctacaggaagtgctatatgctggacttcgggctggccc

SEQ ID NO: 160983 - DNA, 77 bp, Homo sapiens
aaactttgccatgggcaggctgccctccacctacaggaagtgctatatgctggacttcgggctggcccggcagtaca

SEQ ID NO: 160984 - DNA, 77 bp, Homo sapiens
atgggcaggctgccctccacctacaggaagtgctatatgctggacttcgggctggcccggcagtacaccaacaccac

SEQ ID NO: 160985 - DNA, 74 bp, Homo sapiens
ggctgccctccacctacaggaagtgctatatgctggacttcgggctggcccggcagtacaccaacaccacgggg

SEQ ID NO: 160986 - DNA, 76 bp, Homo sapiens
tacaggaagtgctatatgctggacttcgggctggcccggcagtacaccaacaccacgggggatgtgcggcccgtga

SEQ ID NO: 160987 - DNA, 74 bp, Homo sapiens
aagtgctatatgctggacttcgggctggcccggcagtacaccaacaccacgggggatgtgcggcccgtgagtac

SEQ ID NO: 160988 - DNA, 71 bp, Homo sapiens
tgctggacttcgggctggcccggcagtacaccaacaccacgggggatgtgcggcccgtgagtaccgtcggg

SEQ ID NO: 160989 - DNA, 68 bp, Homo sapiens
cgggctggcccggcagtacaccaacaccacgggggatgtgcggcccgtgagtaccgtcggggcgggga

SEQ ID NO: 160990 - DNA, 69 bp, Homo sapiens
cggcagtacaccaacaccacgggggatgtgcggcccgtgagtaccgtcggggcggggaggacagtggag

SEQ ID NO: 160991 - DNA, 75 bp, Homo sapiens
agggttgagaggtggctgaggtgagggcatggtgggtgacgttcttggtggtctcccttctgcagcctcggaatg

SEQ ID NO: 160992 - DNA, 75 bp, Homo sapiens
tggctgaggtgagggcatggtgggtgacgttcttggtggtctcccttctgcagcctcggaatgtggccgggtttc

SEQ ID NO: 160993 - DNA, 73 bp, Homo sapiens
tgagggcatggtgggtgacgttcttggtggtctcccttctgcagcctcggaatgtggccgggtttcgaggaac

SEQ ID NO: 160994 - DNA, 71 bp, Homo sapiens
tgggtgacgttcttggtggtctcccttctgcagcctcggaatgtggccgggtttcgaggaacggttcgcta

SEQ ID NO: 160995 - DNA, 74 bp, Homo sapiens
ttcttggtggtctcccttctgcagcctcggaatgtggccgggtttcgaggaacggttcgctatgcctcagtcaa

SEQ ID NO: 160996 - DNA, 75 bp, Homo sapiens
ctcccttctgcagcctcggaatgtggccgggtttcgaggaacggttcgctatgcctcagtcaatgcccacaagaa

SEQ ID NO: 160997 - DNA, 74 bp, Homo sapiens
ttctgcagcctcggaatgtggccgggtttcgaggaacggttcgctatgcctcagtcaatgcccacaagaaccgg

SEQ ID NO: 160998 - DNA, 72 bp, Homo sapiens
aatgtggccgggtttcgaggaacggttcgctatgcctcagtcaatgcccacaagaaccgggtgagtggcaaa

SEQ ID NO: 160999 - DNA, 74 bp, Homo sapiens
ggtttcgaggaacggttcgctatgcctcagtcaatgcccacaagaaccgggtgagtggcaaagcccgggatgca

SEQ ID NO: 161000 - DNA, 76 bp, Homo sapiens
aggaacggttcgctatgcctcagtcaatgcccacaagaaccgggtgagtggcaaagcccgggatgcaggatgtgga

SEQ ID NO: 161001 - DNA, 77 bp, Homo sapiens
tcgctatgcctcagtcaatgcccacaagaaccgggtgagtggcaaagcccgggatgcaggatgtggaggtgggaggg

SEQ ID NO: 161002 - DNA, 75 bp, Homo sapiens
tcagtcaatgcccacaagaaccgggtgagtggcaaagcccgggatgcaggatgtggaggtgggaggggcaaggtc

SEQ ID NO: 161003 - DNA, 73 bp, Homo sapiens
attcccagggaaggacctgagagctgcaggtgactccctccccccacctccaggagatgggccgccacgacga

SEQ ID NO: 161004 - DNA, 73 bp, Homo sapiens
aaggacctgagagctgcaggtgactccctccccccacctccaggagatgggccgccacgacgacctgtggtcc

SEQ ID NO: 161005 - DNA, 74 bp, Homo sapiens
agagctgcaggtgactccctccccccacctccaggagatgggccgccacgacgacctgtggtccctcttctaca

SEQ ID NO: 161006 - DNA, 72 bp, Homo sapiens
ctccctccccccacctccaggagatgggccgccacgacgacctgtggtccctcttctacatgctggtggagt

SEQ ID NO: 161007 - DNA, 75 bp, Homo sapiens
tccccccacctccaggagatgggccgccacgacgacctgtggtccctcttctacatgctggtggagtttgcagtg

SEQ ID NO: 161008 - DNA, 78 bp, Homo sapiens
aggagatgggccgccacgacgacctgtggtccctcttctacatgctggtggagtttgcagtgggccagctgccctgga

SEQ ID NO: 161009 - DNA, 80 bp, Homo sapiens
gtggagtttgcagtgggccagctgccctggaggaagatcaaggacaaggtgagccccaggcagctgggtctgaggtggca

SEQ ID NO: 161010 - DNA, 80 bp, Homo sapiens
tttgcagtgggccagctgccctggaggaagatcaaggacaaggtgagccccaggcagctgggtctgaggtggcagaagga

SEQ ID NO: 161011 - DNA, 79 bp, Homo sapiens
aaggtgagccccaggcagctgggtctgaggtggcagaaggagtgtcagggcagctgggactccatctccctgtggcctc

SEQ ID NO: 161012 - DNA, 78 bp, Homo sapiens
agtgtcagggcagctgggactccatctccctgtggcctcttgcctccaggaacaggtagggatgatcaaggagaagta

SEQ ID NO: 161013 - DNA, 78 bp, Homo sapiens
agctgggactccatctccctgtggcctcttgcctccaggaacaggtagggatgatcaaggagaagtatgagcaccgga

SEQ ID NO: 161014 - DNA, 81 bp, Homo sapiens
actccatctccctgtggcctcttgcctccaggaacaggtagggatgatcaaggagaagtatgagcaccggatgctgctgaa

SEQ ID NO: 161015 - DNA, 84 bp, Homo sapiens
tggcctcttgcctccaggaacaggtagggatgatcaaggagaagtatgagcaccggatgctgctgaagcacatgccgtcagagt

SEQ ID NO: 161016 - DNA, 82 bp, Homo sapiens
ctccaggaacaggtagggatgatcaaggagaagtatgagcaccggatgctgctgaagcacatgccgtcagagttccacctct

SEQ ID NO: 161017 - DNA, 82 bp, Homo sapiens
aacaggtagggatgatcaaggagaagtatgagcaccggatgctgctgaagcacatgccgtcagagttccacctcttcctgga

SEQ ID NO: 161018 - DNA, 85 bp, Homo sapiens
atgatcaaggagaagtatgagcaccggatgctgctgaagcacatgccgtcagagttccacctcttcctggaccacattgccagcc

SEQ ID NO: 161019 - DNA, 82 bp, Homo sapiens
aagtatgagcaccggatgctgctgaagcacatgccgtcagagttccacctcttcctggaccacattgccagcctcgactact

SEQ ID NO: 161020 - DNA, 82 bp, Homo sapiens
agcaccggatgctgctgaagcacatgccgtcagagttccacctcttcctggaccacattgccagcctcgactacttcaccaa

SEQ ID NO: 161021 - DNA, 81 bp, Homo sapiens
atgctgctgaagcacatgccgtcagagttccacctcttcctggaccacattgccagcctcgactacttcaccaagcccgac

SEQ ID NO: 161022 - DNA, 75 bp, Homo sapiens
acatgccgtcagagttccacctcttcctggaccacattgccagcctcgactacttcaccaagcccgactaccagg

SEQ ID NO: 161023 - DNA, 73 bp, Homo sapiens
agagttccacctcttcctggaccacattgccagcctcgactacttcaccaagcccgactaccaggtgggagcc

SEQ ID NO: 161024 - DNA, 73 bp, Homo sapiens
acctcttcctggaccacattgccagcctcgactacttcaccaagcccgactaccaggtgggagcctgctaccc

SEQ ID NO: 161025 - DNA, 75 bp, Homo sapiens
tggaccacattgccagcctcgactacttcaccaagcccgactaccaggtgggagcctgctaccctgcccccgctc

SEQ ID NO: 161026 - DNA, 81 bp, Homo sapiens
tagcccccggatcacctctctgtcctcccatcaccctcaccccctgcagttgatcatgtcagtgtttgagaacagcatgaa

SEQ ID NO: 161027 - DNA, 81 bp, Homo sapiens
ggatcacctctctgtcctcccatcaccctcaccccctgcagttgatcatgtcagtgtttgagaacagcatgaaggagaggg

SEQ ID NO: 161028 - DNA, 83 bp, Homo sapiens
tcctcccatcaccctcaccccctgcagttgatcatgtcagtgtttgagaacagcatgaaggagaggggcattgccgagaatga

SEQ ID NO: 161029 - DNA, 79 bp, Homo sapiens
accctcaccccctgcagttgatcatgtcagtgtttgagaacagcatgaaggagaggggcattgccgagaatgaggcctt

SEQ ID NO: 161030 - DNA, 82 bp, Homo sapiens
cctgcagttgatcatgtcagtgtttgagaacagcatgaaggagaggggcattgccgagaatgaggcctttgactgggagaag

SEQ ID NO: 161031 - DNA, 83 bp, Homo sapiens
gttgatcatgtcagtgtttgagaacagcatgaaggagaggggcattgccgagaatgaggcctttgactgggagaaggcaggca

SEQ ID NO: 161032 - DNA, 79 bp, Homo sapiens
agtgtttgagaacagcatgaaggagaggggcattgccgagaatgaggcctttgactgggagaaggcaggcaccgatgcc

SEQ ID NO: 161033 - DNA, 79 bp, Homo sapiens
aacagcatgaaggagaggggcattgccgagaatgaggcctttgactgggagaaggcaggcaccgatgccctcctgtcca

SEQ ID NO: 161034 - DNA, 78 bp, Homo sapiens
agaggggcattgccgagaatgaggcctttgactgggagaaggcaggcaccgatgccctcctgtccacgagcacctcta

SEQ ID NO: 161035 - DNA, 76 bp, Homo sapiens
attgccgagaatgaggcctttgactgggagaaggcaggcaccgatgccctcctgtccacgagcacctctaccccgc

SEQ ID NO: 161036 - DNA, 76 bp, Homo sapiens
atgaggcctttgactgggagaaggcaggcaccgatgccctcctgtccacgagcacctctaccccgccccagcagaa

SEQ ID NO: 161037 - DNA, 74 bp, Homo sapiens
tttgactgggagaaggcaggcaccgatgccctcctgtccacgagcacctctaccccgccccagcagaacacccg

SEQ ID NO: 161038 - DNA, 76 bp, Homo sapiens
agaaggcaggcaccgatgccctcctgtccacgagcacctctaccccgccccagcagaacacccggcagacggcagc

SEQ ID NO: 161039 - DNA, 74 bp, Homo sapiens
accgatgccctcctgtccacgagcacctctaccccgccccagcagaacacccggcagacggcagccatgtttgg

SEQ ID NO: 161040 - DNA, 76 bp, Homo sapiens
ctgtccacgagcacctctaccccgccccagcagaacacccggcagacggcagccatgtttgggtgagtctcaggaa

SEQ ID NO: 161041 - DNA, 75 bp, Homo sapiens
acgagcacctctaccccgccccagcagaacacccggcagacggcagccatgtttgggtgagtctcaggaaggcga

SEQ ID NO: 161042 - DNA, 75 bp, Homo sapiens
taccccgccccagcagaacacccggcagacggcagccatgtttgggtgagtctcaggaaggcgagccaccagccc

SEQ ID NO: 161043 - DNA, 78 bp, Homo sapiens
tgccagccttgcccatggctccctcctgccctctccagggtggtcaatgtgacgccagtgcctggggacctgctccgg

SEQ ID NO: 161044 - DNA, 77 bp, Homo sapiens
ttgcccatggctccctcctgccctctccagggtggtcaatgtgacgccagtgcctggggacctgctccgggagaaca

SEQ ID NO: 161045 - DNA, 77 bp, Homo sapiens
ctcctgccctctccagggtggtcaatgtgacgccagtgcctggggacctgctccgggagaacaccgaggatgtgcta

SEQ ID NO: 161046 - DNA, 77 bp, Homo sapiens
ctctccagggtggtcaatgtgacgccagtgcctggggacctgctccgggagaacaccgaggatgtgctacagggaga

SEQ ID NO: 161047 - DNA, 80 bp, Homo sapiens
gtggtcaatgtgacgccagtgcctggggacctgctccgggagaacaccgaggatgtgctacagggagagcacctgagtga

SEQ ID NO: 161048 - DNA, 79 bp, Homo sapiens
tgacgccagtgcctggggacctgctccgggagaacaccgaggatgtgctacagggagagcacctgagtgaccaggagaa

SEQ ID NO: 161049 - DNA, 78 bp, Homo sapiens
gtgcctggggacctgctccgggagaacaccgaggatgtgctacagggagagcacctgagtgaccaggagaatgcaccc

SEQ ID NO: 161050 - DNA, 78 bp, Homo sapiens
acctgctccgggagaacaccgaggatgtgctacagggagagcacctgagtgaccaggagaatgcacccccaattctgc

SEQ ID NO: 161051 - DNA, 76 bp, Homo sapiens
agaacaccgaggatgtgctacagggagagcacctgagtgaccaggagaatgcacccccaattctgcccgggaggcc

SEQ ID NO: 161052 - DNA, 76 bp, Homo sapiens
aggatgtgctacagggagagcacctgagtgaccaggagaatgcacccccaattctgcccgggaggccctctgaggg

SEQ ID NO: 161053 - DNA, 75 bp, Homo sapiens
tacagggagagcacctgagtgaccaggagaatgcacccccaattctgcccgggaggccctctgaggggctgggcc

SEQ ID NO: 161054 - DNA, 71 bp, Homo sapiens
acctgagtgaccaggagaatgcacccccaattctgcccgggaggccctctgaggggctgggccccagtccc

SEQ ID NO: 161055 - DNA, 69 bp, Homo sapiens
accaggagaatgcacccccaattctgcccgggaggccctctgaggggctgggccccagtccccaccttg

SEQ ID NO: 161056 - DNA, 68 bp, Homo sapiens
atgcacccccaattctgcccgggaggccctctgaggggctgggccccagtccccaccttgtcccccac

SEQ ID NO: 161057 - DNA, 64 bp, Homo sapiens
aattctgcccgggaggccctctgaggggctgggccccagtccccaccttgtcccccaccccggg

SEQ ID NO: 161058 - DNA, 66 bp, Homo sapiens
aggccctctgaggggctgggccccagtccccaccttgtcccccaccccgggggtcctgaggctgaa

SEQ ID NO: 161059 - DNA, 67 bp, Homo sapiens
gggctgggccccagtccccaccttgtcccccaccccgggggtcctgaggctgaagtctgggaggaga

SEQ ID NO: 161060 - DNA, 69 bp, Homo sapiens
ccagtccccaccttgtcccccaccccgggggtcctgaggctgaagtctgggaggagacagatgtcaacc

SEQ ID NO: 161061 - DNA, 68 bp, Homo sapiens
accttgtcccccaccccgggggtcctgaggctgaagtctgggaggagacagatgtcaaccggaacaaa

SEQ ID NO: 161062 - DNA, 72 bp, Homo sapiens
caccccgggggtcctgaggctgaagtctgggaggagacagatgtcaaccggaacaaactccggatcaacatc

SEQ ID NO: 161063 - DNA, 75 bp, Homo sapiens
aggctgaagtctgggaggagacagatgtcaaccggaacaaactccggatcaacatcggcaaagtaactgccgcca

SEQ ID NO: 161064 - DNA, 73 bp, Homo sapiens
tgggaggagacagatgtcaaccggaacaaactccggatcaacatcggcaaagtaactgccgccagggcgaagg

SEQ ID NO: 161065 - DNA, 71 bp, Homo sapiens
acagatgtcaaccggaacaaactccggatcaacatcggcaaagtaactgccgccagggcgaagggcgtggg

SEQ ID NO: 161066 - DNA, 83 bp, Homo sapiens
acagccgcctcatcagccccagctcatggcactcccctctcctgcagagcccctgtgtggaggaggaacagagccgaggcatg

SEQ ID NO: 161067 - DNA, 81 bp, Homo sapiens
tcatcagccccagctcatggcactcccctctcctgcagagcccctgtgtggaggaggaacagagccgaggcatgggggtcc

SEQ ID NO: 161068 - DNA, 78 bp, Homo sapiens
agctcatggcactcccctctcctgcagagcccctgtgtggaggaggaacagagccgaggcatgggggtccccagctcc

SEQ ID NO: 161069 - DNA, 75 bp, Homo sapiens
actcccctctcctgcagagcccctgtgtggaggaggaacagagccgaggcatgggggtccccagctccccagtgc

SEQ ID NO: 161070 - DNA, 76 bp, Homo sapiens
ctctcctgcagagcccctgtgtggaggaggaacagagccgaggcatgggggtccccagctccccagtgcgtgcccc

SEQ ID NO: 161071 - DNA, 72 bp, Homo sapiens
cctgtgtggaggaggaacagagccgaggcatgggggtccccagctccccagtgcgtgcccccccagactccc

SEQ ID NO: 161072 - DNA, 70 bp, Homo sapiens
aggaggaacagagccgaggcatgggggtccccagctccccagtgcgtgcccccccagactcccccacaac

SEQ ID NO: 161073 - DNA, 69 bp, Homo sapiens
aacagagccgaggcatgggggtccccagctccccagtgcgtgcccccccagactcccccacaaccccag

SEQ ID NO: 161074 - DNA, 70 bp, Homo sapiens
tgggggtccccagctccccagtgcgtgcccccccagactcccccacaaccccagtccgttctctgcgcta

SEQ ID NO: 161075 - DNA, 71 bp, Homo sapiens
cagctccccagtgcgtgcccccccagactcccccacaaccccagtccgttctctgcgctaccggagggtga

SEQ ID NO: 161076 - DNA, 69 bp, Homo sapiens
agtgcgtgcccccccagactcccccacaaccccagtccgttctctgcgctaccggagggtgaacagccc

SEQ ID NO: 161077 - DNA, 70 bp, Homo sapiens
ccccagactcccccacaaccccagtccgttctctgcgctaccggagggtgaacagccctgagtcagaaag

SEQ ID NO: 161078 - DNA, 72 bp, Homo sapiens
ccccacaaccccagtccgttctctgcgctaccggagggtgaacagccctgagtcagaaaggctgtccacggc

SEQ ID NO: 161079 - DNA, 73 bp, Homo sapiens
cccagtccgttctctgcgctaccggagggtgaacagccctgagtcagaaaggctgtccacggcggacgggcga

SEQ ID NO: 161080 - DNA, 75 bp, Homo sapiens
cgttctctgcgctaccggagggtgaacagccctgagtcagaaaggctgtccacggcggacgggcgagtggagcta

SEQ ID NO: 161081 - DNA, 74 bp, Homo sapiens
ctaccggagggtgaacagccctgagtcagaaaggctgtccacggcggacgggcgagtggagctacctgagagga

SEQ ID NO: 161082 - DNA, 73 bp, Homo sapiens
ccctgagtcagaaaggctgtccacggcggacgggcgagtggagctacctgagaggaggtgggtctggggccag

SEQ ID NO: 161083 - DNA, 71 bp, Homo sapiens
aaaggctgtccacggcggacgggcgagtggagctacctgagaggaggtgggtctggggccaggggcatggt

SEQ ID NO: 161084 - DNA, 70 bp, Homo sapiens
acggcggacgggcgagtggagctacctgagaggaggtgggtctggggccaggggcatggttggggcccaa

SEQ ID NO: 161085 - DNA, 76 bp, Homo sapiens
gtccagtggggccaggtattgagccccgtgaggggtggctttgcaggtcacggatggatctgcctggctcgccctc

SEQ ID NO: 161086 - DNA, 79 bp, Homo sapiens
gccaggtattgagccccgtgaggggtggctttgcaggtcacggatggatctgcctggctcgccctcgcgccaggcctgc

SEQ ID NO: 161087 - DNA, 81 bp, Homo sapiens
tattgagccccgtgaggggtggctttgcaggtcacggatggatctgcctggctcgccctcgcgccaggcctgctcctctca

SEQ ID NO: 161088 - DNA, 81 bp, Homo sapiens
ccgtgaggggtggctttgcaggtcacggatggatctgcctggctcgccctcgcgccaggcctgctcctctcagccagccca

SEQ ID NO: 161089 - DNA, 87 bp, Homo sapiens
ctttgcaggtcacggatggatctgcctggctcgccctcgcgccaggcctgctcctctcagccagcccagatgctgtcagtggacaca

SEQ ID NO: 161090 - DNA, 89 bp, Homo sapiens
tcacggatggatctgcctggctcgccctcgcgccaggcctgctcctctcagccagcccagatgctgtcagtggacacaggccacgctga

SEQ ID NO: 161091 - DNA, 86 bp, Homo sapiens
atctgcctggctcgccctcgcgccaggcctgctcctctcagccagcccagatgctgtcagtggacacaggccacgctgaccgacag

SEQ ID NO: 161092 - DNA, 85 bp, Homo sapiens
ggctcgccctcgcgccaggcctgctcctctcagccagcccagatgctgtcagtggacacaggccacgctgaccgacaggccagtg

SEQ ID NO: 161093 - DNA, 87 bp, Homo sapiens
caggcctgctcctctcagccagcccagatgctgtcagtggacacaggccacgctgaccgacaggccagtggccgcatggacgtgtca

SEQ ID NO: 161094 - DNA, 87 bp, Homo sapiens
tcctctcagccagcccagatgctgtcagtggacacaggccacgctgaccgacaggccagtggccgcatggacgtgtcagcctctgtg

SEQ ID NO: 161095 - DNA, 86 bp, Homo sapiens
agccagcccagatgctgtcagtggacacaggccacgctgaccgacaggccagtggccgcatggacgtgtcagcctctgtggagcag

SEQ ID NO: 161096 - DNA, 84 bp, Homo sapiens
agatgctgtcagtggacacaggccacgctgaccgacaggccagtggccgcatggacgtgtcagcctctgtggagcaggaggccc

SEQ ID NO: 161097 - DNA, 82 bp, Homo sapiens
agtggacacaggccacgctgaccgacaggccagtggccgcatggacgtgtcagcctctgtggagcaggaggccctgagcaac

SEQ ID NO: 161098 - DNA, 80 bp, Homo sapiens
acgctgaccgacaggccagtggccgcatggacgtgtcagcctctgtggagcaggaggccctgagcaacgccttccgctcg

SEQ ID NO: 161099 - DNA, 79 bp, Homo sapiens
accgacaggccagtggccgcatggacgtgtcagcctctgtggagcaggaggccctgagcaacgccttccgctcggtgcc

SEQ ID NO: 161100 - DNA, 81 bp, Homo sapiens
agtggccgcatggacgtgtcagcctctgtggagcaggaggccctgagcaacgccttccgctcggtgccgctggctgaggag

SEQ ID NO: 161101 - DNA, 79 bp, Homo sapiens
atggacgtgtcagcctctgtggagcaggaggccctgagcaacgccttccgctcggtgccgctggctgaggaggaggatt

SEQ ID NO: 161102 - DNA, 80 bp, Homo sapiens
tctgtggagcaggaggccctgagcaacgccttccgctcggtgccgctggctgaggaggaggatttcgacagcaaagagtg

SEQ ID NO: 161103 - DNA, 78 bp, Homo sapiens
aggaggccctgagcaacgccttccgctcggtgccgctggctgaggaggaggatttcgacagcaaagagtgggtcatca

SEQ ID NO: 161104 - DNA, 81 bp, Homo sapiens
tgagcaacgccttccgctcggtgccgctggctgaggaggaggatttcgacagcaaagagtgggtcatcatcgacaaggaga

SEQ ID NO: 161105 - DNA, 80 bp, Homo sapiens
ttccgctcggtgccgctggctgaggaggaggatttcgacagcaaagagtgggtcatcatcgacaaggagacggagctcaa

SEQ ID NO: 161106 - DNA, 76 bp, Homo sapiens
tgaggaggaggatttcgacagcaaagagtgggtcatcatcgacaaggagacggagctcaaggacttccctccaggg

SEQ ID NO: 161107 - DNA, 76 bp, Homo sapiens
aggaggatttcgacagcaaagagtgggtcatcatcgacaaggagacggagctcaaggacttccctccaggggctga

SEQ ID NO: 161108 - DNA, 78 bp, Homo sapiens
acagcaaagagtgggtcatcatcgacaaggagacggagctcaaggacttccctccaggggctgagcccagcacatcgg

SEQ ID NO: 161109 - DNA, 80 bp, Homo sapiens
tgggtcatcatcgacaaggagacggagctcaaggacttccctccaggggctgagcccagcacatcgggcaccacggatga

SEQ ID NO: 161110 - DNA, 78 bp, Homo sapiens
agacggagctcaaggacttccctccaggggctgagcccagcacatcgggcaccacggatgaggagcccgaggagctgc

SEQ ID NO: 161111 - DNA, 79 bp, Homo sapiens
tcaaggacttccctccaggggctgagcccagcacatcgggcaccacggatgaggagcccgaggagctgcggccactgcc

SEQ ID NO: 161112 - DNA, 79 bp, Homo sapiens
tccaggggctgagcccagcacatcgggcaccacggatgaggagcccgaggagctgcggccactgcccgaggagggcgaa

SEQ ID NO: 161113 - DNA, 78 bp, Homo sapiens
agcccagcacatcgggcaccacggatgaggagcccgaggagctgcggccactgcccgaggagggcgaagagcggcggc

SEQ ID NO: 161114 - DNA, 78 bp, Homo sapiens
agcacatcgggcaccacggatgaggagcccgaggagctgcggccactgcccgaggagggcgaagagcggcggcggctg

SEQ ID NO: 161115 - DNA, 76 bp, Homo sapiens
accacggatgaggagcccgaggagctgcggccactgcccgaggagggcgaagagcggcggcggctgggggcagagc

SEQ ID NO: 161116 - DNA, 76 bp, Homo sapiens
tgaggagcccgaggagctgcggccactgcccgaggagggcgaagagcggcggcggctgggggcagagcccaccgtc

SEQ ID NO: 161117 - DNA, 72 bp, Homo sapiens
aggagctgcggccactgcccgaggagggcgaagagcggcggcggctgggggcagagcccaccgtccggcccc

SEQ ID NO: 161118 - DNA, 74 bp, Homo sapiens
ctgcccgaggagggcgaagagcggcggcggctgggggcagagcccaccgtccggccccggggacgcagcatgca

SEQ ID NO: 161119 - DNA, 74 bp, Homo sapiens
aggagggcgaagagcggcggcggctgggggcagagcccaccgtccggccccggggacgcagcatgcaggcgctg

SEQ ID NO: 161120 - DNA, 74 bp, Homo sapiens
aagagcggcggcggctgggggcagagcccaccgtccggccccggggacgcagcatgcaggcgctggcggaggag

SEQ ID NO: 161121 - DNA, 77 bp, Homo sapiens
ctgggggcagagcccaccgtccggccccggggacgcagcatgcaggcgctggcggaggaggacctgcagcatttgcc

SEQ ID NO: 161122 - DNA, 76 bp, Homo sapiens
accgtccggccccggggacgcagcatgcaggcgctggcggaggaggacctgcagcatttgccgccccagcccctgc

SEQ ID NO: 161123 - DNA, 83 bp, Homo sapiens
ggacgcagcatgcaggcgctggcggaggaggacctgcagcatttgccgccccagcccctgccaccccagctgagccagggcga

SEQ ID NO: 161124 - DNA, 82 bp, Homo sapiens
agcatgcaggcgctggcggaggaggacctgcagcatttgccgccccagcccctgccaccccagctgagccagggcgatggcc

SEQ ID NO: 161125 - DNA, 78 bp, Homo sapiens
tggcggaggaggacctgcagcatttgccgccccagcccctgccaccccagctgagccagggcgatggccgttccgaga

SEQ ID NO: 161126 - DNA, 77 bp, Homo sapiens
aggaggacctgcagcatttgccgccccagcccctgccaccccagctgagccagggcgatggccgttccgagacgtca

SEQ ID NO: 161127 - DNA, 75 bp, Homo sapiens
agcatttgccgccccagcccctgccaccccagctgagccagggcgatggccgttccgagacgtcacagcccccca

SEQ ID NO: 161128 - DNA, 75 bp, Homo sapiens
ccagcccctgccaccccagctgagccagggcgatggccgttccgagacgtcacagccccccacgcctggcagccc

SEQ ID NO: 161129 - DNA, 72 bp, Homo sapiens
agggcgatggccgttccgagacgtcacagccccccacgcctggcagcccttcccactcacccctgcactcgg

SEQ ID NO: 161130 - DNA, 71 bp, Homo sapiens
ttccgagacgtcacagccccccacgcctggcagcccttcccactcacccctgcactcgggaccccgccctc

SEQ ID NO: 161131 - DNA, 70 bp, Homo sapiens
ccacgcctggcagcccttcccactcacccctgcactcgggaccccgccctcgacggagagagtcggaccc

SEQ ID NO: 161132 - DNA, 69 bp, Homo sapiens
agcccttcccactcacccctgcactcgggaccccgccctcgacggagagagtcggaccccacaggccca

SEQ ID NO: 161133 - DNA, 71 bp, Homo sapiens
actcacccctgcactcgggaccccgccctcgacggagagagtcggaccccacaggcccacagagacaggta

SEQ ID NO: 161134 - DNA, 69 bp, Homo sapiens
accccgccctcgacggagagagtcggaccccacaggcccacagagacaggtaaggttgggcttgcaccc

SEQ ID NO: 161135 - DNA, 70 bp, Homo sapiens
ccctcgacggagagagtcggaccccacaggcccacagagacaggtaaggttgggcttgcaccccactccc

SEQ ID NO: 161136 - DNA, 72 bp, Homo sapiens
agtctgtgcctgacacctcttttccctccactttcttggtctctttcagttggaggaggacagactctcggg

SEQ ID NO: 161137 - DNA, 70 bp, Homo sapiens
acacctcttttccctccactttcttggtctctttcagttggaggaggacagactctcggggcactccctc

SEQ ID NO: 161138 - DNA, 70 bp, Homo sapiens
tttccctccactttcttggtctctttcagttggaggaggacagactctcggggcactccctcccgcggta

SEQ ID NO: 161139 - DNA, 72 bp, Homo sapiens
tttcttggtctctttcagttggaggaggacagactctcggggcactccctcccgcggtacagccccctgcga

SEQ ID NO: 161140 - DNA, 73 bp, Homo sapiens
tctttcagttggaggaggacagactctcggggcactccctcccgcggtacagccccctgcgacgactggcgtc

SEQ ID NO: 161141 - DNA, 71 bp, Homo sapiens
aggaggacagactctcggggcactccctcccgcggtacagccccctgcgacgactggcgtcctccgtgttc

SEQ ID NO: 161142 - DNA, 71 bp, Homo sapiens
acagactctcggggcactccctcccgcggtacagccccctgcgacgactggcgtcctccgtgttctcctcc

SEQ ID NO: 161143 - DNA, 72 bp, Homo sapiens
cactccctcccgcggtacagccccctgcgacgactggcgtcctccgtgttctcctcctccacgctggagacg

SEQ ID NO: 161144 - DNA, 74 bp, Homo sapiens
ctcccgcggtacagccccctgcgacgactggcgtcctccgtgttctcctcctccacgctggagacggagcatta

SEQ ID NO: 161145 - DNA, 74 bp, Homo sapiens
tacagccccctgcgacgactggcgtcctccgtgttctcctcctccacgctggagacggagcattaccctcaccc

SEQ ID NO: 161146 - DNA, 71 bp, Homo sapiens
acgactggcgtcctccgtgttctcctcctccacgctggagacggagcattaccctcaccccggcggcggcg

SEQ ID NO: 161147 - DNA, 71 bp, Homo sapiens
cgtcctccgtgttctcctcctccacgctggagacggagcattaccctcaccccggcggcggcggctcctcg

SEQ ID NO: 161148 - DNA, 72 bp, Homo sapiens
tgttctcctcctccacgctggagacggagcattaccctcaccccggcggcggcggctcctcgggctcctccg

SEQ ID NO: 161149 - DNA, 71 bp, Homo sapiens
acgctggagacggagcattaccctcaccccggcggcggcggctcctcgggctcctccggttccctcattca

SEQ ID NO: 161150 - DNA, 72 bp, Homo sapiens
agacggagcattaccctcaccccggcggcggcggctcctcgggctcctccggttccctcattcagcgcagcc

SEQ ID NO: 161151 - DNA, 73 bp, Homo sapiens
attaccctcaccccggcggcggcggctcctcgggctcctccggttccctcattcagcgcagccgctcggctga

SEQ ID NO: 161152 - DNA, 79 bp, Homo sapiens
ggcggcggcggctcctcgggctcctccggttccctcattcagcgcagccgctcggctgagagcagccctgtgcgggcgc

SEQ ID NO: 161153 - DNA, 77 bp, Homo sapiens
ggctcctcgggctcctccggttccctcattcagcgcagccgctcggctgagagcagccctgtgcgggcgccccaccg

SEQ ID NO: 161154 - DNA, 78 bp, Homo sapiens
tcgggctcctccggttccctcattcagcgcagccgctcggctgagagcagccctgtgcgggcgccccaccggcgccac

SEQ ID NO: 161155 - DNA, 83 bp, Homo sapiens
tccctcattcagcgcagccgctcggctgagagcagccctgtgcgggcgccccaccggcgccacgcgcccctcgctgctggcaa

SEQ ID NO: 161156 - DNA, 82 bp, Homo sapiens
attcagcgcagccgctcggctgagagcagccctgtgcgggcgccccaccggcgccacgcgcccctcgctgctggcaaccaca

SEQ ID NO: 161157 - DNA, 82 bp, Homo sapiens
agccgctcggctgagagcagccctgtgcgggcgccccaccggcgccacgcgcccctcgctgctggcaaccacagactcatgc

SEQ ID NO: 161158 - DNA, 80 bp, Homo sapiens
agagcagccctgtgcgggcgccccaccggcgccacgcgcccctcgctgctggcaaccacagactcatgccctcggtgctc

SEQ ID NO: 161159 - DNA, 80 bp, Homo sapiens
cctgtgcgggcgccccaccggcgccacgcgcccctcgctgctggcaaccacagactcatgccctcggtgctccgcatctc

SEQ ID NO: 161160 - DNA, 82 bp, Homo sapiens
cccaccggcgccacgcgcccctcgctgctggcaaccacagactcatgccctcggtgctccgcatctcgcggtcccagctgca

SEQ ID NO: 161161 - DNA, 84 bp, Homo sapiens
cgccacgcgcccctcgctgctggcaaccacagactcatgccctcggtgctccgcatctcgcggtcccagctgcagcaggtgtgg

SEQ ID NO: 161162 - DNA, 83 bp, Homo sapiens
cctcgctgctggcaaccacagactcatgccctcggtgctccgcatctcgcggtcccagctgcagcaggtgtgggcccggttca

SEQ ID NO: 161163 - DNA, 80 bp, Homo sapiens
caaccacagactcatgccctcggtgctccgcatctcgcggtcccagctgcagcaggtgtgggcccggttcacccacaaga

SEQ ID NO: 161164 - DNA, 76 bp, Homo sapiens
ccctcggtgctccgcatctcgcggtcccagctgcagcaggtgtgggcccggttcacccacaagacctaggctgggc

SEQ ID NO: 161165 - DNA, 73 bp, Homo sapiens
ctccgcatctcgcggtcccagctgcagcaggtgtgggcccggttcacccacaagacctaggctgggccccccc

SEQ ID NO: 161166 - DNA, 70 bp, Homo sapiens
tcccagctgcagcaggtgtgggcccggttcacccacaagacctaggctgggccccccccctcctggaggg

SEQ ID NO: 161167 - DNA, 66 bp, Homo sapiens
agcaggtgtgggcccggttcacccacaagacctaggctgggccccccccctcctggagggggcagg

SEQ ID NO: 161168 - DNA, 65 bp, Homo sapiens
gtgtgggcccggttcacccacaagacctaggctgggccccccccctcctggagggggcaggtggg

SEQ ID NO: 161169 - DNA, 63 bp, Homo sapiens
ggttcacccacaagacctaggctgggccccccccctcctggagggggcaggtgggggggggtg

SEQ ID NO: 161170 - DNA, 65 bp, Homo sapiens
aagacctaggctgggccccccccctcctggagggggcaggtgggggggggtggggagcaggcaga

SEQ ID NO: 161171 - DNA, 65 bp, Homo sapiens
gccccccccctcctggagggggcaggtgggggggggtggggagcaggcagaggaccatggttcct

SEQ ID NO: 161172 - DNA, 74 bp, Homo sapiens
ggcaggtgggggggggtggggagcaggcagaggaccatggttccttcccaggacgcaataatcacacactcaca

SEQ ID NO: 161173 - DNA, 76 bp, Homo sapiens
ggggggtggggagcaggcagaggaccatggttccttcccaggacgcaataatcacacactcacacatcccatccca

SEQ ID NO: 161174 - DNA, 83 bp, Homo sapiens
gagcaggcagaggaccatggttccttcccaggacgcaataatcacacactcacacatcccatcccaccccatcatgcaataca

SEQ ID NO: 161175 - DNA, 79 bp, Homo sapiens
agaggaccatggttccttcccaggacgcaataatcacacactcacacatcccatcccaccccatcatgcaatacagccc

SEQ ID NO: 161176 - DNA, 78 bp, Homo sapiens
tggttccttcccaggacgcaataatcacacactcacacatcccatcccaccccatcatgcaatacagcccccctagaa

SEQ ID NO: 161177 - DNA, 77 bp, Homo sapiens
aggacgcaataatcacacactcacacatcccatcccaccccatcatgcaatacagcccccctagaacgttggcccaa

SEQ ID NO: 161178 - DNA, 75 bp, Homo sapiens
aataatcacacactcacacatcccatcccaccccatcatgcaatacagcccccctagaacgttggcccaaggtac

SEQ ID NO: 161179 - DNA, 74 bp, Homo sapiens
actcacacatcccatcccaccccatcatgcaatacagcccccctagaacgttggcccaaggtactgtaatactc

SEQ ID NO: 161180 - DNA, 70 bp, Homo sapiens
cccatcccaccccatcatgcaatacagcccccctagaacgttggcccaaggtactgtaatactcccaccc

SEQ ID NO: 161181 - DNA, 72 bp, Homo sapiens
aggagggtgggtgacctcagagggtccctgtgtatgccccttgcaggtgttctccgtggcgcccccatttga

SEQ ID NO: 161182 - DNA, 74 bp, Homo sapiens
gtgggtgacctcagagggtccctgtgtatgccccttgcaggtgttctccgtggcgcccccatttgaggtgaatg

SEQ ID NO: 161183 - DNA, 73 bp, Homo sapiens
agagggtccctgtgtatgccccttgcaggtgttctccgtggcgcccccatttgaggtgaatggcctcccacga

SEQ ID NO: 161184 - DNA, 78 bp, Homo sapiens
cctgtgtatgccccttgcaggtgttctccgtggcgcccccatttgaggtgaatggcctcccacgagctgtgcctctga

SEQ ID NO: 161185 - DNA, 78 bp, Homo sapiens
ttgcaggtgttctccgtggcgcccccatttgaggtgaatggcctcccacgagctgtgcctctgagtctgccctaccag

SEQ ID NO: 161186 - DNA, 77 bp, Homo sapiens
ttctccgtggcgcccccatttgaggtgaatggcctcccacgagctgtgcctctgagtctgccctaccaggacttcaa

SEQ ID NO: 161187 - DNA, 76 bp, Homo sapiens
gcccccatttgaggtgaatggcctcccacgagctgtgcctctgagtctgccctaccaggacttcaaaagagacctc

SEQ ID NO: 161188 - DNA, 77 bp, Homo sapiens
tttgaggtgaatggcctcccacgagctgtgcctctgagtctgccctaccaggacttcaaaagagacctctccgatta

SEQ ID NO: 161189 - DNA, 75 bp, Homo sapiens
aatggcctcccacgagctgtgcctctgagtctgccctaccaggacttcaaaagagacctctccgattaccgagaa

SEQ ID NO: 161190 - DNA, 74 bp, Homo sapiens
agctgtgcctctgagtctgccctaccaggacttcaaaagagacctctccgattaccgagaacgggcgcggttgc

SEQ ID NO: 161191 - DNA, 69 bp, Homo sapiens
cctaccaggacttcaaaagagacctctccgattaccgagaacgggcgcggttgctcaacagggtccgga

SEQ ID NO: 161192 - DNA, 68 bp, Homo sapiens
aggacttcaaaagagacctctccgattaccgagaacgggcgcggttgctcaacagggtccggagggtg

SEQ ID NO: 161193 - DNA, 70 bp, Homo sapiens
aaagagacctctccgattaccgagaacgggcgcggttgctcaacagggtccggagggtgggcttctcgca

SEQ ID NO: 161194 - DNA, 75 bp, Homo sapiens
ctccgattaccgagaacgggcgcggttgctcaacagggtccggagggtgggcttctcgcacatgctgctcaccac

SEQ ID NO: 161195 - DNA, 73 bp, Homo sapiens
agaacgggcgcggttgctcaacagggtccggagggtgggcttctcgcacatgctgctcaccaccccccaggtc

SEQ ID NO: 161196 - DNA, 77 bp, Homo sapiens
ttgctcaacagggtccggagggtgggcttctcgcacatgctgctcaccaccccccaggtcccactggctcctgttca

SEQ ID NO: 161197 - DNA, 74 bp, Homo sapiens
aacagggtccggagggtgggcttctcgcacatgctgctcaccaccccccaggtcccactggctcctgttcagcc

SEQ ID NO: 161198 - DNA, 77 bp, Homo sapiens
agggtgggcttctcgcacatgctgctcaccaccccccaggtcccactggctcctgttcagcctcaggctaatgggaa

SEQ ID NO: 161199 - DNA, 78 bp, Homo sapiens
cttctcgcacatgctgctcaccaccccccaggtcccactggctcctgttcagcctcaggctaatgggaaggaggaaga

SEQ ID NO: 161200 - DNA, 76 bp, Homo sapiens
aagaggaggaggaggctgcagcggcagttgccttgggggaggtgctggggcctcgtagtggctccagcagtgaggg

SEQ ID NO: 161201 - DNA, 78 bp, Homo sapiens
aggaggctgcagcggcagttgccttgggggaggtgctggggcctcgtagtggctccagcagtgaggggagtgagagga

SEQ ID NO: 161202 - DNA, 77 bp, Homo sapiens
agcggcagttgccttgggggaggtgctggggcctcgtagtggctccagcagtgaggggagtgagaggagcactgacc

SEQ ID NO: 161203 - DNA, 77 bp, Homo sapiens
ttgccttgggggaggtgctggggcctcgtagtggctccagcagtgaggggagtgagaggagcactgaccggagccag

SEQ ID NO: 161204 - DNA, 77 bp, Homo sapiens
ggaggtgctggggcctcgtagtggctccagcagtgaggggagtgagaggagcactgaccggagccaggagggtgccc

SEQ ID NO: 161205 - DNA, 80 bp, Homo sapiens
ctcgtagtggctccagcagtgaggggagtgagaggagcactgaccggagccaggagggtgccccgtccacgctgctggca

SEQ ID NO: 161206 - DNA, 81 bp, Homo sapiens
ctccagcagtgaggggagtgagaggagcactgaccggagccaggagggtgccccgtccacgctgctggcagacgatcagaa

SEQ ID NO: 161207 - DNA, 80 bp, Homo sapiens
tgaggggagtgagaggagcactgaccggagccaggagggtgccccgtccacgctgctggcagacgatcagaaggagtcca

SEQ ID NO: 161208 - DNA, 78 bp, Homo sapiens
agtgagaggagcactgaccggagccaggagggtgccccgtccacgctgctggcagacgatcagaaggagtccaggggc

SEQ ID NO: 161209 - DNA, 74 bp, Homo sapiens
actgaccggagccaggagggtgccccgtccacgctgctggcagacgatcagaaggagtccaggggccgggcctc

SEQ ID NO: 161210 - DNA, 75 bp, Homo sapiens
caggagggtgccccgtccacgctgctggcagacgatcagaaggagtccaggggccgggcctccatggccgatggg

SEQ ID NO: 161211 - DNA, 76 bp, Homo sapiens
gtgccccgtccacgctgctggcagacgatcagaaggagtccaggggccgggcctccatggccgatggggacctgga

SEQ ID NO: 161212 - DNA, 78 bp, Homo sapiens
tccacgctgctggcagacgatcagaaggagtccaggggccgggcctccatggccgatggggacctggagcctgaggag

SEQ ID NO: 161213 - DNA, 73 bp, Homo sapiens
agacgatcagaaggagtccaggggccgggcctccatggccgatggggacctggagcctgaggagggctccaaa

SEQ ID NO: 161214 - DNA, 74 bp, Homo sapiens
gggccgggcctccatggccgatggggacctggagcctgaggagggctccaaaacgctggtgcttgtctctcctg

SEQ ID NO: 161215 - DNA, 78 bp, Homo sapiens
ctccatggccgatggggacctggagcctgaggagggctccaaaacgctggtgcttgtctctcctggcgacatgaagaa

SEQ ID NO: 161216 - DNA, 77 bp, Homo sapiens
ggagcctgaggagggctccaaaacgctggtgcttgtctctcctggcgacatgaagaagtcgcccgtcactgccgaac

SEQ ID NO: 161217 - DNA, 75 bp, Homo sapiens
aggagggctccaaaacgctggtgcttgtctctcctggcgacatgaagaagtcgcccgtcactgccgaactggccc

SEQ ID NO: 161218 - DNA, 75 bp, Homo sapiens
tggtgcttgtctctcctggcgacatgaagaagtcgcccgtcactgccgaactggcccccgaccccgacctgggca

SEQ ID NO: 161219 - DNA, 73 bp, Homo sapiens
tctctcctggcgacatgaagaagtcgcccgtcactgccgaactggcccccgaccccgacctgggcaccctggc

SEQ ID NO: 161220 - DNA, 72 bp, Homo sapiens
acatgaagaagtcgcccgtcactgccgaactggcccccgaccccgacctgggcaccctggctgccctcactc

SEQ ID NO: 161221 - DNA, 74 bp, Homo sapiens
aagtcgcccgtcactgccgaactggcccccgaccccgacctgggcaccctggctgccctcactcctcagcatga

SEQ ID NO: 161222 - DNA, 76 bp, Homo sapiens
tcactgccgaactggcccccgaccccgacctgggcaccctggctgccctcactcctcagcatgagcggccccagcc

SEQ ID NO: 161223 - DNA, 82 bp, Homo sapiens
cgacctgggcaccctggctgccctcactcctcagcatgagcggccccagcccacgggcagccagctggacgtatctgagcca

SEQ ID NO: 161224 - DNA, 83 bp, Homo sapiens
ctgccctcactcctcagcatgagcggccccagcccacgggcagccagctggacgtatctgagccaggcaccctgtcctctgtc

SEQ ID NO: 161225 - DNA, 84 bp, Homo sapiens
tcctcagcatgagcggccccagcccacgggcagccagctggacgtatctgagccaggcaccctgtcctctgtcctcaagtctga

SEQ ID NO: 161226 - DNA, 81 bp, Homo sapiens
atgagcggccccagcccacgggcagccagctggacgtatctgagccaggcaccctgtcctctgtcctcaagtctgagccca

SEQ ID NO: 161227 - DNA, 77 bp, Homo sapiens
agcccacgggcagccagctggacgtatctgagccaggcaccctgtcctctgtcctcaagtctgagcccaagcccccg

SEQ ID NO: 161228 - DNA, 75 bp, Homo sapiens
agccagctggacgtatctgagccaggcaccctgtcctctgtcctcaagtctgagcccaagcccccggggcctggg

SEQ ID NO: 161229 - DNA, 75 bp, Homo sapiens
tggacgtatctgagccaggcaccctgtcctctgtcctcaagtctgagcccaagcccccggggcctggggcagggc

SEQ ID NO: 161230 - DNA, 72 bp, Homo sapiens
tgtcctctgtcctcaagtctgagcccaagcccccggggcctggggcagggctgggggccgggacagtgacca

SEQ ID NO: 161231 - DNA, 70 bp, Homo sapiens
ctgtcctcaagtctgagcccaagcccccggggcctggggcagggctgggggccgggacagtgaccacagg

SEQ ID NO: 161232 - DNA, 67 bp, Homo sapiens
gtctgagcccaagcccccggggcctggggcagggctgggggccgggacagtgaccacaggggtcggg

SEQ ID NO: 161233 - DNA, 67 bp, Homo sapiens
cccggggcctggggcagggctgggggccgggacagtgaccacaggggtcgggggcgtggcagtcacc

SEQ ID NO: 161234 - DNA, 70 bp, Homo sapiens
ggggcagggctgggggccgggacagtgaccacaggggtcgggggcgtggcagtcacctcctcacccttca

SEQ ID NO: 161235 - DNA, 70 bp, Homo sapiens
tgggggccgggacagtgaccacaggggtcgggggcgtggcagtcacctcctcacccttcaccaaagttga

SEQ ID NO: 161236 - DNA, 71 bp, Homo sapiens
gacagtgaccacaggggtcgggggcgtggcagtcacctcctcacccttcaccaaagttgagaggacctttg

SEQ ID NO: 161237 - DNA, 73 bp, Homo sapiens
tgaccacaggggtcgggggcgtggcagtcacctcctcacccttcaccaaagttgagaggacctttgtgcacat

SEQ ID NO: 161238 - DNA, 73 bp, Homo sapiens
ggggcgtggcagtcacctcctcacccttcaccaaagttgagaggacctttgtgcacattgcggagaaaaccca

SEQ ID NO: 161239 - DNA, 72 bp, Homo sapiens
accaaagttgagaggacctttgtgcacattgcggagaaaacccacctcaacgtcatgtcttccggtggacaa

SEQ ID NO: 161240 - DNA, 76 bp, Homo sapiens
tttgtgcacattgcggagaaaacccacctcaacgtcatgtcttccggtggacaagccttgcggtctgaggagttca

SEQ ID NO: 161241 - DNA, 74 bp, Homo sapiens
attgcggagaaaacccacctcaacgtcatgtcttccggtggacaagccttgcggtctgaggagttcagcgctgg

SEQ ID NO: 161242 - DNA, 74 bp, Homo sapiens
aaacccacctcaacgtcatgtcttccggtggacaagccttgcggtctgaggagttcagcgctgggggcgagctg

SEQ ID NO: 161243 - DNA, 77 bp, Homo sapiens
aacgtcatgtcttccggtggacaagccttgcggtctgaggagttcagcgctgggggcgagctgggtctggagctggc

SEQ ID NO: 161244 - DNA, 79 bp, Homo sapiens
acaagccttgcggtctgaggagttcagcgctgggggcgagctgggtctggagctggcctctgatgggggcgctgtggag

SEQ ID NO: 161245 - DNA, 76 bp, Homo sapiens
agttcagcgctgggggcgagctgggtctggagctggcctctgatgggggcgctgtggaggagggggcccgagcgcc

SEQ ID NO: 161246 - DNA, 74 bp, Homo sapiens
gggcgagctgggtctggagctggcctctgatgggggcgctgtggaggagggggcccgagcgcccctggagaacg

SEQ ID NO: 161247 - DNA, 75 bp, Homo sapiens
tggcctctgatgggggcgctgtggaggagggggcccgagcgcccctggagaacggcctcgccctgtcagggctga

SEQ ID NO: 161248 - DNA, 74 bp, Homo sapiens
tgtggaggagggggcccgagcgcccctggagaacggcctcgccctgtcagggctgaatggggctgagatagagg

SEQ ID NO: 161249 - DNA, 76 bp, Homo sapiens
gggcccgagcgcccctggagaacggcctcgccctgtcagggctgaatggggctgagatagagggctctgccctgtc

SEQ ID NO: 161250 - DNA, 76 bp, Homo sapiens
agcgcccctggagaacggcctcgccctgtcagggctgaatggggctgagatagagggctctgccctgtctggggcc

SEQ ID NO: 161251 - DNA, 72 bp, Homo sapiens
aacggcctcgccctgtcagggctgaatggggctgagatagagggctctgccctgtctggggccccccgggaa

SEQ ID NO: 161252 - DNA, 71 bp, Homo sapiens
cctcgccctgtcagggctgaatggggctgagatagagggctctgccctgtctggggccccccgggaaaccc

SEQ ID NO: 161253 - DNA, 74 bp, Homo sapiens
gctgaatggggctgagatagagggctctgccctgtctggggccccccgggaaaccccctcagagatggccacaa

SEQ ID NO: 161254 - DNA, 72 bp, Homo sapiens
gggctgagatagagggctctgccctgtctggggccccccgggaaaccccctcagagatggccacaaactcac

SEQ ID NO: 161255 - DNA, 71 bp, Homo sapiens
atagagggctctgccctgtctggggccccccgggaaaccccctcagagatggccacaaactcactgcccaa

SEQ ID NO: 161256 - DNA, 69 bp, Homo sapiens
ggccccccgggaaaccccctcagagatggccacaaactcactgcccaatggcccggcccttgcagacgg

SEQ ID NO: 161257 - DNA, 71 bp, Homo sapiens
ccgggaaaccccctcagagatggccacaaactcactgcccaatggcccggcccttgcagacgggccagccc

SEQ ID NO: 161258 - DNA, 74 bp, Homo sapiens
agagatggccacaaactcactgcccaatggcccggcccttgcagacgggccagccccggtgtccccgctggagc

SEQ ID NO: 161259 - DNA, 71 bp, Homo sapiens
acaaactcactgcccaatggcccggcccttgcagacgggccagccccggtgtccccgctggagccaagccc

SEQ ID NO: 161260 - DNA, 71 bp, Homo sapiens
aatggcccggcccttgcagacgggccagccccggtgtccccgctggagccaagccctgagaaagtggccac

SEQ ID NO: 161261 - DNA, 73 bp, Homo sapiens
ccttgcagacgggccagccccggtgtccccgctggagccaagccctgagaaagtggccaccatctcccccaga

SEQ ID NO: 161262 - DNA, 76 bp, Homo sapiens
ccagccccggtgtccccgctggagccaagccctgagaaagtggccaccatctcccccagacgccatgctatgccag

SEQ ID NO: 161263 - DNA, 77 bp, Homo sapiens
aagccctgagaaagtggccaccatctcccccagacgccatgctatgccaggctctcgccccaggagccgtatccctg

SEQ ID NO: 161264 - DNA, 80 bp, Homo sapiens
aaagtggccaccatctcccccagacgccatgctatgccaggctctcgccccaggagccgtatccctgtcctgctctctga

SEQ ID NO: 161265 - DNA, 79 bp, Homo sapiens
atctcccccagacgccatgctatgccaggctctcgccccaggagccgtatccctgtcctgctctctgaggaggacacgg

SEQ ID NO: 161266 - DNA, 80 bp, Homo sapiens
tatgccaggctctcgccccaggagccgtatccctgtcctgctctctgaggaggacacgggctcggagccctcaggctcac

SEQ ID NO: 161267 - DNA, 77 bp, Homo sapiens
aggagccgtatccctgtcctgctctctgaggaggacacgggctcggagccctcaggctcactgtcggccaaagagcg

SEQ ID NO: 161268 - DNA, 80 bp, Homo sapiens
tgtcctgctctctgaggaggacacgggctcggagccctcaggctcactgtcggccaaagagcggtggagcaagcgggctc

SEQ ID NO: 161269 - DNA, 80 bp, Homo sapiens
tctgaggaggacacgggctcggagccctcaggctcactgtcggccaaagagcggtggagcaagcgggctcggccgcagca

SEQ ID NO: 161270 - DNA, 77 bp, Homo sapiens
aggacacgggctcggagccctcaggctcactgtcggccaaagagcggtggagcaagcgggctcggccgcagcaggac

SEQ ID NO: 161271 - DNA, 80 bp, Homo sapiens
ggagccctcaggctcactgtcggccaaagagcggtggagcaagcgggctcggccgcagcaggacctggcgcggctggtga

SEQ ID NO: 161272 - DNA, 81 bp, Homo sapiens
ctcaggctcactgtcggccaaagagcggtggagcaagcgggctcggccgcagcaggacctggcgcggctggtgatggagaa

SEQ ID NO: 161273 - DNA, 79 bp, Homo sapiens
actgtcggccaaagagcggtggagcaagcgggctcggccgcagcaggacctggcgcggctggtgatggagaagaggcag

SEQ ID NO: 161274 - DNA, 79 bp, Homo sapiens
aaagagcggtggagcaagcgggctcggccgcagcaggacctggcgcggctggtgatggagaagaggcagggccgcctgc

SEQ ID NO: 161275 - DNA, 81 bp, Homo sapiens
aagcgggctcggccgcagcaggacctggcgcggctggtgatggagaagaggcagggccgcctgctgttgcggctggcctca

SEQ ID NO: 161276 - DNA, 81 bp, Homo sapiens
tcggccgcagcaggacctggcgcggctggtgatggagaagaggcagggccgcctgctgttgcggctggcctcaggggcctc

SEQ ID NO: 161277 - DNA, 79 bp, Homo sapiens
agcaggacctggcgcggctggtgatggagaagaggcagggccgcctgctgttgcggctggcctcaggggcctcgtcctc

SEQ ID NO: 161278 - DNA, 80 bp, Homo sapiens
cggctggtgatggagaagaggcagggccgcctgctgttgcggctggcctcaggggcctcgtcctcctccagtgaggagca

SEQ ID NO: 161279 - DNA, 80 bp, Homo sapiens
atggagaagaggcagggccgcctgctgttgcggctggcctcaggggcctcgtcctcctccagtgaggagcagcgccgtgc

SEQ ID NO: 161280 - DNA, 80 bp, Homo sapiens
aagaggcagggccgcctgctgttgcggctggcctcaggggcctcgtcctcctccagtgaggagcagcgccgtgcctctga

SEQ ID NO: 161281 - DNA, 81 bp, Homo sapiens
cctgctgttgcggctggcctcaggggcctcgtcctcctccagtgaggagcagcgccgtgcctctgagaccctctcaggcac

SEQ ID NO: 161282 - DNA, 82 bp, Homo sapiens
tgcggctggcctcaggggcctcgtcctcctccagtgaggagcagcgccgtgcctctgagaccctctcaggcacgggctctga

SEQ ID NO: 161283 - DNA, 80 bp, Homo sapiens
ctcaggggcctcgtcctcctccagtgaggagcagcgccgtgcctctgagaccctctcaggcacgggctctgaggaggaca

SEQ ID NO: 161284 - DNA, 81 bp, Homo sapiens
gtcctcctccagtgaggagcagcgccgtgcctctgagaccctctcaggcacgggctctgaggaggacacgcccgcctctga

SEQ ID NO: 161285 - DNA, 81 bp, Homo sapiens
agtgaggagcagcgccgtgcctctgagaccctctcaggcacgggctctgaggaggacacgcccgcctctgagccggcagcg

SEQ ID NO: 161286 - DNA, 81 bp, Homo sapiens
agcagcgccgtgcctctgagaccctctcaggcacgggctctgaggaggacacgcccgcctctgagccggcagcggccttgc

SEQ ID NO: 161287 - DNA, 76 bp, Homo sapiens
acgggctctgaggaggacacgcccgcctctgagccggcagcggccttgcccaggaagagcgggagggcagccgcca

SEQ ID NO: 161288 - DNA, 77 bp, Homo sapiens
ctgaggaggacacgcccgcctctgagccggcagcggccttgcccaggaagagcgggagggcagccgccaccaggagc

SEQ ID NO: 161289 - DNA, 74 bp, Homo sapiens
acgcccgcctctgagccggcagcggccttgcccaggaagagcgggagggcagccgccaccaggagccggattcc

SEQ ID NO: 161290 - DNA, 74 bp, Homo sapiens
tctgagccggcagcggccttgcccaggaagagcgggagggcagccgccaccaggagccggattccccgccccat

SEQ ID NO: 161291 - DNA, 77 bp, Homo sapiens
agcgggagggcagccgccaccaggagccggattccccgccccattggcctccgcatgcccatgcctgttgcagccca

SEQ ID NO: 161292 - DNA, 84 bp, Homo sapiens
ccgccccattggcctccgcatgcccatgcctgttgcagcccagcagcccgccagcagatcccatggcgcggccccagcattgga

SEQ ID NO: 161293 - DNA, 88 bp, Homo sapiens
attggcctccgcatgcccatgcctgttgcagcccagcagcccgccagcagatcccatggcgcggccccagcattggacacagccatca

SEQ ID NO: 161294 - DNA, 89 bp, Homo sapiens
atgcccatgcctgttgcagcccagcagcccgccagcagatcccatggcgcggccccagcattggacacagccatcaccagcaggtgaga

SEQ ID NO: 161295 - DNA, 86 bp, Homo sapiens
atgcctgttgcagcccagcagcccgccagcagatcccatggcgcggccccagcattggacacagccatcaccagcaggtgagaaac

SEQ ID NO: 161296 - DNA, 85 bp, Homo sapiens
agcccagcagcccgccagcagatcccatggcgcggccccagcattggacacagccatcaccagcaggtgagaaaccgctgccagc

SEQ ID NO: 161297 - DNA, 81 bp, Homo sapiens
cccgccagcagatcccatggcgcggccccagcattggacacagccatcaccagcaggtgagaaaccgctgccagccccagg

SEQ ID NO: 161298 - DNA, 76 bp, Homo sapiens
ttttgtttctttgccctcttcttttctcctgccttctgctctcaagcaggctccagctgcagacgcccccagggtc

SEQ ID NO: 161299 - DNA, 77 bp, Homo sapiens
tttctttgccctcttcttttctcctgccttctgctctcaagcaggctccagctgcagacgcccccagggtcggccac

SEQ ID NO: 161300 - DNA, 81 bp, Homo sapiens
ttcttttctcctgccttctgctctcaagcaggctccagctgcagacgcccccagggtcggccactgctgctgacctccgcc

SEQ ID NO: 161301 - DNA, 80 bp, Homo sapiens
tgccttctgctctcaagcaggctccagctgcagacgcccccagggtcggccactgctgctgacctccgccccaaacaacc

SEQ ID NO: 161302 - DNA, 79 bp, Homo sapiens
ctgctctcaagcaggctccagctgcagacgcccccagggtcggccactgctgctgacctccgccccaaacaacctcctg

SEQ ID NO: 161303 - DNA, 75 bp, Homo sapiens
ctccagctgcagacgcccccagggtcggccactgctgctgacctccgccccaaacaacctcctggccgcggcctg

SEQ ID NO: 161304 - DNA, 71 bp, Homo sapiens
agacgcccccagggtcggccactgctgctgacctccgccccaaacaacctcctggccgcggcctgggccca

SEQ ID NO: 161305 - DNA, 72 bp, Homo sapiens
agggtcggccactgctgctgacctccgccccaaacaacctcctggccgcggcctgggcccagggcgagccca

SEQ ID NO: 161306 - DNA, 73 bp, Homo sapiens
actgctgctgacctccgccccaaacaacctcctggccgcggcctgggcccagggcgagcccaagccggagcca

SEQ ID NO: 161307 - DNA, 72 bp, Homo sapiens
tgctgacctccgccccaaacaacctcctggccgcggcctgggcccagggcgagcccaagccggagccaggcc

SEQ ID NO: 161308 - DNA, 72 bp, Homo sapiens
ccaaacaacctcctggccgcggcctgggcccagggcgagcccaagccggagccaggcccccagcgccgcgca

SEQ ID NO: 161309 - DNA, 72 bp, Homo sapiens
aacctcctggccgcggcctgggcccagggcgagcccaagccggagccaggcccccagcgccgcgcagcccgc

SEQ ID NO: 161310 - DNA, 74 bp, Homo sapiens
gcctgggcccagggcgagcccaagccggagccaggcccccagcgccgcgcagcccgcgcctccccgcgtccaca

SEQ ID NO: 161311 - DNA, 73 bp, Homo sapiens
cccagggcgagcccaagccggagccaggcccccagcgccgcgcagcccgcgcctccccgcgtccacatccgcc

SEQ ID NO: 161312 - DNA, 77 bp, Homo sapiens
agcccaagccggagccaggcccccagcgccgcgcagcccgcgcctccccgcgtccacatccgccgcgcgcaatgcca

SEQ ID NO: 161313 - DNA, 77 bp, Homo sapiens
cggagccaggcccccagcgccgcgcagcccgcgcctccccgcgtccacatccgccgcgcgcaatgccagcgcgtccc

SEQ ID NO: 161314 - DNA, 76 bp, Homo sapiens
agcgccgcgcagcccgcgcctccccgcgtccacatccgccgcgcgcaatgccagcgcgtccccccggagccagtcc

SEQ ID NO: 161315 - DNA, 73 bp, Homo sapiens
agcccgcgcctccccgcgtccacatccgccgcgcgcaatgccagcgcgtccccccggagccagtccctgtccc

SEQ ID NO: 161316 - DNA, 76 bp, Homo sapiens
cctccccgcgtccacatccgccgcgcgcaatgccagcgcgtccccccggagccagtccctgtcccgcagagagagc

SEQ ID NO: 161317 - DNA, 75 bp, Homo sapiens
cgtccacatccgccgcgcgcaatgccagcgcgtccccccggagccagtccctgtcccgcagagagagcccctccc

SEQ ID NO: 161318 - DNA, 74 bp, Homo sapiens
ccgcgcgcaatgccagcgcgtccccccggagccagtccctgtcccgcagagagagcccctccccctcgcaccag

SEQ ID NO: 161319 - DNA, 71 bp, Homo sapiens
aatgccagcgcgtccccccggagccagtccctgtcccgcagagagagcccctccccctcgcaccaggcccg

SEQ ID NO: 161320 - DNA, 67 bp, Homo sapiens
cgtccccccggagccagtccctgtcccgcagagagagcccctccccctcgcaccaggcccggcccgg

SEQ ID NO: 161321 - DNA, 67 bp, Homo sapiens
agccagtccctgtcccgcagagagagcccctccccctcgcaccaggcccggcccggggtccccccgc

SEQ ID NO: 161322 - DNA, 64 bp, Homo sapiens
cctgtcccgcagagagagcccctccccctcgcaccaggcccggcccggggtccccccgccccgg

SEQ ID NO: 161323 - DNA, 62 bp, Homo sapiens
agagagagcccctccccctcgcaccaggcccggcccggggtccccccgccccggggcgtccc

SEQ ID NO: 161324 - DNA, 60 bp, Homo sapiens
ccctcgcaccaggcccggcccggggtccccccgccccggggcgtcccgccggcccgggcc

SEQ ID NO: 161325 - DNA, 62 bp, Homo sapiens
cggcccggggtccccccgccccggggcgtcccgccggcccgggcccagcctgatggcacccc

SEQ ID NO: 161326 - DNA, 64 bp, Homo sapiens
ccgccccggggcgtcccgccggcccgggcccagcctgatggcaccccctcccccgggggctcca

SEQ ID NO: 161327 - DNA, 66 bp, Homo sapiens
gcgtcccgccggcccgggcccagcctgatggcaccccctcccccgggggctccaagaaaggaccca

SEQ ID NO: 161328 - DNA, 69 bp, Homo sapiens
ggcccagcctgatggcaccccctcccccgggggctccaagaaaggacccagagggaaactccaggctca

SEQ ID NO: 161329 - DNA, 69 bp, Homo sapiens
atggcaccccctcccccgggggctccaagaaaggacccagagggaaactccaggctcagcgcgcaacaa

SEQ ID NO: 161330 - DNA, 67 bp, Homo sapiens
ccccgggggctccaagaaaggacccagagggaaactccaggctcagcgcgcaacaaccaaaggccgg

SEQ ID NO: 161331 - DNA, 72 bp, Homo sapiens
ctccaagaaaggacccagagggaaactccaggctcagcgcgcaacaaccaaaggccgggcaggaggcgcgga

SEQ ID NO: 161332 - DNA, 70 bp, Homo sapiens
aaaggacccagagggaaactccaggctcagcgcgcaacaaccaaaggccgggcaggaggcgcggagggcc

SEQ ID NO: 161333 - DNA, 73 bp, Homo sapiens
gaaactccaggctcagcgcgcaacaaccaaaggccgggcaggaggcgcggagggccgggctggggccagataa

SEQ ID NO: 161334 - DNA, 75 bp, Homo sapiens
tccaggctcagcgcgcaacaaccaaaggccgggcaggaggcgcggagggccgggctggggccagataatgacgcc

SEQ ID NO: 161335 - DNA, 73 bp, Homo sapiens
caacaaccaaaggccgggcaggaggcgcggagggccgggctggggccagataatgacgcccgctgctctccgc

SEQ ID NO: 161336 - DNA, 72 bp, Homo sapiens
accaaaggccgggcaggaggcgcggagggccgggctggggccagataatgacgcccgctgctctccgcggtc

SEQ ID NO: 161337 - DNA, 73 bp, Homo sapiens
gggcaggaggcgcggagggccgggctggggccagataatgacgcccgctgctctccgcggtcccccaccctca

SEQ ID NO: 161338 - DNA, 69 bp, Homo sapiens
cggagggccgggctggggccagataatgacgcccgctgctctccgcggtcccccaccctcaccccggcc

SEQ ID NO: 161339 - DNA, 70 bp, Homo sapiens
tggggccagataatgacgcccgctgctctccgcggtcccccaccctcaccccggccccccacccgcagcc

SEQ ID NO: 161340 - DNA, 70 bp, Homo sapiens
agataatgacgcccgctgctctccgcggtcccccaccctcaccccggccccccacccgcagccggccaca

SEQ ID NO: 161341 - DNA, 73 bp, Homo sapiens
caccctcaccccggccccccacccgcagccggccacactggagcagctcccagcacagccttacgcgcccgac

SEQ ID NO: 161342 - DNA, 76 bp, Homo sapiens
acccgcagccggccacactggagcagctcccagcacagccttacgcgcccgacgcgcgccacccgcggccccagct

SEQ ID NO: 161343 - DNA, 78 bp, Homo sapiens
cggccacactggagcagctcccagcacagccttacgcgcccgacgcgcgccacccgcggccccagctttccgcctgca

SEQ ID NO: 161344 - DNA, 76 bp, Homo sapiens
cagcacagccttacgcgcccgacgcgcgccacccgcggccccagctttccgcctgcacccgcgaggacgcgcgcga

SEQ ID NO: 161345 - DNA, 73 bp, Homo sapiens
acccgcggccccagctttccgcctgcacccgcgaggacgcgcgcgagcacacgcggcgccccgccaggcctta

SEQ ID NO: 161346 - DNA, 73 bp, Homo sapiens
ccagctttccgcctgcacccgcgaggacgcgcgcgagcacacgcggcgccccgccaggccttagggcccgtgg

SEQ ID NO: 161347 - DNA, 72 bp, Homo sapiens
tttccgcctgcacccgcgaggacgcgcgcgagcacacgcggcgccccgccaggccttagggcccgtggggga

SEQ ID NO: 161348 - DNA, 69 bp, Homo sapiens
acccgcgaggacgcgcgcgagcacacgcggcgccccgccaggccttagggcccgtgggggacgcggccc

SEQ ID NO: 161349 - DNA, 69 bp, Homo sapiens
acgcgcgcgagcacacgcggcgccccgccaggccttagggcccgtgggggacgcggccccgcgccgcgg

SEQ ID NO: 161350 - DNA, 65 bp, Homo sapiens
acacgcggcgccccgccaggccttagggcccgtgggggacgcggccccgcgccgcggggagggtc

SEQ ID NO: 161351 - DNA, 64 bp, Homo sapiens
cccgccaggccttagggcccgtgggggacgcggccccgcgccgcggggagggtctgcctcccct

SEQ ID NO: 161352 - DNA, 70 bp, Homo sapiens
gtgggggacgcggccccgcgccgcggggagggtctgcctccccttcctcgccctgtgtcctctcatcctc

SEQ ID NO: 161353 - DNA, 70 bp, Homo sapiens
acgcggccccgcgccgcggggagggtctgcctccccttcctcgccctgtgtcctctcatcctcccgccgc

SEQ ID NO: 161354 - DNA, 71 bp, Homo sapiens
cgcggggagggtctgcctccccttcctcgccctgtgtcctctcatcctcccgccgcccgtcaggccggcca

SEQ ID NO: 161355 - DNA, 75 bp, Homo sapiens
agggtctgcctccccttcctcgccctgtgtcctctcatcctcccgccgcccgtcaggccggccagcctcacatca

SEQ ID NO: 161356 - DNA, 75 bp, Homo sapiens
cccttcctcgccctgtgtcctctcatcctcccgccgcccgtcaggccggccagcctcacatcagtctctccgccc

SEQ ID NO: 161357 - DNA, 73 bp, Homo sapiens
ccctgtgtcctctcatcctcccgccgcccgtcaggccggccagcctcacatcagtctctccgccccggggaag

SEQ ID NO: 161358 - DNA, 75 bp, Homo sapiens
tcccgccgcccgtcaggccggccagcctcacatcagtctctccgccccggggaaggctcagccacttttcatcga

SEQ ID NO: 161359 - DNA, 74 bp, Homo sapiens
agcctcacatcagtctctccgccccggggaaggctcagccacttttcatcgaggactccacttctggggacgcc

SEQ ID NO: 161360 - DNA, 72 bp, Homo sapiens
acatcagtctctccgccccggggaaggctcagccacttttcatcgaggactccacttctggggacgcctggt

SEQ ID NO: 161361 - DNA, 71 bp, Homo sapiens
tctccgccccggggaaggctcagccacttttcatcgaggactccacttctggggacgcctggttcgttcgc

SEQ ID NO: 161362 - DNA, 73 bp, Homo sapiens
aggctcagccacttttcatcgaggactccacttctggggacgcctggttcgttcgcccaccaggcctaggcta

SEQ ID NO: 161363 - DNA, 73 bp, Homo sapiens
acttttcatcgaggactccacttctggggacgcctggttcgttcgcccaccaggcctaggctacgctccatgc

SEQ ID NO: 161364 - DNA, 75 bp, Homo sapiens
tcatcgaggactccacttctggggacgcctggttcgttcgcccaccaggcctaggctacgctccatgctccccca

SEQ ID NO: 161365 - DNA, 76 bp, Homo sapiens
acgcctggttcgttcgcccaccaggcctaggctacgctccatgctcccccagcaatctctgcctacacctcctgcg

SEQ ID NO: 161366 - DNA, 78 bp, Homo sapiens
gttcgttcgcccaccaggcctaggctacgctccatgctcccccagcaatctctgcctacacctcctgcggcgccttgc

SEQ ID NO: 161367 - DNA, 77 bp, Homo sapiens
accaggcctaggctacgctccatgctcccccagcaatctctgcctacacctcctgcggcgccttgccctcctccgac

SEQ ID NO: 161368 - DNA, 76 bp, Homo sapiens
taggctacgctccatgctcccccagcaatctctgcctacacctcctgcggcgccttgccctcctccgacccctttc

SEQ ID NO: 161369 - DNA, 74 bp, Homo sapiens
atgctcccccagcaatctctgcctacacctcctgcggcgccttgccctcctccgacccctttccagccaaagtc

SEQ ID NO: 161370 - DNA, 71 bp, Homo sapiens
cccagcaatctctgcctacacctcctgcggcgccttgccctcctccgacccctttccagccaaagtccccc

SEQ ID NO: 161371 - DNA, 68 bp, Homo sapiens
tctgcctacacctcctgcggcgccttgccctcctccgacccctttccagccaaagtccccccacccct

SEQ ID NO: 161372 - DNA, 68 bp, Homo sapiens
ccttgccctcctccgacccctttccagccaaagtccccccaccccttcagagaagcagcctcaaattc

SEQ ID NO: 161373 - DNA, 70 bp, Homo sapiens
tcctccgacccctttccagccaaagtccccccaccccttcagagaagcagcctcaaattccagaagtgga

SEQ ID NO: 161374 - DNA, 70 bp, Homo sapiens
aaagtccccccaccccttcagagaagcagcctcaaattccagaagtggaggctccagcctccccgcgagg

SEQ ID NO: 161375 - DNA, 74 bp, Homo sapiens
cccttcagagaagcagcctcaaattccagaagtggaggctccagcctccccgcgagggtccagccccacagtct

SEQ ID NO: 161376 - DNA, 75 bp, Homo sapiens
agagaagcagcctcaaattccagaagtggaggctccagcctccccgcgagggtccagccccacagtcttctggga

SEQ ID NO: 161377 - DNA, 74 bp, Homo sapiens
aaattccagaagtggaggctccagcctccccgcgagggtccagccccacagtcttctgggagccattgtggcca

SEQ ID NO: 161378 - DNA, 75 bp, Homo sapiens
cgcgagggtccagccccacagtcttctgggagccattgtggccagggacggcctctggactgccaggctgggttg

SEQ ID NO: 161379 - DNA, 75 bp, Homo sapiens
tccagccccacagtcttctgggagccattgtggccagggacggcctctggactgccaggctgggttggggaccca

SEQ ID NO: 161380 - DNA, 73 bp, Homo sapiens
agtcttctgggagccattgtggccagggacggcctctggactgccaggctgggttggggacccagggaacatc

SEQ ID NO: 161381 - DNA, 73 bp, Homo sapiens
agccattgtggccagggacggcctctggactgccaggctgggttggggacccagggaacatcggtctactcag

SEQ ID NO: 161382 - DNA, 74 bp, Homo sapiens
ttgtggccagggacggcctctggactgccaggctgggttggggacccagggaacatcggtctactcaggtgtga

SEQ ID NO: 161383 - DNA, 74 bp, Homo sapiens
gcctctggactgccaggctgggttggggacccagggaacatcggtctactcaggtgtgagggggcaggtctgac

SEQ ID NO: 161384 - DNA, 72 bp, Homo sapiens
actgccaggctgggttggggacccagggaacatcggtctactcaggtgtgagggggcaggtctgacctgccc

SEQ ID NO: 161385 - DNA, 70 bp, Homo sapiens
tgggttggggacccagggaacatcggtctactcaggtgtgagggggcaggtctgacctgccccaaagttg

SEQ ID NO: 161386 - DNA, 73 bp, Homo sapiens
acccagggaacatcggtctactcaggtgtgagggggcaggtctgacctgccccaaagttggctccatcctgga

SEQ ID NO: 161387 - DNA, 73 bp, Homo sapiens
aacatcggtctactcaggtgtgagggggcaggtctgacctgccccaaagttggctccatcctggacaactcgg

SEQ ID NO: 161388 - DNA, 76 bp, Homo sapiens
ctactcaggtgtgagggggcaggtctgacctgccccaaagttggctccatcctggacaactcggtgagaggcagtg

SEQ ID NO: 161389 - DNA, 77 bp, Homo sapiens
ggggcaggtctgacctgccccaaagttggctccatcctggacaactcggtgagaggcagtgggcaagtgatcttgga

SEQ ID NO: 161390 - DNA, 77 bp, Homo sapiens
aggtctgacctgccccaaagttggctccatcctggacaactcggtgagaggcagtgggcaagtgatcttggagatgg

SEQ ID NO: 161391 - DNA, 81 bp, Homo sapiens
ttggctccatcctggacaactcggtgagaggcagtgggcaagtgatcttggagatgggtgggcaggtgattctgtgggcag

SEQ ID NO: 161392 - DNA, 81 bp, Homo sapiens
ctggacaactcggtgagaggcagtgggcaagtgatcttggagatgggtgggcaggtgattctgtgggcaggggatgtgctc

SEQ ID NO: 161393 - DNA, 82 bp, Homo sapiens
tgagaggcagtgggcaagtgatcttggagatgggtgggcaggtgattctgtgggcaggggatgtgctcccctgcacctctgg

SEQ ID NO: 161394 - DNA, 81 bp, Homo sapiens
tgggcaagtgatcttggagatgggtgggcaggtgattctgtgggcaggggatgtgctcccctgcacctctggggtgcagaa

SEQ ID NO: 161395 - DNA, 77 bp, Homo sapiens
atcttggagatgggtgggcaggtgattctgtgggcaggggatgtgctcccctgcacctctggggtgcagaaacctct

SEQ ID NO: 161396 - DNA, 78 bp, Homo sapiens
tgggtgggcaggtgattctgtgggcaggggatgtgctcccctgcacctctggggtgcagaaacctcttgcctccagat

SEQ ID NO: 161397 - DNA, 76 bp, Homo sapiens
atgtgctcccctgcacctctggggtgcagaaacctcttgcctccagatttgggtggagcctctgtgggaaccatag

SEQ ID NO: 161398 - DNA, 76 bp, Homo sapiens
tgcacctctggggtgcagaaacctcttgcctccagatttgggtggagcctctgtgggaaccataggaagtgtgtgg

SEQ ID NO: 161399 - DNA, 75 bp, Homo sapiens
gggtgcagaaacctcttgcctccagatttgggtggagcctctgtgggaaccataggaagtgtgtgggctgccttc

SEQ ID NO: 161400 - DNA, 73 bp, Homo sapiens
agaaacctcttgcctccagatttgggtggagcctctgtgggaaccataggaagtgtgtgggctgccttcctgg

SEQ ID NO: 161401 - DNA, 75 bp, Homo sapiens
ttgcctccagatttgggtggagcctctgtgggaaccataggaagtgtgtgggctgccttcctgggcaagtatttc

SEQ ID NO: 161402 - DNA, 72 bp, Homo sapiens
atttgggtggagcctctgtgggaaccataggaagtgtgtgggctgccttcctgggcaagtatttcccagtgg

SEQ ID NO: 161403 - DNA, 72 bp, Homo sapiens
agcctctgtgggaaccataggaagtgtgtgggctgccttcctgggcaagtatttcccagtgggaagttggag

SEQ ID NO: 161404 - DNA, 70 bp, Homo sapiens
cataggaagtgtgtgggctgccttcctgggcaagtatttcccagtgggaagttggagggggctttaacaa

SEQ ID NO: 161405 - DNA, 68 bp, Homo sapiens
tgtgtgggctgccttcctgggcaagtatttcccagtgggaagttggagggggctttaacaaagtttta

SEQ ID NO: 161406 - DNA, 66 bp, Homo sapiens
aagttggagggggctttaacaaagttttactccctcccctgttcccctgatctagtgctcaggacc

SEQ ID NO: 161407 - DNA, 69 bp, Homo sapiens
aacaaagttttactccctcccctgttcccctgatctagtgctcaggacccttcaccatcaggaattcct

SEQ ID NO: 161408 - DNA, 80 bp, Homo sapiens
tgttcccctgatctagtgctcaggacccttcaccatcaggaattccttcctgtcatctaacctcagtcctgcctactgca

SEQ ID NO: 161409 - DNA, 80 bp, Homo sapiens
atctagtgctcaggacccttcaccatcaggaattccttcctgtcatctaacctcagtcctgcctactgcagttccagcca

SEQ ID NO: 161410 - DNA, 77 bp, Homo sapiens
gacccttcaccatcaggaattccttcctgtcatctaacctcagtcctgcctactgcagttccagccaacctgctctt

SEQ ID NO: 161411 - DNA, 79 bp, Homo sapiens
catcaggaattccttcctgtcatctaacctcagtcctgcctactgcagttccagccaacctgctctttcctgagttcaa

SEQ ID NO: 161412 - DNA, 77 bp, Homo sapiens
aattccttcctgtcatctaacctcagtcctgcctactgcagttccagccaacctgctctttcctgagttcaaagcag

SEQ ID NO: 161413 - DNA, 79 bp, Homo sapiens
cctgtcatctaacctcagtcctgcctactgcagttccagccaacctgctctttcctgagttcaaagcaggtggagactg

SEQ ID NO: 161414 - DNA, 79 bp, Homo sapiens
tcagtcctgcctactgcagttccagccaacctgctctttcctgagttcaaagcaggtggagactggctggttaccatct

SEQ ID NO: 161415 - DNA, 78 bp, Homo sapiens
cctactgcagttccagccaacctgctctttcctgagttcaaagcaggtggagactggctggttaccatctttgcactg

SEQ ID NO: 161416 - DNA, 75 bp, Homo sapiens
agttccagccaacctgctctttcctgagttcaaagcaggtggagactggctggttaccatctttgcactggccct

SEQ ID NO: 161417 - DNA, 75 bp, Homo sapiens
aacctgctctttcctgagttcaaagcaggtggagactggctggttaccatctttgcactggcccttcggagattc

SEQ ID NO: 161418 - DNA, 76 bp, Homo sapiens
tgagttcaaagcaggtggagactggctggttaccatctttgcactggcccttcggagattcggggactcagttctg

SEQ ID NO: 161419 - DNA, 73 bp, Homo sapiens
aaagcaggtggagactggctggttaccatctttgcactggcccttcggagattcggggactcagttctggtgg

SEQ ID NO: 161420 - DNA, 71 bp, Homo sapiens
ctggttaccatctttgcactggcccttcggagattcggggactcagttctggtggggtcaccctccctgtc

SEQ ID NO: 161421 - DNA, 71 bp, Homo sapiens
tctttgcactggcccttcggagattcggggactcagttctggtggggtcaccctccctgtcctcccgcctg

SEQ ID NO: 161422 - DNA, 68 bp, Homo sapiens
cccttcggagattcggggactcagttctggtggggtcaccctccctgtcctcccgcctgtgggaggga

SEQ ID NO: 161423 - DNA, 84 bp, Homo sapiens
ggctggctcaggcatcgtctcccgcaatgggcagagagagcagagacaggtggaccaacagacagctggcccctggaggcagaa

SEQ ID NO: 161424 - DNA, 82 bp, Homo sapiens
ctcaggcatcgtctcccgcaatgggcagagagagcagagacaggtggaccaacagacagctggcccctggaggcagaaaggc

SEQ ID NO: 161425 - DNA, 79 bp, Homo sapiens
tctcccgcaatgggcagagagagcagagacaggtggaccaacagacagctggcccctggaggcagaaaggcccttctaa

SEQ ID NO: 161426 - DNA, 79 bp, Homo sapiens
gcagagagagcagagacaggtggaccaacagacagctggcccctggaggcagaaaggcccttctaacttccagattgta

SEQ ID NO: 161427 - DNA, 77 bp, Homo sapiens
cagagacaggtggaccaacagacagctggcccctggaggcagaaaggcccttctaacttccagattgtatgcttgag

SEQ ID NO: 161428 - DNA, 77 bp, Homo sapiens
acaggtggaccaacagacagctggcccctggaggcagaaaggcccttctaacttccagattgtatgcttgagtgatg

SEQ ID NO: 161429 - DNA, 76 bp, Homo sapiens
aacagacagctggcccctggaggcagaaaggcccttctaacttccagattgtatgcttgagtgatgggtccccagc

SEQ ID NO: 161430 - DNA, 74 bp, Homo sapiens
ccctggaggcagaaaggcccttctaacttccagattgtatgcttgagtgatgggtccccagcccaagcccactc

SEQ ID NO: 161431 - DNA, 73 bp, Homo sapiens
aggcagaaaggcccttctaacttccagattgtatgcttgagtgatgggtccccagcccaagcccactcttccc

SEQ ID NO: 161432 - DNA, 78 bp, Homo sapiens
tatgcttgagtgatgggtccccagcccaagcccactcttccctcagctcacccttcagcctgttccttcttgccctga

SEQ ID NO: 161433 - DNA, 73 bp, Homo sapiens
agtgatgggtccccagcccaagcccactcttccctcagctcacccttcagcctgttccttcttgccctgaccc

SEQ ID NO: 161434 - DNA, 77 bp, Homo sapiens
actcttccctcagctcacccttcagcctgttccttcttgccctgaccccagcccgtgcagctgctctactccaggaa

SEQ ID NO: 161435 - DNA, 80 bp, Homo sapiens
tccctcagctcacccttcagcctgttccttcttgccctgaccccagcccgtgcagctgctctactccaggaatggatgtg

SEQ ID NO: 161436 - DNA, 78 bp, Homo sapiens
ttcagcctgttccttcttgccctgaccccagcccgtgcagctgctctactccaggaatggatgtggggactcttcctg

SEQ ID NO: 161437 - DNA, 79 bp, Homo sapiens
agcccgtgcagctgctctactccaggaatggatgtggggactcttcctgggttctggctcctgcatagctcaccccacc

SEQ ID NO: 161438 - DNA, 83 bp, Homo sapiens
ctgctctactccaggaatggatgtggggactcttcctgggttctggctcctgcatagctcaccccacctcatcatgagcctca

SEQ ID NO: 161439 - DNA, 80 bp, Homo sapiens
ctactccaggaatggatgtggggactcttcctgggttctggctcctgcatagctcaccccacctcatcatgagcctcaac

SEQ ID NO: 161440 - DNA, 82 bp, Homo sapiens
aatggatgtggggactcttcctgggttctggctcctgcatagctcaccccacctcatcatgagcctcaactgcctacatctg

SEQ ID NO: 161441 - DNA, 84 bp, Homo sapiens
actcttcctgggttctggctcctgcatagctcaccccacctcatcatgagcctcaactgcctacatctggggcaagcagcacac

SEQ ID NO: 161442 - DNA, 89 bp, Homo sapiens
ttctggctcctgcatagctcaccccacctcatcatgagcctcaactgcctacatctggggcaagcagcacaccggctgcagatgggaca

SEQ ID NO: 161443 - DNA, 89 bp, Homo sapiens
ctcctgcatagctcaccccacctcatcatgagcctcaactgcctacatctggggcaagcagcacaccggctgcagatgggacagccagc

SEQ ID NO: 161444 - DNA, 85 bp, Homo sapiens
accccacctcatcatgagcctcaactgcctacatctggggcaagcagcacaccggctgcagatgggacagccagccctgcctatc

SEQ ID NO: 161445 - DNA, 87 bp, Homo sapiens
acctcatcatgagcctcaactgcctacatctggggcaagcagcacaccggctgcagatgggacagccagccctgcctatctggacag

SEQ ID NO: 161446 - DNA, 85 bp, Homo sapiens
agcctcaactgcctacatctggggcaagcagcacaccggctgcagatgggacagccagccctgcctatctggacaggcccctgca

SEQ ID NO: 161447 - DNA, 86 bp, Homo sapiens
tgcctacatctggggcaagcagcacaccggctgcagatgggacagccagccctgcctatctggacaggcccctgcagcctctgtcc

SEQ ID NO: 161448 - DNA, 83 bp, Homo sapiens
gggcaagcagcacaccggctgcagatgggacagccagccctgcctatctggacaggcccctgcagcctctgtcccctggccta

SEQ ID NO: 161449 - DNA, 78 bp, Homo sapiens
agatgggacagccagccctgcctatctggacaggcccctgcagcctctgtcccctggcctagcctctctgtccttccc

SEQ ID NO: 161450 - DNA, 81 bp, Homo sapiens
ctatctggacaggcccctgcagcctctgtcccctggcctagcctctctgtccttccctgagtcacagagagcaagccaaga

SEQ ID NO: 161451 - DNA, 78 bp, Homo sapiens
agcctctgtcccctggcctagcctctctgtccttccctgagtcacagagagcaagccaagacatccagggaaagagga

SEQ ID NO: 161452 - DNA, 76 bp, Homo sapiens
ctagcctctctgtccttccctgagtcacagagagcaagccaagacatccagggaaagaggaagaaaggccttagtg

SEQ ID NO: 161453 - DNA, 78 bp, Homo sapiens
tctgtccttccctgagtcacagagagcaagccaagacatccagggaaagaggaagaaaggccttagtgtgccccagca

SEQ ID NO: 161454 - DNA, 79 bp, Homo sapiens
agtcacagagagcaagccaagacatccagggaaagaggaagaaaggccttagtgtgccccagcagtctggctgcgtcca

SEQ ID NO: 161455 - DNA, 75 bp, Homo sapiens
acatccagggaaagaggaagaaaggccttagtgtgccccagcagtctggctgcgtccagccaccatcacccggaa

SEQ ID NO: 161456 - DNA, 76 bp, Homo sapiens
aaagaggaagaaaggccttagtgtgccccagcagtctggctgcgtccagccaccatcacccggaaggatgcccaca

SEQ ID NO: 161457 - DNA, 79 bp, Homo sapiens
aagaaaggccttagtgtgccccagcagtctggctgcgtccagccaccatcacccggaaggatgcccacaaggcagctga

SEQ ID NO: 161458 - DNA, 79 bp, Homo sapiens
ccttagtgtgccccagcagtctggctgcgtccagccaccatcacccggaaggatgcccacaaggcagctgaccctgaaa

SEQ ID NO: 161459 - DNA, 79 bp, Homo sapiens
cccagcagtctggctgcgtccagccaccatcacccggaaggatgcccacaaggcagctgaccctgaaagcagcctcccc

SEQ ID NO: 161460 - DNA, 80 bp, Homo sapiens
ctgcgtccagccaccatcacccggaaggatgcccacaaggcagctgaccctgaaagcagcctccccctcatggagagtca

SEQ ID NO: 161461 - DNA, 80 bp, Homo sapiens
agccaccatcacccggaaggatgcccacaaggcagctgaccctgaaagcagcctccccctcatggagagtcagcagcttg

SEQ ID NO: 161462 - DNA, 81 bp, Homo sapiens
cggaaggatgcccacaaggcagctgaccctgaaagcagcctccccctcatggagagtcagcagcttgggcagccacttcca

SEQ ID NO: 161463 - DNA, 81 bp, Homo sapiens
atgcccacaaggcagctgaccctgaaagcagcctccccctcatggagagtcagcagcttgggcagccacttccaggccagg

SEQ ID NO: 161464 - DNA, 80 bp, Homo sapiens
accctgaaagcagcctccccctcatggagagtcagcagcttgggcagccacttccaggccagggtggtggcttctctgca

SEQ ID NO: 161465 - DNA, 81 bp, Homo sapiens
agcctccccctcatggagagtcagcagcttgggcagccacttccaggccagggtggtggcttctctgcagaccagctgagg

SEQ ID NO: 161466 - DNA, 81 bp, Homo sapiens
tcagcagcttgggcagccacttccaggccagggtggtggcttctctgcagaccagctgaggggaggactcctgggtggaca

SEQ ID NO: 161467 - DNA, 76 bp, Homo sapiens
agccacttccaggccagggtggtggcttctctgcagaccagctgaggggaggactcctgggtggacagcctttgac

SEQ ID NO: 161468 - DNA, 76 bp, Homo sapiens
ttccaggccagggtggtggcttctctgcagaccagctgaggggaggactcctgggtggacagcctttgacgtccac

SEQ ID NO: 161469 - DNA, 80 bp, Homo sapiens
tctgcagaccagctgaggggaggactcctgggtggacagcctttgacgtccaccccacgctgatgcagaagctcccagaa

SEQ ID NO: 161470 - DNA, 77 bp, Homo sapiens
agctgaggggaggactcctgggtggacagcctttgacgtccaccccacgctgatgcagaagctcccagaacactcag

SEQ ID NO: 161471 - DNA, 75 bp, Homo sapiens
aggactcctgggtggacagcctttgacgtccaccccacgctgatgcagaagctcccagaacactcaggaaacttc

SEQ ID NO: 161472 - DNA, 77 bp, Homo sapiens
tgggtggacagcctttgacgtccaccccacgctgatgcagaagctcccagaacactcaggaaacttctccggacaga

SEQ ID NO: 161473 - DNA, 77 bp, Homo sapiens
tttgacgtccaccccacgctgatgcagaagctcccagaacactcaggaaacttctccggacagagccctccttgtca

SEQ ID NO: 161474 - DNA, 77 bp, Homo sapiens
gtccaccccacgctgatgcagaagctcccagaacactcaggaaacttctccggacagagccctccttgtcaacttga

SEQ ID NO: 161475 - DNA, 76 bp, Homo sapiens
tgatgcagaagctcccagaacactcaggaaacttctccggacagagccctccttgtcaacttgaggccctcccaag

SEQ ID NO: 161476 - DNA, 72 bp, Homo sapiens
agaagctcccagaacactcaggaaacttctccggacagagccctccttgtcaacttgaggccctcccaaggc

SEQ ID NO: 161477 - DNA, 72 bp, Homo sapiens
agaacactcaggaaacttctccggacagagccctccttgtcaacttgaggccctcccaaggccctctactgc

SEQ ID NO: 161478 - DNA, 70 bp, Homo sapiens
aaacttctccggacagagccctccttgtcaacttgaggccctcccaaggccctctactgccctctgggtc

SEQ ID NO: 161479 - DNA, 74 bp, Homo sapiens
acagagccctccttgtcaacttgaggccctcccaaggccctctactgccctctgggtccagcagagggagtgga

SEQ ID NO: 161480 - DNA, 72 bp, Homo sapiens
ccctccttgtcaacttgaggccctcccaaggccctctactgccctctgggtccagcagagggagtggaggaa

SEQ ID NO: 161481 - DNA, 72 bp, Homo sapiens
aacttgaggccctcccaaggccctctactgccctctgggtccagcagagggagtggaggaagggccactgcc

SEQ ID NO: 161482 - DNA, 74 bp, Homo sapiens
ccaaggccctctactgccctctgggtccagcagagggagtggaggaagggccactgcctcccacctagagcttc

SEQ ID NO: 161483 - DNA, 77 bp, Homo sapiens
tctactgccctctgggtccagcagagggagtggaggaagggccactgcctcccacctagagcttctccgaatgacaa

SEQ ID NO: 161484 - DNA, 80 bp, Homo sapiens
tctgggtccagcagagggagtggaggaagggccactgcctcccacctagagcttctccgaatgacaatcagctcgtgcca

SEQ ID NO: 161485 - DNA, 77 bp, Homo sapiens
agcagagggagtggaggaagggccactgcctcccacctagagcttctccgaatgacaatcagctcgtgccaggtggg

SEQ ID NO: 161486 - DNA, 79 bp, Homo sapiens
tggaggaagggccactgcctcccacctagagcttctccgaatgacaatcagctcgtgccaggtggggaccaggatatga

SEQ ID NO: 161487 - DNA, 79 bp, Homo sapiens
ccactgcctcccacctagagcttctccgaatgacaatcagctcgtgccaggtggggaccaggatatgactcctggtgcc

SEQ ID NO: 161488 - DNA, 78 bp, Homo sapiens
cctcccacctagagcttctccgaatgacaatcagctcgtgccaggtggggaccaggatatgactcctggtgcccaggc

SEQ ID NO: 161489 - DNA, 80 bp, Homo sapiens
tagagcttctccgaatgacaatcagctcgtgccaggtggggaccaggatatgactcctggtgcccaggccctgggcctgc

SEQ ID NO: 161490 - DNA, 77 bp, Homo sapiens
tcagctcgtgccaggtggggaccaggatatgactcctggtgcccaggccctgggcctgctccttgccaccaaccgaa

SEQ ID NO: 161491 - DNA, 74 bp, Homo sapiens
gtggggaccaggatatgactcctggtgcccaggccctgggcctgctccttgccaccaaccgaaccgtgaatgta

SEQ ID NO: 161492 - DNA, 73 bp, Homo sapiens
accaggatatgactcctggtgcccaggccctgggcctgctccttgccaccaaccgaaccgtgaatgtagggcc

SEQ ID NO: 161493 - DNA, 74 bp, Homo sapiens
tgactcctggtgcccaggccctgggcctgctccttgccaccaaccgaaccgtgaatgtagggcccccagcctca

SEQ ID NO: 161494 - DNA, 71 bp, Homo sapiens
cccaggccctgggcctgctccttgccaccaaccgaaccgtgaatgtagggcccccagcctcacctctgccc

SEQ ID NO: 161495 - DNA, 72 bp, Homo sapiens
cctgctccttgccaccaaccgaaccgtgaatgtagggcccccagcctcacctctgccccaggaccaacaaca

SEQ ID NO: 161496 - DNA, 70 bp, Homo sapiens
cttgccaccaaccgaaccgtgaatgtagggcccccagcctcacctctgccccaggaccaacaacaccctg

SEQ ID NO: 161497 - DNA, 68 bp, Homo sapiens
aaccgaaccgtgaatgtagggcccccagcctcacctctgccccaggaccaacaacaccctggtttgga

SEQ ID NO: 161498 - DNA, 72 bp, Homo sapiens
tgaatgtagggcccccagcctcacctctgccccaggaccaacaacaccctggtttggagctgggaggaagaa

SEQ ID NO: 161499 - DNA, 71 bp, Homo sapiens
ctcacctctgccccaggaccaacaacaccctggtttggagctgggaggaagaagggggcctgagagagccc

SEQ ID NO: 161500 - DNA, 70 bp, Homo sapiens
aggaccaacaacaccctggtttggagctgggaggaagaagggggcctgagagagccccaggtccattcta

SEQ ID NO: 161501 - DNA, 68 bp, Homo sapiens
aacaacaccctggtttggagctgggaggaagaagggggcctgagagagccccaggtccattctacccc

SEQ ID NO: 161502 - DNA, 75 bp, Homo sapiens
tttggagctgggaggaagaagggggcctgagagagccccaggtccattctacccccagcttcactcagcactgga

SEQ ID NO: 161503 - DNA, 78 bp, Homo sapiens
aggaagaagggggcctgagagagccccaggtccattctacccccagcttcactcagcactggagctggcagagacgca

SEQ ID NO: 161504 - DNA, 74 bp, Homo sapiens
actcagcactggagctggcagagacgcaaaacccagtctgcccttgggattccaaacctccctagggctcccaa

SEQ ID NO: 161505 - DNA, 73 bp, Homo sapiens
ggagctggcagagacgcaaaacccagtctgcccttgggattccaaacctccctagggctcccaactgacctca

SEQ ID NO: 161506 - DNA, 70 bp, Homo sapiens
agagacgcaaaacccagtctgcccttgggattccaaacctccctagggctcccaactgacctcaggcctc

SEQ ID NO: 161507 - DNA, 70 bp, Homo sapiens
aaaacccagtctgcccttgggattccaaacctccctagggctcccaactgacctcaggcctctgagtcac

SEQ ID NO: 161508 - DNA, 74 bp, Homo sapiens
cccttgggattccaaacctccctagggctcccaactgacctcaggcctctgagtcactgaatgtcaccaggaga

SEQ ID NO: 161509 - DNA, 74 bp, Homo sapiens
gggattccaaacctccctagggctcccaactgacctcaggcctctgagtcactgaatgtcaccaggagaggtgg

SEQ ID NO: 161510 - DNA, 74 bp, Homo sapiens
tcccaactgacctcaggcctctgagtcactgaatgtcaccaggagaggtgggggagggaaagtgggccagtggg

SEQ ID NO: 161511 - DNA, 71 bp, Homo sapiens
acctcaggcctctgagtcactgaatgtcaccaggagaggtgggggagggaaagtgggccagtggggagggg

SEQ ID NO: 161512 - DNA, 68 bp, Homo sapiens
aggagaggtgggggagggaaagtgggccagtggggagggggtcacctaggggactgcctctgtgcctc

SEQ ID NO: 161513 - DNA, 71 bp, Homo sapiens
ggagggaaagtgggccagtggggagggggtcacctaggggactgcctctgtgcctctccccaggaagcatc

SEQ ID NO: 161514 - DNA, 72 bp, Homo sapiens
aaagtgggccagtggggagggggtcacctaggggactgcctctgtgcctctccccaggaagcatccagggca

SEQ ID NO: 161515 - DNA, 75 bp, Homo sapiens
gggagggggtcacctaggggactgcctctgtgcctctccccaggaagcatccagggcagaggaagccacatctcc

SEQ ID NO: 161516 - DNA, 76 bp, Homo sapiens
gggtcacctaggggactgcctctgtgcctctccccaggaagcatccagggcagaggaagccacatctcccggtgcc

SEQ ID NO: 161517 - DNA, 74 bp, Homo sapiens
aggggactgcctctgtgcctctccccaggaagcatccagggcagaggaagccacatctcccggtgcccccaacc

SEQ ID NO: 161518 - DNA, 78 bp, Homo sapiens
ctctgtgcctctccccaggaagcatccagggcagaggaagccacatctcccggtgcccccaaccccagctgcagcctc

SEQ ID NO: 161519 - DNA, 77 bp, Homo sapiens
caggaagcatccagggcagaggaagccacatctcccggtgcccccaaccccagctgcagcctcctccccctgagcat

SEQ ID NO: 161520 - DNA, 76 bp, Homo sapiens
agaggaagccacatctcccggtgcccccaaccccagctgcagcctcctccccctgagcattcattctctccaccag

SEQ ID NO: 161521 - DNA, 75 bp, Homo sapiens
acatctcccggtgcccccaaccccagctgcagcctcctccccctgagcattcattctctccaccaggcctccagg

SEQ ID NO: 161522 - DNA, 75 bp, Homo sapiens
cccccaaccccagctgcagcctcctccccctgagcattcattctctccaccaggcctccaggtcctgagcccttc

SEQ ID NO: 161523 - DNA, 78 bp, Homo sapiens
cagctgcagcctcctccccctgagcattcattctctccaccaggcctccaggtcctgagcccttcctctgtaaaagtg

SEQ ID NO: 161524 - DNA, 76 bp, Homo sapiens
ctcctccccctgagcattcattctctccaccaggcctccaggtcctgagcccttcctctgtaaaagtgtcacacca

SEQ ID NO: 161525 - DNA, 77 bp, Homo sapiens
cctgagcattcattctctccaccaggcctccaggtcctgagcccttcctctgtaaaagtgtcacaccacctccctca

SEQ ID NO: 161526 - DNA, 75 bp, Homo sapiens
attcattctctccaccaggcctccaggtcctgagcccttcctctgtaaaagtgtcacaccacctccctcagcact

SEQ ID NO: 161527 - DNA, 75 bp, Homo sapiens
caggcctccaggtcctgagcccttcctctgtaaaagtgtcacaccacctccctcagcacttccccatcacaacaa

SEQ ID NO: 161528 - DNA, 75 bp, Homo sapiens
aggtcctgagcccttcctctgtaaaagtgtcacaccacctccctcagcacttccccatcacaacaacctatgtca

SEQ ID NO: 161529 - DNA, 77 bp, Homo sapiens
agcccttcctctgtaaaagtgtcacaccacctccctcagcacttccccatcacaacaacctatgtcactgactcaga

SEQ ID NO: 161530 - DNA, 83 bp, Homo sapiens
tgtcacaccacctccctcagcacttccccatcacaacaacctatgtcactgactcagatgcagggtctgctcaccccaacaca

SEQ ID NO: 161531 - DNA, 81 bp, Homo sapiens
acctccctcagcacttccccatcacaacaacctatgtcactgactcagatgcagggtctgctcaccccaacacatgccttc

SEQ ID NO: 161532 - DNA, 79 bp, Homo sapiens
acttccccatcacaacaacctatgtcactgactcagatgcagggtctgctcaccccaacacatgccttccctccccagc

SEQ ID NO: 161533 - DNA, 82 bp, Homo sapiens
atcacaacaacctatgtcactgactcagatgcagggtctgctcaccccaacacatgccttccctccccagccacaccgtgca

SEQ ID NO: 161534 - DNA, 79 bp, Homo sapiens
cctatgtcactgactcagatgcagggtctgctcaccccaacacatgccttccctccccagccacaccgtgcacgaaggg

SEQ ID NO: 161535 - DNA, 80 bp, Homo sapiens
tgactcagatgcagggtctgctcaccccaacacatgccttccctccccagccacaccgtgcacgaagggggcacaggaga

SEQ ID NO: 161536 - DNA, 74 bp, Homo sapiens
agggtctgctcaccccaacacatgccttccctccccagccacaccgtgcacgaagggggcacaggagaggagag

SEQ ID NO: 161537 - DNA, 75 bp, Homo sapiens
ctcaccccaacacatgccttccctccccagccacaccgtgcacgaagggggcacaggagaggagaggggctgtgc

SEQ ID NO: 161538 - DNA, 74 bp, Homo sapiens
acatgccttccctccccagccacaccgtgcacgaagggggcacaggagaggagaggggctgtgccccaggctcc

SEQ ID NO: 161539 - DNA, 74 bp, Homo sapiens
cccagccacaccgtgcacgaagggggcacaggagaggagaggggctgtgccccaggctccccatttcccagctc

SEQ ID NO: 161540 - DNA, 75 bp, Homo sapiens
acaccgtgcacgaagggggcacaggagaggagaggggctgtgccccaggctccccatttcccagctcctcacaga

SEQ ID NO: 161541 - DNA, 72 bp, Homo sapiens
aagggggcacaggagaggagaggggctgtgccccaggctccccatttcccagctcctcacagaggcctggtt

SEQ ID NO: 161542 - DNA, 77 bp, Homo sapiens
ggagaggagaggggctgtgccccaggctccccatttcccagctcctcacagaggcctggtttgctcagtcttctgaa

SEQ ID NO: 161543 - DNA, 76 bp, Homo sapiens
agaggggctgtgccccaggctccccatttcccagctcctcacagaggcctggtttgctcagtcttctgaactccag

SEQ ID NO: 161544 - DNA, 75 bp, Homo sapiens
cccaggctccccatttcccagctcctcacagaggcctggtttgctcagtcttctgaactccagggaccagccctg

SEQ ID NO: 161545 - DNA, 76 bp, Homo sapiens
ccatttcccagctcctcacagaggcctggtttgctcagtcttctgaactccagggaccagccctggtgggcatggg

SEQ ID NO: 161546 - DNA, 76 bp, Homo sapiens
tcccagctcctcacagaggcctggtttgctcagtcttctgaactccagggaccagccctggtgggcatggggtggg

SEQ ID NO: 161547 - DNA, 73 bp, Homo sapiens
agaggcctggtttgctcagtcttctgaactccagggaccagccctggtgggcatggggtggggagcagggagt

SEQ ID NO: 161548 - DNA, 74 bp, Homo sapiens
tggtttgctcagtcttctgaactccagggaccagccctggtgggcatggggtggggagcagggagttgcccttc

SEQ ID NO: 161549 - DNA, 68 bp, Homo sapiens
actccagggaccagccctggtgggcatggggtggggagcagggagttgcccttcccctccctcgggaa

SEQ ID NO: 161550 - DNA, 68 bp, Homo sapiens
ccctggtgggcatggggtggggagcagggagttgcccttcccctccctcgggaagccacctaagaatg

SEQ ID NO: 161551 - DNA, 71 bp, Homo sapiens
ggagcagggagttgcccttcccctccctcgggaagccacctaagaatgtttacatgccaaacagaatgtaa

SEQ ID NO: 161552 - DNA, 69 bp, Homo sapiens
agggagttgcccttcccctccctcgggaagccacctaagaatgtttacatgccaaacagaatgtaacac

SEQ ID NO: 161553 - DNA, 68 bp, Homo sapiens
ccctccctcgggaagccacctaagaatgtttacatgccaaacagaatgtaacacccctccccaagccc

SEQ ID NO: 161554 - DNA, 73 bp, Homo sapiens
acctaagaatgtttacatgccaaacagaatgtaacacccctccccaagcccttcccagtcactgcatggcctc

SEQ ID NO: 161555 - DNA, 78 bp, Homo sapiens
atgtttacatgccaaacagaatgtaacacccctccccaagcccttcccagtcactgcatggcctctgcccatcctgca

SEQ ID NO: 161556 - DNA, 75 bp, Homo sapiens
aaacagaatgtaacacccctccccaagcccttcccagtcactgcatggcctctgcccatcctgcacctgtccacc

SEQ ID NO: 161557 - DNA, 74 bp, Homo sapiens
atgtaacacccctccccaagcccttcccagtcactgcatggcctctgcccatcctgcacctgtccaccccaccc

SEQ ID NO: 161558 - DNA, 76 bp, Homo sapiens
ccaagcccttcccagtcactgcatggcctctgcccatcctgcacctgtccaccccaccccaacaccctggaagcca

SEQ ID NO: 161559 - DNA, 80 bp, Homo sapiens
tcccagtcactgcatggcctctgcccatcctgcacctgtccaccccaccccaacaccctggaagccactgtcaatgatta

SEQ ID NO: 161560 - DNA, 78 bp, Homo sapiens
actgcatggcctctgcccatcctgcacctgtccaccccaccccaacaccctggaagccactgtcaatgattagatcgg

SEQ ID NO: 161561 - DNA, 76 bp, Homo sapiens
tctgcccatcctgcacctgtccaccccaccccaacaccctggaagccactgtcaatgattagatcgggtctcggaa

SEQ ID NO: 161562 - DNA, 73 bp, Homo sapiens
tgcacctgtccaccccaccccaacaccctggaagccactgtcaatgattagatcgggtctcggaagggaagta

SEQ ID NO: 161563 - DNA, 72 bp, Homo sapiens
accccaccccaacaccctggaagccactgtcaatgattagatcgggtctcggaagggaagtagccatcacac

SEQ ID NO: 161564 - DNA, 73 bp, Homo sapiens
aacaccctggaagccactgtcaatgattagatcgggtctcggaagggaagtagccatcacaccattaaaaagc

SEQ ID NO: 161565 - DNA, 73 bp, Homo sapiens
aagccactgtcaatgattagatcgggtctcggaagggaagtagccatcacaccattaaaaagcctgtggacct

SEQ ID NO: 161566 - DNA, 71 bp, Homo sapiens
actgtcaatgattagatcgggtctcggaagggaagtagccatcacaccattaaaaagcctgtggacctttt

SEQ ID NO: 161567 - DNA, 70 bp, Homo sapiens
attagatcgggtctcggaagggaagtagccatcacaccattaaaaagcctgtggacctttttctgttggc

SEQ ID NO: 161568 - DNA, 71 bp, Homo sapiens
tctcggaagggaagtagccatcacaccattaaaaagcctgtggacctttttctgttggcttggactcttct

SEQ ID NO: 161569 - DNA, 71 bp, Homo sapiens
aagtagccatcacaccattaaaaagcctgtggacctttttctgttggcttggactcttcttccctgaggga

SEQ ID NO: 161570 - DNA, 77 bp, Homo sapiens
ttttgttgagcagtcctgaaagcagttattgacacgttatgagagatgattcaacaaggacaagttcaagtattctt

SEQ ID NO: 161571 - DNA, 75 bp, Homo sapiens
agtcctgaaagcagttattgacacgttatgagagatgattcaacaaggacaagttcaagtattctttattcaaag

SEQ ID NO: 161572 - DNA, 75 bp, Homo sapiens
gaaagcagttattgacacgttatgagagatgattcaacaaggacaagttcaagtattctttattcaaagttgaaa

SEQ ID NO: 161573 - DNA, 74 bp, Homo sapiens
gacacgttatgagagatgattcaacaaggacaagttcaagtattctttattcaaagttgaaaaatgtaccatac

SEQ ID NO: 161574 - DNA, 77 bp, Homo sapiens
gagagatgattcaacaaggacaagttcaagtattctttattcaaagttgaaaaatgtaccatactgcattattgcaa

SEQ ID NO: 161575 - DNA, 72 bp, Homo sapiens
aggacaagttcaagtattctttattcaaagttgaaaaatgtaccatactgcattattgcaaaaattcactgg

SEQ ID NO: 161576 - DNA, 73 bp, Homo sapiens
attctttattcaaagttgaaaaatgtaccatactgcattattgcaaaaattcactggtacaaaacactttgca

SEQ ID NO: 161577 - DNA, 76 bp, Homo sapiens
ttcaaagttgaaaaatgtaccatactgcattattgcaaaaattcactggtacaaaacactttgcagctggtgagaa

SEQ ID NO: 161578 - DNA, 75 bp, Homo sapiens
aaaaatgtaccatactgcattattgcaaaaattcactggtacaaaacactttgcagctggtgagaaggcaataaa

SEQ ID NO: 161579 - DNA, 75 bp, Homo sapiens
catactgcattattgcaaaaattcactggtacaaaacactttgcagctggtgagaaggcaataaaaagttgattt

SEQ ID NO: 161580 - DNA, 72 bp, Homo sapiens
ttgcaaaaattcactggtacaaaacactttgcagctggtgagaaggcaataaaaagttgatttttaaactca

SEQ ID NO: 161581 - DNA, 70 bp, Homo sapiens
aaattcactggtacaaaacactttgcagctggtgagaaggcaataaaaagttgatttttaaactcattac

SEQ ID NO: 161582 - DNA, 70 bp, Homo sapiens
ggtacaaaacactttgcagctggtgagaaggcaataaaaagttgatttttaaactcattactataaatta

SEQ ID NO: 161583 - DNA, 74 bp, Homo sapiens
tgcagctggtgagaaggcaataaaaagttgatttttaaactcattactataaattattcttacagtactttgca

SEQ ID NO: 161584 - DNA, 70 bp, Homo sapiens
tggtgagaaggcaataaaaagttgatttttaaactcattactataaattattcttacagtactttgcaaa

SEQ ID NO: 161585 - DNA, 69 bp, Homo sapiens
gcaataaaaagttgatttttaaactcattactataaattattcttacagtactttgcaaattcagaatt

SEQ ID NO: 161586 - DNA, 72 bp, Homo sapiens
gatttttaaactcattactataaattattcttacagtactttgcaaattcagaatttcaaactgcatgttct

SEQ ID NO: 161587 - DNA, 72 bp, Homo sapiens
aaactcattactataaattattcttacagtactttgcaaattcagaatttcaaactgcatgttctttttcta

SEQ ID NO: 161588 - DNA, 72 bp, Homo sapiens
aattattcttacagtactttgcaaattcagaatttcaaactgcatgttctttttctaaattgcccacagtac

SEQ ID NO: 161589 - DNA, 73 bp, Homo sapiens
ttacagtactttgcaaattcagaatttcaaactgcatgttctttttctaaattgcccacagtactcgaggttc

SEQ ID NO: 161590 - DNA, 74 bp, Homo sapiens
tttgcaaattcagaatttcaaactgcatgttctttttctaaattgcccacagtactcgaggttcctgaagctaa

SEQ ID NO: 161591 - DNA, 74 bp, Homo sapiens
aatttcaaactgcatgttctttttctaaattgcccacagtactcgaggttcctgaagctaaggcagctgtttca

SEQ ID NO: 161592 - DNA, 74 bp, Homo sapiens
aaactgcatgttctttttctaaattgcccacagtactcgaggttcctgaagctaaggcagctgtttcagaggag

SEQ ID NO: 161593 - DNA, 75 bp, Homo sapiens
taaattgcccacagtactcgaggttcctgaagctaaggcagctgtttcagaggaggggggaggaggtagcagatg

SEQ ID NO: 161594 - DNA, 73 bp, Homo sapiens
agtactcgaggttcctgaagctaaggcagctgtttcagaggaggggggaggaggtagcagatgtcaagggatt

SEQ ID NO: 161595 - DNA, 73 bp, Homo sapiens
aggttcctgaagctaaggcagctgtttcagaggaggggggaggaggtagcagatgtcaagggatttccatttc

SEQ ID NO: 161596 - DNA, 76 bp, Homo sapiens
aggcagctgtttcagaggaggggggaggaggtagcagatgtcaagggatttccatttctctttcgatgccgacata

SEQ ID NO: 161597 - DNA, 75 bp, Homo sapiens
tgtttcagaggaggggggaggaggtagcagatgtcaagggatttccatttctctttcgatgccgacatacttcag

SEQ ID NO: 161598 - DNA, 78 bp, Homo sapiens
gggggaggaggtagcagatgtcaagggatttccatttctctttcgatgccgacatacttcagggcatcagcctggctg

SEQ ID NO: 161599 - DNA, 82 bp, Homo sapiens
gtagcagatgtcaagggatttccatttctctttcgatgccgacatacttcagggcatcagcctggctgtatctgaaacaaca

SEQ ID NO: 161600 - DNA, 82 bp, Homo sapiens
tccatttctctttcgatgccgacatacttcagggcatcagcctggctgtatctgaaacaacaggaaggagatgtccgctgga

SEQ ID NO: 161601 - DNA, 83 bp, Homo sapiens
ttctctttcgatgccgacatacttcagggcatcagcctggctgtatctgaaacaacaggaaggagatgtccgctggatggcca

SEQ ID NO: 161602 - DNA, 72 bp, Homo sapiens
agttcacaatccagtagaaaaagcccttagagatcatgctagaaatgtactttaccaacctgtaatcaaaaa

SEQ ID NO: 161603 - DNA, 72 bp, Homo sapiens
agtagaaaaagcccttagagatcatgctagaaatgtactttaccaacctgtaatcaaaaaacagctcttcgc

SEQ ID NO: 161604 - DNA, 75 bp, Homo sapiens
aagcccttagagatcatgctagaaatgtactttaccaacctgtaatcaaaaaacagctcttcgccagtctggatg

SEQ ID NO: 161605 - DNA, 75 bp, Homo sapiens
atgctagaaatgtactttaccaacctgtaatcaaaaaacagctcttcgccagtctggatggctctcttggcaaaa

SEQ ID NO: 161606 - DNA, 73 bp, Homo sapiens
agaaatgtactttaccaacctgtaatcaaaaaacagctcttcgccagtctggatggctctcttggcaaaaata

SEQ ID NO: 161607 - DNA, 75 bp, Homo sapiens
tttaccaacctgtaatcaaaaaacagctcttcgccagtctggatggctctcttggcaaaaatacctatcctgtga

SEQ ID NO: 161608 - DNA, 78 bp, Homo sapiens
tcaaaaaacagctcttcgccagtctggatggctctcttggcaaaaatacctatcctgtgatcaccgttaaccatcata

SEQ ID NO: 161609 - DNA, 79 bp, Homo sapiens
aaacagctcttcgccagtctggatggctctcttggcaaaaatacctatcctgtgatcaccgttaaccatcataactgca

SEQ ID NO: 161610 - DNA, 78 bp, Homo sapiens
agtctggatggctctcttggcaaaaatacctatcctgtgatcaccgttaaccatcataactgcaaagagacacactgg

SEQ ID NO: 161611 - DNA, 80 bp, Homo sapiens
atggctctcttggcaaaaatacctatcctgtgatcaccgttaaccatcataactgcaaagagacacactggtgtcagtga

SEQ ID NO: 161612 - DNA, 81 bp, Homo sapiens
cttggcaaaaatacctatcctgtgatcaccgttaaccatcataactgcaaagagacacactggtgtcagtgagcatgaaga

SEQ ID NO: 161613 - DNA, 80 bp, Homo sapiens
atacctatcctgtgatcaccgttaaccatcataactgcaaagagacacactggtgtcagtgagcatgaagacgggccacg

SEQ ID NO: 161614 - DNA, 73 bp, Homo sapiens
aagtccatcatcacaggactgaaaagggagttccaattctcacgtcaaaggtacctaccttttgcatagcagt

SEQ ID NO: 161615 - DNA, 70 bp, Homo sapiens
acaggactgaaaagggagttccaattctcacgtcaaaggtacctaccttttgcatagcagtttggattta

SEQ ID NO: 161616 - DNA, 69 bp, Homo sapiens
aaagggagttccaattctcacgtcaaaggtacctaccttttgcatagcagtttggatttaccgaatgat

SEQ ID NO: 161617 - DNA, 71 bp, Homo sapiens
agttccaattctcacgtcaaaggtacctaccttttgcatagcagtttggatttaccgaatgatttgcaaaa

SEQ ID NO: 161618 - DNA, 69 bp, Homo sapiens
cgtcaaaggtacctaccttttgcatagcagtttggatttaccgaatgatttgcaaaacgaattttgtta

SEQ ID NO: 161619 - DNA, 67 bp, Homo sapiens
aaggtacctaccttttgcatagcagtttggatttaccgaatgatttgcaaaacgaattttgttaccc

SEQ ID NO: 161620 - DNA, 72 bp, Homo sapiens
ttttgcatagcagtttggatttaccgaatgatttgcaaaacgaattttgttacccttgcgggttgcatccac

SEQ ID NO: 161621 - DNA, 68 bp, Homo sapiens
agtttggatttaccgaatgatttgcaaaacgaattttgttacccttgcgggttgcatccaccacaaaa

SEQ ID NO: 161622 - DNA, 68 bp, Homo sapiens
atttaccgaatgatttgcaaaacgaattttgttacccttgcgggttgcatccaccacaaaatctaaaa

SEQ ID NO: 161623 - DNA, 66 bp, Homo sapiens
gatttgcaaaacgaattttgttacccttgcgggttgcatccaccacaaaatctaaaaagaaaaaag

SEQ ID NO: 161624 - DNA, 69 bp, Homo sapiens
attttgttacccttgcgggttgcatccaccacaaaatctaaaaagaaaaaagtaagcacagcccagtga

SEQ ID NO: 161625 - DNA, 69 bp, Homo sapiens
ttacccttgcgggttgcatccaccacaaaatctaaaaagaaaaaagtaagcacagcccagtgaataatt

SEQ ID NO: 161626 - DNA, 83 bp, Homo sapiens
agaaggctgccacatgcaactcaggaactcactgcctcccagctctgaaacataccattgttcaagttgaacagaaagctgca

SEQ ID NO: 161627 - DNA, 82 bp, Homo sapiens
ccacatgcaactcaggaactcactgcctcccagctctgaaacataccattgttcaagttgaacagaaagctgcacatgtatt

SEQ ID NO: 161628 - DNA, 81 bp, Homo sapiens
aactcaggaactcactgcctcccagctctgaaacataccattgttcaagttgaacagaaagctgcacatgtatttatcata

SEQ ID NO: 161629 - DNA, 80 bp, Homo sapiens
aactcactgcctcccagctctgaaacataccattgttcaagttgaacagaaagctgcacatgtatttatcatacactttc

SEQ ID NO: 161630 - DNA, 80 bp, Homo sapiens
agctctgaaacataccattgttcaagttgaacagaaagctgcacatgtatttatcatacactttccctcttctgtcagct

SEQ ID NO: 161631 - DNA, 79 bp, Homo sapiens
aaacataccattgttcaagttgaacagaaagctgcacatgtatttatcatacactttccctcttctgtcagcttcatct

SEQ ID NO: 161632 - DNA, 80 bp, Homo sapiens
attgttcaagttgaacagaaagctgcacatgtatttatcatacactttccctcttctgtcagcttcatcttgagaaataa

SEQ ID NO: 161633 - DNA, 79 bp, Homo sapiens
gttgaacagaaagctgcacatgtatttatcatacactttccctcttctgtcagcttcatcttgagaaataatctaaaaa

SEQ ID NO: 161634 - DNA, 79 bp, Homo sapiens
aagctgcacatgtatttatcatacactttccctcttctgtcagcttcatcttgagaaataatctaaaaagaaagacaca

SEQ ID NO: 161635 - DNA, 75 bp, Homo sapiens
gtatttatcatacactttccctcttctgtcagcttcatcttgagaaataatctaaaaagaaagacacaggagaaa

SEQ ID NO: 161636 - DNA, 72 bp, Homo sapiens
ctttccctcttctgtcagcttcatcttgagaaataatctaaaaagaaagacacaggagaaaattcttttgga

SEQ ID NO: 161637 - DNA, 73 bp, Homo sapiens
cttctgtcagcttcatcttgagaaataatctaaaaagaaagacacaggagaaaattcttttggataaaggtga

SEQ ID NO: 161638 - DNA, 77 bp, Homo sapiens
aagtaaagttagtatatacaatgccacctgaatacaggttatcagtgccttacctctccacagtattctgagatgaa

SEQ ID NO: 161639 - DNA, 81 bp, Homo sapiens
agtatatacaatgccacctgaatacaggttatcagtgccttacctctccacagtattctgagatgaattcatttttctgca

SEQ ID NO: 161640 - DNA, 80 bp, Homo sapiens
acctgaatacaggttatcagtgccttacctctccacagtattctgagatgaattcatttttctgcacaggatctttgata

SEQ ID NO: 161641 - DNA, 78 bp, Homo sapiens
aatacaggttatcagtgccttacctctccacagtattctgagatgaattcatttttctgcacaggatctttgataaaa

SEQ ID NO: 161642 - DNA, 78 bp, Homo sapiens
atcagtgccttacctctccacagtattctgagatgaattcatttttctgcacaggatctttgataaaaatcccccagc

SEQ ID NO: 161643 - DNA, 79 bp, Homo sapiens
tacctctccacagtattctgagatgaattcatttttctgcacaggatctttgataaaaatcccccagcctgccacgtca

SEQ ID NO: 161644 - DNA, 82 bp, Homo sapiens
tattctgagatgaattcatttttctgcacaggatctttgataaaaatcccccagcctgccacgtcagatggtgccagcaata

SEQ ID NO: 161645 - DNA, 81 bp, Homo sapiens
aattcatttttctgcacaggatctttgataaaaatcccccagcctgccacgtcagatggtgccagcaatagatgctagaga

SEQ ID NO: 161646 - DNA, 80 bp, Homo sapiens
ttttctgcacaggatctttgataaaaatcccccagcctgccacgtcagatggtgccagcaatagatgctagagaataaaa

SEQ ID NO: 161647 - DNA, 80 bp, Homo sapiens
acaggatctttgataaaaatcccccagcctgccacgtcagatggtgccagcaatagatgctagagaataaaacacaatca

SEQ ID NO: 161648 - DNA, 80 bp, Homo sapiens
ataaaaatcccccagcctgccacgtcagatggtgccagcaatagatgctagagaataaaacacaatcacatcatcaaaaa

SEQ ID NO: 161649 - DNA, 72 bp, Homo sapiens
actaaatagctaactacaaacaatcttccagaagtgacttgttgctcacctttttggagccccgctgaatac

SEQ ID NO: 161650 - DNA, 76 bp, Homo sapiens
ctaactacaaacaatcttccagaagtgacttgttgctcacctttttggagccccgctgaatactgcagttcttgca

SEQ ID NO: 161651 - DNA, 76 bp, Homo sapiens
atcttccagaagtgacttgttgctcacctttttggagccccgctgaatactgcagttcttgcaggacacattttta

SEQ ID NO: 161652 - DNA, 75 bp, Homo sapiens
agaagtgacttgttgctcacctttttggagccccgctgaatactgcagttcttgcaggacacatttttactgtcc

SEQ ID NO: 161653 - DNA, 77 bp, Homo sapiens
ttgttgctcacctttttggagccccgctgaatactgcagttcttgcaggacacatttttactgtcccaatggtcagc

SEQ ID NO: 161654 - DNA, 77 bp, Homo sapiens
ttttggagccccgctgaatactgcagttcttgcaggacacatttttactgtcccaatggtcagcggctccacaagta

SEQ ID NO: 161655 - DNA, 79 bp, Homo sapiens
ccgctgaatactgcagttcttgcaggacacatttttactgtcccaatggtcagcggctccacaagtaagacagaggtca

SEQ ID NO: 161656 - DNA, 78 bp, Homo sapiens
atactgcagttcttgcaggacacatttttactgtcccaatggtcagcggctccacaagtaagacagaggtcagggtca

SEQ ID NO: 161657 - DNA, 78 bp, Homo sapiens
ttgcaggacacatttttactgtcccaatggtcagcggctccacaagtaagacagaggtcagggtcacactctcggaca

SEQ ID NO: 161658 - DNA, 75 bp, Homo sapiens
atttttactgtcccaatggtcagcggctccacaagtaagacagaggtcagggtcacactctcggacagccaggta

SEQ ID NO: 161659 - DNA, 79 bp, Homo sapiens
tcccaatggtcagcggctccacaagtaagacagaggtcagggtcacactctcggacagccaggtagcacgggcactgct

SEQ ID NO: 161660 - DNA, 78 bp, Homo sapiens
ggtcagcggctccacaagtaagacagaggtcagggtcacactctcggacagccaggtagcacgggcactgcttggtgt

SEQ ID NO: 161661 - DNA, 80 bp, Homo sapiens
tccacaagtaagacagaggtcagggtcacactctcggacagccaggtagcacgggcactgcttggtgttgcactgtgctt

SEQ ID NO: 161662 - DNA, 82 bp, Homo sapiens
acagaggtcagggtcacactctcggacagccaggtagcacgggcactgcttggtgttgcactgtgctttgcagcggcatccc

SEQ ID NO: 161663 - DNA, 80 bp, Homo sapiens
tcacactctcggacagccaggtagcacgggcactgcttggtgttgcactgtgctttgcagcggcatcccggaaagcggtt

SEQ ID NO: 161664 - DNA, 77 bp, Homo sapiens
ggacagccaggtagcacgggcactgcttggtgttgcactgtgctttgcagcggcatcccggaaagcggttttgacct

SEQ ID NO: 161665 - DNA, 78 bp, Homo sapiens
aggtagcacgggcactgcttggtgttgcactgtgctttgcagcggcatcccggaaagcggttttgaccttcagagaga

SEQ ID NO: 161666 - DNA, 75 bp, Homo sapiens
acgggcactgcttggtgttgcactgtgctttgcagcggcatcccggaaagcggttttgaccttcagagagaggtt

SEQ ID NO: 161667 - DNA, 74 bp, Homo sapiens
ttggtgttgcactgtgctttgcagcggcatcccggaaagcggttttgaccttcagagagaggtttggaggttct

SEQ ID NO: 161668 - DNA, 78 bp, Homo sapiens
gacctatttagttctcatgcaattgcatcaaagcaacaaatacttacactctgaactacattgacaaaacttttcaca

SEQ ID NO: 161669 - DNA, 76 bp, Homo sapiens
tttagttctcatgcaattgcatcaaagcaacaaatacttacactctgaactacattgacaaaacttttcacaaaaa

SEQ ID NO: 161670 - DNA, 77 bp, Homo sapiens
gcaattgcatcaaagcaacaaatacttacactctgaactacattgacaaaacttttcacaaaaattttgtgctatca

SEQ ID NO: 161671 - DNA, 74 bp, Homo sapiens
agcaacaaatacttacactctgaactacattgacaaaacttttcacaaaaattttgtgctatcacacaagggca

SEQ ID NO: 161672 - DNA, 72 bp, Homo sapiens
aatacttacactctgaactacattgacaaaacttttcacaaaaattttgtgctatcacacaagggcacgaac

SEQ ID NO: 161673 - DNA, 74 bp, Homo sapiens
actctgaactacattgacaaaacttttcacaaaaattttgtgctatcacacaagggcacgaactgtcacaaggc

SEQ ID NO: 161674 - DNA, 77 bp, Homo sapiens
attgacaaaacttttcacaaaaattttgtgctatcacacaagggcacgaactgtcacaaggctgccgtggatgatca

SEQ ID NO: 161675 - DNA, 78 bp, Homo sapiens
tttcacaaaaattttgtgctatcacacaagggcacgaactgtcacaaggctgccgtggatgatcacagggttgatagt

SEQ ID NO: 161676 - DNA, 77 bp, Homo sapiens
aaaattttgtgctatcacacaagggcacgaactgtcacaaggctgccgtggatgatcacagggttgatagttgtaaa

SEQ ID NO: 161677 - DNA, 79 bp, Homo sapiens
ctatcacacaagggcacgaactgtcacaaggctgccgtggatgatcacagggttgatagttgtaaacatggttagagga

SEQ ID NO: 161678 - DNA, 76 bp, Homo sapiens
acaagggcacgaactgtcacaaggctgccgtggatgatcacagggttgatagttgtaaacatggttagaggagccg

SEQ ID NO: 161679 - DNA, 79 bp, Homo sapiens
tgtcacaaggctgccgtggatgatcacagggttgatagttgtaaacatggttagaggagccgtctgagtaaagataaca

SEQ ID NO: 161680 - DNA, 80 bp, Homo sapiens
aaggctgccgtggatgatcacagggttgatagttgtaaacatggttagaggagccgtctgagtaaagataacatcatgca

SEQ ID NO: 161681 - DNA, 81 bp, Homo sapiens
atgatcacagggttgatagttgtaaacatggttagaggagccgtctgagtaaagataacatcatgcaggccaatgaatcca

SEQ ID NO: 161682 - DNA, 75 bp, Homo sapiens
tccagttactattctaaaacaaatgaaaacaaagcagatattgttaagctaataatgagaggaatggaaagatgc

SEQ ID NO: 161683 - DNA, 73 bp, Homo sapiens
ctattctaaaacaaatgaaaacaaagcagatattgttaagctaataatgagaggaatggaaagatgctaaccc

SEQ ID NO: 161684 - DNA, 75 bp, Homo sapiens
tgaaaacaaagcagatattgttaagctaataatgagaggaatggaaagatgctaaccctttttcagctgtatctt

SEQ ID NO: 161685 - DNA, 77 bp, Homo sapiens
aaagcagatattgttaagctaataatgagaggaatggaaagatgctaaccctttttcagctgtatctttctgcagtg

SEQ ID NO: 161686 - DNA, 80 bp, Homo sapiens
tattgttaagctaataatgagaggaatggaaagatgctaaccctttttcagctgtatctttctgcagtgtgcagcccaca

SEQ ID NO: 161687 - DNA, 79 bp, Homo sapiens
taataatgagaggaatggaaagatgctaaccctttttcagctgtatctttctgcagtgtgcagcccacaacctgcaaaa

SEQ ID NO: 161688 - DNA, 76 bp, Homo sapiens
aatggaaagatgctaaccctttttcagctgtatctttctgcagtgtgcagcccacaacctgcaaaaacacaaagaa

SEQ ID NO: 161689 - DNA, 75 bp, Homo sapiens
aagatgctaaccctttttcagctgtatctttctgcagtgtgcagcccacaacctgcaaaaacacaaagaaaatta

SEQ ID NO: 161690 - DNA, 73 bp, Homo sapiens
tttttcagctgtatctttctgcagtgtgcagcccacaacctgcaaaaacacaaagaaaattaaaccaaatttc

SEQ ID NO: 161691 - DNA, 74 bp, Homo sapiens
tatctttctgcagtgtgcagcccacaacctgcaaaaacacaaagaaaattaaaccaaatttctgcgggaagcta

SEQ ID NO: 161692 - DNA, 71 bp, Homo sapiens
agtgtgcagcccacaacctgcaaaaacacaaagaaaattaaaccaaatttctgcgggaagctacaaatcca

SEQ ID NO: 161693 - DNA, 69 bp, Homo sapiens
agcccacaacctgcaaaaacacaaagaaaattaaaccaaatttctgcgggaagctacaaatccaacaga

SEQ ID NO: 161694 - DNA, 75 bp, Homo sapiens
agtgtctatctatgttgacttctctaaggagcttcatgacagactcaccggtgtttcctcttctttttccttgga

SEQ ID NO: 161695 - DNA, 74 bp, Homo sapiens
atctatgttgacttctctaaggagcttcatgacagactcaccggtgtttcctcttctttttccttggaggagta

SEQ ID NO: 161696 - DNA, 73 bp, Homo sapiens
acttctctaaggagcttcatgacagactcaccggtgtttcctcttctttttccttggaggagtatccacatcc

SEQ ID NO: 161697 - DNA, 77 bp, Homo sapiens
ttcatgacagactcaccggtgtttcctcttctttttccttggaggagtatccacatcctcagcgggagctggagcta

SEQ ID NO: 161698 - DNA, 77 bp, Homo sapiens
agactcaccggtgtttcctcttctttttccttggaggagtatccacatcctcagcgggagctggagctatgatgcta

SEQ ID NO: 161699 - DNA, 79 bp, Homo sapiens
tgtttcctcttctttttccttggaggagtatccacatcctcagcgggagctggagctatgatgctagattctttgactc

SEQ ID NO: 161700 - DNA, 80 bp, Homo sapiens
ttctttttccttggaggagtatccacatcctcagcgggagctggagctatgatgctagattctttgactctaaactcata

SEQ ID NO: 161701 - DNA, 83 bp, Homo sapiens
tccttggaggagtatccacatcctcagcgggagctggagctatgatgctagattctttgactctaaactcatacacctgacaa

SEQ ID NO: 161702 - DNA, 85 bp, Homo sapiens
agtatccacatcctcagcgggagctggagctatgatgctagattctttgactctaaactcatacacctgacaagaggcacagtca

SEQ ID NO: 161703 - DNA, 86 bp, Homo sapiens
agcgggagctggagctatgatgctagattctttgactctaaactcatacacctgacaagaggcacagtcacagagccatgaggaca

SEQ ID NO: 161704 - DNA, 85 bp, Homo sapiens
tggagctatgatgctagattctttgactctaaactcatacacctgacaagaggcacagtcacagagccatgaggacagtcttatt

SEQ ID NO: 161705 - DNA, 82 bp, Homo sapiens
atgctagattctttgactctaaactcatacacctgacaagaggcacagtcacagagccatgaggacagtcttatttaggcaa

SEQ ID NO: 161706 - DNA, 79 bp, Homo sapiens
tttgactctaaactcatacacctgacaagaggcacagtcacagagccatgaggacagtcttatttaggcaaaccattct

SEQ ID NO: 161707 - DNA, 81 bp, Homo sapiens
tctaaactcatacacctgacaagaggcacagtcacagagccatgaggacagtcttatttaggcaaaccattcttatactca

SEQ ID NO: 161708 - DNA, 81 bp, Homo sapiens
acctgacaagaggcacagtcacagagccatgaggacagtcttatttaggcaaaccattcttatactcatgcataccagaaa

SEQ ID NO: 161709 - DNA, 79 bp, Homo sapiens
aggcacagtcacagagccatgaggacagtcttatttaggcaaaccattcttatactcatgcataccagaaaaatgtctt

SEQ ID NO: 161710 - DNA, 78 bp, Homo sapiens
acagagccatgaggacagtcttatttaggcaaaccattcttatactcatgcataccagaaaaatgtctttgtctcttc

SEQ ID NO: 161711 - DNA, 78 bp, Homo sapiens
atgaggacagtcttatttaggcaaaccattcttatactcatgcataccagaaaaatgtctttgtctcttctgtgacac

SEQ ID NO: 161712 - DNA, 80 bp, Homo sapiens
agtcttatttaggcaaaccattcttatactcatgcataccagaaaaatgtctttgtctcttctgtgacactgctagatgc

SEQ ID NO: 161713 - DNA, 81 bp, Homo sapiens
aaaccattcttatactcatgcataccagaaaaatgtctttgtctcttctgtgacactgctagatgctggggatataacaca

SEQ ID NO: 161714 - DNA, 85 bp, Homo sapiens
ttcttatactcatgcataccagaaaaatgtctttgtctcttctgtgacactgctagatgctggggatataacacacatcgctgtc

SEQ ID NO: 161715 - DNA, 80 bp, Homo sapiens
ataccagaaaaatgtctttgtctcttctgtgacactgctagatgctggggatataacacacatcgctgtccctaccctca

SEQ ID NO: 161716 - DNA, 80 bp, Homo sapiens
agaaaaatgtctttgtctcttctgtgacactgctagatgctggggatataacacacatcgctgtccctaccctcacatta

SEQ ID NO: 161717 - DNA, 81 bp, Homo sapiens
tctcttctgtgacactgctagatgctggggatataacacacatcgctgtccctaccctcacattaggggtagctgtaatta

SEQ ID NO: 161718 - DNA, 81 bp, Homo sapiens
tctgtgacactgctagatgctggggatataacacacatcgctgtccctaccctcacattaggggtagctgtaattatattc

SEQ ID NO: 161719 - DNA, 77 bp, Homo sapiens
agatgctggggatataacacacatcgctgtccctaccctcacattaggggtagctgtaattatattctggtcaagaa

SEQ ID NO: 161720 - DNA, 78 bp, Homo sapiens
atataacacacatcgctgtccctaccctcacattaggggtagctgtaattatattctggtcaagaactgtgatgctaa

SEQ ID NO: 161721 - DNA, 74 bp, Homo sapiens
cctaccctcacattaggggtagctgtaattatattctggtcaagaactgtgatgctaaatttcaattcttacta

SEQ ID NO: 161722 - DNA, 75 bp, Homo sapiens
ggtagctgtaattatattctggtcaagaactgtgatgctaaatttcaattcttactagcttttaaaagctactgc

SEQ ID NO: 161723 - DNA, 75 bp, Homo sapiens
tatattctggtcaagaactgtgatgctaaatttcaattcttactagcttttaaaagctactgctatctaacctta

SEQ ID NO: 161724 - DNA, 72 bp, Homo sapiens
gtcaagaactgtgatgctaaatttcaattcttactagcttttaaaagctactgctatctaaccttaaaagtc

SEQ ID NO: 161725 - DNA, 72 bp, Homo sapiens
tgtgatgctaaatttcaattcttactagcttttaaaagctactgctatctaaccttaaaagtctacattggg

SEQ ID NO: 161726 - DNA, 69 bp, Homo sapiens
tttcaattcttactagcttttaaaagctactgctatctaaccttaaaagtctacattggggaaattctg

SEQ ID NO: 161727 - DNA, 69 bp, Homo sapiens
actagcttttaaaagctactgctatctaaccttaaaagtctacattggggaaattctgtaacatacctg

SEQ ID NO: 161728 - DNA, 69 bp, Homo sapiens
cttttaaaagctactgctatctaaccttaaaagtctacattggggaaattctgtaacatacctggagaa

SEQ ID NO: 161729 - DNA, 69 bp, Homo sapiens
ccttaaaagtctacattggggaaattctgtaacatacctggagaataattttcattcaattccctcttg

SEQ ID NO: 161730 - DNA, 70 bp, Homo sapiens
aagtctacattggggaaattctgtaacatacctggagaataattttcattcaattccctcttgggaagaa

SEQ ID NO: 161731 - DNA, 66 bp, Homo sapiens
gggaaattctgtaacatacctggagaataattttcattcaattccctcttgggaagaaaaaaaaat

SEQ ID NO: 161732 - DNA, 68 bp, Homo sapiens
tttttaggagatgaataggagcttagtaataaccaagaattttctttgtttggacaacgagtacagtt

SEQ ID NO: 161733 - DNA, 70 bp, Homo sapiens
aggagatgaataggagcttagtaataaccaagaattttctttgtttggacaacgagtacagttttatctc

SEQ ID NO: 161734 - DNA, 70 bp, Homo sapiens
ggagcttagtaataaccaagaattttctttgtttggacaacgagtacagttttatctctatgtttgaagc

SEQ ID NO: 161735 - DNA, 68 bp, Homo sapiens
aaccaagaattttctttgtttggacaacgagtacagttttatctctatgtttgaagctcttttaacaa

SEQ ID NO: 161736 - DNA, 69 bp, Homo sapiens
tttctttgtttggacaacgagtacagttttatctctatgtttgaagctcttttaacaacatttttatcg

SEQ ID NO: 161737 - DNA, 72 bp, Homo sapiens
tggacaacgagtacagttttatctctatgtttgaagctcttttaacaacatttttatcggatatcttacctg

SEQ ID NO: 161738 - DNA, 73 bp, Homo sapiens
cgagtacagttttatctctatgtttgaagctcttttaacaacatttttatcggatatcttacctgtctacatg

SEQ ID NO: 161739 - DNA, 73 bp, Homo sapiens
tatctctatgtttgaagctcttttaacaacatttttatcggatatcttacctgtctacatgttttggtcccaa

SEQ ID NO: 161740 - DNA, 70 bp, Homo sapiens
ttgaagctcttttaacaacatttttatcggatatcttacctgtctacatgttttggtcccaattaaccta

SEQ ID NO: 161741 - DNA, 73 bp, Homo sapiens
tttaacaacatttttatcggatatcttacctgtctacatgttttggtcccaattaacctagcaatggcacaga

SEQ ID NO: 161742 - DNA, 72 bp, Homo sapiens
aacatttttatcggatatcttacctgtctacatgttttggtcccaattaacctagcaatggcacagaaattg

SEQ ID NO: 161743 - DNA, 77 bp, Homo sapiens
atatcttacctgtctacatgttttggtcccaattaacctagcaatggcacagaaattgtcatagtaagtgccaatga

SEQ ID NO: 161744 - DNA, 77 bp, Homo sapiens
tgtctacatgttttggtcccaattaacctagcaatggcacagaaattgtcatagtaagtgccaatgaggactctaaa

SEQ ID NO: 161745 - DNA, 76 bp, Homo sapiens
atgttttggtcccaattaacctagcaatggcacagaaattgtcatagtaagtgccaatgaggactctaaacattga

SEQ ID NO: 161746 - DNA, 76 bp, Homo sapiens
tttggtcccaattaacctagcaatggcacagaaattgtcatagtaagtgccaatgaggactctaaacattgaggct

SEQ ID NO: 161747 - DNA, 79 bp, Homo sapiens
aattaacctagcaatggcacagaaattgtcatagtaagtgccaatgaggactctaaacattgaggcttcagcaccactc

SEQ ID NO: 161748 - DNA, 83 bp, Homo sapiens
tagcaatggcacagaaattgtcatagtaagtgccaatgaggactctaaacattgaggcttcagcaccactccactccacattc

SEQ ID NO: 161749 - DNA, 82 bp, Homo sapiens
aatggcacagaaattgtcatagtaagtgccaatgaggactctaaacattgaggcttcagcaccactccactccacattctca

SEQ ID NO: 161750 - DNA, 80 bp, Homo sapiens
acagaaattgtcatagtaagtgccaatgaggactctaaacattgaggcttcagcaccactccactccacattctcaggag

SEQ ID NO: 161751 - DNA, 78 bp, Homo sapiens
aaattgtcatagtaagtgccaatgaggactctaaacattgaggcttcagcaccactccactccacattctcaggaggt

SEQ ID NO: 161752 - DNA, 78 bp, Homo sapiens
atagtaagtgccaatgaggactctaaacattgaggcttcagcaccactccactccacattctcaggaggttcaatatt

SEQ ID NO: 161753 - DNA, 79 bp, Homo sapiens
atgaggactctaaacattgaggcttcagcaccactccactccacattctcaggaggttcaatatttggcttcatcttta

SEQ ID NO: 161754 - DNA, 75 bp, Homo sapiens
actccactccacattctcaggaggttcaatatttggcttcatctttattggtgtttgacaccgagaatttgcttc

SEQ ID NO: 161755 - DNA, 73 bp, Homo sapiens
acattctcaggaggttcaatatttggcttcatctttattggtgtttgacaccgagaatttgcttctacaaaac

SEQ ID NO: 161756 - DNA, 74 bp, Homo sapiens
tatttggcttcatctttattggtgtttgacaccgagaatttgcttctacaaaaccaaatgtaagcactggtcaa

SEQ ID NO: 161757 - DNA, 74 bp, Homo sapiens
tattggtgtttgacaccgagaatttgcttctacaaaaccaaatgtaagcactggtcaagaaatgattggaaata

SEQ ID NO: 161758 - DNA, 73 bp, Homo sapiens
gacaccgagaatttgcttctacaaaaccaaatgtaagcactggtcaagaaatgattggaaataatattaagaa

SEQ ID NO: 161759 - DNA, 73 bp, Homo sapiens
tgcttctacaaaaccaaatgtaagcactggtcaagaaatgattggaaataatattaagaagtacaattcaggg

SEQ ID NO: 161760 - DNA, 73 bp, Homo sapiens
aaccaaatgtaagcactggtcaagaaatgattggaaataatattaagaagtacaattcagggtgtgcttaaga

SEQ ID NO: 161761 - DNA, 71 bp, Homo sapiens
caagaaatgattggaaataatattaagaagtacaattcagggtgtgcttaagaaaaaagcgaaaagatgag

SEQ ID NO: 161762 - DNA, 73 bp, Homo sapiens
tgattggaaataatattaagaagtacaattcagggtgtgcttaagaaaaaagcgaaaagatgaggacaactca

SEQ ID NO: 161763 - DNA, 71 bp, Homo sapiens
atattaagaagtacaattcagggtgtgcttaagaaaaaagcgaaaagatgaggacaactcaaatccaatcg

SEQ ID NO: 161764 - DNA, 72 bp, Homo sapiens
tacaattcagggtgtgcttaagaaaaaagcgaaaagatgaggacaactcaaatccaatcggcaaaacactaa

SEQ ID NO: 161765 - DNA, 71 bp, Homo sapiens
ggtgtgcttaagaaaaaagcgaaaagatgaggacaactcaaatccaatcggcaaaacactaacccatcgta

SEQ ID NO: 161766 - DNA, 71 bp, Homo sapiens
aaagcgaaaagatgaggacaactcaaatccaatcggcaaaacactaacccatcgtagttcacattttccaa

SEQ ID NO: 161767 - DNA, 70 bp, Homo sapiens
aaatccaatcggcaaaacactaacccatcgtagttcacattttccaacaaaactactcacagaacgtcaa

SEQ ID NO: 161768 - DNA, 70 bp, Homo sapiens
ggcaaaacactaacccatcgtagttcacattttccaacaaaactactcacagaacgtcaagaatattaaa

SEQ ID NO: 161769 - DNA, 71 bp, Homo sapiens
cactaacccatcgtagttcacattttccaacaaaactactcacagaacgtcaagaatattaaaccaaatga

SEQ ID NO: 161770 - DNA, 72 bp, Homo sapiens
tcgtagttcacattttccaacaaaactactcacagaacgtcaagaatattaaaccaaatgatccaaatttca

SEQ ID NO: 161771 - DNA, 70 bp, Homo sapiens
ttccaacaaaactactcacagaacgtcaagaatattaaaccaaatgatccaaatttcattattccctacc

SEQ ID NO: 161772 - DNA, 69 bp, Homo sapiens
caagaatattaaaccaaatgatccaaatttcattattccctacctgagaaagatcgaaaaaagaaaatg

SEQ ID NO: 161773 - DNA, 72 bp, Homo sapiens
accaaatgatccaaatttcattattccctacctgagaaagatcgaaaaaagaaaatggcacaaagaatgaga

SEQ ID NO: 161774 - DNA, 74 bp, Homo sapiens
caaatttcattattccctacctgagaaagatcgaaaaaagaaaatggcacaaagaatgagaataaagtgcatca

SEQ ID NO: 161775 - DNA, 76 bp, Homo sapiens
attattccctacctgagaaagatcgaaaaaagaaaatggcacaaagaatgagaataaagtgcatcatcagctttca

SEQ ID NO: 161776 - DNA, 76 bp, Homo sapiens
tacctgagaaagatcgaaaaaagaaaatggcacaaagaatgagaataaagtgcatcatcagctttcaaacaaccaa

SEQ ID NO: 161777 - DNA, 76 bp, Homo sapiens
aagatcgaaaaaagaaaatggcacaaagaatgagaataaagtgcatcatcagctttcaaacaaccaagcagggcaa

SEQ ID NO: 161778 - DNA, 74 bp, Homo sapiens
aaagaatgagaataaagtgcatcatcagctttcaaacaaccaagcagggcaaacaccacaagctagggtacggg

SEQ ID NO: 161779 - DNA, 76 bp, Homo sapiens
aataaagtgcatcatcagctttcaaacaaccaagcagggcaaacaccacaagctagggtacgggtgcaggcaggaa

SEQ ID NO: 161780 - DNA, 75 bp, Homo sapiens
atcatcagctttcaaacaaccaagcagggcaaacaccacaagctagggtacgggtgcaggcaggaaacagaaaca

SEQ ID NO: 161781 - DNA, 75 bp, Homo sapiens
aaacaccacaagctagggtacgggtgcaggcaggaaacagaaacaacacagctacacattcttgagataactctg

SEQ ID NO: 161782 - DNA, 75 bp, Homo sapiens
aagctagggtacgggtgcaggcaggaaacagaaacaacacagctacacattcttgagataactctggtctttata

SEQ ID NO: 161783 - DNA, 76 bp, Homo sapiens
tacgggtgcaggcaggaaacagaaacaacacagctacacattcttgagataactctggtctttatactgaaactaa

SEQ ID NO: 161784 - DNA, 73 bp, Homo sapiens
aggaaacagaaacaacacagctacacattcttgagataactctggtctttatactgaaactaaccaactaaga

SEQ ID NO: 161785 - DNA, 72 bp, Homo sapiens
acagaaacaacacagctacacattcttgagataactctggtctttatactgaaactaaccaactaagaaaat

SEQ ID NO: 161786 - DNA, 76 bp, Homo sapiens
cacagctacacattcttgagataactctggtctttatactgaaactaaccaactaagaaaattattcaatgcatta

SEQ ID NO: 161787 - DNA, 74 bp, Homo sapiens
cattcttgagataactctggtctttatactgaaactaaccaactaagaaaattattcaatgcattatacatcct

SEQ ID NO: 161788 - DNA, 74 bp, Homo sapiens
taactctggtctttatactgaaactaaccaactaagaaaattattcaatgcattatacatccttaatcctcaca

SEQ ID NO: 161789 - DNA, 74 bp, Homo sapiens
tatactgaaactaaccaactaagaaaattattcaatgcattatacatccttaatcctcacaacacgaactttca

SEQ ID NO: 161790 - DNA, 73 bp, Homo sapiens
actaaccaactaagaaaattattcaatgcattatacatccttaatcctcacaacacgaactttcacagaacag

SEQ ID NO: 161791 - DNA, 72 bp, Homo sapiens
agaaaattattcaatgcattatacatccttaatcctcacaacacgaactttcacagaacagtaaaacccagt

SEQ ID NO: 161792 - DNA, 74 bp, Homo sapiens
tattcaatgcattatacatccttaatcctcacaacacgaactttcacagaacagtaaaacccagttattagacg

SEQ ID NO: 161793 - DNA, 71 bp, Homo sapiens
attatacatccttaatcctcacaacacgaactttcacagaacagtaaaacccagttattagacgtgtctta

SEQ ID NO: 161794 - DNA, 72 bp, Homo sapiens
aatcctcacaacacgaactttcacagaacagtaaaacccagttattagacgtgtcttaccagaggagctcga

SEQ ID NO: 161795 - DNA, 70 bp, Homo sapiens
aacacgaactttcacagaacagtaaaacccagttattagacgtgtcttaccagaggagctcgaagtttca

SEQ ID NO: 161796 - DNA, 70 bp, Homo sapiens
aactttcacagaacagtaaaacccagttattagacgtgtcttaccagaggagctcgaagtttcatctttc

SEQ ID NO: 161797 - DNA, 70 bp, Homo sapiens
aacagtaaaacccagttattagacgtgtcttaccagaggagctcgaagtttcatctttcttctcttcttc

SEQ ID NO: 161798 - DNA, 73 bp, Homo sapiens
agttattagacgtgtcttaccagaggagctcgaagtttcatctttcttctcttcttcttctttatcattgttc

SEQ ID NO: 161799 - DNA, 74 bp, Homo sapiens
tagacgtgtcttaccagaggagctcgaagtttcatctttcttctcttcttcttctttatcattgttctctcccc

SEQ ID NO: 161800 - DNA, 72 bp, Homo sapiens
ttaccagaggagctcgaagtttcatctttcttctcttcttcttctttatcattgttctctccccccgtttca

SEQ ID NO: 161801 - DNA, 71 bp, Homo sapiens
agctcgaagtttcatctttcttctcttcttcttctttatcattgttctctccccccgtttcagtccctgct

SEQ ID NO: 161802 - DNA, 72 bp, Homo sapiens
atctttcttctcttcttcttctttatcattgttctctccccccgtttcagtccctgcttccctatcactgtc

SEQ ID NO: 161803 - DNA, 73 bp, Homo sapiens
ttcttcttctttatcattgttctctccccccgtttcagtccctgcttccctatcactgtctgtatcctttgat

SEQ ID NO: 161804 - DNA, 76 bp, Homo sapiens
ttatcattgttctctccccccgtttcagtccctgcttccctatcactgtctgtatcctttgattccagcacattaa

SEQ ID NO: 161805 - DNA, 74 bp, Homo sapiens
attgttctctccccccgtttcagtccctgcttccctatcactgtctgtatcctttgattccagcacattaatgg

SEQ ID NO: 161806 - DNA, 75 bp, Homo sapiens
cccgtttcagtccctgcttccctatcactgtctgtatcctttgattccagcacattaatggtgggggtgctgggc

SEQ ID NO: 161807 - DNA, 78 bp, Homo sapiens
cctgcttccctatcactgtctgtatcctttgattccagcacattaatggtgggggtgctgggcctgctactgttattg

SEQ ID NO: 161808 - DNA, 77 bp, Homo sapiens
ttccctatcactgtctgtatcctttgattccagcacattaatggtgggggtgctgggcctgctactgttattgggaa

SEQ ID NO: 161809 - DNA, 76 bp, Homo sapiens
tctgtatcctttgattccagcacattaatggtgggggtgctgggcctgctactgttattgggaagccgtcctcttc

SEQ ID NO: 161810 - DNA, 76 bp, Homo sapiens
tttgattccagcacattaatggtgggggtgctgggcctgctactgttattgggaagccgtcctcttctgcggcctc

SEQ ID NO: 161811 - DNA, 72 bp, Homo sapiens
acattaatggtgggggtgctgggcctgctactgttattgggaagccgtcctcttctgcggcctcctggacgt

SEQ ID NO: 161812 - DNA, 71 bp, Homo sapiens
tgggggtgctgggcctgctactgttattgggaagccgtcctcttctgcggcctcctggacgttttggtggg

SEQ ID NO: 161813 - DNA, 71 bp, Homo sapiens
tgggcctgctactgttattgggaagccgtcctcttctgcggcctcctggacgttttggtggggtctttatc

SEQ ID NO: 161814 - DNA, 71 bp, Homo sapiens
tactgttattgggaagccgtcctcttctgcggcctcctggacgttttggtggggtctttatccgctcagcg

SEQ ID NO: 161815 - DNA, 75 bp, Homo sapiens
ttgggaagccgtcctcttctgcggcctcctggacgttttggtggggtctttatccgctcagcggtgagagcagca

SEQ ID NO: 161816 - DNA, 75 bp, Homo sapiens
tcctcttctgcggcctcctggacgttttggtggggtctttatccgctcagcggtgagagcagcagcaaactcctt

SEQ ID NO: 161817 - DNA, 74 bp, Homo sapiens
cctcctggacgttttggtggggtctttatccgctcagcggtgagagcagcagcaaactcctttgctccctccta

SEQ ID NO: 161818 - DNA, 74 bp, Homo sapiens
ttttggtggggtctttatccgctcagcggtgagagcagcagcaaactcctttgctccctcctacgaaatgaaaa

SEQ ID NO: 161819 - DNA, 78 bp, Homo sapiens
gggtctttatccgctcagcggtgagagcagcagcaaactcctttgctccctcctacgaaatgaaaaatgtcaacatca

SEQ ID NO: 161820 - DNA, 79 bp, Homo sapiens
gctcagcggtgagagcagcagcaaactcctttgctccctcctacgaaatgaaaaatgtcaacatcagggcaaagttcta

SEQ ID NO: 161821 - DNA, 71 bp, Homo sapiens
gccaacagttttatacttcattctacaaaaaccaaattgcttaaaaataggataccttctgcaggtgccat

SEQ ID NO: 161822 - DNA, 74 bp, Homo sapiens
ttatacttcattctacaaaaaccaaattgcttaaaaataggataccttctgcaggtgccattcaatgaatcttc

SEQ ID NO: 161823 - DNA, 75 bp, Homo sapiens
tcattctacaaaaaccaaattgcttaaaaataggataccttctgcaggtgccattcaatgaatcttctgtccaaa

SEQ ID NO: 161824 - DNA, 72 bp, Homo sapiens
aaaaaccaaattgcttaaaaataggataccttctgcaggtgccattcaatgaatcttctgtccaaaatccaa

SEQ ID NO: 161825 - DNA, 76 bp, Homo sapiens
ttaaaaataggataccttctgcaggtgccattcaatgaatcttctgtccaaaatccaacaggcaatatatacccat

SEQ ID NO: 161826 - DNA, 76 bp, Homo sapiens
aataggataccttctgcaggtgccattcaatgaatcttctgtccaaaatccaacaggcaatatatacccatttagt

SEQ ID NO: 161827 - DNA, 77 bp, Homo sapiens
ttctgcaggtgccattcaatgaatcttctgtccaaaatccaacaggcaatatatacccatttagttcctaggtagga

SEQ ID NO: 161828 - DNA, 73 bp, Homo sapiens
ttcaatgaatcttctgtccaaaatccaacaggcaatatatacccatttagttcctaggtaggagtggcttggt

SEQ ID NO: 161829 - DNA, 71 bp, Homo sapiens
aatcttctgtccaaaatccaacaggcaatatatacccatttagttcctaggtaggagtggcttggttcaaa

SEQ ID NO: 161830 - DNA, 68 bp, Homo sapiens
aaaatccaacaggcaatatatacccatttagttcctaggtaggagtggcttggttcaaagaggggaaa

SEQ ID NO: 161831 - DNA, 67 bp, Homo sapiens
aggcaatatatacccatttagttcctaggtaggagtggcttggttcaaagaggggaaatggtaaaaa

SEQ ID NO: 161832 - DNA, 68 bp, Homo sapiens
tatatacccatttagttcctaggtaggagtggcttggttcaaagaggggaaatggtaaaaataagaga

SEQ ID NO: 161833 - DNA, 74 bp, Homo sapiens
aaagtgcaaagtcctctcaagtaccctctgcaataattaggcactaagtcttaccaaatgctggtaacactgtg

SEQ ID NO: 161834 - DNA, 74 bp, Homo sapiens
tctcaagtaccctctgcaataattaggcactaagtcttaccaaatgctggtaacactgtggtccacaaggtttg

SEQ ID NO: 161835 - DNA, 74 bp, Homo sapiens
taccctctgcaataattaggcactaagtcttaccaaatgctggtaacactgtggtccacaaggtttgttgtcta

SEQ ID NO: 161836 - DNA, 72 bp, Homo sapiens
aataattaggcactaagtcttaccaaatgctggtaacactgtggtccacaaggtttgttgtctagagctgtt

SEQ ID NO: 161837 - DNA, 73 bp, Homo sapiens
actaagtcttaccaaatgctggtaacactgtggtccacaaggtttgttgtctagagctgtttctgtgttcttc

SEQ ID NO: 161838 - DNA, 74 bp, Homo sapiens
ttaccaaatgctggtaacactgtggtccacaaggtttgttgtctagagctgtttctgtgttcttccgcttataa

SEQ ID NO: 161839 - DNA, 72 bp, Homo sapiens
gtaacactgtggtccacaaggtttgttgtctagagctgtttctgtgttcttccgcttataagtgttgggtgt

SEQ ID NO: 161840 - DNA, 75 bp, Homo sapiens
tgtggtccacaaggtttgttgtctagagctgtttctgtgttcttccgcttataagtgttgggtgttgcatgaaaa

SEQ ID NO: 161841 - DNA, 74 bp, Homo sapiens
aaggtttgttgtctagagctgtttctgtgttcttccgcttataagtgttgggtgttgcatgaaaagctgcaaaa

SEQ ID NO: 161842 - DNA, 77 bp, Homo sapiens
tgtctagagctgtttctgtgttcttccgcttataagtgttgggtgttgcatgaaaagctgcaaaataaatgaaacaa

SEQ ID NO: 161843 - DNA, 75 bp, Homo sapiens
tgtttctgtgttcttccgcttataagtgttgggtgttgcatgaaaagctgcaaaataaatgaaacaaagaatcta

SEQ ID NO: 161844 - DNA, 75 bp, Homo sapiens
tcttccgcttataagtgttgggtgttgcatgaaaagctgcaaaataaatgaaacaaagaatctaatataactata

SEQ ID NO: 161845 - DNA, 73 bp, Homo sapiens
gctgctttaaaacataattccacaacaaagatagaaaatgaaaacgtacaataattgcacttacgatgtagga

SEQ ID NO: 161846 - DNA, 74 bp, Homo sapiens
acataattccacaacaaagatagaaaatgaaaacgtacaataattgcacttacgatgtaggaagcagtcatatt

SEQ ID NO: 161847 - DNA, 74 bp, Homo sapiens
caacaaagatagaaaatgaaaacgtacaataattgcacttacgatgtaggaagcagtcatatttaaaacatcgc

SEQ ID NO: 161848 - DNA, 73 bp, Homo sapiens
gaaaatgaaaacgtacaataattgcacttacgatgtaggaagcagtcatatttaaaacatcgcctacagaaaa

SEQ ID NO: 161849 - DNA, 74 bp, Homo sapiens
aaacgtacaataattgcacttacgatgtaggaagcagtcatatttaaaacatcgcctacagaaaagcgtatgaa

SEQ ID NO: 161850 - DNA, 75 bp, Homo sapiens
ataattgcacttacgatgtaggaagcagtcatatttaaaacatcgcctacagaaaagcgtatgaaaggagtgtaa

SEQ ID NO: 161851 - DNA, 74 bp, Homo sapiens
acttacgatgtaggaagcagtcatatttaaaacatcgcctacagaaaagcgtatgaaaggagtgtaagctttgc

SEQ ID NO: 161852 - DNA, 77 bp, Homo sapiens
agcagtcatatttaaaacatcgcctacagaaaagcgtatgaaaggagtgtaagctttgctctctctgaacagattta

SEQ ID NO: 161853 - DNA, 75 bp, Homo sapiens
atatttaaaacatcgcctacagaaaagcgtatgaaaggagtgtaagctttgctctctctgaacagatttagcatt

SEQ ID NO: 161854 - DNA, 78 bp, Homo sapiens
aacatcgcctacagaaaagcgtatgaaaggagtgtaagctttgctctctctgaacagatttagcatttggtccatcta

SEQ ID NO: 161855 - DNA, 76 bp, Homo sapiens
acagaaaagcgtatgaaaggagtgtaagctttgctctctctgaacagatttagcatttggtccatctatgttgggg

SEQ ID NO: 161856 - DNA, 78 bp, Homo sapiens
tatgaaaggagtgtaagctttgctctctctgaacagatttagcatttggtccatctatgttgggggtacattcaggag

SEQ ID NO: 161857 - DNA, 78 bp, Homo sapiens
agtgtaagctttgctctctctgaacagatttagcatttggtccatctatgttgggggtacattcaggaggaagtgcgc

SEQ ID NO: 161858 - DNA, 80 bp, Homo sapiens
tctctctgaacagatttagcatttggtccatctatgttgggggtacattcaggaggaagtgcgcctgggagctgctgttc

SEQ ID NO: 161859 - DNA, 76 bp, Homo sapiens
agatttagcatttggtccatctatgttgggggtacattcaggaggaagtgcgcctgggagctgctgttcggtgagt

SEQ ID NO: 161860 - DNA, 75 bp, Homo sapiens
atttggtccatctatgttgggggtacattcaggaggaagtgcgcctgggagctgctgttcggtgagttctttata

SEQ ID NO: 161861 - DNA, 77 bp, Homo sapiens
atctatgttgggggtacattcaggaggaagtgcgcctgggagctgctgttcggtgagttctttatatctgacattaa

SEQ ID NO: 161862 - DNA, 75 bp, Homo sapiens
gggtacattcaggaggaagtgcgcctgggagctgctgttcggtgagttctttatatctgacattaaccaagaaaa

SEQ ID NO: 161863 - DNA, 74 bp, Homo sapiens
attcaggaggaagtgcgcctgggagctgctgttcggtgagttctttatatctgacattaaccaagaaaaattta

SEQ ID NO: 161864 - DNA, 71 bp, Homo sapiens
agttacataccatacagggcaagattgcctcaaaggaacaaattcttacttttcctttagttcttctgctg

SEQ ID NO: 161865 - DNA, 72 bp, Homo sapiens
atacagggcaagattgcctcaaaggaacaaattcttacttttcctttagttcttctgctgtgcccttatctg

SEQ ID NO: 161866 - DNA, 70 bp, Homo sapiens
aagattgcctcaaaggaacaaattcttacttttcctttagttcttctgctgtgcccttatctggaaacat

SEQ ID NO: 161867 - DNA, 69 bp, Homo sapiens
aaaggaacaaattcttacttttcctttagttcttctgctgtgcccttatctggaaacattgaggaaatg

SEQ ID NO: 161868 - DNA, 70 bp, Homo sapiens
tcttacttttcctttagttcttctgctgtgcccttatctggaaacattgaggaaatggcttcaaaaattt

SEQ ID NO: 161869 - DNA, 73 bp, Homo sapiens
tcctttagttcttctgctgtgcccttatctggaaacattgaggaaatggcttcaaaaattttatcagaaggaa

SEQ ID NO: 161870 - DNA, 72 bp, Homo sapiens
agttcttctgctgtgcccttatctggaaacattgaggaaatggcttcaaaaattttatcagaaggaaatttc

SEQ ID NO: 161871 - DNA, 70 bp, Homo sapiens
ctgtgcccttatctggaaacattgaggaaatggcttcaaaaattttatcagaaggaaatttccgaggtgg

SEQ ID NO: 161872 - DNA, 68 bp, Homo sapiens
gaaacattgaggaaatggcttcaaaaattttatcagaaggaaatttccgaggtgggcggctttcttta

SEQ ID NO: 161873 - DNA, 68 bp, Homo sapiens
attgaggaaatggcttcaaaaattttatcagaaggaaatttccgaggtgggcggctttctttatctaa

SEQ ID NO: 161874 - DNA, 69 bp, Homo sapiens
cttcaaaaattttatcagaaggaaatttccgaggtgggcggctttctttatctaaacaggagaatatga

SEQ ID NO: 161875 - DNA, 68 bp, Homo sapiens
aattttatcagaaggaaatttccgaggtgggcggctttctttatctaaacaggagaatatgaaaggaa

SEQ ID NO: 161876 - DNA, 65 bp, Homo sapiens
aaggaaatttccgaggtgggcggctttctttatctaaacaggagaatatgaaaggaaaaaaagaa

SEQ ID NO: 161877 - DNA, 78 bp, Homo sapiens
aaagaaagctgtaatggctacacagaatcctaataatcaggcataccatctcggtgatcctccagatctttctgcttt

SEQ ID NO: 161878 - DNA, 80 bp, Homo sapiens
aagctgtaatggctacacagaatcctaataatcaggcataccatctcggtgatcctccagatctttctgcttttcttctc

SEQ ID NO: 161879 - DNA, 80 bp, Homo sapiens
tacacagaatcctaataatcaggcataccatctcggtgatcctccagatctttctgcttttcttctctttcttcaggatc

SEQ ID NO: 161880 - DNA, 78 bp, Homo sapiens
aatcctaataatcaggcataccatctcggtgatcctccagatctttctgcttttcttctctttcttcaggatcgtctc

SEQ ID NO: 161881 - DNA, 85 bp, Homo sapiens
atcaggcataccatctcggtgatcctccagatctttctgcttttcttctctttcttcaggatcgtctccatcatcatcatcgtca

SEQ ID NO: 161882 - DNA, 84 bp, Homo sapiens
ttctgcttttcttctctttcttcaggatcgtctccatcatcatcatcgtcatcatcattatattgaccaagggcattcaccaac

SEQ ID NO: 161883 - DNA, 83 bp, Homo sapiens
ttctctttcttcaggatcgtctccatcatcatcatcgtcatcatcattatattgaccaagggcattcaccaactccacaaaaa

SEQ ID NO: 161884 - DNA, 85 bp, Homo sapiens
tcaggatcgtctccatcatcatcatcgtcatcatcattatattgaccaagggcattcaccaactccacaaaaatttcatcattta

SEQ ID NO: 161885 - DNA, 83 bp, Homo sapiens
atcgtctccatcatcatcatcgtcatcatcattatattgaccaagggcattcaccaactccacaaaaatttcatcatttataa

SEQ ID NO: 161886 - DNA, 78 bp, Homo sapiens
atcatcgtcatcatcattatattgaccaagggcattcaccaactccacaaaaatttcatcatttataaacccacattc

SEQ ID NO: 161887 - DNA, 76 bp, Homo sapiens
catcatcattatattgaccaagggcattcaccaactccacaaaaatttcatcatttataaacccacattctgaaac

SEQ ID NO: 161888 - DNA, 75 bp, Homo sapiens
tatattgaccaagggcattcaccaactccacaaaaatttcatcatttataaacccacattctgaaacgcatcaaa

SEQ ID NO: 161889 - DNA, 74 bp, Homo sapiens
aagggcattcaccaactccacaaaaatttcatcatttataaacccacattctgaaacgcatcaaatgtcagaaa

SEQ ID NO: 161890 - DNA, 74 bp, Homo sapiens
tcaattctttagcccctttttccaagagaagaagcatatggctcacctctatccccgtgtactttcccatcata

SEQ ID NO: 161891 - DNA, 71 bp, Homo sapiens
tttagcccctttttccaagagaagaagcatatggctcacctctatccccgtgtactttcccatcataattt

SEQ ID NO: 161892 - DNA, 71 bp, Homo sapiens
tttttccaagagaagaagcatatggctcacctctatccccgtgtactttcccatcataattttttattagt

SEQ ID NO: 161893 - DNA, 73 bp, Homo sapiens
agaagaagcatatggctcacctctatccccgtgtactttcccatcataattttttattagttcttcaatgaaa

SEQ ID NO: 161894 - DNA, 72 bp, Homo sapiens
atatggctcacctctatccccgtgtactttcccatcataattttttattagttcttcaatgaaagtaccatc

SEQ ID NO: 161895 - DNA, 71 bp, Homo sapiens
cctctatccccgtgtactttcccatcataattttttattagttcttcaatgaaagtaccatcctgatctaa

SEQ ID NO: 161896 - DNA, 72 bp, Homo sapiens
cgtgtactttcccatcataattttttattagttcttcaatgaaagtaccatcctgatctaaaacttcatctc

SEQ ID NO: 161897 - DNA, 73 bp, Homo sapiens
cccatcataattttttattagttcttcaatgaaagtaccatcctgatctaaaacttcatctcccatataagga

SEQ ID NO: 161898 - DNA, 74 bp, Homo sapiens
tattagttcttcaatgaaagtaccatcctgatctaaaacttcatctcccatataaggaatgttatgtaaaacag

SEQ ID NO: 161899 - DNA, 74 bp, Homo sapiens
gttcttcaatgaaagtaccatcctgatctaaaacttcatctcccatataaggaatgttatgtaaaacagtttca

SEQ ID NO: 161900 - DNA, 72 bp, Homo sapiens
aaagtaccatcctgatctaaaacttcatctcccatataaggaatgttatgtaaaacagtttcatcttccacc

SEQ ID NO: 161901 - DNA, 72 bp, Homo sapiens
tcctgatctaaaacttcatctcccatataaggaatgttatgtaaaacagtttcatcttccacctaaaagaaa

SEQ ID NO: 161902 - DNA, 68 bp, Homo sapiens
aaacttcatctcccatataaggaatgttatgtaaaacagtttcatcttccacctaaaagaaaaaaata

SEQ ID NO: 161903 - DNA, 74 bp, Homo sapiens
caaataagttattatcaaataagcagaagatatcttatttacataccataaaattctgctgtaggggagaccaa

SEQ ID NO: 161904 - DNA, 77 bp, Homo sapiens
tattatcaaataagcagaagatatcttatttacataccataaaattctgctgtaggggagaccaagaatacattatg

SEQ ID NO: 161905 - DNA, 76 bp, Homo sapiens
taagcagaagatatcttatttacataccataaaattctgctgtaggggagaccaagaatacattatgggtactgaa

SEQ ID NO: 161906 - DNA, 74 bp, Homo sapiens
aagatatcttatttacataccataaaattctgctgtaggggagaccaagaatacattatgggtactgaagcaac

SEQ ID NO: 161907 - DNA, 77 bp, Homo sapiens
acataccataaaattctgctgtaggggagaccaagaatacattatgggtactgaagcaactgcattcagagtcttta

SEQ ID NO: 161908 - DNA, 76 bp, Homo sapiens
ataaaattctgctgtaggggagaccaagaatacattatgggtactgaagcaactgcattcagagtctttaatggga

SEQ ID NO: 161909 - DNA, 78 bp, Homo sapiens
tgtaggggagaccaagaatacattatgggtactgaagcaactgcattcagagtctttaatgggatgacttgtgttgga

SEQ ID NO: 161910 - DNA, 76 bp, Homo sapiens
accaagaatacattatgggtactgaagcaactgcattcagagtctttaatgggatgacttgtgttggaaaatccaa

SEQ ID NO: 161911 - DNA, 77 bp, Homo sapiens
aatacattatgggtactgaagcaactgcattcagagtctttaatgggatgacttgtgttggaaaatccaagtcactg

SEQ ID NO: 161912 - DNA, 78 bp, Homo sapiens
tactgaagcaactgcattcagagtctttaatgggatgacttgtgttggaaaatccaagtcactggtcaccgaacacta

SEQ ID NO: 161913 - DNA, 74 bp, Homo sapiens
aactgcattcagagtctttaatgggatgacttgtgttggaaaatccaagtcactggtcaccgaacactaaaaca

SEQ ID NO: 161914 - DNA, 70 bp, Homo sapiens
agagtctttaatgggatgacttgtgttggaaaatccaagtcactggtcaccgaacactaaaacagaaaaa

SEQ ID NO: 161915 - DNA, 69 bp, Homo sapiens
taatgggatgacttgtgttggaaaatccaagtcactggtcaccgaacactaaaacagaaaaaataaaat

SEQ ID NO: 161916 - DNA, 69 bp, Homo sapiens
ttgtgttggaaaatccaagtcactggtcaccgaacactaaaacagaaaaaataaaattgactcttaaga

SEQ ID NO: 161917 - DNA, 76 bp, Homo sapiens
acacagcttactggtaagtaaccaggttcctctgaggatggatagacttacatcaaccagctggtacaataggcga

SEQ ID NO: 161918 - DNA, 78 bp, Homo sapiens
tggtaagtaaccaggttcctctgaggatggatagacttacatcaaccagctggtacaataggcgactgtgtggctgga

SEQ ID NO: 161919 - DNA, 78 bp, Homo sapiens
accaggttcctctgaggatggatagacttacatcaaccagctggtacaataggcgactgtgtggctggaccactggga

SEQ ID NO: 161920 - DNA, 81 bp, Homo sapiens
tctgaggatggatagacttacatcaaccagctggtacaataggcgactgtgtggctggaccactgggagctggagagggaa

SEQ ID NO: 161921 - DNA, 77 bp, Homo sapiens
acttacatcaaccagctggtacaataggcgactgtgtggctggaccactgggagctggagagggaagtcaagccaaa

SEQ ID NO: 161922 - DNA, 75 bp, Homo sapiens
aaccagctggtacaataggcgactgtgtggctggaccactgggagctggagagggaagtcaagccaaaaatagta

SEQ ID NO: 161923 - DNA, 75 bp, Homo sapiens
ctggtacaataggcgactgtgtggctggaccactgggagctggagagggaagtcaagccaaaaatagtagttgta

SEQ ID NO: 161924 - DNA, 74 bp, Homo sapiens
actgtgtggctggaccactgggagctggagagggaagtcaagccaaaaatagtagttgtaggagtacacaacca

SEQ ID NO: 161925 - DNA, 73 bp, Homo sapiens
tggaccactgggagctggagagggaagtcaagccaaaaatagtagttgtaggagtacacaaccaaactgagac

SEQ ID NO: 161926 - DNA, 74 bp, Homo sapiens
ggagctggagagggaagtcaagccaaaaatagtagttgtaggagtacacaaccaaactgagactcttggcagaa

SEQ ID NO: 161927 - DNA, 71 bp, Homo sapiens
agggaagtcaagccaaaaatagtagttgtaggagtacacaaccaaactgagactcttggcagaaggctggt

SEQ ID NO: 161928 - DNA, 71 bp, Homo sapiens
agccaaaaatagtagttgtaggagtacacaaccaaactgagactcttggcagaaggctggttccaagtaaa

SEQ ID NO: 161929 - DNA, 69 bp, Homo sapiens
aaaatagtagttgtaggagtacacaaccaaactgagactcttggcagaaggctggttccaagtaaaaac

SEQ ID NO: 161930 - DNA, 72 bp, Homo sapiens
ttgtaggagtacacaaccaaactgagactcttggcagaaggctggttccaagtaaaaactgtgttatggaaa

SEQ ID NO: 161931 - DNA, 70 bp, Homo sapiens
accaaactgagactcttggcagaaggctggttccaagtaaaaactgtgttatggaaaatcgtagagggaa

SEQ ID NO: 161932 - DNA, 72 bp, Homo sapiens
agactcttggcagaaggctggttccaagtaaaaactgtgttatggaaaatcgtagagggaagagcaggtgaa

SEQ ID NO: 161933 - DNA, 72 bp, Homo sapiens
agaaggctggttccaagtaaaaactgtgttatggaaaatcgtagagggaagagcaggtgaatggcctgcagg

SEQ ID NO: 161934 - DNA, 71 bp, Homo sapiens
ttccaagtaaaaactgtgttatggaaaatcgtagagggaagagcaggtgaatggcctgcagggaagggaaa

SEQ ID NO: 161935 - DNA, 71 bp, Homo sapiens
taaaaactgtgttatggaaaatcgtagagggaagagcaggtgaatggcctgcagggaagggaaagaaatta

SEQ ID NO: 161936 - DNA, 72 bp, Homo sapiens
tgttatggaaaatcgtagagggaagagcaggtgaatggcctgcagggaagggaaagaaattaacacacccta

SEQ ID NO: 161937 - DNA, 75 bp, Homo sapiens
ataaaccaaaagatgatgataattactacaacatgttatgttaaccaacctccctagtcccgcgcaatgagctca

SEQ ID NO: 161938 - DNA, 77 bp, Homo sapiens
aaagatgatgataattactacaacatgttatgttaaccaacctccctagtcccgcgcaatgagctcacagaagtcag

SEQ ID NO: 161939 - DNA, 78 bp, Homo sapiens
ataattactacaacatgttatgttaaccaacctccctagtcccgcgcaatgagctcacagaagtcaggatgtgcacag

SEQ ID NO: 161940 - DNA, 79 bp, Homo sapiens
aacatgttatgttaaccaacctccctagtcccgcgcaatgagctcacagaagtcaggatgtgcacaggctgtatccttc

SEQ ID NO: 161941 - DNA, 79 bp, Homo sapiens
ttaaccaacctccctagtcccgcgcaatgagctcacagaagtcaggatgtgcacaggctgtatccttcgctgtttccat

SEQ ID NO: 161942 - DNA, 80 bp, Homo sapiens
ctagtcccgcgcaatgagctcacagaagtcaggatgtgcacaggctgtatccttcgctgtttccattcttggtttaagat

SEQ ID NO: 161943 - DNA, 79 bp, Homo sapiens
gcaatgagctcacagaagtcaggatgtgcacaggctgtatccttcgctgtttccattcttggtttaagatttccgttct

SEQ ID NO: 161944 - DNA, 75 bp, Homo sapiens
cacagaagtcaggatgtgcacaggctgtatccttcgctgtttccattcttggtttaagatttccgttctttccaa

SEQ ID NO: 161945 - DNA, 70 bp, Homo sapiens
aggatgtgcacaggctgtatccttcgctgtttccattcttggtttaagatttccgttctttccaaaattt

SEQ ID NO: 161946 - DNA, 69 bp, Homo sapiens
caggctgtatccttcgctgtttccattcttggtttaagatttccgttctttccaaaattttctgacgat

SEQ ID NO: 161947 - DNA, 69 bp, Homo sapiens
tgtatccttcgctgtttccattcttggtttaagatttccgttctttccaaaattttctgacgattggaa

SEQ ID NO: 161948 - DNA, 68 bp, Homo sapiens
gctgtttccattcttggtttaagatttccgttctttccaaaattttctgacgattggaactaaacata

SEQ ID NO: 161949 - DNA, 65 bp, Homo sapiens
cttggtttaagatttccgttctttccaaaattttctgacgattggaactaaacatactcttaaaa

SEQ ID NO: 161950 - DNA, 72 bp, Homo sapiens
cctatccttaattgtatattcattttcacaaaagataaaattatacctttacttcatcagctcgtctgaacc

SEQ ID NO: 161951 - DNA, 77 bp, Homo sapiens
attgtatattcattttcacaaaagataaaattatacctttacttcatcagctcgtctgaacctcttgagctgtctca

SEQ ID NO: 161952 - DNA, 78 bp, Homo sapiens
atattcattttcacaaaagataaaattatacctttacttcatcagctcgtctgaacctcttgagctgtctcagtcgca

SEQ ID NO: 161953 - DNA, 78 bp, Homo sapiens
aaagataaaattatacctttacttcatcagctcgtctgaacctcttgagctgtctcagtcgcatgtactctgatttta

SEQ ID NO: 161954 - DNA, 79 bp, Homo sapiens
aaattatacctttacttcatcagctcgtctgaacctcttgagctgtctcagtcgcatgtactctgattttacacgcttc

SEQ ID NO: 161955 - DNA, 80 bp, Homo sapiens
tttacttcatcagctcgtctgaacctcttgagctgtctcagtcgcatgtactctgattttacacgcttccgccaacaaac

SEQ ID NO: 161956 - DNA, 79 bp, Homo sapiens
atcagctcgtctgaacctcttgagctgtctcagtcgcatgtactctgattttacacgcttccgccaacaaactggtccc

SEQ ID NO: 161957 - DNA, 76 bp, Homo sapiens
aacctcttgagctgtctcagtcgcatgtactctgattttacacgcttccgccaacaaactggtcccttctcagatt

SEQ ID NO: 161958 - DNA, 76 bp, Homo sapiens
agctgtctcagtcgcatgtactctgattttacacgcttccgccaacaaactggtcccttctcagatttcttcccag

SEQ ID NO: 161959 - DNA, 76 bp, Homo sapiens
gcatgtactctgattttacacgcttccgccaacaaactggtcccttctcagatttcttcccagtctggcccatgat

SEQ ID NO: 161960 - DNA, 74 bp, Homo sapiens
tgattttacacgcttccgccaacaaactggtcccttctcagatttcttcccagtctggcccatgattattctaa

SEQ ID NO: 161961 - DNA, 74 bp, Homo sapiens
ttacacgcttccgccaacaaactggtcccttctcagatttcttcccagtctggcccatgattattctaaaagca

SEQ ID NO: 161962 - DNA, 73 bp, Homo sapiens
aacaaactggtcccttctcagatttcttcccagtctggcccatgattattctaaaagcaatggtttcatatta

SEQ ID NO: 161963 - DNA, 74 bp, Homo sapiens
gtcccttctcagatttcttcccagtctggcccatgattattctaaaagcaatggtttcatattaaaatcactaa

SEQ ID NO: 161964 - DNA, 69 bp, Homo sapiens
aacagcttgtaatgtttaaggattacgattctttagaaagtggcaactcactaggcgttcaccaagttt

SEQ ID NO: 161965 - DNA, 68 bp, Homo sapiens
aatgtttaaggattacgattctttagaaagtggcaactcactaggcgttcaccaagttttccaaaaga

SEQ ID NO: 161966 - DNA, 71 bp, Homo sapiens
attacgattctttagaaagtggcaactcactaggcgttcaccaagttttccaaaagatcgtgcttctcgat

SEQ ID NO: 161967 - DNA, 71 bp, Homo sapiens
ttagaaagtggcaactcactaggcgttcaccaagttttccaaaagatcgtgcttctcgattcctcccgctt

SEQ ID NO: 161968 - DNA, 69 bp, Homo sapiens
aactcactaggcgttcaccaagttttccaaaagatcgtgcttctcgattcctcccgctttcaaaaagta

SEQ ID NO: 161969 - DNA, 68 bp, Homo sapiens
taggcgttcaccaagttttccaaaagatcgtgcttctcgattcctcccgctttcaaaaagtaaccctg

SEQ ID NO: 161970 - DNA, 68 bp, Homo sapiens
agttttccaaaagatcgtgcttctcgattcctcccgctttcaaaaagtaaccctgtggcacagatttt

SEQ ID NO: 161971 - DNA, 65 bp, Homo sapiens
cttctcgattcctcccgctttcaaaaagtaaccctgtggcacagatttttggggggaacggaagg

SEQ ID NO: 161972 - DNA, 65 bp, Homo sapiens
attcctcccgctttcaaaaagtaaccctgtggcacagatttttggggggaacggaaggggatgta

SEQ ID NO: 161973 - DNA, 67 bp, Homo sapiens
tttcaaaaagtaaccctgtggcacagatttttggggggaacggaaggggatgtacacaatgaagtgg

SEQ ID NO: 161974 - DNA, 70 bp, Homo sapiens
taaccctgtggcacagatttttggggggaacggaaggggatgtacacaatgaagtgggaattcaacagga

SEQ ID NO: 161975 - DNA, 68 bp, Homo sapiens
agatttttggggggaacggaaggggatgtacacaatgaagtgggaattcaacaggacgccctccagaa

SEQ ID NO: 161976 - DNA, 72 bp, Homo sapiens
ggggaacggaaggggatgtacacaatgaagtgggaattcaacaggacgccctccagaaacacaatcaataga

SEQ ID NO: 161977 - DNA, 77 bp, Homo sapiens
acggaaggggatgtacacaatgaagtgggaattcaacaggacgccctccagaaacacaatcaatagagagcagagca

SEQ ID NO: 161978 - DNA, 80 bp, Homo sapiens
atgtacacaatgaagtgggaattcaacaggacgccctccagaaacacaatcaatagagagcagagcagctcgactcttcc

SEQ ID NO: 161979 - DNA, 77 bp, Homo sapiens
agtgggaattcaacaggacgccctccagaaacacaatcaatagagagcagagcagctcgactcttccctcaaactta

SEQ ID NO: 161980 - DNA, 79 bp, Homo sapiens
attcaacaggacgccctccagaaacacaatcaatagagagcagagcagctcgactcttccctcaaacttagcataaagc

SEQ ID NO: 161981 - DNA, 79 bp, Homo sapiens
acgccctccagaaacacaatcaatagagagcagagcagctcgactcttccctcaaacttagcataaagccagaccaggc

SEQ ID NO: 161982 - DNA, 80 bp, Homo sapiens
aaacacaatcaatagagagcagagcagctcgactcttccctcaaacttagcataaagccagaccaggcggcgagggcagc

SEQ ID NO: 161983 - DNA, 78 bp, Homo sapiens
aatagagagcagagcagctcgactcttccctcaaacttagcataaagccagaccaggcggcgagggcagcccgcgacc

SEQ ID NO: 161984 - DNA, 77 bp, Homo sapiens
agcagctcgactcttccctcaaacttagcataaagccagaccaggcggcgagggcagcccgcgaccgccggagctca

SEQ ID NO: 161985 - DNA, 73 bp, Homo sapiens
cgactcttccctcaaacttagcataaagccagaccaggcggcgagggcagcccgcgaccgccggagctcaggg

SEQ ID NO: 161986 - DNA, 70 bp, Homo sapiens
aaacttagcataaagccagaccaggcggcgagggcagcccgcgaccgccggagctcagggggatttcggg

SEQ ID NO: 161987 - DNA, 71 bp, Homo sapiens
ataaagccagaccaggcggcgagggcagcccgcgaccgccggagctcagggggatttcggggtgcgtcgtg

SEQ ID NO: 161988 - DNA, 69 bp, Homo sapiens
aggcggcgagggcagcccgcgaccgccggagctcagggggatttcggggtgcgtcgtggggaaacgtca

SEQ ID NO: 161989 - DNA, 71 bp, Homo sapiens
ggcagcccgcgaccgccggagctcagggggatttcggggtgcgtcgtggggaaacgtcagaggcgaagcta

SEQ ID NO: 161990 - DNA, 69 bp, Homo sapiens
gaccgccggagctcagggggatttcggggtgcgtcgtggggaaacgtcagaggcgaagctactccgagt

SEQ ID NO: 161991 - DNA, 68 bp, Homo sapiens
ccggagctcagggggatttcggggtgcgtcgtggggaaacgtcagaggcgaagctactccgagttccc

SEQ ID NO: 161992 - DNA, 67 bp, Homo sapiens
atttcggggtgcgtcgtggggaaacgtcagaggcgaagctactccgagttccccgccgcgaacgtcg

SEQ ID NO: 161993 - DNA, 69 bp, Homo sapiens
gggtgcgtcgtggggaaacgtcagaggcgaagctactccgagttccccgccgcgaacgtcgtcccgcga

SEQ ID NO: 161994 - DNA, 67 bp, Homo sapiens
aagctactccgagttccccgccgcgaacgtcgtcccgcgagcgccgcggccccagcccggggtcggc

SEQ ID NO: 161995 - DNA, 69 bp, Homo sapiens
gttcgcactcccggagccccgccggccgggccgcccgcagcggcgcgttaccttcgtcccgcgcgccga

SEQ ID NO: 161996 - DNA, 68 bp, Homo sapiens
agccccgccggccgggccgcccgcagcggcgcgttaccttcgtcccgcgcgccgactcgcgttgttcc

SEQ ID NO: 161997 - DNA, 69 bp, Homo sapiens
ccgggccgcccgcagcggcgcgttaccttcgtcccgcgcgccgactcgcgttgttcccgcgcgtcgccc

SEQ ID NO: 161998 - DNA, 70 bp, Homo sapiens
cccgcagcggcgcgttaccttcgtcccgcgcgccgactcgcgttgttcccgcgcgtcgcccccgcgcgcc

SEQ ID NO: 161999 - DNA, 69 bp, Homo sapiens
cggcgcgttaccttcgtcccgcgcgccgactcgcgttgttcccgcgcgtcgcccccgcgcgccgccgcc

SEQ ID NO: 162000 - DNA, 71 bp, Homo sapiens
cgccgccgccgccggggctccactgccttctgagtcccaccgggtgtcggacgcgaccggaccgagcgcca

SEQ ID NO: 162001 - DNA, 71 bp, Homo sapiens
cgccggggctccactgccttctgagtcccaccgggtgtcggacgcgaccggaccgagcgccaaacgcggca

SEQ ID NO: 162002 - DNA, 74 bp, Homo sapiens
cactgccttctgagtcccaccgggtgtcggacgcgaccggaccgagcgccaaacgcggcagcccaatcgccatc

SEQ ID NO: 162003 - DNA, 72 bp, Homo sapiens
tgagtcccaccgggtgtcggacgcgaccggaccgagcgccaaacgcggcagcccaatcgccatcgcttttat

SEQ ID NO: 162004 - DNA, 70 bp, Homo sapiens
cccaccgggtgtcggacgcgaccggaccgagcgccaaacgcggcagcccaatcgccatcgcttttatttg

SEQ ID NO: 162005 - DNA, 71 bp, Homo sapiens
gtcggacgcgaccggaccgagcgccaaacgcggcagcccaatcgccatcgcttttatttggcccccccagc

SEQ ID NO: 162006 - DNA, 71 bp, Homo sapiens
accggaccgagcgccaaacgcggcagcccaatcgccatcgcttttatttggcccccccagcccaatcaagc

SEQ ID NO: 162007 - DNA, 71 bp, Homo sapiens
ccaaacgcggcagcccaatcgccatcgcttttatttggcccccccagcccaatcaagcgccgccccgattg

SEQ ID NO: 162008 - DNA, 71 bp, Homo sapiens
agcccaatcgccatcgcttttatttggcccccccagcccaatcaagcgccgccccgattggcgggacgcga

SEQ ID NO: 162009 - DNA, 70 bp, Homo sapiens
atcgccatcgcttttatttggcccccccagcccaatcaagcgccgccccgattggcgggacgcgaggcgg

SEQ ID NO: 162010 - DNA, 76 bp, Homo sapiens
aagagctcaaatttgaatatgaggagttaacacagaagctctaggcagctcttatagatgtaaaatattttatttg

SEQ ID NO: 162011 - DNA, 77 bp, Homo sapiens
gaatatgaggagttaacacagaagctctaggcagctcttatagatgtaaaatattttatttgtaaatggtgatcttc

SEQ ID NO: 162012 - DNA, 75 bp, Homo sapiens
ggagttaacacagaagctctaggcagctcttatagatgtaaaatattttatttgtaaatggtgatcttctaaatc

SEQ ID NO: 162013 - DNA, 78 bp, Homo sapiens
cacagaagctctaggcagctcttatagatgtaaaatattttatttgtaaatggtgatcttctaaatctgtgtccacaa

SEQ ID NO: 162014 - DNA, 75 bp, Homo sapiens
ctaggcagctcttatagatgtaaaatattttatttgtaaatggtgatcttctaaatctgtgtccacaaattccaa

SEQ ID NO: 162015 - DNA, 72 bp, Homo sapiens
tagatgtaaaatattttatttgtaaatggtgatcttctaaatctgtgtccacaaattccaaaacccataaca

SEQ ID NO: 162016 - DNA, 72 bp, Homo sapiens
tattttatttgtaaatggtgatcttctaaatctgtgtccacaaattccaaaacccataacactctgtatact

SEQ ID NO: 162017 - DNA, 72 bp, Homo sapiens
atttgtaaatggtgatcttctaaatctgtgtccacaaattccaaaacccataacactctgtatacttcaaaa

SEQ ID NO: 162018 - DNA, 72 bp, Homo sapiens
tggtgatcttctaaatctgtgtccacaaattccaaaacccataacactctgtatacttcaaaaaattcaatt

SEQ ID NO: 162019 - DNA, 72 bp, Homo sapiens
tctgtgtccacaaattccaaaacccataacactctgtatacttcaaaaaattcaatttttgccaacattaga

SEQ ID NO: 162020 - DNA, 70 bp, Homo sapiens
gtccacaaattccaaaacccataacactctgtatacttcaaaaaattcaatttttgccaacattagatac

SEQ ID NO: 162021 - DNA, 72 bp, Homo sapiens
caaaacccataacactctgtatacttcaaaaaattcaatttttgccaacattagatactattatacagaaca

SEQ ID NO: 162022 - DNA, 72 bp, Homo sapiens
aacactctgtatacttcaaaaaattcaatttttgccaacattagatactattatacagaacagaaaacaaca

SEQ ID NO: 162023 - DNA, 67 bp, Homo sapiens
cttcaaaaaattcaatttttgccaacattagatactattatacagaacagaaaacaacaaaaacccg

SEQ ID NO: 162024 - DNA, 69 bp, Homo sapiens
ttcaatttttgccaacattagatactattatacagaacagaaaacaacaaaaacccggtaggacaaata

SEQ ID NO: 162025 - DNA, 70 bp, Homo sapiens
ttgccaacattagatactattatacagaacagaaaacaacaaaaacccggtaggacaaatactggtagga

SEQ ID NO: 162026 - DNA, 70 bp, Homo sapiens
agatactattatacagaacagaaaacaacaaaaacccggtaggacaaatactggtaggatgtcaggatat

SEQ ID NO: 162027 - DNA, 70 bp, Homo sapiens
attatacagaacagaaaacaacaaaaacccggtaggacaaatactggtaggatgtcaggatattgtacaa

SEQ ID NO: 162028 - DNA, 67 bp, Homo sapiens
aaaacaacaaaaacccggtaggacaaatactggtaggatgtcaggatattgtacaagagaagaaaaa

SEQ ID NO: 162029 - DNA, 69 bp, Homo sapiens
aacaaaaacccggtaggacaaatactggtaggatgtcaggatattgtacaagagaagaaaaatattcag

SEQ ID NO: 162030 - DNA, 72 bp, Homo sapiens
cggtaggacaaatactggtaggatgtcaggatattgtacaagagaagaaaaatattcaggaaacaaatttca

SEQ ID NO: 162031 - DNA, 77 bp, Homo sapiens
tggtaggatgtcaggatattgtacaagagaagaaaaatattcaggaaacaaatttcatacagctatttatcaagaga

SEQ ID NO: 162032 - DNA, 75 bp, Homo sapiens
ggatgtcaggatattgtacaagagaagaaaaatattcaggaaacaaatttcatacagctatttatcaagagaaaa

SEQ ID NO: 162033 - DNA, 73 bp, Homo sapiens
agaaaaatattcaggaaacaaatttcatacagctatttatcaagagaaaaatatatacaattgatttattctg

SEQ ID NO: 162034 - DNA, 74 bp, Homo sapiens
ttcaggaaacaaatttcatacagctatttatcaagagaaaaatatatacaattgatttattctgtaagataaaa

SEQ ID NO: 162035 - DNA, 78 bp, Homo sapiens
caaatttcatacagctatttatcaagagaaaaatatatacaattgatttattctgtaagataaaaatacatcatgcca

SEQ ID NO: 162036 - DNA, 79 bp, Homo sapiens
cagctatttatcaagagaaaaatatatacaattgatttattctgtaagataaaaatacatcatgccatatacaagttca

SEQ ID NO: 162037 - DNA, 80 bp, Homo sapiens
caagagaaaaatatatacaattgatttattctgtaagataaaaatacatcatgccatatacaagttcagaactgcatcac

SEQ ID NO: 162038 - DNA, 82 bp, Homo sapiens
atatatacaattgatttattctgtaagataaaaatacatcatgccatatacaagttcagaactgcatcactgaatataccaa

SEQ ID NO: 162039 - DNA, 80 bp, Homo sapiens
ttctgtaagataaaaatacatcatgccatatacaagttcagaactgcatcactgaatataccaacagtttacagtccact

SEQ ID NO: 162040 - DNA, 80 bp, Homo sapiens
agataaaaatacatcatgccatatacaagttcagaactgcatcactgaatataccaacagtttacagtccacttgaattg

SEQ ID NO: 162041 - DNA, 81 bp, Homo sapiens
atgccatatacaagttcagaactgcatcactgaatataccaacagtttacagtccacttgaattgtgcacacaaaacttca

SEQ ID NO: 162042 - DNA, 78 bp, Homo sapiens
atatacaagttcagaactgcatcactgaatataccaacagtttacagtccacttgaattgtgcacacaaaacttcatt

SEQ ID NO: 162043 - DNA, 77 bp, Homo sapiens
agaactgcatcactgaatataccaacagtttacagtccacttgaattgtgcacacaaaacttcattttatacttagc

SEQ ID NO: 162044 - DNA, 76 bp, Homo sapiens
atcactgaatataccaacagtttacagtccacttgaattgtgcacacaaaacttcattttatacttagcctgtgaa

SEQ ID NO: 162045 - DNA, 75 bp, Homo sapiens
ataccaacagtttacagtccacttgaattgtgcacacaaaacttcattttatacttagcctgtgaagtgtcagta

SEQ ID NO: 162046 - DNA, 75 bp, Homo sapiens
ttacagtccacttgaattgtgcacacaaaacttcattttatacttagcctgtgaagtgtcagtaccagaatttta

SEQ ID NO: 162047 - DNA, 73 bp, Homo sapiens
acttgaattgtgcacacaaaacttcattttatacttagcctgtgaagtgtcagtaccagaattttaagtacaa

SEQ ID NO: 162048 - DNA, 71 bp, Homo sapiens
tgcacacaaaacttcattttatacttagcctgtgaagtgtcagtaccagaattttaagtacaaaataaaaa

SEQ ID NO: 162049 - DNA, 69 bp, Homo sapiens
tcattttatacttagcctgtgaagtgtcagtaccagaattttaagtacaaaataaaaagctaacctggt

SEQ ID NO: 162050 - DNA, 69 bp, Homo sapiens
gtgaagtgtcagtaccagaattttaagtacaaaataaaaagctaacctggttcaaaatgctgattaagt

SEQ ID NO: 162051 - DNA, 69 bp, Homo sapiens
gtaccagaattttaagtacaaaataaaaagctaacctggttcaaaatgctgattaagtttctacaagca

SEQ ID NO: 162052 - DNA, 67 bp, Homo sapiens
aataaaaagctaacctggttcaaaatgctgattaagtttctacaagcaaacacaaaacagtgttttt

SEQ ID NO: 162053 - DNA, 68 bp, Homo sapiens
agctaacctggttcaaaatgctgattaagtttctacaagcaaacacaaaacagtgttttttttattaa

SEQ ID NO: 162054 - DNA, 68 bp, Homo sapiens
gttcaaaatgctgattaagtttctacaagcaaacacaaaacagtgttttttttattaaagaaatgtaa

SEQ ID NO: 162055 - DNA, 66 bp, Homo sapiens
ctgattaagtttctacaagcaaacacaaaacagtgttttttttattaaagaaatgtaaacaaacag

SEQ ID NO: 162056 - DNA, 69 bp, Homo sapiens
tctacaagcaaacacaaaacagtgttttttttattaaagaaatgtaaacaaacagttcatacaaacaca

SEQ ID NO: 162057 - DNA, 65 bp, Homo sapiens
aaacacaaaacagtgttttttttattaaagaaatgtaaacaaacagttcatacaaacacatttta

SEQ ID NO: 162058 - DNA, 69 bp, Homo sapiens
gaaatgtaaacaaacagttcatacaaacacattttaaaattacatcttccaaaaaccctattgccagag

SEQ ID NO: 162059 - DNA, 77 bp, Homo sapiens
ttcatacaaacacattttaaaattacatcttccaaaaaccctattgccagagtcctgcagctgtaagcataatcaca

SEQ ID NO: 162060 - DNA, 73 bp, Homo sapiens
ttttaaaattacatcttccaaaaaccctattgccagagtcctgcagctgtaagcataatcacatctccttttt

SEQ ID NO: 162061 - DNA, 72 bp, Homo sapiens
aaattacatcttccaaaaaccctattgccagagtcctgcagctgtaagcataatcacatctccttttttttt

SEQ ID NO: 162062 - DNA, 64 bp, Homo sapiens
ttttaactttttcaaatttttgtgttaaatagaaggctaaagggttagatttaagtttctgcta

SEQ ID NO: 162063 - DNA, 69 bp, Homo sapiens
ttcaaatttttgtgttaaatagaaggctaaagggttagatttaagtttctgctacatgatcctattacg

SEQ ID NO: 162064 - DNA, 73 bp, Homo sapiens
tgtgttaaatagaaggctaaagggttagatttaagtttctgctacatgatcctattacgtttacatgattctc

SEQ ID NO: 162065 - DNA, 75 bp, Homo sapiens
ttaagtttctgctacatgatcctattacgtttacatgattctctgtggctgaaacaaagttctaatcaaaactac

SEQ ID NO: 162066 - DNA, 76 bp, Homo sapiens
tttctgctacatgatcctattacgtttacatgattctctgtggctgaaacaaagttctaatcaaaactacttttgc

SEQ ID NO: 162067 - DNA, 72 bp, Homo sapiens
cgtttacatgattctctgtggctgaaacaaagttctaatcaaaactacttttgctgaagaaaaaattcagcc

SEQ ID NO: 162068 - DNA, 71 bp, Homo sapiens
attctctgtggctgaaacaaagttctaatcaaaactacttttgctgaagaaaaaattcagcctccatttgg

SEQ ID NO: 162069 - DNA, 69 bp, Homo sapiens
ggctgaaacaaagttctaatcaaaactacttttgctgaagaaaaaattcagcctccatttgggtgtatt

SEQ ID NO: 162070 - DNA, 72 bp, Homo sapiens
actacttttgctgaagaaaaaattcagcctccatttgggtgtatttttaagcagttattcacagttatcaca

SEQ ID NO: 162071 - DNA, 74 bp, Homo sapiens
gctgaagaaaaaattcagcctccatttgggtgtatttttaagcagttattcacagttatcacaaattgtaagca

SEQ ID NO: 162072 - DNA, 71 bp, Homo sapiens
aaaaattcagcctccatttgggtgtatttttaagcagttattcacagttatcacaaattgtaagcacaaaa

SEQ ID NO: 162073 - DNA, 71 bp, Homo sapiens
gcctccatttgggtgtatttttaagcagttattcacagttatcacaaattgtaagcacaaaaaaacctgac

SEQ ID NO: 162074 - DNA, 71 bp, Homo sapiens
gtatttttaagcagttattcacagttatcacaaattgtaagcacaaaaaaacctgactgaagaagtaggga

SEQ ID NO: 162075 - DNA, 75 bp, Homo sapiens
agcagttattcacagttatcacaaattgtaagcacaaaaaaacctgactgaagaagtagggatgcaacaatataa

SEQ ID NO: 162076 - DNA, 75 bp, Homo sapiens
attcacagttatcacaaattgtaagcacaaaaaaacctgactgaagaagtagggatgcaacaatataatatgaaa

SEQ ID NO: 162077 - DNA, 73 bp, Homo sapiens
tatcacaaattgtaagcacaaaaaaacctgactgaagaagtagggatgcaacaatataatatgaaaaaattag

SEQ ID NO: 162078 - DNA, 70 bp, Homo sapiens
gcacaaaaaaacctgactgaagaagtagggatgcaacaatataatatgaaaaaattagtttaaattacca

SEQ ID NO: 162079 - DNA, 71 bp, Homo sapiens
acctgactgaagaagtagggatgcaacaatataatatgaaaaaattagtttaaattaccaaaacagctata

SEQ ID NO: 162080 - DNA, 71 bp, Homo sapiens
ggatgcaacaatataatatgaaaaaattagtttaaattaccaaaacagctataaaagttgtagtcgtagca

SEQ ID NO: 162081 - DNA, 68 bp, Homo sapiens
atataatatgaaaaaattagtttaaattaccaaaacagctataaaagttgtagtcgtagcatacgccc

SEQ ID NO: 162082 - DNA, 69 bp, Homo sapiens
aaaattagtttaaattaccaaaacagctataaaagttgtagtcgtagcatacgccccgctctgtcagaa

SEQ ID NO: 162083 - DNA, 72 bp, Homo sapiens
taaattaccaaaacagctataaaagttgtagtcgtagcatacgccccgctctgtcagaagtaaggtgtataa

SEQ ID NO: 162084 - DNA, 72 bp, Homo sapiens
aaacagctataaaagttgtagtcgtagcatacgccccgctctgtcagaagtaaggtgtataaaaccattgag

SEQ ID NO: 162085 - DNA, 72 bp, Homo sapiens
ataaaagttgtagtcgtagcatacgccccgctctgtcagaagtaaggtgtataaaaccattgagtactaata

SEQ ID NO: 162086 - DNA, 74 bp, Homo sapiens
ttgtagtcgtagcatacgccccgctctgtcagaagtaaggtgtataaaaccattgagtactaatagactgcggt

SEQ ID NO: 162087 - DNA, 68 bp, Homo sapiens
ccgctctgtcagaagtaaggtgtataaaaccattgagtactaatagactgcggtttccaaaaaacccc

SEQ ID NO: 162088 - DNA, 66 bp, Homo sapiens
aagtaaggtgtataaaaccattgagtactaatagactgcggtttccaaaaaacccccaacactcta

SEQ ID NO: 162089 - DNA, 64 bp, Homo sapiens
aaaaccattgagtactaatagactgcggtttccaaaaaacccccaacactctaggttgaaattt

SEQ ID NO: 162090 - DNA, 65 bp, Homo sapiens
attgagtactaatagactgcggtttccaaaaaacccccaacactctaggttgaaattttggttat

SEQ ID NO: 162091 - DNA, 66 bp, Homo sapiens
cggtttccaaaaaacccccaacactctaggttgaaattttggttattacataattataatggcata

SEQ ID NO: 162092 - DNA, 69 bp, Homo sapiens
ccccaacactctaggttgaaattttggttattacataattataatggcatattttataacacaaaatta

SEQ ID NO: 162093 - DNA, 71 bp, Homo sapiens
acactctaggttgaaattttggttattacataattataatggcatattttataacacaaaattatattgta

SEQ ID NO: 162094 - DNA, 72 bp, Homo sapiens
attttggttattacataattataatggcatattttataacacaaaattatattgtaacatccctatgaacat

SEQ ID NO: 162095 - DNA, 73 bp, Homo sapiens
ttacataattataatggcatattttataacacaaaattatattgtaacatccctatgaacattttataagccc

SEQ ID NO: 162096 - DNA, 76 bp, Homo sapiens
ataatggcatattttataacacaaaattatattgtaacatccctatgaacattttataagcccccgagctgctgca

SEQ ID NO: 162097 - DNA, 78 bp, Homo sapiens
tatattgtaacatccctatgaacattttataagcccccgagctgctgcagagcctggtagcatttggtcaataactat

SEQ ID NO: 162098 - DNA, 75 bp, Homo sapiens
aacatccctatgaacattttataagcccccgagctgctgcagagcctggtagcatttggtcaataactattttta

SEQ ID NO: 162099 - DNA, 73 bp, Homo sapiens
aacattttataagcccccgagctgctgcagagcctggtagcatttggtcaataactatttttatactgtattt

SEQ ID NO: 162100 - DNA, 74 bp, Homo sapiens
ataagcccccgagctgctgcagagcctggtagcatttggtcaataactatttttatactgtattttttctcaaa

SEQ ID NO: 162101 - DNA, 77 bp, Homo sapiens
gagctgctgcagagcctggtagcatttggtcaataactatttttatactgtattttttctcaaaatatttacatatc

SEQ ID NO: 162102 - DNA, 73 bp, Homo sapiens
agagcctggtagcatttggtcaataactatttttatactgtattttttctcaaaatatttacatatctgtaca

SEQ ID NO: 162103 - DNA, 71 bp, Homo sapiens
gcatttggtcaataactatttttatactgtattttttctcaaaatatttacatatctgtacaaagtaacag

SEQ ID NO: 162104 - DNA, 71 bp, Homo sapiens
tactgtattttttctcaaaatatttacatatctgtacaaagtaacagggtttgttagttctgcaggtaaca

SEQ ID NO: 162105 - DNA, 74 bp, Homo sapiens
tttttctcaaaatatttacatatctgtacaaagtaacagggtttgttagttctgcaggtaacagcagcagcttg

SEQ ID NO: 162106 - DNA, 75 bp, Homo sapiens
atatttacatatctgtacaaagtaacagggtttgttagttctgcaggtaacagcagcagcttggctttcttctaa

SEQ ID NO: 162107 - DNA, 73 bp, Homo sapiens
atatctgtacaaagtaacagggtttgttagttctgcaggtaacagcagcagcttggctttcttctaactttat

SEQ ID NO: 162108 - DNA, 70 bp, Homo sapiens
acaaagtaacagggtttgttagttctgcaggtaacagcagcagcttggctttcttctaactttatttaaa

SEQ ID NO: 162109 - DNA, 73 bp, Homo sapiens
gtttgttagttctgcaggtaacagcagcagcttggctttcttctaactttatttaaaaatagcttcattcact

SEQ ID NO: 162110 - DNA, 75 bp, Homo sapiens
agttctgcaggtaacagcagcagcttggctttcttctaactttatttaaaaatagcttcattcacttattcaata

SEQ ID NO: 162111 - DNA, 74 bp, Homo sapiens
gtaacagcagcagcttggctttcttctaactttatttaaaaatagcttcattcacttattcaataataaataca

SEQ ID NO: 162112 - DNA, 69 bp, Homo sapiens
cagcttggctttcttctaactttatttaaaaatagcttcattcacttattcaataataaatacaaaagt

SEQ ID NO: 162113 - DNA, 68 bp, Homo sapiens
ttcttctaactttatttaaaaatagcttcattcacttattcaataataaatacaaaagtttctcttat

SEQ ID NO: 162114 - DNA, 70 bp, Homo sapiens
ttattcaataataaatacaaaagtttctcttattttacagaaatcaaaaactacaataaactgactcatg

SEQ ID NO: 162115 - DNA, 70 bp, Homo sapiens
tacaaaagtttctcttattttacagaaatcaaaaactacaataaactgactcatggaatcaagtatttaa

SEQ ID NO: 162116 - DNA, 72 bp, Homo sapiens
gaaatcaaaaactacaataaactgactcatggaatcaagtatttaaatgtatttagtgcaagttattatccc

SEQ ID NO: 162117 - DNA, 74 bp, Homo sapiens
ctacaataaactgactcatggaatcaagtatttaaatgtatttagtgcaagttattatcccttagctctatccc

SEQ ID NO: 162118 - DNA, 72 bp, Homo sapiens
ggaatcaagtatttaaatgtatttagtgcaagttattatcccttagctctatccctaaggaagtcatttcag

SEQ ID NO: 162119 - DNA, 72 bp, Homo sapiens
tttaaatgtatttagtgcaagttattatcccttagctctatccctaaggaagtcatttcagtacattccttg

SEQ ID NO: 162120 - DNA, 74 bp, Homo sapiens
atgtatttagtgcaagttattatcccttagctctatccctaaggaagtcatttcagtacattccttgttcagtg

SEQ ID NO: 162121 - DNA, 72 bp, Homo sapiens
agttattatcccttagctctatccctaaggaagtcatttcagtacattccttgttcagtggtgtctacttta

SEQ ID NO: 162122 - DNA, 72 bp, Homo sapiens
tatcccttagctctatccctaaggaagtcatttcagtacattccttgttcagtggtgtctactttatttaaa

SEQ ID NO: 162123 - DNA, 69 bp, Homo sapiens
ctctatccctaaggaagtcatttcagtacattccttgttcagtggtgtctactttatttaaaaacattt

SEQ ID NO: 162124 - DNA, 69 bp, Homo sapiens
agtcatttcagtacattccttgttcagtggtgtctactttatttaaaaacattttgaagttagagggcc

SEQ ID NO: 162125 - DNA, 69 bp, Homo sapiens
tttcagtacattccttgttcagtggtgtctactttatttaaaaacattttgaagttagagggcctgccc

SEQ ID NO: 162126 - DNA, 65 bp, Homo sapiens
ccttgttcagtggtgtctactttatttaaaaacattttgaagttagagggcctgcccctttttaa

SEQ ID NO: 162127 - DNA, 64 bp, Homo sapiens
agtggtgtctactttatttaaaaacattttgaagttagagggcctgcccctttttaataaggcc

SEQ ID NO: 162128 - DNA, 68 bp, Homo sapiens
atttaaaaacattttgaagttagagggcctgcccctttttaataaggccgtggccagcactctctgtc

SEQ ID NO: 162129 - DNA, 67 bp, Homo sapiens
aaaacattttgaagttagagggcctgcccctttttaataaggccgtggccagcactctctgtccccc

SEQ ID NO: 162130 - DNA, 71 bp, Homo sapiens
aagttagagggcctgcccctttttaataaggccgtggccagcactctctgtccccctcgctggtgatttca

SEQ ID NO: 162131 - DNA, 75 bp, Homo sapiens
tgcccctttttaataaggccgtggccagcactctctgtccccctcgctggtgatttcagtcttacattcatagga

SEQ ID NO: 162132 - DNA, 74 bp, Homo sapiens
tttttaataaggccgtggccagcactctctgtccccctcgctggtgatttcagtcttacattcataggaaggcc

SEQ ID NO: 162133 - DNA, 75 bp, Homo sapiens
actctctgtccccctcgctggtgatttcagtcttacattcataggaaggcccctgcccggggcagggcagccatc

SEQ ID NO: 162134 - DNA, 75 bp, Homo sapiens
ccctcgctggtgatttcagtcttacattcataggaaggcccctgcccggggcagggcagccatcggctctttgcc

SEQ ID NO: 162135 - DNA, 70 bp, Homo sapiens
agtcttacattcataggaaggcccctgcccggggcagggcagccatcggctctttgccccagtaaaagtt

SEQ ID NO: 162136 - DNA, 70 bp, Homo sapiens
ttcataggaaggcccctgcccggggcagggcagccatcggctctttgccccagtaaaagtttctccttag

SEQ ID NO: 162137 - DNA, 71 bp, Homo sapiens
ctgcccggggcagggcagccatcggctctttgccccagtaaaagtttctccttagtgagactagaaaacca

SEQ ID NO: 162138 - DNA, 71 bp, Homo sapiens
cagggcagccatcggctctttgccccagtaaaagtttctccttagtgagactagaaaaccaaaacaatgaa

SEQ ID NO: 162139 - DNA, 67 bp, Homo sapiens
atcggctctttgccccagtaaaagtttctccttagtgagactagaaaaccaaaacaatgaaacccac

SEQ ID NO: 162140 - DNA, 67 bp, Homo sapiens
tctttgccccagtaaaagtttctccttagtgagactagaaaaccaaaacaatgaaacccacccacaa

SEQ ID NO: 162141 - DNA, 64 bp, Homo sapiens
agtaaaagtttctccttagtgagactagaaaaccaaaacaatgaaacccacccacaagggaaaa

SEQ ID NO: 162142 - DNA, 74 bp, Homo sapiens
aaaagcaaaagtgctggaccattctgtgattccgtttaacctcggccacttcaggaacgctgcttctgtcagct

SEQ ID NO: 162143 - DNA, 74 bp, Homo sapiens
aaaagtgctggaccattctgtgattccgtttaacctcggccacttcaggaacgctgcttctgtcagcttcctcc

SEQ ID NO: 162144 - DNA, 75 bp, Homo sapiens
attctgtgattccgtttaacctcggccacttcaggaacgctgcttctgtcagcttcctcctggcgctgctttaac

SEQ ID NO: 162145 - DNA, 72 bp, Homo sapiens
attccgtttaacctcggccacttcaggaacgctgcttctgtcagcttcctcctggcgctgctttaacctaaa

SEQ ID NO: 162146 - DNA, 75 bp, Homo sapiens
taacctcggccacttcaggaacgctgcttctgtcagcttcctcctggcgctgctttaacctaaaggactgaggaa

SEQ ID NO: 162147 - DNA, 75 bp, Homo sapiens
acttcaggaacgctgcttctgtcagcttcctcctggcgctgctttaacctaaaggactgaggaaatcagaactcc

SEQ ID NO: 162148 - DNA, 76 bp, Homo sapiens
tgcttctgtcagcttcctcctggcgctgctttaacctaaaggactgaggaaatcagaactcccagaagctttttca

SEQ ID NO: 162149 - DNA, 70 bp, Homo sapiens
agcttcctcctggcgctgctttaacctaaaggactgaggaaatcagaactcccagaagctttttcaaaaa

SEQ ID NO: 162150 - DNA, 70 bp, Homo sapiens
ctggcgctgctttaacctaaaggactgaggaaatcagaactcccagaagctttttcaaaaagtcataaaa

SEQ ID NO: 162151 - DNA, 69 bp, Homo sapiens
tgctttaacctaaaggactgaggaaatcagaactcccagaagctttttcaaaaagtcataaaacagaaa

SEQ ID NO: 162152 - DNA, 67 bp, Homo sapiens
aacctaaaggactgaggaaatcagaactcccagaagctttttcaaaaagtcataaaacagaaaacaa

SEQ ID NO: 162153 - DNA, 73 bp, Homo sapiens
agtcataaaacagaaaacaaaaatctctttctgtctgcaaaattccaatggtgtgttgaatcgcctcttccta

SEQ ID NO: 162154 - DNA, 72 bp, Homo sapiens
agaaaacaaaaatctctttctgtctgcaaaattccaatggtgtgttgaatcgcctcttcctagggacaagcc

SEQ ID NO: 162155 - DNA, 74 bp, Homo sapiens
aaaaatctctttctgtctgcaaaattccaatggtgtgttgaatcgcctcttcctagggacaagccgcccgctga

SEQ ID NO: 162156 - DNA, 79 bp, Homo sapiens
tgtctgcaaaattccaatggtgtgttgaatcgcctcttcctagggacaagccgcccgctgagctagcaaggaatgcatt

SEQ ID NO: 162157 - DNA, 76 bp, Homo sapiens
aaattccaatggtgtgttgaatcgcctcttcctagggacaagccgcccgctgagctagcaaggaatgcatttcagt

SEQ ID NO: 162158 - DNA, 78 bp, Homo sapiens
aatcgcctcttcctagggacaagccgcccgctgagctagcaaggaatgcatttcagttcatccacttccggcagttca

SEQ ID NO: 162159 - DNA, 80 bp, Homo sapiens
ttcctagggacaagccgcccgctgagctagcaaggaatgcatttcagttcatccacttccggcagttcacagctccacag

SEQ ID NO: 162160 - DNA, 83 bp, Homo sapiens
agctagcaaggaatgcatttcagttcatccacttccggcagttcacagctccacagtgacacggaatcttgtgctggtcatct

SEQ ID NO: 162161 - DNA, 81 bp, Homo sapiens
aaggaatgcatttcagttcatccacttccggcagttcacagctccacagtgacacggaatcttgtgctggtcatcttcaaa

SEQ ID NO: 162162 - DNA, 79 bp, Homo sapiens
agttcatccacttccggcagttcacagctccacagtgacacggaatcttgtgctggtcatcttcaaagtcaaacttata

SEQ ID NO: 162163 - DNA, 80 bp, Homo sapiens
atccacttccggcagttcacagctccacagtgacacggaatcttgtgctggtcatcttcaaagtcaaacttatagtcata

SEQ ID NO: 162164 - DNA, 82 bp, Homo sapiens
agttcacagctccacagtgacacggaatcttgtgctggtcatcttcaaagtcaaacttatagtcatagcagagctgcccacg

SEQ ID NO: 162165 - DNA, 83 bp, Homo sapiens
tccacagtgacacggaatcttgtgctggtcatcttcaaagtcaaacttatagtcatagcagagctgcccacggcaaagacaca

SEQ ID NO: 162166 - DNA, 78 bp, Homo sapiens
aatcttgtgctggtcatcttcaaagtcaaacttatagtcatagcagagctgcccacggcaaagacacagggtaagaaa

SEQ ID NO: 162167 - DNA, 79 bp, Homo sapiens
tcttgtgctggtcatcttcaaagtcaaacttatagtcatagcagagctgcccacggcaaagacacagggtaagaaagga

SEQ ID NO: 162168 - DNA, 76 bp, Homo sapiens
atcttcaaagtcaaacttatagtcatagcagagctgcccacggcaaagacacagggtaagaaaggacagcaaggaa

SEQ ID NO: 162169 - DNA, 76 bp, Homo sapiens
aagtcaaacttatagtcatagcagagctgcccacggcaaagacacagggtaagaaaggacagcaaggaaggcaata

SEQ ID NO: 162170 - DNA, 75 bp, Homo sapiens
aacttatagtcatagcagagctgcccacggcaaagacacagggtaagaaaggacagcaaggaaggcaatagcgtt

SEQ ID NO: 162171 - DNA, 78 bp, Homo sapiens
atagcagagctgcccacggcaaagacacagggtaagaaaggacagcaaggaaggcaatagcgtttctgcctccatctc

SEQ ID NO: 162172 - DNA, 74 bp, Homo sapiens
agctgcccacggcaaagacacagggtaagaaaggacagcaaggaaggcaatagcgtttctgcctccatctccct

SEQ ID NO: 162173 - DNA, 74 bp, Homo sapiens
ccacggcaaagacacagggtaagaaaggacagcaaggaaggcaatagcgtttctgcctccatctcccttgcatt

SEQ ID NO: 162174 - DNA, 73 bp, Homo sapiens
taagaaaggacagcaaggaaggcaatagcgtttctgcctccatctcccttgcattttaaaaccagcaaacgaa

SEQ ID NO: 162175 - DNA, 72 bp, Homo sapiens
agcaaggaaggcaatagcgtttctgcctccatctcccttgcattttaaaaccagcaaacgaaacagacgtaa

SEQ ID NO: 162176 - DNA, 70 bp, Homo sapiens
aaggcaatagcgtttctgcctccatctcccttgcattttaaaaccagcaaacgaaacagacgtaaattaa

SEQ ID NO: 162177 - DNA, 68 bp, Homo sapiens
atctcccttgcattttaaaaccagcaaacgaaacagacgtaaattaaggaagacctgatttattgagg

SEQ ID NO: 162178 - DNA, 68 bp, Homo sapiens
cattttaaaaccagcaaacgaaacagacgtaaattaaggaagacctgatttattgaggttccatggga

SEQ ID NO: 162179 - DNA, 68 bp, Homo sapiens
taaaaccagcaaacgaaacagacgtaaattaaggaagacctgatttattgaggttccatgggaccctg

SEQ ID NO: 162180 - DNA, 65 bp, Homo sapiens
acgtaaattaaggaagacctgatttattgaggttccatgggaccctgggggaaccctgaaaagag

SEQ ID NO: 162181 - DNA, 72 bp, Homo sapiens
aaggaagacctgatttattgaggttccatgggaccctgggggaaccctgaaaagaggcattgtgcttgcaca

SEQ ID NO: 162182 - DNA, 73 bp, Homo sapiens
ttccatgggaccctgggggaaccctgaaaagaggcattgtgcttgcacagaggaaatgagggaggcagtattt

SEQ ID NO: 162183 - DNA, 76 bp, Homo sapiens
aaccctgaaaagaggcattgtgcttgcacagaggaaatgagggaggcagtatttttaaacagcgagatctgagaac

SEQ ID NO: 162184 - DNA, 78 bp, Homo sapiens
aaagaggcattgtgcttgcacagaggaaatgagggaggcagtatttttaaacagcgagatctgagaacgggagcctga

SEQ ID NO: 162185 - DNA, 78 bp, Homo sapiens
ttgcacagaggaaatgagggaggcagtatttttaaacagcgagatctgagaacgggagcctgaccagagaaagctgta

SEQ ID NO: 162186 - DNA, 77 bp, Homo sapiens
gaaatgagggaggcagtatttttaaacagcgagatctgagaacgggagcctgaccagagaaagctgtatttctgtga

SEQ ID NO: 162187 - DNA, 79 bp, Homo sapiens
tatttttaaacagcgagatctgagaacgggagcctgaccagagaaagctgtatttctgtgacttctcataatgctgtcc

SEQ ID NO: 162188 - DNA, 83 bp, Homo sapiens
acagcgagatctgagaacgggagcctgaccagagaaagctgtatttctgtgacttctcataatgctgtccctgcaagtggatg

SEQ ID NO: 162189 - DNA, 78 bp, Homo sapiens
agaacgggagcctgaccagagaaagctgtatttctgtgacttctcataatgctgtccctgcaagtggatggaggggac

SEQ ID NO: 162190 - DNA, 79 bp, Homo sapiens
ctgaccagagaaagctgtatttctgtgacttctcataatgctgtccctgcaagtggatggaggggactggaagggcaac

SEQ ID NO: 162191 - DNA, 78 bp, Homo sapiens
aagctgtatttctgtgacttctcataatgctgtccctgcaagtggatggaggggactggaagggcaactgctttccta

SEQ ID NO: 162192 - DNA, 78 bp, Homo sapiens
tatttctgtgacttctcataatgctgtccctgcaagtggatggaggggactggaagggcaactgctttcctagccctc

SEQ ID NO: 162193 - DNA, 75 bp, Homo sapiens
ttctcataatgctgtccctgcaagtggatggaggggactggaagggcaactgctttcctagccctctccctaaaa

SEQ ID NO: 162194 - DNA, 72 bp, Homo sapiens
aatgctgtccctgcaagtggatggaggggactggaagggcaactgctttcctagccctctccctaaaaccca

SEQ ID NO: 162195 - DNA, 69 bp, Homo sapiens
aagtggatggaggggactggaagggcaactgctttcctagccctctccctaaaacccagaagcctttca

SEQ ID NO: 162196 - DNA, 68 bp, Homo sapiens
atggaggggactggaagggcaactgctttcctagccctctccctaaaacccagaagcctttcacctcc

SEQ ID NO: 162197 - DNA, 68 bp, Homo sapiens
aagggcaactgctttcctagccctctccctaaaacccagaagcctttcacctcccctgatttactgaa

SEQ ID NO: 162198 - DNA, 70 bp, Homo sapiens
ctttcctagccctctccctaaaacccagaagcctttcacctcccctgatttactgaatggggcatgcaat

SEQ ID NO: 162199 - DNA, 74 bp, Homo sapiens
cctctccctaaaacccagaagcctttcacctcccctgatttactgaatggggcatgcaattctgggtgagatga

SEQ ID NO: 162200 - DNA, 76 bp, Homo sapiens
aaacccagaagcctttcacctcccctgatttactgaatggggcatgcaattctgggtgagatgaactgccagctaa

SEQ ID NO: 162201 - DNA, 75 bp, Homo sapiens
acctcccctgatttactgaatggggcatgcaattctgggtgagatgaactgccagctaactctgttttccctcct

SEQ ID NO: 162202 - DNA, 75 bp, Homo sapiens
atttactgaatggggcatgcaattctgggtgagatgaactgccagctaactctgttttccctccttcatttttcc

SEQ ID NO: 162203 - DNA, 78 bp, Homo sapiens
ggcatgcaattctgggtgagatgaactgccagctaactctgttttccctccttcatttttcctcactcaagactgaaa

SEQ ID NO: 162204 - DNA, 74 bp, Homo sapiens
aattctgggtgagatgaactgccagctaactctgttttccctccttcatttttcctcactcaagactgaaagga

SEQ ID NO: 162205 - DNA, 73 bp, Homo sapiens
atgaactgccagctaactctgttttccctccttcatttttcctcactcaagactgaaaggatgtctttctatt

SEQ ID NO: 162206 - DNA, 71 bp, Homo sapiens
tgttttccctccttcatttttcctcactcaagactgaaaggatgtctttctatttagaggtcaccaaatta

SEQ ID NO: 162207 - DNA, 74 bp, Homo sapiens
tttttcctcactcaagactgaaaggatgtctttctatttagaggtcaccaaattaacatctcagaccaatcaag

SEQ ID NO: 162208 - DNA, 75 bp, Homo sapiens
atgtctttctatttagaggtcaccaaattaacatctcagaccaatcaaggtaggtgggagtctgcgtgagtccca

SEQ ID NO: 162209 - DNA, 74 bp, Homo sapiens
tatttagaggtcaccaaattaacatctcagaccaatcaaggtaggtgggagtctgcgtgagtcccacggtacaa

SEQ ID NO: 162210 - DNA, 74 bp, Homo sapiens
aggtcaccaaattaacatctcagaccaatcaaggtaggtgggagtctgcgtgagtcccacggtacaagcctcag

SEQ ID NO: 162211 - DNA, 74 bp, Homo sapiens
agaccaatcaaggtaggtgggagtctgcgtgagtcccacggtacaagcctcagtgcgcggccctgcaaccccca

SEQ ID NO: 162212 - DNA, 71 bp, Homo sapiens
aaggtaggtgggagtctgcgtgagtcccacggtacaagcctcagtgcgcggccctgcaacccccaccaccc

SEQ ID NO: 162213 - DNA, 79 bp, Homo sapiens
tctgcgtgagtcccacggtacaagcctcagtgcgcggccctgcaacccccaccaccccagagagagccgatgctgcaaa

SEQ ID NO: 162214 - DNA, 78 bp, Homo sapiens
tgagtcccacggtacaagcctcagtgcgcggccctgcaacccccaccaccccagagagagccgatgctgcaaaatgaa

SEQ ID NO: 162215 - DNA, 75 bp, Homo sapiens
cggtacaagcctcagtgcgcggccctgcaacccccaccaccccagagagagccgatgctgcaaaatgaaggggag

SEQ ID NO: 162216 - DNA, 75 bp, Homo sapiens
tgcgcggccctgcaacccccaccaccccagagagagccgatgctgcaaaatgaaggggaggcccaggaatttcta

SEQ ID NO: 162217 - DNA, 74 bp, Homo sapiens
tgcaacccccaccaccccagagagagccgatgctgcaaaatgaaggggaggcccaggaatttctaggtctcttc

SEQ ID NO: 162218 - DNA, 76 bp, Homo sapiens
accaccccagagagagccgatgctgcaaaatgaaggggaggcccaggaatttctaggtctcttctgagtgaaatga

SEQ ID NO: 162219 - DNA, 78 bp, Homo sapiens
agagagccgatgctgcaaaatgaaggggaggcccaggaatttctaggtctcttctgagtgaaatgattctagacgcta

SEQ ID NO: 162220 - DNA, 77 bp, Homo sapiens
atgctgcaaaatgaaggggaggcccaggaatttctaggtctcttctgagtgaaatgattctagacgctagctggaaa

SEQ ID NO: 162221 - DNA, 73 bp, Homo sapiens
aaaatgaaggggaggcccaggaatttctaggtctcttctgagtgaaatgattctagacgctagctggaaagac

SEQ ID NO: 162222 - DNA, 75 bp, Homo sapiens
aggcccaggaatttctaggtctcttctgagtgaaatgattctagacgctagctggaaagaccttctacacagaaa

SEQ ID NO: 162223 - DNA, 74 bp, Homo sapiens
aatttctaggtctcttctgagtgaaatgattctagacgctagctggaaagaccttctacacagaaaggaaggaa

SEQ ID NO: 162224 - DNA, 74 bp, Homo sapiens
tcttctgagtgaaatgattctagacgctagctggaaagaccttctacacagaaaggaaggaaaccagtgtttat

SEQ ID NO: 162225 - DNA, 74 bp, Homo sapiens
attctagacgctagctggaaagaccttctacacagaaaggaaggaaaccagtgtttattgagcagctgttcttg

SEQ ID NO: 162226 - DNA, 76 bp, Homo sapiens
tggaaagaccttctacacagaaaggaaggaaaccagtgtttattgagcagctgttcttggcaatgattccactgct

SEQ ID NO: 162227 - DNA, 74 bp, Homo sapiens
accttctacacagaaaggaaggaaaccagtgtttattgagcagctgttcttggcaatgattccactgctttctt

SEQ ID NO: 162228 - DNA, 79 bp, Homo sapiens
aaaccagtgtttattgagcagctgttcttggcaatgattccactgctttctttcaggtatctgctgagtccttccaaga

SEQ ID NO: 162229 - DNA, 80 bp, Homo sapiens
tttattgagcagctgttcttggcaatgattccactgctttctttcaggtatctgctgagtccttccaagagcctggtaag

SEQ ID NO: 162230 - DNA, 78 bp, Homo sapiens
ttggcaatgattccactgctttctttcaggtatctgctgagtccttccaagagcctggtaaggaagtcattttctcta

SEQ ID NO: 162231 - DNA, 78 bp, Homo sapiens
actgctttctttcaggtatctgctgagtccttccaagagcctggtaaggaagtcattttctctatcttgcagaagata

SEQ ID NO: 162232 - DNA, 77 bp, Homo sapiens
tgctgagtccttccaagagcctggtaaggaagtcattttctctatcttgcagaagataaaataggggctcatattaa

SEQ ID NO: 162233 - DNA, 73 bp, Homo sapiens
ttccaagagcctggtaaggaagtcattttctctatcttgcagaagataaaataggggctcatattaaactatt

SEQ ID NO: 162234 - DNA, 74 bp, Homo sapiens
ggaagtcattttctctatcttgcagaagataaaataggggctcatattaaactatttactcaagaatactcaag

SEQ ID NO: 162235 - DNA, 71 bp, Homo sapiens
agaagataaaataggggctcatattaaactatttactcaagaatactcaagtaggaaggaggcaggtggcc

SEQ ID NO: 162236 - DNA, 70 bp, Homo sapiens
ataaaataggggctcatattaaactatttactcaagaatactcaagtaggaaggaggcaggtggccctgg

SEQ ID NO: 162237 - DNA, 74 bp, Homo sapiens
atattaaactatttactcaagaatactcaagtaggaaggaggcaggtggccctgggctgagtctcttctgacca

SEQ ID NO: 162238 - DNA, 74 bp, Homo sapiens
aaactatttactcaagaatactcaagtaggaaggaggcaggtggccctgggctgagtctcttctgaccaccatg

SEQ ID NO: 162239 - DNA, 75 bp, Homo sapiens
aagaatactcaagtaggaaggaggcaggtggccctgggctgagtctcttctgaccaccatggtagccattggtta

SEQ ID NO: 162240 - DNA, 77 bp, Homo sapiens
aagtaggaaggaggcaggtggccctgggctgagtctcttctgaccaccatggtagccattggttactggcactgtgc

SEQ ID NO: 162241 - DNA, 78 bp, Homo sapiens
aaggaggcaggtggccctgggctgagtctcttctgaccaccatggtagccattggttactggcactgtgccagggctc

SEQ ID NO: 162242 - DNA, 79 bp, Homo sapiens
cctgggctgagtctcttctgaccaccatggtagccattggttactggcactgtgccagggctcccacacactgtcttat

SEQ ID NO: 162243 - DNA, 77 bp, Homo sapiens
gtctcttctgaccaccatggtagccattggttactggcactgtgccagggctcccacacactgtcttatttacacgt

SEQ ID NO: 162244 - DNA, 75 bp, Homo sapiens
accaccatggtagccattggttactggcactgtgccagggctcccacacactgtcttatttacacgttactttga

SEQ ID NO: 162245 - DNA, 77 bp, Homo sapiens
atggtagccattggttactggcactgtgccagggctcccacacactgtcttatttacacgttactttgagatgtata

SEQ ID NO: 162246 - DNA, 72 bp, Homo sapiens
actgtgccagggctcccacacactgtcttatttacacgttactttgagatgtataacgggccttgggtctag

SEQ ID NO: 162247 - DNA, 71 bp, Homo sapiens
ctcccacacactgtcttatttacacgttactttgagatgtataacgggccttgggtctagtcggatcctta

SEQ ID NO: 162248 - DNA, 70 bp, Homo sapiens
actgtcttatttacacgttactttgagatgtataacgggccttgggtctagtcggatccttattcttgac

SEQ ID NO: 162249 - DNA, 70 bp, Homo sapiens
ttatttacacgttactttgagatgtataacgggccttgggtctagtcggatccttattcttgactaagaa

SEQ ID NO: 162250 - DNA, 72 bp, Homo sapiens
ttactttgagatgtataacgggccttgggtctagtcggatccttattcttgactaagaaaggagattccaca

SEQ ID NO: 162251 - DNA, 69 bp, Homo sapiens
tataacgggccttgggtctagtcggatccttattcttgactaagaaaggagattccacaaagacccaaa

SEQ ID NO: 162252 - DNA, 71 bp, Homo sapiens
cttgggtctagtcggatccttattcttgactaagaaaggagattccacaaagacccaaaatacagatagaa

SEQ ID NO: 162253 - DNA, 72 bp, Homo sapiens
tagtcggatccttattcttgactaagaaaggagattccacaaagacccaaaatacagatagaatcccacgaa

SEQ ID NO: 162254 - DNA, 74 bp, Homo sapiens
ttattcttgactaagaaaggagattccacaaagacccaaaatacagatagaatcccacgaatcccatggctatg

SEQ ID NO: 162255 - DNA, 73 bp, Homo sapiens
actaagaaaggagattccacaaagacccaaaatacagatagaatcccacgaatcccatggctatgttcacgaa

SEQ ID NO: 162256 - DNA, 74 bp, Homo sapiens
aggagattccacaaagacccaaaatacagatagaatcccacgaatcccatggctatgttcacgaagggagagga

SEQ ID NO: 162257 - DNA, 73 bp, Homo sapiens
aaagacccaaaatacagatagaatcccacgaatcccatggctatgttcacgaagggagaggagcaccaacaaa

SEQ ID NO: 162258 - DNA, 78 bp, Homo sapiens
tagaatcccacgaatcccatggctatgttcacgaagggagaggagcaccaacaaagtcaagtcactcaggtgcctcac

SEQ ID NO: 162259 - DNA, 76 bp, Homo sapiens
cgaatcccatggctatgttcacgaagggagaggagcaccaacaaagtcaagtcactcaggtgcctcactccccaaa

SEQ ID NO: 162260 - DNA, 74 bp, Homo sapiens
tatgttcacgaagggagaggagcaccaacaaagtcaagtcactcaggtgcctcactccccaaatgcgggacgtt

SEQ ID NO: 162261 - DNA, 73 bp, Homo sapiens
gggagaggagcaccaacaaagtcaagtcactcaggtgcctcactccccaaatgcgggacgtttcctacagaaa

SEQ ID NO: 162262 - DNA, 72 bp, Homo sapiens
aggagcaccaacaaagtcaagtcactcaggtgcctcactccccaaatgcgggacgtttcctacagaaaccaa

SEQ ID NO: 162263 - DNA, 76 bp, Homo sapiens
tttcctacagaaaccaagcctgctgctcagtgacagctttccaggaaatgccaattccagaaccaaggtacctgaa

SEQ ID NO: 162264 - DNA, 79 bp, Homo sapiens
tacagaaaccaagcctgctgctcagtgacagctttccaggaaatgccaattccagaaccaaggtacctgaatcacagtg

SEQ ID NO: 162265 - DNA, 77 bp, Homo sapiens
tgctgctcagtgacagctttccaggaaatgccaattccagaaccaaggtacctgaatcacagtgggaaagaccaagg

SEQ ID NO: 162266 - DNA, 72 bp, Homo sapiens
agtgacagctttccaggaaatgccaattccagaaccaaggtacctgaatcacagtgggaaagaccaaggtgg

SEQ ID NO: 162267 - DNA, 74 bp, Homo sapiens
aatgccaattccagaaccaaggtacctgaatcacagtgggaaagaccaaggtgggaagcaaatgcagcaattaa

SEQ ID NO: 162268 - DNA, 71 bp, Homo sapiens
aaccaaggtacctgaatcacagtgggaaagaccaaggtgggaagcaaatgcagcaattaaggccaaaaata

SEQ ID NO: 162269 - DNA, 72 bp, Homo sapiens
aggtacctgaatcacagtgggaaagaccaaggtgggaagcaaatgcagcaattaaggccaaaaataatccca

SEQ ID NO: 162270 - DNA, 73 bp, Homo sapiens
atcacagtgggaaagaccaaggtgggaagcaaatgcagcaattaaggccaaaaataatcccaatgggtgagcc

SEQ ID NO: 162271 - DNA, 76 bp, Homo sapiens
aaatgcagcaattaaggccaaaaataatcccaatgggtgagccgccggaccagagtcacctctgagagcacggaga

SEQ ID NO: 162272 - DNA, 77 bp, Homo sapiens
aaaataatcccaatgggtgagccgccggaccagagtcacctctgagagcacggagacaaacagcaagcttggcactc

SEQ ID NO: 162273 - DNA, 79 bp, Homo sapiens
aatgggtgagccgccggaccagagtcacctctgagagcacggagacaaacagcaagcttggcactcggcattttgaaga

SEQ ID NO: 162274 - DNA, 81 bp, Homo sapiens
tctgagagcacggagacaaacagcaagcttggcactcggcattttgaagacaacaacccacacctgaactgctgaagaatg

SEQ ID NO: 162275 - DNA, 79 bp, Homo sapiens
agacaaacagcaagcttggcactcggcattttgaagacaacaacccacacctgaactgctgaagaatgtggcgatgtgg

SEQ ID NO: 162276 - DNA, 78 bp, Homo sapiens
agcttggcactcggcattttgaagacaacaacccacacctgaactgctgaagaatgtggcgatgtgggcacttggtta

SEQ ID NO: 162277 - DNA, 78 bp, Homo sapiens
actcggcattttgaagacaacaacccacacctgaactgctgaagaatgtggcgatgtgggcacttggttaagcacaca

SEQ ID NO: 162278 - DNA, 79 bp, Homo sapiens
attttgaagacaacaacccacacctgaactgctgaagaatgtggcgatgtgggcacttggttaagcacacactgatcgc

SEQ ID NO: 162279 - DNA, 83 bp, Homo sapiens
aacccacacctgaactgctgaagaatgtggcgatgtgggcacttggttaagcacacactgatcgccagcgtgagcacacaatc

SEQ ID NO: 162280 - DNA, 87 bp, Homo sapiens
acctgaactgctgaagaatgtggcgatgtgggcacttggttaagcacacactgatcgccagcgtgagcacacaatcctcagcagcac

SEQ ID NO: 162281 - DNA, 85 bp, Homo sapiens
agaatgtggcgatgtgggcacttggttaagcacacactgatcgccagcgtgagcacacaatcctcagcagcacggcggcccagat

SEQ ID NO: 162282 - DNA, 85 bp, Homo sapiens
gatgtgggcacttggttaagcacacactgatcgccagcgtgagcacacaatcctcagcagcacggcggcccagatttgccgccca

SEQ ID NO: 162283 - DNA, 83 bp, Homo sapiens
acttggttaagcacacactgatcgccagcgtgagcacacaatcctcagcagcacggcggcccagatttgccgcccacagccca

SEQ ID NO: 162284 - DNA, 86 bp, Homo sapiens
ttaagcacacactgatcgccagcgtgagcacacaatcctcagcagcacggcggcccagatttgccgcccacagcccaacagtgcca

SEQ ID NO: 162285 - DNA, 86 bp, Homo sapiens
actgatcgccagcgtgagcacacaatcctcagcagcacggcggcccagatttgccgcccacagcccaacagtgccatctcaggagc

SEQ ID NO: 162286 - DNA, 83 bp, Homo sapiens
agcgtgagcacacaatcctcagcagcacggcggcccagatttgccgcccacagcccaacagtgccatctcaggagccacggcc

SEQ ID NO: 162287 - DNA, 78 bp, Homo sapiens
aatcctcagcagcacggcggcccagatttgccgcccacagcccaacagtgccatctcaggagccacggcccccttgga

SEQ ID NO: 162288 - DNA, 77 bp, Homo sapiens
cagatttgccgcccacagcccaacagtgccatctcaggagccacggcccccttggagaaggacggggatgctcttca

SEQ ID NO: 162289 - DNA, 76 bp, Homo sapiens
ttgccgcccacagcccaacagtgccatctcaggagccacggcccccttggagaaggacggggatgctcttcagagg

SEQ ID NO: 162290 - DNA, 75 bp, Homo sapiens
ccaacagtgccatctcaggagccacggcccccttggagaaggacggggatgctcttcagaggggacactgccaaa

SEQ ID NO: 162291 - DNA, 74 bp, Homo sapiens
atctcaggagccacggcccccttggagaaggacggggatgctcttcagaggggacactgccaaactgtgtccag

SEQ ID NO: 162292 - DNA, 71 bp, Homo sapiens
agccacggcccccttggagaaggacggggatgctcttcagaggggacactgccaaactgtgtccaggttaa

SEQ ID NO: 162293 - DNA, 71 bp, Homo sapiens
agaaggacggggatgctcttcagaggggacactgccaaactgtgtccaggttaaggggataaagaaggatc

SEQ ID NO: 162294 - DNA, 74 bp, Homo sapiens
gggacactgccaaactgtgtccaggttaaggggataaagaaggatcctatggcacacagaaatgataccacctg

SEQ ID NO: 162295 - DNA, 77 bp, Homo sapiens
tgtccaggttaaggggataaagaaggatcctatggcacacagaaatgataccacctgggtgccatggggatgctgaa

SEQ ID NO: 162296 - DNA, 78 bp, Homo sapiens
gggataaagaaggatcctatggcacacagaaatgataccacctgggtgccatggggatgctgaacccgtggcacagaa

SEQ ID NO: 162297 - DNA, 77 bp, Homo sapiens
aaagaaggatcctatggcacacagaaatgataccacctgggtgccatggggatgctgaacccgtggcacagaaggga

SEQ ID NO: 162298 - DNA, 79 bp, Homo sapiens
tatggcacacagaaatgataccacctgggtgccatggggatgctgaacccgtggcacagaagggaagggagaggtgaca

SEQ ID NO: 162299 - DNA, 78 bp, Homo sapiens
aaatgataccacctgggtgccatggggatgctgaacccgtggcacagaagggaagggagaggtgacagcaaatgctca

SEQ ID NO: 162300 - DNA, 81 bp, Homo sapiens
taccacctgggtgccatggggatgctgaacccgtggcacagaagggaagggagaggtgacagcaaatgctcacagagctgc

SEQ ID NO: 162301 - DNA, 80 bp, Homo sapiens
atggggatgctgaacccgtggcacagaagggaagggagaggtgacagcaaatgctcacagagctgccatgtggaggaagg

SEQ ID NO: 162302 - DNA, 81 bp, Homo sapiens
atgctgaacccgtggcacagaagggaagggagaggtgacagcaaatgctcacagagctgccatgtggaggaaggtgaactg

SEQ ID NO: 162303 - DNA, 84 bp, Homo sapiens
gaagggagaggtgacagcaaatgctcacagagctgccatgtggaggaaggtgaactggagtgcctgaagggtgagatactgcag

SEQ ID NO: 162304 - DNA, 84 bp, Homo sapiens
gtgacagcaaatgctcacagagctgccatgtggaggaaggtgaactggagtgcctgaagggtgagatactgcagggtgggaaca

SEQ ID NO: 162305 - DNA, 83 bp, Homo sapiens
agcaaatgctcacagagctgccatgtggaggaaggtgaactggagtgcctgaagggtgagatactgcagggtgggaacatctg

SEQ ID NO: 162306 - DNA, 80 bp, Homo sapiens
agctgccatgtggaggaaggtgaactggagtgcctgaagggtgagatactgcagggtgggaacatctggcctattatgga

SEQ ID NO: 162307 - DNA, 77 bp, Homo sapiens
tggaggaaggtgaactggagtgcctgaagggtgagatactgcagggtgggaacatctggcctattatggacagagtt

SEQ ID NO: 162308 - DNA, 75 bp, Homo sapiens
aaggtgaactggagtgcctgaagggtgagatactgcagggtgggaacatctggcctattatggacagagttttta

SEQ ID NO: 162309 - DNA, 76 bp, Homo sapiens
agtgcctgaagggtgagatactgcagggtgggaacatctggcctattatggacagagtttttatcacaacaaagaa

SEQ ID NO: 162310 - DNA, 74 bp, Homo sapiens
atactgcagggtgggaacatctggcctattatggacagagtttttatcacaacaaagaattgggaaacaagtga

SEQ ID NO: 162311 - DNA, 73 bp, Homo sapiens
aacatctggcctattatggacagagtttttatcacaacaaagaattgggaaacaagtgagtaagtgacctgtg

SEQ ID NO: 162312 - DNA, 73 bp, Homo sapiens
ctattatggacagagtttttatcacaacaaagaattgggaaacaagtgagtaagtgacctgtgtgaggaggga

SEQ ID NO: 162313 - DNA, 71 bp, Homo sapiens
acagagtttttatcacaacaaagaattgggaaacaagtgagtaagtgacctgtgtgaggagggaactattc

SEQ ID NO: 162314 - DNA, 71 bp, Homo sapiens
tttttatcacaacaaagaattgggaaacaagtgagtaagtgacctgtgtgaggagggaactattcgcccag

SEQ ID NO: 162315 - DNA, 73 bp, Homo sapiens
aaagaattgggaaacaagtgagtaagtgacctgtgtgaggagggaactattcgcccaggatctgaacaacatg

SEQ ID NO: 162316 - DNA, 81 bp, Homo sapiens
aaacaagtgagtaagtgacctgtgtgaggagggaactattcgcccaggatctgaacaacatggcagatgcaatctctcaca

SEQ ID NO: 162317 - DNA, 81 bp, Homo sapiens
taagtgacctgtgtgaggagggaactattcgcccaggatctgaacaacatggcagatgcaatctctcacactcttacctct

SEQ ID NO: 162318 - DNA, 81 bp, Homo sapiens
tgtgtgaggagggaactattcgcccaggatctgaacaacatggcagatgcaatctctcacactcttacctcttctcctttc

SEQ ID NO: 162319 - DNA, 82 bp, Homo sapiens
tattcgcccaggatctgaacaacatggcagatgcaatctctcacactcttacctcttctcctttctggattctccgactgga

SEQ ID NO: 162320 - DNA, 83 bp, Homo sapiens
tgaacaacatggcagatgcaatctctcacactcttacctcttctcctttctggattctccgactggagctgatgataattttg

SEQ ID NO: 162321 - DNA, 78 bp, Homo sapiens
atctctcacactcttacctcttctcctttctggattctccgactggagctgatgataattttgtgtcctctctcaaaa

SEQ ID NO: 162322 - DNA, 79 bp, Homo sapiens
ttctcctttctggattctccgactggagctgatgataattttgtgtcctctctcaaaagtcaccacttcagccacacaa

SEQ ID NO: 162323 - DNA, 78 bp, Homo sapiens
tttctggattctccgactggagctgatgataattttgtgtcctctctcaaaagtcaccacttcagccacacaattagg

SEQ ID NO: 162324 - DNA, 81 bp, Homo sapiens
tctctcaaaagtcaccacttcagccacacaattaggtgcacacgaatggttgatatacctgcaagccaccatgtcagaaaa

SEQ ID NO: 162325 - DNA, 79 bp, Homo sapiens
aaagtcaccacttcagccacacaattaggtgcacacgaatggttgatatacctgcaagccaccatgtcagaaaactgta

SEQ ID NO: 162326 - DNA, 75 bp, Homo sapiens
tccaccagcactggccccacaagcaaaagcactccccgtcaggttcctcgctgtctcaccttgcgggccctcctg

SEQ ID NO: 162327 - DNA, 74 bp, Homo sapiens
actggccccacaagcaaaagcactccccgtcaggttcctcgctgtctcaccttgcgggccctcctgtgagcgtc

SEQ ID NO: 162328 - DNA, 77 bp, Homo sapiens
aagcaaaagcactccccgtcaggttcctcgctgtctcaccttgcgggccctcctgtgagcgtcgcgtcaatcacatg

SEQ ID NO: 162329 - DNA, 76 bp, Homo sapiens
actccccgtcaggttcctcgctgtctcaccttgcgggccctcctgtgagcgtcgcgtcaatcacatggtcgttatc

SEQ ID NO: 162330 - DNA, 79 bp, Homo sapiens
aggttcctcgctgtctcaccttgcgggccctcctgtgagcgtcgcgtcaatcacatggtcgttatccatgcggaacatg

SEQ ID NO: 162331 - DNA, 81 bp, Homo sapiens
cctcgctgtctcaccttgcgggccctcctgtgagcgtcgcgtcaatcacatggtcgttatccatgcggaacatgtacacac

SEQ ID NO: 162332 - DNA, 77 bp, Homo sapiens
accttgcgggccctcctgtgagcgtcgcgtcaatcacatggtcgttatccatgcggaacatgtacacaccacggttc

SEQ ID NO: 162333 - DNA, 77 bp, Homo sapiens
ccctcctgtgagcgtcgcgtcaatcacatggtcgttatccatgcggaacatgtacacaccacggttctgagggaaaa

SEQ ID NO: 162334 - DNA, 77 bp, Homo sapiens
cgtcgcgtcaatcacatggtcgttatccatgcggaacatgtacacaccacggttctgagggaaaagtcagtcagtaa

SEQ ID NO: 162335 - DNA, 78 bp, Homo sapiens
aatcacatggtcgttatccatgcggaacatgtacacaccacggttctgagggaaaagtcagtcagtaagtcatcaatg

SEQ ID NO: 162336 - DNA, 77 bp, Homo sapiens
gttatccatgcggaacatgtacacaccacggttctgagggaaaagtcagtcagtaagtcatcaatgtcgacctgaaa

SEQ ID NO: 162337 - DNA, 75 bp, Homo sapiens
atgcggaacatgtacacaccacggttctgagggaaaagtcagtcagtaagtcatcaatgtcgacctgaaactccc

SEQ ID NO: 162338 - DNA, 77 bp, Homo sapiens
agggagaggatgatggtgctgtgtatacaatctcggggaccagacacctacctgagactcataaagcttctctttcc

SEQ ID NO: 162339 - DNA, 76 bp, Homo sapiens
atggtgctgtgtatacaatctcggggaccagacacctacctgagactcataaagcttctctttcctgttggctact

SEQ ID NO: 162340 - DNA, 74 bp, Homo sapiens
tgtatacaatctcggggaccagacacctacctgagactcataaagcttctctttcctgttggctacttcgtttc

SEQ ID NO: 162341 - DNA, 73 bp, Homo sapiens
gggaccagacacctacctgagactcataaagcttctctttcctgttggctacttcgtttcgaatgatagtccc

SEQ ID NO: 162342 - DNA, 74 bp, Homo sapiens
acctacctgagactcataaagcttctctttcctgttggctacttcgtttcgaatgatagtcccgatgtactcaa

SEQ ID NO: 162343 - DNA, 76 bp, Homo sapiens
agactcataaagcttctctttcctgttggctacttcgtttcgaatgatagtcccgatgtactcaatgaccatggtg

SEQ ID NO: 162344 - DNA, 76 bp, Homo sapiens
agcttctctttcctgttggctacttcgtttcgaatgatagtcccgatgtactcaatgaccatggtgtgtttctcaa

SEQ ID NO: 162345 - DNA, 77 bp, Homo sapiens
ctttcctgttggctacttcgtttcgaatgatagtcccgatgtactcaatgaccatggtgtgtttctcaatgtctcga

SEQ ID NO: 162346 - DNA, 81 bp, Homo sapiens
ctacttcgtttcgaatgatagtcccgatgtactcaatgaccatggtgtgtttctcaatgtctcgagcagcatacaggccca

SEQ ID NO: 162347 - DNA, 81 bp, Homo sapiens
tttcgaatgatagtcccgatgtactcaatgaccatggtgtgtttctcaatgtctcgagcagcatacaggcccagcccctaa

SEQ ID NO: 162348 - DNA, 77 bp, Homo sapiens
atagtcccgatgtactcaatgaccatggtgtgtttctcaatgtctcgagcagcatacaggcccagcccctaaaaaaa

SEQ ID NO: 162349 - DNA, 79 bp, Homo sapiens
tgtactcaatgaccatggtgtgtttctcaatgtctcgagcagcatacaggcccagcccctaaaaaaaagtgtgtacata

SEQ ID NO: 162350 - DNA, 75 bp, Homo sapiens
tggtgtgtttctcaatgtctcgagcagcatacaggcccagcccctaaaaaaaagtgtgtacatacttccaattta

SEQ ID NO: 162351 - DNA, 75 bp, Homo sapiens
actccaccctgtctctccacttcctgtacacaaagtatttcttcacctgaatccgagaccgtgccagatacacat

SEQ ID NO: 162352 - DNA, 76 bp, Homo sapiens
gtctctccacttcctgtacacaaagtatttcttcacctgaatccgagaccgtgccagatacacattggatttccat

SEQ ID NO: 162353 - DNA, 74 bp, Homo sapiens
acttcctgtacacaaagtatttcttcacctgaatccgagaccgtgccagatacacattggatttccattcagtt

SEQ ID NO: 162354 - DNA, 76 bp, Homo sapiens
tacacaaagtatttcttcacctgaatccgagaccgtgccagatacacattggatttccattcagttttcatcttcc

SEQ ID NO: 162355 - DNA, 77 bp, Homo sapiens
tatttcttcacctgaatccgagaccgtgccagatacacattggatttccattcagttttcatcttccggtactgcga

SEQ ID NO: 162356 - DNA, 77 bp, Homo sapiens
aatccgagaccgtgccagatacacattggatttccattcagttttcatcttccggtactgcgatgacttggagtgaa

SEQ ID NO: 162357 - DNA, 77 bp, Homo sapiens
gtgccagatacacattggatttccattcagttttcatcttccggtactgcgatgacttggagtgaacaaactgttta

SEQ ID NO: 162358 - DNA, 75 bp, Homo sapiens
tacacattggatttccattcagttttcatcttccggtactgcgatgacttggagtgaacaaactgtttactataa

SEQ ID NO: 162359 - DNA, 74 bp, Homo sapiens
tttccattcagttttcatcttccggtactgcgatgacttggagtgaacaaactgtttactataaggtgcgttca

SEQ ID NO: 162360 - DNA, 73 bp, Homo sapiens
agttttcatcttccggtactgcgatgacttggagtgaacaaactgtttactataaggtgcgttcagttctcca

SEQ ID NO: 162361 - DNA, 76 bp, Homo sapiens
atcttccggtactgcgatgacttggagtgaacaaactgtttactataaggtgcgttcagttctccagtgactgtgc

SEQ ID NO: 162362 - DNA, 78 bp, Homo sapiens
actgcgatgacttggagtgaacaaactgtttactataaggtgcgttcagttctccagtgactgtgctctgaaatgact

SEQ ID NO: 162363 - DNA, 78 bp, Homo sapiens
ttggagtgaacaaactgtttactataaggtgcgttcagttctccagtgactgtgctctgaaatgactttgaggtgctg

SEQ ID NO: 162364 - DNA, 77 bp, Homo sapiens
aactgtttactataaggtgcgttcagttctccagtgactgtgctctgaaatgactttgaggtgctggtgctgtttaa

SEQ ID NO: 162365 - DNA, 80 bp, Homo sapiens
tactataaggtgcgttcagttctccagtgactgtgctctgaaatgactttgaggtgctggtgctgtttaaggtgtgaggc

SEQ ID NO: 162366 - DNA, 86 bp, Homo sapiens
tcagttctccagtgactgtgctctgaaatgactttgaggtgctggtgctgtttaaggtgtgaggcctgcagacaatggcatatcaa

SEQ ID NO: 162367 - DNA, 83 bp, Homo sapiens
agtgactgtgctctgaaatgactttgaggtgctggtgctgtttaaggtgtgaggcctgcagacaatggcatatcaacaggaaa

SEQ ID NO: 162368 - DNA, 81 bp, Homo sapiens
ctgtgctctgaaatgactttgaggtgctggtgctgtttaaggtgtgaggcctgcagacaatggcatatcaacaggaaaaaa

SEQ ID NO: 162369 - DNA, 77 bp, Homo sapiens
aaatgactttgaggtgctggtgctgtttaaggtgtgaggcctgcagacaatggcatatcaacaggaaaaaaatacaa

SEQ ID NO: 162370 - DNA, 67 bp, Homo sapiens
taatacgcctagaaaccctgggctgtactatgtgaagttaaaacaaaataccttaacacaaacctct

SEQ ID NO: 162371 - DNA, 70 bp, Homo sapiens
aaaccctgggctgtactatgtgaagttaaaacaaaataccttaacacaaacctcttgacatgggcactca

SEQ ID NO: 162372 - DNA, 71 bp, Homo sapiens
ctgtactatgtgaagttaaaacaaaataccttaacacaaacctcttgacatgggcactcattttaggttca

SEQ ID NO: 162373 - DNA, 69 bp, Homo sapiens
agttaaaacaaaataccttaacacaaacctcttgacatgggcactcattttaggttcagaacgggcaca

SEQ ID NO: 162374 - DNA, 69 bp, Homo sapiens
aaacaaaataccttaacacaaacctcttgacatgggcactcattttaggttcagaacgggcacaacctg

SEQ ID NO: 162375 - DNA, 69 bp, Homo sapiens
cttaacacaaacctcttgacatgggcactcattttaggttcagaacgggcacaacctgtggggttaacg

SEQ ID NO: 162376 - DNA, 72 bp, Homo sapiens
tcttgacatgggcactcattttaggttcagaacgggcacaacctgtggggttaacggcaagaggaagttcca

SEQ ID NO: 162377 - DNA, 71 bp, Homo sapiens
gcactcattttaggttcagaacgggcacaacctgtggggttaacggcaagaggaagttccatgagaggatt

SEQ ID NO: 162378 - DNA, 68 bp, Homo sapiens
attttaggttcagaacgggcacaacctgtggggttaacggcaagaggaagttccatgagaggatttcg

SEQ ID NO: 162379 - DNA, 69 bp, Homo sapiens
agaacgggcacaacctgtggggttaacggcaagaggaagttccatgagaggatttcggccgtatcggaa

SEQ ID NO: 162380 - DNA, 67 bp, Homo sapiens
acctgtggggttaacggcaagaggaagttccatgagaggatttcggccgtatcggaaggtataattt

SEQ ID NO: 162381 - DNA, 72 bp, Homo sapiens
ggttaacggcaagaggaagttccatgagaggatttcggccgtatcggaaggtataattttcacatgcctcaa

SEQ ID NO: 162382 - DNA, 71 bp, Homo sapiens
aagaggaagttccatgagaggatttcggccgtatcggaaggtataattttcacatgcctcaaccccaggaa

SEQ ID NO: 162383 - DNA, 73 bp, Homo sapiens
ttccatgagaggatttcggccgtatcggaaggtataattttcacatgcctcaaccccaggaagctgaaaagaa

SEQ ID NO: 162384 - DNA, 72 bp, Homo sapiens
aggatttcggccgtatcggaaggtataattttcacatgcctcaaccccaggaagctgaaaagaagcaaagca

SEQ ID NO: 162385 - DNA, 74 bp, Homo sapiens
ccgtatcggaaggtataattttcacatgcctcaaccccaggaagctgaaaagaagcaaagcagacacaaagtca

SEQ ID NO: 162386 - DNA, 82 bp, Homo sapiens
aatcaggaaagcaattccaatctcaaagcctgaccaagacactcactgattccgctatgcgtgccactgcagagacggtcag

SEQ ID NO: 162387 - DNA, 81 bp, Homo sapiens
aaagcaattccaatctcaaagcctgaccaagacactcactgattccgctatgcgtgccactgcagagacggtcaggccaaa

SEQ ID NO: 162388 - DNA, 82 bp, Homo sapiens
aatctcaaagcctgaccaagacactcactgattccgctatgcgtgccactgcagagacggtcaggccaaacagatcctctcc

SEQ ID NO: 162389 - DNA, 80 bp, Homo sapiens
tgaccaagacactcactgattccgctatgcgtgccactgcagagacggtcaggccaaacagatcctctccttttaaatac

SEQ ID NO: 162390 - DNA, 79 bp, Homo sapiens
aagacactcactgattccgctatgcgtgccactgcagagacggtcaggccaaacagatcctctccttttaaatacgctg

SEQ ID NO: 162391 - DNA, 76 bp, Homo sapiens
attccgctatgcgtgccactgcagagacggtcaggccaaacagatcctctccttttaaatacgctgggaaaagctg

SEQ ID NO: 162392 - DNA, 79 bp, Homo sapiens
tatgcgtgccactgcagagacggtcaggccaaacagatcctctccttttaaatacgctgggaaaagctggagcatttca

SEQ ID NO: 162393 - DNA, 71 bp, Homo sapiens
agagacggtcaggccaaacagatcctctccttttaaatacgctgggaaaagctggagcatttcagactttt

SEQ ID NO: 162394 - DNA, 74 bp, Homo sapiens
gtcaggccaaacagatcctctccttttaaatacgctgggaaaagctggagcatttcagacttttttctcacaca

SEQ ID NO: 162395 - DNA, 74 bp, Homo sapiens
aaacagatcctctccttttaaatacgctgggaaaagctggagcatttcagacttttttctcacacatgccacag

SEQ ID NO: 162396 - DNA, 75 bp, Homo sapiens
ttttaaatacgctgggaaaagctggagcatttcagacttttttctcacacatgccacaggctccaaaatcttatc

SEQ ID NO: 162397 - DNA, 77 bp, Homo sapiens
aatacgctgggaaaagctggagcatttcagacttttttctcacacatgccacaggctccaaaatcttatcccagaca

SEQ ID NO: 162398 - DNA, 76 bp, Homo sapiens
aaaagctggagcatttcagacttttttctcacacatgccacaggctccaaaatcttatcccagacacctacacagg

SEQ ID NO: 162399 - DNA, 75 bp, Homo sapiens
ttcagacttttttctcacacatgccacaggctccaaaatcttatcccagacacctacacagggacaaaaacataa

SEQ ID NO: 162400 - DNA, 73 bp, Homo sapiens
tttttctcacacatgccacaggctccaaaatcttatcccagacacctacacagggacaaaaacataattttta

SEQ ID NO: 162401 - DNA, 79 bp, Homo sapiens
acatcagagtaagtagcactgcacagcatgtgaacggcagacgttacctttaggtgagatgtcacttagaaccaggtct

SEQ ID NO: 162402 - DNA, 79 bp, Homo sapiens
agtaagtagcactgcacagcatgtgaacggcagacgttacctttaggtgagatgtcacttagaaccaggtcttcatggc

SEQ ID NO: 162403 - DNA, 77 bp, Homo sapiens
cacagcatgtgaacggcagacgttacctttaggtgagatgtcacttagaaccaggtcttcatggccttgttccacaa

SEQ ID NO: 162404 - DNA, 74 bp, Homo sapiens
atgtgaacggcagacgttacctttaggtgagatgtcacttagaaccaggtcttcatggccttgttccacaatcc

SEQ ID NO: 162405 - DNA, 75 bp, Homo sapiens
agacgttacctttaggtgagatgtcacttagaaccaggtcttcatggccttgttccacaatcctgatgacaaaca

SEQ ID NO: 162406 - DNA, 78 bp, Homo sapiens
tttaggtgagatgtcacttagaaccaggtcttcatggccttgttccacaatcctgatgacaaacactgggcgcccatc

SEQ ID NO: 162407 - DNA, 77 bp, Homo sapiens
agatgtcacttagaaccaggtcttcatggccttgttccacaatcctgatgacaaacactgggcgcccatccttctcc

SEQ ID NO: 162408 - DNA, 80 bp, Homo sapiens
tagaaccaggtcttcatggccttgttccacaatcctgatgacaaacactgggcgcccatccttctcctcaatggagcaca

SEQ ID NO: 162409 - DNA, 82 bp, Homo sapiens
tcttcatggccttgttccacaatcctgatgacaaacactgggcgcccatccttctcctcaatggagcacaggtagcggcagc

SEQ ID NO: 162410 - DNA, 83 bp, Homo sapiens
tgttccacaatcctgatgacaaacactgggcgcccatccttctcctcaatggagcacaggtagcggcagcgcctattggcata

SEQ ID NO: 162411 - DNA, 85 bp, Homo sapiens
tgatgacaaacactgggcgcccatccttctcctcaatggagcacaggtagcggcagcgcctattggcatagcgagtgctccagta

SEQ ID NO: 162412 - DNA, 82 bp, Homo sapiens
acaaacactgggcgcccatccttctcctcaatggagcacaggtagcggcagcgcctattggcatagcgagtgctccagtaca

SEQ ID NO: 162413 - DNA, 85 bp, Homo sapiens
ccatccttctcctcaatggagcacaggtagcggcagcgcctattggcatagcgagtgctccagtacagccggctggcttcatagc

SEQ ID NO: 162414 - DNA, 85 bp, Homo sapiens
ttctcctcaatggagcacaggtagcggcagcgcctattggcatagcgagtgctccagtacagccggctggcttcatagcccacag

SEQ ID NO: 162415 - DNA, 83 bp, Homo sapiens
atggagcacaggtagcggcagcgcctattggcatagcgagtgctccagtacagccggctggcttcatagcccacagggaagag

SEQ ID NO: 162416 - DNA, 83 bp, Homo sapiens
tagcggcagcgcctattggcatagcgagtgctccagtacagccggctggcttcatagcccacagggaagagtgctttaggaga

SEQ ID NO: 162417 - DNA, 81 bp, Homo sapiens
ctattggcatagcgagtgctccagtacagccggctggcttcatagcccacagggaagagtgctttaggagaatggaatgct

SEQ ID NO: 162418 - DNA, 84 bp, Homo sapiens
atagcgagtgctccagtacagccggctggcttcatagcccacagggaagagtgctttaggagaatggaatgcttgcatctgctg

SEQ ID NO: 162419 - DNA, 84 bp, Homo sapiens
ctccagtacagccggctggcttcatagcccacagggaagagtgctttaggagaatggaatgcttgcatctgctgtggaagcagc

SEQ ID NO: 162420 - DNA, 85 bp, Homo sapiens
ggctggcttcatagcccacagggaagagtgctttaggagaatggaatgcttgcatctgctgtggaagcagctgaccaattgtgtg

SEQ ID NO: 162421 - DNA, 86 bp, Homo sapiens
ttcatagcccacagggaagagtgctttaggagaatggaatgcttgcatctgctgtggaagcagctgaccaattgtgtggaagatga

SEQ ID NO: 162422 - DNA, 83 bp, Homo sapiens
agggaagagtgctttaggagaatggaatgcttgcatctgctgtggaagcagctgaccaattgtgtggaagatgaggctaccca

SEQ ID NO: 162423 - DNA, 83 bp, Homo sapiens
agtgctttaggagaatggaatgcttgcatctgctgtggaagcagctgaccaattgtgtggaagatgaggctacccacgcgaaa

SEQ ID NO: 162424 - DNA, 82 bp, Homo sapiens
agaatggaatgcttgcatctgctgtggaagcagctgaccaattgtgtggaagatgaggctacccacgcgaaaggtatggtcc

SEQ ID NO: 162425 - DNA, 77 bp, Homo sapiens
aattgtgtggaagatgaggctacccacgcgaaaggtatggtcccgttctcctcgttgcacgatgctagcaatctgtc

SEQ ID NO: 162426 - DNA, 81 bp, Homo sapiens
tacccacgcgaaaggtatggtcccgttctcctcgttgcacgatgctagcaatctgtcgcacctcatcacgctgaacataga

SEQ ID NO: 162427 - DNA, 80 bp, Homo sapiens
aaaggtatggtcccgttctcctcgttgcacgatgctagcaatctgtcgcacctcatcacgctgaacatagaccctcctga

SEQ ID NO: 162428 - DNA, 82 bp, Homo sapiens
gttctcctcgttgcacgatgctagcaatctgtcgcacctcatcacgctgaacatagaccctcctgaagactgcaaagtaact

SEQ ID NO: 162429 - DNA, 82 bp, Homo sapiens
tcgttgcacgatgctagcaatctgtcgcacctcatcacgctgaacatagaccctcctgaagactgcaaagtaacttaattct

SEQ ID NO: 162430 - DNA, 83 bp, Homo sapiens
atgctagcaatctgtcgcacctcatcacgctgaacatagaccctcctgaagactgcaaagtaacttaattcttgctcatgaat

SEQ ID NO: 162431 - DNA, 79 bp, Homo sapiens
aatctgtcgcacctcatcacgctgaacatagaccctcctgaagactgcaaagtaacttaattcttgctcatgaattccc

SEQ ID NO: 162432 - DNA, 77 bp, Homo sapiens
atcacgctgaacatagaccctcctgaagactgcaaagtaacttaattcttgctcatgaattccctttggtttgtgca

SEQ ID NO: 162433 - DNA, 75 bp, Homo sapiens
ctgaacatagaccctcctgaagactgcaaagtaacttaattcttgctcatgaattccctttggtttgtgcatggg

SEQ ID NO: 162434 - DNA, 75 bp, Homo sapiens
tcctgaagactgcaaagtaacttaattcttgctcatgaattccctttggtttgtgcatggggcaaagcatagttt

SEQ ID NO: 162435 - DNA, 74 bp, Homo sapiens
tgcaaagtaacttaattcttgctcatgaattccctttggtttgtgcatggggcaaagcatagttttgtccttaa

SEQ ID NO: 162436 - DNA, 71 bp, Homo sapiens
agtaacttaattcttgctcatgaattccctttggtttgtgcatggggcaaagcatagttttgtccttaaaa

SEQ ID NO: 162437 - DNA, 76 bp, Homo sapiens
ttgctcatgaattccctttggtttgtgcatggggcaaagcatagttttgtccttaaaaaacatgcattgtgcttta

SEQ ID NO: 162438 - DNA, 72 bp, Homo sapiens
aattccctttggtttgtgcatggggcaaagcatagttttgtccttaaaaaacatgcattgtgctttaatggc

SEQ ID NO: 162439 - DNA, 77 bp, Homo sapiens
tttgtgcatggggcaaagcatagttttgtccttaaaaaacatgcattgtgctttaatggcgcaagtgaagtgataaa

SEQ ID NO: 162440 - DNA, 78 bp, Homo sapiens
ggcaaagcatagttttgtccttaaaaaacatgcattgtgctttaatggcgcaagtgaagtgataaatgttggtgcatc

SEQ ID NO: 162441 - DNA, 81 bp, Homo sapiens
ttaaaaaacatgcattgtgctttaatggcgcaagtgaagtgataaatgttggtgcatcgaaatctgtggcatccactagtg

SEQ ID NO: 162442 - DNA, 82 bp, Homo sapiens
aaacatgcattgtgctttaatggcgcaagtgaagtgataaatgttggtgcatcgaaatctgtggcatccactagtggcaccc

SEQ ID NO: 162443 - DNA, 81 bp, Homo sapiens
tttaatggcgcaagtgaagtgataaatgttggtgcatcgaaatctgtggcatccactagtggcacccgtcttgtgacagaa

SEQ ID NO: 162444 - DNA, 82 bp, Homo sapiens
caagtgaagtgataaatgttggtgcatcgaaatctgtggcatccactagtggcacccgtcttgtgacagaagacacatttca

SEQ ID NO: 162445 - DNA, 80 bp, Homo sapiens
aagtgataaatgttggtgcatcgaaatctgtggcatccactagtggcacccgtcttgtgacagaagacacatttcatttg

SEQ ID NO: 162446 - DNA, 81 bp, Homo sapiens
atgttggtgcatcgaaatctgtggcatccactagtggcacccgtcttgtgacagaagacacatttcatttgtaggcctctc

SEQ ID NO: 162447 - DNA, 81 bp, Homo sapiens
atcgaaatctgtggcatccactagtggcacccgtcttgtgacagaagacacatttcatttgtaggcctctcctcagagcta

SEQ ID NO: 162448 - DNA, 79 bp, Homo sapiens
atccactagtggcacccgtcttgtgacagaagacacatttcatttgtaggcctctcctcagagctagctccacatttat

SEQ ID NO: 162449 - DNA, 78 bp, Homo sapiens
ctagtggcacccgtcttgtgacagaagacacatttcatttgtaggcctctcctcagagctagctccacatttattaag

SEQ ID NO: 162450 - DNA, 80 bp, Homo sapiens
aagacacatttcatttgtaggcctctcctcagagctagctccacatttattaaggcaccagcctgagtctcatagacctc

SEQ ID NO: 162451 - DNA, 79 bp, Homo sapiens
atttcatttgtaggcctctcctcagagctagctccacatttattaaggcaccagcctgagtctcatagacctccgtgga

SEQ ID NO: 162452 - DNA, 80 bp, Homo sapiens
agagctagctccacatttattaaggcaccagcctgagtctcatagacctccgtggaccacagagcgcagttcaagtggac

SEQ ID NO: 162453 - DNA, 80 bp, Homo sapiens
cacatttattaaggcaccagcctgagtctcatagacctccgtggaccacagagcgcagttcaagtggacccacagatcca

SEQ ID NO: 162454 - DNA, 80 bp, Homo sapiens
tattaaggcaccagcctgagtctcatagacctccgtggaccacagagcgcagttcaagtggacccacagatccaagtcaa

SEQ ID NO: 162455 - DNA, 79 bp, Homo sapiens
agcctgagtctcatagacctccgtggaccacagagcgcagttcaagtggacccacagatccaagtcaaggttgagtagc

SEQ ID NO: 162456 - DNA, 79 bp, Homo sapiens
gtctcatagacctccgtggaccacagagcgcagttcaagtggacccacagatccaagtcaaggttgagtagccttgctg

SEQ ID NO: 162457 - DNA, 80 bp, Homo sapiens
tccgtggaccacagagcgcagttcaagtggacccacagatccaagtcaaggttgagtagccttgctggtccatctgtcaa

SEQ ID NO: 162458 - DNA, 80 bp, Homo sapiens
acagagcgcagttcaagtggacccacagatccaagtcaaggttgagtagccttgctggtccatctgtcaatccatcacct

SEQ ID NO: 162459 - DNA, 81 bp, Homo sapiens
ttcaagtggacccacagatccaagtcaaggttgagtagccttgctggtccatctgtcaatccatcaccttcttcatgacaa

SEQ ID NO: 162460 - DNA, 80 bp, Homo sapiens
ccacagatccaagtcaaggttgagtagccttgctggtccatctgtcaatccatcaccttcttcatgacaaaagcaacatt

SEQ ID NO: 162461 - DNA, 78 bp, Homo sapiens
aagtcaaggttgagtagccttgctggtccatctgtcaatccatcaccttcttcatgacaaaagcaacatttccgatag

SEQ ID NO: 162462 - DNA, 80 bp, Homo sapiens
tgctggtccatctgtcaatccatcaccttcttcatgacaaaagcaacatttccgatagtctttgggcacaggatcaggtt

SEQ ID NO: 162463 - DNA, 76 bp, Homo sapiens
atctgtcaatccatcaccttcttcatgacaaaagcaacatttccgatagtctttgggcacaggatcaggtttaagg

SEQ ID NO: 162464 - DNA, 73 bp, Homo sapiens
aatccatcaccttcttcatgacaaaagcaacatttccgatagtctttgggcacaggatcaggtttaagggaag

SEQ ID NO: 162465 - DNA, 73 bp, Homo sapiens
tcatgacaaaagcaacatttccgatagtctttgggcacaggatcaggtttaagggaagtgcccaatttcttta

SEQ ID NO: 162466 - DNA, 69 bp, Homo sapiens
aaaagcaacatttccgatagtctttgggcacaggatcaggtttaagggaagtgcccaatttctttagaa

SEQ ID NO: 162467 - DNA, 70 bp, Homo sapiens
atttccgatagtctttgggcacaggatcaggtttaagggaagtgcccaatttctttagaaattcatctat

SEQ ID NO: 162468 - DNA, 70 bp, Homo sapiens
gatcaggtttaagggaagtgcccaatttctttagaaattcatctatttcatcctcacaaggtggtttaaa

SEQ ID NO: 162469 - DNA, 69 bp, Homo sapiens
gtttaagggaagtgcccaatttctttagaaattcatctatttcatcctcacaaggtggtttaaatgtcc

SEQ ID NO: 162470 - DNA, 69 bp, Homo sapiens
cccaatttctttagaaattcatctatttcatcctcacaaggtggtttaaatgtccccttagggattaca

SEQ ID NO: 162471 - DNA, 74 bp, Homo sapiens
tttagaaattcatctatttcatcctcacaaggtggtttaaatgtccccttagggattacaatatgaatgctcca

SEQ ID NO: 162472 - DNA, 73 bp, Homo sapiens
aattcatctatttcatcctcacaaggtggtttaaatgtccccttagggattacaatatgaatgctccacttct

SEQ ID NO: 162473 - DNA, 73 bp, Homo sapiens
tttcatcctcacaaggtggtttaaatgtccccttagggattacaatatgaatgctccacttcttccatttcat

SEQ ID NO: 162474 - DNA, 71 bp, Homo sapiens
gtggtttaaatgtccccttagggattacaatatgaatgctccacttcttccatttcattcctctccatttt

SEQ ID NO: 162475 - DNA, 73 bp, Homo sapiens
ttaaatgtccccttagggattacaatatgaatgctccacttcttccatttcattcctctccattttttattga

SEQ ID NO: 162476 - DNA, 77 bp, Homo sapiens
tacaatatgaatgctccacttcttccatttcattcctctccattttttattgagcggcctgcaatcttcaaacccac

SEQ ID NO: 162477 - DNA, 76 bp, Homo sapiens
tccacttcttccatttcattcctctccattttttattgagcggcctgcaatcttcaaacccaccatggacagctct

SEQ ID NO: 162478 - DNA, 77 bp, Homo sapiens
tcttccatttcattcctctccattttttattgagcggcctgcaatcttcaaacccaccatggacagctcttagccga

SEQ ID NO: 162479 - DNA, 79 bp, Homo sapiens
tttttattgagcggcctgcaatcttcaaacccaccatggacagctcttagccgaggcttcagcttgactgtcaccttca

SEQ ID NO: 162480 - DNA, 82 bp, Homo sapiens
agcggcctgcaatcttcaaacccaccatggacagctcttagccgaggcttcagcttgactgtcaccttcagctcatctggct

SEQ ID NO: 162481 - DNA, 81 bp, Homo sapiens
aatcttcaaacccaccatggacagctcttagccgaggcttcagcttgactgtcaccttcagctcatctggcttggcctcga

SEQ ID NO: 162482 - DNA, 83 bp, Homo sapiens
accatggacagctcttagccgaggcttcagcttgactgtcaccttcagctcatctggcttggcctcgacttgggctgcttcaa

SEQ ID NO: 162483 - DNA, 81 bp, Homo sapiens
tagccgaggcttcagcttgactgtcaccttcagctcatctggcttggcctcgacttgggctgcttcaaaagcaggagggaa

SEQ ID NO: 162484 - DNA, 80 bp, Homo sapiens
ctgtcaccttcagctcatctggcttggcctcgacttgggctgcttcaaaagcaggagggaaggcgatgggtggtgaggca

SEQ ID NO: 162485 - DNA, 76 bp, Homo sapiens
ctcatctggcttggcctcgacttgggctgcttcaaaagcaggagggaaggcgatgggtggtgaggcagggggagaa

SEQ ID NO: 162486 - DNA, 74 bp, Homo sapiens
ttggcctcgacttgggctgcttcaaaagcaggagggaaggcgatgggtggtgaggcagggggagaagctttctc

SEQ ID NO: 162487 - DNA, 74 bp, Homo sapiens
acttgggctgcttcaaaagcaggagggaaggcgatgggtggtgaggcagggggagaagctttctctgggagctg

SEQ ID NO: 162488 - DNA, 73 bp, Homo sapiens
cttcaaaagcaggagggaaggcgatgggtggtgaggcagggggagaagctttctctgggagctgggggagaca

SEQ ID NO: 162489 - DNA, 74 bp, Homo sapiens
agggaaggcgatgggtggtgaggcagggggagaagctttctctgggagctgggggagacagtgcacatccaaag

SEQ ID NO: 162490 - DNA, 76 bp, Homo sapiens
atgggtggtgaggcagggggagaagctttctctgggagctgggggagacagtgcacatccaaagtggagatgttgt

SEQ ID NO: 162491 - DNA, 80 bp, Homo sapiens
aggcagggggagaagctttctctgggagctgggggagacagtgcacatccaaagtggagatgttgttgctgtactgatga

SEQ ID NO: 162492 - DNA, 81 bp, Homo sapiens
agaagctttctctgggagctgggggagacagtgcacatccaaagtggagatgttgttgctgtactgatgaaatgctttgga

SEQ ID NO: 162493 - DNA, 80 bp, Homo sapiens
tctgggagctgggggagacagtgcacatccaaagtggagatgttgttgctgtactgatgaaatgctttggaaggcgtttc

SEQ ID NO: 162494 - DNA, 80 bp, Homo sapiens
tgggggagacagtgcacatccaaagtggagatgttgttgctgtactgatgaaatgctttggaaggcgtttctctcatagg

SEQ ID NO: 162495 - DNA, 82 bp, Homo sapiens
agtgcacatccaaagtggagatgttgttgctgtactgatgaaatgctttggaaggcgtttctctcataggtgattgtggcaa

SEQ ID NO: 162496 - DNA, 79 bp, Homo sapiens
aaagtggagatgttgttgctgtactgatgaaatgctttggaaggcgtttctctcataggtgattgtggcaatgaaggaa

SEQ ID NO: 162497 - DNA, 80 bp, Homo sapiens
agatgttgttgctgtactgatgaaatgctttggaaggcgtttctctcataggtgattgtggcaatgaaggaatggattcc

SEQ ID NO: 162498 - DNA, 75 bp, Homo sapiens
aaatgctttggaaggcgtttctctcataggtgattgtggcaatgaaggaatggattcctgggcaacataaagaaa

SEQ ID NO: 162499 - DNA, 76 bp, Homo sapiens
tttctctcataggtgattgtggcaatgaaggaatggattcctgggcaacataaagaaaccatgacaaagaaaaata

SEQ ID NO: 162500 - DNA, 78 bp, Homo sapiens
agaagtcactcgttacacattgttatcagctgagattatcctaatctcaccttgttttctgagtttttcgcttgtgca

SEQ ID NO: 162501 - DNA, 79 bp, Homo sapiens
ttacacattgttatcagctgagattatcctaatctcaccttgttttctgagtttttcgcttgtgcagttgatgaataaa

SEQ ID NO: 162502 - DNA, 78 bp, Homo sapiens
ttgttatcagctgagattatcctaatctcaccttgttttctgagtttttcgcttgtgcagttgatgaataaagaataa

SEQ ID NO: 162503 - DNA, 76 bp, Homo sapiens
ctgagattatcctaatctcaccttgttttctgagtttttcgcttgtgcagttgatgaataaagaataaagcagtta

SEQ ID NO: 162504 - DNA, 76 bp, Homo sapiens
tctcaccttgttttctgagtttttcgcttgtgcagttgatgaataaagaataaagcagttattactacagaagaca

SEQ ID NO: 162505 - DNA, 75 bp, Homo sapiens
ttttctgagtttttcgcttgtgcagttgatgaataaagaataaagcagttattactacagaagacaatgtccttc

SEQ ID NO: 162506 - DNA, 74 bp, Homo sapiens
agtttttcgcttgtgcagttgatgaataaagaataaagcagttattactacagaagacaatgtccttctctacc

SEQ ID NO: 162507 - DNA, 76 bp, Homo sapiens
ttgtgcagttgatgaataaagaataaagcagttattactacagaagacaatgtccttctctaccctcttggtgctt

SEQ ID NO: 162508 - DNA, 72 bp, Homo sapiens
gaataaagaataaagcagttattactacagaagacaatgtccttctctaccctcttggtgctttctcgggaa

SEQ ID NO: 162509 - DNA, 72 bp, Homo sapiens
ataaagcagttattactacagaagacaatgtccttctctaccctcttggtgctttctcgggaatcctgaaaa

SEQ ID NO: 162510 - DNA, 72 bp, Homo sapiens
agttattactacagaagacaatgtccttctctaccctcttggtgctttctcgggaatcctgaaaagcaaaga

SEQ ID NO: 162511 - DNA, 72 bp, Homo sapiens
aagacaatgtccttctctaccctcttggtgctttctcgggaatcctgaaaagcaaagagaaatgtgtgggaa

SEQ ID NO: 162512 - DNA, 73 bp, Homo sapiens
aatgtccttctctaccctcttggtgctttctcgggaatcctgaaaagcaaagagaaatgtgtgggaatctcaa

SEQ ID NO: 162513 - DNA, 68 bp, Homo sapiens
acattttcgctggaggtaggaggtggggtcataaaaggagtagcaaagtaccttgttcaaaagggtca

SEQ ID NO: 162514 - DNA, 68 bp, Homo sapiens
gtaggaggtggggtcataaaaggagtagcaaagtaccttgttcaaaagggtcagatctttgaaagatt

SEQ ID NO: 162515 - DNA, 70 bp, Homo sapiens
gggtcataaaaggagtagcaaagtaccttgttcaaaagggtcagatctttgaaagatttccgcacaccac

SEQ ID NO: 162516 - DNA, 70 bp, Homo sapiens
ataaaaggagtagcaaagtaccttgttcaaaagggtcagatctttgaaagatttccgcacaccacttcca

SEQ ID NO: 162517 - DNA, 68 bp, Homo sapiens
aagtaccttgttcaaaagggtcagatctttgaaagatttccgcacaccacttccaagaataaccactt

SEQ ID NO: 162518 - DNA, 72 bp, Homo sapiens
ttgttcaaaagggtcagatctttgaaagatttccgcacaccacttccaagaataaccactttacaatgacaa

SEQ ID NO: 162519 - DNA, 72 bp, Homo sapiens
aagggtcagatctttgaaagatttccgcacaccacttccaagaataaccactttacaatgacaacaccactg

SEQ ID NO: 162520 - DNA, 77 bp, Homo sapiens
tctttgaaagatttccgcacaccacttccaagaataaccactttacaatgacaacaccactgtggtctgagtgctgc

SEQ ID NO: 162521 - DNA, 79 bp, Homo sapiens
tttccgcacaccacttccaagaataaccactttacaatgacaacaccactgtggtctgagtgctgcgctttctgcaata

SEQ ID NO: 162522 - DNA, 79 bp, Homo sapiens
acttccaagaataaccactttacaatgacaacaccactgtggtctgagtgctgcgctttctgcaataccatgactagaa

SEQ ID NO: 162523 - DNA, 80 bp, Homo sapiens
aataaccactttacaatgacaacaccactgtggtctgagtgctgcgctttctgcaataccatgactagaatccttatatc

SEQ ID NO: 162524 - DNA, 82 bp, Homo sapiens
ttacaatgacaacaccactgtggtctgagtgctgcgctttctgcaataccatgactagaatccttatatccagaaagaccta

SEQ ID NO: 162525 - DNA, 79 bp, Homo sapiens
tctgagtgctgcgctttctgcaataccatgactagaatccttatatccagaaagacctaaaggcaatcaacttttgtta

SEQ ID NO: 162526 - DNA, 75 bp, Homo sapiens
tgcgctttctgcaataccatgactagaatccttatatccagaaagacctaaaggcaatcaacttttgttagtaat

SEQ ID NO: 162527 - DNA, 73 bp, Homo sapiens
ttctgcaataccatgactagaatccttatatccagaaagacctaaaggcaatcaacttttgttagtaattaaa

SEQ ID NO: 162528 - DNA, 73 bp, Homo sapiens
ttttgaatcaggaatggatttggggttaacaaaaagctcactagctcaccattgcttgttggaggaaatggta

SEQ ID NO: 162529 - DNA, 73 bp, Homo sapiens
aatggatttggggttaacaaaaagctcactagctcaccattgcttgttggaggaaatggtacattaggctgct

SEQ ID NO: 162530 - DNA, 75 bp, Homo sapiens
ggttaacaaaaagctcactagctcaccattgcttgttggaggaaatggtacattaggctgcttcagccggtaaga

SEQ ID NO: 162531 - DNA, 77 bp, Homo sapiens
aaaaagctcactagctcaccattgcttgttggaggaaatggtacattaggctgcttcagccggtaagagctcactaa

SEQ ID NO: 162532 - DNA, 77 bp, Homo sapiens
actagctcaccattgcttgttggaggaaatggtacattaggctgcttcagccggtaagagctcactaatctgggagg

SEQ ID NO: 162533 - DNA, 77 bp, Homo sapiens
attgcttgttggaggaaatggtacattaggctgcttcagccggtaagagctcactaatctgggagggtttgcagatc

SEQ ID NO: 162534 - DNA, 77 bp, Homo sapiens
ttggaggaaatggtacattaggctgcttcagccggtaagagctcactaatctgggagggtttgcagatcctggcgga

SEQ ID NO: 162535 - DNA, 77 bp, Homo sapiens
tacattaggctgcttcagccggtaagagctcactaatctgggagggtttgcagatcctggcggaggcccacggagaa

SEQ ID NO: 162536 - DNA, 76 bp, Homo sapiens
ctgcttcagccggtaagagctcactaatctgggagggtttgcagatcctggcggaggcccacggagaagtaaatgc

SEQ ID NO: 162537 - DNA, 77 bp, Homo sapiens
taagagctcactaatctgggagggtttgcagatcctggcggaggcccacggagaagtaaatgctgtcgatactccaa

SEQ ID NO: 162538 - DNA, 72 bp, Homo sapiens
actaatctgggagggtttgcagatcctggcggaggcccacggagaagtaaatgctgtcgatactccaaaccc

SEQ ID NO: 162539 - DNA, 71 bp, Homo sapiens
agggtttgcagatcctggcggaggcccacggagaagtaaatgctgtcgatactccaaacccgggttgattc

SEQ ID NO: 162540 - DNA, 75 bp, Homo sapiens
ttgcagatcctggcggaggcccacggagaagtaaatgctgtcgatactccaaacccgggttgattctgtggctac

SEQ ID NO: 162541 - DNA, 72 bp, Homo sapiens
gaggcccacggagaagtaaatgctgtcgatactccaaacccgggttgattctgtggctactgaccaaaccca

SEQ ID NO: 162542 - DNA, 72 bp, Homo sapiens
acggagaagtaaatgctgtcgatactccaaacccgggttgattctgtggctactgaccaaacccatggatgg

SEQ ID NO: 162543 - DNA, 77 bp, Homo sapiens
gtaaatgctgtcgatactccaaacccgggttgattctgtggctactgaccaaacccatggatgggacatctggagca

SEQ ID NO: 162544 - DNA, 77 bp, Homo sapiens
tactccaaacccgggttgattctgtggctactgaccaaacccatggatgggacatctggagcactgctaacctcata

SEQ ID NO: 162545 - DNA, 76 bp, Homo sapiens
aaacccgggttgattctgtggctactgaccaaacccatggatgggacatctggagcactgctaacctcatagctgt

SEQ ID NO: 162546 - DNA, 80 bp, Homo sapiens
tctgtggctactgaccaaacccatggatgggacatctggagcactgctaacctcatagctgttagggattcggacgtgaa

SEQ ID NO: 162547 - DNA, 77 bp, Homo sapiens
tactgaccaaacccatggatgggacatctggagcactgctaacctcatagctgttagggattcggacgtgaagaagg

SEQ ID NO: 162548 - DNA, 75 bp, Homo sapiens
acccatggatgggacatctggagcactgctaacctcatagctgttagggattcggacgtgaagaaggtcggaaaa

SEQ ID NO: 162549 - DNA, 78 bp, Homo sapiens
atgggacatctggagcactgctaacctcatagctgttagggattcggacgtgaagaaggtcggaaaatgcagccacaa

SEQ ID NO: 162550 - DNA, 77 bp, Homo sapiens
agcactgctaacctcatagctgttagggattcggacgtgaagaaggtcggaaaatgcagccacaacactgctaatgt

SEQ ID NO: 162551 - DNA, 72 bp, Homo sapiens
agctgttagggattcggacgtgaagaaggtcggaaaatgcagccacaacactgctaatgttctaaaaccaaa

SEQ ID NO: 162552 - DNA, 76 bp, Homo sapiens
ttcggacgtgaagaaggtcggaaaatgcagccacaacactgctaatgttctaaaaccaaatgcaaatgctgtatta

SEQ ID NO: 162553 - DNA, 74 bp, Homo sapiens
aaattggggacatactgtttaacattaagaagtcatttaatcttttacctcagcagctgtaggatgcagagtaa

SEQ ID NO: 162554 - DNA, 79 bp, Homo sapiens
tactgtttaacattaagaagtcatttaatcttttacctcagcagctgtaggatgcagagtaattgctacagatataaga

SEQ ID NO: 162555 - DNA, 79 bp, Homo sapiens
tttaacattaagaagtcatttaatcttttacctcagcagctgtaggatgcagagtaattgctacagatataagacctga

SEQ ID NO: 162556 - DNA, 79 bp, Homo sapiens
aagtcatttaatcttttacctcagcagctgtaggatgcagagtaattgctacagatataagacctgatctgggaccatt

SEQ ID NO: 162557 - DNA, 79 bp, Homo sapiens
taatcttttacctcagcagctgtaggatgcagagtaattgctacagatataagacctgatctgggaccatttggggaag

SEQ ID NO: 162558 - DNA, 78 bp, Homo sapiens
agcagctgtaggatgcagagtaattgctacagatataagacctgatctgggaccatttggggaaggaccaaaaggtga

SEQ ID NO: 162559 - DNA, 76 bp, Homo sapiens
gatgcagagtaattgctacagatataagacctgatctgggaccatttggggaaggaccaaaaggtgacgcaaaata

SEQ ID NO: 162560 - DNA, 72 bp, Homo sapiens
taattgctacagatataagacctgatctgggaccatttggggaaggaccaaaaggtgacgcaaaatataaag

SEQ ID NO: 162561 - DNA, 72 bp, Homo sapiens
ctacagatataagacctgatctgggaccatttggggaaggaccaaaaggtgacgcaaaatataaagtgcctg

SEQ ID NO: 162562 - DNA, 70 bp, Homo sapiens
aagacctgatctgggaccatttggggaaggaccaaaaggtgacgcaaaatataaagtgcctggctcagtt

SEQ ID NO: 162563 - DNA, 71 bp, Homo sapiens
accatttggggaaggaccaaaaggtgacgcaaaatataaagtgcctggctcagttttgatgtcattccttc

SEQ ID NO: 162564 - DNA, 74 bp, Homo sapiens
gggaaggaccaaaaggtgacgcaaaatataaagtgcctggctcagttttgatgtcattccttcttgattctgaa

SEQ ID NO: 162565 - DNA, 72 bp, Homo sapiens
aaaaggtgacgcaaaatataaagtgcctggctcagttttgatgtcattccttcttgattctgaacctttaaa

SEQ ID NO: 162566 - DNA, 73 bp, Homo sapiens
acgcaaaatataaagtgcctggctcagttttgatgtcattccttcttgattctgaacctttaaaaagagagaa

SEQ ID NO: 162567 - DNA, 68 bp, Homo sapiens
gtaaattggcgtagtgtaaagggaaataataaggttaagtgttgttcttacttttcccagcagtgcta

SEQ ID NO: 162568 - DNA, 70 bp, Homo sapiens
tgtaaagggaaataataaggttaagtgttgttcttacttttcccagcagtgctaggaagaattggaatga

SEQ ID NO: 162569 - DNA, 69 bp, Homo sapiens
gggaaataataaggttaagtgttgttcttacttttcccagcagtgctaggaagaattggaatgatgggg

SEQ ID NO: 162570 - DNA, 69 bp, Homo sapiens
aaggttaagtgttgttcttacttttcccagcagtgctaggaagaattggaatgatgggggacggcaccg

SEQ ID NO: 162571 - DNA, 72 bp, Homo sapiens
ttgttcttacttttcccagcagtgctaggaagaattggaatgatgggggacggcaccggttctggaggctcc

SEQ ID NO: 162572 - DNA, 73 bp, Homo sapiens
ttttcccagcagtgctaggaagaattggaatgatgggggacggcaccggttctggaggctcctccttgaccaa

SEQ ID NO: 162573 - DNA, 75 bp, Homo sapiens
ctaggaagaattggaatgatgggggacggcaccggttctggaggctcctccttgaccaatgacagatctggatac

SEQ ID NO: 162574 - DNA, 77 bp, Homo sapiens
aagaattggaatgatgggggacggcaccggttctggaggctcctccttgaccaatgacagatctggatacctgctca

SEQ ID NO: 162575 - DNA, 76 bp, Homo sapiens
atgatgggggacggcaccggttctggaggctcctccttgaccaatgacagatctggatacctgctcacttctaccc

SEQ ID NO: 162576 - DNA, 75 bp, Homo sapiens
acggcaccggttctggaggctcctccttgaccaatgacagatctggatacctgctcacttctaccccaaccacac

SEQ ID NO: 162577 - DNA, 81 bp, Homo sapiens
ttctggaggctcctccttgaccaatgacagatctggatacctgctcacttctaccccaaccacactctcaggagaggatga

SEQ ID NO: 162578 - DNA, 78 bp, Homo sapiens
tccttgaccaatgacagatctggatacctgctcacttctaccccaaccacactctcaggagaggatgagggaacaaaa

SEQ ID NO: 162579 - DNA, 78 bp, Homo sapiens
aatgacagatctggatacctgctcacttctaccccaaccacactctcaggagaggatgagggaacaaaactgtcagga

SEQ ID NO: 162580 - DNA, 77 bp, Homo sapiens
atctggatacctgctcacttctaccccaaccacactctcaggagaggatgagggaacaaaactgtcaggagtatctc

SEQ ID NO: 162581 - DNA, 79 bp, Homo sapiens
tcacttctaccccaaccacactctcaggagaggatgagggaacaaaactgtcaggagtatctcgatcaccacagtgatc

SEQ ID NO: 162582 - DNA, 80 bp, Homo sapiens
ccaaccacactctcaggagaggatgagggaacaaaactgtcaggagtatctcgatcaccacagtgatcctgtatcctgaa

SEQ ID NO: 162583 - DNA, 79 bp, Homo sapiens
tctcaggagaggatgagggaacaaaactgtcaggagtatctcgatcaccacagtgatcctgtatcctgaaaaaacataa

SEQ ID NO: 162584 - DNA, 77 bp, Homo sapiens
agaggatgagggaacaaaactgtcaggagtatctcgatcaccacagtgatcctgtatcctgaaaaaacataaacaca

SEQ ID NO: 162585 - DNA, 77 bp, Homo sapiens
aacaaaactgtcaggagtatctcgatcaccacagtgatcctgtatcctgaaaaaacataaacacacacatcaaagtc

SEQ ID NO: 162586 - DNA, 67 bp, Homo sapiens
agaaataactaagaattatttgagaaaaaaataacctgtaccttaattcttcctgattgttatgagg

SEQ ID NO: 162587 - DNA, 69 bp, Homo sapiens
taagaattatttgagaaaaaaataacctgtaccttaattcttcctgattgttatgaggtggtgttggga

SEQ ID NO: 162588 - DNA, 68 bp, Homo sapiens
ttatttgagaaaaaaataacctgtaccttaattcttcctgattgttatgaggtggtgttgggagggag

SEQ ID NO: 162589 - DNA, 71 bp, Homo sapiens
aaaaataacctgtaccttaattcttcctgattgttatgaggtggtgttgggagggaggctggcacatcaac

SEQ ID NO: 162590 - DNA, 75 bp, Homo sapiens
taccttaattcttcctgattgttatgaggtggtgttgggagggaggctggcacatcaactgtcttggggccctga

SEQ ID NO: 162591 - DNA, 78 bp, Homo sapiens
attcttcctgattgttatgaggtggtgttgggagggaggctggcacatcaactgtcttggggccctgagcaagagctc

SEQ ID NO: 162592 - DNA, 77 bp, Homo sapiens
ttgttatgaggtggtgttgggagggaggctggcacatcaactgtcttggggccctgagcaagagctcgggccaacaa

SEQ ID NO: 162593 - DNA, 76 bp, Homo sapiens
tggtgttgggagggaggctggcacatcaactgtcttggggccctgagcaagagctcgggccaacaagtcgtcctgg

SEQ ID NO: 162594 - DNA, 75 bp, Homo sapiens
agggaggctggcacatcaactgtcttggggccctgagcaagagctcgggccaacaagtcgtcctggggtctgaag

SEQ ID NO: 162595 - DNA, 76 bp, Homo sapiens
acatcaactgtcttggggccctgagcaagagctcgggccaacaagtcgtcctggggtctgaagggcagctgaaatg

SEQ ID NO: 162596 - DNA, 74 bp, Homo sapiens
tgtcttggggccctgagcaagagctcgggccaacaagtcgtcctggggtctgaagggcagctgaaatggtttag

SEQ ID NO: 162597 - DNA, 73 bp, Homo sapiens
tgagcaagagctcgggccaacaagtcgtcctggggtctgaagggcagctgaaatggtttaggtcctagagttt

SEQ ID NO: 162598 - DNA, 69 bp, Homo sapiens
ctcgggccaacaagtcgtcctggggtctgaagggcagctgaaatggtttaggtcctagagttttggtaa

SEQ ID NO: 162599 - DNA, 68 bp, Homo sapiens
aacaagtcgtcctggggtctgaagggcagctgaaatggtttaggtcctagagttttggtaactggaaa

SEQ ID NO: 162600 - DNA, 68 bp, Homo sapiens
gtcctggggtctgaagggcagctgaaatggtttaggtcctagagttttggtaactggaaaagcaaaaa

SEQ ID NO: 162601 - DNA, 67 bp, Homo sapiens
aagggcagctgaaatggtttaggtcctagagttttggtaactggaaaagcaaaaacacaaaaccata

SEQ ID NO: 162602 - DNA, 67 bp, Homo sapiens
agctgaaatggtttaggtcctagagttttggtaactggaaaagcaaaaacacaaaaccataaataca

SEQ ID NO: 162603 - DNA, 75 bp, Homo sapiens
agaggcacatttctccgaggtgtgaaatttggaggctataatcataccttcatggctcactaacactccggcttt

SEQ ID NO: 162604 - DNA, 75 bp, Homo sapiens
atttctccgaggtgtgaaatttggaggctataatcataccttcatggctcactaacactccggcttttccagcaa

SEQ ID NO: 162605 - DNA, 75 bp, Homo sapiens
gtgaaatttggaggctataatcataccttcatggctcactaacactccggcttttccagcaagttcttcagttgt

SEQ ID NO: 162606 - DNA, 76 bp, Homo sapiens
tttggaggctataatcataccttcatggctcactaacactccggcttttccagcaagttcttcagttgttgcaaaa

SEQ ID NO: 162607 - DNA, 77 bp, Homo sapiens
tataatcataccttcatggctcactaacactccggcttttccagcaagttcttcagttgttgcaaaaccattggcca

SEQ ID NO: 162608 - DNA, 77 bp, Homo sapiens
cttcatggctcactaacactccggcttttccagcaagttcttcagttgttgcaaaaccattggccatcttctgacaa

SEQ ID NO: 162609 - DNA, 75 bp, Homo sapiens
actaacactccggcttttccagcaagttcttcagttgttgcaaaaccattggccatcttctgacaagccatagga

SEQ ID NO: 162610 - DNA, 75 bp, Homo sapiens
cttttccagcaagttcttcagttgttgcaaaaccattggccatcttctgacaagccataggaggtggtgtaggag

SEQ ID NO: 162611 - DNA, 77 bp, Homo sapiens
ccagcaagttcttcagttgttgcaaaaccattggccatcttctgacaagccataggaggtggtgtaggaggaagaga

SEQ ID NO: 162612 - DNA, 75 bp, Homo sapiens
cttcagttgttgcaaaaccattggccatcttctgacaagccataggaggtggtgtaggaggaagagaggcagggg

SEQ ID NO: 162613 - DNA, 74 bp, Homo sapiens
aaccattggccatcttctgacaagccataggaggtggtgtaggaggaagagaggcagggggtgttggaggatta

SEQ ID NO: 162614 - DNA, 73 bp, Homo sapiens
catcttctgacaagccataggaggtggtgtaggaggaagagaggcagggggtgttggaggattacttaaatta

SEQ ID NO: 162615 - DNA, 74 bp, Homo sapiens
tctgacaagccataggaggtggtgtaggaggaagagaggcagggggtgttggaggattacttaaattattctgc

SEQ ID NO: 162616 - DNA, 73 bp, Homo sapiens
ataggaggtggtgtaggaggaagagaggcagggggtgttggaggattacttaaattattctgctgcaggagac

SEQ ID NO: 162617 - DNA, 71 bp, Homo sapiens
taggaggaagagaggcagggggtgttggaggattacttaaattattctgctgcaggagaccaaaaaattta

SEQ ID NO: 162618 - DNA, 69 bp, Homo sapiens
aagagaggcagggggtgttggaggattacttaaattattctgctgcaggagaccaaaaaatttaaatta

SEQ ID NO: 162619 - DNA, 77 bp, Homo sapiens
acatgttacccaaagatgaagcaagacaacaccttggcagagaaacataccttgtagatcaactgagaatagtagtc

SEQ ID NO: 162620 - DNA, 74 bp, Homo sapiens
aaagatgaagcaagacaacaccttggcagagaaacataccttgtagatcaactgagaatagtagtccgaaaccc

SEQ ID NO: 162621 - DNA, 71 bp, Homo sapiens
aagacaacaccttggcagagaaacataccttgtagatcaactgagaatagtagtccgaaaccccttccagg

SEQ ID NO: 162622 - DNA, 74 bp, Homo sapiens
tggcagagaaacataccttgtagatcaactgagaatagtagtccgaaaccccttccagggtagcactgccaaaa

SEQ ID NO: 162623 - DNA, 70 bp, Homo sapiens
aaacataccttgtagatcaactgagaatagtagtccgaaaccccttccagggtagcactgccaaaagttc

SEQ ID NO: 162624 - DNA, 72 bp, Homo sapiens
tagatcaactgagaatagtagtccgaaaccccttccagggtagcactgccaaaagttcctagaagtcgattc

SEQ ID NO: 162625 - DNA, 70 bp, Homo sapiens
tgagaatagtagtccgaaaccccttccagggtagcactgccaaaagttcctagaagtcgattcccactat

SEQ ID NO: 162626 - DNA, 68 bp, Homo sapiens
tagtagtccgaaaccccttccagggtagcactgccaaaagttcctagaagtcgattcccactattaaa

SEQ ID NO: 162627 - DNA, 72 bp, Homo sapiens
ccttccagggtagcactgccaaaagttcctagaagtcgattcccactattaaattggccactgccataagga

SEQ ID NO: 162628 - DNA, 71 bp, Homo sapiens
agggtagcactgccaaaagttcctagaagtcgattcccactattaaattggccactgccataaggaagaaa

SEQ ID NO: 162629 - DNA, 71 bp, Homo sapiens
aaaagttcctagaagtcgattcccactattaaattggccactgccataaggaagaaagtgcgcaaagttca

SEQ ID NO: 162630 - DNA, 75 bp, Homo sapiens
ttcctagaagtcgattcccactattaaattggccactgccataaggaagaaagtgcgcaaagttcactccaatga

SEQ ID NO: 162631 - DNA, 74 bp, Homo sapiens
attcccactattaaattggccactgccataaggaagaaagtgcgcaaagttcactccaatgattggttccatta

SEQ ID NO: 162632 - DNA, 77 bp, Homo sapiens
tattaaattggccactgccataaggaagaaagtgcgcaaagttcactccaatgattggttccattagagggagcaga

SEQ ID NO: 162633 - DNA, 79 bp, Homo sapiens
actgccataaggaagaaagtgcgcaaagttcactccaatgattggttccattagagggagcagagagagctgctattaa

SEQ ID NO: 162634 - DNA, 76 bp, Homo sapiens
ataaggaagaaagtgcgcaaagttcactccaatgattggttccattagagggagcagagagagctgctattaaaaa

SEQ ID NO: 162635 - DNA, 76 bp, Homo sapiens
aagtgcgcaaagttcactccaatgattggttccattagagggagcagagagagctgctattaaaaaacacatttaa

SEQ ID NO: 162636 - DNA, 78 bp, Homo sapiens
actccaatgattggttccattagagggagcagagagagctgctattaaaaaacacatttaagagtaatgtacatgata

SEQ ID NO: 162637 - DNA, 71 bp, Homo sapiens
agcctatatccttgacttttaaaagaggctgctctaaatgactcaccctcacctgtttcaagtgggtaaac

SEQ ID NO: 162638 - DNA, 72 bp, Homo sapiens
atatccttgacttttaaaagaggctgctctaaatgactcaccctcacctgtttcaagtgggtaaacgtgtca

SEQ ID NO: 162639 - DNA, 75 bp, Homo sapiens
tttaaaagaggctgctctaaatgactcaccctcacctgtttcaagtgggtaaacgtgtcagtgctagagtacata

SEQ ID NO: 162640 - DNA, 74 bp, Homo sapiens
aaatgactcaccctcacctgtttcaagtgggtaaacgtgtcagtgctagagtacatagcttgtttctcctcttc

SEQ ID NO: 162641 - DNA, 70 bp, Homo sapiens
acctgtttcaagtgggtaaacgtgtcagtgctagagtacatagcttgtttctcctcttcgtcctttttcc

SEQ ID NO: 162642 - DNA, 70 bp, Homo sapiens
tttcaagtgggtaaacgtgtcagtgctagagtacatagcttgtttctcctcttcgtcctttttccttttc

SEQ ID NO: 162643 - DNA, 71 bp, Homo sapiens
gtaaacgtgtcagtgctagagtacatagcttgtttctcctcttcgtcctttttccttttctttgagcgagg

SEQ ID NO: 162644 - DNA, 74 bp, Homo sapiens
agtgctagagtacatagcttgtttctcctcttcgtcctttttccttttctttgagcgaggtgctgctttctcac

SEQ ID NO: 162645 - DNA, 72 bp, Homo sapiens
atagcttgtttctcctcttcgtcctttttccttttctttgagcgaggtgctgctttctcacccgtcctctga

SEQ ID NO: 162646 - DNA, 70 bp, Homo sapiens
ttctcctcttcgtcctttttccttttctttgagcgaggtgctgctttctcacccgtcctctgagtccgtt

SEQ ID NO: 162647 - DNA, 72 bp, Homo sapiens
tcctttttccttttctttgagcgaggtgctgctttctcacccgtcctctgagtccgtttgcttcgctgtttc

SEQ ID NO: 162648 - DNA, 73 bp, Homo sapiens
ttttctttgagcgaggtgctgctttctcacccgtcctctgagtccgtttgcttcgctgtttcttggtttcact

SEQ ID NO: 162649 - DNA, 75 bp, Homo sapiens
tttgagcgaggtgctgctttctcacccgtcctctgagtccgtttgcttcgctgtttcttggtttcacttcctcca

SEQ ID NO: 162650 - DNA, 72 bp, Homo sapiens
ctgctttctcacccgtcctctgagtccgtttgcttcgctgtttcttggtttcacttcctccatctgtttttg

SEQ ID NO: 162651 - DNA, 70 bp, Homo sapiens
acccgtcctctgagtccgtttgcttcgctgtttcttggtttcacttcctccatctgtttttggcaactgg

SEQ ID NO: 162652 - DNA, 72 bp, Homo sapiens
agtccgtttgcttcgctgtttcttggtttcacttcctccatctgtttttggcaactggttgccacatccaaa

SEQ ID NO: 162653 - DNA, 72 bp, Homo sapiens
gtttgcttcgctgtttcttggtttcacttcctccatctgtttttggcaactggttgccacatccaaaaccac

SEQ ID NO: 162654 - DNA, 73 bp, Homo sapiens
ctgtttcttggtttcacttcctccatctgtttttggcaactggttgccacatccaaaaccaccttgcatttga

SEQ ID NO: 162655 - DNA, 70 bp, Homo sapiens
acttcctccatctgtttttggcaactggttgccacatccaaaaccaccttgcatttgagcccccaaagtt

SEQ ID NO: 162656 - DNA, 72 bp, Homo sapiens
tctgtttttggcaactggttgccacatccaaaaccaccttgcatttgagcccccaaagtttgctaatgtaat

SEQ ID NO: 162657 - DNA, 72 bp, Homo sapiens
ttttggcaactggttgccacatccaaaaccaccttgcatttgagcccccaaagtttgctaatgtaattggaa

SEQ ID NO: 162658 - DNA, 69 bp, Homo sapiens
ttgccacatccaaaaccaccttgcatttgagcccccaaagtttgctaatgtaattggaaagggtaaaaa

SEQ ID NO: 162659 - DNA, 66 bp, Homo sapiens
atccaaaaccaccttgcatttgagcccccaaagtttgctaatgtaattggaaagggtaaaaaataa

SEQ ID NO: 162660 - DNA, 69 bp, Homo sapiens
aacaaaagaaaaaagttgtcgtttttatgatttacacttaccagtccttcagctgggttctgcttctca

SEQ ID NO: 162661 - DNA, 69 bp, Homo sapiens
aaaaagttgtcgtttttatgatttacacttaccagtccttcagctgggttctgcttctcaactagttta

SEQ ID NO: 162662 - DNA, 71 bp, Homo sapiens
ttgtcgtttttatgatttacacttaccagtccttcagctgggttctgcttctcaactagtttattatcctt

SEQ ID NO: 162663 - DNA, 76 bp, Homo sapiens
tatgatttacacttaccagtccttcagctgggttctgcttctcaactagtttattatcctttgtacagtcatcttc

SEQ ID NO: 162664 - DNA, 74 bp, Homo sapiens
acttaccagtccttcagctgggttctgcttctcaactagtttattatcctttgtacagtcatcttctgaacaaa

SEQ ID NO: 162665 - DNA, 74 bp, Homo sapiens
agctgggttctgcttctcaactagtttattatcctttgtacagtcatcttctgaacaaatactgccctcaggtt

SEQ ID NO: 162666 - DNA, 75 bp, Homo sapiens
tgcttctcaactagtttattatcctttgtacagtcatcttctgaacaaatactgccctcaggtttttgattcaaa

SEQ ID NO: 162667 - DNA, 73 bp, Homo sapiens
ctcaactagtttattatcctttgtacagtcatcttctgaacaaatactgccctcaggtttttgattcaaaaga

SEQ ID NO: 162668 - DNA, 73 bp, Homo sapiens
attatcctttgtacagtcatcttctgaacaaatactgccctcaggtttttgattcaaaagagaagatgacttt

SEQ ID NO: 162669 - DNA, 72 bp, Homo sapiens
ttgtacagtcatcttctgaacaaatactgccctcaggtttttgattcaaaagagaagatgactttttatttt

SEQ ID NO: 162670 - DNA, 70 bp, Homo sapiens
cttctgaacaaatactgccctcaggtttttgattcaaaagagaagatgactttttatttttcaacaagtg

SEQ ID NO: 162671 - DNA, 70 bp, Homo sapiens
actgccctcaggtttttgattcaaaagagaagatgactttttatttttcaacaagtgtttcagaagttca

SEQ ID NO: 162672 - DNA, 69 bp, Homo sapiens
ggtttttgattcaaaagagaagatgactttttatttttcaacaagtgtttcagaagttcattccctgag

SEQ ID NO: 162673 - DNA, 72 bp, Homo sapiens
ttcaaaagagaagatgactttttatttttcaacaagtgtttcagaagttcattccctgagtctcctttggca

SEQ ID NO: 162674 - DNA, 72 bp, Homo sapiens
agagaagatgactttttatttttcaacaagtgtttcagaagttcattccctgagtctcctttggcagcaggg

SEQ ID NO: 162675 - DNA, 73 bp, Homo sapiens
ttttatttttcaacaagtgtttcagaagttcattccctgagtctcctttggcagcaggggccccagcagaatg

SEQ ID NO: 162676 - DNA, 74 bp, Homo sapiens
tttcaacaagtgtttcagaagttcattccctgagtctcctttggcagcaggggccccagcagaatggggaggac

SEQ ID NO: 162677 - DNA, 79 bp, Homo sapiens
tgtttcagaagttcattccctgagtctcctttggcagcaggggccccagcagaatggggaggactctgtgctgaggaga

SEQ ID NO: 162678 - DNA, 80 bp, Homo sapiens
ttcattccctgagtctcctttggcagcaggggccccagcagaatggggaggactctgtgctgaggagacaggacaggcta

SEQ ID NO: 162679 - DNA, 77 bp, Homo sapiens
ctcctttggcagcaggggccccagcagaatggggaggactctgtgctgaggagacaggacaggctacagcgtttcct

SEQ ID NO: 162680 - DNA, 78 bp, Homo sapiens
tttggcagcaggggccccagcagaatggggaggactctgtgctgaggagacaggacaggctacagcgtttccttctac

SEQ ID NO: 162681 - DNA, 76 bp, Homo sapiens
agcaggggccccagcagaatggggaggactctgtgctgaggagacaggacaggctacagcgtttccttctacctta

SEQ ID NO: 162682 - DNA, 75 bp, Homo sapiens
agaatggggaggactctgtgctgaggagacaggacaggctacagcgtttccttctaccttactaccattctgttc

SEQ ID NO: 162683 - DNA, 75 bp, Homo sapiens
ggactctgtgctgaggagacaggacaggctacagcgtttccttctaccttactaccattctgttcctccaattta

SEQ ID NO: 162684 - DNA, 73 bp, Homo sapiens
ctgaggagacaggacaggctacagcgtttccttctaccttactaccattctgttcctccaatttaggctcctc

SEQ ID NO: 162685 - DNA, 71 bp, Homo sapiens
aggagacaggacaggctacagcgtttccttctaccttactaccattctgttcctccaatttaggctcctct

SEQ ID NO: 162686 - DNA, 72 bp, Homo sapiens
agacaggacaggctacagcgtttccttctaccttactaccattctgttcctccaatttaggctcctcttggc

SEQ ID NO: 162687 - DNA, 71 bp, Homo sapiens
aggctacagcgtttccttctaccttactaccattctgttcctccaatttaggctcctcttggcctgggcag

SEQ ID NO: 162688 - DNA, 73 bp, Homo sapiens
gtttccttctaccttactaccattctgttcctccaatttaggctcctcttggcctgggcaggactctgtctca

SEQ ID NO: 162689 - DNA, 73 bp, Homo sapiens
ttactaccattctgttcctccaatttaggctcctcttggcctgggcaggactctgtctcagccttttccagtt

SEQ ID NO: 162690 - DNA, 73 bp, Homo sapiens
attctgttcctccaatttaggctcctcttggcctgggcaggactctgtctcagccttttccagttttatctct

SEQ ID NO: 162691 - DNA, 73 bp, Homo sapiens
ctccaatttaggctcctcttggcctgggcaggactctgtctcagccttttccagttttatctcttctgttttg

SEQ ID NO: 162692 - DNA, 73 bp, Homo sapiens
ctcttggcctgggcaggactctgtctcagccttttccagttttatctcttctgttttggcaggggtttccatg

SEQ ID NO: 162693 - DNA, 75 bp, Homo sapiens
tgggcaggactctgtctcagccttttccagttttatctcttctgttttggcaggggtttccatggagagcttgtc

SEQ ID NO: 162694 - DNA, 75 bp, Homo sapiens
tctgtctcagccttttccagttttatctcttctgttttggcaggggtttccatggagagcttgtctacttctgaa

SEQ ID NO: 162695 - DNA, 75 bp, Homo sapiens
ttttatctcttctgttttggcaggggtttccatggagagcttgtctacttctgaatttgcatacgtctgttgatt

SEQ ID NO: 162696 - DNA, 76 bp, Homo sapiens
ttctgttttggcaggggtttccatggagagcttgtctacttctgaatttgcatacgtctgttgatttggagttgct

SEQ ID NO: 162697 - DNA, 79 bp, Homo sapiens
atggagagcttgtctacttctgaatttgcatacgtctgttgatttggagttgcttgtgagaaatcactattgggcagtt

SEQ ID NO: 162698 - DNA, 79 bp, Homo sapiens
ttgtctacttctgaatttgcatacgtctgttgatttggagttgcttgtgagaaatcactattgggcagtttgttctcta

SEQ ID NO: 162699 - DNA, 77 bp, Homo sapiens
acttctgaatttgcatacgtctgttgatttggagttgcttgtgagaaatcactattgggcagtttgttctctaattc

SEQ ID NO: 162700 - DNA, 78 bp, Homo sapiens
atacgtctgttgatttggagttgcttgtgagaaatcactattgggcagtttgttctctaattctgtacatagctggcc

SEQ ID NO: 162701 - DNA, 81 bp, Homo sapiens
agttgcttgtgagaaatcactattgggcagtttgttctctaattctgtacatagctggcctgctgccatattgggagtgga

SEQ ID NO: 162702 - DNA, 79 bp, Homo sapiens
aaatcactattgggcagtttgttctctaattctgtacatagctggcctgctgccatattgggagtggatgggccgactg

SEQ ID NO: 162703 - DNA, 78 bp, Homo sapiens
actattgggcagtttgttctctaattctgtacatagctggcctgctgccatattgggagtggatgggccgactggttc

SEQ ID NO: 162704 - DNA, 78 bp, Homo sapiens
tttgttctctaattctgtacatagctggcctgctgccatattgggagtggatgggccgactggttccaccgactcttg

SEQ ID NO: 162705 - DNA, 79 bp, Homo sapiens
ttctgtacatagctggcctgctgccatattgggagtggatgggccgactggttccaccgactcttggtcggcttgttga

SEQ ID NO: 162706 - DNA, 77 bp, Homo sapiens
acatagctggcctgctgccatattgggagtggatgggccgactggttccaccgactcttggtcggcttgttgaggaa

SEQ ID NO: 162707 - DNA, 76 bp, Homo sapiens
tattgggagtggatgggccgactggttccaccgactcttggtcggcttgttgaggaagctcactgggtgtgctcac

SEQ ID NO: 162708 - DNA, 77 bp, Homo sapiens
atgggccgactggttccaccgactcttggtcggcttgttgaggaagctcactgggtgtgctcactgcaggagtagag

SEQ ID NO: 162709 - DNA, 75 bp, Homo sapiens
actggttccaccgactcttggtcggcttgttgaggaagctcactgggtgtgctcactgcaggagtagaggtagtt

SEQ ID NO: 162710 - DNA, 80 bp, Homo sapiens
actcttggtcggcttgttgaggaagctcactgggtgtgctcactgcaggagtagaggtagtttctgagatgcctggagtc

SEQ ID NO: 162711 - DNA, 79 bp, Homo sapiens
gtcggcttgttgaggaagctcactgggtgtgctcactgcaggagtagaggtagtttctgagatgcctggagtcggtggg

SEQ ID NO: 162712 - DNA, 81 bp, Homo sapiens
aagctcactgggtgtgctcactgcaggagtagaggtagtttctgagatgcctggagtcggtggggcagttatatctgaatg

SEQ ID NO: 162713 - DNA, 80 bp, Homo sapiens
ggtgtgctcactgcaggagtagaggtagtttctgagatgcctggagtcggtggggcagttatatctgaatggggagttga

SEQ ID NO: 162714 - DNA, 78 bp, Homo sapiens
ctgcaggagtagaggtagtttctgagatgcctggagtcggtggggcagttatatctgaatggggagttgatggagcct

SEQ ID NO: 162715 - DNA, 77 bp, Homo sapiens
tagaggtagtttctgagatgcctggagtcggtggggcagttatatctgaatggggagttgatggagccttggtggat

SEQ ID NO: 162716 - DNA, 81 bp, Homo sapiens
atgcctggagtcggtggggcagttatatctgaatggggagttgatggagccttggtggattctgcatcatcatctcttttc

SEQ ID NO: 162717 - DNA, 72 bp, Homo sapiens
ttgttcttttctttttccctttttcctctgggattatatcagaatacaactgaatgagcgattgggttgatc

SEQ ID NO: 162718 - DNA, 72 bp, Homo sapiens
tttttccctttttcctctgggattatatcagaatacaactgaatgagcgattgggttgatcccggataactg

SEQ ID NO: 162719 - DNA, 75 bp, Homo sapiens
tttttcctctgggattatatcagaatacaactgaatgagcgattgggttgatcccggataactgtgtccatgggt

SEQ ID NO: 162720 - DNA, 78 bp, Homo sapiens
gattatatcagaatacaactgaatgagcgattgggttgatcccggataactgtgtccatgggttatagtagaatcttg

SEQ ID NO: 162721 - DNA, 79 bp, Homo sapiens
tatcagaatacaactgaatgagcgattgggttgatcccggataactgtgtccatgggttatagtagaatcttggccaca

SEQ ID NO: 162722 - DNA, 79 bp, Homo sapiens
ttgatcccggataactgtgtccatgggttatagtagaatcttggccacatgggagactgctattagctactggaggtgc

SEQ ID NO: 162723 - DNA, 79 bp, Homo sapiens
ataactgtgtccatgggttatagtagaatcttggccacatgggagactgctattagctactggaggtgctgctggtaaa

SEQ ID NO: 162724 - DNA, 78 bp, Homo sapiens
atgggttatagtagaatcttggccacatgggagactgctattagctactggaggtgctgctggtaaagcaggtgtaaa

SEQ ID NO: 162725 - DNA, 78 bp, Homo sapiens
tagtagaatcttggccacatgggagactgctattagctactggaggtgctgctggtaaagcaggtgtaaaagaaggcc

SEQ ID NO: 162726 - DNA, 78 bp, Homo sapiens
ttggccacatgggagactgctattagctactggaggtgctgctggtaaagcaggtgtaaaagaaggcctcactgggga

SEQ ID NO: 162727 - DNA, 78 bp, Homo sapiens
acatgggagactgctattagctactggaggtgctgctggtaaagcaggtgtaaaagaaggcctcactggggactgctg

SEQ ID NO: 162728 - DNA, 77 bp, Homo sapiens
gggagactgctattagctactggaggtgctgctggtaaagcaggtgtaaaagaaggcctcactggggactgctggaa

SEQ ID NO: 162729 - DNA, 77 bp, Homo sapiens
actgctattagctactggaggtgctgctggtaaagcaggtgtaaaagaaggcctcactggggactgctggaagctgg

SEQ ID NO: 162730 - DNA, 77 bp, Homo sapiens
tattagctactggaggtgctgctggtaaagcaggtgtaaaagaaggcctcactggggactgctggaagctggtccca

SEQ ID NO: 162731 - DNA, 75 bp, Homo sapiens
tggaggtgctgctggtaaagcaggtgtaaaagaaggcctcactggggactgctggaagctggtcccagaaagatt

SEQ ID NO: 162732 - DNA, 75 bp, Homo sapiens
ctgctggtaaagcaggtgtaaaagaaggcctcactggggactgctggaagctggtcccagaaagatttccatgtc

SEQ ID NO: 162733 - DNA, 73 bp, Homo sapiens
ctggtaaagcaggtgtaaaagaaggcctcactggggactgctggaagctggtcccagaaagatttccatgtcc

SEQ ID NO: 162734 - DNA, 74 bp, Homo sapiens
taaagcaggtgtaaaagaaggcctcactggggactgctggaagctggtcccagaaagatttccatgtccctgct

SEQ ID NO: 162735 - DNA, 73 bp, Homo sapiens
actggggactgctggaagctggtcccagaaagatttccatgtccctgcttcacagaagaaaaatttgggcttc

SEQ ID NO: 162736 - DNA, 74 bp, Homo sapiens
tggtcccagaaagatttccatgtccctgcttcacagaagaaaaatttgggcttccaacagggattgatggtgaa

SEQ ID NO: 162737 - DNA, 74 bp, Homo sapiens
aagatttccatgtccctgcttcacagaagaaaaatttgggcttccaacagggattgatggtgaatcaggaacaa

SEQ ID NO: 162738 - DNA, 74 bp, Homo sapiens
atgtccctgcttcacagaagaaaaatttgggcttccaacagggattgatggtgaatcaggaacaaatgaaggag

SEQ ID NO: 162739 - DNA, 70 bp, Homo sapiens
aagaaaaatttgggcttccaacagggattgatggtgaatcaggaacaaatgaaggagggcctacctgcct

SEQ ID NO: 162740 - DNA, 78 bp, Homo sapiens
ttccaacagggattgatggtgaatcaggaacaaatgaaggagggcctacctgccttcgctcattagtctgcatgaaag

SEQ ID NO: 162741 - DNA, 77 bp, Homo sapiens
acagggattgatggtgaatcaggaacaaatgaaggagggcctacctgccttcgctcattagtctgcatgaaagtttg

SEQ ID NO: 162742 - DNA, 75 bp, Homo sapiens
gaatcaggaacaaatgaaggagggcctacctgccttcgctcattagtctgcatgaaagtttgggtggagggtgaa

SEQ ID NO: 162743 - DNA, 74 bp, Homo sapiens
agggcctacctgccttcgctcattagtctgcatgaaagtttgggtggagggtgaattaattgatccttgttgta

SEQ ID NO: 162744 - DNA, 77 bp, Homo sapiens
ctacctgccttcgctcattagtctgcatgaaagtttgggtggagggtgaattaattgatccttgttgtatattctgc

SEQ ID NO: 162745 - DNA, 76 bp, Homo sapiens
ctcattagtctgcatgaaagtttgggtggagggtgaattaattgatccttgttgtatattctgctgctgtaaaacc

SEQ ID NO: 162746 - DNA, 73 bp, Homo sapiens
catgaaagtttgggtggagggtgaattaattgatccttgttgtatattctgctgctgtaaaacctgccccatt

SEQ ID NO: 162747 - DNA, 73 bp, Homo sapiens
agtttgggtggagggtgaattaattgatccttgttgtatattctgctgctgtaaaacctgccccatttgctgt

SEQ ID NO: 162748 - DNA, 78 bp, Homo sapiens
ttaattgatccttgttgtatattctgctgctgtaaaacctgccccatttgctgttggtgttgtggagactgctgaagg

SEQ ID NO: 162749 - DNA, 77 bp, Homo sapiens
ttgttgtatattctgctgctgtaaaacctgccccatttgctgttggtgttgtggagactgctgaaggggtcctagag

SEQ ID NO: 162750 - DNA, 75 bp, Homo sapiens
tgtaaaacctgccccatttgctgttggtgttgtggagactgctgaaggggtcctagaggttgcataaaatcacaa

SEQ ID NO: 162751 - DNA, 73 bp, Homo sapiens
atttgctgttggtgttgtggagactgctgaaggggtcctagaggttgcataaaatcacaaggtaagtcggaac

SEQ ID NO: 162752 - DNA, 74 bp, Homo sapiens
tgttggtgttgtggagactgctgaaggggtcctagaggttgcataaaatcacaaggtaagtcggaactgtagaa

SEQ ID NO: 162753 - DNA, 72 bp, Homo sapiens
agactgctgaaggggtcctagaggttgcataaaatcacaaggtaagtcggaactgtagaagggaatctggga

SEQ ID NO: 162754 - DNA, 71 bp, Homo sapiens
aaggggtcctagaggttgcataaaatcacaaggtaagtcggaactgtagaagggaatctgggacacagatg

SEQ ID NO: 162755 - DNA, 74 bp, Homo sapiens
ctagaggttgcataaaatcacaaggtaagtcggaactgtagaagggaatctgggacacagatgtcctactacta

SEQ ID NO: 162756 - DNA, 74 bp, Homo sapiens
aaggtaagtcggaactgtagaagggaatctgggacacagatgtcctactactacttatctcagagcccaccata

SEQ ID NO: 162757 - DNA, 79 bp, Homo sapiens
aactgtagaagggaatctgggacacagatgtcctactactacttatctcagagcccaccataccatgctgctccatttc

SEQ ID NO: 162758 - DNA, 81 bp, Homo sapiens
tagaagggaatctgggacacagatgtcctactactacttatctcagagcccaccataccatgctgctccatttccatcctc

SEQ ID NO: 162759 - DNA, 85 bp, Homo sapiens
gacacagatgtcctactactacttatctcagagcccaccataccatgctgctccatttccatcctctgctgcaaagctctttgtc

SEQ ID NO: 162760 - DNA, 84 bp, Homo sapiens
gagcccaccataccatgctgctccatttccatcctctgctgcaaagctctttgtctatctacctcctgcatgagttggatccgt

SEQ ID NO: 162761 - DNA, 84 bp, Homo sapiens
ataccatgctgctccatttccatcctctgctgcaaagctctttgtctatctacctcctgcatgagttggatccgttgtctctct

SEQ ID NO: 162762 - DNA, 83 bp, Homo sapiens
ctccatttccatcctctgctgcaaagctctttgtctatctacctcctgcatgagttggatccgttgtctctcttgctgttctc

SEQ ID NO: 162763 - DNA, 82 bp, Homo sapiens
ttccatcctctgctgcaaagctctttgtctatctacctcctgcatgagttggatccgttgtctctcttgctgttctcgtaaa

SEQ ID NO: 162764 - DNA, 78 bp, Homo sapiens
tgcaaagctctttgtctatctacctcctgcatgagttggatccgttgtctctcttgctgttctcgtaaacgttcctta

SEQ ID NO: 162765 - DNA, 75 bp, Homo sapiens
tctttgtctatctacctcctgcatgagttggatccgttgtctctcttgctgttctcgtaaacgttccttacgttc

SEQ ID NO: 162766 - DNA, 73 bp, Homo sapiens
tacctcctgcatgagttggatccgttgtctctcttgctgttctcgtaaacgttccttacgttcccgttcttga

SEQ ID NO: 162767 - DNA, 68 bp, Homo sapiens
atgagttggatccgttgtctctcttgctgttctcgtaaacgttccttacgttcccgttcttgaaaact

SEQ ID NO: 162768 - DNA, 67 bp, Homo sapiens
atccgttgtctctcttgctgttctcgtaaacgttccttacgttcccgttcttgaaaactttcactaa

SEQ ID NO: 162769 - DNA, 66 bp, Homo sapiens
ttctcgtaaacgttccttacgttcccgttcttgaaaactttcactaaagggattgttgtcatcaaa

SEQ ID NO: 162770 - DNA, 65 bp, Homo sapiens
aaacgttccttacgttcccgttcttgaaaactttcactaaagggattgttgtcatcaaattctac

SEQ ID NO: 162771 - DNA, 67 bp, Homo sapiens
tacgttcccgttcttgaaaactttcactaaagggattgttgtcatcaaattctacccgaggtggtgg

SEQ ID NO: 162772 - DNA, 70 bp, Homo sapiens
cttgaaaactttcactaaagggattgttgtcatcaaattctacccgaggtggtggtccactctgtggatt

SEQ ID NO: 162773 - DNA, 74 bp, Homo sapiens
agggattgttgtcatcaaattctacccgaggtggtggtccactctgtggatttgcatttgagactgtccctggg

SEQ ID NO: 162774 - DNA, 74 bp, Homo sapiens
tcaaattctacccgaggtggtggtccactctgtggatttgcatttgagactgtccctggggctggtgtacaagt

SEQ ID NO: 162775 - DNA, 73 bp, Homo sapiens
tctacccgaggtggtggtccactctgtggatttgcatttgagactgtccctggggctggtgtacaagttttta

SEQ ID NO: 162776 - DNA, 74 bp, Homo sapiens
tggtccactctgtggatttgcatttgagactgtccctggggctggtgtacaagtttttattggtaactgggcaa

SEQ ID NO: 162777 - DNA, 72 bp, Homo sapiens
actctgtggatttgcatttgagactgtccctggggctggtgtacaagtttttattggtaactgggcaattgg

SEQ ID NO: 162778 - DNA, 70 bp, Homo sapiens
atttgagactgtccctggggctggtgtacaagtttttattggtaactgggcaattgggggctgaattcta

SEQ ID NO: 162779 - DNA, 70 bp, Homo sapiens
gtccctggggctggtgtacaagtttttattggtaactgggcaattgggggctgaattctaggaggattga

SEQ ID NO: 162780 - DNA, 70 bp, Homo sapiens
ctggtgtacaagtttttattggtaactgggcaattgggggctgaattctaggaggattgaggggcaggtg

SEQ ID NO: 162781 - DNA, 70 bp, Homo sapiens
gtacaagtttttattggtaactgggcaattgggggctgaattctaggaggattgaggggcaggtgggcag

SEQ ID NO: 162782 - DNA, 73 bp, Homo sapiens
tattggtaactgggcaattgggggctgaattctaggaggattgaggggcaggtgggcaggagcactgttgggt

SEQ ID NO: 162783 - DNA, 74 bp, Homo sapiens
caattgggggctgaattctaggaggattgaggggcaggtgggcaggagcactgttgggttgccatccaggtaaa

SEQ ID NO: 162784 - DNA, 76 bp, Homo sapiens
ctgaattctaggaggattgaggggcaggtgggcaggagcactgttgggttgccatccaggtaaactgggcattcta

SEQ ID NO: 162785 - DNA, 75 bp, Homo sapiens
ttctaggaggattgaggggcaggtgggcaggagcactgttgggttgccatccaggtaaactgggcattctaacag

SEQ ID NO: 162786 - DNA, 75 bp, Homo sapiens
attgaggggcaggtgggcaggagcactgttgggttgccatccaggtaaactgggcattctaacagggctagtatg

SEQ ID NO: 162787 - DNA, 75 bp, Homo sapiens
ggcaggagcactgttgggttgccatccaggtaaactgggcattctaacagggctagtatggccagaaataactgt

SEQ ID NO: 162788 - DNA, 76 bp, Homo sapiens
agcactgttgggttgccatccaggtaaactgggcattctaacagggctagtatggccagaaataactgttgtgtgc

SEQ ID NO: 162789 - DNA, 79 bp, Homo sapiens
ggttgccatccaggtaaactgggcattctaacagggctagtatggccagaaataactgttgtgtgctgctggtgctgaa

SEQ ID NO: 162790 - DNA, 81 bp, Homo sapiens
attctaacagggctagtatggccagaaataactgttgtgtgctgctggtgctgaagctgctgtggcaccatgggaaaggtg

SEQ ID NO: 162791 - DNA, 79 bp, Homo sapiens
aacagggctagtatggccagaaataactgttgtgtgctgctggtgctgaagctgctgtggcaccatgggaaaggtgggt

SEQ ID NO: 162792 - DNA, 82 bp, Homo sapiens
gtatggccagaaataactgttgtgtgctgctggtgctgaagctgctgtggcaccatgggaaaggtgggttggctcatggtgg

SEQ ID NO: 162793 - DNA, 80 bp, Homo sapiens
aaataactgttgtgtgctgctggtgctgaagctgctgtggcaccatgggaaaggtgggttggctcatggtgggtggagtg

SEQ ID NO: 162794 - DNA, 83 bp, Homo sapiens
tgtgtgctgctggtgctgaagctgctgtggcaccatgggaaaggtgggttggctcatggtgggtggagtggcacctggaatta

SEQ ID NO: 162795 - DNA, 77 bp, Homo sapiens
gtgctgaagctgctgtggcaccatgggaaaggtgggttggctcatggtgggtggagtggcacctggaattaggggtg

SEQ ID NO: 162796 - DNA, 74 bp, Homo sapiens
ctgctgtggcaccatgggaaaggtgggttggctcatggtgggtggagtggcacctggaattaggggtggctggg

SEQ ID NO: 162797 - DNA, 72 bp, Homo sapiens
accatgggaaaggtgggttggctcatggtgggtggagtggcacctggaattaggggtggctggggctggaca

SEQ ID NO: 162798 - DNA, 75 bp, Homo sapiens
aaggtgggttggctcatggtgggtggagtggcacctggaattaggggtggctggggctggacactgggcatcatg

SEQ ID NO: 162799 - DNA, 78 bp, Homo sapiens
ggtggagtggcacctggaattaggggtggctggggctggacactgggcatcatggtaggtggggccattgcacattgc

SEQ ID NO: 162800 - DNA, 80 bp, Homo sapiens
acctggaattaggggtggctggggctggacactgggcatcatggtaggtggggccattgcacattgctgctgctgtttga

SEQ ID NO: 162801 - DNA, 85 bp, Homo sapiens
ggtggctggggctggacactgggcatcatggtaggtggggccattgcacattgctgctgctgtttgatccgataatcttcaatca

SEQ ID NO: 162802 - DNA, 88 bp, Homo sapiens
gctggacactgggcatcatggtaggtggggccattgcacattgctgctgctgtttgatccgataatcttcaatcaattcagcatgttc

SEQ ID NO: 162803 - DNA, 86 bp, Homo sapiens
tgggcatcatggtaggtggggccattgcacattgctgctgctgtttgatccgataatcttcaatcaattcagcatgttctttctgt

SEQ ID NO: 162804 - DNA, 82 bp, Homo sapiens
atggtaggtggggccattgcacattgctgctgctgtttgatccgataatcttcaatcaattcagcatgttctttctgttgtt

SEQ ID NO: 162805 - DNA, 84 bp, Homo sapiens
ccattgcacattgctgctgctgtttgatccgataatcttcaatcaattcagcatgttctttctgttgtttacgaatctggaata

SEQ ID NO: 162806 - DNA, 80 bp, Homo sapiens
ttgctgctgctgtttgatccgataatcttcaatcaattcagcatgttctttctgttgtttacgaatctggaataacaaaa

SEQ ID NO: 162807 - DNA, 81 bp, Homo sapiens
tgctgtttgatccgataatcttcaatcaattcagcatgttctttctgttgtttacgaatctggaataacaaaatgcatcat

SEQ ID NO: 162808 - DNA, 80 bp, Homo sapiens
gatccgataatcttcaatcaattcagcatgttctttctgttgtttacgaatctggaataacaaaatgcatcattactcat

SEQ ID NO: 162809 - DNA, 73 bp, Homo sapiens
tactcattaattgttggtagtttctattttgcaaacctatttattacctgttctagctgtttctgaaccatgc

SEQ ID NO: 162810 - DNA, 74 bp, Homo sapiens
ttgttggtagtttctattttgcaaacctatttattacctgttctagctgtttctgaaccatgctttgctgttca

SEQ ID NO: 162811 - DNA, 77 bp, Homo sapiens
tttctattttgcaaacctatttattacctgttctagctgtttctgaaccatgctttgctgttcagtaacatgcttga

SEQ ID NO: 162812 - DNA, 76 bp, Homo sapiens
ttttgcaaacctatttattacctgttctagctgtttctgaaccatgctttgctgttcagtaacatgcttgagttgt

SEQ ID NO: 162813 - DNA, 80 bp, Homo sapiens
ctatttattacctgttctagctgtttctgaaccatgctttgctgttcagtaacatgcttgagttgttctgcatcttcctc

SEQ ID NO: 162814 - DNA, 80 bp, Homo sapiens
tttctgaaccatgctttgctgttcagtaacatgcttgagttgttctgcatcttcctctggaaattcacgcccagctttct

SEQ ID NO: 162815 - DNA, 81 bp, Homo sapiens
accatgctttgctgttcagtaacatgcttgagttgttctgcatcttcctctggaaattcacgcccagctttcttggcagta

SEQ ID NO: 162816 - DNA, 78 bp, Homo sapiens
tgttcagtaacatgcttgagttgttctgcatcttcctctggaaattcacgcccagctttcttggcagtacgttgttta

SEQ ID NO: 162817 - DNA, 77 bp, Homo sapiens
aacatgcttgagttgttctgcatcttcctctggaaattcacgcccagctttcttggcagtacgttgtttagctgaaa

SEQ ID NO: 162818 - DNA, 75 bp, Homo sapiens
ttctgcatcttcctctggaaattcacgcccagctttcttggcagtacgttgtttagctgaaagggccttcttaga

SEQ ID NO: 162819 - DNA, 71 bp, Homo sapiens
ttcctctggaaattcacgcccagctttcttggcagtacgttgtttagctgaaagggccttcttagattttc

SEQ ID NO: 162820 - DNA, 73 bp, Homo sapiens
aaattcacgcccagctttcttggcagtacgttgtttagctgaaagggccttcttagattttctgtgagcacca

SEQ ID NO: 162821 - DNA, 73 bp, Homo sapiens
agctttcttggcagtacgttgtttagctgaaagggccttcttagattttctgtgagcaccaatttgttcttca

SEQ ID NO: 162822 - DNA, 73 bp, Homo sapiens
ttggcagtacgttgtttagctgaaagggccttcttagattttctgtgagcaccaatttgttcttcaagatact

SEQ ID NO: 162823 - DNA, 77 bp, Homo sapiens
ttgtttagctgaaagggccttcttagattttctgtgagcaccaatttgttcttcaagatacttctgctgcatttgaa

SEQ ID NO: 162824 - DNA, 77 bp, Homo sapiens
aaagggccttcttagattttctgtgagcaccaatttgttcttcaagatacttctgctgcatttgaagcagctgttgg

SEQ ID NO: 162825 - DNA, 80 bp, Homo sapiens
cttcttagattttctgtgagcaccaatttgttcttcaagatacttctgctgcatttgaagcagctgttgggtctcctgga

SEQ ID NO: 162826 - DNA, 80 bp, Homo sapiens
accaatttgttcttcaagatacttctgctgcatttgaagcagctgttgggtctcctggagccactcttcatactgcttac

SEQ ID NO: 162827 - DNA, 87 bp, Homo sapiens
ttcttcaagatacttctgctgcatttgaagcagctgttgggtctcctggagccactcttcatactgcttacgctgtgaatcatctga

SEQ ID NO: 162828 - DNA, 84 bp, Homo sapiens
ttctgctgcatttgaagcagctgttgggtctcctggagccactcttcatactgcttacgctgtgaatcatctgaggaaaaatta

SEQ ID NO: 162829 - DNA, 78 bp, Homo sapiens
atttgaagcagctgttgggtctcctggagccactcttcatactgcttacgctgtgaatcatctgaggaaaaattaaaa

SEQ ID NO: 162830 - DNA, 77 bp, Homo sapiens
tgttgggtctcctggagccactcttcatactgcttacgctgtgaatcatctgaggaaaaattaaaattcagttgtgt

SEQ ID NO: 162831 - DNA, 76 bp, Homo sapiens
tctcctggagccactcttcatactgcttacgctgtgaatcatctgaggaaaaattaaaattcagttgtgttaattt

SEQ ID NO: 162832 - DNA, 78 bp, Homo sapiens
tagaacagcacacatagagtgcagacaagcaatccccagaaaacattaacttattagatttatacttactgacaaagc

SEQ ID NO: 162833 - DNA, 74 bp, Homo sapiens
atagagtgcagacaagcaatccccagaaaacattaacttattagatttatacttactgacaaagcctggaccaa

SEQ ID NO: 162834 - DNA, 71 bp, Homo sapiens
gcagacaagcaatccccagaaaacattaacttattagatttatacttactgacaaagcctggaccaaaatt

SEQ ID NO: 162835 - DNA, 69 bp, Homo sapiens
ccagaaaacattaacttattagatttatacttactgacaaagcctggaccaaaatttggaggattaggc

SEQ ID NO: 162836 - DNA, 70 bp, Homo sapiens
cattaacttattagatttatacttactgacaaagcctggaccaaaatttggaggattaggcctagaaatc

SEQ ID NO: 162837 - DNA, 73 bp, Homo sapiens
ttagatttatacttactgacaaagcctggaccaaaatttggaggattaggcctagaaatctgatgtgttatac

SEQ ID NO: 162838 - DNA, 74 bp, Homo sapiens
ttactgacaaagcctggaccaaaatttggaggattaggcctagaaatctgatgtgttatactgccatcctaaaa

SEQ ID NO: 162839 - DNA, 72 bp, Homo sapiens
aaagcctggaccaaaatttggaggattaggcctagaaatctgatgtgttatactgccatcctaaaataagta

SEQ ID NO: 162840 - DNA, 70 bp, Homo sapiens
ggaccaaaatttggaggattaggcctagaaatctgatgtgttatactgccatcctaaaataagtaaaatt

SEQ ID NO: 162841 - DNA, 72 bp, Homo sapiens
ttggaggattaggcctagaaatctgatgtgttatactgccatcctaaaataagtaaaatttacaaatatgtt

SEQ ID NO: 162842 - DNA, 72 bp, Homo sapiens
aggcctagaaatctgatgtgttatactgccatcctaaaataagtaaaatttacaaatatgtttattccacat

SEQ ID NO: 162843 - DNA, 72 bp, Homo sapiens
tctgatgtgttatactgccatcctaaaataagtaaaatttacaaatatgtttattccacatttcagttaaag

SEQ ID NO: 162844 - DNA, 77 bp, Homo sapiens
atgagtttgctgggaaacagaaaagcgtgcattctagagggactcattacaggcagtgttacctgaggaatggcctg

SEQ ID NO: 162845 - DNA, 74 bp, Homo sapiens
aaacagaaaagcgtgcattctagagggactcattacaggcagtgttacctgaggaatggcctgtggtccaaggt

SEQ ID NO: 162846 - DNA, 75 bp, Homo sapiens
aaaagcgtgcattctagagggactcattacaggcagtgttacctgaggaatggcctgtggtccaaggttctgtcc

SEQ ID NO: 162847 - DNA, 75 bp, Homo sapiens
attctagagggactcattacaggcagtgttacctgaggaatggcctgtggtccaaggttctgtccttcactgttc

SEQ ID NO: 162848 - DNA, 74 bp, Homo sapiens
attacaggcagtgttacctgaggaatggcctgtggtccaaggttctgtccttcactgttctgtgttccagttac

SEQ ID NO: 162849 - DNA, 73 bp, Homo sapiens
agtgttacctgaggaatggcctgtggtccaaggttctgtccttcactgttctgtgttccagttaccacctggc

SEQ ID NO: 162850 - DNA, 71 bp, Homo sapiens
aggaatggcctgtggtccaaggttctgtccttcactgttctgtgttccagttaccacctggcccataaaag

SEQ ID NO: 162851 - DNA, 72 bp, Homo sapiens
tgtggtccaaggttctgtccttcactgttctgtgttccagttaccacctggcccataaaagggaacctgtca

SEQ ID NO: 162852 - DNA, 69 bp, Homo sapiens
aaggttctgtccttcactgttctgtgttccagttaccacctggcccataaaagggaacctgtcaaaaca

SEQ ID NO: 162853 - DNA, 70 bp, Homo sapiens
ttcactgttctgtgttccagttaccacctggcccataaaagggaacctgtcaaaacagggtacacaagta

SEQ ID NO: 162854 - DNA, 71 bp, Homo sapiens
ttctgtgttccagttaccacctggcccataaaagggaacctgtcaaaacagggtacacaagtatcaagtga

SEQ ID NO: 162855 - DNA, 71 bp, Homo sapiens
ttaccacctggcccataaaagggaacctgtcaaaacagggtacacaagtatcaagtgatgagcgtttagaa

SEQ ID NO: 162856 - DNA, 82 bp, Homo sapiens
atgaatgtctagatgcccagtagaaacaagcagccactccacctacctgctcatcaccattggtggcatgcccagattgttt

SEQ ID NO: 162857 - DNA, 85 bp, Homo sapiens
tctagatgcccagtagaaacaagcagccactccacctacctgctcatcaccattggtggcatgcccagattgttttgtgccatca

SEQ ID NO: 162858 - DNA, 81 bp, Homo sapiens
tagaaacaagcagccactccacctacctgctcatcaccattggtggcatgcccagattgttttgtgccatcactttattta

SEQ ID NO: 162859 - DNA, 79 bp, Homo sapiens
cagccactccacctacctgctcatcaccattggtggcatgcccagattgttttgtgccatcactttatttataccttta

SEQ ID NO: 162860 - DNA, 76 bp, Homo sapiens
actccacctacctgctcatcaccattggtggcatgcccagattgttttgtgccatcactttatttatacctttaag

SEQ ID NO: 162861 - DNA, 75 bp, Homo sapiens
ctcatcaccattggtggcatgcccagattgttttgtgccatcactttatttatacctttaagggccaccattttg

SEQ ID NO: 162862 - DNA, 73 bp, Homo sapiens
attggtggcatgcccagattgttttgtgccatcactttatttatacctttaagggccaccattttggctttca

SEQ ID NO: 162863 - DNA, 72 bp, Homo sapiens
atgcccagattgttttgtgccatcactttatttatacctttaagggccaccattttggctttcattatagga

SEQ ID NO: 162864 - DNA, 75 bp, Homo sapiens
tttgtgccatcactttatttatacctttaagggccaccattttggctttcattataggatctgtaattgcatcaa

SEQ ID NO: 162865 - DNA, 74 bp, Homo sapiens
gccatcactttatttatacctttaagggccaccattttggctttcattataggatctgtaattgcatcaaaatc

SEQ ID NO: 162866 - DNA, 72 bp, Homo sapiens
atttatacctttaagggccaccattttggctttcattataggatctgtaattgcatcaaaatctagaaaaga

SEQ ID NO: 162867 - DNA, 72 bp, Homo sapiens
agggccaccattttggctttcattataggatctgtaattgcatcaaaatctagaaaagaaatataaagttac

SEQ ID NO: 162868 - DNA, 73 bp, Homo sapiens
ccattttggctttcattataggatctgtaattgcatcaaaatctagaaaagaaatataaagttacttatttca

SEQ ID NO: 162869 - DNA, 72 bp, Homo sapiens
atagtaatatacgttgagactcaagaaaactcctaccaatattagggaagaacggttctgatcgctgacgaa

SEQ ID NO: 162870 - DNA, 74 bp, Homo sapiens
aatatacgttgagactcaagaaaactcctaccaatattagggaagaacggttctgatcgctgacgaatcatggc

SEQ ID NO: 162871 - DNA, 76 bp, Homo sapiens
agactcaagaaaactcctaccaatattagggaagaacggttctgatcgctgacgaatcatggcttgcatctgtctt

SEQ ID NO: 162872 - DNA, 79 bp, Homo sapiens
aaaactcctaccaatattagggaagaacggttctgatcgctgacgaatcatggcttgcatctgtctttgctgctgctgt

SEQ ID NO: 162873 - DNA, 82 bp, Homo sapiens
aatattagggaagaacggttctgatcgctgacgaatcatggcttgcatctgtctttgctgctgctgttcttgcctttcttga

SEQ ID NO: 162874 - DNA, 83 bp, Homo sapiens
aagaacggttctgatcgctgacgaatcatggcttgcatctgtctttgctgctgctgttcttgcctttcttgatccaaaagatc

SEQ ID NO: 162875 - DNA, 86 bp, Homo sapiens
ttctgatcgctgacgaatcatggcttgcatctgtctttgctgctgctgttcttgcctttcttgatccaaaagatcctgtagaagta

SEQ ID NO: 162876 - DNA, 82 bp, Homo sapiens
aatcatggcttgcatctgtctttgctgctgctgttcttgcctttcttgatccaaaagatcctgtagaagtagaggctgttct

SEQ ID NO: 162877 - DNA, 82 bp, Homo sapiens
tgcatctgtctttgctgctgctgttcttgcctttcttgatccaaaagatcctgtagaagtagaggctgttcttctagaagaa

SEQ ID NO: 162878 - DNA, 76 bp, Homo sapiens
ctttgctgctgctgttcttgcctttcttgatccaaaagatcctgtagaagtagaggctgttcttctagaagaaggg

SEQ ID NO: 162879 - DNA, 74 bp, Homo sapiens
ctgttcttgcctttcttgatccaaaagatcctgtagaagtagaggctgttcttctagaagaaggggcctctctc

SEQ ID NO: 162880 - DNA, 74 bp, Homo sapiens
cttgcctttcttgatccaaaagatcctgtagaagtagaggctgttcttctagaagaaggggcctctctctattc

SEQ ID NO: 162881 - DNA, 76 bp, Homo sapiens
atccaaaagatcctgtagaagtagaggctgttcttctagaagaaggggcctctctctattctgctgtgctaatgtt

SEQ ID NO: 162882 - DNA, 79 bp, Homo sapiens
tcctgtagaagtagaggctgttcttctagaagaaggggcctctctctattctgctgtgctaatgtttgaggaatcatta

SEQ ID NO: 162883 - DNA, 79 bp, Homo sapiens
tgttcttctagaagaaggggcctctctctattctgctgtgctaatgtttgaggaatcattagctgttggggtccagaca

SEQ ID NO: 162884 - DNA, 79 bp, Homo sapiens
aagaaggggcctctctctattctgctgtgctaatgtttgaggaatcattagctgttggggtccagacatgctactggta

SEQ ID NO: 162885 - DNA, 81 bp, Homo sapiens
tctctattctgctgtgctaatgtttgaggaatcattagctgttggggtccagacatgctactggtaccagactgacttgtt

SEQ ID NO: 162886 - DNA, 80 bp, Homo sapiens
attctgctgtgctaatgtttgaggaatcattagctgttggggtccagacatgctactggtaccagactgacttgtttgag

SEQ ID NO: 162887 - DNA, 76 bp, Homo sapiens
taatgtttgaggaatcattagctgttggggtccagacatgctactggtaccagactgacttgtttgaggcccagtt

SEQ ID NO: 162888 - DNA, 76 bp, Homo sapiens
atcattagctgttggggtccagacatgctactggtaccagactgacttgtttgaggcccagtttgagttgcaggtt

SEQ ID NO: 162889 - DNA, 75 bp, Homo sapiens
tagctgttggggtccagacatgctactggtaccagactgacttgtttgaggcccagtttgagttgcaggttttcc

SEQ ID NO: 162890 - DNA, 72 bp, Homo sapiens
tactggtaccagactgacttgtttgaggcccagtttgagttgcaggttttcctgtccccagactgtggttaa

SEQ ID NO: 162891 - DNA, 73 bp, Homo sapiens
agactgacttgtttgaggcccagtttgagttgcaggttttcctgtccccagactgtggttaactgttgattga

SEQ ID NO: 162892 - DNA, 72 bp, Homo sapiens
ttgtttgaggcccagtttgagttgcaggttttcctgtccccagactgtggttaactgttgattgacctggaa

SEQ ID NO: 162893 - DNA, 71 bp, Homo sapiens
agtttgagttgcaggttttcctgtccccagactgtggttaactgttgattgacctggaatgagccctgggt

SEQ ID NO: 162894 - DNA, 70 bp, Homo sapiens
agttgcaggttttcctgtccccagactgtggttaactgttgattgacctggaatgagccctgggtttacc

SEQ ID NO: 162895 - DNA, 73 bp, Homo sapiens
tgtccccagactgtggttaactgttgattgacctggaatgagccctgggtttacctgcacaccctgagaaaaa

SEQ ID NO: 162896 - DNA, 71 bp, Homo sapiens
actgtggttaactgttgattgacctggaatgagccctgggtttacctgcacaccctgagaaaaaacatggt

SEQ ID NO: 162897 - DNA, 71 bp, Homo sapiens
taactgttgattgacctggaatgagccctgggtttacctgcacaccctgagaaaaaacatggtttacccta

SEQ ID NO: 162898 - DNA, 76 bp, Homo sapiens
ttacctgcacaccctgagaaaaaacatggtttaccctagagactactgtcacattagaattcatggcattatccaa

SEQ ID NO: 162899 - DNA, 72 bp, Homo sapiens
accctgagaaaaaacatggtttaccctagagactactgtcacattagaattcatggcattatccaaaacacg

SEQ ID NO: 162900 - DNA, 76 bp, Homo sapiens
atggtttaccctagagactactgtcacattagaattcatggcattatccaaaacacggccaggcggtgctatgaaa

SEQ ID NO: 162901 - DNA, 77 bp, Homo sapiens
ctagagactactgtcacattagaattcatggcattatccaaaacacggccaggcggtgctatgaaaggaggcaaact

SEQ ID NO: 162902 - DNA, 79 bp, Homo sapiens
acattagaattcatggcattatccaaaacacggccaggcggtgctatgaaaggaggcaaacttgacacatgattggatg

SEQ ID NO: 162903 - DNA, 78 bp, Homo sapiens
agaattcatggcattatccaaaacacggccaggcggtgctatgaaaggaggcaaacttgacacatgattggatgggga

SEQ ID NO: 162904 - DNA, 76 bp, Homo sapiens
attatccaaaacacggccaggcggtgctatgaaaggaggcaaacttgacacatgattggatggggaggccggcaga

SEQ ID NO: 162905 - DNA, 75 bp, Homo sapiens
aaacacggccaggcggtgctatgaaaggaggcaaacttgacacatgattggatggggaggccggcagagttggtg

SEQ ID NO: 162906 - DNA, 76 bp, Homo sapiens
aggcggtgctatgaaaggaggcaaacttgacacatgattggatggggaggccggcagagttggtggtggtggagac

SEQ ID NO: 162907 - DNA, 74 bp, Homo sapiens
aggaggcaaacttgacacatgattggatggggaggccggcagagttggtggtggtggagaccccgatggcctaa

SEQ ID NO: 162908 - DNA, 76 bp, Homo sapiens
acatgattggatggggaggccggcagagttggtggtggtggagaccccgatggcctaatgtctgaattatcagatt

SEQ ID NO: 162909 - DNA, 76 bp, Homo sapiens
agagttggtggtggtggagaccccgatggcctaatgtctgaattatcagatttctcattagcaagtaaacttgaga

SEQ ID NO: 162910 - DNA, 76 bp, Homo sapiens
gtggtggagaccccgatggcctaatgtctgaattatcagatttctcattagcaagtaaacttgagagaactggagt

SEQ ID NO: 162911 - DNA, 77 bp, Homo sapiens
ccccgatggcctaatgtctgaattatcagatttctcattagcaagtaaacttgagagaactggagttgatccagtta

SEQ ID NO: 162912 - DNA, 79 bp, Homo sapiens
ctaatgtctgaattatcagatttctcattagcaagtaaacttgagagaactggagttgatccagttatgccacaagagt

SEQ ID NO: 162913 - DNA, 78 bp, Homo sapiens
atttctcattagcaagtaaacttgagagaactggagttgatccagttatgccacaagagtttattacatcttgagcag

SEQ ID NO: 162914 - DNA, 76 bp, Homo sapiens
attagcaagtaaacttgagagaactggagttgatccagttatgccacaagagtttattacatcttgagcaggtagt

SEQ ID NO: 162915 - DNA, 79 bp, Homo sapiens
taaacttgagagaactggagttgatccagttatgccacaagagtttattacatcttgagcaggtagttgagtggatgcc

SEQ ID NO: 162916 - DNA, 80 bp, Homo sapiens
agaactggagttgatccagttatgccacaagagtttattacatcttgagcaggtagttgagtggatgcctgaatgacatt

SEQ ID NO: 162917 - DNA, 83 bp, Homo sapiens
ttgatccagttatgccacaagagtttattacatcttgagcaggtagttgagtggatgcctgaatgacatttgcactggggcca

SEQ ID NO: 162918 - DNA, 81 bp, Homo sapiens
cacaagagtttattacatcttgagcaggtagttgagtggatgcctgaatgacatttgcactggggccagcagtttctcgat

SEQ ID NO: 162919 - DNA, 80 bp, Homo sapiens
tattacatcttgagcaggtagttgagtggatgcctgaatgacatttgcactggggccagcagtttctcgattggttcttt

SEQ ID NO: 162920 - DNA, 80 bp, Homo sapiens
ttgagcaggtagttgagtggatgcctgaatgacatttgcactggggccagcagtttctcgattggttcttttctcaaata

SEQ ID NO: 162921 - DNA, 82 bp, Homo sapiens
tagttgagtggatgcctgaatgacatttgcactggggccagcagtttctcgattggttcttttctcaaatagatctggatca

SEQ ID NO: 162922 - DNA, 82 bp, Homo sapiens
atgcctgaatgacatttgcactggggccagcagtttctcgattggttcttttctcaaatagatctggatcacaaggatgcaa

SEQ ID NO: 162923 - DNA, 79 bp, Homo sapiens
aatgacatttgcactggggccagcagtttctcgattggttcttttctcaaatagatctggatcacaaggatgcaaagaa

SEQ ID NO: 162924 - DNA, 75 bp, Homo sapiens
actggggccagcagtttctcgattggttcttttctcaaatagatctggatcacaaggatgcaaagaagtcttttc

SEQ ID NO: 162925 - DNA, 75 bp, Homo sapiens
agtttctcgattggttcttttctcaaatagatctggatcacaaggatgcaaagaagtcttttctccatcatttag

SEQ ID NO: 162926 - DNA, 79 bp, Homo sapiens
tcgattggttcttttctcaaatagatctggatcacaaggatgcaaagaagtcttttctccatcatttaggtctgagtga

SEQ ID NO: 162927 - DNA, 82 bp, Homo sapiens
aatagatctggatcacaaggatgcaaagaagtcttttctccatcatttaggtctgagtgagcagaagcctgtgagcaaggag

SEQ ID NO: 162928 - DNA, 81 bp, Homo sapiens
caaggatgcaaagaagtcttttctccatcatttaggtctgagtgagcagaagcctgtgagcaaggagtgtcaacattatct

SEQ ID NO: 162929 - DNA, 79 bp, Homo sapiens
atcatttaggtctgagtgagcagaagcctgtgagcaaggagtgtcaacattatctttattctcatcatttttttcagtt

SEQ ID NO: 162930 - DNA, 75 bp, Homo sapiens
gtgagcaaggagtgtcaacattatctttattctcatcatttttttcagtttcacatttggattccaccttagaat

SEQ ID NO: 162931 - DNA, 74 bp, Homo sapiens
gtgtcaacattatctttattctcatcatttttttcagtttcacatttggattccaccttagaatttggagacag

SEQ ID NO: 162932 - DNA, 70 bp, Homo sapiens
ctttattctcatcatttttttcagtttcacatttggattccaccttagaatttggagacagtacttccgt

SEQ ID NO: 162933 - DNA, 69 bp, Homo sapiens
tcatttttttcagtttcacatttggattccaccttagaatttggagacagtacttccgtttttacctca

SEQ ID NO: 162934 - DNA, 67 bp, Homo sapiens
atttggattccaccttagaatttggagacagtacttccgtttttacctcattggtaacagtggattt

SEQ ID NO: 162935 - DNA, 67 bp, Homo sapiens
attccaccttagaatttggagacagtacttccgtttttacctcattggtaacagtggattttttctg

SEQ ID NO: 162936 - DNA, 70 bp, Homo sapiens
atttggagacagtacttccgtttttacctcattggtaacagtggattttttctgtggtgaatgtttatca

SEQ ID NO: 162937 - DNA, 70 bp, Homo sapiens
acagtacttccgtttttacctcattggtaacagtggattttttctgtggtgaatgtttatcagagagaac

SEQ ID NO: 162938 - DNA, 70 bp, Homo sapiens
gtttttacctcattggtaacagtggattttttctgtggtgaatgtttatcagagagaaccagagttttgt

SEQ ID NO: 162939 - DNA, 70 bp, Homo sapiens
attggtaacagtggattttttctgtggtgaatgtttatcagagagaaccagagttttgttttcttgttcc

SEQ ID NO: 162940 - DNA, 68 bp, Homo sapiens
acagtggattttttctgtggtgaatgtttatcagagagaaccagagttttgttttcttgttccttttt

SEQ ID NO: 162941 - DNA, 69 bp, Homo sapiens
ctgtggtgaatgtttatcagagagaaccagagttttgttttcttgttcctttttttttggttcaacaga

SEQ ID NO: 162942 - DNA, 69 bp, Homo sapiens
gtttatcagagagaaccagagttttgttttcttgttcctttttttttggttcaacagatacacactgat

SEQ ID NO: 162943 - DNA, 69 bp, Homo sapiens
gagagaaccagagttttgttttcttgttcctttttttttggttcaacagatacacactgattatctaac

SEQ ID NO: 162944 - DNA, 71 bp, Homo sapiens
ccagagttttgttttcttgttcctttttttttggttcaacagatacacactgattatctaacttatcatca

SEQ ID NO: 162945 - DNA, 71 bp, Homo sapiens
cttgttcctttttttttggttcaacagatacacactgattatctaacttatcatcaattggaaggtctagt

SEQ ID NO: 162946 - DNA, 77 bp, Homo sapiens
ttggttcaacagatacacactgattatctaacttatcatcaattggaaggtctagttcctcattaaacatgcttttc

SEQ ID NO: 162947 - DNA, 79 bp, Homo sapiens
aattggaaggtctagttcctcattaaacatgcttttcttatctcccatgtcaagttctggatctgtatatgcaatgata

SEQ ID NO: 162948 - DNA, 83 bp, Homo sapiens
tctagttcctcattaaacatgcttttcttatctcccatgtcaagttctggatctgtatatgcaatgatatcaaactctcctga

SEQ ID NO: 162949 - DNA, 80 bp, Homo sapiens
attaaacatgcttttcttatctcccatgtcaagttctggatctgtatatgcaatgatatcaaactctcctgaccttaaga

SEQ ID NO: 162950 - DNA, 80 bp, Homo sapiens
tttcttatctcccatgtcaagttctggatctgtatatgcaatgatatcaaactctcctgaccttaagaggtcatccaggt

SEQ ID NO: 162951 - DNA, 81 bp, Homo sapiens
catgtcaagttctggatctgtatatgcaatgatatcaaactctcctgaccttaagaggtcatccaggttgggatcattagt

SEQ ID NO: 162952 - DNA, 78 bp, Homo sapiens
aagttctggatctgtatatgcaatgatatcaaactctcctgaccttaagaggtcatccaggttgggatcattagtttc

SEQ ID NO: 162953 - DNA, 77 bp, Homo sapiens
tatatgcaatgatatcaaactctcctgaccttaagaggtcatccaggttgggatcattagtttccaaattatctaaa

SEQ ID NO: 162954 - DNA, 73 bp, Homo sapiens
aatgatatcaaactctcctgaccttaagaggtcatccaggttgggatcattagtttccaaattatctaaagta

SEQ ID NO: 162955 - DNA, 70 bp, Homo sapiens
aaactctcctgaccttaagaggtcatccaggttgggatcattagtttccaaattatctaaagtatccaat

SEQ ID NO: 162956 - DNA, 69 bp, Homo sapiens
accttaagaggtcatccaggttgggatcattagtttccaaattatctaaagtatccaattcaactacct

SEQ ID NO: 162957 - DNA, 70 bp, Homo sapiens
agtttccaaattatctaaagtatccaattcaactaccttgccatcctctgtatctaaatttaagttttca

SEQ ID NO: 162958 - DNA, 75 bp, Homo sapiens
attatctaaagtatccaattcaactaccttgccatcctctgtatctaaatttaagttttcaagatcttcatcatc

SEQ ID NO: 162959 - DNA, 75 bp, Homo sapiens
atccaattcaactaccttgccatcctctgtatctaaatttaagttttcaagatcttcatcatctaagtctttgac

SEQ ID NO: 162960 - DNA, 75 bp, Homo sapiens
tcaactaccttgccatcctctgtatctaaatttaagttttcaagatcttcatcatctaagtctttgacttcaacc

SEQ ID NO: 162961 - DNA, 72 bp, Homo sapiens
aagatcttcatcatctaagtctttgacttcaaccccctcaaggtctttaacatccagttccttcacagaagg

SEQ ID NO: 162962 - DNA, 73 bp, Homo sapiens
atctaagtctttgacttcaaccccctcaaggtctttaacatccagttccttcacagaagggtcatcagaatca

SEQ ID NO: 162963 - DNA, 70 bp, Homo sapiens
tttgacttcaaccccctcaaggtctttaacatccagttccttcacagaagggtcatcagaatcaagtttt

SEQ ID NO: 162964 - DNA, 73 bp, Homo sapiens
cccctcaaggtctttaacatccagttccttcacagaagggtcatcagaatcaagtttttcctctagaccatca

SEQ ID NO: 162965 - DNA, 73 bp, Homo sapiens
aaggtctttaacatccagttccttcacagaagggtcatcagaatcaagtttttcctctagaccatcagaaggc

SEQ ID NO: 162966 - DNA, 76 bp, Homo sapiens
tccagttccttcacagaagggtcatcagaatcaagtttttcctctagaccatcagaaggctgggtggttatctgta

SEQ ID NO: 162967 - DNA, 77 bp, Homo sapiens
tcatcagaatcaagtttttcctctagaccatcagaaggctgggtggttatctgtaaattatcagacgttgtttcaga

SEQ ID NO: 162968 - DNA, 72 bp, Homo sapiens
caagtttttcctctagaccatcagaaggctgggtggttatctgtaaattatcagacgttgtttcagacggta

SEQ ID NO: 162969 - DNA, 74 bp, Homo sapiens
ttttcctctagaccatcagaaggctgggtggttatctgtaaattatcagacgttgtttcagacggtacagatgt

SEQ ID NO: 162970 - DNA, 75 bp, Homo sapiens
atcagaaggctgggtggttatctgtaaattatcagacgttgtttcagacggtacagatgttgacaaaggagcttc

SEQ ID NO: 162971 - DNA, 73 bp, Homo sapiens
ctgggtggttatctgtaaattatcagacgttgtttcagacggtacagatgttgacaaaggagcttctgaaaat

SEQ ID NO: 162972 - DNA, 75 bp, Homo sapiens
ttatctgtaaattatcagacgttgtttcagacggtacagatgttgacaaaggagcttctgaaaattcaccaccta

SEQ ID NO: 162973 - DNA, 74 bp, Homo sapiens
aattatcagacgttgtttcagacggtacagatgttgacaaaggagcttctgaaaattcaccacctagtggatgg

SEQ ID NO: 162974 - DNA, 81 bp, Homo sapiens
tacagatgttgacaaaggagcttctgaaaattcaccacctagtggatggttcagagtcctcatgaccatagaagatgaatg

SEQ ID NO: 162975 - DNA, 80 bp, Homo sapiens
cttctgaaaattcaccacctagtggatggttcagagtcctcatgaccatagaagatgaatggacagaatgaccttgctct

SEQ ID NO: 162976 - DNA, 80 bp, Homo sapiens
aaaattcaccacctagtggatggttcagagtcctcatgaccatagaagatgaatggacagaatgaccttgctcttgttga

SEQ ID NO: 162977 - DNA, 84 bp, Homo sapiens
tagtggatggttcagagtcctcatgaccatagaagatgaatggacagaatgaccttgctcttgttgagatggtggcacttgttc

SEQ ID NO: 162978 - DNA, 82 bp, Homo sapiens
atggttcagagtcctcatgaccatagaagatgaatggacagaatgaccttgctcttgttgagatggtggcacttgttccaaa

SEQ ID NO: 162979 - DNA, 84 bp, Homo sapiens
tcatgaccatagaagatgaatggacagaatgaccttgctcttgttgagatggtggcacttgttccaaatctgggtgcacaggta

SEQ ID NO: 162980 - DNA, 80 bp, Homo sapiens
aatggacagaatgaccttgctcttgttgagatggtggcacttgttccaaatctgggtgcacaggtagctgattaggtaga

SEQ ID NO: 162981 - DNA, 77 bp, Homo sapiens
aatgaccttgctcttgttgagatggtggcacttgttccaaatctgggtgcacaggtagctgattaggtagaccctgg

SEQ ID NO: 162982 - DNA, 76 bp, Homo sapiens
tcttgttgagatggtggcacttgttccaaatctgggtgcacaggtagctgattaggtagaccctggggaggtcgtc

SEQ ID NO: 162983 - DNA, 75 bp, Homo sapiens
agatggtggcacttgttccaaatctgggtgcacaggtagctgattaggtagaccctggggaggtcgtcgcatggg

SEQ ID NO: 162984 - DNA, 76 bp, Homo sapiens
ttgttccaaatctgggtgcacaggtagctgattaggtagaccctggggaggtcgtcgcatggggtctgtgtgtcta

SEQ ID NO: 162985 - DNA, 74 bp, Homo sapiens
aatctgggtgcacaggtagctgattaggtagaccctggggaggtcgtcgcatggggtctgtgtgtctagggccc

SEQ ID NO: 162986 - DNA, 71 bp, Homo sapiens
aggtagctgattaggtagaccctggggaggtcgtcgcatggggtctgtgtgtctagggcccggaaagtctg

SEQ ID NO: 162987 - DNA, 68 bp, Homo sapiens
attaggtagaccctggggaggtcgtcgcatggggtctgtgtgtctagggcccggaaagtctggccggg

SEQ ID NO: 162988 - DNA, 74 bp, Homo sapiens
gtcgcatggggtctgtgtgtctagggcccggaaagtctggccggggaatgaagtttccatgtctcagattagaa

SEQ ID NO: 162989 - DNA, 76 bp, Homo sapiens
gtctgtgtgtctagggcccggaaagtctggccggggaatgaagtttccatgtctcagattagaagatgcctctaca

SEQ ID NO: 162990 - DNA, 75 bp, Homo sapiens
tgtgtctagggcccggaaagtctggccggggaatgaagtttccatgtctcagattagaagatgcctctacaacgc

SEQ ID NO: 162991 - DNA, 79 bp, Homo sapiens
gaaagtctggccggggaatgaagtttccatgtctcagattagaagatgcctctacaacgctgccaggtggagcactgaa

SEQ ID NO: 162992 - DNA, 80 bp, Homo sapiens
attagaagatgcctctacaacgctgccaggtggagcactgaaaggcagccgttgccttccgtcaggagccctatgtctca

SEQ ID NO: 162993 - DNA, 81 bp, Homo sapiens
tctacaacgctgccaggtggagcactgaaaggcagccgttgccttccgtcaggagccctatgtctcagttcaatatatgct

SEQ ID NO: 162994 - DNA, 81 bp, Homo sapiens
tgccaggtggagcactgaaaggcagccgttgccttccgtcaggagccctatgtctcagttcaatatatgcttggcccagta

SEQ ID NO: 162995 - DNA, 80 bp, Homo sapiens
gtggagcactgaaaggcagccgttgccttccgtcaggagccctatgtctcagttcaatatatgcttggcccagtatgttg

SEQ ID NO: 162996 - DNA, 80 bp, Homo sapiens
aaaggcagccgttgccttccgtcaggagccctatgtctcagttcaatatatgcttggcccagtatgttgtgctgctgaac

SEQ ID NO: 162997 - DNA, 84 bp, Homo sapiens
gttgccttccgtcaggagccctatgtctcagttcaatatatgcttggcccagtatgttgtgctgctgaactggcaagctctgtg

SEQ ID NO: 162998 - DNA, 83 bp, Homo sapiens
cgtcaggagccctatgtctcagttcaatatatgcttggcccagtatgttgtgctgctgaactggcaagctctgtggtgaaaaa

SEQ ID NO: 162999 - DNA, 86 bp, Homo sapiens
tatgtctcagttcaatatatgcttggcccagtatgttgtgctgctgaactggcaagctctgtggtgaaaaatgctgaggaagtcca

SEQ ID NO: 163000 - DNA, 84 bp, Homo sapiens
tcaatatatgcttggcccagtatgttgtgctgctgaactggcaagctctgtggtgaaaaatgctgaggaagtccaactggatta

SEQ ID NO: 163001 - DNA, 83 bp, Homo sapiens
tatgcttggcccagtatgttgtgctgctgaactggcaagctctgtggtgaaaaatgctgaggaagtccaactggattattcat

SEQ ID NO: 163002 - DNA, 81 bp, Homo sapiens
tatgttgtgctgctgaactggcaagctctgtggtgaaaaatgctgaggaagtccaactggattattcatttgtgagttatt

SEQ ID NO: 163003 - DNA, 77 bp, Homo sapiens
ctgctgaactggcaagctctgtggtgaaaaatgctgaggaagtccaactggattattcatttgtgagttatttaaag

SEQ ID NO: 163004 - DNA, 76 bp, Homo sapiens
caagctctgtggtgaaaaatgctgaggaagtccaactggattattcatttgtgagttatttaaaggcctaggcata

SEQ ID NO: 163005 - DNA, 77 bp, Homo sapiens
tggtgaaaaatgctgaggaagtccaactggattattcatttgtgagttatttaaaggcctaggcatatctacagata

SEQ ID NO: 163006 - DNA, 77 bp, Homo sapiens
aaatgctgaggaagtccaactggattattcatttgtgagttatttaaaggcctaggcatatctacagatactgatct

SEQ ID NO: 163007 - DNA, 77 bp, Homo sapiens
aagtccaactggattattcatttgtgagttatttaaaggcctaggcatatctacagatactgatcttcttagctgtg

SEQ ID NO: 163008 - DNA, 78 bp, Homo sapiens
attattcatttgtgagttatttaaaggcctaggcatatctacagatactgatcttcttagctgtggagaaactccaga

SEQ ID NO: 163009 - DNA, 77 bp, Homo sapiens
gtgagttatttaaaggcctaggcatatctacagatactgatcttcttagctgtggagaaactccagatccctgtatt

SEQ ID NO: 163010 - DNA, 79 bp, Homo sapiens
ttatttaaaggcctaggcatatctacagatactgatcttcttagctgtggagaaactccagatccctgtatttgctgag

SEQ ID NO: 163011 - DNA, 81 bp, Homo sapiens
cctaggcatatctacagatactgatcttcttagctgtggagaaactccagatccctgtatttgctgaggaggcacaaggaa

SEQ ID NO: 163012 - DNA, 82 bp, Homo sapiens
atctacagatactgatcttcttagctgtggagaaactccagatccctgtatttgctgaggaggcacaaggaagcgctcttga

SEQ ID NO: 163013 - DNA, 80 bp, Homo sapiens
atcttcttagctgtggagaaactccagatccctgtatttgctgaggaggcacaaggaagcgctcttgactcggcatggta

SEQ ID NO: 163014 - DNA, 82 bp, Homo sapiens
tagctgtggagaaactccagatccctgtatttgctgaggaggcacaaggaagcgctcttgactcggcatggtaccatgacta

SEQ ID NO: 163015 - DNA, 78 bp, Homo sapiens
ctgtatttgctgaggaggcacaaggaagcgctcttgactcggcatggtaccatgactacctcctggaaatccaaatct

SEQ ID NO: 163016 - DNA, 75 bp, Homo sapiens
tgaggaggcacaaggaagcgctcttgactcggcatggtaccatgactacctcctggaaatccaaatcttttaaaa

SEQ ID NO: 163017 - DNA, 72 bp, Homo sapiens
aggcacaaggaagcgctcttgactcggcatggtaccatgactacctcctggaaatccaaatcttttaaaaaa

SEQ ID NO: 163018 - DNA, 72 bp, Homo sapiens
tttccctcttctaatagcaatttaaattcggcaggaaattaaaagcattacctaaatccatgaggtctcatc

SEQ ID NO: 163019 - DNA, 73 bp, Homo sapiens
aatagcaatttaaattcggcaggaaattaaaagcattacctaaatccatgaggtctcatccccatactagcaa

SEQ ID NO: 163020 - DNA, 76 bp, Homo sapiens
aaattaaaagcattacctaaatccatgaggtctcatccccatactagcaacatcaggaggatagggtccacgctga

SEQ ID NO: 163021 - DNA, 76 bp, Homo sapiens
aaaagcattacctaaatccatgaggtctcatccccatactagcaacatcaggaggatagggtccacgctgatcttt

SEQ ID NO: 163022 - DNA, 76 bp, Homo sapiens
cctaaatccatgaggtctcatccccatactagcaacatcaggaggatagggtccacgctgatcttttgggaaaaca

SEQ ID NO: 163023 - DNA, 78 bp, Homo sapiens
tctcatccccatactagcaacatcaggaggatagggtccacgctgatcttttgggaaaacagcatatctaggtcctaa

SEQ ID NO: 163024 - DNA, 74 bp, Homo sapiens
atactagcaacatcaggaggatagggtccacgctgatcttttgggaaaacagcatatctaggtcctaaaggagg

SEQ ID NO: 163025 - DNA, 73 bp, Homo sapiens
aacatcaggaggatagggtccacgctgatcttttgggaaaacagcatatctaggtcctaaaggaggggcaaca

SEQ ID NO: 163026 - DNA, 71 bp, Homo sapiens
atagggtccacgctgatcttttgggaaaacagcatatctaggtcctaaaggaggggcaacaggagacctaa

SEQ ID NO: 163027 - DNA, 71 bp, Homo sapiens
acgctgatcttttgggaaaacagcatatctaggtcctaaaggaggggcaacaggagacctaatgttcccag

SEQ ID NO: 163028 - DNA, 70 bp, Homo sapiens
atcttttgggaaaacagcatatctaggtcctaaaggaggggcaacaggagacctaatgttcccaggatag

SEQ ID NO: 163029 - DNA, 69 bp, Homo sapiens
aaaacagcatatctaggtcctaaaggaggggcaacaggagacctaatgttcccaggatagggaggtggg

SEQ ID NO: 163030 - DNA, 68 bp, Homo sapiens
taggtcctaaaggaggggcaacaggagacctaatgttcccaggatagggaggtgggggtctggtgaaa

SEQ ID NO: 163031 - DNA, 69 bp, Homo sapiens
gaggggcaacaggagacctaatgttcccaggatagggaggtgggggtctggtgaaagcctggttaacat

SEQ ID NO: 163032 - DNA, 69 bp, Homo sapiens
aacaggagacctaatgttcccaggatagggaggtgggggtctggtgaaagcctggttaacattctctgg

SEQ ID NO: 163033 - DNA, 72 bp, Homo sapiens
taatgttcccaggatagggaggtgggggtctggtgaaagcctggttaacattctctggttgccagtgttgaa

SEQ ID NO: 163034 - DNA, 74 bp, Homo sapiens
gatagggaggtgggggtctggtgaaagcctggttaacattctctggttgccagtgttgaagaggccctggatga

SEQ ID NO: 163035 - DNA, 75 bp, Homo sapiens
aggtgggggtctggtgaaagcctggttaacattctctggttgccagtgttgaagaggccctggatgaggcactgc

SEQ ID NO: 163036 - DNA, 79 bp, Homo sapiens
tggtgaaagcctggttaacattctctggttgccagtgttgaagaggccctggatgaggcactgcgggtgagtcctgtga

SEQ ID NO: 163037 - DNA, 77 bp, Homo sapiens
tggttaacattctctggttgccagtgttgaagaggccctggatgaggcactgcgggtgagtcctgtgaccccttctc

SEQ ID NO: 163038 - DNA, 78 bp, Homo sapiens
acattctctggttgccagtgttgaagaggccctggatgaggcactgcgggtgagtcctgtgaccccttctcctgtcga

SEQ ID NO: 163039 - DNA, 78 bp, Homo sapiens
cagtgttgaagaggccctggatgaggcactgcgggtgagtcctgtgaccccttctcctgtcgacctgcaatcttcttc

SEQ ID NO: 163040 - DNA, 79 bp, Homo sapiens
ttgaagaggccctggatgaggcactgcgggtgagtcctgtgaccccttctcctgtcgacctgcaatcttcttctgctgt

SEQ ID NO: 163041 - DNA, 82 bp, Homo sapiens
atgaggcactgcgggtgagtcctgtgaccccttctcctgtcgacctgcaatcttcttctgctgttgctgctggagaatgatt

SEQ ID NO: 163042 - DNA, 81 bp, Homo sapiens
tgcgggtgagtcctgtgaccccttctcctgtcgacctgcaatcttcttctgctgttgctgctggagaatgatttcacgtaa

SEQ ID NO: 163043 - DNA, 80 bp, Homo sapiens
agtcctgtgaccccttctcctgtcgacctgcaatcttcttctgctgttgctgctggagaatgatttcacgtaacttctgc

SEQ ID NO: 163044 - DNA, 80 bp, Homo sapiens
cttctcctgtcgacctgcaatcttcttctgctgttgctgctggagaatgatttcacgtaacttctgccgctaaatgggaa

SEQ ID NO: 163045 - DNA, 79 bp, Homo sapiens
tcgacctgcaatcttcttctgctgttgctgctggagaatgatttcacgtaacttctgccgctaaatgggaagaaacaaa

SEQ ID NO: 163046 - DNA, 75 bp, Homo sapiens
ctgttgctgctggagaatgatttcacgtaacttctgccgctaaatgggaagaaacaaaaatcactgggatttgtg

SEQ ID NO: 163047 - DNA, 76 bp, Homo sapiens
ttcctcaaataatacatttaaaactgagaacatacaatgtgtttacctgtctcaatttctctgtatctgcttgggc

SEQ ID NO: 163048 - DNA, 76 bp, Homo sapiens
aatacatttaaaactgagaacatacaatgtgtttacctgtctcaatttctctgtatctgcttgggccatatttaca

SEQ ID NO: 163049 - DNA, 76 bp, Homo sapiens
tttaaaactgagaacatacaatgtgtttacctgtctcaatttctctgtatctgcttgggccatatttacagtattc

SEQ ID NO: 163050 - DNA, 79 bp, Homo sapiens
agaacatacaatgtgtttacctgtctcaatttctctgtatctgcttgggccatatttacagtattctgtgtatcagtta

SEQ ID NO: 163051 - DNA, 78 bp, Homo sapiens
aatgtgtttacctgtctcaatttctctgtatctgcttgggccatatttacagtattctgtgtatcagttactcctgaa

SEQ ID NO: 163052 - DNA, 79 bp, Homo sapiens
ctcaatttctctgtatctgcttgggccatatttacagtattctgtgtatcagttactcctgaagttggcacaggtccag

SEQ ID NO: 163053 - DNA, 78 bp, Homo sapiens
ttctctgtatctgcttgggccatatttacagtattctgtgtatcagttactcctgaagttggcacaggtccaggaagt

SEQ ID NO: 163054 - DNA, 76 bp, Homo sapiens
ttgggccatatttacagtattctgtgtatcagttactcctgaagttggcacaggtccaggaagttgggagacacca

SEQ ID NO: 163055 - DNA, 75 bp, Homo sapiens
atatttacagtattctgtgtatcagttactcctgaagttggcacaggtccaggaagttgggagacaccagagaac

SEQ ID NO: 163056 - DNA, 76 bp, Homo sapiens
agtattctgtgtatcagttactcctgaagttggcacaggtccaggaagttgggagacaccagagaactgctggcct

SEQ ID NO: 163057 - DNA, 78 bp, Homo sapiens
tatcagttactcctgaagttggcacaggtccaggaagttgggagacaccagagaactgctggccttgggagtgcattg

SEQ ID NO: 163058 - DNA, 78 bp, Homo sapiens
tgaagttggcacaggtccaggaagttgggagacaccagagaactgctggccttgggagtgcattggagagtttgaaga

SEQ ID NO: 163059 - DNA, 79 bp, Homo sapiens
acaggtccaggaagttgggagacaccagagaactgctggccttgggagtgcattggagagtttgaagatgcacagaagc

SEQ ID NO: 163060 - DNA, 80 bp, Homo sapiens
aagttgggagacaccagagaactgctggccttgggagtgcattggagagtttgaagatgcacagaagctcccctctgatc

SEQ ID NO: 163061 - DNA, 81 bp, Homo sapiens
agacaccagagaactgctggccttgggagtgcattggagagtttgaagatgcacagaagctcccctctgatccaggccttg

SEQ ID NO: 163062 - DNA, 84 bp, Homo sapiens
aactgctggccttgggagtgcattggagagtttgaagatgcacagaagctcccctctgatccaggccttggctgatcagcaaca

SEQ ID NO: 163063 - DNA, 85 bp, Homo sapiens
ttgggagtgcattggagagtttgaagatgcacagaagctcccctctgatccaggccttggctgatcagcaacatcatgggcagtt

SEQ ID NO: 163064 - DNA, 83 bp, Homo sapiens
attggagagtttgaagatgcacagaagctcccctctgatccaggccttggctgatcagcaacatcatgggcagtttgacttgt

SEQ ID NO: 163065 - DNA, 83 bp, Homo sapiens
tttgaagatgcacagaagctcccctctgatccaggccttggctgatcagcaacatcatgggcagtttgacttgttccaaaaga

SEQ ID NO: 163066 - DNA, 82 bp, Homo sapiens
acagaagctcccctctgatccaggccttggctgatcagcaacatcatgggcagtttgacttgttccaaaagagtcagactga

SEQ ID NO: 163067 - DNA, 82 bp, Homo sapiens
ccctctgatccaggccttggctgatcagcaacatcatgggcagtttgacttgttccaaaagagtcagactgagatcttggag

SEQ ID NO: 163068 - DNA, 83 bp, Homo sapiens
atccaggccttggctgatcagcaacatcatgggcagtttgacttgttccaaaagagtcagactgagatcttggagtcattgga

SEQ ID NO: 163069 - DNA, 86 bp, Homo sapiens
ttggctgatcagcaacatcatgggcagtttgacttgttccaaaagagtcagactgagatcttggagtcattggagactgatcatag

SEQ ID NO: 163070 - DNA, 82 bp, Homo sapiens
cagtttgacttgttccaaaagagtcagactgagatcttggagtcattggagactgatcatagggatcacgggcagcagatgg

SEQ ID NO: 163071 - DNA, 80 bp, Homo sapiens
acttgttccaaaagagtcagactgagatcttggagtcattggagactgatcatagggatcacgggcagcagatggggaaa

SEQ ID NO: 163072 - DNA, 80 bp, Homo sapiens
aaagagtcagactgagatcttggagtcattggagactgatcatagggatcacgggcagcagatggggaaacacggctaaa

SEQ ID NO: 163073 - DNA, 81 bp, Homo sapiens
actgagatcttggagtcattggagactgatcatagggatcacgggcagcagatggggaaacacggctaaatgtgtctgaaa

SEQ ID NO: 163074 - DNA, 79 bp, Homo sapiens
cttggagtcattggagactgatcatagggatcacgggcagcagatggggaaacacggctaaatgtgtctgaaagaccag

SEQ ID NO: 163075 - DNA, 77 bp, Homo sapiens
ttggagactgatcatagggatcacgggcagcagatggggaaacacggctaaatgtgtctgaaagaccaggtccaggg

SEQ ID NO: 163076 - DNA, 73 bp, Homo sapiens
agatggggaaacacggctaaatgtgtctgaaagaccaggtccagggggcctaggtgtctgggaacatgtatca

SEQ ID NO: 163077 - DNA, 73 bp, Homo sapiens
acacggctaaatgtgtctgaaagaccaggtccagggggcctaggtgtctgggaacatgtatcaggtggcctta

SEQ ID NO: 163078 - DNA, 69 bp, Homo sapiens
agaccaggtccagggggcctaggtgtctgggaacatgtatcaggtggccttaccaacgggccaggtaaa

SEQ ID NO: 163079 - DNA, 69 bp, Homo sapiens
ggggcctaggtgtctgggaacatgtatcaggtggccttaccaacgggccaggtaaagctggtcctcggt

SEQ ID NO: 163080 - DNA, 71 bp, Homo sapiens
ctaggtgtctgggaacatgtatcaggtggccttaccaacgggccaggtaaagctggtcctcggttttgtgc

SEQ ID NO: 163081 - DNA, 72 bp, Homo sapiens
aacatgtatcaggtggccttaccaacgggccaggtaaagctggtcctcggttttgtgctgcttgcaggaaag

SEQ ID NO: 163082 - DNA, 73 bp, Homo sapiens
atcaggtggccttaccaacgggccaggtaaagctggtcctcggttttgtgctgcttgcaggaaaggatcctga

SEQ ID NO: 163083 - DNA, 75 bp, Homo sapiens
ttaccaacgggccaggtaaagctggtcctcggttttgtgctgcttgcaggaaaggatcctgatttggcatgagga

SEQ ID NO: 163084 - DNA, 78 bp, Homo sapiens
aggtaaagctggtcctcggttttgtgctgcttgcaggaaaggatcctgatttggcatgaggactggtcttgtcattga

SEQ ID NO: 163085 - DNA, 78 bp, Homo sapiens
gtcctcggttttgtgctgcttgcaggaaaggatcctgatttggcatgaggactggtcttgtcattgaggacctagtaa

SEQ ID NO: 163086 - DNA, 77 bp, Homo sapiens
ttttgtgctgcttgcaggaaaggatcctgatttggcatgaggactggtcttgtcattgaggacctagtaaaaccctc

SEQ ID NO: 163087 - DNA, 75 bp, Homo sapiens
ttgcaggaaaggatcctgatttggcatgaggactggtcttgtcattgaggacctagtaaaaccctctgaaatcct

SEQ ID NO: 163088 - DNA, 74 bp, Homo sapiens
atttggcatgaggactggtcttgtcattgaggacctagtaaaaccctctgaaatccttggccttggtgttgctg

SEQ ID NO: 163089 - DNA, 74 bp, Homo sapiens
actggtcttgtcattgaggacctagtaaaaccctctgaaatccttggccttggtgttgctggtggctgagagta

SEQ ID NO: 163090 - DNA, 74 bp, Homo sapiens
tcttgtcattgaggacctagtaaaaccctctgaaatccttggccttggtgttgctggtggctgagagtaaggga

SEQ ID NO: 163091 - DNA, 70 bp, Homo sapiens
aggacctagtaaaaccctctgaaatccttggccttggtgttgctggtggctgagagtaagggacagaaat

SEQ ID NO: 163092 - DNA, 72 bp, Homo sapiens
taaaaccctctgaaatccttggccttggtgttgctggtggctgagagtaagggacagaaattccaggtcttg

SEQ ID NO: 163093 - DNA, 72 bp, Homo sapiens
aaatccttggccttggtgttgctggtggctgagagtaagggacagaaattccaggtcttggtgttccaggag

SEQ ID NO: 163094 - DNA, 80 bp, Homo sapiens
ttggtgttgctggtggctgagagtaagggacagaaattccaggtcttggtgttccaggaggatgagcatatggatcagaa

SEQ ID NO: 163095 - DNA, 81 bp, Homo sapiens
tggtggctgagagtaagggacagaaattccaggtcttggtgttccaggaggatgagcatatggatcagaatgcctctgatt

SEQ ID NO: 163096 - DNA, 79 bp, Homo sapiens
agagtaagggacagaaattccaggtcttggtgttccaggaggatgagcatatggatcagaatgcctctgatttgttaca

SEQ ID NO: 163097 - DNA, 78 bp, Homo sapiens
agaaattccaggtcttggtgttccaggaggatgagcatatggatcagaatgcctctgatttgttacaggtgtaacaaa

SEQ ID NO: 163098 - DNA, 78 bp, Homo sapiens
aggtcttggtgttccaggaggatgagcatatggatcagaatgcctctgatttgttacaggtgtaacaaacaagtcagt

SEQ ID NO: 163099 - DNA, 81 bp, Homo sapiens
ttccaggaggatgagcatatggatcagaatgcctctgatttgttacaggtgtaacaaacaagtcagtttgtgtagatggtc

SEQ ID NO: 163100 - DNA, 73 bp, Homo sapiens
agaatgcctctgatttgttacaggtgtaacaaacaagtcagtttgtgtagatggtcttggggtttggggctgc

SEQ ID NO: 163101 - DNA, 72 bp, Homo sapiens
atttgttacaggtgtaacaaacaagtcagtttgtgtagatggtcttggggtttggggctgctgactatatgg

SEQ ID NO: 163102 - DNA, 74 bp, Homo sapiens
tgtaacaaacaagtcagtttgtgtagatggtcttggggtttggggctgctgactatatgggtcaacagtagtag

SEQ ID NO: 163103 - DNA, 72 bp, Homo sapiens
aaacaagtcagtttgtgtagatggtcttggggtttggggctgctgactatatgggtcaacagtagtaggccg

SEQ ID NO: 163104 - DNA, 72 bp, Homo sapiens
gtttgtgtagatggtcttggggtttggggctgctgactatatgggtcaacagtagtaggccggggagttcca

SEQ ID NO: 163105 - DNA, 71 bp, Homo sapiens
atggtcttggggtttggggctgctgactatatgggtcaacagtagtaggccggggagttccaggaggttga

SEQ ID NO: 163106 - DNA, 70 bp, Homo sapiens
actatatgggtcaacagtagtaggccggggagttccaggaggttgagagtaagggtctgtattggaccta

SEQ ID NO: 163107 - DNA, 72 bp, Homo sapiens
tcaacagtagtaggccggggagttccaggaggttgagagtaagggtctgtattggacctagctgttcctgaa

SEQ ID NO: 163108 - DNA, 70 bp, Homo sapiens
agtagtaggccggggagttccaggaggttgagagtaagggtctgtattggacctagctgttcctgaagat

SEQ ID NO: 163109 - DNA, 73 bp, Homo sapiens
agttccaggaggttgagagtaagggtctgtattggacctagctgttcctgaagattgggaataagaatctaca

SEQ ID NO: 163110 - DNA, 72 bp, Homo sapiens
aggttgagagtaagggtctgtattggacctagctgttcctgaagattgggaataagaatctacaacaggtcg

SEQ ID NO: 163111 - DNA, 72 bp, Homo sapiens
tctgtattggacctagctgttcctgaagattgggaataagaatctacaacaggtcgtggagttcctgggggt

SEQ ID NO: 163112 - DNA, 70 bp, Homo sapiens
aagattgggaataagaatctacaacaggtcgtggagttcctgggggttgggagtatgggtcctgagatgt

SEQ ID NO: 163113 - DNA, 72 bp, Homo sapiens
aataagaatctacaacaggtcgtggagttcctgggggttgggagtatgggtcctgagatgttggccttgata

SEQ ID NO: 163114 - DNA, 72 bp, Homo sapiens
aatctacaacaggtcgtggagttcctgggggttgggagtatgggtcctgagatgttggccttgatatggttc

SEQ ID NO: 163115 - DNA, 71 bp, Homo sapiens
gtggagttcctgggggttgggagtatgggtcctgagatgttggccttgatatggttccaggctgggaaaaa

SEQ ID NO: 163116 - DNA, 71 bp, Homo sapiens
ctgggggttgggagtatgggtcctgagatgttggccttgatatggttccaggctgggaaaaagcccttgaa

SEQ ID NO: 163117 - DNA, 74 bp, Homo sapiens
gagtatgggtcctgagatgttggccttgatatggttccaggctgggaaaaagcccttgaaggatgggcaaaaga

SEQ ID NO: 163118 - DNA, 75 bp, Homo sapiens
ggtcctgagatgttggccttgatatggttccaggctgggaaaaagcccttgaaggatgggcaaaagattcattca

SEQ ID NO: 163119 - DNA, 76 bp, Homo sapiens
atgttggccttgatatggttccaggctgggaaaaagcccttgaaggatgggcaaaagattcattcactgctggatg

SEQ ID NO: 163120 - DNA, 75 bp, Homo sapiens
ttgatatggttccaggctgggaaaaagcccttgaaggatgggcaaaagattcattcactgctggatgtggggtaa

SEQ ID NO: 163121 - DNA, 74 bp, Homo sapiens
gctgggaaaaagcccttgaaggatgggcaaaagattcattcactgctggatgtggggtaaggggaggctgacta

SEQ ID NO: 163122 - DNA, 74 bp, Homo sapiens
aaaaagcccttgaaggatgggcaaaagattcattcactgctggatgtggggtaaggggaggctgactatatgga

SEQ ID NO: 163123 - DNA, 80 bp, Homo sapiens
ttgaaggatgggcaaaagattcattcactgctggatgtggggtaaggggaggctgactatatggatcatttgactgatta

SEQ ID NO: 163124 - DNA, 77 bp, Homo sapiens
aaaagattcattcactgctggatgtggggtaaggggaggctgactatatggatcatttgactgattatgagaaaaat

SEQ ID NO: 163125 - DNA, 78 bp, Homo sapiens
attcactgctggatgtggggtaaggggaggctgactatatggatcatttgactgattatgagaaaaattatctatagg

SEQ ID NO: 163126 - DNA, 77 bp, Homo sapiens
tgtggggtaaggggaggctgactatatggatcatttgactgattatgagaaaaattatctataggtcttggtgtcaa

SEQ ID NO: 163127 - DNA, 77 bp, Homo sapiens
ggtaaggggaggctgactatatggatcatttgactgattatgagaaaaattatctataggtcttggtgtcaaagcag

SEQ ID NO: 163128 - DNA, 76 bp, Homo sapiens
actatatggatcatttgactgattatgagaaaaattatctataggtcttggtgtcaaagcaggcctttcataaggg

SEQ ID NO: 163129 - DNA, 76 bp, Homo sapiens
gattatgagaaaaattatctataggtcttggtgtcaaagcaggcctttcataagggtcaacagacaatcgccttga

SEQ ID NO: 163130 - DNA, 76 bp, Homo sapiens
aaaaattatctataggtcttggtgtcaaagcaggcctttcataagggtcaacagacaatcgccttgatgcctgtga

SEQ ID NO: 163131 - DNA, 82 bp, Homo sapiens
tatctataggtcttggtgtcaaagcaggcctttcataagggtcaacagacaatcgccttgatgcctgtgacactgatccata

SEQ ID NO: 163132 - DNA, 82 bp, Homo sapiens
ttggtgtcaaagcaggcctttcataagggtcaacagacaatcgccttgatgcctgtgacactgatccataaggatcctgaga

SEQ ID NO: 163133 - DNA, 81 bp, Homo sapiens
aaagcaggcctttcataagggtcaacagacaatcgccttgatgcctgtgacactgatccataaggatcctgagaggatgga

SEQ ID NO: 163134 - DNA, 79 bp, Homo sapiens
aatcgccttgatgcctgtgacactgatccataaggatcctgagaggatggaggaggttgcattggagtcttaaaaggtc

SEQ ID NO: 163135 - DNA, 79 bp, Homo sapiens
tgtgacactgatccataaggatcctgagaggatggaggaggttgcattggagtcttaaaaggtccaggaccactatcaa

SEQ ID NO: 163136 - DNA, 76 bp, Homo sapiens
actgatccataaggatcctgagaggatggaggaggttgcattggagtcttaaaaggtccaggaccactatcaagag

SEQ ID NO: 163137 - DNA, 77 bp, Homo sapiens
atcctgagaggatggaggaggttgcattggagtcttaaaaggtccaggaccactatcaagaggtgcaggtgtcaaca

SEQ ID NO: 163138 - DNA, 73 bp, Homo sapiens
aggatggaggaggttgcattggagtcttaaaaggtccaggaccactatcaagaggtgcaggtgtcaacaaggg

SEQ ID NO: 163139 - DNA, 76 bp, Homo sapiens
aggttgcattggagtcttaaaaggtccaggaccactatcaagaggtgcaggtgtcaacaagggtcgtgcatatgag

SEQ ID NO: 163140 - DNA, 75 bp, Homo sapiens
aaaggtccaggaccactatcaagaggtgcaggtgtcaacaagggtcgtgcatatgagtcaggtatcctttgtctt

SEQ ID NO: 163141 - DNA, 78 bp, Homo sapiens
aggaccactatcaagaggtgcaggtgtcaacaagggtcgtgcatatgagtcaggtatcctttgtctttgaaacacatc

SEQ ID NO: 163142 - DNA, 78 bp, Homo sapiens
aagaggtgcaggtgtcaacaagggtcgtgcatatgagtcaggtatcctttgtctttgaaacacatctgccctaggaga

SEQ ID NO: 163143 - DNA, 75 bp, Homo sapiens
aagggtcgtgcatatgagtcaggtatcctttgtctttgaaacacatctgccctaggagatggtttagtaaagtga

SEQ ID NO: 163144 - DNA, 76 bp, Homo sapiens
atatgagtcaggtatcctttgtctttgaaacacatctgccctaggagatggtttagtaaagtgatcactggttcca

SEQ ID NO: 163145 - DNA, 75 bp, Homo sapiens
taggagatggtttagtaaagtgatcactggttccagctgctatagggccttttgcagtttgttctgaaactacag

SEQ ID NO: 163146 - DNA, 74 bp, Homo sapiens
tggtttagtaaagtgatcactggttccagctgctatagggccttttgcagtttgttctgaaactacaggagacc

SEQ ID NO: 163147 - DNA, 74 bp, Homo sapiens
aagtgatcactggttccagctgctatagggccttttgcagtttgttctgaaactacaggagaccgggataggcc

SEQ ID NO: 163148 - DNA, 72 bp, Homo sapiens
ttccagctgctatagggccttttgcagtttgttctgaaactacaggagaccgggataggcccaaggatttgg

SEQ ID NO: 163149 - DNA, 70 bp, Homo sapiens
tatagggccttttgcagtttgttctgaaactacaggagaccgggataggcccaaggatttgggaaattga

SEQ ID NO: 163150 - DNA, 74 bp, Homo sapiens
ttttgcagtttgttctgaaactacaggagaccgggataggcccaaggatttgggaaattgatctgtcatcacag

SEQ ID NO: 163151 - DNA, 73 bp, Homo sapiens
tttgttctgaaactacaggagaccgggataggcccaaggatttgggaaattgatctgtcatcacaggcctagg

SEQ ID NO: 163152 - DNA, 74 bp, Homo sapiens
aactacaggagaccgggataggcccaaggatttgggaaattgatctgtcatcacaggcctaggtgtgtctggag

SEQ ID NO: 163153 - DNA, 74 bp, Homo sapiens
accgggataggcccaaggatttgggaaattgatctgtcatcacaggcctaggtgtgtctggaggttttgcatag

SEQ ID NO: 163154 - DNA, 75 bp, Homo sapiens
aaggatttgggaaattgatctgtcatcacaggcctaggtgtgtctggaggttttgcataggggtcattatttgtc

SEQ ID NO: 163155 - DNA, 77 bp, Homo sapiens
gaaattgatctgtcatcacaggcctaggtgtgtctggaggttttgcataggggtcattatttgtcgtggaagaagaa

SEQ ID NO: 163156 - DNA, 76 bp, Homo sapiens
atctgtcatcacaggcctaggtgtgtctggaggttttgcataggggtcattatttgtcgtggaagaagaacataaa

SEQ ID NO: 163157 - DNA, 75 bp, Homo sapiens
acaggcctaggtgtgtctggaggttttgcataggggtcattatttgtcgtggaagaagaacataaatctctgaca

SEQ ID NO: 163158 - DNA, 76 bp, Homo sapiens
ttttgcataggggtcattatttgtcgtggaagaagaacataaatctctgacaggggatggcctatttgctgttgtc

SEQ ID NO: 163159 - DNA, 78 bp, Homo sapiens
gggtcattatttgtcgtggaagaagaacataaatctctgacaggggatggcctatttgctgttgtctcattcatttga

SEQ ID NO: 163160 - DNA, 76 bp, Homo sapiens
attatttgtcgtggaagaagaacataaatctctgacaggggatggcctatttgctgttgtctcattcatttgaagg

SEQ ID NO: 163161 - DNA, 78 bp, Homo sapiens
agaagaacataaatctctgacaggggatggcctatttgctgttgtctcattcatttgaaggggcctagataccgatga

SEQ ID NO: 163162 - DNA, 77 bp, Homo sapiens
aacataaatctctgacaggggatggcctatttgctgttgtctcattcatttgaaggggcctagataccgatgataaa

SEQ ID NO: 163163 - DNA, 74 bp, Homo sapiens
acaggggatggcctatttgctgttgtctcattcatttgaaggggcctagataccgatgataaaggtgtacagtt

SEQ ID NO: 163164 - DNA, 75 bp, Homo sapiens
atggcctatttgctgttgtctcattcatttgaaggggcctagataccgatgataaaggtgtacagttttccactg

SEQ ID NO: 163165 - DNA, 77 bp, Homo sapiens
tgttgtctcattcatttgaaggggcctagataccgatgataaaggtgtacagttttccactggtgcagcagaatttc

SEQ ID NO: 163166 - DNA, 75 bp, Homo sapiens
attcatttgaaggggcctagataccgatgataaaggtgtacagttttccactggtgcagcagaatttcttctgga

SEQ ID NO: 163167 - DNA, 74 bp, Homo sapiens
gggcctagataccgatgataaaggtgtacagttttccactggtgcagcagaatttcttctggaaaaactatggc

SEQ ID NO: 163168 - DNA, 75 bp, Homo sapiens
tagataccgatgataaaggtgtacagttttccactggtgcagcagaatttcttctggaaaaactatggcccacag

SEQ ID NO: 163169 - DNA, 72 bp, Homo sapiens
ataaaggtgtacagttttccactggtgcagcagaatttcttctggaaaaactatggcccacaggaggtggtc

SEQ ID NO: 163170 - DNA, 72 bp, Homo sapiens
tacagttttccactggtgcagcagaatttcttctggaaaaactatggcccacaggaggtggtcgaggggtac

SEQ ID NO: 163171 - DNA, 73 bp, Homo sapiens
tggtgcagcagaatttcttctggaaaaactatggcccacaggaggtggtcgaggggtaccaaccatttttgca

SEQ ID NO: 163172 - DNA, 70 bp, Homo sapiens
agaatttcttctggaaaaactatggcccacaggaggtggtcgaggggtaccaaccatttttgcatatgga

SEQ ID NO: 163173 - DNA, 73 bp, Homo sapiens
ttctggaaaaactatggcccacaggaggtggtcgaggggtaccaaccatttttgcatatggatccattggaga

SEQ ID NO: 163174 - DNA, 75 bp, Homo sapiens
tggcccacaggaggtggtcgaggggtaccaaccatttttgcatatggatccattggagatggtggtcgtgagtta

SEQ ID NO: 163175 - DNA, 74 bp, Homo sapiens
acaggaggtggtcgaggggtaccaaccatttttgcatatggatccattggagatggtggtcgtgagttagagga

SEQ ID NO: 163176 - DNA, 72 bp, Homo sapiens
aggggtaccaaccatttttgcatatggatccattggagatggtggtcgtgagttagaggacccaggtgaaaa

SEQ ID NO: 163177 - DNA, 75 bp, Homo sapiens
aaccatttttgcatatggatccattggagatggtggtcgtgagttagaggacccaggtgaaaacacttgcggtga

SEQ ID NO: 163178 - DNA, 76 bp, Homo sapiens
ttttgcatatggatccattggagatggtggtcgtgagttagaggacccaggtgaaaacacttgcggtgagggtggc

SEQ ID NO: 163179 - DNA, 76 bp, Homo sapiens
atccattggagatggtggtcgtgagttagaggacccaggtgaaaacacttgcggtgagggtggctgagaagtctga

SEQ ID NO: 163180 - DNA, 75 bp, Homo sapiens
atggtggtcgtgagttagaggacccaggtgaaaacacttgcggtgagggtggctgagaagtctgagcctgagaaa

SEQ ID NO: 163181 - DNA, 75 bp, Homo sapiens
agttagaggacccaggtgaaaacacttgcggtgagggtggctgagaagtctgagcctgagaaagactatcctgga

SEQ ID NO: 163182 - DNA, 75 bp, Homo sapiens
acccaggtgaaaacacttgcggtgagggtggctgagaagtctgagcctgagaaagactatcctggatgggaatcc

SEQ ID NO: 163183 - DNA, 77 bp, Homo sapiens
ttgcggtgagggtggctgagaagtctgagcctgagaaagactatcctggatgggaatccgggatggggctggaggag

SEQ ID NO: 163184 - DNA, 77 bp, Homo sapiens
gtggctgagaagtctgagcctgagaaagactatcctggatgggaatccgggatggggctggaggaggaggtggagct

SEQ ID NO: 163185 - DNA, 75 bp, Homo sapiens
ggaggaggaggtggagcttgtggctttacaaacacatcatctgaagatgtagacgtaggggtactgggtggctgt

SEQ ID NO: 163186 - DNA, 75 bp, Homo sapiens
gtggagcttgtggctttacaaacacatcatctgaagatgtagacgtaggggtactgggtggctgttttgtaaaca

SEQ ID NO: 163187 - DNA, 73 bp, Homo sapiens
ttgtggctttacaaacacatcatctgaagatgtagacgtaggggtactgggtggctgttttgtaaacagttct

SEQ ID NO: 163188 - DNA, 73 bp, Homo sapiens
tggctttacaaacacatcatctgaagatgtagacgtaggggtactgggtggctgttttgtaaacagttcttta

SEQ ID NO: 163189 - DNA, 73 bp, Homo sapiens
ttacaaacacatcatctgaagatgtagacgtaggggtactgggtggctgttttgtaaacagttctttatggaa

SEQ ID NO: 163190 - DNA, 76 bp, Homo sapiens
atcatctgaagatgtagacgtaggggtactgggtggctgttttgtaaacagttctttatggaatgactgtgcagga

SEQ ID NO: 163191 - DNA, 73 bp, Homo sapiens
atgtagacgtaggggtactgggtggctgttttgtaaacagttctttatggaatgactgtgcaggagacatatt

SEQ ID NO: 163192 - DNA, 77 bp, Homo sapiens
gggtactgggtggctgttttgtaaacagttctttatggaatgactgtgcaggagacatatttccattgccaggctga

SEQ ID NO: 163193 - DNA, 79 bp, Homo sapiens
tggctgttttgtaaacagttctttatggaatgactgtgcaggagacatatttccattgccaggctgaggtgtcaaggga

SEQ ID NO: 163194 - DNA, 79 bp, Homo sapiens
tttgtaaacagttctttatggaatgactgtgcaggagacatatttccattgccaggctgaggtgtcaagggactctgta

SEQ ID NO: 163195 - DNA, 80 bp, Homo sapiens
ttctttatggaatgactgtgcaggagacatatttccattgccaggctgaggtgtcaagggactctgtatcccactacttg

SEQ ID NO: 163196 - DNA, 81 bp, Homo sapiens
aatgactgtgcaggagacatatttccattgccaggctgaggtgtcaagggactctgtatcccactacttggtgtatctgaa

SEQ ID NO: 163197 - DNA, 80 bp, Homo sapiens
agacatatttccattgccaggctgaggtgtcaagggactctgtatcccactacttggtgtatctgaaccagactgcacca

SEQ ID NO: 163198 - DNA, 80 bp, Homo sapiens
tatttccattgccaggctgaggtgtcaagggactctgtatcccactacttggtgtatctgaaccagactgcaccagaaga

SEQ ID NO: 163199 - DNA, 80 bp, Homo sapiens
gctgaggtgtcaagggactctgtatcccactacttggtgtatctgaaccagactgcaccagaagatgctgagaaccaaat

SEQ ID NO: 163200 - DNA, 80 bp, Homo sapiens
tcaagggactctgtatcccactacttggtgtatctgaaccagactgcaccagaagatgctgagaaccaaattgctgttgt

SEQ ID NO: 163201 - DNA, 85 bp, Homo sapiens
actctgtatcccactacttggtgtatctgaaccagactgcaccagaagatgctgagaaccaaattgctgttgttgctgctgctgc

SEQ ID NO: 163202 - DNA, 79 bp, Homo sapiens
ctgctgctgctcatttttcacctgttcaagtttctgtgtggcttcaattttagcttgctgcttacttttctgacgcatt

SEQ ID NO: 163203 - DNA, 77 bp, Homo sapiens
tcatttttcacctgttcaagtttctgtgtggcttcaattttagcttgctgcttacttttctgacgcatttgctatta

SEQ ID NO: 163204 - DNA, 75 bp, Homo sapiens
gtggcttcaattttagcttgctgcttacttttctgacgcatttgctattaaaatagaaaagaaaaagcaatcata

SEQ ID NO: 163205 - DNA, 68 bp, Homo sapiens
aacaaaaatgcaacttcaaaaagtagattatccaaaaattccatacctgtctaaatttccattcctgt

SEQ ID NO: 163206 - DNA, 73 bp, Homo sapiens
gcaacttcaaaaagtagattatccaaaaattccatacctgtctaaatttccattcctgttcatgttctgattc

SEQ ID NO: 163207 - DNA, 73 bp, Homo sapiens
caaaaagtagattatccaaaaattccatacctgtctaaatttccattcctgttcatgttctgattctctttgc

SEQ ID NO: 163208 - DNA, 72 bp, Homo sapiens
tccaaaaattccatacctgtctaaatttccattcctgttcatgttctgattctctttgctttaaaggatctt

SEQ ID NO: 163209 - DNA, 72 bp, Homo sapiens
ccatacctgtctaaatttccattcctgttcatgttctgattctctttgctttaaaggatctttaaaaagctc

SEQ ID NO: 163210 - DNA, 71 bp, Homo sapiens
cctgtctaaatttccattcctgttcatgttctgattctctttgctttaaaggatctttaaaaagctccgaa

SEQ ID NO: 163211 - DNA, 74 bp, Homo sapiens
tttccattcctgttcatgttctgattctctttgctttaaaggatctttaaaaagctccgaatcaatacgagagc

SEQ ID NO: 163212 - DNA, 76 bp, Homo sapiens
atgttctgattctctttgctttaaaggatctttaaaaagctccgaatcaatacgagagctgggatcaatgctatct

SEQ ID NO: 163213 - DNA, 77 bp, Homo sapiens
attctctttgctttaaaggatctttaaaaagctccgaatcaatacgagagctgggatcaatgctatcttgctgttgc

SEQ ID NO: 163214 - DNA, 77 bp, Homo sapiens
ttgctttaaaggatctttaaaaagctccgaatcaatacgagagctgggatcaatgctatcttgctgttgctgccttt

SEQ ID NO: 163215 - DNA, 81 bp, Homo sapiens
atctttaaaaagctccgaatcaatacgagagctgggatcaatgctatcttgctgttgctgccttttcatggaatcatttga

SEQ ID NO: 163216 - DNA, 84 bp, Homo sapiens
tccgaatcaatacgagagctgggatcaatgctatcttgctgttgctgccttttcatggaatcatttgacatctgtactttatta

SEQ ID NO: 163217 - DNA, 83 bp, Homo sapiens
aatacgagagctgggatcaatgctatcttgctgttgctgccttttcatggaatcatttgacatctgtactttattaatgcgta

SEQ ID NO: 163218 - DNA, 84 bp, Homo sapiens
tgggatcaatgctatcttgctgttgctgccttttcatggaatcatttgacatctgtactttattaatgcgtaaagcagctctgt

SEQ ID NO: 163219 - DNA, 83 bp, Homo sapiens
aatgctatcttgctgttgctgccttttcatggaatcatttgacatctgtactttattaatgcgtaaagcagctctgttatctc

SEQ ID NO: 163220 - DNA, 79 bp, Homo sapiens
ctgttgctgccttttcatggaatcatttgacatctgtactttattaatgcgtaaagcagctctgttatctctggctttt

SEQ ID NO: 163221 - DNA, 79 bp, Homo sapiens
ttttcatggaatcatttgacatctgtactttattaatgcgtaaagcagctctgttatctctggctttttgctttgacaa

SEQ ID NO: 163222 - DNA, 77 bp, Homo sapiens
aatcatttgacatctgtactttattaatgcgtaaagcagctctgttatctctggctttttgctttgacaaaagaaga

SEQ ID NO: 163223 - DNA, 76 bp, Homo sapiens
tgacatctgtactttattaatgcgtaaagcagctctgttatctctggctttttgctttgacaaaagaagagaaaaa

SEQ ID NO: 163224 - DNA, 72 bp, Homo sapiens
attaatgcgtaaagcagctctgttatctctggctttttgctttgacaaaagaagagaaaaaaatttcccaga

SEQ ID NO: 163225 - DNA, 69 bp, Homo sapiens
caaataaggttcaagcactgtatttaaatatttaaaagatagaggagtttcttaaaataccacatatgg

SEQ ID NO: 163226 - DNA, 71 bp, Homo sapiens
ggttcaagcactgtatttaaatatttaaaagatagaggagtttcttaaaataccacatatggtgctctttc

SEQ ID NO: 163227 - DNA, 73 bp, Homo sapiens
ctgtatttaaatatttaaaagatagaggagtttcttaaaataccacatatggtgctctttcttgtgagcttgc

SEQ ID NO: 163228 - DNA, 73 bp, Homo sapiens
tttaaaagatagaggagtttcttaaaataccacatatggtgctctttcttgtgagcttgcttttctccacaat

SEQ ID NO: 163229 - DNA, 74 bp, Homo sapiens
atagaggagtttcttaaaataccacatatggtgctctttcttgtgagcttgcttttctccacaatttggcaatt

SEQ ID NO: 163230 - DNA, 77 bp, Homo sapiens
tttcttaaaataccacatatggtgctctttcttgtgagcttgcttttctccacaatttggcaatttgcttcactcta

SEQ ID NO: 163231 - DNA, 79 bp, Homo sapiens
ataccacatatggtgctctttcttgtgagcttgcttttctccacaatttggcaatttgcttcactctagtagtccaatc

SEQ ID NO: 163232 - DNA, 77 bp, Homo sapiens
ctctttcttgtgagcttgcttttctccacaatttggcaatttgcttcactctagtagtccaatctgcaacaaaagaa

SEQ ID NO: 163233 - DNA, 79 bp, Homo sapiens
tgagcttgcttttctccacaatttggcaatttgcttcactctagtagtccaatctgcaacaaaagaacagagtataaca

SEQ ID NO: 163234 - DNA, 75 bp, Homo sapiens
ttttctccacaatttggcaatttgcttcactctagtagtccaatctgcaacaaaagaacagagtataacactttc

SEQ ID NO: 163235 - DNA, 79 bp, Homo sapiens
atttggcaatttgcttcactctagtagtccaatctgcaacaaaagaacagagtataacactttctcagagccatgctaa

SEQ ID NO: 163236 - DNA, 73 bp, Homo sapiens
tgcacatgtgaaaatgttggtaaaacagaaataatatattcatggcttaccagggaattcttcctttaagttg

SEQ ID NO: 163237 - DNA, 68 bp, Homo sapiens
gaaaatgttggtaaaacagaaataatatattcatggcttaccagggaattcttcctttaagttgggga

SEQ ID NO: 163238 - DNA, 69 bp, Homo sapiens
acagaaataatatattcatggcttaccagggaattcttcctttaagttggggaaattaatattggtgta

SEQ ID NO: 163239 - DNA, 69 bp, Homo sapiens
atatattcatggcttaccagggaattcttcctttaagttggggaaattaatattggtgtagagaactgg

SEQ ID NO: 163240 - DNA, 68 bp, Homo sapiens
atggcttaccagggaattcttcctttaagttggggaaattaatattggtgtagagaactggggcaaca

SEQ ID NO: 163241 - DNA, 67 bp, Homo sapiens
agggaattcttcctttaagttggggaaattaatattggtgtagagaactggggcaacagttgccatt

SEQ ID NO: 163242 - DNA, 70 bp, Homo sapiens
cttcctttaagttggggaaattaatattggtgtagagaactggggcaacagttgccatttcacccagagc

SEQ ID NO: 163243 - DNA, 72 bp, Homo sapiens
ggaaattaatattggtgtagagaactggggcaacagttgccatttcacccagagcctcctctttctcccact

SEQ ID NO: 163244 - DNA, 73 bp, Homo sapiens
ttaatattggtgtagagaactggggcaacagttgccatttcacccagagcctcctctttctcccacttaagcg

SEQ ID NO: 163245 - DNA, 76 bp, Homo sapiens
tagagaactggggcaacagttgccatttcacccagagcctcctctttctcccacttaagcgtgcttctctgggcat

SEQ ID NO: 163246 - DNA, 78 bp, Homo sapiens
caacagttgccatttcacccagagcctcctctttctcccacttaagcgtgcttctctgggcattcgacattgtgtcat

SEQ ID NO: 163247 - DNA, 76 bp, Homo sapiens
catttcacccagagcctcctctttctcccacttaagcgtgcttctctgggcattcgacattgtgtcattttctcct

SEQ ID NO: 163248 - DNA, 76 bp, Homo sapiens
agagcctcctctttctcccacttaagcgtgcttctctgggcattcgacattgtgtcattttctccttccacagtgg

SEQ ID NO: 163249 - DNA, 81 bp, Homo sapiens
tctttctcccacttaagcgtgcttctctgggcattcgacattgtgtcattttctccttccacagtgggagctgatgatgtc

SEQ ID NO: 163250 - DNA, 80 bp, Homo sapiens
acttaagcgtgcttctctgggcattcgacattgtgtcattttctccttccacagtgggagctgatgatgtccaagagttg

SEQ ID NO: 163251 - DNA, 80 bp, Homo sapiens
cttctctgggcattcgacattgtgtcattttctccttccacagtgggagctgatgatgtccaagagttgttaggatcact

SEQ ID NO: 163252 - DNA, 81 bp, Homo sapiens
cattcgacattgtgtcattttctccttccacagtgggagctgatgatgtccaagagttgttaggatcacttgccattggat

SEQ ID NO: 163253 - DNA, 79 bp, Homo sapiens
acattgtgtcattttctccttccacagtgggagctgatgatgtccaagagttgttaggatcacttgccattggattaaa

SEQ ID NO: 163254 - DNA, 77 bp, Homo sapiens
tttctccttccacagtgggagctgatgatgtccaagagttgttaggatcacttgccattggattaaaggctgaattt

SEQ ID NO: 163255 - DNA, 77 bp, Homo sapiens
ttccacagtgggagctgatgatgtccaagagttgttaggatcacttgccattggattaaaggctgaatttttatccc

SEQ ID NO: 163256 - DNA, 74 bp, Homo sapiens
agctgatgatgtccaagagttgttaggatcacttgccattggattaaaggctgaatttttatccctgggaaaaa

SEQ ID NO: 163257 - DNA, 70 bp, Homo sapiens
atgtccaagagttgttaggatcacttgccattggattaaaggctgaatttttatccctgggaaaaaataa

SEQ ID NO: 163258 - DNA, 69 bp, Homo sapiens
gttgttaggatcacttgccattggattaaaggctgaatttttatccctgggaaaaaataaatatcttta

SEQ ID NO: 163259 - DNA, 69 bp, Homo sapiens
cacttgccattggattaaaggctgaatttttatccctgggaaaaaataaatatctttactttatgaaca

SEQ ID NO: 163260 - DNA, 74 bp, Homo sapiens
tcaaacagaaattagtgcaatttaagtttccatagaaaataaggcttgtacctggcatcaggataagaggattg

SEQ ID NO: 163261 - DNA, 78 bp, Homo sapiens
attagtgcaatttaagtttccatagaaaataaggcttgtacctggcatcaggataagaggattgtgcaattgcagaga

SEQ ID NO: 163262 - DNA, 75 bp, Homo sapiens
tttaagtttccatagaaaataaggcttgtacctggcatcaggataagaggattgtgcaattgcagagaaagttcc

SEQ ID NO: 163263 - DNA, 77 bp, Homo sapiens
atagaaaataaggcttgtacctggcatcaggataagaggattgtgcaattgcagagaaagttcccagtccgcttcca

SEQ ID NO: 163264 - DNA, 78 bp, Homo sapiens
ttgtacctggcatcaggataagaggattgtgcaattgcagagaaagttcccagtccgcttccaggtggcaaagaatta

SEQ ID NO: 163265 - DNA, 80 bp, Homo sapiens
catcaggataagaggattgtgcaattgcagagaaagttcccagtccgcttccaggtggcaaagaattatgtgggagatga

SEQ ID NO: 163266 - DNA, 77 bp, Homo sapiens
ataagaggattgtgcaattgcagagaaagttcccagtccgcttccaggtggcaaagaattatgtgggagatgaggac

SEQ ID NO: 163267 - DNA, 79 bp, Homo sapiens
tgtgcaattgcagagaaagttcccagtccgcttccaggtggcaaagaattatgtgggagatgaggactggatccaataa

SEQ ID NO: 163268 - DNA, 75 bp, Homo sapiens
agaaagttcccagtccgcttccaggtggcaaagaattatgtgggagatgaggactggatccaataaggccattca

SEQ ID NO: 163269 - DNA, 80 bp, Homo sapiens
ttcccagtccgcttccaggtggcaaagaattatgtgggagatgaggactggatccaataaggccattcatgagaggcatc

SEQ ID NO: 163270 - DNA, 78 bp, Homo sapiens
cttccaggtggcaaagaattatgtgggagatgaggactggatccaataaggccattcatgagaggcatccgtgaaaaa

SEQ ID NO: 163271 - DNA, 80 bp, Homo sapiens
aaagaattatgtgggagatgaggactggatccaataaggccattcatgagaggcatccgtgaaaaagcatcttcagagaa

SEQ ID NO: 163272 - DNA, 79 bp, Homo sapiens
ttatgtgggagatgaggactggatccaataaggccattcatgagaggcatccgtgaaaaagcatcttcagagaaaaaaa

SEQ ID NO: 163273 - DNA, 74 bp, Homo sapiens
aggactggatccaataaggccattcatgagaggcatccgtgaaaaagcatcttcagagaaaaaaataattccgt

SEQ ID NO: 163274 - DNA, 77 bp, Homo sapiens
atccaataaggccattcatgagaggcatccgtgaaaaagcatcttcagagaaaaaaataattccgttggcatgatat

SEQ ID NO: 163275 - DNA, 81 bp, Homo sapiens
atacacatgtgtgtgaatataatgtagaattataaagtcataacataccctgattgtgtattggcaacagctgtgttggtg

SEQ ID NO: 163276 - DNA, 78 bp, Homo sapiens
tgtgtgaatataatgtagaattataaagtcataacataccctgattgtgtattggcaacagctgtgttggtgggggag

SEQ ID NO: 163277 - DNA, 79 bp, Homo sapiens
tataatgtagaattataaagtcataacataccctgattgtgtattggcaacagctgtgttggtgggggaggctgtggca

SEQ ID NO: 163278 - DNA, 76 bp, Homo sapiens
aattataaagtcataacataccctgattgtgtattggcaacagctgtgttggtgggggaggctgtggcaatggagt

SEQ ID NO: 163279 - DNA, 80 bp, Homo sapiens
ataacataccctgattgtgtattggcaacagctgtgttggtgggggaggctgtggcaatggagttggctgagtgttcgca

SEQ ID NO: 163280 - DNA, 79 bp, Homo sapiens
attgtgtattggcaacagctgtgttggtgggggaggctgtggcaatggagttggctgagtgttcgcaggactaagtaca

SEQ ID NO: 163281 - DNA, 80 bp, Homo sapiens
tattggcaacagctgtgttggtgggggaggctgtggcaatggagttggctgagtgttcgcaggactaagtacagctgtaa

SEQ ID NO: 163282 - DNA, 78 bp, Homo sapiens
tgtgttggtgggggaggctgtggcaatggagttggctgagtgttcgcaggactaagtacagctgtaaataagtcttca

SEQ ID NO: 163283 - DNA, 77 bp, Homo sapiens
gggaggctgtggcaatggagttggctgagtgttcgcaggactaagtacagctgtaaataagtcttcaacatcttttc

SEQ ID NO: 163284 - DNA, 77 bp, Homo sapiens
ctgtggcaatggagttggctgagtgttcgcaggactaagtacagctgtaaataagtcttcaacatcttttccgccaa

SEQ ID NO: 163285 - DNA, 77 bp, Homo sapiens
ttggctgagtgttcgcaggactaagtacagctgtaaataagtcttcaacatcttttccgccaagctctaggagataa

SEQ ID NO: 163286 - DNA, 75 bp, Homo sapiens
tgttcgcaggactaagtacagctgtaaataagtcttcaacatcttttccgccaagctctaggagataaaacaata

SEQ ID NO: 163287 - DNA, 72 bp, Homo sapiens
aggactaagtacagctgtaaataagtcttcaacatcttttccgccaagctctaggagataaaacaataatag

SEQ ID NO: 163288 - DNA, 73 bp, Homo sapiens
cagctgtaaataagtcttcaacatcttttccgccaagctctaggagataaaacaataatagtaacaagattaa

SEQ ID NO: 163289 - DNA, 70 bp, Homo sapiens
tccgccaagctctaggagataaaacaataatagtaacaagattaaaagactagtagggtcctggtatggg

SEQ ID NO: 163290 - DNA, 67 bp, Homo sapiens
aatagtaacaagattaaaagactagtagggtcctggtatggggaacgccattttcattaactagaaa

SEQ ID NO: 163291 - DNA, 68 bp, Homo sapiens
caagattaaaagactagtagggtcctggtatggggaacgccattttcattaactagaaaatcaaaaca

SEQ ID NO: 163292 - DNA, 68 bp, Homo sapiens
tagtagggtcctggtatggggaacgccattttcattaactagaaaatcaaaacacatttacctggaat

SEQ ID NO: 163293 - DNA, 68 bp, Homo sapiens
ggtcctggtatggggaacgccattttcattaactagaaaatcaaaacacatttacctggaattttata

SEQ ID NO: 163294 - DNA, 67 bp, Homo sapiens
gggaacgccattttcattaactagaaaatcaaaacacatttacctggaattttatataattttccaa

SEQ ID NO: 163295 - DNA, 70 bp, Homo sapiens
ttcattaactagaaaatcaaaacacatttacctggaattttatataattttccaagaattgctcctagaa

SEQ ID NO: 163296 - DNA, 69 bp, Homo sapiens
ctagaaaatcaaaacacatttacctggaattttatataattttccaagaattgctcctagaataaatta

SEQ ID NO: 163297 - DNA, 67 bp, Homo sapiens
tcaaaacacatttacctggaattttatataattttccaagaattgctcctagaataaattaaaaaaa

SEQ ID NO: 163298 - DNA, 71 bp, Homo sapiens
atttactcaggtcttttagaaagcctagatgtagggcaaatattttaccatctgtgaccattttgtctagt

SEQ ID NO: 163299 - DNA, 73 bp, Homo sapiens
aggtcttttagaaagcctagatgtagggcaaatattttaccatctgtgaccattttgtctagttcaggactga

SEQ ID NO: 163300 - DNA, 76 bp, Homo sapiens
agaaagcctagatgtagggcaaatattttaccatctgtgaccattttgtctagttcaggactgaggatcccatcta

SEQ ID NO: 163301 - DNA, 77 bp, Homo sapiens
tagggcaaatattttaccatctgtgaccattttgtctagttcaggactgaggatcccatctagctgttcttcactta

SEQ ID NO: 163302 - DNA, 75 bp, Homo sapiens
aaatattttaccatctgtgaccattttgtctagttcaggactgaggatcccatctagctgttcttcacttaatgg

SEQ ID NO: 163303 - DNA, 80 bp, Homo sapiens
tgtgaccattttgtctagttcaggactgaggatcccatctagctgttcttcacttaatggtcgtgaactctgattgacat

SEQ ID NO: 163304 - DNA, 78 bp, Homo sapiens
ccattttgtctagttcaggactgaggatcccatctagctgttcttcacttaatggtcgtgaactctgattgacatttg

SEQ ID NO: 163305 - DNA, 81 bp, Homo sapiens
tagttcaggactgaggatcccatctagctgttcttcacttaatggtcgtgaactctgattgacatttggctgaggcaaaga

SEQ ID NO: 163306 - DNA, 81 bp, Homo sapiens
aggatcccatctagctgttcttcacttaatggtcgtgaactctgattgacatttggctgaggcaaagaggaaggatcatca

SEQ ID NO: 163307 - DNA, 82 bp, Homo sapiens
atctagctgttcttcacttaatggtcgtgaactctgattgacatttggctgaggcaaagaggaaggatcatcagtgacagga

SEQ ID NO: 163308 - DNA, 82 bp, Homo sapiens
ttcacttaatggtcgtgaactctgattgacatttggctgaggcaaagaggaaggatcatcagtgacaggaccaatatctaca

SEQ ID NO: 163309 - DNA, 81 bp, Homo sapiens
aatggtcgtgaactctgattgacatttggctgaggcaaagaggaaggatcatcagtgacaggaccaatatctacaagagta

SEQ ID NO: 163310 - DNA, 78 bp, Homo sapiens
tgattgacatttggctgaggcaaagaggaaggatcatcagtgacaggaccaatatctacaagagtaaggaaaataaat

SEQ ID NO: 163311 - DNA, 74 bp, Homo sapiens
atttggctgaggcaaagaggaaggatcatcagtgacaggaccaatatctacaagagtaaggaaaataaatttaa

SEQ ID NO: 163312 - DNA, 81 bp, Homo sapiens
gctcacatcagaaaccagaaaaagggtaaacagtattcatatatacctgaatgatcaactgattttgctagatcatctgaa

SEQ ID NO: 163313 - DNA, 78 bp, Homo sapiens
catcagaaaccagaaaaagggtaaacagtattcatatatacctgaatgatcaactgattttgctagatcatctgaaat

SEQ ID NO: 163314 - DNA, 78 bp, Homo sapiens
cagaaaaagggtaaacagtattcatatatacctgaatgatcaactgattttgctagatcatctgaaattattccaaga

SEQ ID NO: 163315 - DNA, 84 bp, Homo sapiens
gtaaacagtattcatatatacctgaatgatcaactgattttgctagatcatctgaaattattccaagaatgtcatcatctgtgt

SEQ ID NO: 163316 - DNA, 84 bp, Homo sapiens
tcatatatacctgaatgatcaactgattttgctagatcatctgaaattattccaagaatgtcatcatctgtgtttaaaacttca

SEQ ID NO: 163317 - DNA, 83 bp, Homo sapiens
gaatgatcaactgattttgctagatcatctgaaattattccaagaatgtcatcatctgtgtttaaaacttcagaaatatcagc

SEQ ID NO: 163318 - DNA, 81 bp, Homo sapiens
gattttgctagatcatctgaaattattccaagaatgtcatcatctgtgtttaaaacttcagaaatatcagctaatgggtca

SEQ ID NO: 163319 - DNA, 83 bp, Homo sapiens
tagatcatctgaaattattccaagaatgtcatcatctgtgtttaaaacttcagaaatatcagctaatgggtcatcagcaggac

SEQ ID NO: 163320 - DNA, 78 bp, Homo sapiens
aattattccaagaatgtcatcatctgtgtttaaaacttcagaaatatcagctaatgggtcatcagcaggacctaaata

SEQ ID NO: 163321 - DNA, 79 bp, Homo sapiens
tccaagaatgtcatcatctgtgtttaaaacttcagaaatatcagctaatgggtcatcagcaggacctaaatatagtaaa

SEQ ID NO: 163322 - DNA, 77 bp, Homo sapiens
gtcatcatctgtgtttaaaacttcagaaatatcagctaatgggtcatcagcaggacctaaatatagtaaatatgttt

SEQ ID NO: 163323 - DNA, 72 bp, Homo sapiens
gtgtttaaaacttcagaaatatcagctaatgggtcatcagcaggacctaaatatagtaaatatgttttttaa

SEQ ID NO: 163324 - DNA, 76 bp, Homo sapiens
gtatgttatatgatataaagaaaatatctgtgaataattctacataccgtgagttccagattttgttggagccgag

SEQ ID NO: 163325 - DNA, 76 bp, Homo sapiens
tgatataaagaaaatatctgtgaataattctacataccgtgagttccagattttgttggagccgaggatgaactaa

SEQ ID NO: 163326 - DNA, 74 bp, Homo sapiens
aaaatatctgtgaataattctacataccgtgagttccagattttgttggagccgaggatgaactaagtagtgga

SEQ ID NO: 163327 - DNA, 73 bp, Homo sapiens
gaataattctacataccgtgagttccagattttgttggagccgaggatgaactaagtagtggatctaaggaag

SEQ ID NO: 163328 - DNA, 74 bp, Homo sapiens
attctacataccgtgagttccagattttgttggagccgaggatgaactaagtagtggatctaaggaaggatcca

SEQ ID NO: 163329 - DNA, 71 bp, Homo sapiens
agttccagattttgttggagccgaggatgaactaagtagtggatctaaggaaggatccaagaaacctgtgt

SEQ ID NO: 163330 - DNA, 72 bp, Homo sapiens
agattttgttggagccgaggatgaactaagtagtggatctaaggaaggatccaagaaacctgtgttcatgtt

SEQ ID NO: 163331 - DNA, 72 bp, Homo sapiens
agccgaggatgaactaagtagtggatctaaggaaggatccaagaaacctgtgttcatgtttgttttatataa

SEQ ID NO: 163332 - DNA, 73 bp, Homo sapiens
atgaactaagtagtggatctaaggaaggatccaagaaacctgtgttcatgtttgttttatataaaagctgagc

SEQ ID NO: 163333 - DNA, 77 bp, Homo sapiens
tagtggatctaaggaaggatccaagaaacctgtgttcatgtttgttttatataaaagctgagctccatcttctgaca

SEQ ID NO: 163334 - DNA, 75 bp, Homo sapiens
aaggatccaagaaacctgtgttcatgtttgttttatataaaagctgagctccatcttctgacagattatctaaac

SEQ ID NO: 163335 - DNA, 77 bp, Homo sapiens
caagaaacctgtgttcatgtttgttttatataaaagctgagctccatcttctgacagattatctaaacttatcttgc

SEQ ID NO: 163336 - DNA, 78 bp, Homo sapiens
ctgtgttcatgtttgttttatataaaagctgagctccatcttctgacagattatctaaacttatcttgctttgtctac

SEQ ID NO: 163337 - DNA, 79 bp, Homo sapiens
ttttatataaaagctgagctccatcttctgacagattatctaaacttatcttgctttgtctacttgtatctagaagatc

SEQ ID NO: 163338 - DNA, 78 bp, Homo sapiens
ataaaagctgagctccatcttctgacagattatctaaacttatcttgctttgtctacttgtatctagaagatcttttc

SEQ ID NO: 163339 - DNA, 77 bp, Homo sapiens
gagctccatcttctgacagattatctaaacttatcttgctttgtctacttgtatctagaagatcttttccaaagaaa

SEQ ID NO: 163340 - DNA, 75 bp, Homo sapiens
ctgacagattatctaaacttatcttgctttgtctacttgtatctagaagatcttttccaaagaaagcttcctaga

SEQ ID NO: 163341 - DNA, 75 bp, Homo sapiens
ctaaacttatcttgctttgtctacttgtatctagaagatcttttccaaagaaagcttcctagatgaagataagca

SEQ ID NO: 163342 - DNA, 76 bp, Homo sapiens
atcttgctttgtctacttgtatctagaagatcttttccaaagaaagcttcctagatgaagataagcacatacaaaa

SEQ ID NO: 163343 - DNA, 75 bp, Homo sapiens
gtctacttgtatctagaagatcttttccaaagaaagcttcctagatgaagataagcacatacaaaaatggttaga

SEQ ID NO: 163344 - DNA, 68 bp, Homo sapiens
tcctcaattaacaaaccatgtaaaataatgtaaagcaaaatattacttgtaaataggcagggaaagtt

SEQ ID NO: 163345 - DNA, 69 bp, Homo sapiens
taacaaaccatgtaaaataatgtaaagcaaaatattacttgtaaataggcagggaaagtttcttcaagc

SEQ ID NO: 163346 - DNA, 68 bp, Homo sapiens
ccatgtaaaataatgtaaagcaaaatattacttgtaaataggcagggaaagtttcttcaagcttattt

SEQ ID NO: 163347 - DNA, 65 bp, Homo sapiens
aatgtaaagcaaaatattacttgtaaataggcagggaaagtttcttcaagcttatttttcctttt

SEQ ID NO: 163348 - DNA, 66 bp, Homo sapiens
tattacttgtaaataggcagggaaagtttcttcaagcttatttttcctttttcggtatctcttctt

SEQ ID NO: 163349 - DNA, 65 bp, Homo sapiens
cttgtaaataggcagggaaagtttcttcaagcttatttttcctttttcggtatctcttctttatt

SEQ ID NO: 163350 - DNA, 66 bp, Homo sapiens
ggcagggaaagtttcttcaagcttatttttcctttttcggtatctcttctttattttttcagtgct

SEQ ID NO: 163351 - DNA, 68 bp, Homo sapiens
gtttcttcaagcttatttttcctttttcggtatctcttctttattttttcagtgctttcagtaacaga

SEQ ID NO: 163352 - DNA, 69 bp, Homo sapiens
atttttcctttttcggtatctcttctttattttttcagtgctttcagtaacagaaacagattcatcaac

SEQ ID NO: 163353 - DNA, 72 bp, Homo sapiens
ttttcggtatctcttctttattttttcagtgctttcagtaacagaaacagattcatcaactaaagtatctgg

SEQ ID NO: 163354 - DNA, 75 bp, Homo sapiens
cttctttattttttcagtgctttcagtaacagaaacagattcatcaactaaagtatctggtaactgctcactcca

SEQ ID NO: 163355 - DNA, 77 bp, Homo sapiens
tttttcagtgctttcagtaacagaaacagattcatcaactaaagtatctggtaactgctcactccagcctgaaacaa

SEQ ID NO: 163356 - DNA, 78 bp, Homo sapiens
tttcagtaacagaaacagattcatcaactaaagtatctggtaactgctcactccagcctgaaacaacagtcacattta

SEQ ID NO: 163357 - DNA, 78 bp, Homo sapiens
taacagaaacagattcatcaactaaagtatctggtaactgctcactccagcctgaaacaacagtcacatttataaata

SEQ ID NO: 163358 - DNA, 78 bp, Homo sapiens
attcatcaactaaagtatctggtaactgctcactccagcctgaaacaacagtcacatttataaatatgtgacatttaa

SEQ ID NO: 163359 - DNA, 73 bp, Homo sapiens
aatttttttttaagtcagtactataccatcatctctgcaaggtaactgctcggaaatagagcctgaggaatct

SEQ ID NO: 163360 - DNA, 79 bp, Homo sapiens
tttttaagtcagtactataccatcatctctgcaaggtaactgctcggaaatagagcctgaggaatcttttctgatcaca

SEQ ID NO: 163361 - DNA, 79 bp, Homo sapiens
tactataccatcatctctgcaaggtaactgctcggaaatagagcctgaggaatcttttctgatcacagatcttttggtt

SEQ ID NO: 163362 - DNA, 76 bp, Homo sapiens
atcatctctgcaaggtaactgctcggaaatagagcctgaggaatcttttctgatcacagatcttttggttttccct

SEQ ID NO: 163363 - DNA, 72 bp, Homo sapiens
aaggtaactgctcggaaatagagcctgaggaatcttttctgatcacagatcttttggttttcccttgcccag

SEQ ID NO: 163364 - DNA, 72 bp, Homo sapiens
tcggaaatagagcctgaggaatcttttctgatcacagatcttttggttttcccttgcccagttcgacttctt

SEQ ID NO: 163365 - DNA, 74 bp, Homo sapiens
gcctgaggaatcttttctgatcacagatcttttggttttcccttgcccagttcgacttctttgccgcaccataa

SEQ ID NO: 163366 - DNA, 73 bp, Homo sapiens
tcttttctgatcacagatcttttggttttcccttgcccagttcgacttctttgccgcaccataaatccaccaa

SEQ ID NO: 163367 - DNA, 72 bp, Homo sapiens
atcacagatcttttggttttcccttgcccagttcgacttctttgccgcaccataaatccaccaatacctatc

SEQ ID NO: 163368 - DNA, 68 bp, Homo sapiens
ttttggttttcccttgcccagttcgacttctttgccgcaccataaatccaccaatacctatccaaaaa

SEQ ID NO: 163369 - DNA, 68 bp, Homo sapiens
ttttcccttgcccagttcgacttctttgccgcaccataaatccaccaatacctatccaaaaaagaaat

SEQ ID NO: 163370 - DNA, 69 bp, Homo sapiens
agttcgacttctttgccgcaccataaatccaccaatacctatccaaaaaagaaattaggtaaactgata

SEQ ID NO: 163371 - DNA, 73 bp, Homo sapiens
ttaattaaccaagtgttgatgatattgaaatgtctacctcaggcactatacctggtctgtatggtttcctttt

SEQ ID NO: 163372 - DNA, 74 bp, Homo sapiens
aagtgttgatgatattgaaatgtctacctcaggcactatacctggtctgtatggtttcctttttctctttttga

SEQ ID NO: 163373 - DNA, 73 bp, Homo sapiens
atattgaaatgtctacctcaggcactatacctggtctgtatggtttcctttttctctttttgacaccatctgt

SEQ ID NO: 163374 - DNA, 73 bp, Homo sapiens
tgtctacctcaggcactatacctggtctgtatggtttcctttttctctttttgacaccatctgttccttccac

SEQ ID NO: 163375 - DNA, 68 bp, Homo sapiens
actatacctggtctgtatggtttcctttttctctttttgacaccatctgttccttccactcccttagt

SEQ ID NO: 163376 - DNA, 73 bp, Homo sapiens
tggtctgtatggtttcctttttctctttttgacaccatctgttccttccactcccttagtttcatcatccaca

SEQ ID NO: 163377 - DNA, 71 bp, Homo sapiens
atggtttcctttttctctttttgacaccatctgttccttccactcccttagtttcatcatccacagcttcc

SEQ ID NO: 163378 - DNA, 77 bp, Homo sapiens
tctttttgacaccatctgttccttccactcccttagtttcatcatccacagcttcccgctcaggactagattctgat

SEQ ID NO: 163379 - DNA, 78 bp, Homo sapiens
ttgacaccatctgttccttccactcccttagtttcatcatccacagcttcccgctcaggactagattctgattttcca

SEQ ID NO: 163380 - DNA, 78 bp, Homo sapiens
ttccttccactcccttagtttcatcatccacagcttcccgctcaggactagattctgattttccatcacaatccataa

SEQ ID NO: 163381 - DNA, 78 bp, Homo sapiens
tcccttagtttcatcatccacagcttcccgctcaggactagattctgattttccatcacaatccataagttctccttc

SEQ ID NO: 163382 - DNA, 78 bp, Homo sapiens
tttcatcatccacagcttcccgctcaggactagattctgattttccatcacaatccataagttctccttctggaaaaa

SEQ ID NO: 163383 - DNA, 73 bp, Homo sapiens
acagcttcccgctcaggactagattctgattttccatcacaatccataagttctccttctggaaaaaagtaaa

SEQ ID NO: 163384 - DNA, 75 bp, Homo sapiens
gctcaggactagattctgattttccatcacaatccataagttctccttctggaaaaaagtaaatgtatacacaaa

SEQ ID NO: 163385 - DNA, 73 bp, Homo sapiens
ctagattctgattttccatcacaatccataagttctccttctggaaaaaagtaaatgtatacacaaaactgga

SEQ ID NO: 163386 - DNA, 75 bp, Homo sapiens
gctttaattcttgcacacatatttcatggaaaataaattagtattacctcgactatcatccatttcaccatccct

SEQ ID NO: 163387 - DNA, 78 bp, Homo sapiens
attcttgcacacatatttcatggaaaataaattagtattacctcgactatcatccatttcaccatcccttgaatgctc

SEQ ID NO: 163388 - DNA, 78 bp, Homo sapiens
atatttcatggaaaataaattagtattacctcgactatcatccatttcaccatcccttgaatgctctgattggatgtc

SEQ ID NO: 163389 - DNA, 76 bp, Homo sapiens
ggaaaataaattagtattacctcgactatcatccatttcaccatcccttgaatgctctgattggatgtctggaggg

SEQ ID NO: 163390 - DNA, 78 bp, Homo sapiens
attagtattacctcgactatcatccatttcaccatcccttgaatgctctgattggatgtctggaggggtctgaaggac

SEQ ID NO: 163391 - DNA, 80 bp, Homo sapiens
actatcatccatttcaccatcccttgaatgctctgattggatgtctggaggggtctgaaggacggccacgctattctgat

SEQ ID NO: 163392 - DNA, 78 bp, Homo sapiens
atttcaccatcccttgaatgctctgattggatgtctggaggggtctgaaggacggccacgctattctgatttataatc

SEQ ID NO: 163393 - DNA, 77 bp, Homo sapiens
atcccttgaatgctctgattggatgtctggaggggtctgaaggacggccacgctattctgatttataatcttcaatt

SEQ ID NO: 163394 - DNA, 76 bp, Homo sapiens
aatgctctgattggatgtctggaggggtctgaaggacggccacgctattctgatttataatcttcaatttcaattt

SEQ ID NO: 163395 - DNA, 72 bp, Homo sapiens
attggatgtctggaggggtctgaaggacggccacgctattctgatttataatcttcaatttcaattttggtt

SEQ ID NO: 163396 - DNA, 69 bp, Homo sapiens
gggtctgaaggacggccacgctattctgatttataatcttcaatttcaattttggttttgaccgttttc

SEQ ID NO: 163397 - DNA, 70 bp, Homo sapiens
tgaaggacggccacgctattctgatttataatcttcaatttcaattttggttttgaccgttttcttcttg

SEQ ID NO: 163398 - DNA, 69 bp, Homo sapiens
ccacgctattctgatttataatcttcaatttcaattttggttttgaccgttttcttcttggaactgtaa

SEQ ID NO: 163399 - DNA, 70 bp, Homo sapiens
gatttataatcttcaatttcaattttggttttgaccgttttcttcttggaactgtaactgtgaggctctg

SEQ ID NO: 163400 - DNA, 70 bp, Homo sapiens
atcttcaatttcaattttggttttgaccgttttcttcttggaactgtaactgtgaggctctgtaactgag

SEQ ID NO: 163401 - DNA, 72 bp, Homo sapiens
aattttggttttgaccgttttcttcttggaactgtaactgtgaggctctgtaactgagtcatccctgattca

SEQ ID NO: 163402 - DNA, 76 bp, Homo sapiens
ttttgaccgttttcttcttggaactgtaactgtgaggctctgtaactgagtcatccctgattcagtcaaacacaca

SEQ ID NO: 163403 - DNA, 79 bp, Homo sapiens
tcttcttggaactgtaactgtgaggctctgtaactgagtcatccctgattcagtcaaacacacaccatcctgggtataa

SEQ ID NO: 163404 - DNA, 77 bp, Homo sapiens
aactgtaactgtgaggctctgtaactgagtcatccctgattcagtcaaacacacaccatcctgggtataagtcttgg

SEQ ID NO: 163405 - DNA, 75 bp, Homo sapiens
aggctctgtaactgagtcatccctgattcagtcaaacacacaccatcctgggtataagtcttgggtgggtctaaa

SEQ ID NO: 163406 - DNA, 74 bp, Homo sapiens
taactgagtcatccctgattcagtcaaacacacaccatcctgggtataagtcttgggtgggtctaaaattacaa

SEQ ID NO: 163407 - DNA, 71 bp, Homo sapiens
atccctgattcagtcaaacacacaccatcctgggtataagtcttgggtgggtctaaaattacaaaatccca

SEQ ID NO: 163408 - DNA, 69 bp, Homo sapiens
tcaaacacacaccatcctgggtataagtcttgggtgggtctaaaattacaaaatcccaaggatacaaat

SEQ ID NO: 163409 - DNA, 66 bp, Homo sapiens
agccaattatgtaaaaattaagcaaagtaaattaattaaatcaagtaaagcatttcaaattttacc

SEQ ID NO: 163410 - DNA, 65 bp, Homo sapiens
gtaaaaattaagcaaagtaaattaattaaatcaagtaaagcatttcaaattttacctagctcttt

SEQ ID NO: 163411 - DNA, 68 bp, Homo sapiens
gcaaagtaaattaattaaatcaagtaaagcatttcaaattttacctagctcttttacttttgtgacaa

SEQ ID NO: 163412 - DNA, 70 bp, Homo sapiens
taattaaatcaagtaaagcatttcaaattttacctagctcttttacttttgtgacaatttgtgctacaag

SEQ ID NO: 163413 - DNA, 73 bp, Homo sapiens
caagtaaagcatttcaaattttacctagctcttttacttttgtgacaatttgtgctacaagtgaagattcaca

SEQ ID NO: 163414 - DNA, 76 bp, Homo sapiens
aagcatttcaaattttacctagctcttttacttttgtgacaatttgtgctacaagtgaagattcacagcagtctga

SEQ ID NO: 163415 - DNA, 75 bp, Homo sapiens
aattttacctagctcttttacttttgtgacaatttgtgctacaagtgaagattcacagcagtctgaggaaggcac

SEQ ID NO: 163416 - DNA, 75 bp, Homo sapiens
ctcttttacttttgtgacaatttgtgctacaagtgaagattcacagcagtctgaggaaggcactgaaacgaaaaa

SEQ ID NO: 163417 - DNA, 73 bp, Homo sapiens
cttttgtgacaatttgtgctacaagtgaagattcacagcagtctgaggaaggcactgaaacgaaaaaaaaaaa

SEQ ID NO: 163418 - DNA, 79 bp, Homo sapiens
aagtgagtggtacaagagtgcagactcacagtttaaattattctcttaccattagacgcaggcatatagggtctgcaca

SEQ ID NO: 163419 - DNA, 80 bp, Homo sapiens
aagagtgcagactcacagtttaaattattctcttaccattagacgcaggcatatagggtctgcacatgctacaatcaaaa

SEQ ID NO: 163420 - DNA, 78 bp, Homo sapiens
agactcacagtttaaattattctcttaccattagacgcaggcatatagggtctgcacatgctacaatcaaaaccaatg

SEQ ID NO: 163421 - DNA, 79 bp, Homo sapiens
ttaaattattctcttaccattagacgcaggcatatagggtctgcacatgctacaatcaaaaccaatgtctgctacattt

SEQ ID NO: 163422 - DNA, 80 bp, Homo sapiens
attctcttaccattagacgcaggcatatagggtctgcacatgctacaatcaaaaccaatgtctgctacattttccacttc

SEQ ID NO: 163423 - DNA, 80 bp, Homo sapiens
attagacgcaggcatatagggtctgcacatgctacaatcaaaaccaatgtctgctacattttccacttcttcctcagtat

SEQ ID NO: 163424 - DNA, 78 bp, Homo sapiens
atatagggtctgcacatgctacaatcaaaaccaatgtctgctacattttccacttcttcctcagtatttaagttctga

SEQ ID NO: 163425 - DNA, 77 bp, Homo sapiens
ggtctgcacatgctacaatcaaaaccaatgtctgctacattttccacttcttcctcagtatttaagttctgacaaac

SEQ ID NO: 163426 - DNA, 80 bp, Homo sapiens
tacaatcaaaaccaatgtctgctacattttccacttcttcctcagtatttaagttctgacaaactgcatgcatccatcta

SEQ ID NO: 163427 - DNA, 76 bp, Homo sapiens
aaaaccaatgtctgctacattttccacttcttcctcagtatttaagttctgacaaactgcatgcatccatctaaaa

SEQ ID NO: 163428 - DNA, 76 bp, Homo sapiens
ctacattttccacttcttcctcagtatttaagttctgacaaactgcatgcatccatctaaaaagaccatatttgta

SEQ ID NO: 163429 - DNA, 75 bp, Homo sapiens
ttttccacttcttcctcagtatttaagttctgacaaactgcatgcatccatctaaaaagaccatatttgtacatt

SEQ ID NO: 163430 - DNA, 73 bp, Homo sapiens
cttcctcagtatttaagttctgacaaactgcatgcatccatctaaaaagaccatatttgtacattttttttaa

SEQ ID NO: 163431 - DNA, 76 bp, Homo sapiens
gctacatttcaaagagaaaagctttaaaaagatgaaaaaatagcacaatacctatcacattgtctacattgcagaa

SEQ ID NO: 163432 - DNA, 76 bp, Homo sapiens
gaaaagctttaaaaagatgaaaaaatagcacaatacctatcacattgtctacattgcagaataagatcttcttctc

SEQ ID NO: 163433 - DNA, 77 bp, Homo sapiens
aaaaagatgaaaaaatagcacaatacctatcacattgtctacattgcagaataagatcttcttctctatagtttcga

SEQ ID NO: 163434 - DNA, 81 bp, Homo sapiens
aaaaatagcacaatacctatcacattgtctacattgcagaataagatcttcttctctatagtttcgatagcagactggaca

SEQ ID NO: 163435 - DNA, 81 bp, Homo sapiens
acaatacctatcacattgtctacattgcagaataagatcttcttctctatagtttcgatagcagactggacaggaagataa

SEQ ID NO: 163436 - DNA, 84 bp, Homo sapiens
tatcacattgtctacattgcagaataagatcttcttctctatagtttcgatagcagactggacaggaagataagcttgcacaag

SEQ ID NO: 163437 - DNA, 84 bp, Homo sapiens
tacattgcagaataagatcttcttctctatagtttcgatagcagactggacaggaagataagcttgcacaaggagcgcactgtg

SEQ ID NO: 163438 - DNA, 80 bp, Homo sapiens
aataagatcttcttctctatagtttcgatagcagactggacaggaagataagcttgcacaaggagcgcactgtgtgtaat

SEQ ID NO: 163439 - DNA, 82 bp, Homo sapiens
ttcttctctatagtttcgatagcagactggacaggaagataagcttgcacaaggagcgcactgtgtgtaattgttctgccat

SEQ ID NO: 163440 - DNA, 84 bp, Homo sapiens
tatagtttcgatagcagactggacaggaagataagcttgcacaaggagcgcactgtgtgtaattgttctgccattcacatctta

SEQ ID NO: 163441 - DNA, 86 bp, Homo sapiens
tagcagactggacaggaagataagcttgcacaaggagcgcactgtgtgtaattgttctgccattcacatcttagacctgcagatgt

SEQ ID NO: 163442 - DNA, 85 bp, Homo sapiens
aggaagataagcttgcacaaggagcgcactgtgtgtaattgttctgccattcacatcttagacctgcagatgttgctccacagtg

SEQ ID NO: 163443 - DNA, 88 bp, Homo sapiens
ataagcttgcacaaggagcgcactgtgtgtaattgttctgccattcacatcttagacctgcagatgttgctccacagtgtctgcacca

SEQ ID NO: 163444 - DNA, 85 bp, Homo sapiens
acaaggagcgcactgtgtgtaattgttctgccattcacatcttagacctgcagatgttgctccacagtgtctgcaccaaacacac

SEQ ID NO: 163445 - DNA, 84 bp, Homo sapiens
tgtgtgtaattgttctgccattcacatcttagacctgcagatgttgctccacagtgtctgcaccaaacacacctgaaatccaaa

SEQ ID NO: 163446 - DNA, 82 bp, Homo sapiens
taattgttctgccattcacatcttagacctgcagatgttgctccacagtgtctgcaccaaacacacctgaaatccaaatccc

SEQ ID NO: 163447 - DNA, 77 bp, Homo sapiens
attcacatcttagacctgcagatgttgctccacagtgtctgcaccaaacacacctgaaatccaaatccccccgaaaa

SEQ ID NO: 163448 - DNA, 76 bp, Homo sapiens
tagacctgcagatgttgctccacagtgtctgcaccaaacacacctgaaatccaaatccccccgaaaagtctcaatt

SEQ ID NO: 163449 - DNA, 70 bp, Homo sapiens
aaagctctgaacttgaaagactaacaaggcaaacaaaccctagagtaccatttgcacttccagcctcctt

SEQ ID NO: 163450 - DNA, 68 bp, Homo sapiens
aacttgaaagactaacaaggcaaacaaaccctagagtaccatttgcacttccagcctcctttgggaac

SEQ ID NO: 163451 - DNA, 73 bp, Homo sapiens
agactaacaaggcaaacaaaccctagagtaccatttgcacttccagcctcctttgggaactgtctgcaatgga

SEQ ID NO: 163452 - DNA, 73 bp, Homo sapiens
aacaaaccctagagtaccatttgcacttccagcctcctttgggaactgtctgcaatggagggtctaggcagta

SEQ ID NO: 163453 - DNA, 76 bp, Homo sapiens
tagagtaccatttgcacttccagcctcctttgggaactgtctgcaatggagggtctaggcagtaggtgtgataact

SEQ ID NO: 163454 - DNA, 77 bp, Homo sapiens
atttgcacttccagcctcctttgggaactgtctgcaatggagggtctaggcagtaggtgtgataacttatgtcacag

SEQ ID NO: 163455 - DNA, 81 bp, Homo sapiens
agcctcctttgggaactgtctgcaatggagggtctaggcagtaggtgtgataacttatgtcacagtcatcacacagcagga

SEQ ID NO: 163456 - DNA, 81 bp, Homo sapiens
tttgggaactgtctgcaatggagggtctaggcagtaggtgtgataacttatgtcacagtcatcacacagcaggagtcttcc

SEQ ID NO: 163457 - DNA, 81 bp, Homo sapiens
gcaatggagggtctaggcagtaggtgtgataacttatgtcacagtcatcacacagcaggagtcttcctgggtcagttgcct

SEQ ID NO: 163458 - DNA, 79 bp, Homo sapiens
agggtctaggcagtaggtgtgataacttatgtcacagtcatcacacagcaggagtcttcctgggtcagttgccttccca

SEQ ID NO: 163459 - DNA, 81 bp, Homo sapiens
agtaggtgtgataacttatgtcacagtcatcacacagcaggagtcttcctgggtcagttgccttcccacaggcctcacaca

SEQ ID NO: 163460 - DNA, 83 bp, Homo sapiens
ataacttatgtcacagtcatcacacagcaggagtcttcctgggtcagttgccttcccacaggcctcacacacagtgcactcaa

SEQ ID NO: 163461 - DNA, 82 bp, Homo sapiens
acagtcatcacacagcaggagtcttcctgggtcagttgccttcccacaggcctcacacacagtgcactcaagacacctccaa

SEQ ID NO: 163462 - DNA, 77 bp, Homo sapiens
acacagcaggagtcttcctgggtcagttgccttcccacaggcctcacacacagtgcactcaagacacctccaacctt

SEQ ID NO: 163463 - DNA, 76 bp, Homo sapiens
agtcttcctgggtcagttgccttcccacaggcctcacacacagtgcactcaagacacctccaacctttgctaagaa

SEQ ID NO: 163464 - DNA, 77 bp, Homo sapiens
gtcagttgccttcccacaggcctcacacacagtgcactcaagacacctccaacctttgctaagaaccactttagtga

SEQ ID NO: 163465 - DNA, 76 bp, Homo sapiens
ttcccacaggcctcacacacagtgcactcaagacacctccaacctttgctaagaaccactttagtgatctgtaaaa

SEQ ID NO: 163466 - DNA, 74 bp, Homo sapiens
cctcacacacagtgcactcaagacacctccaacctttgctaagaaccactttagtgatctgtaaaagaaacaac

SEQ ID NO: 163467 - DNA, 73 bp, Homo sapiens
acacagtgcactcaagacacctccaacctttgctaagaaccactttagtgatctgtaaaagaaacaaccaatc

SEQ ID NO: 163468 - DNA, 71 bp, Homo sapiens
aagacacctccaacctttgctaagaaccactttagtgatctgtaaaagaaacaaccaatccatgtgattta

SEQ ID NO: 163469 - DNA, 80 bp, Homo sapiens
tgacacagtatggatggtaacactgaccacactgagaacaggcaagtaatcttccttctgctccttggccaaaactgcca

SEQ ID NO: 163470 - DNA, 77 bp, Homo sapiens
agtatggatggtaacactgaccacactgagaacaggcaagtaatcttccttctgctccttggccaaaactgccacaa

SEQ ID NO: 163471 - DNA, 78 bp, Homo sapiens
taacactgaccacactgagaacaggcaagtaatcttccttctgctccttggccaaaactgccacaaactacacacata

SEQ ID NO: 163472 - DNA, 76 bp, Homo sapiens
actgagaacaggcaagtaatcttccttctgctccttggccaaaactgccacaaactacacacatatcctgaagtta

SEQ ID NO: 163473 - DNA, 73 bp, Homo sapiens
aggcaagtaatcttccttctgctccttggccaaaactgccacaaactacacacatatcctgaagttaagaaaa

SEQ ID NO: 163474 - DNA, 73 bp, Homo sapiens
ttccttctgctccttggccaaaactgccacaaactacacacatatcctgaagttaagaaaacagaacatattt

SEQ ID NO: 163475 - DNA, 72 bp, Homo sapiens
ctccttggccaaaactgccacaaactacacacatatcctgaagttaagaaaacagaacatattttaaatgga

SEQ ID NO: 163476 - DNA, 76 bp, Homo sapiens
caaggaggaattcaatgaggaagacagtaaattgtcaagttcaaacctgattcaaagtgaacttgtcactgctaga

SEQ ID NO: 163477 - DNA, 75 bp, Homo sapiens
attcaatgaggaagacagtaaattgtcaagttcaaacctgattcaaagtgaacttgtcactgctagaaaacaaca

SEQ ID NO: 163478 - DNA, 74 bp, Homo sapiens
gaagacagtaaattgtcaagttcaaacctgattcaaagtgaacttgtcactgctagaaaacaacacaactgtat

SEQ ID NO: 163479 - DNA, 76 bp, Homo sapiens
agtaaattgtcaagttcaaacctgattcaaagtgaacttgtcactgctagaaaacaacacaactgtattgtgcata

SEQ ID NO: 163480 - DNA, 74 bp, Homo sapiens
aagttcaaacctgattcaaagtgaacttgtcactgctagaaaacaacacaactgtattgtgcatagagttttct

SEQ ID NO: 163481 - DNA, 80 bp, Homo sapiens
ttcaaagtgaacttgtcactgctagaaaacaacacaactgtattgtgcatagagttttcttcatcatccttatttgatga

SEQ ID NO: 163482 - DNA, 79 bp, Homo sapiens
agtgaacttgtcactgctagaaaacaacacaactgtattgtgcatagagttttcttcatcatccttatttgatgaaata

SEQ ID NO: 163483 - DNA, 82 bp, Homo sapiens
tgctagaaaacaacacaactgtattgtgcatagagttttcttcatcatccttatttgatgaaatatctgcagtagacaccta

SEQ ID NO: 163484 - DNA, 81 bp, Homo sapiens
caacacaactgtattgtgcatagagttttcttcatcatccttatttgatgaaatatctgcagtagacacctataaaaagca

SEQ ID NO: 163485 - DNA, 78 bp, Homo sapiens
aactgtattgtgcatagagttttcttcatcatccttatttgatgaaatatctgcagtagacacctataaaaagcaaaa

SEQ ID NO: 163486 - DNA, 79 bp, Homo sapiens
gcatagagttttcttcatcatccttatttgatgaaatatctgcagtagacacctataaaaagcaaaatacacagaatac

SEQ ID NO: 163487 - DNA, 77 bp, Homo sapiens
cttcatcatccttatttgatgaaatatctgcagtagacacctataaaaagcaaaatacacagaatacgaagttatat

SEQ ID NO: 163488 - DNA, 77 bp, Homo sapiens
atcattaactgacatttagattagagaaaatatacatgaagcaagcctcaccccaggtaatacaacagctccgattc

SEQ ID NO: 163489 - DNA, 75 bp, Homo sapiens
acatttagattagagaaaatatacatgaagcaagcctcaccccaggtaatacaacagctccgattccacttttca

SEQ ID NO: 163490 - DNA, 75 bp, Homo sapiens
ttagagaaaatatacatgaagcaagcctcaccccaggtaatacaacagctccgattccacttttcagctttgacc

SEQ ID NO: 163491 - DNA, 77 bp, Homo sapiens
tatacatgaagcaagcctcaccccaggtaatacaacagctccgattccacttttcagctttgacctgcctcggccac

SEQ ID NO: 163492 - DNA, 72 bp, Homo sapiens
aagcctcaccccaggtaatacaacagctccgattccacttttcagctttgacctgcctcggccacctcgccc

SEQ ID NO: 163493 - DNA, 74 bp, Homo sapiens
aggtaatacaacagctccgattccacttttcagctttgacctgcctcggccacctcgccccgacagtcctgcac

SEQ ID NO: 163494 - DNA, 75 bp, Homo sapiens
tacaacagctccgattccacttttcagctttgacctgcctcggccacctcgccccgacagtcctgcacctcgagg

SEQ ID NO: 163495 - DNA, 73 bp, Homo sapiens
attccacttttcagctttgacctgcctcggccacctcgccccgacagtcctgcacctcgaggtctccgctttc

SEQ ID NO: 163496 - DNA, 73 bp, Homo sapiens
ttttcagctttgacctgcctcggccacctcgccccgacagtcctgcacctcgaggtctccgctttcctggaaa

SEQ ID NO: 163497 - DNA, 73 bp, Homo sapiens
tgcctcggccacctcgccccgacagtcctgcacctcgaggtctccgctttcctggaaatccagacccacggcc

SEQ ID NO: 163498 - DNA, 71 bp, Homo sapiens
acctcgccccgacagtcctgcacctcgaggtctccgctttcctggaaatccagacccacggccctatgtaa

SEQ ID NO: 163499 - DNA, 73 bp, Homo sapiens
gacagtcctgcacctcgaggtctccgctttcctggaaatccagacccacggccctatgtaacagattgggaaa

SEQ ID NO: 163500 - DNA, 71 bp, Homo sapiens
cacctcgaggtctccgctttcctggaaatccagacccacggccctatgtaacagattgggaaaagtcaaca

SEQ ID NO: 163501 - DNA, 72 bp, Homo sapiens
aggtctccgctttcctggaaatccagacccacggccctatgtaacagattgggaaaagtcaacattctgtga

SEQ ID NO: 163502 - DNA, 80 bp, Homo sapiens
acaaatcagacagaaatgatatatgaatgtaaatgcaattttatttaccactttgatgctccaaatggcactgccaggaa

SEQ ID NO: 163503 - DNA, 81 bp, Homo sapiens
agacagaaatgatatatgaatgtaaatgcaattttatttaccactttgatgctccaaatggcactgccaggaagctgcctg

SEQ ID NO: 163504 - DNA, 77 bp, Homo sapiens
atatatgaatgtaaatgcaattttatttaccactttgatgctccaaatggcactgccaggaagctgcctgggtttaa

SEQ ID NO: 163505 - DNA, 73 bp, Homo sapiens
taaatgcaattttatttaccactttgatgctccaaatggcactgccaggaagctgcctgggtttaaaaatttc

SEQ ID NO: 163506 - DNA, 70 bp, Homo sapiens
attttatttaccactttgatgctccaaatggcactgccaggaagctgcctgggtttaaaaatttcccgac

SEQ ID NO: 163507 - DNA, 73 bp, Homo sapiens
actttgatgctccaaatggcactgccaggaagctgcctgggtttaaaaatttcccgaccttctgaaatgtctg

SEQ ID NO: 163508 - DNA, 70 bp, Homo sapiens
aaatggcactgccaggaagctgcctgggtttaaaaatttcccgaccttctgaaatgtctggggaccagga

SEQ ID NO: 163509 - DNA, 68 bp, Homo sapiens
actgccaggaagctgcctgggtttaaaaatttcccgaccttctgaaatgtctggggaccaggaaggtg

SEQ ID NO: 163510 - DNA, 69 bp, Homo sapiens
tgcctgggtttaaaaatttcccgaccttctgaaatgtctggggaccaggaaggtgggctcactgtatta

SEQ ID NO: 163511 - DNA, 68 bp, Homo sapiens
tttaaaaatttcccgaccttctgaaatgtctggggaccaggaaggtgggctcactgtattatgggtac

SEQ ID NO: 163512 - DNA, 70 bp, Homo sapiens
atttcccgaccttctgaaatgtctggggaccaggaaggtgggctcactgtattatgggtactccaagccc

SEQ ID NO: 163513 - DNA, 74 bp, Homo sapiens
gaaatgtctggggaccaggaaggtgggctcactgtattatgggtactccaagccccctaggatatggcagttga

SEQ ID NO: 163514 - DNA, 73 bp, Homo sapiens
gggaccaggaaggtgggctcactgtattatgggtactccaagccccctaggatatggcagttgagaaaataga

SEQ ID NO: 163515 - DNA, 73 bp, Homo sapiens
aaggtgggctcactgtattatgggtactccaagccccctaggatatggcagttgagaaaatagatgtgtaaaa

SEQ ID NO: 163516 - DNA, 75 bp, Homo sapiens
actgtattatgggtactccaagccccctaggatatggcagttgagaaaatagatgtgtaaaactcagcaacataa

SEQ ID NO: 163517 - DNA, 73 bp, Homo sapiens
attatgggtactccaagccccctaggatatggcagttgagaaaatagatgtgtaaaactcagcaacataaaag

SEQ ID NO: 163518 - DNA, 75 bp, Homo sapiens
agccccctaggatatggcagttgagaaaatagatgtgtaaaactcagcaacataaaaggtcaaagccagcaacta

SEQ ID NO: 163519 - DNA, 75 bp, Homo sapiens
gatatggcagttgagaaaatagatgtgtaaaactcagcaacataaaaggtcaaagccagcaactaaggaatttta

SEQ ID NO: 163520 - DNA, 72 bp, Homo sapiens
aatagatgtgtaaaactcagcaacataaaaggtcaaagccagcaactaaggaattttagaacagcaaaaaca

SEQ ID NO: 163521 - DNA, 70 bp, Homo sapiens
aaactcagcaacataaaaggtcaaagccagcaactaaggaattttagaacagcaaaaacaaatgcaaacg

SEQ ID NO: 163522 - DNA, 71 bp, Homo sapiens
gcaacataaaaggtcaaagccagcaactaaggaattttagaacagcaaaaacaaatgcaaacgtatggaaa

SEQ ID NO: 163523 - DNA, 73 bp, Homo sapiens
tatagaattgttccaatatcttttctgtcaatatcattaaaatcaccctacctgtttggaccgaggtctacca

SEQ ID NO: 163524 - DNA, 69 bp, Homo sapiens
atatcttttctgtcaatatcattaaaatcaccctacctgtttggaccgaggtctaccaggagaaaattt

SEQ ID NO: 163525 - DNA, 70 bp, Homo sapiens
tttctgtcaatatcattaaaatcaccctacctgtttggaccgaggtctaccaggagaaaattttctctta

SEQ ID NO: 163526 - DNA, 69 bp, Homo sapiens
atatcattaaaatcaccctacctgtttggaccgaggtctaccaggagaaaattttctcttagtaatagc

SEQ ID NO: 163527 - DNA, 67 bp, Homo sapiens
aatcaccctacctgtttggaccgaggtctaccaggagaaaattttctcttagtaatagctggtttac

SEQ ID NO: 163528 - DNA, 68 bp, Homo sapiens
tgtttggaccgaggtctaccaggagaaaattttctcttagtaatagctggtttacccatgccaatttt

SEQ ID NO: 163529 - DNA, 73 bp, Homo sapiens
gtctaccaggagaaaattttctcttagtaatagctggtttacccatgccaatttttggagtgactgagatgta

SEQ ID NO: 163530 - DNA, 71 bp, Homo sapiens
agaaaattttctcttagtaatagctggtttacccatgccaatttttggagtgactgagatgtaagttgttg

SEQ ID NO: 163531 - DNA, 76 bp, Homo sapiens
tttctcttagtaatagctggtttacccatgccaatttttggagtgactgagatgtaagttgttggcatgatgtttc

SEQ ID NO: 163532 - DNA, 78 bp, Homo sapiens
agtaatagctggtttacccatgccaatttttggagtgactgagatgtaagttgttggcatgatgtttccagcagagga

SEQ ID NO: 163533 - DNA, 79 bp, Homo sapiens
tttacccatgccaatttttggagtgactgagatgtaagttgttggcatgatgtttccagcagaggaactaagagctgaa

SEQ ID NO: 163534 - DNA, 76 bp, Homo sapiens
aatttttggagtgactgagatgtaagttgttggcatgatgtttccagcagaggaactaagagctgaagggtaatta

SEQ ID NO: 163535 - DNA, 85 bp, Homo sapiens
agtgactgagatgtaagttgttggcatgatgtttccagcagaggaactaagagctgaagggtaattatgcagcatgtcatgcgaa

SEQ ID NO: 163536 - DNA, 83 bp, Homo sapiens
atgtaagttgttggcatgatgtttccagcagaggaactaagagctgaagggtaattatgcagcatgtcatgcgaaggcaagtc

SEQ ID NO: 163537 - DNA, 84 bp, Homo sapiens
ttgttggcatgatgtttccagcagaggaactaagagctgaagggtaattatgcagcatgtcatgcgaaggcaagtctgaagaag

SEQ ID NO: 163538 - DNA, 78 bp, Homo sapiens
agaggaactaagagctgaagggtaattatgcagcatgtcatgcgaaggcaagtctgaagaaggtgttggggaggaaga

SEQ ID NO: 163539 - DNA, 81 bp, Homo sapiens
taagagctgaagggtaattatgcagcatgtcatgcgaaggcaagtctgaagaaggtgttggggaggaagacacatctgcct

SEQ ID NO: 163540 - DNA, 89 bp, Homo sapiens
taattatgcagcatgtcatgcgaaggcaagtctgaagaaggtgttggggaggaagacacatctgccttgcttatgtctgctgatgatga

SEQ ID NO: 163541 - DNA, 86 bp, Homo sapiens
agcatgtcatgcgaaggcaagtctgaagaaggtgttggggaggaagacacatctgccttgcttatgtctgctgatgatgaaaatga

SEQ ID NO: 163542 - DNA, 84 bp, Homo sapiens
atgcgaaggcaagtctgaagaaggtgttggggaggaagacacatctgccttgcttatgtctgctgatgatgaaaatgatgactc

SEQ ID NO: 163543 - DNA, 86 bp, Homo sapiens
tgttggggaggaagacacatctgccttgcttatgtctgctgatgatgaaaatgatgactctgtctcagatgataactttatagatt

SEQ ID NO: 163544 - DNA, 86 bp, Homo sapiens
aggaagacacatctgccttgcttatgtctgctgatgatgaaaatgatgactctgtctcagatgataactttatagatttgcctcct

SEQ ID NO: 163545 - DNA, 86 bp, Homo sapiens
atctgccttgcttatgtctgctgatgatgaaaatgatgactctgtctcagatgataactttatagatttgcctccttggtatgaaa

SEQ ID NO: 163546 - DNA, 85 bp, Homo sapiens
ttgcttatgtctgctgatgatgaaaatgatgactctgtctcagatgataactttatagatttgcctccttggtatgaaacatctt

SEQ ID NO: 163547 - DNA, 81 bp, Homo sapiens
gatgatgaaaatgatgactctgtctcagatgataactttatagatttgcctccttggtatgaaacatctttcacacaaccc

SEQ ID NO: 163548 - DNA, 78 bp, Homo sapiens
aaatgatgactctgtctcagatgataactttatagatttgcctccttggtatgaaacatctttcacacaaccctcaat

SEQ ID NO: 163549 - DNA, 78 bp, Homo sapiens
tgtctcagatgataactttatagatttgcctccttggtatgaaacatctttcacacaaccctcaattgtaggagtcat

SEQ ID NO: 163550 - DNA, 76 bp, Homo sapiens
agatgataactttatagatttgcctccttggtatgaaacatctttcacacaaccctcaattgtaggagtcatttca

SEQ ID NO: 163551 - DNA, 78 bp, Homo sapiens
ttatagatttgcctccttggtatgaaacatctttcacacaaccctcaattgtaggagtcatttcagagtccatcaatc

SEQ ID NO: 163552 - DNA, 76 bp, Homo sapiens
tccttggtatgaaacatctttcacacaaccctcaattgtaggagtcatttcagagtccatcaatccagtagaaagt

SEQ ID NO: 163553 - DNA, 74 bp, Homo sapiens
atctttcacacaaccctcaattgtaggagtcatttcagagtccatcaatccagtagaaagttcagaattttctt

SEQ ID NO: 163554 - DNA, 72 bp, Homo sapiens
aaccctcaattgtaggagtcatttcagagtccatcaatccagtagaaagttcagaattttctttctgttcct

SEQ ID NO: 163555 - DNA, 74 bp, Homo sapiens
tgtaggagtcatttcagagtccatcaatccagtagaaagttcagaattttctttctgttccttttctccttgta

SEQ ID NO: 163556 - DNA, 73 bp, Homo sapiens
tcagagtccatcaatccagtagaaagttcagaattttctttctgttccttttctccttgtagcctttctataa

SEQ ID NO: 163557 - DNA, 70 bp, Homo sapiens
ccatcaatccagtagaaagttcagaattttctttctgttccttttctccttgtagcctttctataaccaa

SEQ ID NO: 163558 - DNA, 69 bp, Homo sapiens
tagaaagttcagaattttctttctgttccttttctccttgtagcctttctataaccaactgttcctcag

SEQ ID NO: 163559 - DNA, 70 bp, Homo sapiens
tttctgttccttttctccttgtagcctttctataaccaactgttcctcaggacataatgaaatactttcc

SEQ ID NO: 163560 - DNA, 71 bp, Homo sapiens
ccttttctccttgtagcctttctataaccaactgttcctcaggacataatgaaatactttcctcatgtggg

SEQ ID NO: 163561 - DNA, 72 bp, Homo sapiens
tgtagcctttctataaccaactgttcctcaggacataatgaaatactttcctcatgtggggacactaaggtt

SEQ ID NO: 163562 - DNA, 73 bp, Homo sapiens
tctataaccaactgttcctcaggacataatgaaatactttcctcatgtggggacactaaggtttctagtggaa

SEQ ID NO: 163563 - DNA, 74 bp, Homo sapiens
actgttcctcaggacataatgaaatactttcctcatgtggggacactaaggtttctagtggaagagtgacagat

SEQ ID NO: 163564 - DNA, 73 bp, Homo sapiens
ataatgaaatactttcctcatgtggggacactaaggtttctagtggaagagtgacagattccatgactaattt

SEQ ID NO: 163565 - DNA, 74 bp, Homo sapiens
atgtggggacactaaggtttctagtggaagagtgacagattccatgactaattttggaggccttgattcttctc

SEQ ID NO: 163566 - DNA, 75 bp, Homo sapiens
acactaaggtttctagtggaagagtgacagattccatgactaattttggaggccttgattcttctctggatacca

SEQ ID NO: 163567 - DNA, 76 bp, Homo sapiens
ttctagtggaagagtgacagattccatgactaattttggaggccttgattcttctctggataccactgtttcaggt

SEQ ID NO: 163568 - DNA, 75 bp, Homo sapiens
agtgacagattccatgactaattttggaggccttgattcttctctggataccactgtttcaggttcctctaacaa

SEQ ID NO: 163569 - DNA, 74 bp, Homo sapiens
attccatgactaattttggaggccttgattcttctctggataccactgtttcaggttcctctaacaactgcagt

SEQ ID NO: 163570 - DNA, 72 bp, Homo sapiens
actaattttggaggccttgattcttctctggataccactgtttcaggttcctctaacaactgcagttgttct

SEQ ID NO: 163571 - DNA, 81 bp, Homo sapiens
cttgattcttctctggataccactgtttcaggttcctctaacaactgcagttgttcttgctgcacagtgatctggtgtgta

SEQ ID NO: 163572 - DNA, 80 bp, Homo sapiens
ttcttctctggataccactgtttcaggttcctctaacaactgcagttgttcttgctgcacagtgatctggtgtgtaacga

SEQ ID NO: 163573 - DNA, 78 bp, Homo sapiens
cactgtttcaggttcctctaacaactgcagttgttcttgctgcacagtgatctggtgtgtaacgacttcaatgttttc

SEQ ID NO: 163574 - DNA, 79 bp, Homo sapiens
tttcaggttcctctaacaactgcagttgttcttgctgcacagtgatctggtgtgtaacgacttcaatgttttctgtcac

SEQ ID NO: 163575 - DNA, 79 bp, Homo sapiens
taacaactgcagttgttcttgctgcacagtgatctggtgtgtaacgacttcaatgttttctgtcacttccattttatct

SEQ ID NO: 163576 - DNA, 78 bp, Homo sapiens
agttgttcttgctgcacagtgatctggtgtgtaacgacttcaatgttttctgtcacttccattttatcttcaatttga

SEQ ID NO: 163577 - DNA, 79 bp, Homo sapiens
tgcacagtgatctggtgtgtaacgacttcaatgttttctgtcacttccattttatcttcaatttgatcttcgccacaaa

SEQ ID NO: 163578 - DNA, 76 bp, Homo sapiens
atctggtgtgtaacgacttcaatgttttctgtcacttccattttatcttcaatttgatcttcgccacaaatatgct

SEQ ID NO: 163579 - DNA, 76 bp, Homo sapiens
aacgacttcaatgttttctgtcacttccattttatcttcaatttgatcttcgccacaaatatgcttcacttcagaa

SEQ ID NO: 163580 - DNA, 77 bp, Homo sapiens
cttcaatgttttctgtcacttccattttatcttcaatttgatcttcgccacaaatatgcttcacttcagaagacatt

SEQ ID NO: 163581 - DNA, 79 bp, Homo sapiens
tttatcttcaatttgatcttcgccacaaatatgcttcacttcagaagacattttcaggtcttcactatcaacttcatta

SEQ ID NO: 163582 - DNA, 76 bp, Homo sapiens
caaatatgcttcacttcagaagacattttcaggtcttcactatcaacttcattagaaatctgtttttccaattcag

SEQ ID NO: 163583 - DNA, 77 bp, Homo sapiens
gacattttcaggtcttcactatcaacttcattagaaatctgtttttccaattcagtattcactgtatgttgggatga

SEQ ID NO: 163584 - DNA, 76 bp, Homo sapiens
ggtcttcactatcaacttcattagaaatctgtttttccaattcagtattcactgtatgttgggatgatactacaaa

SEQ ID NO: 163585 - DNA, 77 bp, Homo sapiens
tatcaacttcattagaaatctgtttttccaattcagtattcactgtatgttgggatgatactacaaaattcagaaca

SEQ ID NO: 163586 - DNA, 78 bp, Homo sapiens
gggataaagacattatcttgtaactcaatcaaattagacaatatgaacatactgcttaccagcaataagaagactatc

SEQ ID NO: 163587 - DNA, 81 bp, Homo sapiens
gacattatcttgtaactcaatcaaattagacaatatgaacatactgcttaccagcaataagaagactatctgtgtcaagac

SEQ ID NO: 163588 - DNA, 80 bp, Homo sapiens
ttgtaactcaatcaaattagacaatatgaacatactgcttaccagcaataagaagactatctgtgtcaagactttctgag

SEQ ID NO: 163589 - DNA, 79 bp, Homo sapiens
aaattagacaatatgaacatactgcttaccagcaataagaagactatctgtgtcaagactttctgagggatgactcttc

SEQ ID NO: 163590 - DNA, 81 bp, Homo sapiens
acaatatgaacatactgcttaccagcaataagaagactatctgtgtcaagactttctgagggatgactcttctgttgctct

SEQ ID NO: 163591 - DNA, 81 bp, Homo sapiens
atactgcttaccagcaataagaagactatctgtgtcaagactttctgagggatgactcttctgttgctcttcagtgtggac

SEQ ID NO: 163592 - DNA, 81 bp, Homo sapiens
caataagaagactatctgtgtcaagactttctgagggatgactcttctgttgctcttcagtgtggacttgaaccgctgtga

SEQ ID NO: 163593 - DNA, 80 bp, Homo sapiens
aagactatctgtgtcaagactttctgagggatgactcttctgttgctcttcagtgtggacttgaaccgctgtgagtaaca

SEQ ID NO: 163594 - DNA, 80 bp, Homo sapiens
tgtgtcaagactttctgagggatgactcttctgttgctcttcagtgtggacttgaaccgctgtgagtaacacatttataa

SEQ ID NO: 163595 - DNA, 78 bp, Homo sapiens
tttctgagggatgactcttctgttgctcttcagtgtggacttgaaccgctgtgagtaacacatttataaaatctctaa

SEQ ID NO: 163596 - DNA, 75 bp, Homo sapiens
actcttctgttgctcttcagtgtggacttgaaccgctgtgagtaacacatttataaaatctctaaggagtcaaaa

SEQ ID NO: 163597 - DNA, 74 bp, Homo sapiens
tacacattttcttcaaaaacagagtatatccattaaacattcttaccatctggaacaattccaggagtggactc

SEQ ID NO: 163598 - DNA, 73 bp, Homo sapiens
attttcttcaaaaacagagtatatccattaaacattcttaccatctggaacaattccaggagtggactcctga

SEQ ID NO: 163599 - DNA, 74 bp, Homo sapiens
agagtatatccattaaacattcttaccatctggaacaattccaggagtggactcctgaccgttgacatctttat

SEQ ID NO: 163600 - DNA, 76 bp, Homo sapiens
atatccattaaacattcttaccatctggaacaattccaggagtggactcctgaccgttgacatctttattagctgc

SEQ ID NO: 163601 - DNA, 79 bp, Homo sapiens
acattcttaccatctggaacaattccaggagtggactcctgaccgttgacatctttattagctgcctgctctgagaata

SEQ ID NO: 163602 - DNA, 79 bp, Homo sapiens
atctggaacaattccaggagtggactcctgaccgttgacatctttattagctgcctgctctgagaataccatttgatct

SEQ ID NO: 163603 - DNA, 78 bp, Homo sapiens
attccaggagtggactcctgaccgttgacatctttattagctgcctgctctgagaataccatttgatcttcagggcct

SEQ ID NO: 163604 - DNA, 77 bp, Homo sapiens
actcctgaccgttgacatctttattagctgcctgctctgagaataccatttgatcttcagggccttcaacttccatt

SEQ ID NO: 163605 - DNA, 79 bp, Homo sapiens
gttgacatctttattagctgcctgctctgagaataccatttgatcttcagggccttcaacttccatttcattgttataa

SEQ ID NO: 163606 - DNA, 78 bp, Homo sapiens
tttattagctgcctgctctgagaataccatttgatcttcagggccttcaacttccatttcattgttataatcttaaca

SEQ ID NO: 163607 - DNA, 76 bp, Homo sapiens
agctgcctgctctgagaataccatttgatcttcagggccttcaacttccatttcattgttataatcttaacaaaaa

SEQ ID NO: 163608 - DNA, 73 bp, Homo sapiens
tctgagaataccatttgatcttcagggccttcaacttccatttcattgttataatcttaacaaaaaattatta

SEQ ID NO: 163609 - DNA, 73 bp, Homo sapiens
tgatcttcagggccttcaacttccatttcattgttataatcttaacaaaaaattattaattctttagctcaga

SEQ ID NO: 163610 - DNA, 75 bp, Homo sapiens
taaaaaaaaatcattctcaaatttacctgtagtgagctcagctatctccacttcctcacctggctgtaaacgatc

SEQ ID NO: 163611 - DNA, 79 bp, Homo sapiens
aaaaatcattctcaaatttacctgtagtgagctcagctatctccacttcctcacctggctgtaaacgatccatctcagc

SEQ ID NO: 163612 - DNA, 78 bp, Homo sapiens
aatttacctgtagtgagctcagctatctccacttcctcacctggctgtaaacgatccatctcagctcccaggtgttta

SEQ ID NO: 163613 - DNA, 85 bp, Homo sapiens
tagtgagctcagctatctccacttcctcacctggctgtaaacgatccatctcagctcccaggtgtttacaatacatgcagatata

SEQ ID NO: 163614 - DNA, 81 bp, Homo sapiens
agctatctccacttcctcacctggctgtaaacgatccatctcagctcccaggtgtttacaatacatgcagatatactcttc

SEQ ID NO: 163615 - DNA, 81 bp, Homo sapiens
acttcctcacctggctgtaaacgatccatctcagctcccaggtgtttacaatacatgcagatatactcttctttgagctga

SEQ ID NO: 163616 - DNA, 85 bp, Homo sapiens
tggctgtaaacgatccatctcagctcccaggtgtttacaatacatgcagatatactcttctttgagctgagtatccagttcatga

SEQ ID NO: 163617 - DNA, 84 bp, Homo sapiens
taaacgatccatctcagctcccaggtgtttacaatacatgcagatatactcttctttgagctgagtatccagttcatgatctgt

SEQ ID NO: 163618 - DNA, 84 bp, Homo sapiens
atctcagctcccaggtgtttacaatacatgcagatatactcttctttgagctgagtatccagttcatgatctgttggtttgtca

SEQ ID NO: 163619 - DNA, 83 bp, Homo sapiens
gtgtttacaatacatgcagatatactcttctttgagctgagtatccagttcatgatctgttggtttgtcacactctaggtgaa

SEQ ID NO: 163620 - DNA, 83 bp, Homo sapiens
tacaatacatgcagatatactcttctttgagctgagtatccagttcatgatctgttggtttgtcacactctaggtgaacccac

SEQ ID NO: 163621 - DNA, 81 bp, Homo sapiens
atatactcttctttgagctgagtatccagttcatgatctgttggtttgtcacactctaggtgaacccacctgcagtgataa

SEQ ID NO: 163622 - DNA, 80 bp, Homo sapiens
tttgagctgagtatccagttcatgatctgttggtttgtcacactctaggtgaacccacctgcagtgataagtatacttaa

SEQ ID NO: 163623 - DNA, 76 bp, Homo sapiens
agtatccagttcatgatctgttggtttgtcacactctaggtgaacccacctgcagtgataagtatacttaaataaa

SEQ ID NO: 163624 - DNA, 73 bp, Homo sapiens
agttcatgatctgttggtttgtcacactctaggtgaacccacctgcagtgataagtatacttaaataaaaatt

SEQ ID NO: 163625 - DNA, 76 bp, Homo sapiens
tgaataaaacaatcgacaaaacaactgaatagaataactatcttcttaccttttgcacatattacaatgaagcatg

SEQ ID NO: 163626 - DNA, 78 bp, Homo sapiens
acaatcgacaaaacaactgaatagaataactatcttcttaccttttgcacatattacaatgaagcatgtctttctgca

SEQ ID NO: 163627 - DNA, 80 bp, Homo sapiens
actgaatagaataactatcttcttaccttttgcacatattacaatgaagcatgtctttctgcaattctggatgataacac

SEQ ID NO: 163628 - DNA, 80 bp, Homo sapiens
tagaataactatcttcttaccttttgcacatattacaatgaagcatgtctttctgcaattctggatgataacacttccca

SEQ ID NO: 163629 - DNA, 80 bp, Homo sapiens
tcttaccttttgcacatattacaatgaagcatgtctttctgcaattctggatgataacacttcccacagaagggacataa

SEQ ID NO: 163630 - DNA, 80 bp, Homo sapiens
ttttgcacatattacaatgaagcatgtctttctgcaattctggatgataacacttcccacagaagggacataagttatcc

SEQ ID NO: 163631 - DNA, 80 bp, Homo sapiens
atattacaatgaagcatgtctttctgcaattctggatgataacacttcccacagaagggacataagttatcctgctgttg

SEQ ID NO: 163632 - DNA, 78 bp, Homo sapiens
atgtctttctgcaattctggatgataacacttcccacagaagggacataagttatcctgctgttggtaacaattgtca

SEQ ID NO: 163633 - DNA, 80 bp, Homo sapiens
tttctgcaattctggatgataacacttcccacagaagggacataagttatcctgctgttggtaacaattgtcacatatca

SEQ ID NO: 163634 - DNA, 80 bp, Homo sapiens
tctggatgataacacttcccacagaagggacataagttatcctgctgttggtaacaattgtcacatatcaggcaattgtg

SEQ ID NO: 163635 - DNA, 77 bp, Homo sapiens
aacacttcccacagaagggacataagttatcctgctgttggtaacaattgtcacatatcaggcaattgtggtgccac

SEQ ID NO: 163636 - DNA, 79 bp, Homo sapiens
acagaagggacataagttatcctgctgttggtaacaattgtcacatatcaggcaattgtggtgccactgagaactagac

SEQ ID NO: 163637 - DNA, 80 bp, Homo sapiens
ataagttatcctgctgttggtaacaattgtcacatatcaggcaattgtggtgccactgagaactagaccgtgtgccacac

SEQ ID NO: 163638 - DNA, 84 bp, Homo sapiens
tgttggtaacaattgtcacatatcaggcaattgtggtgccactgagaactagaccgtgtgccacactctatacatattctgcaa

SEQ ID NO: 163639 - DNA, 84 bp, Homo sapiens
taacaattgtcacatatcaggcaattgtggtgccactgagaactagaccgtgtgccacactctatacatattctgcaattctaa

SEQ ID NO: 163640 - DNA, 81 bp, Homo sapiens
atatcaggcaattgtggtgccactgagaactagaccgtgtgccacactctatacatattctgcaattctaaacaccaggaa

SEQ ID NO: 163641 - DNA, 77 bp, Homo sapiens
aattgtggtgccactgagaactagaccgtgtgccacactctatacatattctgcaattctaaacaccaggaaaaata

SEQ ID NO: 163642 - DNA, 76 bp, Homo sapiens
gtgccactgagaactagaccgtgtgccacactctatacatattctgcaattctaaacaccaggaaaaataaaaaca

SEQ ID NO: 163643 - DNA, 71 bp, Homo sapiens
taaataaacaacttactttgcatttccagccattggttggtactgatttcataactggttgaagacaaaaa

SEQ ID NO: 163644 - DNA, 72 bp, Homo sapiens
aaacaacttactttgcatttccagccattggttggtactgatttcataactggttgaagacaaaaagtatga

SEQ ID NO: 163645 - DNA, 75 bp, Homo sapiens
tttgcatttccagccattggttggtactgatttcataactggttgaagacaaaaagtatgataccctttgtcaca

SEQ ID NO: 163646 - DNA, 75 bp, Homo sapiens
cattggttggtactgatttcataactggttgaagacaaaaagtatgataccctttgtcacacgtatcacacacta

SEQ ID NO: 163647 - DNA, 79 bp, Homo sapiens
tactgatttcataactggttgaagacaaaaagtatgataccctttgtcacacgtatcacacactagcatcttgctatct

SEQ ID NO: 163648 - DNA, 78 bp, Homo sapiens
atttcataactggttgaagacaaaaagtatgataccctttgtcacacgtatcacacactagcatcttgctatcttctc

SEQ ID NO: 163649 - DNA, 77 bp, Homo sapiens
gaagacaaaaagtatgataccctttgtcacacgtatcacacactagcatcttgctatcttctcccgattgtctaaaa

SEQ ID NO: 163650 - DNA, 75 bp, Homo sapiens
aaaaagtatgataccctttgtcacacgtatcacacactagcatcttgctatcttctcccgattgtctaaaaaata

SEQ ID NO: 163651 - DNA, 77 bp, Homo sapiens
ataccctttgtcacacgtatcacacactagcatcttgctatcttctcccgattgtctaaaaaataagatagcattaa

SEQ ID NO: 163652 - DNA, 79 bp, Homo sapiens
acgtatcacacactagcatcttgctatcttctcccgattgtctaaaaaataagatagcattaatgatgccttatcttta

SEQ ID NO: 163653 - DNA, 70 bp, Homo sapiens
agggtccctcttaaacccaatacacagctttgaattgaaatgaaaacttacttgcagttctggcacactt

SEQ ID NO: 163654 - DNA, 77 bp, Homo sapiens
ttaaacccaatacacagctttgaattgaaatgaaaacttacttgcagttctggcacactttgcactcaggacattgc

SEQ ID NO: 163655 - DNA, 76 bp, Homo sapiens
agctttgaattgaaatgaaaacttacttgcagttctggcacactttgcactcaggacattgccaacctgcacgttt

SEQ ID NO: 163656 - DNA, 77 bp, Homo sapiens
tgaaatgaaaacttacttgcagttctggcacactttgcactcaggacattgccaacctgcacgttttaatggagtaa

SEQ ID NO: 163657 - DNA, 76 bp, Homo sapiens
aacttacttgcagttctggcacactttgcactcaggacattgccaacctgcacgttttaatggagtaaccgctata

SEQ ID NO: 163658 - DNA, 78 bp, Homo sapiens
agttctggcacactttgcactcaggacattgccaacctgcacgttttaatggagtaaccgctatatccaggcacattc

SEQ ID NO: 163659 - DNA, 80 bp, Homo sapiens
acactttgcactcaggacattgccaacctgcacgttttaatggagtaaccgctatatccaggcacattccatgatagtgc

SEQ ID NO: 163660 - DNA, 81 bp, Homo sapiens
tcaggacattgccaacctgcacgttttaatggagtaaccgctatatccaggcacattccatgatagtgctgaccacaagta

SEQ ID NO: 163661 - DNA, 79 bp, Homo sapiens
attgccaacctgcacgttttaatggagtaaccgctatatccaggcacattccatgatagtgctgaccacaagtagtaca

SEQ ID NO: 163662 - DNA, 76 bp, Homo sapiens
acgttttaatggagtaaccgctatatccaggcacattccatgatagtgctgaccacaagtagtacaaaagaactga

SEQ ID NO: 163663 - DNA, 79 bp, Homo sapiens
ttaatggagtaaccgctatatccaggcacattccatgatagtgctgaccacaagtagtacaaaagaactgatctaagag

SEQ ID NO: 163664 - DNA, 77 bp, Homo sapiens
aaccgctatatccaggcacattccatgatagtgctgaccacaagtagtacaaaagaactgatctaagaggtctcccg

SEQ ID NO: 163665 - DNA, 81 bp, Homo sapiens
aggcacattccatgatagtgctgaccacaagtagtacaaaagaactgatctaagaggtctcccgggctgtcgcacactgca

SEQ ID NO: 163666 - DNA, 79 bp, Homo sapiens
ttccatgatagtgctgaccacaagtagtacaaaagaactgatctaagaggtctcccgggctgtcgcacactgcacagtt

SEQ ID NO: 163667 - DNA, 77 bp, Homo sapiens
ctgaccacaagtagtacaaaagaactgatctaagaggtctcccgggctgtcgcacactgcacagtttgcatcttcct

SEQ ID NO: 163668 - DNA, 78 bp, Homo sapiens
tagtacaaaagaactgatctaagaggtctcccgggctgtcgcacactgcacagtttgcatcttccttcgctataatta

SEQ ID NO: 163669 - DNA, 76 bp, Homo sapiens
aaaagaactgatctaagaggtctcccgggctgtcgcacactgcacagtttgcatcttccttcgctataattaacag

SEQ ID NO: 163670 - DNA, 77 bp, Homo sapiens
taagaggtctcccgggctgtcgcacactgcacagtttgcatcttccttcgctataattaacagtgaaacaatgaaat

SEQ ID NO: 163671 - DNA, 78 bp, Homo sapiens
tcccgggctgtcgcacactgcacagtttgcatcttccttcgctataattaacagtgaaacaatgaaattgttgtataa

SEQ ID NO: 163672 - DNA, 70 bp, Homo sapiens
gtaaatacattggttgaagtttaaaagtctatccgtagtaaacttacatctttcaggagcttggtcaatg

SEQ ID NO: 163673 - DNA, 71 bp, Homo sapiens
acattggttgaagtttaaaagtctatccgtagtaaacttacatctttcaggagcttggtcaatgtgttctg

SEQ ID NO: 163674 - DNA, 71 bp, Homo sapiens
aagtttaaaagtctatccgtagtaaacttacatctttcaggagcttggtcaatgtgttctggacaaagcag

SEQ ID NO: 163675 - DNA, 78 bp, Homo sapiens
tctatccgtagtaaacttacatctttcaggagcttggtcaatgtgttctggacaaagcaggaagatgtgactgaaatc

SEQ ID NO: 163676 - DNA, 76 bp, Homo sapiens
agtaaacttacatctttcaggagcttggtcaatgtgttctggacaaagcaggaagatgtgactgaaatcctgaaag

SEQ ID NO: 163677 - DNA, 80 bp, Homo sapiens
atctttcaggagcttggtcaatgtgttctggacaaagcaggaagatgtgactgaaatcctgaaaggtgccggctcctgca

SEQ ID NO: 163678 - DNA, 83 bp, Homo sapiens
tggtcaatgtgttctggacaaagcaggaagatgtgactgaaatcctgaaaggtgccggctcctgcagcacaaggataatgata

SEQ ID NO: 163679 - DNA, 82 bp, Homo sapiens
aatgtgttctggacaaagcaggaagatgtgactgaaatcctgaaaggtgccggctcctgcagcacaaggataatgatacatc

SEQ ID NO: 163680 - DNA, 80 bp, Homo sapiens
aaagcaggaagatgtgactgaaatcctgaaaggtgccggctcctgcagcacaaggataatgatacatctgggtacatttc

SEQ ID NO: 163681 - DNA, 82 bp, Homo sapiens
atgtgactgaaatcctgaaaggtgccggctcctgcagcacaaggataatgatacatctgggtacatttctcttcacagcatt

SEQ ID NO: 163682 - DNA, 81 bp, Homo sapiens
aaatcctgaaaggtgccggctcctgcagcacaaggataatgatacatctgggtacatttctcttcacagcatttgatagtg

SEQ ID NO: 163683 - DNA, 81 bp, Homo sapiens
aaaggtgccggctcctgcagcacaaggataatgatacatctgggtacatttctcttcacagcatttgatagtggctccaag

SEQ ID NO: 163684 - DNA, 82 bp, Homo sapiens
ctcctgcagcacaaggataatgatacatctgggtacatttctcttcacagcatttgatagtggctccaaggtgcttacaaaa

SEQ ID NO: 163685 - DNA, 83 bp, Homo sapiens
aaggataatgatacatctgggtacatttctcttcacagcatttgatagtggctccaaggtgcttacaaaatgcacatcgctga

SEQ ID NO: 163686 - DNA, 82 bp, Homo sapiens
taatgatacatctgggtacatttctcttcacagcatttgatagtggctccaaggtgcttacaaaatgcacatcgctgaaagg

SEQ ID NO: 163687 - DNA, 78 bp, Homo sapiens
tctgggtacatttctcttcacagcatttgatagtggctccaaggtgcttacaaaatgcacatcgctgaaaggggtaaa

SEQ ID NO: 163688 - DNA, 77 bp, Homo sapiens
tttctcttcacagcatttgatagtggctccaaggtgcttacaaaatgcacatcgctgaaaggggtaaaggagagaaa

SEQ ID NO: 163689 - DNA, 74 bp, Homo sapiens
atttgatagtggctccaaggtgcttacaaaatgcacatcgctgaaaggggtaaaggagagaaatctctttataa

SEQ ID NO: 163690 - DNA, 75 bp, Homo sapiens
gtgaatgttataaaactatgatttaaatatttgctttgtctacttacttctgtgctccctgagacaacagctttg

SEQ ID NO: 163691 - DNA, 74 bp, Homo sapiens
tataaaactatgatttaaatatttgctttgtctacttacttctgtgctccctgagacaacagctttgtccacgt

SEQ ID NO: 163692 - DNA, 74 bp, Homo sapiens
atttaaatatttgctttgtctacttacttctgtgctccctgagacaacagctttgtccacgttcactaacaatg

SEQ ID NO: 163693 - DNA, 75 bp, Homo sapiens
atatttgctttgtctacttacttctgtgctccctgagacaacagctttgtccacgttcactaacaatggttcttc

SEQ ID NO: 163694 - DNA, 78 bp, Homo sapiens
tacttacttctgtgctccctgagacaacagctttgtccacgttcactaacaatggttcttccatctggcatactccta

SEQ ID NO: 163695 - DNA, 79 bp, Homo sapiens
gtgctccctgagacaacagctttgtccacgttcactaacaatggttcttccatctggcatactcctagtgaccactcca

SEQ ID NO: 163696 - DNA, 76 bp, Homo sapiens
agacaacagctttgtccacgttcactaacaatggttcttccatctggcatactcctagtgaccactccacacaacg

SEQ ID NO: 163697 - DNA, 78 bp, Homo sapiens
acagctttgtccacgttcactaacaatggttcttccatctggcatactcctagtgaccactccacacaacggtgatga

SEQ ID NO: 163698 - DNA, 76 bp, Homo sapiens
acgttcactaacaatggttcttccatctggcatactcctagtgaccactccacacaacggtgatgagcccaacaag

SEQ ID NO: 163699 - DNA, 77 bp, Homo sapiens
taacaatggttcttccatctggcatactcctagtgaccactccacacaacggtgatgagcccaacaagtgcctaaaa

SEQ ID NO: 163700 - DNA, 76 bp, Homo sapiens
tcttccatctggcatactcctagtgaccactccacacaacggtgatgagcccaacaagtgcctaaaatgggaaaaa

SEQ ID NO: 163701 - DNA, 72 bp, Homo sapiens
atactcctagtgaccactccacacaacggtgatgagcccaacaagtgcctaaaatgggaaaaatgaaaagga

SEQ ID NO: 163702 - DNA, 78 bp, Homo sapiens
aatgcttccagaattaagaggcagtcattattgaaaacatgcccatacctgtagaatcaaataaggcttggatatcaa

SEQ ID NO: 163703 - DNA, 79 bp, Homo sapiens
aattaagaggcagtcattattgaaaacatgcccatacctgtagaatcaaataaggcttggatatcaatggcatctggaa

SEQ ID NO: 163704 - DNA, 79 bp, Homo sapiens
agtcattattgaaaacatgcccatacctgtagaatcaaataaggcttggatatcaatggcatctggaagcccaaccaga

SEQ ID NO: 163705 - DNA, 79 bp, Homo sapiens
tattgaaaacatgcccatacctgtagaatcaaataaggcttggatatcaatggcatctggaagcccaaccagactgagt

SEQ ID NO: 163706 - DNA, 78 bp, Homo sapiens
ccatacctgtagaatcaaataaggcttggatatcaatggcatctggaagcccaaccagactgagttcatcccacagtt

SEQ ID NO: 163707 - DNA, 80 bp, Homo sapiens
tagaatcaaataaggcttggatatcaatggcatctggaagcccaaccagactgagttcatcccacagtttaccagcttga

SEQ ID NO: 163708 - DNA, 81 bp, Homo sapiens
aaataaggcttggatatcaatggcatctggaagcccaaccagactgagttcatcccacagtttaccagcttgatcatctga

SEQ ID NO: 163709 - DNA, 84 bp, Homo sapiens
tatcaatggcatctggaagcccaaccagactgagttcatcccacagtttaccagcttgatcatctgaagctgtctgggtgctta

SEQ ID NO: 163710 - DNA, 80 bp, Homo sapiens
atctggaagcccaaccagactgagttcatcccacagtttaccagcttgatcatctgaagctgtctgggtgcttacactta

SEQ ID NO: 163711 - DNA, 80 bp, Homo sapiens
ccaaccagactgagttcatcccacagtttaccagcttgatcatctgaagctgtctgggtgcttacacttacacaagatac

SEQ ID NO: 163712 - DNA, 81 bp, Homo sapiens
agactgagttcatcccacagtttaccagcttgatcatctgaagctgtctgggtgcttacacttacacaagatactatattc

SEQ ID NO: 163713 - DNA, 83 bp, Homo sapiens
atcccacagtttaccagcttgatcatctgaagctgtctgggtgcttacacttacacaagatactatattctgctgaggagatc

SEQ ID NO: 163714 - DNA, 84 bp, Homo sapiens
taccagcttgatcatctgaagctgtctgggtgcttacacttacacaagatactatattctgctgaggagatcgttctctgaaaa

SEQ ID NO: 163715 - DNA, 81 bp, Homo sapiens
atcatctgaagctgtctgggtgcttacacttacacaagatactatattctgctgaggagatcgttctctgaaaataaaata

SEQ ID NO: 163716 - DNA, 76 bp, Homo sapiens
aagctgtctgggtgcttacacttacacaagatactatattctgctgaggagatcgttctctgaaaataaaataaaa

SEQ ID NO: 163717 - DNA, 72 bp, Homo sapiens
atatgcagtcttaatctattccaacatttaaagtcgaaactgcttactttctctgtcctctttgttttcgtg

SEQ ID NO: 163718 - DNA, 71 bp, Homo sapiens
taatctattccaacatttaaagtcgaaactgcttactttctctgtcctctttgttttcgtggtgctgagtt

SEQ ID NO: 163719 - DNA, 72 bp, Homo sapiens
tattccaacatttaaagtcgaaactgcttactttctctgtcctctttgttttcgtggtgctgagttttgcat

SEQ ID NO: 163720 - DNA, 72 bp, Homo sapiens
tttaaagtcgaaactgcttactttctctgtcctctttgttttcgtggtgctgagttttgcattttctcatag

SEQ ID NO: 163721 - DNA, 74 bp, Homo sapiens
aactgcttactttctctgtcctctttgttttcgtggtgctgagttttgcattttctcataggttccattgctgt

SEQ ID NO: 163722 - DNA, 78 bp, Homo sapiens
tctgtcctctttgttttcgtggtgctgagttttgcattttctcataggttccattgctgttgtcatcaatgtccttct

SEQ ID NO: 163723 - DNA, 77 bp, Homo sapiens
tttgttttcgtggtgctgagttttgcattttctcataggttccattgctgttgtcatcaatgtccttcttgttagaa

SEQ ID NO: 163724 - DNA, 77 bp, Homo sapiens
tggtgctgagttttgcattttctcataggttccattgctgttgtcatcaatgtccttcttgttagaaggttggtttc

SEQ ID NO: 163725 - DNA, 77 bp, Homo sapiens
ttttgcattttctcataggttccattgctgttgtcatcaatgtccttcttgttagaaggttggtttctccatggcaa

SEQ ID NO: 163726 - DNA, 76 bp, Homo sapiens
ttttctcataggttccattgctgttgtcatcaatgtccttcttgttagaaggttggtttctccatggcaagataaa

SEQ ID NO: 163727 - DNA, 76 bp, Homo sapiens
ttccattgctgttgtcatcaatgtccttcttgttagaaggttggtttctccatggcaagataaatccaggcgttat

SEQ ID NO: 163728 - DNA, 75 bp, Homo sapiens
ttgtcatcaatgtccttcttgttagaaggttggtttctccatggcaagataaatccaggcgttattctgaattgt

SEQ ID NO: 163729 - DNA, 71 bp, Homo sapiens
aatgtccttcttgttagaaggttggtttctccatggcaagataaatccaggcgttattctgaattgtttta

SEQ ID NO: 163730 - DNA, 71 bp, Homo sapiens
tcttgttagaaggttggtttctccatggcaagataaatccaggcgttattctgaattgttttaagtctcct

SEQ ID NO: 163731 - DNA, 71 bp, Homo sapiens
tggtttctccatggcaagataaatccaggcgttattctgaattgttttaagtctccttgtcctaaggaact

SEQ ID NO: 163732 - DNA, 69 bp, Homo sapiens
ctccatggcaagataaatccaggcgttattctgaattgttttaagtctccttgtcctaaggaacttttt

SEQ ID NO: 163733 - DNA, 67 bp, Homo sapiens
agataaatccaggcgttattctgaattgttttaagtctccttgtcctaaggaacttttttccccaca

SEQ ID NO: 163734 - DNA, 65 bp, Homo sapiens
aggcgttattctgaattgttttaagtctccttgtcctaaggaacttttttccccacagtaacaaa

SEQ ID NO: 163735 - DNA, 66 bp, Homo sapiens
aattgttttaagtctccttgtcctaaggaacttttttccccacagtaacaaaaagcgcagagctgt

SEQ ID NO: 163736 - DNA, 69 bp, Homo sapiens
ttaagtctccttgtcctaaggaacttttttccccacagtaacaaaaagcgcagagctgttcactagtaa

SEQ ID NO: 163737 - DNA, 69 bp, Homo sapiens
ttgtcctaaggaacttttttccccacagtaacaaaaagcgcagagctgttcactagtaaaaatgaaatg

SEQ ID NO: 163738 - DNA, 72 bp, Homo sapiens
tttttccccacagtaacaaaaagcgcagagctgttcactagtaaaaatgaaatgtaagtcagagaaggagaa

SEQ ID NO: 163739 - DNA, 79 bp, Homo sapiens
tttattcctgtcactaatatccaatccagctgcattcattctctaacctgattttggcttctacaccaacagagaccag

SEQ ID NO: 163740 - DNA, 78 bp, Homo sapiens
ctgtcactaatatccaatccagctgcattcattctctaacctgattttggcttctacaccaacagagaccagggagtt

SEQ ID NO: 163741 - DNA, 78 bp, Homo sapiens
atatccaatccagctgcattcattctctaacctgattttggcttctacaccaacagagaccagggagtttgccgattc

SEQ ID NO: 163742 - DNA, 79 bp, Homo sapiens
ctgcattcattctctaacctgattttggcttctacaccaacagagaccagggagtttgccgattcctcagacacagatc

SEQ ID NO: 163743 - DNA, 77 bp, Homo sapiens
attctctaacctgattttggcttctacaccaacagagaccagggagtttgccgattcctcagacacagatcgctgaa

SEQ ID NO: 163744 - DNA, 76 bp, Homo sapiens
attttggcttctacaccaacagagaccagggagtttgccgattcctcagacacagatcgctgaagagttggaatta

SEQ ID NO: 163745 - DNA, 79 bp, Homo sapiens
tacaccaacagagaccagggagtttgccgattcctcagacacagatcgctgaagagttggaattagctgtttgctgtta

SEQ ID NO: 163746 - DNA, 78 bp, Homo sapiens
agagaccagggagtttgccgattcctcagacacagatcgctgaagagttggaattagctgtttgctgttatccacttc

SEQ ID NO: 163747 - DNA, 81 bp, Homo sapiens
agggagtttgccgattcctcagacacagatcgctgaagagttggaattagctgtttgctgttatccacttctgcttcagca

SEQ ID NO: 163748 - DNA, 85 bp, Homo sapiens
ttcctcagacacagatcgctgaagagttggaattagctgtttgctgttatccacttctgcttcagcatcctcttctgcagattgt

SEQ ID NO: 163749 - DNA, 83 bp, Homo sapiens
acagatcgctgaagagttggaattagctgtttgctgttatccacttctgcttcagcatcctcttctgcagattgttctttgat

SEQ ID NO: 163750 - DNA, 83 bp, Homo sapiens
tgaagagttggaattagctgtttgctgttatccacttctgcttcagcatcctcttctgcagattgttctttgatttctgctta

SEQ ID NO: 163751 - DNA, 80 bp, Homo sapiens
aattagctgtttgctgttatccacttctgcttcagcatcctcttctgcagattgttctttgatttctgcttaacagtaaa

SEQ ID NO: 163752 - DNA, 80 bp, Homo sapiens
tttgctgttatccacttctgcttcagcatcctcttctgcagattgttctttgatttctgcttaacagtaaacaagagaaa

SEQ ID NO: 163753 - DNA, 78 bp, Homo sapiens
ttatccacttctgcttcagcatcctcttctgcagattgttctttgatttctgcttaacagtaaacaagagaaaacaaa

SEQ ID NO: 163754 - DNA, 77 bp, Homo sapiens
aacatatgcaaagcatcattatacattcttataaattcttgagttctgatacctgtttccacaatcgtttctgtttc

SEQ ID NO: 163755 - DNA, 78 bp, Homo sapiens
tgcaaagcatcattatacattcttataaattcttgagttctgatacctgtttccacaatcgtttctgtttctgttgtc

SEQ ID NO: 163756 - DNA, 74 bp, Homo sapiens
attatacattcttataaattcttgagttctgatacctgtttccacaatcgtttctgtttctgttgtctccagcc

SEQ ID NO: 163757 - DNA, 77 bp, Homo sapiens
ttcttataaattcttgagttctgatacctgtttccacaatcgtttctgtttctgttgtctccagcccatccatgctg

SEQ ID NO: 163758 - DNA, 80 bp, Homo sapiens
ttcttgagttctgatacctgtttccacaatcgtttctgtttctgttgtctccagcccatccatgctgtcctcatcttcca

SEQ ID NO: 163759 - DNA, 78 bp, Homo sapiens
atacctgtttccacaatcgtttctgtttctgttgtctccagcccatccatgctgtcctcatcttccactgcagttttc

SEQ ID NO: 163760 - DNA, 77 bp, Homo sapiens
tttccacaatcgtttctgtttctgttgtctccagcccatccatgctgtcctcatcttccactgcagttttcccccta

SEQ ID NO: 163761 - DNA, 77 bp, Homo sapiens
tttctgtttctgttgtctccagcccatccatgctgtcctcatcttccactgcagttttccccctacttcgaggtcta

SEQ ID NO: 163762 - DNA, 77 bp, Homo sapiens
tctgttgtctccagcccatccatgctgtcctcatcttccactgcagttttccccctacttcgaggtctacagaaaaa

SEQ ID NO: 163763 - DNA, 72 bp, Homo sapiens
ccagcccatccatgctgtcctcatcttccactgcagttttccccctacttcgaggtctacagaaaaaaaaaa

SEQ ID NO: 163764 - DNA, 72 bp, Homo sapiens
cccggcgccgccgctggctcccggcctggctccctcgcactcaacttacttctttctggctctctggaaagg

SEQ ID NO: 163765 - DNA, 73 bp, Homo sapiens
ctggctcccggcctggctccctcgcactcaacttacttctttctggctctctggaaaggggaagcgccatctt

SEQ ID NO: 163766 - DNA, 74 bp, Homo sapiens
tcccggcctggctccctcgcactcaacttacttctttctggctctctggaaaggggaagcgccatctttgcgag

SEQ ID NO: 163767 - DNA, 73 bp, Homo sapiens
tccctcgcactcaacttacttctttctggctctctggaaaggggaagcgccatctttgcgaggccggccccga

SEQ ID NO: 163768 - DNA, 68 bp, Homo sapiens
aacttacttctttctggctctctggaaaggggaagcgccatctttgcgaggccggccccgaggtcttt

SEQ ID NO: 163769 - DNA, 73 bp, Homo sapiens
tttctggctctctggaaaggggaagcgccatctttgcgaggccggccccgaggtcttttgtctgcggctgcgg

SEQ ID NO: 163770 - DNA, 70 bp, Homo sapiens
ctggaaaggggaagcgccatctttgcgaggccggccccgaggtcttttgtctgcggctgcggggctcggg

SEQ ID NO: 163771 - DNA, 69 bp, Homo sapiens
aaggggaagcgccatctttgcgaggccggccccgaggtcttttgtctgcggctgcggggctcggggccg

SEQ ID NO: 163772 - DNA, 71 bp, Homo sapiens
ccatctttgcgaggccggccccgaggtcttttgtctgcggctgcggggctcggggccggggctccaggctc

SEQ ID NO: 163773 - DNA, 68 bp, Homo sapiens
cgaggccggccccgaggtcttttgtctgcggctgcggggctcggggccggggctccaggctcctcggg

SEQ ID NO: 163774 - DNA, 68 bp, Homo sapiens
cccgaggtcttttgtctgcggctgcggggctcggggccggggctccaggctcctcggggggtggtggc

SEQ ID NO: 163775 - DNA, 73 bp, Homo sapiens
tttgtctgcggctgcggggctcggggccggggctccaggctcctcggggggtggtggcggcggctgcggctgc

SEQ ID NO: 163776 - DNA, 72 bp, Homo sapiens
ggggctcggggccggggctccaggctcctcggggggtggtggcggcggctgcggctgctccacgctcttgtc

SEQ ID NO: 163777 - DNA, 74 bp, Homo sapiens
gccggggctccaggctcctcggggggtggtggcggcggctgcggctgctccacgctcttgtcctcctccgacga

SEQ ID NO: 163778 - DNA, 77 bp, Homo sapiens
tccaggctcctcggggggtggtggcggcggctgcggctgctccacgctcttgtcctcctccgacgacatcctagtca

SEQ ID NO: 163779 - DNA, 75 bp, Homo sapiens
tcggggggtggtggcggcggctgcggctgctccacgctcttgtcctcctccgacgacatcctagtcaccaggaaa

SEQ ID NO: 163780 - DNA, 80 bp, Homo sapiens
tggtggcggcggctgcggctgctccacgctcttgtcctcctccgacgacatcctagtcaccaggaaagacacatggatcc

SEQ ID NO: 163781 - DNA, 78 bp, Homo sapiens
tgcggctgctccacgctcttgtcctcctccgacgacatcctagtcaccaggaaagacacatggatcccggtcctcctc

SEQ ID NO: 163782 - DNA, 74 bp, Homo sapiens
ctccacgctcttgtcctcctccgacgacatcctagtcaccaggaaagacacatggatcccggtcctcctcctgg

SEQ ID NO: 163783 - DNA, 73 bp, Homo sapiens
tcttgtcctcctccgacgacatcctagtcaccaggaaagacacatggatcccggtcctcctcctggggggctc

SEQ ID NO: 163784 - DNA, 71 bp, Homo sapiens
ctccgacgacatcctagtcaccaggaaagacacatggatcccggtcctcctcctggggggctcccgccgcc

SEQ ID NO: 163785 - DNA, 70 bp, Homo sapiens
atcctagtcaccaggaaagacacatggatcccggtcctcctcctggggggctcccgccgccgcggccgcc

SEQ ID NO: 163786 - DNA, 78 bp, Homo sapiens
gccgccgccgctgctgctcgggttcctcctccccggctcagcctctcgcatttcccgcagccccgggagcagcagcag

SEQ ID NO: 163787 - DNA, 75 bp, Homo sapiens
ctgctgctcgggttcctcctccccggctcagcctctcgcatttcccgcagccccgggagcagcagcaggtaccgg

SEQ ID NO: 163788 - DNA, 77 bp, Homo sapiens
tcctccccggctcagcctctcgcatttcccgcagccccgggagcagcagcaggtaccgggagaggcggcaacatgga

SEQ ID NO: 163789 - DNA, 82 bp, Homo sapiens
tcagcctctcgcatttcccgcagccccgggagcagcagcaggtaccgggagaggcggcaacatggagcgagcaggacacgca

SEQ ID NO: 163790 - DNA, 82 bp, Homo sapiens
tcgcatttcccgcagccccgggagcagcagcaggtaccgggagaggcggcaacatggagcgagcaggacacgcactcacaca

SEQ ID NO: 163791 - DNA, 82 bp, Homo sapiens
agcagcaggtaccgggagaggcggcaacatggagcgagcaggacacgcactcacacacatcggcgcgggcgcgcgcacctcc

SEQ ID NO: 163792 - DNA, 80 bp, Homo sapiens
aggtaccgggagaggcggcaacatggagcgagcaggacacgcactcacacacatcggcgcgggcgcgcgcacctccgcgc

SEQ ID NO: 163793 - DNA, 81 bp, Homo sapiens
agaggcggcaacatggagcgagcaggacacgcactcacacacatcggcgcgggcgcgcgcacctccgcgcgcaggggccgg

SEQ ID NO: 163794 - DNA, 78 bp, Homo sapiens
aacatggagcgagcaggacacgcactcacacacatcggcgcgggcgcgcgcacctccgcgcgcaggggccgggcgggg

SEQ ID NO: 163795 - DNA, 75 bp, Homo sapiens
agcaggacacgcactcacacacatcggcgcgggcgcgcgcacctccgcgcgcaggggccgggcggggggcggcgg

SEQ ID NO: 163796 - DNA, 73 bp, Homo sapiens
tgcgcggcccgcgcccggggcggtgactgcggcaagccccctgggtccccgcgcggcgcatcccagcctgggc

SEQ ID NO: 163797 - DNA, 70 bp, Homo sapiens
cccggggcggtgactgcggcaagccccctgggtccccgcgcggcgcatcccagcctgggcgggacgctcg

SEQ ID NO: 163798 - DNA, 73 bp, Homo sapiens
cggtgactgcggcaagccccctgggtccccgcgcggcgcatcccagcctgggcgggacgctcggccgcggcga

SEQ ID NO: 163799 - DNA, 71 bp, Homo sapiens
aagccccctgggtccccgcgcggcgcatcccagcctgggcgggacgctcggccgcggcgaggcgggcaagc

SEQ ID NO: 163800 - DNA, 76 bp, Homo sapiens
tgggtccccgcgcggcgcatcccagcctgggcgggacgctcggccgcggcgaggcgggcaagcctggcagggcaga

SEQ ID NO: 163801 - DNA, 76 bp, Homo sapiens
gcgcatcccagcctgggcgggacgctcggccgcggcgaggcgggcaagcctggcagggcagagggagccccggctc

SEQ ID NO: 163802 - DNA, 72 bp, Homo sapiens
gcctgggcgggacgctcggccgcggcgaggcgggcaagcctggcagggcagagggagccccggctccgaggt

SEQ ID NO: 163803 - DNA, 75 bp, Homo sapiens
ggacgctcggccgcggcgaggcgggcaagcctggcagggcagagggagccccggctccgaggttgctcttcgcac

SEQ ID NO: 163804 - DNA, 75 bp, Homo sapiens
cgcggcgaggcgggcaagcctggcagggcagagggagccccggctccgaggttgctcttcgcacccgaggatcag

SEQ ID NO: 163805 - DNA, 75 bp, Homo sapiens
cgaggcgggcaagcctggcagggcagagggagccccggctccgaggttgctcttcgcacccgaggatcagtcttg

SEQ ID NO: 163806 - DNA, 73 bp, Homo sapiens
aagcctggcagggcagagggagccccggctccgaggttgctcttcgcacccgaggatcagtcttggccccaaa

SEQ ID NO: 163807 - DNA, 73 bp, Homo sapiens
agagggagccccggctccgaggttgctcttcgcacccgaggatcagtcttggccccaaagcgcgacgcacaaa

SEQ ID NO: 163808 - DNA, 75 bp, Homo sapiens
cggctccgaggttgctcttcgcacccgaggatcagtcttggccccaaagcgcgacgcacaaatccacgtgagtgt

SEQ ID NO: 163809 - DNA, 74 bp, Homo sapiens
aggttgctcttcgcacccgaggatcagtcttggccccaaagcgcgacgcacaaatccacgtgagtgttttcaaa

SEQ ID NO: 163810 - DNA, 74 bp, Homo sapiens
tcttcgcacccgaggatcagtcttggccccaaagcgcgacgcacaaatccacgtgagtgttttcaaattgaatt

SEQ ID NO: 163811 - DNA, 72 bp, Homo sapiens
atcagtcttggccccaaagcgcgacgcacaaatccacgtgagtgttttcaaattgaatttcaataggaaaac

SEQ ID NO: 163812 - DNA, 74 bp, Homo sapiens
tttttgcatatttggcaagtggttccacctttctctgcaccctggtggagtgtgaaggcagcagaggaaccttt

SEQ ID NO: 163813 - DNA, 74 bp, Homo sapiens
atatttggcaagtggttccacctttctctgcaccctggtggagtgtgaaggcagcagaggaaccttttggagga

SEQ ID NO: 163814 - DNA, 73 bp, Homo sapiens
agtggttccacctttctctgcaccctggtggagtgtgaaggcagcagaggaaccttttggaggaggaagagga

SEQ ID NO: 163815 - DNA, 76 bp, Homo sapiens
tttctctgcaccctggtggagtgtgaaggcagcagaggaaccttttggaggaggaagaggacacagaggccctgta

SEQ ID NO: 163816 - DNA, 77 bp, Homo sapiens
tggtggagtgtgaaggcagcagaggaaccttttggaggaggaagaggacacagaggccctgtagccaggcaccaaga

SEQ ID NO: 163817 - DNA, 75 bp, Homo sapiens
agtgtgaaggcagcagaggaaccttttggaggaggaagaggacacagaggccctgtagccaggcaccaagatccc

SEQ ID NO: 163818 - DNA, 73 bp, Homo sapiens
agcagaggaaccttttggaggaggaagaggacacagaggccctgtagccaggcaccaagatccctcccaggtg

SEQ ID NO: 163819 - DNA, 71 bp, Homo sapiens
aaccttttggaggaggaagaggacacagaggccctgtagccaggcaccaagatccctcccaggtggctggg

SEQ ID NO: 163820 - DNA, 73 bp, Homo sapiens
aggaagaggacacagaggccctgtagccaggcaccaagatccctcccaggtggctgggtctgaggggaactcc

SEQ ID NO: 163821 - DNA, 75 bp, Homo sapiens
acacagaggccctgtagccaggcaccaagatccctcccaggtggctgggtctgaggggaactccgagcagcccta

SEQ ID NO: 163822 - DNA, 74 bp, Homo sapiens
ctgtagccaggcaccaagatccctcccaggtggctgggtctgaggggaactccgagcagccctaggtcctcaaa

SEQ ID NO: 163823 - DNA, 71 bp, Homo sapiens
accaagatccctcccaggtggctgggtctgaggggaactccgagcagccctaggtcctcaaagtctggatt

SEQ ID NO: 163824 - DNA, 72 bp, Homo sapiens
ctcccaggtggctgggtctgaggggaactccgagcagccctaggtcctcaaagtctggatttgtgtggaaaa

SEQ ID NO: 163825 - DNA, 75 bp, Homo sapiens
gctgggtctgaggggaactccgagcagccctaggtcctcaaagtctggatttgtgtggaaaaggcagctctcact

SEQ ID NO: 163826 - DNA, 75 bp, Homo sapiens
tctgaggggaactccgagcagccctaggtcctcaaagtctggatttgtgtggaaaaggcagctctcacttggcct

SEQ ID NO: 163827 - DNA, 75 bp, Homo sapiens
aactccgagcagccctaggtcctcaaagtctggatttgtgtggaaaaggcagctctcacttggccttggcgaggc

SEQ ID NO: 163828 - DNA, 73 bp, Homo sapiens
taggtcctcaaagtctggatttgtgtggaaaaggcagctctcacttggccttggcgaggcctcggttggttgg

SEQ ID NO: 163829 - DNA, 75 bp, Homo sapiens
aaagtctggatttgtgtggaaaaggcagctctcacttggccttggcgaggcctcggttggttggtgagtgccaca

SEQ ID NO: 163830 - DNA, 73 bp, Homo sapiens
ttgtgtggaaaaggcagctctcacttggccttggcgaggcctcggttggttggtgagtgccacacggtttctt

SEQ ID NO: 163831 - DNA, 73 bp, Homo sapiens
aaaaggcagctctcacttggccttggcgaggcctcggttggttggtgagtgccacacggtttctttgtgtgct

SEQ ID NO: 163832 - DNA, 70 bp, Homo sapiens
ctctctttctcatatcttattagtatttttgctttaaactaaaatcccttcctctctttctcagataacc

SEQ ID NO: 163833 - DNA, 71 bp, Homo sapiens
catatcttattagtatttttgctttaaactaaaatcccttcctctctttctcagataacctgaggaccatg

SEQ ID NO: 163834 - DNA, 73 bp, Homo sapiens
ttattagtatttttgctttaaactaaaatcccttcctctctttctcagataacctgaggaccatggatgctga

SEQ ID NO: 163835 - DNA, 74 bp, Homo sapiens
tttttgctttaaactaaaatcccttcctctctttctcagataacctgaggaccatggatgctgatgagggtcaa

SEQ ID NO: 163836 - DNA, 76 bp, Homo sapiens
aaactaaaatcccttcctctctttctcagataacctgaggaccatggatgctgatgagggtcaagacatgtcccaa

SEQ ID NO: 163837 - DNA, 79 bp, Homo sapiens
cctctctttctcagataacctgaggaccatggatgctgatgagggtcaagacatgtcccaagtttcaggtgagacctta

SEQ ID NO: 163838 - DNA, 81 bp, Homo sapiens
ctttctcagataacctgaggaccatggatgctgatgagggtcaagacatgtcccaagtttcaggtgagaccttatgagata

SEQ ID NO: 163839 - DNA, 83 bp, Homo sapiens
tgaggaccatggatgctgatgagggtcaagacatgtcccaagtttcaggtgagaccttatgagatagctgtgtgggaagttca

SEQ ID NO: 163840 - DNA, 82 bp, Homo sapiens
atggatgctgatgagggtcaagacatgtcccaagtttcaggtgagaccttatgagatagctgtgtgggaagttcatgagaaa

SEQ ID NO: 163841 - DNA, 78 bp, Homo sapiens
atgagggtcaagacatgtcccaagtttcaggtgagaccttatgagatagctgtgtgggaagttcatgagaaaagcttc

SEQ ID NO: 163842 - DNA, 75 bp, Homo sapiens
aagacatgtcccaagtttcaggtgagaccttatgagatagctgtgtgggaagttcatgagaaaagcttccctggg

SEQ ID NO: 163843 - DNA, 73 bp, Homo sapiens
gggaagcccaggcaccttgaccatgaccgcccgagactcacacttcttctttctcatcagggaaggaaagccc

SEQ ID NO: 163844 - DNA, 72 bp, Homo sapiens
aggcaccttgaccatgaccgcccgagactcacacttcttctttctcatcagggaaggaaagcccccctgtaa

SEQ ID NO: 163845 - DNA, 74 bp, Homo sapiens
ttgaccatgaccgcccgagactcacacttcttctttctcatcagggaaggaaagcccccctgtaagcgatactc

SEQ ID NO: 163846 - DNA, 76 bp, Homo sapiens
ccgagactcacacttcttctttctcatcagggaaggaaagcccccctgtaagcgatactccagatgagggcgatga

SEQ ID NO: 163847 - DNA, 76 bp, Homo sapiens
acttcttctttctcatcagggaaggaaagcccccctgtaagcgatactccagatgagggcgatgagcccatgccga

SEQ ID NO: 163848 - DNA, 76 bp, Homo sapiens
tttctcatcagggaaggaaagcccccctgtaagcgatactccagatgagggcgatgagcccatgccgatccccgag

SEQ ID NO: 163849 - DNA, 75 bp, Homo sapiens
gaaggaaagcccccctgtaagcgatactccagatgagggcgatgagcccatgccgatccccgaggacctctccac

SEQ ID NO: 163850 - DNA, 75 bp, Homo sapiens
ccccctgtaagcgatactccagatgagggcgatgagcccatgccgatccccgaggacctctccaccacctcggga

SEQ ID NO: 163851 - DNA, 78 bp, Homo sapiens
taagcgatactccagatgagggcgatgagcccatgccgatccccgaggacctctccaccacctcgggaggacagcaaa

SEQ ID NO: 163852 - DNA, 77 bp, Homo sapiens
actccagatgagggcgatgagcccatgccgatccccgaggacctctccaccacctcgggaggacagcaaagctccaa

SEQ ID NO: 163853 - DNA, 78 bp, Homo sapiens
gatgagcccatgccgatccccgaggacctctccaccacctcgggaggacagcaaagctccaagagtgacagagtcgtg

SEQ ID NO: 163854 - DNA, 74 bp, Homo sapiens
atgccgatccccgaggacctctccaccacctcgggaggacagcaaagctccaagagtgacagagtcgtgggtaa

SEQ ID NO: 163855 - DNA, 74 bp, Homo sapiens
cgaggacctctccaccacctcgggaggacagcaaagctccaagagtgacagagtcgtgggtaagtgggtcacca

SEQ ID NO: 163856 - DNA, 76 bp, Homo sapiens
tctccaccacctcgggaggacagcaaagctccaagagtgacagagtcgtgggtaagtgggtcaccagcggcctctg

SEQ ID NO: 163857 - DNA, 77 bp, Homo sapiens
tcgggaggacagcaaagctccaagagtgacagagtcgtgggtaagtgggtcaccagcggcctctgtgcctgtgaaac

SEQ ID NO: 163858 - DNA, 75 bp, Homo sapiens
actctctcctggtatcacaacccagctttctttttgccttctttattgcagttacatatggggctgatgacttta

SEQ ID NO: 163859 - DNA, 74 bp, Homo sapiens
gtatcacaacccagctttctttttgccttctttattgcagttacatatggggctgatgactttagggatttcca

SEQ ID NO: 163860 - DNA, 74 bp, Homo sapiens
ctttctttttgccttctttattgcagttacatatggggctgatgactttagggatttccatgcaataattccca

SEQ ID NO: 163861 - DNA, 74 bp, Homo sapiens
ttttgccttctttattgcagttacatatggggctgatgactttagggatttccatgcaataattcccaaatctt

SEQ ID NO: 163862 - DNA, 77 bp, Homo sapiens
tattgcagttacatatggggctgatgactttagggatttccatgcaataattcccaaatctttctctcgtaagtata

SEQ ID NO: 163863 - DNA, 75 bp, Homo sapiens
gttacatatggggctgatgactttagggatttccatgcaataattcccaaatctttctctcgtaagtatatgcct

SEQ ID NO: 163864 - DNA, 75 bp, Homo sapiens
ctgatgactttagggatttccatgcaataattcccaaatctttctctcgtaagtatatgccttgcttctggaaaa

SEQ ID NO: 163865 - DNA, 77 bp, Homo sapiens
atgcaataattcccaaatctttctctcgtaagtatatgccttgcttctggaaaacaaaagcatgccttcatctccta

SEQ ID NO: 163866 - DNA, 78 bp, Homo sapiens
tcccaaatctttctctcgtaagtatatgccttgcttctggaaaacaaaagcatgccttcatctcctatcatgtaaata

SEQ ID NO: 163867 - DNA, 78 bp, Homo sapiens
atctttctctcgtaagtatatgccttgcttctggaaaacaaaagcatgccttcatctcctatcatgtaaatatcgtac

SEQ ID NO: 163868 - DNA, 81 bp, Homo sapiens
taagtatatgccttgcttctggaaaacaaaagcatgccttcatctcctatcatgtaaatatcgtacgtgcatgttccttca

SEQ ID NO: 163869 - DNA, 78 bp, Homo sapiens
ccttgcttctggaaaacaaaagcatgccttcatctcctatcatgtaaatatcgtacgtgcatgttccttcatcaaccc

SEQ ID NO: 163870 - DNA, 78 bp, Homo sapiens
aaacaaaagcatgccttcatctcctatcatgtaaatatcgtacgtgcatgttccttcatcaacccccgagatacatta

SEQ ID NO: 163871 - DNA, 78 bp, Homo sapiens
aaagcatgccttcatctcctatcatgtaaatatcgtacgtgcatgttccttcatcaacccccgagatacattaaatat

SEQ ID NO: 163872 - DNA, 77 bp, Homo sapiens
atctcctatcatgtaaatatcgtacgtgcatgttccttcatcaacccccgagatacattaaatattcactgttctat

SEQ ID NO: 163873 - DNA, 76 bp, Homo sapiens
atcatgtaaatatcgtacgtgcatgttccttcatcaacccccgagatacattaaatattcactgttctattcgtta

SEQ ID NO: 163874 - DNA, 77 bp, Homo sapiens
tacgtgcatgttccttcatcaacccccgagatacattaaatattcactgttctattcgttagacacctaccatatca

SEQ ID NO: 163875 - DNA, 73 bp, Homo sapiens
atgttccttcatcaacccccgagatacattaaatattcactgttctattcgttagacacctaccatatcattt

SEQ ID NO: 163876 - DNA, 71 bp, Homo sapiens
atcaacccccgagatacattaaatattcactgttctattcgttagacacctaccatatcatttttgggtat

SEQ ID NO: 163877 - DNA, 73 bp, Homo sapiens
ccgagatacattaaatattcactgttctattcgttagacacctaccatatcatttttgggtatttataccata

SEQ ID NO: 163878 - DNA, 72 bp, Homo sapiens
tattcactgttctattcgttagacacctaccatatcatttttgggtatttataccataaagtgcaaaacgaa

SEQ ID NO: 163879 - DNA, 70 bp, Homo sapiens
ctgttctattcgttagacacctaccatatcatttttgggtatttataccataaagtgcaaaacgaaggtc

SEQ ID NO: 163880 - DNA, 71 bp, Homo sapiens
tcgttagacacctaccatatcatttttgggtatttataccataaagtgcaaaacgaaggtctaggcagttg

SEQ ID NO: 163881 - DNA, 72 bp, Homo sapiens
taccatatcatttttgggtatttataccataaagtgcaaaacgaaggtctaggcagttgtgcggtgtcctgg

SEQ ID NO: 163882 - DNA, 73 bp, Homo sapiens
atttttgggtatttataccataaagtgcaaaacgaaggtctaggcagttgtgcggtgtcctgggagcatggca

SEQ ID NO: 163883 - DNA, 76 bp, Homo sapiens
ttataccataaagtgcaaaacgaaggtctaggcagttgtgcggtgtcctgggagcatggcagtggagtaacagtaa

SEQ ID NO: 163884 - DNA, 75 bp, Homo sapiens
aacgaaggtctaggcagttgtgcggtgtcctgggagcatggcagtggagtaacagtaagggttggagtcacagta

SEQ ID NO: 163885 - DNA, 79 bp, Homo sapiens
cagttgtgcggtgtcctgggagcatggcagtggagtaacagtaagggttggagtcacagtagcactgatgggattgtta

SEQ ID NO: 163886 - DNA, 81 bp, Homo sapiens
gtgtcctgggagcatggcagtggagtaacagtaagggttggagtcacagtagcactgatgggattgttacttcgcagatgc

SEQ ID NO: 163887 - DNA, 82 bp, Homo sapiens
tggagtaacagtaagggttggagtcacagtagcactgatgggattgttacttcgcagatgctgctggacagctttgagatta

SEQ ID NO: 163888 - DNA, 81 bp, Homo sapiens
gagtcacagtagcactgatgggattgttacttcgcagatgctgctggacagctttgagattactcctgtaatcctttttat

SEQ ID NO: 163889 - DNA, 80 bp, Homo sapiens
acagtagcactgatgggattgttacttcgcagatgctgctggacagctttgagattactcctgtaatcctttttattgag

SEQ ID NO: 163890 - DNA, 78 bp, Homo sapiens
ggattgttacttcgcagatgctgctggacagctttgagattactcctgtaatcctttttattgagtgtgaggataaaa

SEQ ID NO: 163891 - DNA, 80 bp, Homo sapiens
ttacttcgcagatgctgctggacagctttgagattactcctgtaatcctttttattgagtgtgaggataaaatggccata

SEQ ID NO: 163892 - DNA, 79 bp, Homo sapiens
atgctgctggacagctttgagattactcctgtaatcctttttattgagtgtgaggataaaatggccatattttctgtca

SEQ ID NO: 163893 - DNA, 74 bp, Homo sapiens
agctttgagattactcctgtaatcctttttattgagtgtgaggataaaatggccatattttctgtcaccaacaa

SEQ ID NO: 163894 - DNA, 74 bp, Homo sapiens
tactcctgtaatcctttttattgagtgtgaggataaaatggccatattttctgtcaccaacaaagaactgaaca

SEQ ID NO: 163895 - DNA, 73 bp, Homo sapiens
atcctttttattgagtgtgaggataaaatggccatattttctgtcaccaacaaagaactgaacatggtttcaa

SEQ ID NO: 163896 - DNA, 74 bp, Homo sapiens
tttattgagtgtgaggataaaatggccatattttctgtcaccaacaaagaactgaacatggtttcaagataatt

SEQ ID NO: 163897 - DNA, 72 bp, Homo sapiens
gtgaggataaaatggccatattttctgtcaccaacaaagaactgaacatggtttcaagataatttttacaat

SEQ ID NO: 163898 - DNA, 71 bp, Homo sapiens
ggccatattttctgtcaccaacaaagaactgaacatggtttcaagataatttttacaattttgtgggacag

SEQ ID NO: 163899 - DNA, 71 bp, Homo sapiens
tttctgtcaccaacaaagaactgaacatggtttcaagataatttttacaattttgtgggacaggagaagga

SEQ ID NO: 163900 - DNA, 74 bp, Homo sapiens
acaaagaactgaacatggtttcaagataatttttacaattttgtgggacaggagaaggagatatgctcttcatc

SEQ ID NO: 163901 - DNA, 74 bp, Homo sapiens
aactgaacatggtttcaagataatttttacaattttgtgggacaggagaaggagatatgctcttcatctgtggt

SEQ ID NO: 163902 - DNA, 74 bp, Homo sapiens
atttttacaattttgtgggacaggagaaggagatatgctcttcatctgtggttctggagtattaatttcagaac

SEQ ID NO: 163903 - DNA, 77 bp, Homo sapiens
aattttgtgggacaggagaaggagatatgctcttcatctgtggttctggagtattaatttcagaactgagaagagaa

SEQ ID NO: 163904 - DNA, 77 bp, Homo sapiens
atatgctcttcatctgtggttctggagtattaatttcagaactgagaagagaaaattgcaggcctccaggccgttat

SEQ ID NO: 163905 - DNA, 77 bp, Homo sapiens
tcttcatctgtggttctggagtattaatttcagaactgagaagagaaaattgcaggcctccaggccgttattctgtg

SEQ ID NO: 163906 - DNA, 80 bp, Homo sapiens
ttctggagtattaatttcagaactgagaagagaaaattgcaggcctccaggccgttattctgtggtgcatcgctgctgga

SEQ ID NO: 163907 - DNA, 80 bp, Homo sapiens
ctgagaagagaaaattgcaggcctccaggccgttattctgtggtgcatcgctgctggagccaacgtactgttcctgcttg

SEQ ID NO: 163908 - DNA, 79 bp, Homo sapiens
aagagaaaattgcaggcctccaggccgttattctgtggtgcatcgctgctggagccaacgtactgttcctgcttggtgc

SEQ ID NO: 163909 - DNA, 77 bp, Homo sapiens
aggcctccaggccgttattctgtggtgcatcgctgctggagccaacgtactgttcctgcttggtgcccgcaggacct

SEQ ID NO: 163910 - DNA, 81 bp, Homo sapiens
aggccgttattctgtggtgcatcgctgctggagccaacgtactgttcctgcttggtgcccgcaggaccttctctgatctga

SEQ ID NO: 163911 - DNA, 81 bp, Homo sapiens
tggtgcatcgctgctggagccaacgtactgttcctgcttggtgcccgcaggaccttctctgatctgagctgttaaaccaaa

SEQ ID NO: 163912 - DNA, 77 bp, Homo sapiens
atcgctgctggagccaacgtactgttcctgcttggtgcccgcaggaccttctctgatctgagctgttaaaccaaaaa

SEQ ID NO: 163913 - DNA, 75 bp, Homo sapiens
caacgtactgttcctgcttggtgcccgcaggaccttctctgatctgagctgttaaaccaaaaacagatgtgaatt

SEQ ID NO: 163914 - DNA, 76 bp, Homo sapiens
tactgttcctgcttggtgcccgcaggaccttctctgatctgagctgttaaaccaaaaacagatgtgaatttcattt

SEQ ID NO: 163915 - DNA, 72 bp, Homo sapiens
cttggtgcccgcaggaccttctctgatctgagctgttaaaccaaaaacagatgtgaatttcatttttctttt

SEQ ID NO: 163916 - DNA, 74 bp, Homo sapiens
tcatttttcttttttagatattgagctgataaatgataaatatatttgggtaacatcctcaaatgagtacttta

SEQ ID NO: 163917 - DNA, 75 bp, Homo sapiens
tttttagatattgagctgataaatgataaatatatttgggtaacatcctcaaatgagtactttaaagaacagaga

SEQ ID NO: 163918 - DNA, 77 bp, Homo sapiens
tattgagctgataaatgataaatatatttgggtaacatcctcaaatgagtactttaaagaacagagagtgcttttga

SEQ ID NO: 163919 - DNA, 72 bp, Homo sapiens
aaatgataaatatatttgggtaacatcctcaaatgagtactttaaagaacagagagtgcttttgaaaatgta

SEQ ID NO: 163920 - DNA, 75 bp, Homo sapiens
atatatttgggtaacatcctcaaatgagtactttaaagaacagagagtgcttttgaaaatgtatagagagctgaa

SEQ ID NO: 163921 - DNA, 74 bp, Homo sapiens
ctttaaagaacagagagtgcttttgaaaatgtatagagagctgaatatttaaagccatacaagttgataatccc

SEQ ID NO: 163922 - DNA, 75 bp, Homo sapiens
agaacagagagtgcttttgaaaatgtatagagagctgaatatttaaagccatacaagttgataatccccttagga

SEQ ID NO: 163923 - DNA, 73 bp, Homo sapiens
gcttttgaaaatgtatagagagctgaatatttaaagccatacaagttgataatccccttaggacctgtattag

SEQ ID NO: 163924 - DNA, 72 bp, Homo sapiens
agagagctgaatatttaaagccatacaagttgataatccccttaggacctgtattagtaaatcctctaatac

SEQ ID NO: 163925 - DNA, 73 bp, Homo sapiens
gagctgaatatttaaagccatacaagttgataatccccttaggacctgtattagtaaatcctctaatactata

SEQ ID NO: 163926 - DNA, 70 bp, Homo sapiens
atttaaagccatacaagttgataatccccttaggacctgtattagtaaatcctctaatactataaagcaa

SEQ ID NO: 163927 - DNA, 73 bp, Homo sapiens
aaagccatacaagttgataatccccttaggacctgtattagtaaatcctctaatactataaagcaacatcaga

SEQ ID NO: 163928 - DNA, 73 bp, Homo sapiens
aagccatacaagttgataatccccttaggacctgtattagtaaatcctctaatactataaagcaacatcagaa

SEQ ID NO: 163929 - DNA, 71 bp, Homo sapiens
caagttgataatccccttaggacctgtattagtaaatcctctaatactataaagcaacatcagaaaacagg

SEQ ID NO: 163930 - DNA, 71 bp, Homo sapiens
ataatccccttaggacctgtattagtaaatcctctaatactataaagcaacatcagaaaacaggtcgcatt

SEQ ID NO: 163931 - DNA, 72 bp, Homo sapiens
cttaggacctgtattagtaaatcctctaatactataaagcaacatcagaaaacaggtcgcatttgttaacac

SEQ ID NO: 163932 - DNA, 75 bp, Homo sapiens
taggacctgtattagtaaatcctctaatactataaagcaacatcagaaaacaggtcgcatttgttaacactgtga

SEQ ID NO: 163933 - DNA, 76 bp, Homo sapiens
ctataaagcaacatcagaaaacaggtcgcatttgttaacactgtgacaattataattataggctctaatttgaaca

SEQ ID NO: 163934 - DNA, 76 bp, Homo sapiens
acatcagaaaacaggtcgcatttgttaacactgtgacaattataattataggctctaatttgaacagtgccagtaa

SEQ ID NO: 163935 - DNA, 74 bp, Homo sapiens
gaaaacaggtcgcatttgttaacactgtgacaattataattataggctctaatttgaacagtgccagtaacagt

SEQ ID NO: 163936 - DNA, 76 bp, Homo sapiens
ttgttaacactgtgacaattataattataggctctaatttgaacagtgccagtaacagttaaagacaggtgtctga

SEQ ID NO: 163937 - DNA, 76 bp, Homo sapiens
tataggctctaatttgaacagtgccagtaacagttaaagacaggtgtctgacatcctggttatcaaaaactatctg

SEQ ID NO: 163938 - DNA, 74 bp, Homo sapiens
aatttgaacagtgccagtaacagttaaagacaggtgtctgacatcctggttatcaaaaactatctggtgtctaa

SEQ ID NO: 163939 - DNA, 71 bp, Homo sapiens
agtaacagttaaagacaggtgtctgacatcctggttatcaaaaactatctggtgtctaaggaatttaacag

SEQ ID NO: 163940 - DNA, 72 bp, Homo sapiens
agttaaagacaggtgtctgacatcctggttatcaaaaactatctggtgtctaaggaatttaacagtatcaaa

SEQ ID NO: 163941 - DNA, 72 bp, Homo sapiens
aggtgtctgacatcctggttatcaaaaactatctggtgtctaaggaatttaacagtatcaaagtacatcttt

SEQ ID NO: 163942 - DNA, 73 bp, Homo sapiens
acatcctggttatcaaaaactatctggtgtctaaggaatttaacagtatcaaagtacatctttttgctcacaa

SEQ ID NO: 163943 - DNA, 72 bp, Homo sapiens
aaaactatctggtgtctaaggaatttaacagtatcaaagtacatctttttgctcacaaactagattggctac

SEQ ID NO: 163944 - DNA, 73 bp, Homo sapiens
atctggtgtctaaggaatttaacagtatcaaagtacatctttttgctcacaaactagattggctacttttcca

SEQ ID NO: 163945 - DNA, 72 bp, Homo sapiens
ggaatttaacagtatcaaagtacatctttttgctcacaaactagattggctacttttccagcctatagaagt

SEQ ID NO: 163946 - DNA, 73 bp, Homo sapiens
aacagtatcaaagtacatctttttgctcacaaactagattggctacttttccagcctatagaagttacagaaa

SEQ ID NO: 163947 - DNA, 71 bp, Homo sapiens
aagtacatctttttgctcacaaactagattggctacttttccagcctatagaagttacagaaatctttctt

SEQ ID NO: 163948 - DNA, 72 bp, Homo sapiens
gctcacaaactagattggctacttttccagcctatagaagttacagaaatctttcttttactgatattcctt

SEQ ID NO: 163949 - DNA, 72 bp, Homo sapiens
ctagattggctacttttccagcctatagaagttacagaaatctttcttttactgatattcctttgattccac

SEQ ID NO: 163950 - DNA, 73 bp, Homo sapiens
ccagcctatagaagttacagaaatctttcttttactgatattcctttgattccactttaaagcaatagcttga

SEQ ID NO: 163951 - DNA, 71 bp, Homo sapiens
gaagttacagaaatctttcttttactgatattcctttgattccactttaaagcaatagcttgatacctact

SEQ ID NO: 163952 - DNA, 73 bp, Homo sapiens
ctttcttttactgatattcctttgattccactttaaagcaatagcttgatacctactttttgagatgtatatg

SEQ ID NO: 163953 - DNA, 76 bp, Homo sapiens
ttactgatattcctttgattccactttaaagcaatagcttgatacctactttttgagatgtatatgtatgtacttg

SEQ ID NO: 163954 - DNA, 75 bp, Homo sapiens
cctttgattccactttaaagcaatagcttgatacctactttttgagatgtatatgtatgtacttgtaaatgctta

SEQ ID NO: 163955 - DNA, 78 bp, Homo sapiens
ttccactttaaagcaatagcttgatacctactttttgagatgtatatgtatgtacttgtaaatgcttatatatgtgta

SEQ ID NO: 163956 - DNA, 78 bp, Homo sapiens
gcaatagcttgatacctactttttgagatgtatatgtatgtacttgtaaatgcttatatatgtgtatttgtttacacg

SEQ ID NO: 163957 - DNA, 78 bp, Homo sapiens
acctactttttgagatgtatatgtatgtacttgtaaatgcttatatatgtgtatttgtttacacgtgagcttatatga

SEQ ID NO: 163958 - DNA, 80 bp, Homo sapiens
ctttttgagatgtatatgtatgtacttgtaaatgcttatatatgtgtatttgtttacacgtgagcttatatgaacatata

SEQ ID NO: 163959 - DNA, 78 bp, Homo sapiens
atatgtatgtacttgtaaatgcttatatatgtgtatttgtttacacgtgagcttatatgaacatataaaacattatgg

SEQ ID NO: 163960 - DNA, 78 bp, Homo sapiens
cttgtaaatgcttatatatgtgtatttgtttacacgtgagcttatatgaacatataaaacattatggtattggacaga

SEQ ID NO: 163961 - DNA, 78 bp, Homo sapiens
gtatttgtttacacgtgagcttatatgaacatataaaacattatggtattggacagagaaatgatattgatttgaaga

SEQ ID NO: 163962 - DNA, 82 bp, Homo sapiens
tacacgtgagcttatatgaacatataaaacattatggtattggacagagaaatgatattgatttgaagaatcatattgttga

SEQ ID NO: 163963 - DNA, 80 bp, Homo sapiens
gagcttatatgaacatataaaacattatggtattggacagagaaatgatattgatttgaagaatcatattgttgaagtat

SEQ ID NO: 163964 - DNA, 79 bp, Homo sapiens
catataaaacattatggtattggacagagaaatgatattgatttgaagaatcatattgttgaagtattttgagaagtca

SEQ ID NO: 163965 - DNA, 81 bp, Homo sapiens
cattatggtattggacagagaaatgatattgatttgaagaatcatattgttgaagtattttgagaagtcaaatgcacttga

SEQ ID NO: 163966 - DNA, 80 bp, Homo sapiens
ggacagagaaatgatattgatttgaagaatcatattgttgaagtattttgagaagtcaaatgcacttgagagtaagctaa

SEQ ID NO: 163967 - DNA, 82 bp, Homo sapiens
gagaaatgatattgatttgaagaatcatattgttgaagtattttgagaagtcaaatgcacttgagagtaagctaatgcatcc

SEQ ID NO: 163968 - DNA, 79 bp, Homo sapiens
gatttgaagaatcatattgttgaagtattttgagaagtcaaatgcacttgagagtaagctaatgcatcctaaaacatgt

SEQ ID NO: 163969 - DNA, 80 bp, Homo sapiens
agaatcatattgttgaagtattttgagaagtcaaatgcacttgagagtaagctaatgcatcctaaaacatgtttctgtga

SEQ ID NO: 163970 - DNA, 77 bp, Homo sapiens
aagtattttgagaagtcaaatgcacttgagagtaagctaatgcatcctaaaacatgtttctgtgaagtctgaggaag

SEQ ID NO: 163971 - DNA, 80 bp, Homo sapiens
ttttgagaagtcaaatgcacttgagagtaagctaatgcatcctaaaacatgtttctgtgaagtctgaggaaggtgtcagc

SEQ ID NO: 163972 - DNA, 80 bp, Homo sapiens
agtaagctaatgcatcctaaaacatgtttctgtgaagtctgaggaaggtgtcagccagagcatatgttgaagcagaccct

SEQ ID NO: 163973 - DNA, 82 bp, Homo sapiens
ctaatgcatcctaaaacatgtttctgtgaagtctgaggaaggtgtcagccagagcatatgttgaagcagacccttcagtgaa

SEQ ID NO: 163974 - DNA, 81 bp, Homo sapiens
taaaacatgtttctgtgaagtctgaggaaggtgtcagccagagcatatgttgaagcagacccttcagtgaagccttcagtc

SEQ ID NO: 163975 - DNA, 82 bp, Homo sapiens
tttctgtgaagtctgaggaaggtgtcagccagagcatatgttgaagcagacccttcagtgaagccttcagtctgtaagaatc

SEQ ID NO: 163976 - DNA, 85 bp, Homo sapiens
agtctgaggaaggtgtcagccagagcatatgttgaagcagacccttcagtgaagccttcagtctgtaagaatcgctgcatgtgaa

SEQ ID NO: 163977 - DNA, 88 bp, Homo sapiens
tcagccagagcatatgttgaagcagacccttcagtgaagccttcagtctgtaagaatcgctgcatgtgaagatgtgttaatgttatga

SEQ ID NO: 163978 - DNA, 84 bp, Homo sapiens
catatgttgaagcagacccttcagtgaagccttcagtctgtaagaatcgctgcatgtgaagatgtgttaatgttatgatagtta

SEQ ID NO: 163979 - DNA, 80 bp, Homo sapiens
agcagacccttcagtgaagccttcagtctgtaagaatcgctgcatgtgaagatgtgttaatgttatgatagttacagttt

SEQ ID NO: 163980 - DNA, 79 bp, Homo sapiens
cttcagtgaagccttcagtctgtaagaatcgctgcatgtgaagatgtgttaatgttatgatagttacagtttttataaa

SEQ ID NO: 163981 - DNA, 80 bp, Homo sapiens
gaagccttcagtctgtaagaatcgctgcatgtgaagatgtgttaatgttatgatagttacagtttttataaaagagatga

SEQ ID NO: 163982 - DNA, 79 bp, Homo sapiens
gtgaagatgtgttaatgttatgatagttacagtttttataaaagagatgatatacacttggatatgctttctgtctata

SEQ ID NO: 163983 - DNA, 80 bp, Homo sapiens
tgttatgatagttacagtttttataaaagagatgatatacacttggatatgctttctgtctatatttatgcaaatgtgtc

SEQ ID NO: 163984 - DNA, 79 bp, Homo sapiens
aatgacactgagtggcctcctgtattgtttctttcagccagtaatgttaaagtagagactcagagtgatgaagagaatg

SEQ ID NO: 163985 - DNA, 77 bp, Homo sapiens
actgagtggcctcctgtattgtttctttcagccagtaatgttaaagtagagactcagagtgatgaagagaatgggcg

SEQ ID NO: 163986 - DNA, 79 bp, Homo sapiens
gtattgtttctttcagccagtaatgttaaagtagagactcagagtgatgaagagaatgggcgtgcctgtgaaatgaatg

SEQ ID NO: 163987 - DNA, 78 bp, Homo sapiens
tttctttcagccagtaatgttaaagtagagactcagagtgatgaagagaatgggcgtgcctgtgaaatgaatggggaa

SEQ ID NO: 163988 - DNA, 79 bp, Homo sapiens
taatgttaaagtagagactcagagtgatgaagagaatgggcgtgcctgtgaaatgaatggggaagaatgtgcggaggat

SEQ ID NO: 163989 - DNA, 78 bp, Homo sapiens
ttaaagtagagactcagagtgatgaagagaatgggcgtgcctgtgaaatgaatggggaagaatgtgcggaggatttac

SEQ ID NO: 163990 - DNA, 81 bp, Homo sapiens
actcagagtgatgaagagaatgggcgtgcctgtgaaatgaatggggaagaatgtgcggaggatttacgaatgcttgatgcc

SEQ ID NO: 163991 - DNA, 79 bp, Homo sapiens
atgaagagaatgggcgtgcctgtgaaatgaatggggaagaatgtgcggaggatttacgaatgcttgatgcctcgggaga

SEQ ID NO: 163992 - DNA, 78 bp, Homo sapiens
atgggcgtgcctgtgaaatgaatggggaagaatgtgcggaggatttacgaatgcttgatgcctcgggagagaaaatga

SEQ ID NO: 163993 - DNA, 76 bp, Homo sapiens
aaatgaatggggaagaatgtgcggaggatttacgaatgcttgatgcctcgggagagaaaatgaatggctcccacag

SEQ ID NO: 163994 - DNA, 75 bp, Homo sapiens
gggaagaatgtgcggaggatttacgaatgcttgatgcctcgggagagaaaatgaatggctcccacagggaccaag

SEQ ID NO: 163995 - DNA, 77 bp, Homo sapiens
aatgtgcggaggatttacgaatgcttgatgcctcgggagagaaaatgaatggctcccacagggaccaaggcagctcg

SEQ ID NO: 163996 - DNA, 75 bp, Homo sapiens
atttacgaatgcttgatgcctcgggagagaaaatgaatggctcccacagggaccaaggcagctcggctttgtcgg

SEQ ID NO: 163997 - DNA, 76 bp, Homo sapiens
atgcttgatgcctcgggagagaaaatgaatggctcccacagggaccaaggcagctcggctttgtcgggagttggag

SEQ ID NO: 163998 - DNA, 74 bp, Homo sapiens
ggagagaaaatgaatggctcccacagggaccaaggcagctcggctttgtcgggagttggaggcattcgacttcc

SEQ ID NO: 163999 - DNA, 72 bp, Homo sapiens
aaaatgaatggctcccacagggaccaaggcagctcggctttgtcgggagttggaggcattcgacttcctaac

SEQ ID NO: 164000 - DNA, 69 bp, Homo sapiens
ccacagggaccaaggcagctcggctttgtcgggagttggaggcattcgacttcctaacggaaaactaaa

SEQ ID NO: 164001 - DNA, 71 bp, Homo sapiens
accaaggcagctcggctttgtcgggagttggaggcattcgacttcctaacggaaaactaaagtgtgatatc

SEQ ID NO: 164002 - DNA, 72 bp, Homo sapiens
tcggctttgtcgggagttggaggcattcgacttcctaacggaaaactaaagtgtgatatctgtgggatcatt

SEQ ID NO: 164003 - DNA, 74 bp, Homo sapiens
ttgtcgggagttggaggcattcgacttcctaacggaaaactaaagtgtgatatctgtgggatcatttgcatcgg

SEQ ID NO: 164004 - DNA, 78 bp, Homo sapiens
ttggaggcattcgacttcctaacggaaaactaaagtgtgatatctgtgggatcatttgcatcgggcccaatgtgctca

SEQ ID NO: 164005 - DNA, 76 bp, Homo sapiens
acttcctaacggaaaactaaagtgtgatatctgtgggatcatttgcatcgggcccaatgtgctcatggttcacaaa

SEQ ID NO: 164006 - DNA, 77 bp, Homo sapiens
aacggaaaactaaagtgtgatatctgtgggatcatttgcatcgggcccaatgtgctcatggttcacaaaagaagcca

SEQ ID NO: 164007 - DNA, 80 bp, Homo sapiens
taaagtgtgatatctgtgggatcatttgcatcgggcccaatgtgctcatggttcacaaaagaagccacactggtaaggcc

SEQ ID NO: 164008 - DNA, 74 bp, Homo sapiens
atttgcatcgggcccaatgtgctcatggttcacaaaagaagccacactggtaaggcctggctcagtttttcctt

SEQ ID NO: 164009 - DNA, 74 bp, Homo sapiens
cccaatgtgctcatggttcacaaaagaagccacactggtaaggcctggctcagtttttcctttagtggcctgga

SEQ ID NO: 164010 - DNA, 76 bp, Homo sapiens
cccacgctgagtttagttctcaccagctctcctctctccgtcccaggagaacggcccttccagtgcaatcagtgcg

SEQ ID NO: 164011 - DNA, 75 bp, Homo sapiens
gtttagttctcaccagctctcctctctccgtcccaggagaacggcccttccagtgcaatcagtgcggggcctcat

SEQ ID NO: 164012 - DNA, 78 bp, Homo sapiens
tctcaccagctctcctctctccgtcccaggagaacggcccttccagtgcaatcagtgcggggcctcattcacccagaa

SEQ ID NO: 164013 - DNA, 75 bp, Homo sapiens
tctcctctctccgtcccaggagaacggcccttccagtgcaatcagtgcggggcctcattcacccagaagggcaac

SEQ ID NO: 164014 - DNA, 78 bp, Homo sapiens
tcccaggagaacggcccttccagtgcaatcagtgcggggcctcattcacccagaagggcaacctgctccggcacatca

SEQ ID NO: 164015 - DNA, 79 bp, Homo sapiens
agaacggcccttccagtgcaatcagtgcggggcctcattcacccagaagggcaacctgctccggcacatcaagctgcat

SEQ ID NO: 164016 - DNA, 80 bp, Homo sapiens
ttccagtgcaatcagtgcggggcctcattcacccagaagggcaacctgctccggcacatcaagctgcattccggggagaa

SEQ ID NO: 164017 - DNA, 76 bp, Homo sapiens
aatcagtgcggggcctcattcacccagaagggcaacctgctccggcacatcaagctgcattccggggagaagccct

SEQ ID NO: 164018 - DNA, 77 bp, Homo sapiens
gggcctcattcacccagaagggcaacctgctccggcacatcaagctgcattccggggagaagcccttcaaatgccac

SEQ ID NO: 164019 - DNA, 77 bp, Homo sapiens
acccagaagggcaacctgctccggcacatcaagctgcattccggggagaagcccttcaaatgccacctctgcaacta

SEQ ID NO: 164020 - DNA, 77 bp, Homo sapiens
aacctgctccggcacatcaagctgcattccggggagaagcccttcaaatgccacctctgcaactacgcctgccgccg

SEQ ID NO: 164021 - DNA, 77 bp, Homo sapiens
ctccggcacatcaagctgcattccggggagaagcccttcaaatgccacctctgcaactacgcctgccgccggaggga

SEQ ID NO: 164022 - DNA, 74 bp, Homo sapiens
aagctgcattccggggagaagcccttcaaatgccacctctgcaactacgcctgccgccggagggacgccctcac

SEQ ID NO: 164023 - DNA, 75 bp, Homo sapiens
gggagaagcccttcaaatgccacctctgcaactacgcctgccgccggagggacgccctcactggccacctgagga

SEQ ID NO: 164024 - DNA, 75 bp, Homo sapiens
aagcccttcaaatgccacctctgcaactacgcctgccgccggagggacgccctcactggccacctgaggacgcac

SEQ ID NO: 164025 - DNA, 74 bp, Homo sapiens
aatgccacctctgcaactacgcctgccgccggagggacgccctcactggccacctgaggacgcactccggtagg

SEQ ID NO: 164026 - DNA, 73 bp, Homo sapiens
aactacgcctgccgccggagggacgccctcactggccacctgaggacgcactccggtaggtcccctggatgca

SEQ ID NO: 164027 - DNA, 72 bp, Homo sapiens
ctgccgccggagggacgccctcactggccacctgaggacgcactccggtaggtcccctggatgcagtccggg

SEQ ID NO: 164028 - DNA, 72 bp, Homo sapiens
agggacgccctcactggccacctgaggacgcactccggtaggtcccctggatgcagtccggggctgtctggg

SEQ ID NO: 164029 - DNA, 73 bp, Homo sapiens
aaggctggcatttaattggggtcttgaactcaattgtgttttctgcagttggtaaacctcacaaatgtggata

SEQ ID NO: 164030 - DNA, 72 bp, Homo sapiens
atttaattggggtcttgaactcaattgtgttttctgcagttggtaaacctcacaaatgtggatattgtggcc

SEQ ID NO: 164031 - DNA, 75 bp, Homo sapiens
ggtcttgaactcaattgtgttttctgcagttggtaaacctcacaaatgtggatattgtggccgaagctataaaca

SEQ ID NO: 164032 - DNA, 75 bp, Homo sapiens
attgtgttttctgcagttggtaaacctcacaaatgtggatattgtggccgaagctataaacagcgaagctcttta

SEQ ID NO: 164033 - DNA, 75 bp, Homo sapiens
ttttctgcagttggtaaacctcacaaatgtggatattgtggccgaagctataaacagcgaagctctttagaggaa

SEQ ID NO: 164034 - DNA, 74 bp, Homo sapiens
gttggtaaacctcacaaatgtggatattgtggccgaagctataaacagcgaagctctttagaggaacataaaga

SEQ ID NO: 164035 - DNA, 76 bp, Homo sapiens
aaatgtggatattgtggccgaagctataaacagcgaagctctttagaggaacataaagagcgctgccacaactact

SEQ ID NO: 164036 - DNA, 77 bp, Homo sapiens
tggatattgtggccgaagctataaacagcgaagctctttagaggaacataaagagcgctgccacaactacttggaaa

SEQ ID NO: 164037 - DNA, 75 bp, Homo sapiens
aagctataaacagcgaagctctttagaggaacataaagagcgctgccacaactacttggaaagcatgggccttcc

SEQ ID NO: 164038 - DNA, 75 bp, Homo sapiens
ataaacagcgaagctctttagaggaacataaagagcgctgccacaactacttggaaagcatgggccttccgggca

SEQ ID NO: 164039 - DNA, 74 bp, Homo sapiens
aagctctttagaggaacataaagagcgctgccacaactacttggaaagcatgggccttccgggcacactgtacc

SEQ ID NO: 164040 - DNA, 74 bp, Homo sapiens
aggaacataaagagcgctgccacaactacttggaaagcatgggccttccgggcacactgtacccaggtaagcgc

SEQ ID NO: 164041 - DNA, 77 bp, Homo sapiens
aagagcgctgccacaactacttggaaagcatgggccttccgggcacactgtacccaggtaagcgctgctgctcggag

SEQ ID NO: 164042 - DNA, 75 bp, Homo sapiens
aactacttggaaagcatgggccttccgggcacactgtacccaggtaagcgctgctgctcggaggccagcctggtg

SEQ ID NO: 164043 - DNA, 67 bp, Homo sapiens
accctttaaacataagcctttctaaactggcctctctgtctttgactttagtcattaaagaagaaac

SEQ ID NO: 164044 - DNA, 72 bp, Homo sapiens
ataagcctttctaaactggcctctctgtctttgactttagtcattaaagaagaaactaatcacagtgaaatg

SEQ ID NO: 164045 - DNA, 75 bp, Homo sapiens
tctaaactggcctctctgtctttgactttagtcattaaagaagaaactaatcacagtgaaatggcagaagacctg

SEQ ID NO: 164046 - DNA, 79 bp, Homo sapiens
ctgtctttgactttagtcattaaagaagaaactaatcacagtgaaatggcagaagacctgtgcaagataggatcagaga

SEQ ID NO: 164047 - DNA, 80 bp, Homo sapiens
tttgactttagtcattaaagaagaaactaatcacagtgaaatggcagaagacctgtgcaagataggatcagagagatctc

SEQ ID NO: 164048 - DNA, 83 bp, Homo sapiens
ttaaagaagaaactaatcacagtgaaatggcagaagacctgtgcaagataggatcagagagatctctcgtgctggacagacta

SEQ ID NO: 164049 - DNA, 84 bp, Homo sapiens
agaaactaatcacagtgaaatggcagaagacctgtgcaagataggatcagagagatctctcgtgctggacagactagcaagtaa

SEQ ID NO: 164050 - DNA, 82 bp, Homo sapiens
agtgaaatggcagaagacctgtgcaagataggatcagagagatctctcgtgctggacagactagcaagtaacgtcgccaaac

SEQ ID NO: 164051 - DNA, 81 bp, Homo sapiens
agaagacctgtgcaagataggatcagagagatctctcgtgctggacagactagcaagtaacgtcgccaaacgtaagagctc

SEQ ID NO: 164052 - DNA, 84 bp, Homo sapiens
tgcaagataggatcagagagatctctcgtgctggacagactagcaagtaacgtcgccaaacgtaagagctctatgcctcagaaa

SEQ ID NO: 164053 - DNA, 80 bp, Homo sapiens
ataggatcagagagatctctcgtgctggacagactagcaagtaacgtcgccaaacgtaagagctctatgcctcagaaatt

SEQ ID NO: 164054 - DNA, 77 bp, Homo sapiens
agatctctcgtgctggacagactagcaagtaacgtcgccaaacgtaagagctctatgcctcagaaatttcttggtaa

SEQ ID NO: 164055 - DNA, 73 bp, Homo sapiens
ctggacagactagcaagtaacgtcgccaaacgtaagagctctatgcctcagaaatttcttggtaagagttaaa

SEQ ID NO: 164056 - DNA, 71 bp, Homo sapiens
agactagcaagtaacgtcgccaaacgtaagagctctatgcctcagaaatttcttggtaagagttaaatgtt

SEQ ID NO: 164057 - DNA, 73 bp, Homo sapiens
taacgtcgccaaacgtaagagctctatgcctcagaaatttcttggtaagagttaaatgtttgctgtctcttaa

SEQ ID NO: 164058 - DNA, 70 bp, Homo sapiens
accggttccggaggtggccgcgccccactcactgtcgcctgctttccacaggggacaagggcctgtccga

SEQ ID NO: 164059 - DNA, 73 bp, Homo sapiens
aggtggccgcgccccactcactgtcgcctgctttccacaggggacaagggcctgtccgacacgccctacgaca

SEQ ID NO: 164060 - DNA, 78 bp, Homo sapiens
cactcactgtcgcctgctttccacaggggacaagggcctgtccgacacgccctacgacagcagcgccagctacgagaa

SEQ ID NO: 164061 - DNA, 77 bp, Homo sapiens
tccacaggggacaagggcctgtccgacacgccctacgacagcagcgccagctacgagaaggagaacgaaatgatgaa

SEQ ID NO: 164062 - DNA, 75 bp, Homo sapiens
acaagggcctgtccgacacgccctacgacagcagcgccagctacgagaaggagaacgaaatgatgaagtcccacg

SEQ ID NO: 164063 - DNA, 78 bp, Homo sapiens
ctgtccgacacgccctacgacagcagcgccagctacgagaaggagaacgaaatgatgaagtcccacgtgatggaccaa

SEQ ID NO: 164064 - DNA, 78 bp, Homo sapiens
ccctacgacagcagcgccagctacgagaaggagaacgaaatgatgaagtcccacgtgatggaccaagccatcaacaac

SEQ ID NO: 164065 - DNA, 80 bp, Homo sapiens
agcagcgccagctacgagaaggagaacgaaatgatgaagtcccacgtgatggaccaagccatcaacaacgccatcaacta

SEQ ID NO: 164066 - DNA, 76 bp, Homo sapiens
agctacgagaaggagaacgaaatgatgaagtcccacgtgatggaccaagccatcaacaacgccatcaactacctgg

SEQ ID NO: 164067 - DNA, 74 bp, Homo sapiens
aaggagaacgaaatgatgaagtcccacgtgatggaccaagccatcaacaacgccatcaactacctgggggccga

SEQ ID NO: 164068 - DNA, 75 bp, Homo sapiens
aaatgatgaagtcccacgtgatggaccaagccatcaacaacgccatcaactacctgggggccgagtccctgcgcc

SEQ ID NO: 164069 - DNA, 76 bp, Homo sapiens
agtcccacgtgatggaccaagccatcaacaacgccatcaactacctgggggccgagtccctgcgcccgctggtgca

SEQ ID NO: 164070 - DNA, 74 bp, Homo sapiens
atggaccaagccatcaacaacgccatcaactacctgggggccgagtccctgcgcccgctggtgcagacgccccc

SEQ ID NO: 164071 - DNA, 71 bp, Homo sapiens
atcaacaacgccatcaactacctgggggccgagtccctgcgcccgctggtgcagacgcccccgggcggttc

SEQ ID NO: 164072 - DNA, 69 bp, Homo sapiens
atcaactacctgggggccgagtccctgcgcccgctggtgcagacgcccccgggcggttccgaggtggtc

SEQ ID NO: 164073 - DNA, 70 bp, Homo sapiens
ctgggggccgagtccctgcgcccgctggtgcagacgcccccgggcggttccgaggtggtcccggtcatca

SEQ ID NO: 164074 - DNA, 71 bp, Homo sapiens
agtccctgcgcccgctggtgcagacgcccccgggcggttccgaggtggtcccggtcatcagcccgatgtac

SEQ ID NO: 164075 - DNA, 76 bp, Homo sapiens
tgcgcccgctggtgcagacgcccccgggcggttccgaggtggtcccggtcatcagcccgatgtaccagctgcacaa

SEQ ID NO: 164076 - DNA, 73 bp, Homo sapiens
agacgcccccgggcggttccgaggtggtcccggtcatcagcccgatgtaccagctgcacaagccgctcgcgga

SEQ ID NO: 164077 - DNA, 73 bp, Homo sapiens
cccgggcggttccgaggtggtcccggtcatcagcccgatgtaccagctgcacaagccgctcgcggagggcacc

SEQ ID NO: 164078 - DNA, 76 bp, Homo sapiens
ttccgaggtggtcccggtcatcagcccgatgtaccagctgcacaagccgctcgcggagggcaccccgcgctccaac

SEQ ID NO: 164079 - DNA, 78 bp, Homo sapiens
cggtcatcagcccgatgtaccagctgcacaagccgctcgcggagggcaccccgcgctccaaccactcggcccaggaca

SEQ ID NO: 164080 - DNA, 78 bp, Homo sapiens
atcagcccgatgtaccagctgcacaagccgctcgcggagggcaccccgcgctccaaccactcggcccaggacagcgcc

SEQ ID NO: 164081 - DNA, 77 bp, Homo sapiens
tgtaccagctgcacaagccgctcgcggagggcaccccgcgctccaaccactcggcccaggacagcgccgtggagaac

SEQ ID NO: 164082 - DNA, 77 bp, Homo sapiens
acaagccgctcgcggagggcaccccgcgctccaaccactcggcccaggacagcgccgtggagaacctgctgctgctc

SEQ ID NO: 164083 - DNA, 76 bp, Homo sapiens
cggagggcaccccgcgctccaaccactcggcccaggacagcgccgtggagaacctgctgctgctctccaaggccaa

SEQ ID NO: 164084 - DNA, 77 bp, Homo sapiens
ccgcgctccaaccactcggcccaggacagcgccgtggagaacctgctgctgctctccaaggccaagttggtgccctc

SEQ ID NO: 164085 - DNA, 77 bp, Homo sapiens
aaccactcggcccaggacagcgccgtggagaacctgctgctgctctccaaggccaagttggtgccctcggagcgcga

SEQ ID NO: 164086 - DNA, 78 bp, Homo sapiens
tcggcccaggacagcgccgtggagaacctgctgctgctctccaaggccaagttggtgccctcggagcgcgaggcgtcc

SEQ ID NO: 164087 - DNA, 79 bp, Homo sapiens
aacctgctgctgctctccaaggccaagttggtgccctcggagcgcgaggcgtccccgagcaacagctgccaagactcca

SEQ ID NO: 164088 - DNA, 77 bp, Homo sapiens
gccaagttggtgccctcggagcgcgaggcgtccccgagcaacagctgccaagactccacggacaccgagagcaacaa

SEQ ID NO: 164089 - DNA, 77 bp, Homo sapiens
ttggtgccctcggagcgcgaggcgtccccgagcaacagctgccaagactccacggacaccgagagcaacaacgagga

SEQ ID NO: 164090 - DNA, 81 bp, Homo sapiens
agcgcgaggcgtccccgagcaacagctgccaagactccacggacaccgagagcaacaacgaggagcagcgcagcggtctca

SEQ ID NO: 164091 - DNA, 82 bp, Homo sapiens
tccccgagcaacagctgccaagactccacggacaccgagagcaacaacgaggagcagcgcagcggtctcatctacctgacca

SEQ ID NO: 164092 - DNA, 81 bp, Homo sapiens
aacagctgccaagactccacggacaccgagagcaacaacgaggagcagcgcagcggtctcatctacctgaccaaccacatc

SEQ ID NO: 164093 - DNA, 79 bp, Homo sapiens
aagactccacggacaccgagagcaacaacgaggagcagcgcagcggtctcatctacctgaccaaccacatcgccccgca

SEQ ID NO: 164094 - DNA, 80 bp, Homo sapiens
acggacaccgagagcaacaacgaggagcagcgcagcggtctcatctacctgaccaaccacatcgccccgcacgcgcgcaa

SEQ ID NO: 164095 - DNA, 82 bp, Homo sapiens
gcaacaacgaggagcagcgcagcggtctcatctacctgaccaaccacatcgccccgcacgcgcgcaacgggctgtcgctcaa

SEQ ID NO: 164096 - DNA, 80 bp, Homo sapiens
aacgaggagcagcgcagcggtctcatctacctgaccaaccacatcgccccgcacgcgcgcaacgggctgtcgctcaagga

SEQ ID NO: 164097 - DNA, 80 bp, Homo sapiens
agcgcagcggtctcatctacctgaccaaccacatcgccccgcacgcgcgcaacgggctgtcgctcaaggaggagcaccgc

SEQ ID NO: 164098 - DNA, 79 bp, Homo sapiens
tctcatctacctgaccaaccacatcgccccgcacgcgcgcaacgggctgtcgctcaaggaggagcaccgcgcctacgac

SEQ ID NO: 164099 - DNA, 80 bp, Homo sapiens
tgaccaaccacatcgccccgcacgcgcgcaacgggctgtcgctcaaggaggagcaccgcgcctacgacctgctgcgcgcc

SEQ ID NO: 164100 - DNA, 78 bp, Homo sapiens
aacgggctgtcgctcaaggaggagcaccgcgcctacgacctgctgcgcgccgcctccgagaactcgcaggacgcgctc

SEQ ID NO: 164101 - DNA, 80 bp, Homo sapiens
cctacgacctgctgcgcgccgcctccgagaactcgcaggacgcgctccgcgtggtcagcaccagcggggagcagatgaag

SEQ ID NO: 164102 - DNA, 82 bp, Homo sapiens
tgcgcgccgcctccgagaactcgcaggacgcgctccgcgtggtcagcaccagcggggagcagatgaaggtgtacaagtgcga

SEQ ID NO: 164103 - DNA, 79 bp, Homo sapiens
aactcgcaggacgcgctccgcgtggtcagcaccagcggggagcagatgaaggtgtacaagtgcgaacactgccgggtgc

SEQ ID NO: 164104 - DNA, 79 bp, Homo sapiens
ctccgcgtggtcagcaccagcggggagcagatgaaggtgtacaagtgcgaacactgccgggtgctcttcctggatcacg

SEQ ID NO: 164105 - DNA, 83 bp, Homo sapiens
tcagcaccagcggggagcagatgaaggtgtacaagtgcgaacactgccgggtgctcttcctggatcacgtcatgtacaccatc

SEQ ID NO: 164106 - DNA, 81 bp, Homo sapiens
agcggggagcagatgaaggtgtacaagtgcgaacactgccgggtgctcttcctggatcacgtcatgtacaccatccacatg

SEQ ID NO: 164107 - DNA, 82 bp, Homo sapiens
tgtacaagtgcgaacactgccgggtgctcttcctggatcacgtcatgtacaccatccacatgggctgccacggcttccgtga

SEQ ID NO: 164108 - DNA, 79 bp, Homo sapiens
aacactgccgggtgctcttcctggatcacgtcatgtacaccatccacatgggctgccacggcttccgtgatccttttga

SEQ ID NO: 164109 - DNA, 83 bp, Homo sapiens
ggtgctcttcctggatcacgtcatgtacaccatccacatgggctgccacggcttccgtgatccttttgagtgcaacatgtgcg

SEQ ID NO: 164110 - DNA, 83 bp, Homo sapiens
ttcctggatcacgtcatgtacaccatccacatgggctgccacggcttccgtgatccttttgagtgcaacatgtgcggctacca

SEQ ID NO: 164111 - DNA, 82 bp, Homo sapiens
acgtcatgtacaccatccacatgggctgccacggcttccgtgatccttttgagtgcaacatgtgcggctaccacagccagga

SEQ ID NO: 164112 - DNA, 78 bp, Homo sapiens
atccacatgggctgccacggcttccgtgatccttttgagtgcaacatgtgcggctaccacagccaggaccggtacgag

SEQ ID NO: 164113 - DNA, 77 bp, Homo sapiens
atgggctgccacggcttccgtgatccttttgagtgcaacatgtgcggctaccacagccaggaccggtacgagttctc

SEQ ID NO: 164114 - DNA, 77 bp, Homo sapiens
cttccgtgatccttttgagtgcaacatgtgcggctaccacagccaggaccggtacgagttctcgtcgcacataacgc

SEQ ID NO: 164115 - DNA, 77 bp, Homo sapiens
agtgcaacatgtgcggctaccacagccaggaccggtacgagttctcgtcgcacataacgcgaggggagcaccgcttc

SEQ ID NO: 164116 - DNA, 76 bp, Homo sapiens
cggctaccacagccaggaccggtacgagttctcgtcgcacataacgcgaggggagcaccgcttccacatgagctaa

SEQ ID NO: 164117 - DNA, 73 bp, Homo sapiens
accggtacgagttctcgtcgcacataacgcgaggggagcaccgcttccacatgagctaaagccctcccgcgcc

SEQ ID NO: 164118 - DNA, 73 bp, Homo sapiens
agttctcgtcgcacataacgcgaggggagcaccgcttccacatgagctaaagccctcccgcgcccccacccca

SEQ ID NO: 164119 - DNA, 71 bp, Homo sapiens
acataacgcgaggggagcaccgcttccacatgagctaaagccctcccgcgcccccaccccagaccccgagc

SEQ ID NO: 164120 - DNA, 70 bp, Homo sapiens
acatgagctaaagccctcccgcgcccccaccccagaccccgagccaccccaggaaaagcacaaggactgc

SEQ ID NO: 164121 - DNA, 74 bp, Homo sapiens
cccaccccagaccccgagccaccccaggaaaagcacaaggactgccgccttctcgctcccgccagcagcataga

SEQ ID NO: 164122 - DNA, 76 bp, Homo sapiens
agaccccgagccaccccaggaaaagcacaaggactgccgccttctcgctcccgccagcagcatagactggactgga

SEQ ID NO: 164123 - DNA, 77 bp, Homo sapiens
accccaggaaaagcacaaggactgccgccttctcgctcccgccagcagcatagactggactggaccagacaatgttg

SEQ ID NO: 164124 - DNA, 78 bp, Homo sapiens
aaaagcacaaggactgccgccttctcgctcccgccagcagcatagactggactggaccagacaatgttgtgtttggat

SEQ ID NO: 164125 - DNA, 77 bp, Homo sapiens
actgccgccttctcgctcccgccagcagcatagactggactggaccagacaatgttgtgtttggatttgtaactgtt

SEQ ID NO: 164126 - DNA, 75 bp, Homo sapiens
cgccttctcgctcccgccagcagcatagactggactggaccagacaatgttgtgtttggatttgtaactgttttt

SEQ ID NO: 164127 - DNA, 72 bp, Homo sapiens
ctcccgccagcagcatagactggactggaccagacaatgttgtgtttggatttgtaactgttttttgttttt

SEQ ID NO: 164128 - DNA, 65 bp, Homo sapiens
ttgttttttgtttgagttggttgattggggtttgatttgcttttgaaaagatttttatttttaga

SEQ ID NO: 164129 - DNA, 74 bp, Homo sapiens
tttttatttttagaggcagggctgcattgggagcatccagaactgctaccttcctagatgtttccccagaccgc

SEQ ID NO: 164130 - DNA, 79 bp, Homo sapiens
ttttagaggcagggctgcattgggagcatccagaactgctaccttcctagatgtttccccagaccgctggctgagattc

SEQ ID NO: 164131 - DNA, 78 bp, Homo sapiens
agggctgcattgggagcatccagaactgctaccttcctagatgtttccccagaccgctggctgagattccctcacctg

SEQ ID NO: 164132 - DNA, 78 bp, Homo sapiens
gagcatccagaactgctaccttcctagatgtttccccagaccgctggctgagattccctcacctgtcgcttcctagaa

SEQ ID NO: 164133 - DNA, 74 bp, Homo sapiens
agaactgctaccttcctagatgtttccccagaccgctggctgagattccctcacctgtcgcttcctagaatccc

SEQ ID NO: 164134 - DNA, 73 bp, Homo sapiens
ctaccttcctagatgtttccccagaccgctggctgagattccctcacctgtcgcttcctagaatccccttctc

SEQ ID NO: 164135 - DNA, 73 bp, Homo sapiens
tttccccagaccgctggctgagattccctcacctgtcgcttcctagaatccccttctccaaacgattagtcta

SEQ ID NO: 164136 - DNA, 71 bp, Homo sapiens
agaccgctggctgagattccctcacctgtcgcttcctagaatccccttctccaaacgattagtctaaattt

SEQ ID NO: 164137 - DNA, 71 bp, Homo sapiens
agattccctcacctgtcgcttcctagaatccccttctccaaacgattagtctaaattttcagagagaaata

SEQ ID NO: 164138 - DNA, 71 bp, Homo sapiens
ctcacctgtcgcttcctagaatccccttctccaaacgattagtctaaattttcagagagaaatagataaaa

SEQ ID NO: 164139 - DNA, 72 bp, Homo sapiens
tcgcttcctagaatccccttctccaaacgattagtctaaattttcagagagaaatagataaaacacgccaca

SEQ ID NO: 164140 - DNA, 71 bp, Homo sapiens
cccttctccaaacgattagtctaaattttcagagagaaatagataaaacacgccacagcctgggaaggagc

SEQ ID NO: 164141 - DNA, 72 bp, Homo sapiens
aaacgattagtctaaattttcagagagaaatagataaaacacgccacagcctgggaaggagcgtgctctacc

SEQ ID NO: 164142 - DNA, 75 bp, Homo sapiens
ttagtctaaattttcagagagaaatagataaaacacgccacagcctgggaaggagcgtgctctaccctgtgctaa

SEQ ID NO: 164143 - DNA, 74 bp, Homo sapiens
aaatagataaaacacgccacagcctgggaaggagcgtgctctaccctgtgctaagcacggggttcgcgcaccag

SEQ ID NO: 164144 - DNA, 72 bp, Homo sapiens
agcctgggaaggagcgtgctctaccctgtgctaagcacggggttcgcgcaccaggtgtctttttccagtccc

SEQ ID NO: 164145 - DNA, 75 bp, Homo sapiens
tctaccctgtgctaagcacggggttcgcgcaccaggtgtctttttccagtccccagaagcagagagcacagcccc

SEQ ID NO: 164146 - DNA, 76 bp, Homo sapiens
taagcacggggttcgcgcaccaggtgtctttttccagtccccagaagcagagagcacagcccctgctgtgtgggtc

SEQ ID NO: 164147 - DNA, 80 bp, Homo sapiens
accaggtgtctttttccagtccccagaagcagagagcacagcccctgctgtgtgggtctgcaggtgagcagacaggacag

SEQ ID NO: 164148 - DNA, 82 bp, Homo sapiens
tttttccagtccccagaagcagagagcacagcccctgctgtgtgggtctgcaggtgagcagacaggacaggtgtgccgccac

SEQ ID NO: 164149 - DNA, 85 bp, Homo sapiens
agaagcagagagcacagcccctgctgtgtgggtctgcaggtgagcagacaggacaggtgtgccgccacccaagtgccaagacaca

SEQ ID NO: 164150 - DNA, 84 bp, Homo sapiens
agagagcacagcccctgctgtgtgggtctgcaggtgagcagacaggacaggtgtgccgccacccaagtgccaagacacagcagg

SEQ ID NO: 164151 - DNA, 84 bp, Homo sapiens
tgctgtgtgggtctgcaggtgagcagacaggacaggtgtgccgccacccaagtgccaagacacagcagggccaacaacctgtgc

SEQ ID NO: 164152 - DNA, 82 bp, Homo sapiens
tgtgggtctgcaggtgagcagacaggacaggtgtgccgccacccaagtgccaagacacagcagggccaacaacctgtgccca

SEQ ID NO: 164153 - DNA, 81 bp, Homo sapiens
gtgagcagacaggacaggtgtgccgccacccaagtgccaagacacagcagggccaacaacctgtgcccaggccagcttcga

SEQ ID NO: 164154 - DNA, 80 bp, Homo sapiens
ccgccacccaagtgccaagacacagcagggccaacaacctgtgcccaggccagcttcgagctacatgcatctagggcgga

SEQ ID NO: 164155 - DNA, 82 bp, Homo sapiens
aagtgccaagacacagcagggccaacaacctgtgcccaggccagcttcgagctacatgcatctagggcggagaggctgcact

SEQ ID NO: 164156 - DNA, 83 bp, Homo sapiens
acacagcagggccaacaacctgtgcccaggccagcttcgagctacatgcatctagggcggagaggctgcacttgtgagagaaa

SEQ ID NO: 164157 - DNA, 80 bp, Homo sapiens
ccaacaacctgtgcccaggccagcttcgagctacatgcatctagggcggagaggctgcacttgtgagagaaaatactatt

SEQ ID NO: 164158 - DNA, 84 bp, Homo sapiens
tgtgcccaggccagcttcgagctacatgcatctagggcggagaggctgcacttgtgagagaaaatactatttcaagtcatattc

SEQ ID NO: 164159 - DNA, 83 bp, Homo sapiens
cagcttcgagctacatgcatctagggcggagaggctgcacttgtgagagaaaatactatttcaagtcatattctgcgtaggaa

SEQ ID NO: 164160 - DNA, 80 bp, Homo sapiens
ctacatgcatctagggcggagaggctgcacttgtgagagaaaatactatttcaagtcatattctgcgtaggaaaatgaat

SEQ ID NO: 164161 - DNA, 76 bp, Homo sapiens
atctagggcggagaggctgcacttgtgagagaaaatactatttcaagtcatattctgcgtaggaaaatgaattggt

SEQ ID NO: 164162 - DNA, 74 bp, Homo sapiens
agaggctgcacttgtgagagaaaatactatttcaagtcatattctgcgtaggaaaatgaattggttggggaaag

SEQ ID NO: 164163 - DNA, 72 bp, Homo sapiens
acttgtgagagaaaatactatttcaagtcatattctgcgtaggaaaatgaattggttggggaaagtcgtgtc

SEQ ID NO: 164164 - DNA, 73 bp, Homo sapiens
aaatactatttcaagtcatattctgcgtaggaaaatgaattggttggggaaagtcgtgtctgtcagactgccc

SEQ ID NO: 164165 - DNA, 73 bp, Homo sapiens
atattctgcgtaggaaaatgaattggttggggaaagtcgtgtctgtcagactgccctgggtggagggagacgc

SEQ ID NO: 164166 - DNA, 72 bp, Homo sapiens
taggaaaatgaattggttggggaaagtcgtgtctgtcagactgccctgggtggagggagacgccgggctaga

SEQ ID NO: 164167 - DNA, 70 bp, Homo sapiens
aattggttggggaaagtcgtgtctgtcagactgccctgggtggagggagacgccgggctagagcctttgg

SEQ ID NO: 164168 - DNA, 74 bp, Homo sapiens
aaagtcgtgtctgtcagactgccctgggtggagggagacgccgggctagagcctttgggatcgtcctggattca

SEQ ID NO: 164169 - DNA, 75 bp, Homo sapiens
gtgtctgtcagactgccctgggtggagggagacgccgggctagagcctttgggatcgtcctggattcactggctt

SEQ ID NO: 164170 - DNA, 79 bp, Homo sapiens
gtggagggagacgccgggctagagcctttgggatcgtcctggattcactggctttgcggaggctgctcagatggcctga

SEQ ID NO: 164171 - DNA, 78 bp, Homo sapiens
acgccgggctagagcctttgggatcgtcctggattcactggctttgcggaggctgctcagatggcctgagcctcccga

SEQ ID NO: 164172 - DNA, 81 bp, Homo sapiens
tagagcctttgggatcgtcctggattcactggctttgcggaggctgctcagatggcctgagcctcccgaggcttgctgccc

SEQ ID NO: 164173 - DNA, 80 bp, Homo sapiens
atcgtcctggattcactggctttgcggaggctgctcagatggcctgagcctcccgaggcttgctgccccgtaggaggaga

SEQ ID NO: 164174 - DNA, 79 bp, Homo sapiens
attcactggctttgcggaggctgctcagatggcctgagcctcccgaggcttgctgccccgtaggaggagactgtcttcc

SEQ ID NO: 164175 - DNA, 79 bp, Homo sapiens
tttgcggaggctgctcagatggcctgagcctcccgaggcttgctgccccgtaggaggagactgtcttcccgtgggcata

SEQ ID NO: 164176 - DNA, 78 bp, Homo sapiens
aggctgctcagatggcctgagcctcccgaggcttgctgccccgtaggaggagactgtcttcccgtgggcatatctggg

SEQ ID NO: 164177 - DNA, 74 bp, Homo sapiens
cctgagcctcccgaggcttgctgccccgtaggaggagactgtcttcccgtgggcatatctggggagccctgttc

SEQ ID NO: 164178 - DNA, 72 bp, Homo sapiens
ttgctgccccgtaggaggagactgtcttcccgtgggcatatctggggagccctgttccccgctttttcactc

SEQ ID NO: 164179 - DNA, 70 bp, Homo sapiens
ggaggagactgtcttcccgtgggcatatctggggagccctgttccccgctttttcactcccataccttta

SEQ ID NO: 164180 - DNA, 70 bp, Homo sapiens
agactgtcttcccgtgggcatatctggggagccctgttccccgctttttcactcccatacctttaatggc

SEQ ID NO: 164181 - DNA, 71 bp, Homo sapiens
tgggcatatctggggagccctgttccccgctttttcactcccatacctttaatggcccccaaaatctgtca

SEQ ID NO: 164182 - DNA, 68 bp, Homo sapiens
tggggagccctgttccccgctttttcactcccatacctttaatggcccccaaaatctgtcactacaat

SEQ ID NO: 164183 - DNA, 67 bp, Homo sapiens
cctgttccccgctttttcactcccatacctttaatggcccccaaaatctgtcactacaatttaaaca

SEQ ID NO: 164184 - DNA, 67 bp, Homo sapiens
ttttcactcccatacctttaatggcccccaaaatctgtcactacaatttaaacaccagtcccgaaat

SEQ ID NO: 164185 - DNA, 68 bp, Homo sapiens
catacctttaatggcccccaaaatctgtcactacaatttaaacaccagtcccgaaatttggatcttct

SEQ ID NO: 164186 - DNA, 70 bp, Homo sapiens
cccaaaatctgtcactacaatttaaacaccagtcccgaaatttggatcttctttctttttgaatctctca

SEQ ID NO: 164187 - DNA, 70 bp, Homo sapiens
tcactacaatttaaacaccagtcccgaaatttggatcttctttctttttgaatctctcaaacggcaacat

SEQ ID NO: 164188 - DNA, 70 bp, Homo sapiens
atttaaacaccagtcccgaaatttggatcttctttctttttgaatctctcaaacggcaacattcctcaga

SEQ ID NO: 164189 - DNA, 69 bp, Homo sapiens
ccgaaatttggatcttctttctttttgaatctctcaaacggcaacattcctcagaaaccaaagctttat

SEQ ID NO: 164190 - DNA, 71 bp, Homo sapiens
ggatcttctttctttttgaatctctcaaacggcaacattcctcagaaaccaaagctttatttcaaatctct

SEQ ID NO: 164191 - DNA, 70 bp, Homo sapiens
ctttctttttgaatctctcaaacggcaacattcctcagaaaccaaagctttatttcaaatctcttccttc

SEQ ID NO: 164192 - DNA, 71 bp, Homo sapiens
aatctctcaaacggcaacattcctcagaaaccaaagctttatttcaaatctcttccttccctggctggttc

SEQ ID NO: 164193 - DNA, 71 bp, Homo sapiens
tcagaaaccaaagctttatttcaaatctcttccttccctggctggttccatctagtaccagaggcctcttt

SEQ ID NO: 164194 - DNA, 71 bp, Homo sapiens
aagctttatttcaaatctcttccttccctggctggttccatctagtaccagaggcctcttttcctgaagaa

SEQ ID NO: 164195 - DNA, 72 bp, Homo sapiens
ttatttcaaatctcttccttccctggctggttccatctagtaccagaggcctcttttcctgaagaaatccaa

SEQ ID NO: 164196 - DNA, 74 bp, Homo sapiens
tggctggttccatctagtaccagaggcctcttttcctgaagaaatccaatcctagccctcattttaattatgta

SEQ ID NO: 164197 - DNA, 74 bp, Homo sapiens
tctagtaccagaggcctcttttcctgaagaaatccaatcctagccctcattttaattatgtacatctgtttgta

SEQ ID NO: 164198 - DNA, 75 bp, Homo sapiens
taccagaggcctcttttcctgaagaaatccaatcctagccctcattttaattatgtacatctgtttgtagccaca

SEQ ID NO: 164199 - DNA, 75 bp, Homo sapiens
aagaaatccaatcctagccctcattttaattatgtacatctgtttgtagccacaagcctgaatttctcagtgttg

SEQ ID NO: 164200 - DNA, 74 bp, Homo sapiens
tagccctcattttaattatgtacatctgtttgtagccacaagcctgaatttctcagtgttggtaagtttcttta

SEQ ID NO: 164201 - DNA, 71 bp, Homo sapiens
ttttaattatgtacatctgtttgtagccacaagcctgaatttctcagtgttggtaagtttctttacctacc

SEQ ID NO: 164202 - DNA, 74 bp, Homo sapiens
tacatctgtttgtagccacaagcctgaatttctcagtgttggtaagtttctttacctaccctcactatatatta

SEQ ID NO: 164203 - DNA, 72 bp, Homo sapiens
ctgtttgtagccacaagcctgaatttctcagtgttggtaagtttctttacctaccctcactatatattattc

SEQ ID NO: 164204 - DNA, 70 bp, Homo sapiens
ccacaagcctgaatttctcagtgttggtaagtttctttacctaccctcactatatattattctcgtttta

SEQ ID NO: 164205 - DNA, 67 bp, Homo sapiens
tctcagtgttggtaagtttctttacctaccctcactatatattattctcgttttaaaacccataaag

SEQ ID NO: 164206 - DNA, 66 bp, Homo sapiens
gttggtaagtttctttacctaccctcactatatattattctcgttttaaaacccataaaggagtga

SEQ ID NO: 164207 - DNA, 68 bp, Homo sapiens
ctaccctcactatatattattctcgttttaaaacccataaaggagtgatttagaacagtcattaattt

SEQ ID NO: 164208 - DNA, 70 bp, Homo sapiens
atatattattctcgttttaaaacccataaaggagtgatttagaacagtcattaattttcaactcaatgaa

SEQ ID NO: 164209 - DNA, 73 bp, Homo sapiens
ttttaaaacccataaaggagtgatttagaacagtcattaattttcaactcaatgaaatatgtgaagcccagca

SEQ ID NO: 164210 - DNA, 75 bp, Homo sapiens
aaacccataaaggagtgatttagaacagtcattaattttcaactcaatgaaatatgtgaagcccagcatctctgt

SEQ ID NO: 164211 - DNA, 81 bp, Homo sapiens
acagtcattaattttcaactcaatgaaatatgtgaagcccagcatctctgttgctaacacacagagctcacctgtttgaaa

SEQ ID NO: 164212 - DNA, 79 bp, Homo sapiens
attaattttcaactcaatgaaatatgtgaagcccagcatctctgttgctaacacacagagctcacctgtttgaaaccaa

SEQ ID NO: 164213 - DNA, 81 bp, Homo sapiens
aatgaaatatgtgaagcccagcatctctgttgctaacacacagagctcacctgtttgaaaccaagctttcaaacatgttga

SEQ ID NO: 164214 - DNA, 81 bp, Homo sapiens
aatatgtgaagcccagcatctctgttgctaacacacagagctcacctgtttgaaaccaagctttcaaacatgttgaagctc

SEQ ID NO: 164215 - DNA, 78 bp, Homo sapiens
agcatctctgttgctaacacacagagctcacctgtttgaaaccaagctttcaaacatgttgaagctctttactgtaaa

SEQ ID NO: 164216 - DNA, 77 bp, Homo sapiens
tctgttgctaacacacagagctcacctgtttgaaaccaagctttcaaacatgttgaagctctttactgtaaaggcaa

SEQ ID NO: 164217 - DNA, 78 bp, Homo sapiens
acacagagctcacctgtttgaaaccaagctttcaaacatgttgaagctctttactgtaaaggcaagccagcatgtgtg

SEQ ID NO: 164218 - DNA, 77 bp, Homo sapiens
acctgtttgaaaccaagctttcaaacatgttgaagctctttactgtaaaggcaagccagcatgtgtgtccacacata

SEQ ID NO: 164219 - DNA, 79 bp, Homo sapiens
aaaccaagctttcaaacatgttgaagctctttactgtaaaggcaagccagcatgtgtgtccacacatacataggatggc

SEQ ID NO: 164220 - DNA, 85 bp, Homo sapiens
ttcaaacatgttgaagctctttactgtaaaggcaagccagcatgtgtgtccacacatacataggatggctggctctgcacctgta

SEQ ID NO: 164221 - DNA, 83 bp, Homo sapiens
aagctctttactgtaaaggcaagccagcatgtgtgtccacacatacataggatggctggctctgcacctgtaggatattggaa

SEQ ID NO: 164222 - DNA, 85 bp, Homo sapiens
ctttactgtaaaggcaagccagcatgtgtgtccacacatacataggatggctggctctgcacctgtaggatattggaatgcacag

SEQ ID NO: 164223 - DNA, 86 bp, Homo sapiens
atgtgtgtccacacatacataggatggctggctctgcacctgtaggatattggaatgcacagggcaattgagggactgagccagac

SEQ ID NO: 164224 - DNA, 83 bp, Homo sapiens
acatacataggatggctggctctgcacctgtaggatattggaatgcacagggcaattgagggactgagccagaccttcggaga

SEQ ID NO: 164225 - DNA, 81 bp, Homo sapiens
ctctgcacctgtaggatattggaatgcacagggcaattgagggactgagccagaccttcggagagtaatgccaccagatcc

SEQ ID NO: 164226 - DNA, 78 bp, Homo sapiens
taggatattggaatgcacagggcaattgagggactgagccagaccttcggagagtaatgccaccagatcccctaggaa

SEQ ID NO: 164227 - DNA, 74 bp, Homo sapiens
acagggcaattgagggactgagccagaccttcggagagtaatgccaccagatcccctaggaaagaggaggcaaa

SEQ ID NO: 164228 - DNA, 75 bp, Homo sapiens
agccagaccttcggagagtaatgccaccagatcccctaggaaagaggaggcaaatggcactgcaggtgagaaccc

SEQ ID NO: 164229 - DNA, 78 bp, Homo sapiens
aatgccaccagatcccctaggaaagaggaggcaaatggcactgcaggtgagaaccccgcccatccgtgctatgacatg

SEQ ID NO: 164230 - DNA, 78 bp, Homo sapiens
cctaggaaagaggaggcaaatggcactgcaggtgagaaccccgcccatccgtgctatgacatggaggcactgaagccc

SEQ ID NO: 164231 - DNA, 78 bp, Homo sapiens
aaagaggaggcaaatggcactgcaggtgagaaccccgcccatccgtgctatgacatggaggcactgaagcccgaggaa

SEQ ID NO: 164232 - DNA, 79 bp, Homo sapiens
aaatggcactgcaggtgagaaccccgcccatccgtgctatgacatggaggcactgaagcccgaggaaggtgtgtggaga

SEQ ID NO: 164233 - DNA, 77 bp, Homo sapiens
cccgcccatccgtgctatgacatggaggcactgaagcccgaggaaggtgtgtggagattctaatcccaacaagcaag

SEQ ID NO: 164234 - DNA, 78 bp, Homo sapiens
gtgctatgacatggaggcactgaagcccgaggaaggtgtgtggagattctaatcccaacaagcaagggtctccttcaa

SEQ ID NO: 164235 - DNA, 77 bp, Homo sapiens
tgaagcccgaggaaggtgtgtggagattctaatcccaacaagcaagggtctccttcaagattaatgctatcaatcat

SEQ ID NO: 164236 - DNA, 76 bp, Homo sapiens
ggaaggtgtgtggagattctaatcccaacaagcaagggtctccttcaagattaatgctatcaatcattaaggtcat

SEQ ID NO: 164237 - DNA, 79 bp, Homo sapiens
tgtgtggagattctaatcccaacaagcaagggtctccttcaagattaatgctatcaatcattaaggtcattactctcaa

SEQ ID NO: 164238 - DNA, 76 bp, Homo sapiens
ttctaatcccaacaagcaagggtctccttcaagattaatgctatcaatcattaaggtcattactctcaaccaccta

SEQ ID NO: 164239 - DNA, 78 bp, Homo sapiens
tccttcaagattaatgctatcaatcattaaggtcattactctcaaccacctaggcaatgaagaatataccatttcaaa

SEQ ID NO: 164240 - DNA, 76 bp, Homo sapiens
gctatcaatcattaaggtcattactctcaaccacctaggcaatgaagaatataccatttcaaatatttacagtact

SEQ ID NO: 164241 - DNA, 75 bp, Homo sapiens
taaggtcattactctcaaccacctaggcaatgaagaatataccatttcaaatatttacagtacttgtcttcacca

SEQ ID NO: 164242 - DNA, 75 bp, Homo sapiens
taggcaatgaagaatataccatttcaaatatttacagtacttgtcttcaccaacactgtcccaaggtgaaatgaa

SEQ ID NO: 164243 - DNA, 75 bp, Homo sapiens
atgaagaatataccatttcaaatatttacagtacttgtcttcaccaacactgtcccaaggtgaaatgaagcaaca

SEQ ID NO: 164244 - DNA, 73 bp, Homo sapiens
atttcaaatatttacagtacttgtcttcaccaacactgtcccaaggtgaaatgaagcaacagagaggaaattg

SEQ ID NO: 164245 - DNA, 74 bp, Homo sapiens
aatatttacagtacttgtcttcaccaacactgtcccaaggtgaaatgaagcaacagagaggaaattgtacataa

SEQ ID NO: 164246 - DNA, 76 bp, Homo sapiens
ttgtcttcaccaacactgtcccaaggtgaaatgaagcaacagagaggaaattgtacataagtacctcagcatttaa

SEQ ID NO: 164247 - DNA, 74 bp, Homo sapiens
accaacactgtcccaaggtgaaatgaagcaacagagaggaaattgtacataagtacctcagcatttaatccaaa

SEQ ID NO: 164248 - DNA, 72 bp, Homo sapiens
ccaaggtgaaatgaagcaacagagaggaaattgtacataagtacctcagcatttaatccaaacaggggttct

SEQ ID NO: 164249 - DNA, 75 bp, Homo sapiens
aaatgaagcaacagagaggaaattgtacataagtacctcagcatttaatccaaacaggggttcttagtctcagca

SEQ ID NO: 164250 - DNA, 74 bp, Homo sapiens
ggaaattgtacataagtacctcagcatttaatccaaacaggggttcttagtctcagcactatgacattttgggc

SEQ ID NO: 164251 - DNA, 74 bp, Homo sapiens
ataagtacctcagcatttaatccaaacaggggttcttagtctcagcactatgacattttgggctgactacttat

SEQ ID NO: 164252 - DNA, 74 bp, Homo sapiens
atccaaacaggggttcttagtctcagcactatgacattttgggctgactacttatttgttaggcgggagctctc

SEQ ID NO: 164253 - DNA, 77 bp, Homo sapiens
gggttcttagtctcagcactatgacattttgggctgactacttatttgttaggcgggagctctcctgtgcattgtag

SEQ ID NO: 164254 - DNA, 79 bp, Homo sapiens
agcactatgacattttgggctgactacttatttgttaggcgggagctctcctgtgcattgtaggataattagcagtatc

SEQ ID NO: 164255 - DNA, 77 bp, Homo sapiens
tgactacttatttgttaggcgggagctctcctgtgcattgtaggataattagcagtatccctggtggctacccaata

SEQ ID NO: 164256 - DNA, 77 bp, Homo sapiens
ttatttgttaggcgggagctctcctgtgcattgtaggataattagcagtatccctggtggctacccaatagacgcca

SEQ ID NO: 164257 - DNA, 77 bp, Homo sapiens
aggcgggagctctcctgtgcattgtaggataattagcagtatccctggtggctacccaatagacgccagtagcaccc

SEQ ID NO: 164258 - DNA, 77 bp, Homo sapiens
tgtgcattgtaggataattagcagtatccctggtggctacccaatagacgccagtagcaccccgaattgacaaccca

SEQ ID NO: 164259 - DNA, 73 bp, Homo sapiens
attgtaggataattagcagtatccctggtggctacccaatagacgccagtagcaccccgaattgacaacccaa

SEQ ID NO: 164260 - DNA, 75 bp, Homo sapiens
agcagtatccctggtggctacccaatagacgccagtagcaccccgaattgacaacccaaactctccagacatcac

SEQ ID NO: 164261 - DNA, 73 bp, Homo sapiens
atccctggtggctacccaatagacgccagtagcaccccgaattgacaacccaaactctccagacatcaccaac

SEQ ID NO: 164262 - DNA, 74 bp, Homo sapiens
ctacccaatagacgccagtagcaccccgaattgacaacccaaactctccagacatcaccaactgtcccctgcga

SEQ ID NO: 164263 - DNA, 75 bp, Homo sapiens
agacgccagtagcaccccgaattgacaacccaaactctccagacatcaccaactgtcccctgcgaggagaaatca

SEQ ID NO: 164264 - DNA, 73 bp, Homo sapiens
agcaccccgaattgacaacccaaactctccagacatcaccaactgtcccctgcgaggagaaatcactcctggg

SEQ ID NO: 164265 - DNA, 73 bp, Homo sapiens
attgacaacccaaactctccagacatcaccaactgtcccctgcgaggagaaatcactcctgggggagaaccac

SEQ ID NO: 164266 - DNA, 76 bp, Homo sapiens
tctccagacatcaccaactgtcccctgcgaggagaaatcactcctgggggagaaccactgacccaaatgaattcta

SEQ ID NO: 164267 - DNA, 73 bp, Homo sapiens
agacatcaccaactgtcccctgcgaggagaaatcactcctgggggagaaccactgacccaaatgaattctaaa

SEQ ID NO: 164268 - DNA, 71 bp, Homo sapiens
aactgtcccctgcgaggagaaatcactcctgggggagaaccactgacccaaatgaattctaaaccaatcaa

SEQ ID NO: 164269 - DNA, 71 bp, Homo sapiens
aggagaaatcactcctgggggagaaccactgacccaaatgaattctaaaccaatcaaatgtctgggaagcc

SEQ ID NO: 164270 - DNA, 71 bp, Homo sapiens
aatcactcctgggggagaaccactgacccaaatgaattctaaaccaatcaaatgtctgggaagccctccaa

SEQ ID NO: 164271 - DNA, 72 bp, Homo sapiens
ctccaagaaaaaaaatagaaaagcacttgaagaatattcccaatattcccggtcagcagtatcaaggctgac

SEQ ID NO: 164272 - DNA, 75 bp, Homo sapiens
aaaaatagaaaagcacttgaagaatattcccaatattcccggtcagcagtatcaaggctgacttgtgttcatgtg

SEQ ID NO: 164273 - DNA, 77 bp, Homo sapiens
aagaatattcccaatattcccggtcagcagtatcaaggctgacttgtgttcatgtggagtcattataaattctataa

SEQ ID NO: 164274 - DNA, 77 bp, Homo sapiens
attcccaatattcccggtcagcagtatcaaggctgacttgtgttcatgtggagtcattataaattctataaatcaat

SEQ ID NO: 164275 - DNA, 76 bp, Homo sapiens
ttcccggtcagcagtatcaaggctgacttgtgttcatgtggagtcattataaattctataaatcaattattcccct

SEQ ID NO: 164276 - DNA, 75 bp, Homo sapiens
cagtatcaaggctgacttgtgttcatgtggagtcattataaattctataaatcaattattccccttcggtcttaa

SEQ ID NO: 164277 - DNA, 73 bp, Homo sapiens
ggctgacttgtgttcatgtggagtcattataaattctataaatcaattattccccttcggtcttaaaaatata

SEQ ID NO: 164278 - DNA, 72 bp, Homo sapiens
gttcatgtggagtcattataaattctataaatcaattattccccttcggtcttaaaaatatatttcctcata

SEQ ID NO: 164279 - DNA, 70 bp, Homo sapiens
gtcattataaattctataaatcaattattccccttcggtcttaaaaatatatttcctcataaacatttga

SEQ ID NO: 164280 - DNA, 69 bp, Homo sapiens
ttctataaatcaattattccccttcggtcttaaaaatatatttcctcataaacatttgagttttgttga

SEQ ID NO: 164281 - DNA, 67 bp, Homo sapiens
cccttcggtcttaaaaatatatttcctcataaacatttgagttttgttgaaaagatggagtttacaa

SEQ ID NO: 164282 - DNA, 70 bp, Homo sapiens
aaaatatatttcctcataaacatttgagttttgttgaaaagatggagtttacaaagataccattcttgag

SEQ ID NO: 164283 - DNA, 76 bp, Homo sapiens
tcctcataaacatttgagttttgttgaaaagatggagtttacaaagataccattcttgagtcatggatttctctgc

SEQ ID NO: 164284 - DNA, 76 bp, Homo sapiens
aacatttgagttttgttgaaaagatggagtttacaaagataccattcttgagtcatggatttctctgctcacagaa

SEQ ID NO: 164285 - DNA, 77 bp, Homo sapiens
tttgttgaaaagatggagtttacaaagataccattcttgagtcatggatttctctgctcacagaagggtgtggcatt

SEQ ID NO: 164286 - DNA, 76 bp, Homo sapiens
aaaagatggagtttacaaagataccattcttgagtcatggatttctctgctcacagaagggtgtggcatttggaaa

SEQ ID NO: 164287 - DNA, 75 bp, Homo sapiens
tttacaaagataccattcttgagtcatggatttctctgctcacagaagggtgtggcatttggaaacgggaataaa

SEQ ID NO: 164288 - DNA, 75 bp, Homo sapiens
ataccattcttgagtcatggatttctctgctcacagaagggtgtggcatttggaaacgggaataaacaaaattgc

SEQ ID NO: 164289 - DNA, 79 bp, Homo sapiens
ttgagtcatggatttctctgctcacagaagggtgtggcatttggaaacgggaataaacaaaattgctgcaccaatgcac

SEQ ID NO: 164290 - DNA, 77 bp, Homo sapiens
atttctctgctcacagaagggtgtggcatttggaaacgggaataaacaaaattgctgcaccaatgcactgagtgaag

SEQ ID NO: 164291 - DNA, 78 bp, Homo sapiens
tgtggcatttggaaacgggaataaacaaaattgctgcaccaatgcactgagtgaaggaagagagacagaggatcaagg

SEQ ID NO: 164292 - DNA, 81 bp, Homo sapiens
taaacaaaattgctgcaccaatgcactgagtgaaggaagagagacagaggatcaagggctttagacagcactccttcaata

SEQ ID NO: 164293 - DNA, 86 bp, Homo sapiens
aattgctgcaccaatgcactgagtgaaggaagagagacagaggatcaagggctttagacagcactccttcaatatgcaatcacaga

SEQ ID NO: 164294 - DNA, 85 bp, Homo sapiens
aatgcactgagtgaaggaagagagacagaggatcaagggctttagacagcactccttcaatatgcaatcacagagaaagatgcgc

SEQ ID NO: 164295 - DNA, 81 bp, Homo sapiens
aaggaagagagacagaggatcaagggctttagacagcactccttcaatatgcaatcacagagaaagatgcgccttatccaa

SEQ ID NO: 164296 - DNA, 81 bp, Homo sapiens
agacagaggatcaagggctttagacagcactccttcaatatgcaatcacagagaaagatgcgccttatccaagttaatatc

SEQ ID NO: 164297 - DNA, 80 bp, Homo sapiens
aggatcaagggctttagacagcactccttcaatatgcaatcacagagaaagatgcgccttatccaagttaatatctctaa

SEQ ID NO: 164298 - DNA, 81 bp, Homo sapiens
tttagacagcactccttcaatatgcaatcacagagaaagatgcgccttatccaagttaatatctctaaggtgagagccttc

SEQ ID NO: 164299 - DNA, 80 bp, Homo sapiens
actccttcaatatgcaatcacagagaaagatgcgccttatccaagttaatatctctaaggtgagagccttcttagagtca

SEQ ID NO: 164300 - DNA, 78 bp, Homo sapiens
aatatgcaatcacagagaaagatgcgccttatccaagttaatatctctaaggtgagagccttcttagagtcagtttgt

SEQ ID NO: 164301 - DNA, 76 bp, Homo sapiens
agagaaagatgcgccttatccaagttaatatctctaaggtgagagccttcttagagtcagtttgttgcaaatttca

SEQ ID NO: 164302 - DNA, 74 bp, Homo sapiens
gccttatccaagttaatatctctaaggtgagagccttcttagagtcagtttgttgcaaatttcacctactctgt

SEQ ID NO: 164303 - DNA, 72 bp, Homo sapiens
aagttaatatctctaaggtgagagccttcttagagtcagtttgttgcaaatttcacctactctgttcttttc

SEQ ID NO: 164304 - DNA, 75 bp, Homo sapiens
atatctctaaggtgagagccttcttagagtcagtttgttgcaaatttcacctactctgttcttttccatccatcc

SEQ ID NO: 164305 - DNA, 71 bp, Homo sapiens
tgttgcaaatttcacctactctgttcttttccatccatccccctgagtcagttggttgaagggagttattt

SEQ ID NO: 164306 - DNA, 69 bp, Homo sapiens
ctgttcttttccatccatccccctgagtcagttggttgaagggagttattttttcaagtggaattcaaa

SEQ ID NO: 164307 - DNA, 68 bp, Homo sapiens
cttttccatccatccccctgagtcagttggttgaagggagttattttttcaagtggaattcaaacaaa

SEQ ID NO: 164308 - DNA, 69 bp, Homo sapiens
ccctgagtcagttggttgaagggagttattttttcaagtggaattcaaacaaagctcaaaccagaactg

SEQ ID NO: 164309 - DNA, 69 bp, Homo sapiens
tcagttggttgaagggagttattttttcaagtggaattcaaacaaagctcaaaccagaactgtaaatag

SEQ ID NO: 164310 - DNA, 71 bp, Homo sapiens
gggagttattttttcaagtggaattcaaacaaagctcaaaccagaactgtaaatagtgattgcaggaattc

SEQ ID NO: 164311 - DNA, 71 bp, Homo sapiens
ttttcaagtggaattcaaacaaagctcaaaccagaactgtaaatagtgattgcaggaattcttttctaaac

SEQ ID NO: 164312 - DNA, 72 bp, Homo sapiens
gaattcaaacaaagctcaaaccagaactgtaaatagtgattgcaggaattcttttctaaactgctttgccct

SEQ ID NO: 164313 - DNA, 70 bp, Homo sapiens
aaacaaagctcaaaccagaactgtaaatagtgattgcaggaattcttttctaaactgctttgccctttcc

SEQ ID NO: 164314 - DNA, 73 bp, Homo sapiens
ccagaactgtaaatagtgattgcaggaattcttttctaaactgctttgccctttcctctcactgccttttata

SEQ ID NO: 164315 - DNA, 74 bp, Homo sapiens
taaatagtgattgcaggaattcttttctaaactgctttgccctttcctctcactgccttttatagccaatataa

SEQ ID NO: 164316 - DNA, 73 bp, Homo sapiens
attgcaggaattcttttctaaactgctttgccctttcctctcactgccttttatagccaatataaatgtctct

SEQ ID NO: 164317 - DNA, 73 bp, Homo sapiens
aattcttttctaaactgctttgccctttcctctcactgccttttatagccaatataaatgtctctttgcacac

SEQ ID NO: 164318 - DNA, 74 bp, Homo sapiens
taaactgctttgccctttcctctcactgccttttatagccaatataaatgtctctttgcacaccttttgttgtg

SEQ ID NO: 164319 - DNA, 73 bp, Homo sapiens
ctttcctctcactgccttttatagccaatataaatgtctctttgcacaccttttgttgtggttttatattgta

SEQ ID NO: 164320 - DNA, 74 bp, Homo sapiens
ctctcactgccttttatagccaatataaatgtctctttgcacaccttttgttgtggttttatattgtaacacca

SEQ ID NO: 164321 - DNA, 70 bp, Homo sapiens
cttttatagccaatataaatgtctctttgcacaccttttgttgtggttttatattgtaacaccatttttc

SEQ ID NO: 164322 - DNA, 69 bp, Homo sapiens
ataaatgtctctttgcacaccttttgttgtggttttatattgtaacaccatttttctttgaaactattg

SEQ ID NO: 164323 - DNA, 65 bp, Homo sapiens
caccttttgttgtggttttatattgtaacaccatttttctttgaaactattgtatttaaagtaag

SEQ ID NO: 164324 - DNA, 70 bp, Homo sapiens
gttttatattgtaacaccatttttctttgaaactattgtatttaaagtaaggtttcatattatgtcagca

SEQ ID NO: 164325 - DNA, 70 bp, Homo sapiens
tgtaacaccatttttctttgaaactattgtatttaaagtaaggtttcatattatgtcagcaagtaattaa

SEQ ID NO: 164326 - DNA, 69 bp, Homo sapiens
ccatttttctttgaaactattgtatttaaagtaaggtttcatattatgtcagcaagtaattaacttatg

SEQ ID NO: 164327 - DNA, 68 bp, Homo sapiens
aactattgtatttaaagtaaggtttcatattatgtcagcaagtaattaacttatgtttaaaaggtggc

SEQ ID NO: 164328 - DNA, 72 bp, Homo sapiens
tttaaagtaaggtttcatattatgtcagcaagtaattaacttatgtttaaaaggtggccatatcatgtacca

SEQ ID NO: 164329 - DNA, 74 bp, Homo sapiens
aggtttcatattatgtcagcaagtaattaacttatgtttaaaaggtggccatatcatgtaccaaaagttgctga

SEQ ID NO: 164330 - DNA, 74 bp, Homo sapiens
tatgtcagcaagtaattaacttatgtttaaaaggtggccatatcatgtaccaaaagttgctgaagtttctcttc

SEQ ID NO: 164331 - DNA, 71 bp, Homo sapiens
agtaattaacttatgtttaaaaggtggccatatcatgtaccaaaagttgctgaagtttctcttctagctgg

SEQ ID NO: 164332 - DNA, 72 bp, Homo sapiens
ttatgtttaaaaggtggccatatcatgtaccaaaagttgctgaagtttctcttctagctggtaaagtaggag

SEQ ID NO: 164333 - DNA, 73 bp, Homo sapiens
tttaaaaggtggccatatcatgtaccaaaagttgctgaagtttctcttctagctggtaaagtaggagtttgca

SEQ ID NO: 164334 - DNA, 74 bp, Homo sapiens
atatcatgtaccaaaagttgctgaagtttctcttctagctggtaaagtaggagtttgcatgacttcacactttt

SEQ ID NO: 164335 - DNA, 73 bp, Homo sapiens
tgtaccaaaagttgctgaagtttctcttctagctggtaaagtaggagtttgcatgacttcacactttttttgc

SEQ ID NO: 164336 - DNA, 72 bp, Homo sapiens
tgaagtttctcttctagctggtaaagtaggagtttgcatgacttcacactttttttgcgtagtttcttctgt

SEQ ID NO: 164337 - DNA, 74 bp, Homo sapiens
tttctcttctagctggtaaagtaggagtttgcatgacttcacactttttttgcgtagtttcttctgttgtatga

SEQ ID NO: 164338 - DNA, 76 bp, Homo sapiens
tggtaaagtaggagtttgcatgacttcacactttttttgcgtagtttcttctgttgtatgatggcgtgagtgtgtg

SEQ ID NO: 164339 - DNA, 77 bp, Homo sapiens
taggagtttgcatgacttcacactttttttgcgtagtttcttctgttgtatgatggcgtgagtgtgtgtcttgggta

SEQ ID NO: 164340 - DNA, 76 bp, Homo sapiens
atgacttcacactttttttgcgtagtttcttctgttgtatgatggcgtgagtgtgtgtcttgggtaccgctgtgta

SEQ ID NO: 164341 - DNA, 77 bp, Homo sapiens
ttttttgcgtagtttcttctgttgtatgatggcgtgagtgtgtgtcttgggtaccgctgtgtactactgtgtgccta

SEQ ID NO: 164342 - DNA, 81 bp, Homo sapiens
agtttcttctgttgtatgatggcgtgagtgtgtgtcttgggtaccgctgtgtactactgtgtgcctagattccatgcactc

SEQ ID NO: 164343 - DNA, 80 bp, Homo sapiens
atggcgtgagtgtgtgtcttgggtaccgctgtgtactactgtgtgcctagattccatgcactctcgttgtgtttgaagta

SEQ ID NO: 164344 - DNA, 77 bp, Homo sapiens
agtgtgtgtcttgggtaccgctgtgtactactgtgtgcctagattccatgcactctcgttgtgtttgaagtaaatat

SEQ ID NO: 164345 - DNA, 76 bp, Homo sapiens
tgtgtactactgtgtgcctagattccatgcactctcgttgtgtttgaagtaaatattggagaccggagggtaacag

SEQ ID NO: 164346 - DNA, 74 bp, Homo sapiens
tgtgcctagattccatgcactctcgttgtgtttgaagtaaatattggagaccggagggtaacaggttggcctgt

SEQ ID NO: 164347 - DNA, 74 bp, Homo sapiens
tagattccatgcactctcgttgtgtttgaagtaaatattggagaccggagggtaacaggttggcctgttgatta

SEQ ID NO: 164348 - DNA, 72 bp, Homo sapiens
tctcgttgtgtttgaagtaaatattggagaccggagggtaacaggttggcctgttgattacagctagtaatc

SEQ ID NO: 164349 - DNA, 73 bp, Homo sapiens
ttgaagtaaatattggagaccggagggtaacaggttggcctgttgattacagctagtaatcgctgtgtcttgt

SEQ ID NO: 164350 - DNA, 73 bp, Homo sapiens
taaatattggagaccggagggtaacaggttggcctgttgattacagctagtaatcgctgtgtcttgttccgcc

SEQ ID NO: 164351 - DNA, 73 bp, Homo sapiens
gtaacaggttggcctgttgattacagctagtaatcgctgtgtcttgttccgccccctccctgacaccccagct

SEQ ID NO: 164352 - DNA, 75 bp, Homo sapiens
tgttgattacagctagtaatcgctgtgtcttgttccgccccctccctgacaccccagcttcccaggatgtggaaa

SEQ ID NO: 164353 - DNA, 73 bp, Homo sapiens
attacagctagtaatcgctgtgtcttgttccgccccctccctgacaccccagcttcccaggatgtggaaagcc

SEQ ID NO: 164354 - DNA, 75 bp, Homo sapiens
cctccctgacaccccagcttcccaggatgtggaaagcctggatctcagctccttgccccatatcccttctgtaat

SEQ ID NO: 164355 - DNA, 74 bp, Homo sapiens
accccagcttcccaggatgtggaaagcctggatctcagctccttgccccatatcccttctgtaatttgtaccta

SEQ ID NO: 164356 - DNA, 75 bp, Homo sapiens
tggaaagcctggatctcagctccttgccccatatcccttctgtaatttgtacctaaagagtgtgattatcctaat

SEQ ID NO: 164357 - DNA, 77 bp, Homo sapiens
gatctcagctccttgccccatatcccttctgtaatttgtacctaaagagtgtgattatcctaattcaagagtcacta

SEQ ID NO: 164358 - DNA, 72 bp, Homo sapiens
ctccttgccccatatcccttctgtaatttgtacctaaagagtgtgattatcctaattcaagagtcactaaaa

SEQ ID NO: 164359 - DNA, 74 bp, Homo sapiens
cccatatcccttctgtaatttgtacctaaagagtgtgattatcctaattcaagagtcactaaaactcatcacat

SEQ ID NO: 164360 - DNA, 80 bp, Homo sapiens
ttgtacctaaagagtgtgattatcctaattcaagagtcactaaaactcatcacattatcattgcatatcagcaaagggta

SEQ ID NO: 164361 - DNA, 81 bp, Homo sapiens
tgtgattatcctaattcaagagtcactaaaactcatcacattatcattgcatatcagcaaagggtaaagtcctagcaccaa

SEQ ID NO: 164362 - DNA, 82 bp, Homo sapiens
taattcaagagtcactaaaactcatcacattatcattgcatatcagcaaagggtaaagtcctagcaccaattgcttcacata

SEQ ID NO: 164363 - DNA, 82 bp, Homo sapiens
aagagtcactaaaactcatcacattatcattgcatatcagcaaagggtaaagtcctagcaccaattgcttcacataccagca

SEQ ID NO: 164364 - DNA, 82 bp, Homo sapiens
taaaactcatcacattatcattgcatatcagcaaagggtaaagtcctagcaccaattgcttcacataccagcatgttccatt

SEQ ID NO: 164365 - DNA, 80 bp, Homo sapiens
acattatcattgcatatcagcaaagggtaaagtcctagcaccaattgcttcacataccagcatgttccatttccaattta

SEQ ID NO: 164366 - DNA, 77 bp, Homo sapiens
atatcagcaaagggtaaagtcctagcaccaattgcttcacataccagcatgttccatttccaatttagaattagcca

SEQ ID NO: 164367 - DNA, 75 bp, Homo sapiens
aagggtaaagtcctagcaccaattgcttcacataccagcatgttccatttccaatttagaattagccacataata

SEQ ID NO: 164368 - DNA, 76 bp, Homo sapiens
aagtcctagcaccaattgcttcacataccagcatgttccatttccaatttagaattagccacataataaaatctta

SEQ ID NO: 164369 - DNA, 75 bp, Homo sapiens
accaattgcttcacataccagcatgttccatttccaatttagaattagccacataataaaatcttagaatcttcc

SEQ ID NO: 164370 - DNA, 76 bp, Homo sapiens
cacataccagcatgttccatttccaatttagaattagccacataataaaatcttagaatcttccttgagaaagagc

SEQ ID NO: 164371 - DNA, 75 bp, Homo sapiens
tccaatttagaattagccacataataaaatcttagaatcttccttgagaaagagctgcctgagatgtagttttgt

SEQ ID NO: 164372 - DNA, 76 bp, Homo sapiens
gaattagccacataataaaatcttagaatcttccttgagaaagagctgcctgagatgtagttttgttatatggttc

SEQ ID NO: 164373 - DNA, 73 bp, Homo sapiens
ataataaaatcttagaatcttccttgagaaagagctgcctgagatgtagttttgttatatggttccccaccga

SEQ ID NO: 164374 - DNA, 71 bp, Homo sapiens
cttccttgagaaagagctgcctgagatgtagttttgttatatggttccccaccgaccatttttgtgctttt

SEQ ID NO: 164375 - DNA, 69 bp, Homo sapiens
aaagagctgcctgagatgtagttttgttatatggttccccaccgaccatttttgtgcttttttcttgtt

SEQ ID NO: 164376 - DNA, 74 bp, Homo sapiens
tgttttgttttgactgcactgtgagttttgtagtgtcctcttcttgccaaaacaaacgcgagatgaactggact

SEQ ID NO: 164377 - DNA, 77 bp, Homo sapiens
ttgactgcactgtgagttttgtagtgtcctcttcttgccaaaacaaacgcgagatgaactggacttatgtagacaaa

SEQ ID NO: 164378 - DNA, 75 bp, Homo sapiens
actgtgagttttgtagtgtcctcttcttgccaaaacaaacgcgagatgaactggacttatgtagacaaatcgtga

SEQ ID NO: 164379 - DNA, 77 bp, Homo sapiens
ttttgtagtgtcctcttcttgccaaaacaaacgcgagatgaactggacttatgtagacaaatcgtgatgccagtgta

SEQ ID NO: 164380 - DNA, 77 bp, Homo sapiens
ttcttgccaaaacaaacgcgagatgaactggacttatgtagacaaatcgtgatgccagtgtatccttcctttcttca

SEQ ID NO: 164381 - DNA, 75 bp, Homo sapiens
aaaacaaacgcgagatgaactggacttatgtagacaaatcgtgatgccagtgtatccttcctttcttcagttcca

SEQ ID NO: 164382 - DNA, 77 bp, Homo sapiens
aaacgcgagatgaactggacttatgtagacaaatcgtgatgccagtgtatccttcctttcttcagttccagcaataa

SEQ ID NO: 164383 - DNA, 80 bp, Homo sapiens
agatgaactggacttatgtagacaaatcgtgatgccagtgtatccttcctttcttcagttccagcaataatgaatggtca

SEQ ID NO: 164384 - DNA, 76 bp, Homo sapiens
gacttatgtagacaaatcgtgatgccagtgtatccttcctttcttcagttccagcaataatgaatggtcaactttt

SEQ ID NO: 164385 - DNA, 74 bp, Homo sapiens
tagacaaatcgtgatgccagtgtatccttcctttcttcagttccagcaataatgaatggtcaacttttttaaaa

SEQ ID NO: 164386 - DNA, 73 bp, Homo sapiens
acaaatcgtgatgccagtgtatccttcctttcttcagttccagcaataatgaatggtcaacttttttaaaatc

SEQ ID NO: 164387 - DNA, 75 bp, Homo sapiens
atcgtgatgccagtgtatccttcctttcttcagttccagcaataatgaatggtcaacttttttaaaatctagatc

SEQ ID NO: 164388 - DNA, 76 bp, Homo sapiens
cagtgtatccttcctttcttcagttccagcaataatgaatggtcaacttttttaaaatctagatctctctcattca

SEQ ID NO: 164389 - DNA, 74 bp, Homo sapiens
ccttcctttcttcagttccagcaataatgaatggtcaacttttttaaaatctagatctctctcattcatttcaa

SEQ ID NO: 164390 - DNA, 75 bp, Homo sapiens
ttcttcagttccagcaataatgaatggtcaacttttttaaaatctagatctctctcattcatttcaatgtatttt

SEQ ID NO: 164391 - DNA, 73 bp, Homo sapiens
ccagcaataatgaatggtcaacttttttaaaatctagatctctctcattcatttcaatgtatttttactttaa

SEQ ID NO: 164392 - DNA, 72 bp, Homo sapiens
gaatggtcaacttttttaaaatctagatctctctcattcatttcaatgtatttttactttaagatgaaccaa

SEQ ID NO: 164393 - DNA, 72 bp, Homo sapiens
tttaaaatctagatctctctcattcatttcaatgtatttttactttaagatgaaccaaaattattagactta

SEQ ID NO: 164394 - DNA, 74 bp, Homo sapiens
tctagatctctctcattcatttcaatgtatttttactttaagatgaaccaaaattattagacttatttaagatg

SEQ ID NO: 164395 - DNA, 71 bp, Homo sapiens
ttcaatgtatttttactttaagatgaaccaaaattattagacttatttaagatgtacaggcatcagaaaaa

SEQ ID NO: 164396 - DNA, 74 bp, Homo sapiens
tactttaagatgaaccaaaattattagacttatttaagatgtacaggcatcagaaaaaagaagcacataatgct

SEQ ID NO: 164397 - DNA, 76 bp, Homo sapiens
tgaaccaaaattattagacttatttaagatgtacaggcatcagaaaaaagaagcacataatgcttttggtgcgatg

SEQ ID NO: 164398 - DNA, 81 bp, Homo sapiens
ttatttaagatgtacaggcatcagaaaaaagaagcacataatgcttttggtgcgatggcactcactgtgaacatgtgtaac

SEQ ID NO: 164399 - DNA, 83 bp, Homo sapiens
tgtacaggcatcagaaaaaagaagcacataatgcttttggtgcgatggcactcactgtgaacatgtgtaaccacatattaata

SEQ ID NO: 164400 - DNA, 81 bp, Homo sapiens
aaaagaagcacataatgcttttggtgcgatggcactcactgtgaacatgtgtaaccacatattaatatgcaatattgtttc

SEQ ID NO: 164401 - DNA, 80 bp, Homo sapiens
ataatgcttttggtgcgatggcactcactgtgaacatgtgtaaccacatattaatatgcaatattgtttccaatactttc

SEQ ID NO: 164402 - DNA, 78 bp, Homo sapiens
gcgatggcactcactgtgaacatgtgtaaccacatattaatatgcaatattgtttccaatactttctaatacagtttt

SEQ ID NO: 164403 - DNA, 76 bp, Homo sapiens
ggcactcactgtgaacatgtgtaaccacatattaatatgcaatattgtttccaatactttctaatacagtttttta

SEQ ID NO: 164404 - DNA, 75 bp, Homo sapiens
catgtgtaaccacatattaatatgcaatattgtttccaatactttctaatacagttttttataatgttgtgtgtg

SEQ ID NO: 164405 - DNA, 74 bp, Homo sapiens
accacatattaatatgcaatattgtttccaatactttctaatacagttttttataatgttgtgtgtggtgattg

SEQ ID NO: 164406 - DNA, 75 bp, Homo sapiens
tatgcaatattgtttccaatactttctaatacagttttttataatgttgtgtgtggtgattgttcaggtcgaatc

SEQ ID NO: 164407 - DNA, 74 bp, Homo sapiens
tgtttccaatactttctaatacagttttttataatgttgtgtgtggtgattgttcaggtcgaatctgttgtatc

SEQ ID NO: 164408 - DNA, 75 bp, Homo sapiens
tactttctaatacagttttttataatgttgtgtgtggtgattgttcaggtcgaatctgttgtatccagtacagct

SEQ ID NO: 164409 - DNA, 74 bp, Homo sapiens
atacagttttttataatgttgtgtgtggtgattgttcaggtcgaatctgttgtatccagtacagctttaggtct

SEQ ID NO: 164410 - DNA, 77 bp, Homo sapiens
ttttataatgttgtgtgtggtgattgttcaggtcgaatctgttgtatccagtacagctttaggtcttcagctgccct

SEQ ID NO: 164411 - DNA, 83 bp, Homo sapiens
tgtgtggtgattgttcaggtcgaatctgttgtatccagtacagctttaggtcttcagctgcccttctggcgagtacatgcaca

SEQ ID NO: 164412 - DNA, 81 bp, Homo sapiens
tcgaatctgttgtatccagtacagctttaggtcttcagctgcccttctggcgagtacatgcacaggattgtaaatgagaaa

SEQ ID NO: 164413 - DNA, 83 bp, Homo sapiens
ttgtatccagtacagctttaggtcttcagctgcccttctggcgagtacatgcacaggattgtaaatgagaaatgcagtcatat

SEQ ID NO: 164414 - DNA, 81 bp, Homo sapiens
agtacagctttaggtcttcagctgcccttctggcgagtacatgcacaggattgtaaatgagaaatgcagtcatatttccag

SEQ ID NO: 164415 - DNA, 88 bp, Homo sapiens
tcttcagctgcccttctggcgagtacatgcacaggattgtaaatgagaaatgcagtcatatttccagtctgcctctatgatgatgtta

SEQ ID NO: 164416 - DNA, 83 bp, Homo sapiens
ccttctggcgagtacatgcacaggattgtaaatgagaaatgcagtcatatttccagtctgcctctatgatgatgttaaattat

SEQ ID NO: 164417 - DNA, 84 bp, Homo sapiens
cgagtacatgcacaggattgtaaatgagaaatgcagtcatatttccagtctgcctctatgatgatgttaaattattgctgttta

SEQ ID NO: 164418 - DNA, 83 bp, Homo sapiens
caggattgtaaatgagaaatgcagtcatatttccagtctgcctctatgatgatgttaaattattgctgtttagctgtgaacaa

SEQ ID NO: 164419 - DNA, 82 bp, Homo sapiens
aaatgagaaatgcagtcatatttccagtctgcctctatgatgatgttaaattattgctgtttagctgtgaacaagggatgta

SEQ ID NO: 164420 - DNA, 81 bp, Homo sapiens
aaatgcagtcatatttccagtctgcctctatgatgatgttaaattattgctgtttagctgtgaacaagggatgtaccactg

SEQ ID NO: 164421 - DNA, 79 bp, Homo sapiens
atatttccagtctgcctctatgatgatgttaaattattgctgtttagctgtgaacaagggatgtaccactggaggaata

SEQ ID NO: 164422 - DNA, 76 bp, Homo sapiens
cctctatgatgatgttaaattattgctgtttagctgtgaacaagggatgtaccactggaggaatagagtatccttt

SEQ ID NO: 164423 - DNA, 75 bp, Homo sapiens
gatgttaaattattgctgtttagctgtgaacaagggatgtaccactggaggaatagagtatccttttgtacacat

SEQ ID NO: 164424 - DNA, 75 bp, Homo sapiens
aacaagggatgtaccactggaggaatagagtatccttttgtacacattttgaaatgcttcttctgtagtgataga

SEQ ID NO: 164425 - DNA, 76 bp, Homo sapiens
gatgtaccactggaggaatagagtatccttttgtacacattttgaaatgcttcttctgtagtgatagaacaaataa

SEQ ID NO: 164426 - DNA, 75 bp, Homo sapiens
ggaggaatagagtatccttttgtacacattttgaaatgcttcttctgtagtgatagaacaaataaatgcaacgaa

SEQ ID NO: 164427 - DNA, 77 bp, Homo sapiens
agtatccttttgtacacattttgaaatgcttcttctgtagtgatagaacaaataaatgcaacgaatactctgtctgc

SEQ ID NO: 164428 - DNA, 77 bp, Homo sapiens
acacattttgaaatgcttcttctgtagtgatagaacaaataaatgcaacgaatactctgtctgccctatcccgtgaa

SEQ ID NO: 164429 - DNA, 77 bp, Homo sapiens
ttcttctgtagtgatagaacaaataaatgcaacgaatactctgtctgccctatcccgtgaagtccacactggcgtaa

SEQ ID NO: 164430 - DNA, 77 bp, Homo sapiens
aaataaatgcaacgaatactctgtctgccctatcccgtgaagtccacactggcgtaagagaaggcccagcagagcag

SEQ ID NO: 164431 - DNA, 78 bp, Homo sapiens
aacgaatactctgtctgccctatcccgtgaagtccacactggcgtaagagaaggcccagcagagcaggaatctgccta

SEQ ID NO: 164432 - DNA, 79 bp, Homo sapiens
tgccctatcccgtgaagtccacactggcgtaagagaaggcccagcagagcaggaatctgcctagactttctcccaatga

SEQ ID NO: 164433 - DNA, 80 bp, Homo sapiens
agtccacactggcgtaagagaaggcccagcagagcaggaatctgcctagactttctcccaatgagatcccaatatgagag

SEQ ID NO: 164434 - DNA, 80 bp, Homo sapiens
cgtaagagaaggcccagcagagcaggaatctgcctagactttctcccaatgagatcccaatatgagagggagaagagatg

SEQ ID NO: 164435 - DNA, 80 bp, Homo sapiens
aaggcccagcagagcaggaatctgcctagactttctcccaatgagatcccaatatgagagggagaagagatgggcctcag

SEQ ID NO: 164436 - DNA, 81 bp, Homo sapiens
aggaatctgcctagactttctcccaatgagatcccaatatgagagggagaagagatgggcctcaggacagctgcaatacca

SEQ ID NO: 164437 - DNA, 79 bp, Homo sapiens
ctagactttctcccaatgagatcccaatatgagagggagaagagatgggcctcaggacagctgcaataccacttgggaa

SEQ ID NO: 164438 - DNA, 81 bp, Homo sapiens
tttctcccaatgagatcccaatatgagagggagaagagatgggcctcaggacagctgcaataccacttgggaacacatgtg

SEQ ID NO: 164439 - DNA, 83 bp, Homo sapiens
atgagatcccaatatgagagggagaagagatgggcctcaggacagctgcaataccacttgggaacacatgtggtgtcttgatg

SEQ ID NO: 164440 - DNA, 84 bp, Homo sapiens
aatatgagagggagaagagatgggcctcaggacagctgcaataccacttgggaacacatgtggtgtcttgatgtggccagcgca

SEQ ID NO: 164441 - DNA, 86 bp, Homo sapiens
agaagagatgggcctcaggacagctgcaataccacttgggaacacatgtggtgtcttgatgtggccagcgcagcagttcagcacaa

SEQ ID NO: 164442 - DNA, 84 bp, Homo sapiens
ctcaggacagctgcaataccacttgggaacacatgtggtgtcttgatgtggccagcgcagcagttcagcacaacgtacctccca

SEQ ID NO: 164443 - DNA, 83 bp, Homo sapiens
agctgcaataccacttgggaacacatgtggtgtcttgatgtggccagcgcagcagttcagcacaacgtacctcccatctacaa

SEQ ID NO: 164444 - DNA, 82 bp, Homo sapiens
ataccacttgggaacacatgtggtgtcttgatgtggccagcgcagcagttcagcacaacgtacctcccatctacaacagtgc

SEQ ID NO: 164445 - DNA, 82 bp, Homo sapiens
acatgtggtgtcttgatgtggccagcgcagcagttcagcacaacgtacctcccatctacaacagtgctggacgtgggaattc

SEQ ID NO: 164446 - DNA, 81 bp, Homo sapiens
tgtcttgatgtggccagcgcagcagttcagcacaacgtacctcccatctacaacagtgctggacgtgggaattctaagtcc

SEQ ID NO: 164447 - DNA, 73 bp, Homo sapiens
agcacaacgtacctcccatctacaacagtgctggacgtgggaattctaagtcccagtcttgagggtgggtgga

SEQ ID NO: 164448 - DNA, 75 bp, Homo sapiens
tcccatctacaacagtgctggacgtgggaattctaagtcccagtcttgagggtgggtggagatggagggcaacaa

SEQ ID NO: 164449 - DNA, 74 bp, Homo sapiens
aacagtgctggacgtgggaattctaagtcccagtcttgagggtgggtggagatggagggcaacaagagatacat

SEQ ID NO: 164450 - DNA, 72 bp, Homo sapiens
acgtgggaattctaagtcccagtcttgagggtgggtggagatggagggcaacaagagatacatttccagttc

SEQ ID NO: 164451 - DNA, 83 bp, Homo sapiens
agtcttgagggtgggtggagatggagggcaacaagagatacatttccagttctccactgcagcatgcttcagtcattctgtga

SEQ ID NO: 164452 - DNA, 82 bp, Homo sapiens
agggtgggtggagatggagggcaacaagagatacatttccagttctccactgcagcatgcttcagtcattctgtgagtggcc

SEQ ID NO: 164453 - DNA, 83 bp, Homo sapiens
tggagatggagggcaacaagagatacatttccagttctccactgcagcatgcttcagtcattctgtgagtggccgggcccagg

SEQ ID NO: 164454 - DNA, 80 bp, Homo sapiens
acaagagatacatttccagttctccactgcagcatgcttcagtcattctgtgagtggccgggcccagggccctcacaatt

SEQ ID NO: 164455 - DNA, 81 bp, Homo sapiens
agatacatttccagttctccactgcagcatgcttcagtcattctgtgagtggccgggcccagggccctcacaatttcacta

SEQ ID NO: 164456 - DNA, 79 bp, Homo sapiens
ttctccactgcagcatgcttcagtcattctgtgagtggccgggcccagggccctcacaatttcactaccttgtctttta

SEQ ID NO: 164457 - DNA, 73 bp, Homo sapiens
agtcattctgtgagtggccgggcccagggccctcacaatttcactaccttgtcttttacatagtcataagaat

SEQ ID NO: 164458 - DNA, 74 bp, Homo sapiens
tgagtggccgggcccagggccctcacaatttcactaccttgtcttttacatagtcataagaattatcctcaaca

SEQ ID NO: 164459 - DNA, 72 bp, Homo sapiens
ggcccagggccctcacaatttcactaccttgtcttttacatagtcataagaattatcctcaacatagccttt

SEQ ID NO: 164460 - DNA, 74 bp, Homo sapiens
cctcacaatttcactaccttgtcttttacatagtcataagaattatcctcaacatagccttttgacgctgtaaa

SEQ ID NO: 164461 - DNA, 77 bp, Homo sapiens
tcactaccttgtcttttacatagtcataagaattatcctcaacatagccttttgacgctgtaaatcttgagtattca

SEQ ID NO: 164462 - DNA, 74 bp, Homo sapiens
gtcttttacatagtcataagaattatcctcaacatagccttttgacgctgtaaatcttgagtattcatttaccc

SEQ ID NO: 164463 - DNA, 76 bp, Homo sapiens
catagtcataagaattatcctcaacatagccttttgacgctgtaaatcttgagtattcatttacccttttctgatc

SEQ ID NO: 164464 - DNA, 74 bp, Homo sapiens
ataagaattatcctcaacatagccttttgacgctgtaaatcttgagtattcatttacccttttctgatctcctg

SEQ ID NO: 164465 - DNA, 76 bp, Homo sapiens
tcctcaacatagccttttgacgctgtaaatcttgagtattcatttacccttttctgatctcctggaaacagctgcc

SEQ ID NO: 164466 - DNA, 79 bp, Homo sapiens
ttttgacgctgtaaatcttgagtattcatttacccttttctgatctcctggaaacagctgcctgcctgcattgcacttc

SEQ ID NO: 164467 - DNA, 79 bp, Homo sapiens
tgtaaatcttgagtattcatttacccttttctgatctcctggaaacagctgcctgcctgcattgcacttctcttcccga

SEQ ID NO: 164468 - DNA, 78 bp, Homo sapiens
ttgagtattcatttacccttttctgatctcctggaaacagctgcctgcctgcattgcacttctcttcccgaggagtgg

SEQ ID NO: 164469 - DNA, 75 bp, Homo sapiens
tacccttttctgatctcctggaaacagctgcctgcctgcattgcacttctcttcccgaggagtggggtaaattta

SEQ ID NO: 164470 - DNA, 76 bp, Homo sapiens
tttctgatctcctggaaacagctgcctgcctgcattgcacttctcttcccgaggagtggggtaaatttaaaagtca

SEQ ID NO: 164471 - DNA, 72 bp, Homo sapiens
ctgcctgcctgcattgcacttctcttcccgaggagtggggtaaatttaaaagtcaagttatagtttggatgt

SEQ ID NO: 164472 - DNA, 69 bp, Homo sapiens
tgcacttctcttcccgaggagtggggtaaatttaaaagtcaagttatagtttggatgttagtatagaat

SEQ ID NO: 164473 - DNA, 67 bp, Homo sapiens
ctcttcccgaggagtggggtaaatttaaaagtcaagttatagtttggatgttagtatagaattttga

SEQ ID NO: 164474 - DNA, 67 bp, Homo sapiens
gaggagtggggtaaatttaaaagtcaagttatagtttggatgttagtatagaattttgaaattggga

SEQ ID NO: 164475 - DNA, 67 bp, Homo sapiens
tttaaaagtcaagttatagtttggatgttagtatagaattttgaaattgggaattaaaaatcaggac

SEQ ID NO: 164476 - DNA, 69 bp, Homo sapiens
gtcaagttatagtttggatgttagtatagaattttgaaattgggaattaaaaatcaggactggggactg

SEQ ID NO: 164477 - DNA, 69 bp, Homo sapiens
tagtttggatgttagtatagaattttgaaattgggaattaaaaatcaggactggggactgggagaccaa

SEQ ID NO: 164478 - DNA, 68 bp, Homo sapiens
gtatagaattttgaaattgggaattaaaaatcaggactggggactgggagaccaaaaatttctgatcc

SEQ ID NO: 164479 - DNA, 73 bp, Homo sapiens
attgggaattaaaaatcaggactggggactgggagaccaaaaatttctgatcccatttctgatggatgtgtca

SEQ ID NO: 164480 - DNA, 72 bp, Homo sapiens
aaaaatcaggactggggactgggagaccaaaaatttctgatcccatttctgatggatgtgtcacaccttttc

SEQ ID NO: 164481 - DNA, 73 bp, Homo sapiens
gggactgggagaccaaaaatttctgatcccatttctgatggatgtgtcacaccttttctgtcaaaataaaatg

SEQ ID NO: 164482 - DNA, 72 bp, Homo sapiens
accaaaaatttctgatcccatttctgatggatgtgtcacaccttttctgtcaaaataaaatgtcttggaggt

SEQ ID NO: 164483 - DNA, 75 bp, Homo sapiens
aaatttctgatcccatttctgatggatgtgtcacaccttttctgtcaaaataaaatgtcttggaggttatgactc

SEQ ID NO: 164484 - DNA, 72 bp, Homo sapiens
acaccttttctgtcaaaataaaatgtcttggaggttatgactccttggtgaaaccttctcacattctcattg

SEQ ID NO: 164485 - DNA, 68 bp, Homo sapiens
tttcccttggggaccaccaccaactgaataatgaatactcaaaaaagtacagcttataacacaacttt

SEQ ID NO: 164486 - DNA, 69 bp, Homo sapiens
gggaccaccaccaactgaataatgaatactcaaaaaagtacagcttataacacaacttttattagaaaa

SEQ ID NO: 164487 - DNA, 70 bp, Homo sapiens
ccaccaactgaataatgaatactcaaaaaagtacagcttataacacaacttttattagaaaagttataca

SEQ ID NO: 164488 - DNA, 73 bp, Homo sapiens
tgaatactcaaaaaagtacagcttataacacaacttttattagaaaagttatacataacatagcatcaactat

SEQ ID NO: 164489 - DNA, 71 bp, Homo sapiens
aaaaagtacagcttataacacaacttttattagaaaagttatacataacatagcatcaactattttcaaga

SEQ ID NO: 164490 - DNA, 73 bp, Homo sapiens
gtacagcttataacacaacttttattagaaaagttatacataacatagcatcaactattttcaagaacaatat

SEQ ID NO: 164491 - DNA, 71 bp, Homo sapiens
cacaacttttattagaaaagttatacataacatagcatcaactattttcaagaacaatattaaacccgata

SEQ ID NO: 164492 - DNA, 71 bp, Homo sapiens
tagaaaagttatacataacatagcatcaactattttcaagaacaatattaaacccgataagcaacaaaaac

SEQ ID NO: 164493 - DNA, 71 bp, Homo sapiens
aagttatacataacatagcatcaactattttcaagaacaatattaaacccgataagcaacaaaaaccagac

SEQ ID NO: 164494 - DNA, 72 bp, Homo sapiens
catagcatcaactattttcaagaacaatattaaacccgataagcaacaaaaaccagactaacaaaatgtgta

SEQ ID NO: 164495 - DNA, 69 bp, Homo sapiens
tcaactattttcaagaacaatattaaacccgataagcaacaaaaaccagactaacaaaatgtgtaacaa

SEQ ID NO: 164496 - DNA, 68 bp, Homo sapiens
gaacaatattaaacccgataagcaacaaaaaccagactaacaaaatgtgtaacaagaaactaatgacc

SEQ ID NO: 164497 - DNA, 67 bp, Homo sapiens
attaaacccgataagcaacaaaaaccagactaacaaaatgtgtaacaagaaactaatgacctttcta

SEQ ID NO: 164498 - DNA, 69 bp, Homo sapiens
gataagcaacaaaaaccagactaacaaaatgtgtaacaagaaactaatgacctttctaaaatcaaacat

SEQ ID NO: 164499 - DNA, 72 bp, Homo sapiens
ccagactaacaaaatgtgtaacaagaaactaatgacctttctaaaatcaaacattcaattatctacaatgtc

SEQ ID NO: 164500 - DNA, 71 bp, Homo sapiens
caaaatgtgtaacaagaaactaatgacctttctaaaatcaaacattcaattatctacaatgtctttttaca

SEQ ID NO: 164501 - DNA, 67 bp, Homo sapiens
aacaagaaactaatgacctttctaaaatcaaacattcaattatctacaatgtctttttacaaacggg

SEQ ID NO: 164502 - DNA, 67 bp, Homo sapiens
ctaatgacctttctaaaatcaaacattcaattatctacaatgtctttttacaaacggggaaaactcc

SEQ ID NO: 164503 - DNA, 66 bp, Homo sapiens
ctaaaatcaaacattcaattatctacaatgtctttttacaaacggggaaaactccttggtttacag

SEQ ID NO: 164504 - DNA, 71 bp, Homo sapiens
acattcaattatctacaatgtctttttacaaacggggaaaactccttggtttacaggcacatcatattgaa

SEQ ID NO: 164505 - DNA, 71 bp, Homo sapiens
ttatctacaatgtctttttacaaacggggaaaactccttggtttacaggcacatcatattgaatgtaaagc

SEQ ID NO: 164506 - DNA, 72 bp, Homo sapiens
tctttttacaaacggggaaaactccttggtttacaggcacatcatattgaatgtaaagctgcaatagcaatt

SEQ ID NO: 164507 - DNA, 74 bp, Homo sapiens
ttacaaacggggaaaactccttggtttacaggcacatcatattgaatgtaaagctgcaatagcaattttataca

SEQ ID NO: 164508 - DNA, 77 bp, Homo sapiens
aactccttggtttacaggcacatcatattgaatgtaaagctgcaatagcaattttatacaattaccactctgaagaa

SEQ ID NO: 164509 - DNA, 80 bp, Homo sapiens
ttggtttacaggcacatcatattgaatgtaaagctgcaatagcaattttatacaattaccactctgaagaaactgaatca

SEQ ID NO: 164510 - DNA, 75 bp, Homo sapiens
gctgcaatagcaattttatacaattaccactctgaagaaactgaatcattaaaacagtaattacgagttcacaaa

SEQ ID NO: 164511 - DNA, 71 bp, Homo sapiens
gcaattttatacaattaccactctgaagaaactgaatcattaaaacagtaattacgagttcacaaatttaa

SEQ ID NO: 164512 - DNA, 71 bp, Homo sapiens
caattaccactctgaagaaactgaatcattaaaacagtaattacgagttcacaaatttaaaacatttcaca

SEQ ID NO: 164513 - DNA, 69 bp, Homo sapiens
actctgaagaaactgaatcattaaaacagtaattacgagttcacaaatttaaaacatttcacataattt

SEQ ID NO: 164514 - DNA, 68 bp, Homo sapiens
acagtaattacgagttcacaaatttaaaacatttcacataattttaaattattgggtatacactgaag

SEQ ID NO: 164515 - DNA, 70 bp, Homo sapiens
acgagttcacaaatttaaaacatttcacataattttaaattattgggtatacactgaagtctgagtttca

SEQ ID NO: 164516 - DNA, 67 bp, Homo sapiens
aaaacatttcacataattttaaattattgggtatacactgaagtctgagtttcaaaagtgatttttt

SEQ ID NO: 164517 - DNA, 67 bp, Homo sapiens
ttaaattattgggtatacactgaagtctgagtttcaaaagtgatttttttttcccacaaaagtttca

SEQ ID NO: 164518 - DNA, 67 bp, Homo sapiens
gggtatacactgaagtctgagtttcaaaagtgatttttttttcccacaaaagtttcaacacttaagc

SEQ ID NO: 164519 - DNA, 67 bp, Homo sapiens
cactgaagtctgagtttcaaaagtgatttttttttcccacaaaagtttcaacacttaagctagaact

SEQ ID NO: 164520 - DNA, 67 bp, Homo sapiens
tgagtttcaaaagtgatttttttttcccacaaaagtttcaacacttaagctagaactttcagtgtta

SEQ ID NO: 164521 - DNA, 65 bp, Homo sapiens
aagtgatttttttttcccacaaaagtttcaacacttaagctagaactttcagtgttaactttgcc

SEQ ID NO: 164522 - DNA, 65 bp, Homo sapiens
gatttttttttcccacaaaagtttcaacacttaagctagaactttcagtgttaactttgccctaa

SEQ ID NO: 164523 - DNA, 66 bp, Homo sapiens
cccacaaaagtttcaacacttaagctagaactttcagtgttaactttgccctaaaaagttaagaca

SEQ ID NO: 164524 - DNA, 71 bp, Homo sapiens
gtttcaacacttaagctagaactttcagtgttaactttgccctaaaaagttaagacattctgataatcata

SEQ ID NO: 164525 - DNA, 74 bp, Homo sapiens
cttaagctagaactttcagtgttaactttgccctaaaaagttaagacattctgataatcataacagtcacatga

SEQ ID NO: 164526 - DNA, 77 bp, Homo sapiens
tagaactttcagtgttaactttgccctaaaaagttaagacattctgataatcataacagtcacatgatttctgatgc

SEQ ID NO: 164527 - DNA, 76 bp, Homo sapiens
agaactttcagtgttaactttgccctaaaaagttaagacattctgataatcataacagtcacatgatttctgatgc

SEQ ID NO: 164528 - DNA, 78 bp, Homo sapiens
tttcagtgttaactttgccctaaaaagttaagacattctgataatcataacagtcacatgatttctgatgctatctgg

SEQ ID NO: 164529 - DNA, 79 bp, Homo sapiens
ctttgccctaaaaagttaagacattctgataatcataacagtcacatgatttctgatgctatctggtctgttaataata

SEQ ID NO: 164530 - DNA, 78 bp, Homo sapiens
ctaaaaagttaagacattctgataatcataacagtcacatgatttctgatgctatctggtctgttaataataaagtct

SEQ ID NO: 164531 - DNA, 78 bp, Homo sapiens
gataatcataacagtcacatgatttctgatgctatctggtctgttaataataaagtctttatttggatgtatttttct

SEQ ID NO: 164532 - DNA, 76 bp, Homo sapiens
acagtcacatgatttctgatgctatctggtctgttaataataaagtctttatttggatgtatttttcttcaattaa

SEQ ID NO: 164533 - DNA, 72 bp, Homo sapiens
ctgatgctatctggtctgttaataataaagtctttatttggatgtatttttcttcaattaaattacaggaaa

SEQ ID NO: 164534 - DNA, 70 bp, Homo sapiens
gctatctggtctgttaataataaagtctttatttggatgtatttttcttcaattaaattacaggaaactg

SEQ ID NO: 164535 - DNA, 69 bp, Homo sapiens
ctgttaataataaagtctttatttggatgtatttttcttcaattaaattacaggaaactggatatagga

SEQ ID NO: 164536 - DNA, 71 bp, Homo sapiens
gatgtatttttcttcaattaaattacaggaaactggatataggatttcgttgcaacgctattaaagttcca

SEQ ID NO: 164537 - DNA, 71 bp, Homo sapiens
aattaaattacaggaaactggatataggatttcgttgcaacgctattaaagttccaaaccaggagtgtgca

SEQ ID NO: 164538 - DNA, 72 bp, Homo sapiens
aggaaactggatataggatttcgttgcaacgctattaaagttccaaaccaggagtgtgcagcactggaaaag

SEQ ID NO: 164539 - DNA, 75 bp, Homo sapiens
atataggatttcgttgcaacgctattaaagttccaaaccaggagtgtgcagcactggaaaaggagatcagtacta

SEQ ID NO: 164540 - DNA, 74 bp, Homo sapiens
ttgcaacgctattaaagttccaaaccaggagtgtgcagcactggaaaaggagatcagtactaaaacttacaata

SEQ ID NO: 164541 - DNA, 73 bp, Homo sapiens
ctattaaagttccaaaccaggagtgtgcagcactggaaaaggagatcagtactaaaacttacaataaatatca

SEQ ID NO: 164542 - DNA, 73 bp, Homo sapiens
aaaccaggagtgtgcagcactggaaaaggagatcagtactaaaacttacaataaatatcagagaagccgttag

SEQ ID NO: 164543 - DNA, 73 bp, Homo sapiens
agtgtgcagcactggaaaaggagatcagtactaaaacttacaataaatatcagagaagccgttagtttttaca

SEQ ID NO: 164544 - DNA, 71 bp, Homo sapiens
actggaaaaggagatcagtactaaaacttacaataaatatcagagaagccgttagtttttacagcatcgtc

SEQ ID NO: 164545 - DNA, 73 bp, Homo sapiens
ggagatcagtactaaaacttacaataaatatcagagaagccgttagtttttacagcatcgtctgcttaaaagc

SEQ ID NO: 164546 - DNA, 74 bp, Homo sapiens
ataaatatcagagaagccgttagtttttacagcatcgtctgcttaaaagctaagttgaccaggtgcataatttc

SEQ ID NO: 164547 - DNA, 76 bp, Homo sapiens
tatcagagaagccgttagtttttacagcatcgtctgcttaaaagctaagttgaccaggtgcataatttcccatcag

SEQ ID NO: 164548 - DNA, 77 bp, Homo sapiens
tttacagcatcgtctgcttaaaagctaagttgaccaggtgcataatttcccatcagtctgtccttgtagtaggcagg

SEQ ID NO: 164549 - DNA, 75 bp, Homo sapiens
tgcttaaaagctaagttgaccaggtgcataatttcccatcagtctgtccttgtagtaggcagggcaatttctgtt

SEQ ID NO: 164550 - DNA, 73 bp, Homo sapiens
tccttgtagtaggcagggcaatttctgttttcatgatcggaatactcaaatatatccaaacatctttttaaaa

SEQ ID NO: 164551 - DNA, 71 bp, Homo sapiens
aggcagggcaatttctgttttcatgatcggaatactcaaatatatccaaacatctttttaaaactttgatt

SEQ ID NO: 164552 - DNA, 72 bp, Homo sapiens
ctgttttcatgatcggaatactcaaatatatccaaacatctttttaaaactttgatttatagctcctagaaa

SEQ ID NO: 164553 - DNA, 72 bp, Homo sapiens
catgatcggaatactcaaatatatccaaacatctttttaaaactttgatttatagctcctagaaagttatgt

SEQ ID NO: 164554 - DNA, 67 bp, Homo sapiens
aatactcaaatatatccaaacatctttttaaaactttgatttatagctcctagaaagttatgttttt

SEQ ID NO: 164555 - DNA, 67 bp, Homo sapiens
ccaaacatctttttaaaactttgatttatagctcctagaaagttatgttttttaatagtcactctac

SEQ ID NO: 164556 - DNA, 74 bp, Homo sapiens
ctttgatttatagctcctagaaagttatgttttttaatagtcactctactctaatcaggcctagctttgctcat

SEQ ID NO: 164557 - DNA, 75 bp, Homo sapiens
ttatagctcctagaaagttatgttttttaatagtcactctactctaatcaggcctagctttgctcattttggagc

SEQ ID NO: 164558 - DNA, 73 bp, Homo sapiens
agttatgttttttaatagtcactctactctaatcaggcctagctttgctcattttggagcctcactaaaataa

SEQ ID NO: 164559 - DNA, 77 bp, Homo sapiens
actctactctaatcaggcctagctttgctcattttggagcctcactaaaataacagatttcagtatagccaagttca

SEQ ID NO: 164560 - DNA, 77 bp, Homo sapiens
aatcaggcctagctttgctcattttggagcctcactaaaataacagatttcagtatagccaagttcatcagaaagac

SEQ ID NO: 164561 - DNA, 78 bp, Homo sapiens
tagctttgctcattttggagcctcactaaaataacagatttcagtatagccaagttcatcagaaagactcaaatggaa

SEQ ID NO: 164562 - DNA, 77 bp, Homo sapiens
ctcattttggagcctcactaaaataacagatttcagtatagccaagttcatcagaaagactcaaatggaatgattta

SEQ ID NO: 164563 - DNA, 74 bp, Homo sapiens
taacagatttcagtatagccaagttcatcagaaagactcaaatggaatgatttacaaaatagaacactttaaac

SEQ ID NO: 164564 - DNA, 74 bp, Homo sapiens
tagccaagttcatcagaaagactcaaatggaatgatttacaaaatagaacactttaaaccaggtcagtcctatc

SEQ ID NO: 164565 - DNA, 71 bp, Homo sapiens
cagaaagactcaaatggaatgatttacaaaatagaacactttaaaccaggtcagtcctatctttttgtagc

SEQ ID NO: 164566 - DNA, 72 bp, Homo sapiens
aatggaatgatttacaaaatagaacactttaaaccaggtcagtcctatctttttgtagctgaaggctatcag

SEQ ID NO: 164567 - DNA, 73 bp, Homo sapiens
tttacaaaatagaacactttaaaccaggtcagtcctatctttttgtagctgaaggctatcagtcataacacaa

SEQ ID NO: 164568 - DNA, 72 bp, Homo sapiens
aaaatagaacactttaaaccaggtcagtcctatctttttgtagctgaaggctatcagtcataacacaatttc

SEQ ID NO: 164569 - DNA, 73 bp, Homo sapiens
actttaaaccaggtcagtcctatctttttgtagctgaaggctatcagtcataacacaatttcgcgtacacctc

SEQ ID NO: 164570 - DNA, 78 bp, Homo sapiens
agtcctatctttttgtagctgaaggctatcagtcataacacaatttcgcgtacacctctgctcattatggaattacac

SEQ ID NO: 164571 - DNA, 77 bp, Homo sapiens
atctttttgtagctgaaggctatcagtcataacacaatttcgcgtacacctctgctcattatggaattacacttaaa

SEQ ID NO: 164572 - DNA, 79 bp, Homo sapiens
tagctgaaggctatcagtcataacacaatttcgcgtacacctctgctcattatggaattacacttaaaacgaatctcaa

SEQ ID NO: 164573 - DNA, 77 bp, Homo sapiens
tatcagtcataacacaatttcgcgtacacctctgctcattatggaattacacttaaaacgaatctcaagagggtgac

SEQ ID NO: 164574 - DNA, 74 bp, Homo sapiens
taacacaatttcgcgtacacctctgctcattatggaattacacttaaaacgaatctcaagagggtgaccattgt

SEQ ID NO: 164575 - DNA, 73 bp, Homo sapiens
ctcattatggaattacacttaaaacgaatctcaagagggtgaccattgttgtttcagataccatccctaagga

SEQ ID NO: 164576 - DNA, 70 bp, Homo sapiens
acttaaaacgaatctcaagagggtgaccattgttgtttcagataccatccctaaggagagtggttaacag

SEQ ID NO: 164577 - DNA, 75 bp, Homo sapiens
tctcaagagggtgaccattgttgtttcagataccatccctaaggagagtggttaacaggaagattgccagtgtta

SEQ ID NO: 164578 - DNA, 76 bp, Homo sapiens
tgaccattgttgtttcagataccatccctaaggagagtggttaacaggaagattgccagtgttactgatggaaaga

SEQ ID NO: 164579 - DNA, 73 bp, Homo sapiens
ttgtttcagataccatccctaaggagagtggttaacaggaagattgccagtgttactgatggaaagaagtgtt

SEQ ID NO: 164580 - DNA, 71 bp, Homo sapiens
ataccatccctaaggagagtggttaacaggaagattgccagtgttactgatggaaagaagtgtttgtttgt

SEQ ID NO: 164581 - DNA, 69 bp, Homo sapiens
tgtttttttttcttgtcaaagacttacaccatagttttaaattaaactgtcaggcattttctcagacag

SEQ ID NO: 164582 - DNA, 69 bp, Homo sapiens
tttcttgtcaaagacttacaccatagttttaaattaaactgtcaggcattttctcagacaggttttcct

SEQ ID NO: 164583 - DNA, 69 bp, Homo sapiens
tcttgtcaaagacttacaccatagttttaaattaaactgtcaggcattttctcagacaggttttccttt

SEQ ID NO: 164584 - DNA, 71 bp, Homo sapiens
gacttacaccatagttttaaattaaactgtcaggcattttctcagacaggttttccttttcaatgcagtaa

SEQ ID NO: 164585 - DNA, 71 bp, Homo sapiens
ccatagttttaaattaaactgtcaggcattttctcagacaggttttccttttcaatgcagtaatgaagaac

SEQ ID NO: 164586 - DNA, 71 bp, Homo sapiens
gttttaaattaaactgtcaggcattttctcagacaggttttccttttcaatgcagtaatgaagaactaaga

SEQ ID NO: 164587 - DNA, 75 bp, Homo sapiens
taaactgtcaggcattttctcagacaggttttccttttcaatgcagtaatgaagaactaagataaaaatcatgac

SEQ ID NO: 164588 - DNA, 74 bp, Homo sapiens
actgtcaggcattttctcagacaggttttccttttcaatgcagtaatgaagaactaagataaaaatcatgactt

SEQ ID NO: 164589 - DNA, 76 bp, Homo sapiens
gcattttctcagacaggttttccttttcaatgcagtaatgaagaactaagataaaaatcatgacttttgactgcca

SEQ ID NO: 164590 - DNA, 76 bp, Homo sapiens
tcagacaggttttccttttcaatgcagtaatgaagaactaagataaaaatcatgacttttgactgccactcaacat

SEQ ID NO: 164591 - DNA, 78 bp, Homo sapiens
ccttttcaatgcagtaatgaagaactaagataaaaatcatgacttttgactgccactcaacattattacatgcaccaa

SEQ ID NO: 164592 - DNA, 82 bp, Homo sapiens
aatgcagtaatgaagaactaagataaaaatcatgacttttgactgccactcaacattattacatgcaccaatattgcacaca

SEQ ID NO: 164593 - DNA, 81 bp, Homo sapiens
aagaactaagataaaaatcatgacttttgactgccactcaacattattacatgcaccaatattgcacacatctgttctgaa

SEQ ID NO: 164594 - DNA, 83 bp, Homo sapiens
atgacttttgactgccactcaacattattacatgcaccaatattgcacacatctgttctgaactgttaaaatcatcttctgag

SEQ ID NO: 164595 - DNA, 81 bp, Homo sapiens
actgccactcaacattattacatgcaccaatattgcacacatctgttctgaactgttaaaatcatcttctgagtccttggg

SEQ ID NO: 164596 - DNA, 81 bp, Homo sapiens
atgcaccaatattgcacacatctgttctgaactgttaaaatcatcttctgagtccttggggtgctgttttctccatcagaa

SEQ ID NO: 164597 - DNA, 79 bp, Homo sapiens
aatattgcacacatctgttctgaactgttaaaatcatcttctgagtccttggggtgctgttttctccatcagaacacaa

SEQ ID NO: 164598 - DNA, 76 bp, Homo sapiens
acatctgttctgaactgttaaaatcatcttctgagtccttggggtgctgttttctccatcagaacacaaacacaac

SEQ ID NO: 164599 - DNA, 75 bp, Homo sapiens
tgttaaaatcatcttctgagtccttggggtgctgttttctccatcagaacacaaacacaacccatctaatcagtt

SEQ ID NO: 164600 - DNA, 74 bp, Homo sapiens
atcttctgagtccttggggtgctgttttctccatcagaacacaaacacaacccatctaatcagtttccctcaaa

SEQ ID NO: 164601 - DNA, 75 bp, Homo sapiens
tccttggggtgctgttttctccatcagaacacaaacacaacccatctaatcagtttccctcaaagatgaaattga

SEQ ID NO: 164602 - DNA, 75 bp, Homo sapiens
tgctgttttctccatcagaacacaaacacaacccatctaatcagtttccctcaaagatgaaattgacaaatttaa

SEQ ID NO: 164603 - DNA, 75 bp, Homo sapiens
ttctccatcagaacacaaacacaacccatctaatcagtttccctcaaagatgaaattgacaaatttaatgtactg

SEQ ID NO: 164604 - DNA, 71 bp, Homo sapiens
gaacacaaacacaacccatctaatcagtttccctcaaagatgaaattgacaaatttaatgtactggaaaaa

SEQ ID NO: 164605 - DNA, 71 bp, Homo sapiens
cacaacccatctaatcagtttccctcaaagatgaaattgacaaatttaatgtactggaaaaaaatgaagaa

SEQ ID NO: 164606 - DNA, 69 bp, Homo sapiens
atcagtttccctcaaagatgaaattgacaaatttaatgtactggaaaaaaatgaagaaggaaaaaggca

SEQ ID NO: 164607 - DNA, 67 bp, Homo sapiens
ccctcaaagatgaaattgacaaatttaatgtactggaaaaaaatgaagaaggaaaaaggcaaagact

SEQ ID NO: 164608 - DNA, 68 bp, Homo sapiens
gaaattgacaaatttaatgtactggaaaaaaatgaagaaggaaaaaggcaaagactttgtacagacaa

SEQ ID NO: 164609 - DNA, 67 bp, Homo sapiens
caaatttaatgtactggaaaaaaatgaagaaggaaaaaggcaaagactttgtacagacaaaaatcta

SEQ ID NO: 164610 - DNA, 67 bp, Homo sapiens
gtactggaaaaaaatgaagaaggaaaaaggcaaagactttgtacagacaaaaatctaagttttctca

SEQ ID NO: 164611 - DNA, 67 bp, Homo sapiens
gaagaaggaaaaaggcaaagactttgtacagacaaaaatctaagttttctcaaagggttctgtgtcc

SEQ ID NO: 164612 - DNA, 67 bp, Homo sapiens
aaaaaggcaaagactttgtacagacaaaaatctaagttttctcaaagggttctgtgtcccctacaca

SEQ ID NO: 164613 - DNA, 68 bp, Homo sapiens
agactttgtacagacaaaaatctaagttttctcaaagggttctgtgtcccctacacatgggggcaatt

SEQ ID NO: 164614 - DNA, 69 bp, Homo sapiens
agacaaaaatctaagttttctcaaagggttctgtgtcccctacacatgggggcaatttgtaagcactag

SEQ ID NO: 164615 - DNA, 72 bp, Homo sapiens
taagttttctcaaagggttctgtgtcccctacacatgggggcaatttgtaagcactagtgaatcaaacacta

SEQ ID NO: 164616 - DNA, 79 bp, Homo sapiens
tgtgtcccctacacatgggggcaatttgtaagcactagtgaatcaaacactagctataatgcttctagctccttatata

SEQ ID NO: 164617 - DNA, 79 bp, Homo sapiens
ctacacatgggggcaatttgtaagcactagtgaatcaaacactagctataatgcttctagctccttatataatatggaa

SEQ ID NO: 164618 - DNA, 78 bp, Homo sapiens
gcaatttgtaagcactagtgaatcaaacactagctataatgcttctagctccttatataatatggaaccttggtccag

SEQ ID NO: 164619 - DNA, 77 bp, Homo sapiens
ttgtaagcactagtgaatcaaacactagctataatgcttctagctccttatataatatggaaccttggtccaggtgt

SEQ ID NO: 164620 - DNA, 80 bp, Homo sapiens
aatcaaacactagctataatgcttctagctccttatataatatggaaccttggtccaggtgttgcgatgatgtcactgta

SEQ ID NO: 164621 - DNA, 79 bp, Homo sapiens
tagctataatgcttctagctccttatataatatggaaccttggtccaggtgttgcgatgatgtcactgtacggttcttc

SEQ ID NO: 164622 - DNA, 77 bp, Homo sapiens
ataatgcttctagctccttatataatatggaaccttggtccaggtgttgcgatgatgtcactgtacggttcttcctg

SEQ ID NO: 164623 - DNA, 79 bp, Homo sapiens
tccttatataatatggaaccttggtccaggtgttgcgatgatgtcactgtacggttcttcctgtgtcagctcaatagct

SEQ ID NO: 164624 - DNA, 81 bp, Homo sapiens
tataatatggaaccttggtccaggtgttgcgatgatgtcactgtacggttcttcctgtgtcagctcaatagcttgctgctt

SEQ ID NO: 164625 - DNA, 78 bp, Homo sapiens
aaccttggtccaggtgttgcgatgatgtcactgtacggttcttcctgtgtcagctcaatagcttgctgctttttaaga

SEQ ID NO: 164626 - DNA, 81 bp, Homo sapiens
tgttgcgatgatgtcactgtacggttcttcctgtgtcagctcaatagcttgctgctttttaagaaccaagaagctgtagaa

SEQ ID NO: 164627 - DNA, 77 bp, Homo sapiens
atgatgtcactgtacggttcttcctgtgtcagctcaatagcttgctgctttttaagaaccaagaagctgtagaactt

SEQ ID NO: 164628 - DNA, 77 bp, Homo sapiens
tacggttcttcctgtgtcagctcaatagcttgctgctttttaagaaccaagaagctgtagaactttgcggcagcttg

SEQ ID NO: 164629 - DNA, 75 bp, Homo sapiens
tcaatagcttgctgctttttaagaaccaagaagctgtagaactttgcggcagcttgttttctgttcgtatttcga

SEQ ID NO: 164630 - DNA, 77 bp, Homo sapiens
aagaagctgtagaactttgcggcagcttgttttctgttcgtatttcgacataactcaagcaaactgatagattcagc

SEQ ID NO: 164631 - DNA, 79 bp, Homo sapiens
gcttgttttctgttcgtatttcgacataactcaagcaaactgatagattcagctccagttttagcaagagcacgctgaa

SEQ ID NO: 164632 - DNA, 78 bp, Homo sapiens
ttctgttcgtatttcgacataactcaagcaaactgatagattcagctccagttttagcaagagcacgctgaaataaaa

SEQ ID NO: 164633 - DNA, 73 bp, Homo sapiens
ataactcaagcaaactgatagattcagctccagttttagcaagagcacgctgaaataaaaccaaaaaagggta

SEQ ID NO: 164634 - DNA, 70 bp, Homo sapiens
aaactgatagattcagctccagttttagcaagagcacgctgaaataaaaccaaaaaagggtaacttaatc

SEQ ID NO: 164635 - DNA, 82 bp, Homo sapiens
aacaatggcaaaagcctttgatgaagcattttcctctgagacaacagcggcaatacctgaagaccatgaagcatctgctgag

SEQ ID NO: 164636 - DNA, 79 bp, Homo sapiens
aaaagcctttgatgaagcattttcctctgagacaacagcggcaatacctgaagaccatgaagcatctgctgagtccttt

SEQ ID NO: 164637 - DNA, 81 bp, Homo sapiens
tgaagcattttcctctgagacaacagcggcaatacctgaagaccatgaagcatctgctgagtccttttgttccatcttctt

SEQ ID NO: 164638 - DNA, 78 bp, Homo sapiens
attttcctctgagacaacagcggcaatacctgaagaccatgaagcatctgctgagtccttttgttccatcttctttct

SEQ ID NO: 164639 - DNA, 81 bp, Homo sapiens
agacaacagcggcaatacctgaagaccatgaagcatctgctgagtccttttgttccatcttctttcttcctgatcttgatc

SEQ ID NO: 164640 - DNA, 81 bp, Homo sapiens
aatacctgaagaccatgaagcatctgctgagtccttttgttccatcttctttcttcctgatcttgatcgccccctgatgca

SEQ ID NO: 164641 - DNA, 83 bp, Homo sapiens
accatgaagcatctgctgagtccttttgttccatcttctttcttcctgatcttgatcgccccctgatgcatcttcatcctgaa

SEQ ID NO: 164642 - DNA, 79 bp, Homo sapiens
atctgctgagtccttttgttccatcttctttcttcctgatcttgatcgccccctgatgcatcttcatcctgaataaaaa

SEQ ID NO: 164643 - DNA, 76 bp, Homo sapiens
agtccttttgttccatcttctttcttcctgatcttgatcgccccctgatgcatcttcatcctgaataaaaatgacc

SEQ ID NO: 164644 - DNA, 76 bp, Homo sapiens
ttgttccatcttctttcttcctgatcttgatcgccccctgatgcatcttcatcctgaataaaaatgacccccaaaa

SEQ ID NO: 164645 - DNA, 76 bp, Homo sapiens
ttcttcctgatcttgatcgccccctgatgcatcttcatcctgaataaaaatgacccccaaaaagctgacaaaacaa

SEQ ID NO: 164646 - DNA, 76 bp, Homo sapiens
atcttgatcgccccctgatgcatcttcatcctgaataaaaatgacccccaaaaagctgacaaaacaagtccaatga

SEQ ID NO: 164647 - DNA, 70 bp, Homo sapiens
ctggttggaggtttttgctaaatctggaatgaaaattattaattagtttacctcttcctcttcatcatct

SEQ ID NO: 164648 - DNA, 69 bp, Homo sapiens
gtttttgctaaatctggaatgaaaattattaattagtttacctcttcctcttcatcatcttctttttcc

SEQ ID NO: 164649 - DNA, 70 bp, Homo sapiens
atctggaatgaaaattattaattagtttacctcttcctcttcatcatcttctttttccttctctttctcc

SEQ ID NO: 164650 - DNA, 73 bp, Homo sapiens
ttccttctctttctccttctctttttctggcagaagttctaactctggtattagctgacagatatttggaggt

SEQ ID NO: 164651 - DNA, 73 bp, Homo sapiens
tttctccttctctttttctggcagaagttctaactctggtattagctgacagatatttggaggttcttctggg

SEQ ID NO: 164652 - DNA, 75 bp, Homo sapiens
tctttttctggcagaagttctaactctggtattagctgacagatatttggaggttcttctgggggaagctctaca

SEQ ID NO: 164653 - DNA, 73 bp, Homo sapiens
cagaagttctaactctggtattagctgacagatatttggaggttcttctgggggaagctctacaggtggtatt

SEQ ID NO: 164654 - DNA, 74 bp, Homo sapiens
gttctaactctggtattagctgacagatatttggaggttcttctgggggaagctctacaggtggtatttccatc

SEQ ID NO: 164655 - DNA, 79 bp, Homo sapiens
tggtattagctgacagatatttggaggttcttctgggggaagctctacaggtggtatttccatctgctctacctgctga

SEQ ID NO: 164656 - DNA, 75 bp, Homo sapiens
acagatatttggaggttcttctgggggaagctctacaggtggtatttccatctgctctacctgctgaggcttaaa

SEQ ID NO: 164657 - DNA, 75 bp, Homo sapiens
aggttcttctgggggaagctctacaggtggtatttccatctgctctacctgctgaggcttaaagcaatacaaata

SEQ ID NO: 164658 - DNA, 75 bp, Homo sapiens
ggggaagctctacaggtggtatttccatctgctctacctgctgaggcttaaagcaatacaaataagacaatttaa

SEQ ID NO: 164659 - DNA, 78 bp, Homo sapiens
actgtatgaataccttcaaatgacttaatggatagatttgcttacttacaggcatcacaggctctgggtcaatttgtc

SEQ ID NO: 164660 - DNA, 76 bp, Homo sapiens
ataccttcaaatgacttaatggatagatttgcttacttacaggcatcacaggctctgggtcaatttgtccagcttt

SEQ ID NO: 164661 - DNA, 76 bp, Homo sapiens
aatgacttaatggatagatttgcttacttacaggcatcacaggctctgggtcaatttgtccagcttttcgcttaac

SEQ ID NO: 164662 - DNA, 75 bp, Homo sapiens
atagatttgcttacttacaggcatcacaggctctgggtcaatttgtccagcttttcgcttaactccctgaggtgg

SEQ ID NO: 164663 - DNA, 74 bp, Homo sapiens
cttacttacaggcatcacaggctctgggtcaatttgtccagcttttcgcttaactccctgaggtggtggtggag

SEQ ID NO: 164664 - DNA, 79 bp, Homo sapiens
atcacaggctctgggtcaatttgtccagcttttcgcttaactccctgaggtggtggtggaggcatagctgactcatcta

SEQ ID NO: 164665 - DNA, 77 bp, Homo sapiens
tctgggtcaatttgtccagcttttcgcttaactccctgaggtggtggtggaggcatagctgactcatctatgtttgt

SEQ ID NO: 164666 - DNA, 78 bp, Homo sapiens
aatttgtccagcttttcgcttaactccctgaggtggtggtggaggcatagctgactcatctatgtttgttctgctggc

SEQ ID NO: 164667 - DNA, 81 bp, Homo sapiens
agcttttcgcttaactccctgaggtggtggtggaggcatagctgactcatctatgtttgttctgctggcctccatcactga

SEQ ID NO: 164668 - DNA, 81 bp, Homo sapiens
cttaactccctgaggtggtggtggaggcatagctgactcatctatgtttgttctgctggcctccatcactgactcctggag

SEQ ID NO: 164669 - DNA, 85 bp, Homo sapiens
tggtggtggaggcatagctgactcatctatgtttgttctgctggcctccatcactgactcctggaggcggcttggctcttcaata

SEQ ID NO: 164670 - DNA, 85 bp, Homo sapiens
aggcatagctgactcatctatgtttgttctgctggcctccatcactgactcctggaggcggcttggctcttcaataatgggctca

SEQ ID NO: 164671 - DNA, 84 bp, Homo sapiens
actcatctatgtttgttctgctggcctccatcactgactcctggaggcggcttggctcttcaataatgggctcatctgcaattg

SEQ ID NO: 164672 - DNA, 86 bp, Homo sapiens
tatgtttgttctgctggcctccatcactgactcctggaggcggcttggctcttcaataatgggctcatctgcaattggtcatatga

SEQ ID NO: 164673 - DNA, 85 bp, Homo sapiens
ttctgctggcctccatcactgactcctggaggcggcttggctcttcaataatgggctcatctgcaattggtcatatgaagagaaa

SEQ ID NO: 164674 - DNA, 83 bp, Homo sapiens
atcactgactcctggaggcggcttggctcttcaataatgggctcatctgcaattggtcatatgaagagaaaacataggtcata

SEQ ID NO: 164675 - DNA, 83 bp, Homo sapiens
agccaaatactcatgtgaacttcatcaaggaactattccaacagaacaaaccgataacatcacgctgctgatgctgctgttgc

SEQ ID NO: 164676 - DNA, 83 bp, Homo sapiens
atgtgaacttcatcaaggaactattccaacagaacaaaccgataacatcacgctgctgatgctgctgttgctggtcctctcta

SEQ ID NO: 164677 - DNA, 81 bp, Homo sapiens
ttcatcaaggaactattccaacagaacaaaccgataacatcacgctgctgatgctgctgttgctggtcctctctaggaacc

SEQ ID NO: 164678 - DNA, 81 bp, Homo sapiens
tattccaacagaacaaaccgataacatcacgctgctgatgctgctgttgctggtcctctctaggaacctctggattttcaa

SEQ ID NO: 164679 - DNA, 78 bp, Homo sapiens
agaacaaaccgataacatcacgctgctgatgctgctgttgctggtcctctctaggaacctctggattttcaaattctt

SEQ ID NO: 164680 - DNA, 82 bp, Homo sapiens
ataacatcacgctgctgatgctgctgttgctggtcctctctaggaacctctggattttcaaattctttgaggaattcatcca

SEQ ID NO: 164681 - DNA, 81 bp, Homo sapiens
tgctgatgctgctgttgctggtcctctctaggaacctctggattttcaaattctttgaggaattcatccaaattatctgcc

SEQ ID NO: 164682 - DNA, 77 bp, Homo sapiens
tgctgttgctggtcctctctaggaacctctggattttcaaattctttgaggaattcatccaaattatctgcctctcc

SEQ ID NO: 164683 - DNA, 73 bp, Homo sapiens
tggtcctctctaggaacctctggattttcaaattctttgaggaattcatccaaattatctgcctctcctcctt

SEQ ID NO: 164684 - DNA, 71 bp, Homo sapiens
taggaacctctggattttcaaattctttgaggaattcatccaaattatctgcctctcctcctttcctcctt

SEQ ID NO: 164685 - DNA, 70 bp, Homo sapiens
gattttcaaattctttgaggaattcatccaaattatctgcctctcctcctttcctcctttttctaaggtc

SEQ ID NO: 164686 - DNA, 70 bp, Homo sapiens
aattctttgaggaattcatccaaattatctgcctctcctcctttcctcctttttctaaggtcttctggta

SEQ ID NO: 164687 - DNA, 70 bp, Homo sapiens
aattcatccaaattatctgcctctcctcctttcctcctttttctaaggtcttctggtacaagcggtgtaa

SEQ ID NO: 164688 - DNA, 71 bp, Homo sapiens
aattatctgcctctcctcctttcctcctttttctaaggtcttctggtacaagcggtgtaagacagcgtgta

SEQ ID NO: 164689 - DNA, 70 bp, Homo sapiens
ctctcctcctttcctcctttttctaaggtcttctggtacaagcggtgtaagacagcgtgtaaagagctat

SEQ ID NO: 164690 - DNA, 68 bp, Homo sapiens
ctttcctcctttttctaaggtcttctggtacaagcggtgtaagacagcgtgtaaagagctattaaaaa

SEQ ID NO: 164691 - DNA, 66 bp, Homo sapiens
cctttttctaaggtcttctggtacaagcggtgtaagacagcgtgtaaagagctattaaaaaaaaaa

SEQ ID NO: 164692 - DNA, 75 bp, Homo sapiens
atgtatatgaagtaaaaattctgcaaactatattaccttcagtagtctgttattccacaaaggctgagcaggtaa

SEQ ID NO: 164693 - DNA, 72 bp, Homo sapiens
gaagtaaaaattctgcaaactatattaccttcagtagtctgttattccacaaaggctgagcaggtaaagaaa

SEQ ID NO: 164694 - DNA, 71 bp, Homo sapiens
aaattctgcaaactatattaccttcagtagtctgttattccacaaaggctgagcaggtaaagaaaacagtt

SEQ ID NO: 164695 - DNA, 70 bp, Homo sapiens
aactatattaccttcagtagtctgttattccacaaaggctgagcaggtaaagaaaacagtttttctactc

SEQ ID NO: 164696 - DNA, 71 bp, Homo sapiens
cttcagtagtctgttattccacaaaggctgagcaggtaaagaaaacagtttttctactcctcctgtctctt

SEQ ID NO: 164697 - DNA, 73 bp, Homo sapiens
ttattccacaaaggctgagcaggtaaagaaaacagtttttctactcctcctgtctctttccacatcatcaatt

SEQ ID NO: 164698 - DNA, 72 bp, Homo sapiens
aaaggctgagcaggtaaagaaaacagtttttctactcctcctgtctctttccacatcatcaatttcttggtg

SEQ ID NO: 164699 - DNA, 71 bp, Homo sapiens
aggtaaagaaaacagtttttctactcctcctgtctctttccacatcatcaatttcttggtgggcggtgcca

SEQ ID NO: 164700 - DNA, 73 bp, Homo sapiens
aaacagtttttctactcctcctgtctctttccacatcatcaatttcttggtgggcggtgccagatccaaagta

SEQ ID NO: 164701 - DNA, 75 bp, Homo sapiens
ttttctactcctcctgtctctttccacatcatcaatttcttggtgggcggtgccagatccaaagtagtaacaata

SEQ ID NO: 164702 - DNA, 78 bp, Homo sapiens
tgtctctttccacatcatcaatttcttggtgggcggtgccagatccaaagtagtaacaatatctgaataatcactaag

SEQ ID NO: 164703 - DNA, 76 bp, Homo sapiens
tttccacatcatcaatttcttggtgggcggtgccagatccaaagtagtaacaatatctgaataatcactaagttgg

SEQ ID NO: 164704 - DNA, 74 bp, Homo sapiens
atcaatttcttggtgggcggtgccagatccaaagtagtaacaatatctgaataatcactaagttgggctctaat

SEQ ID NO: 164705 - DNA, 77 bp, Homo sapiens
gtgggcggtgccagatccaaagtagtaacaatatctgaataatcactaagttgggctctaattgtcttgctatccaa

SEQ ID NO: 164706 - DNA, 76 bp, Homo sapiens
agatccaaagtagtaacaatatctgaataatcactaagttgggctctaattgtcttgctatccaactctttgacac

SEQ ID NO: 164707 - DNA, 77 bp, Homo sapiens
agtaacaatatctgaataatcactaagttgggctctaattgtcttgctatccaactctttgacactgtcaacaatta

SEQ ID NO: 164708 - DNA, 76 bp, Homo sapiens
ataatcactaagttgggctctaattgtcttgctatccaactctttgacactgtcaacaattagcttcctcttcctc

SEQ ID NO: 164709 - DNA, 75 bp, Homo sapiens
ttgggctctaattgtcttgctatccaactctttgacactgtcaacaattagcttcctcttcctcttggcttttgt

SEQ ID NO: 164710 - DNA, 74 bp, Homo sapiens
taattgtcttgctatccaactctttgacactgtcaacaattagcttcctcttcctcttggcttttgtttcttta

SEQ ID NO: 164711 - DNA, 74 bp, Homo sapiens
tatccaactctttgacactgtcaacaattagcttcctcttcctcttggcttttgtttctttaactggaatgata

SEQ ID NO: 164712 - DNA, 71 bp, Homo sapiens
ctttgacactgtcaacaattagcttcctcttcctcttggcttttgtttctttaactggaatgataataaaa

SEQ ID NO: 164713 - DNA, 71 bp, Homo sapiens
gtcaacaattagcttcctcttcctcttggcttttgtttctttaactggaatgataataaaaaataagatca

SEQ ID NO: 164714 - DNA, 78 bp, Homo sapiens
aataggaccttatgttgtatgctgtataaatctaaaggttcatatgcttaccagttatatcaataggctccaatgcaa

SEQ ID NO: 164715 - DNA, 82 bp, Homo sapiens
tatgttgtatgctgtataaatctaaaggttcatatgcttaccagttatatcaataggctccaatgcaaatgcttcttcctca

SEQ ID NO: 164716 - DNA, 78 bp, Homo sapiens
tataaatctaaaggttcatatgcttaccagttatatcaataggctccaatgcaaatgcttcttcctcatttggaacaa

SEQ ID NO: 164717 - DNA, 77 bp, Homo sapiens
taaaggttcatatgcttaccagttatatcaataggctccaatgcaaatgcttcttcctcatttggaacaagtgttgt

SEQ ID NO: 164718 - DNA, 81 bp, Homo sapiens
atatgcttaccagttatatcaataggctccaatgcaaatgcttcttcctcatttggaacaagtgttgtttgatcagtcatg

SEQ ID NO: 164719 - DNA, 80 bp, Homo sapiens
agttatatcaataggctccaatgcaaatgcttcttcctcatttggaacaagtgttgtttgatcagtcatggttggcattg

SEQ ID NO: 164720 - DNA, 78 bp, Homo sapiens
aataggctccaatgcaaatgcttcttcctcatttggaacaagtgttgtttgatcagtcatggttggcattggttcaac

SEQ ID NO: 164721 - DNA, 77 bp, Homo sapiens
caaatgcttcttcctcatttggaacaagtgttgtttgatcagtcatggttggcattggttcaacgggatccactgaa

SEQ ID NO: 164722 - DNA, 79 bp, Homo sapiens
ttcctcatttggaacaagtgttgtttgatcagtcatggttggcattggttcaacgggatccactgaatcaggactatca

SEQ ID NO: 164723 - DNA, 77 bp, Homo sapiens
atttggaacaagtgttgtttgatcagtcatggttggcattggttcaacgggatccactgaatcaggactatcaggcc

SEQ ID NO: 164724 - DNA, 77 bp, Homo sapiens
ttgtttgatcagtcatggttggcattggttcaacgggatccactgaatcaggactatcaggcccacccactgtaaaa

SEQ ID NO: 164725 - DNA, 74 bp, Homo sapiens
atcagtcatggttggcattggttcaacgggatccactgaatcaggactatcaggcccacccactgtaaaaaaaa

SEQ ID NO: 164726 - DNA, 90 bp, Homo sapiens
ttctggatgccatacaatcatccccagaatcactgaacatgaaatgcttacttgatacattatcatcctcatccatatcgtcatgtgcag

SEQ ID NO: 164727 - DNA, 91 bp, Homo sapiens
atacaatcatccccagaatcactgaacatgaaatgcttacttgatacattatcatcctcatccatatcgtcatgtgcaggctgctctggca

SEQ ID NO: 164728 - DNA, 89 bp, Homo sapiens
cccagaatcactgaacatgaaatgcttacttgatacattatcatcctcatccatatcgtcatgtgcaggctgctctggcaacatcaccc

SEQ ID NO: 164729 - DNA, 90 bp, Homo sapiens
actgaacatgaaatgcttacttgatacattatcatcctcatccatatcgtcatgtgcaggctgctctggcaacatcacccctgcctcaga

SEQ ID NO: 164730 - DNA, 88 bp, Homo sapiens
aaatgcttacttgatacattatcatcctcatccatatcgtcatgtgcaggctgctctggcaacatcacccctgcctcagagagggcag

SEQ ID NO: 164731 - DNA, 88 bp, Homo sapiens
atacattatcatcctcatccatatcgtcatgtgcaggctgctctggcaacatcacccctgcctcagagagggcagggggatcatcaaa

SEQ ID NO: 164732 - DNA, 88 bp, Homo sapiens
tatcatcctcatccatatcgtcatgtgcaggctgctctggcaacatcacccctgcctcagagagggcagggggatcatcaaagatacc

SEQ ID NO: 164733 - DNA, 86 bp, Homo sapiens
tatcgtcatgtgcaggctgctctggcaacatcacccctgcctcagagagggcagggggatcatcaaagataccgccatcattatta

SEQ ID NO: 164734 - DNA, 83 bp, Homo sapiens
tgcaggctgctctggcaacatcacccctgcctcagagagggcagggggatcatcaaagataccgccatcattattactaataa

SEQ ID NO: 164735 - DNA, 78 bp, Homo sapiens
tctggcaacatcacccctgcctcagagagggcagggggatcatcaaagataccgccatcattattactaataagtttg

SEQ ID NO: 164736 - DNA, 78 bp, Homo sapiens
atcacccctgcctcagagagggcagggggatcatcaaagataccgccatcattattactaataagtttgtcatctgaa

SEQ ID NO: 164737 - DNA, 77 bp, Homo sapiens
ctcagagagggcagggggatcatcaaagataccgccatcattattactaataagtttgtcatctgaaatagggaatg

SEQ ID NO: 164738 - DNA, 75 bp, Homo sapiens
ggcagggggatcatcaaagataccgccatcattattactaataagtttgtcatctgaaatagggaatgtaagtta

SEQ ID NO: 164739 - DNA, 75 bp, Homo sapiens
gggatcatcaaagataccgccatcattattactaataagtttgtcatctgaaatagggaatgtaagttagttata

SEQ ID NO: 164740 - DNA, 72 bp, Homo sapiens
aagataccgccatcattattactaataagtttgtcatctgaaatagggaatgtaagttagttataatttgaa

SEQ ID NO: 164741 - DNA, 75 bp, Homo sapiens
ataaagaaattctgtttatgctggaataaccatcattcccacatacctaatattccaccatcatttccttctcca

SEQ ID NO: 164742 - DNA, 76 bp, Homo sapiens
attctgtttatgctggaataaccatcattcccacatacctaatattccaccatcatttccttctccaaaattatca

SEQ ID NO: 164743 - DNA, 76 bp, Homo sapiens
atgctggaataaccatcattcccacatacctaatattccaccatcatttccttctccaaaattatcatccttatat

SEQ ID NO: 164744 - DNA, 78 bp, Homo sapiens
ccatcattcccacatacctaatattccaccatcatttccttctccaaaattatcatccttatattgatcttcatattc

SEQ ID NO: 164745 - DNA, 77 bp, Homo sapiens
tcccacatacctaatattccaccatcatttccttctccaaaattatcatccttatattgatcttcatattctaaatg

SEQ ID NO: 164746 - DNA, 74 bp, Homo sapiens
cctaatattccaccatcatttccttctccaaaattatcatccttatattgatcttcatattctaaatggttaat

SEQ ID NO: 164747 - DNA, 77 bp, Homo sapiens
caccatcatttccttctccaaaattatcatccttatattgatcttcatattctaaatggttaattttctcattcaga

SEQ ID NO: 164748 - DNA, 80 bp, Homo sapiens
ctccaaaattatcatccttatattgatcttcatattctaaatggttaattttctcattcagattgctggtgctctgttca

SEQ ID NO: 164749 - DNA, 81 bp, Homo sapiens
atcatccttatattgatcttcatattctaaatggttaattttctcattcagattgctggtgctctgttcagactctaatag

SEQ ID NO: 164750 - DNA, 80 bp, Homo sapiens
tattgatcttcatattctaaatggttaattttctcattcagattgctggtgctctgttcagactctaataggaggttaga

SEQ ID NO: 164751 - DNA, 78 bp, Homo sapiens
tcatattctaaatggttaattttctcattcagattgctggtgctctgttcagactctaataggaggttagaagtagta

SEQ ID NO: 164752 - DNA, 77 bp, Homo sapiens
atggttaattttctcattcagattgctggtgctctgttcagactctaataggaggttagaagtagtagtgcttacta

SEQ ID NO: 164753 - DNA, 78 bp, Homo sapiens
aattttctcattcagattgctggtgctctgttcagactctaataggaggttagaagtagtagtgcttactaacatgtc

SEQ ID NO: 164754 - DNA, 78 bp, Homo sapiens
agattgctggtgctctgttcagactctaataggaggttagaagtagtagtgcttactaacatgtcgtcatcctcaaaa

SEQ ID NO: 164755 - DNA, 79 bp, Homo sapiens
tgctctgttcagactctaataggaggttagaagtagtagtgcttactaacatgtcgtcatcctcaaaagcactgccttc

SEQ ID NO: 164756 - DNA, 77 bp, Homo sapiens
agactctaataggaggttagaagtagtagtgcttactaacatgtcgtcatcctcaaaagcactgccttctctcatta

SEQ ID NO: 164757 - DNA, 79 bp, Homo sapiens
taataggaggttagaagtagtagtgcttactaacatgtcgtcatcctcaaaagcactgccttctctcattatctcacga

SEQ ID NO: 164758 - DNA, 80 bp, Homo sapiens
aagtagtagtgcttactaacatgtcgtcatcctcaaaagcactgccttctctcattatctcacgatcatccattccaaaa

SEQ ID NO: 164759 - DNA, 80 bp, Homo sapiens
cttactaacatgtcgtcatcctcaaaagcactgccttctctcattatctcacgatcatccattccaaaatcacctaaaca

SEQ ID NO: 164760 - DNA, 78 bp, Homo sapiens
atgtcgtcatcctcaaaagcactgccttctctcattatctcacgatcatccattccaaaatcacctaaacaaatttta

SEQ ID NO: 164761 - DNA, 75 bp, Homo sapiens
atcctcaaaagcactgccttctctcattatctcacgatcatccattccaaaatcacctaaacaaattttaatttg

SEQ ID NO: 164762 - DNA, 75 bp, Homo sapiens
aagcactgccttctctcattatctcacgatcatccattccaaaatcacctaaacaaattttaatttgtcattagt

SEQ ID NO: 164763 - DNA, 70 bp, Homo sapiens
caacacaatataacattataattaatggctaataatttgtttctcttttaccaaaatcattttcttgtaa

SEQ ID NO: 164764 - DNA, 70 bp, Homo sapiens
cattataattaatggctaataatttgtttctcttttaccaaaatcattttcttgtaaaatactgatgttc

SEQ ID NO: 164765 - DNA, 69 bp, Homo sapiens
tggctaataatttgtttctcttttaccaaaatcattttcttgtaaaatactgatgttcccaacttcttc

SEQ ID NO: 164766 - DNA, 70 bp, Homo sapiens
tttgtttctcttttaccaaaatcattttcttgtaaaatactgatgttcccaacttcttctctcatggtta

SEQ ID NO: 164767 - DNA, 71 bp, Homo sapiens
cttttaccaaaatcattttcttgtaaaatactgatgttcccaacttcttctctcatggttatctcttccac

SEQ ID NO: 164768 - DNA, 76 bp, Homo sapiens
aatcattttcttgtaaaatactgatgttcccaacttcttctctcatggttatctcttccactctactctgattcaa

SEQ ID NO: 164769 - DNA, 79 bp, Homo sapiens
ttcttgtaaaatactgatgttcccaacttcttctctcatggttatctcttccactctactctgattcaagctgaactgc

SEQ ID NO: 164770 - DNA, 81 bp, Homo sapiens
aatactgatgttcccaacttcttctctcatggttatctcttccactctactctgattcaagctgaactgctgggccacatc

SEQ ID NO: 164771 - DNA, 80 bp, Homo sapiens
aacttcttctctcatggttatctcttccactctactctgattcaagctgaactgctgggccacatcgatgtcactttaaa

SEQ ID NO: 164772 - DNA, 80 bp, Homo sapiens
cttctctcatggttatctcttccactctactctgattcaagctgaactgctgggccacatcgatgtcactttaaaagaag

SEQ ID NO: 164773 - DNA, 79 bp, Homo sapiens
ttatctcttccactctactctgattcaagctgaactgctgggccacatcgatgtcactttaaaagaaggtcaaatacat

SEQ ID NO: 164774 - DNA, 75 bp, Homo sapiens
actctactctgattcaagctgaactgctgggccacatcgatgtcactttaaaagaaggtcaaatacattttagtt

SEQ ID NO: 164775 - DNA, 74 bp, Homo sapiens
caattttttttaaaagaagacacatactctaagtcaggcagtggctgatcaaagtcatgaaattcttcaggtaa

SEQ ID NO: 164776 - DNA, 79 bp, Homo sapiens
taaaagaagacacatactctaagtcaggcagtggctgatcaaagtcatgaaattcttcaggtaaagtaatggcattata

SEQ ID NO: 164777 - DNA, 80 bp, Homo sapiens
aagacacatactctaagtcaggcagtggctgatcaaagtcatgaaattcttcaggtaaagtaatggcattataagctgct

SEQ ID NO: 164778 - DNA, 78 bp, Homo sapiens
taagtcaggcagtggctgatcaaagtcatgaaattcttcaggtaaagtaatggcattataagctgcttcccgattttc

SEQ ID NO: 164779 - DNA, 77 bp, Homo sapiens
agtggctgatcaaagtcatgaaattcttcaggtaaagtaatggcattataagctgcttcccgattttcctcaggcag

SEQ ID NO: 164780 - DNA, 74 bp, Homo sapiens
aaagtcatgaaattcttcaggtaaagtaatggcattataagctgcttcccgattttcctcaggcaggtcaacca

SEQ ID NO: 164781 - DNA, 73 bp, Homo sapiens
attcttcaggtaaagtaatggcattataagctgcttcccgattttcctcaggcaggtcaaccacacctagaaa

SEQ ID NO: 164782 - DNA, 74 bp, Homo sapiens
taaagtaatggcattataagctgcttcccgattttcctcaggcaggtcaaccacacctagaaaagaaatgctaa

SEQ ID NO: 164783 - DNA, 75 bp, Homo sapiens
taatggcattataagctgcttcccgattttcctcaggcaggtcaaccacacctagaaaagaaatgctaagcttaa

SEQ ID NO: 164784 - DNA, 75 bp, Homo sapiens
taagctgcttcccgattttcctcaggcaggtcaaccacacctagaaaagaaatgctaagcttaaatatctagcta

SEQ ID NO: 164785 - DNA, 69 bp, Homo sapiens
aacaacaaaaaccaaacaagtttaacaatacctggccgaaaagccatctttatcttaatgaatgcttca

SEQ ID NO: 164786 - DNA, 70 bp, Homo sapiens
caaaaaccaaacaagtttaacaatacctggccgaaaagccatctttatcttaatgaatgcttcattacag

SEQ ID NO: 164787 - DNA, 73 bp, Homo sapiens
aagtttaacaatacctggccgaaaagccatctttatcttaatgaatgcttcattacagtctgcaagaaggtat

SEQ ID NO: 164788 - DNA, 74 bp, Homo sapiens
aatacctggccgaaaagccatctttatcttaatgaatgcttcattacagtctgcaagaaggtatttggctttcc

SEQ ID NO: 164789 - DNA, 77 bp, Homo sapiens
aaaagccatctttatcttaatgaatgcttcattacagtctgcaagaaggtatttggctttcctgtgatagattcgaa

SEQ ID NO: 164790 - DNA, 78 bp, Homo sapiens
tatcttaatgaatgcttcattacagtctgcaagaaggtatttggctttcctgtgatagattcgaactactcccagtaa

SEQ ID NO: 164791 - DNA, 79 bp, Homo sapiens
taatgaatgcttcattacagtctgcaagaaggtatttggctttcctgtgatagattcgaactactcccagtaagagatg

SEQ ID NO: 164792 - DNA, 79 bp, Homo sapiens
ttcattacagtctgcaagaaggtatttggctttcctgtgatagattcgaactactcccagtaagagatgtcctgatgtc

SEQ ID NO: 164793 - DNA, 75 bp, Homo sapiens
aagaaggtatttggctttcctgtgatagattcgaactactcccagtaagagatgtcctgatgtccgtaatgccat

SEQ ID NO: 164794 - DNA, 77 bp, Homo sapiens
tatttggctttcctgtgatagattcgaactactcccagtaagagatgtcctgatgtccgtaatgccattttcaccta

SEQ ID NO: 164795 - DNA, 77 bp, Homo sapiens
ttcctgtgatagattcgaactactcccagtaagagatgtcctgatgtccgtaatgccattttcacctatgaataaaa

SEQ ID NO: 164796 - DNA, 77 bp, Homo sapiens
tagattcgaactactcccagtaagagatgtcctgatgtccgtaatgccattttcacctatgaataaaacattaatca

SEQ ID NO: 164797 - DNA, 76 bp, Homo sapiens
tactcccagtaagagatgtcctgatgtccgtaatgccattttcacctatgaataaaacattaatcatattccaaaa

SEQ ID NO: 164798 - DNA, 78 bp, Homo sapiens
acaatcaacaaagtgaataaaaatgtcaacatcaaacatacctttggtgagatgatactctccacgctgctctctaaa

SEQ ID NO: 164799 - DNA, 78 bp, Homo sapiens
aagtgaataaaaatgtcaacatcaaacatacctttggtgagatgatactctccacgctgctctctaaattacactcga

SEQ ID NO: 164800 - DNA, 78 bp, Homo sapiens
aaaaatgtcaacatcaaacatacctttggtgagatgatactctccacgctgctctctaaattacactcgaacacatgg

SEQ ID NO: 164801 - DNA, 78 bp, Homo sapiens
acatcaaacatacctttggtgagatgatactctccacgctgctctctaaattacactcgaacacatgggctttggtta

SEQ ID NO: 164802 - DNA, 77 bp, Homo sapiens
atacctttggtgagatgatactctccacgctgctctctaaattacactcgaacacatgggctttggttagcttctta

SEQ ID NO: 164803 - DNA, 77 bp, Homo sapiens
agatgatactctccacgctgctctctaaattacactcgaacacatgggctttggttagcttcttatcccaatgggcc

SEQ ID NO: 164804 - DNA, 76 bp, Homo sapiens
tccacgctgctctctaaattacactcgaacacatgggctttggttagcttcttatcccaatgggccgctagccaaa

SEQ ID NO: 164805 - DNA, 72 bp, Homo sapiens
ctctctaaattacactcgaacacatgggctttggttagcttcttatcccaatgggccgctagccaaattttg

SEQ ID NO: 164806 - DNA, 72 bp, Homo sapiens
aaattacactcgaacacatgggctttggttagcttcttatcccaatgggccgctagccaaattttggccaga

SEQ ID NO: 164807 - DNA, 70 bp, Homo sapiens
acatgggctttggttagcttcttatcccaatgggccgctagccaaattttggccagaggccctcttttac

SEQ ID NO: 164808 - DNA, 71 bp, Homo sapiens
tttggttagcttcttatcccaatgggccgctagccaaattttggccagaggccctcttttactgagaacaa

SEQ ID NO: 164809 - DNA, 73 bp, Homo sapiens
tcttatcccaatgggccgctagccaaattttggccagaggccctcttttactgagaacaaaatgtgcgtagaa

SEQ ID NO: 164810 - DNA, 73 bp, Homo sapiens
atgggccgctagccaaattttggccagaggccctcttttactgagaacaaaatgtgcgtagaacattgttctg

SEQ ID NO: 164811 - DNA, 76 bp, Homo sapiens
tagccaaattttggccagaggccctcttttactgagaacaaaatgtgcgtagaacattgttctggctggctatgaa

SEQ ID NO: 164812 - DNA, 75 bp, Homo sapiens
attttggccagaggccctcttttactgagaacaaaatgtgcgtagaacattgttctggctggctatgaaaacaga

SEQ ID NO: 164813 - DNA, 72 bp, Homo sapiens
ccctcttttactgagaacaaaatgtgcgtagaacattgttctggctggctatgaaaacagaagaaaacctaa

SEQ ID NO: 164814 - DNA, 72 bp, Homo sapiens
tgagaacaaaatgtgcgtagaacattgttctggctggctatgaaaacagaagaaaacctaagaggggaaaaa

SEQ ID NO: 164815 - DNA, 69 bp, Homo sapiens
acaaaatgtgcgtagaacattgttctggctggctatgaaaacagaagaaaacctaagaggggaaaaaaa

SEQ ID NO: 164816 - DNA, 67 bp, Homo sapiens
cgtagaacattgttctggctggctatgaaaacagaagaaaacctaagaggggaaaaaaaagttaatg

SEQ ID NO: 164817 - DNA, 68 bp, Homo sapiens
gggggagggagctggaggaaaagaaggggtcggccgagtctcttaccttgctctccgctgggagttgg

SEQ ID NO: 164818 - DNA, 69 bp, Homo sapiens
agctggaggaaaagaaggggtcggccgagtctcttaccttgctctccgctgggagttgggcgggctggg

SEQ ID NO: 164819 - DNA, 68 bp, Homo sapiens
aggaaaagaaggggtcggccgagtctcttaccttgctctccgctgggagttgggcgggctgggtggcc

SEQ ID NO: 164820 - DNA, 68 bp, Homo sapiens
tcggccgagtctcttaccttgctctccgctgggagttgggcgggctgggtggcccggggaggggaaaa

SEQ ID NO: 164821 - DNA, 66 bp, Homo sapiens
agtctcttaccttgctctccgctgggagttgggcgggctgggtggcccggggaggggaaaagggtc

SEQ ID NO: 164822 - DNA, 64 bp, Homo sapiens
ccttgctctccgctgggagttgggcgggctgggtggcccggggaggggaaaagggtcgggggag

SEQ ID NO: 164823 - DNA, 60 bp, Homo sapiens
ctgggagttgggcgggctgggtggcccggggaggggaaaagggtcgggggagggggtggg

SEQ ID NO: 164824 - DNA, 59 bp, Homo sapiens
tgggcgggctgggtggcccggggaggggaaaagggtcgggggagggggtggggaaaggg

SEQ ID NO: 164825 - DNA, 61 bp, Homo sapiens
gggaggggaaaagggtcgggggagggggtggggaaaggggggagcccttgcgaggtgtagc

SEQ ID NO: 164826 - DNA, 64 bp, Homo sapiens
aaaagggtcgggggagggggtggggaaaggggggagcccttgcgaggtgtagcttccgagcagc

SEQ ID NO: 164827 - DNA, 70 bp, Homo sapiens
ggagggggtggggaaaggggggagcccttgcgaggtgtagcttccgagcagctcccgccgccgccacagc

SEQ ID NO: 164828 - DNA, 71 bp, Homo sapiens
gggaaaggggggagcccttgcgaggtgtagcttccgagcagctcccgccgccgccacagccggcgcctcct

SEQ ID NO: 164829 - DNA, 76 bp, Homo sapiens
ggagcccttgcgaggtgtagcttccgagcagctcccgccgccgccacagccggcgcctcctttccgattcactcaa

SEQ ID NO: 164830 - DNA, 75 bp, Homo sapiens
cttgcgaggtgtagcttccgagcagctcccgccgccgccacagccggcgcctcctttccgattcactcaaacaaa

SEQ ID NO: 164831 - DNA, 78 bp, Homo sapiens
tgtagcttccgagcagctcccgccgccgccacagccggcgcctcctttccgattcactcaaacaaacaagatggctgc

SEQ ID NO: 164832 - DNA, 73 bp, Homo sapiens
agctcccgccgccgccacagccggcgcctcctttccgattcactcaaacaaacaagatggctgccgttacgcc

SEQ ID NO: 164833 - DNA, 73 bp, Homo sapiens
ccgccacagccggcgcctcctttccgattcactcaaacaaacaagatggctgccgttacgccgcggctcttcc

SEQ ID NO: 164834 - DNA, 73 bp, Homo sapiens
cggcgcctcctttccgattcactcaaacaaacaagatggctgccgttacgccgcggctcttcctgccgcccaa

SEQ ID NO: 164835 - DNA, 72 bp, Homo sapiens
tttccgattcactcaaacaaacaagatggctgccgttacgccgcggctcttcctgccgcccaaatcctcggt

SEQ ID NO: 164836 - DNA, 73 bp, Homo sapiens
attcactcaaacaaacaagatggctgccgttacgccgcggctcttcctgccgcccaaatcctcggttcaaatc

SEQ ID NO: 164837 - DNA, 73 bp, Homo sapiens
aacaagatggctgccgttacgccgcggctcttcctgccgcccaaatcctcggttcaaatcggcaggatgttta

SEQ ID NO: 164838 - DNA, 71 bp, Homo sapiens
tgccgttacgccgcggctcttcctgccgcccaaatcctcggttcaaatcggcaggatgtttacggtcaaaa

SEQ ID NO: 164839 - DNA, 73 bp, Homo sapiens
ctcttcctgccgcccaaatcctcggttcaaatcggcaggatgtttacggtcaaaatggtacctgtgcgcctgc

SEQ ID NO: 164840 - DNA, 74 bp, Homo sapiens
cccaaatcctcggttcaaatcggcaggatgtttacggtcaaaatggtacctgtgcgcctgcgcagccagcccaa

SEQ ID NO: 164841 - DNA, 73 bp, Homo sapiens
cctcggttcaaatcggcaggatgtttacggtcaaaatggtacctgtgcgcctgcgcagccagcccaagccccc

SEQ ID NO: 164842 - DNA, 71 bp, Homo sapiens
aatcggcaggatgtttacggtcaaaatggtacctgtgcgcctgcgcagccagcccaagcccccccctcccc

SEQ ID NO: 164843 - DNA, 75 bp, Homo sapiens
aatgcgttgctgggttattttaatcattctaggcatcgttttcctccttatgcctctatcattcctccctatcta

SEQ ID NO: 164844 - DNA, 75 bp, Homo sapiens
tgggttattttaatcattctaggcatcgttttcctccttatgcctctatcattcctccctatctacactaacatc

SEQ ID NO: 164845 - DNA, 78 bp, Homo sapiens
ttaatcattctaggcatcgttttcctccttatgcctctatcattcctccctatctacactaacatcccacgctctgaa

SEQ ID NO: 164846 - DNA, 78 bp, Homo sapiens
ttctaggcatcgttttcctccttatgcctctatcattcctccctatctacactaacatcccacgctctgaacgcgcgc

SEQ ID NO: 164847 - DNA, 76 bp, Homo sapiens
ttttcctccttatgcctctatcattcctccctatctacactaacatcccacgctctgaacgcgcgcccattaatac

SEQ ID NO: 164848 - DNA, 75 bp, Homo sapiens
cttatgcctctatcattcctccctatctacactaacatcccacgctctgaacgcgcgcccattaatacccttctt

SEQ ID NO: 164849 - DNA, 74 bp, Homo sapiens
tatctacactaacatcccacgctctgaacgcgcgcccattaatacccttctttcctccactctccctgggactc

SEQ ID NO: 164850 - DNA, 74 bp, Homo sapiens
taacatcccacgctctgaacgcgcgcccattaatacccttctttcctccactctccctgggactcttgatcaaa

SEQ ID NO: 164851 - DNA, 72 bp, Homo sapiens
tctgaacgcgcgcccattaatacccttctttcctccactctccctgggactcttgatcaaagcgcggccctt

SEQ ID NO: 164852 - DNA, 70 bp, Homo sapiens
acgcgcgcccattaatacccttctttcctccactctccctgggactcttgatcaaagcgcggccctttcc

SEQ ID NO: 164853 - DNA, 69 bp, Homo sapiens
attaatacccttctttcctccactctccctgggactcttgatcaaagcgcggccctttccccagcctta

SEQ ID NO: 164854 - DNA, 74 bp, Homo sapiens
ttctttcctccactctccctgggactcttgatcaaagcgcggccctttccccagccttagcgaggcgccctgca

SEQ ID NO: 164855 - DNA, 74 bp, Homo sapiens
actctccctgggactcttgatcaaagcgcggccctttccccagccttagcgaggcgccctgcagcctggtacgc

SEQ ID NO: 164856 - DNA, 75 bp, Homo sapiens
actcttgatcaaagcgcggccctttccccagccttagcgaggcgccctgcagcctggtacgcgcgtggcgtggcg

SEQ ID NO: 164857 - DNA, 74 bp, Homo sapiens
atcaaagcgcggccctttccccagccttagcgaggcgccctgcagcctggtacgcgcgtggcgtggcggtgggc

SEQ ID NO: 164858 - DNA, 76 bp, Homo sapiens
tttccccagccttagcgaggcgccctgcagcctggtacgcgcgtggcgtggcggtgggcgcgcagtgcgttctcgg

SEQ ID NO: 164859 - DNA, 77 bp, Homo sapiens
agccttagcgaggcgccctgcagcctggtacgcgcgtggcgtggcggtgggcgcgcagtgcgttctcggtgtggagg

SEQ ID NO: 164860 - DNA, 78 bp, Homo sapiens
aggcgccctgcagcctggtacgcgcgtggcgtggcggtgggcgcgcagtgcgttctcggtgtggagggcagctgttcc

SEQ ID NO: 164861 - DNA, 78 bp, Homo sapiens
cctggtacgcgcgtggcgtggcggtgggcgcgcagtgcgttctcggtgtggagggcagctgttccgcctgcgatgatt

SEQ ID NO: 164862 - DNA, 81 bp, Homo sapiens
tacgcgcgtggcgtggcggtgggcgcgcagtgcgttctcggtgtggagggcagctgttccgcctgcgatgatttatactca

SEQ ID NO: 164863 - DNA, 80 bp, Homo sapiens
gtggcggtgggcgcgcagtgcgttctcggtgtggagggcagctgttccgcctgcgatgatttatactcacaggacaagga

SEQ ID NO: 164864 - DNA, 80 bp, Homo sapiens
cgcagtgcgttctcggtgtggagggcagctgttccgcctgcgatgatttatactcacaggacaaggatgcggtttgtcaa

SEQ ID NO: 164865 - DNA, 78 bp, Homo sapiens
gttctcggtgtggagggcagctgttccgcctgcgatgatttatactcacaggacaaggatgcggtttgtcaaacagta

SEQ ID NO: 164866 - DNA, 79 bp, Homo sapiens
gagggcagctgttccgcctgcgatgatttatactcacaggacaaggatgcggtttgtcaaacagtactgctacggagga

SEQ ID NO: 164867 - DNA, 81 bp, Homo sapiens
agctgttccgcctgcgatgatttatactcacaggacaaggatgcggtttgtcaaacagtactgctacggaggagcagcaga

SEQ ID NO: 164868 - DNA, 75 bp, Homo sapiens
atttatactcacaggacaaggatgcggtttgtcaaacagtactgctacggaggagcagcagagaaagggagaggg

SEQ ID NO: 164869 - DNA, 75 bp, Homo sapiens
acaaggatgcggtttgtcaaacagtactgctacggaggagcagcagagaaagggagagggtttgagagggagcaa

SEQ ID NO: 164870 - DNA, 72 bp, Homo sapiens
ggtttgtcaaacagtactgctacggaggagcagcagagaaagggagagggtttgagagggagcaaaagaaaa

SEQ ID NO: 164871 - DNA, 73 bp, Homo sapiens
gtcaaacagtactgctacggaggagcagcagagaaagggagagggtttgagagggagcaaaagaaaatggtag

SEQ ID NO: 164872 - DNA, 72 bp, Homo sapiens
tacggaggagcagcagagaaagggagagggtttgagagggagcaaaagaaaatggtaggcgcgcgtagttaa

SEQ ID NO: 164873 - DNA, 74 bp, Homo sapiens
aggagcagcagagaaagggagagggtttgagagggagcaaaagaaaatggtaggcgcgcgtagttaattcatgc

SEQ ID NO: 164874 - DNA, 71 bp, Homo sapiens
aaagggagagggtttgagagggagcaaaagaaaatggtaggcgcgcgtagttaattcatgcggctctctta

SEQ ID NO: 164875 - DNA, 74 bp, Homo sapiens
ctaatctccgcccaccggccctttataatgcgagggtctggacggctgaggacccccgagctgtgctgctcgcg

SEQ ID NO: 164876 - DNA, 73 bp, Homo sapiens
cccaccggccctttataatgcgagggtctggacggctgaggacccccgagctgtgctgctcgcggccgccacc

SEQ ID NO: 164877 - DNA, 73 bp, Homo sapiens
cctttataatgcgagggtctggacggctgaggacccccgagctgtgctgctcgcggccgccaccgccgggccc

SEQ ID NO: 164878 - DNA, 70 bp, Homo sapiens
agggtctggacggctgaggacccccgagctgtgctgctcgcggccgccaccgccgggccccggccgtccc

SEQ ID NO: 164879 - DNA, 71 bp, Homo sapiens
ggacggctgaggacccccgagctgtgctgctcgcggccgccaccgccgggccccggccgtccctggctccc

SEQ ID NO: 164880 - DNA, 72 bp, Homo sapiens
cccgagctgtgctgctcgcggccgccaccgccgggccccggccgtccctggctcccctcctgcctcgagaag

SEQ ID NO: 164881 - DNA, 72 bp, Homo sapiens
ctgtgctgctcgcggccgccaccgccgggccccggccgtccctggctcccctcctgcctcgagaagggcagg

SEQ ID NO: 164882 - DNA, 71 bp, Homo sapiens
tcgcggccgccaccgccgggccccggccgtccctggctcccctcctgcctcgagaagggcagggcttctca

SEQ ID NO: 164883 - DNA, 71 bp, Homo sapiens
gccgtccctggctcccctcctgcctcgagaagggcagggcttctcagaggcttggcgggaaaaagaacgga

SEQ ID NO: 164884 - DNA, 71 bp, Homo sapiens
gctcccctcctgcctcgagaagggcagggcttctcagaggcttggcgggaaaaagaacggagggagggatc

SEQ ID NO: 164885 - DNA, 74 bp, Homo sapiens
tgcctcgagaagggcagggcttctcagaggcttggcgggaaaaagaacggagggagggatcgcgctgagtataa

SEQ ID NO: 164886 - DNA, 71 bp, Homo sapiens
agaagggcagggcttctcagaggcttggcgggaaaaagaacggagggagggatcgcgctgagtataaaagc

SEQ ID NO: 164887 - DNA, 68 bp, Homo sapiens
ttctcagaggcttggcgggaaaaagaacggagggagggatcgcgctgagtataaaagccggttttcgg

SEQ ID NO: 164888 - DNA, 65 bp, Homo sapiens
cttggcgggaaaaagaacggagggagggatcgcgctgagtataaaagccggttttcggggcttta

SEQ ID NO: 164889 - DNA, 66 bp, Homo sapiens
aaaaagaacggagggagggatcgcgctgagtataaaagccggttttcggggctttatctaactcgc

SEQ ID NO: 164890 - DNA, 68 bp, Homo sapiens
acggagggagggatcgcgctgagtataaaagccggttttcggggctttatctaactcgctgtagtaat

SEQ ID NO: 164891 - DNA, 73 bp, Homo sapiens
gggatcgcgctgagtataaaagccggttttcggggctttatctaactcgctgtagtaattccagcgagaggca

SEQ ID NO: 164892 - DNA, 71 bp, Homo sapiens
agtataaaagccggttttcggggctttatctaactcgctgtagtaattccagcgagaggcagagggagcga

SEQ ID NO: 164893 - DNA, 73 bp, Homo sapiens
gttttcggggctttatctaactcgctgtagtaattccagcgagaggcagagggagcgagcgggcggccggcta

SEQ ID NO: 164894 - DNA, 75 bp, Homo sapiens
ggctttatctaactcgctgtagtaattccagcgagaggcagagggagcgagcgggcggccggctagggtggaaga

SEQ ID NO: 164895 - DNA, 75 bp, Homo sapiens
tctaactcgctgtagtaattccagcgagaggcagagggagcgagcgggcggccggctagggtggaagagccgggc

SEQ ID NO: 164896 - DNA, 79 bp, Homo sapiens
tgtagtaattccagcgagaggcagagggagcgagcgggcggccggctagggtggaagagccgggcgagcagagctgcgc

SEQ ID NO: 164897 - DNA, 78 bp, Homo sapiens
gagaggcagagggagcgagcgggcggccggctagggtggaagagccgggcgagcagagctgcgctgcgggcgtcctgg

SEQ ID NO: 164898 - DNA, 75 bp, Homo sapiens
agagggagcgagcgggcggccggctagggtggaagagccgggcgagcagagctgcgctgcgggcgtcctgggaag

SEQ ID NO: 164899 - DNA, 75 bp, Homo sapiens
ggctagggtggaagagccgggcgagcagagctgcgctgcgggcgtcctgggaagggagatccggagcgaataggg

SEQ ID NO: 164900 - DNA, 76 bp, Homo sapiens
cgggcgagcagagctgcgctgcgggcgtcctgggaagggagatccggagcgaatagggggcttcgcctctggccca

SEQ ID NO: 164901 - DNA, 73 bp, Homo sapiens
agctgcgctgcgggcgtcctgggaagggagatccggagcgaatagggggcttcgcctctggcccagccctccc

SEQ ID NO: 164902 - DNA, 72 bp, Homo sapiens
aagggagatccggagcgaatagggggcttcgcctctggcccagccctcccgctgatcccccagccagcggtc

SEQ ID NO: 164903 - DNA, 72 bp, Homo sapiens
atccggagcgaatagggggcttcgcctctggcccagccctcccgctgatcccccagccagcggtccgcaacc

SEQ ID NO: 164904 - DNA, 73 bp, Homo sapiens
aatagggggcttcgcctctggcccagccctcccgctgatcccccagccagcggtccgcaacccttgccgcatc

SEQ ID NO: 164905 - DNA, 73 bp, Homo sapiens
ttcgcctctggcccagccctcccgctgatcccccagccagcggtccgcaacccttgccgcatccacgaaactt

SEQ ID NO: 164906 - DNA, 74 bp, Homo sapiens
agccctcccgctgatcccccagccagcggtccgcaacccttgccgcatccacgaaactttgcccatagcagcgg

SEQ ID NO: 164907 - DNA, 74 bp, Homo sapiens
ctgatcccccagccagcggtccgcaacccttgccgcatccacgaaactttgcccatagcagcgggcgggcactt

SEQ ID NO: 164908 - DNA, 76 bp, Homo sapiens
ccagccagcggtccgcaacccttgccgcatccacgaaactttgcccatagcagcgggcgggcactttgcactggaa

SEQ ID NO: 164909 - DNA, 75 bp, Homo sapiens
gtccgcaacccttgccgcatccacgaaactttgcccatagcagcgggcgggcactttgcactggaacttacaaca

SEQ ID NO: 164910 - DNA, 76 bp, Homo sapiens
ttgccgcatccacgaaactttgcccatagcagcgggcgggcactttgcactggaacttacaacacccgagcaagga

SEQ ID NO: 164911 - DNA, 74 bp, Homo sapiens
atccacgaaactttgcccatagcagcgggcgggcactttgcactggaacttacaacacccgagcaaggacgcga

SEQ ID NO: 164912 - DNA, 74 bp, Homo sapiens
actttgcccatagcagcgggcgggcactttgcactggaacttacaacacccgagcaaggacgcgactctcccga

SEQ ID NO: 164913 - DNA, 73 bp, Homo sapiens
tagcagcgggcgggcactttgcactggaacttacaacacccgagcaaggacgcgactctcccgacgcggggag

SEQ ID NO: 164914 - DNA, 72 bp, Homo sapiens
actttgcactggaacttacaacacccgagcaaggacgcgactctcccgacgcggggaggctattctgcccat

SEQ ID NO: 164915 - DNA, 70 bp, Homo sapiens
actggaacttacaacacccgagcaaggacgcgactctcccgacgcggggaggctattctgcccatttggg

SEQ ID NO: 164916 - DNA, 71 bp, Homo sapiens
ttacaacacccgagcaaggacgcgactctcccgacgcggggaggctattctgcccatttggggacacttcc

SEQ ID NO: 164917 - DNA, 71 bp, Homo sapiens
aaggacgcgactctcccgacgcggggaggctattctgcccatttggggacacttccccgccgctgccagga

SEQ ID NO: 164918 - DNA, 71 bp, Homo sapiens
cgacgcggggaggctattctgcccatttggggacacttccccgccgctgccaggacccgcttctctgaaag

SEQ ID NO: 164919 - DNA, 75 bp, Homo sapiens
cgctgccaggacccgcttctctgaaaggctctccttgcagctgcttagacgctggatttttttcgggtagtggaa

SEQ ID NO: 164920 - DNA, 73 bp, Homo sapiens
ttctctgaaaggctctccttgcagctgcttagacgctggatttttttcgggtagtggaaaaccaggtaagcac

SEQ ID NO: 164921 - DNA, 70 bp, Homo sapiens
ctccttgcagctgcttagacgctggatttttttcgggtagtggaaaaccaggtaagcaccgaagtccact

SEQ ID NO: 164922 - DNA, 67 bp, Homo sapiens
ctgcttagacgctggatttttttcgggtagtggaaaaccaggtaagcaccgaagtccacttgccttt

SEQ ID NO: 164923 - DNA, 66 bp, Homo sapiens
tagacgctggatttttttcgggtagtggaaaaccaggtaagcaccgaagtccacttgccttttaat

SEQ ID NO: 164924 - DNA, 75 bp, Homo sapiens
ttaactcaagactgcctcccgctttgtgtgccccgctccagcagcctcccgcgacgatgcccctcaacgttagct

SEQ ID NO: 164925 - DNA, 74 bp, Homo sapiens
cctcccgctttgtgtgccccgctccagcagcctcccgcgacgatgcccctcaacgttagcttcaccaacaggaa

SEQ ID NO: 164926 - DNA, 75 bp, Homo sapiens
ctccagcagcctcccgcgacgatgcccctcaacgttagcttcaccaacaggaactatgacctcgactacgactcg

SEQ ID NO: 164927 - DNA, 75 bp, Homo sapiens
agcctcccgcgacgatgcccctcaacgttagcttcaccaacaggaactatgacctcgactacgactcggtgcagc

SEQ ID NO: 164928 - DNA, 74 bp, Homo sapiens
acgatgcccctcaacgttagcttcaccaacaggaactatgacctcgactacgactcggtgcagccgtatttcta

SEQ ID NO: 164929 - DNA, 74 bp, Homo sapiens
aacgttagcttcaccaacaggaactatgacctcgactacgactcggtgcagccgtatttctactgcgacgagga

SEQ ID NO: 164930 - DNA, 76 bp, Homo sapiens
tcaccaacaggaactatgacctcgactacgactcggtgcagccgtatttctactgcgacgaggaggagaacttcta

SEQ ID NO: 164931 - DNA, 74 bp, Homo sapiens
aacaggaactatgacctcgactacgactcggtgcagccgtatttctactgcgacgaggaggagaacttctacca

SEQ ID NO: 164932 - DNA, 83 bp, Homo sapiens
tgacctcgactacgactcggtgcagccgtatttctactgcgacgaggaggagaacttctaccagcagcagcagcagagcgagc

SEQ ID NO: 164933 - DNA, 85 bp, Homo sapiens
tgcagccgtatttctactgcgacgaggaggagaacttctaccagcagcagcagcagagcgagctgcagcccccggcgcccagcga

SEQ ID NO: 164934 - DNA, 84 bp, Homo sapiens
tttctactgcgacgaggaggagaacttctaccagcagcagcagcagagcgagctgcagcccccggcgcccagcgaggatatctg

SEQ ID NO: 164935 - DNA, 85 bp, Homo sapiens
gaggagaacttctaccagcagcagcagcagagcgagctgcagcccccggcgcccagcgaggatatctggaagaaattcgagctgc

SEQ ID NO: 164936 - DNA, 85 bp, Homo sapiens
cttctaccagcagcagcagcagagcgagctgcagcccccggcgcccagcgaggatatctggaagaaattcgagctgctgcccacc

SEQ ID NO: 164937 - DNA, 81 bp, Homo sapiens
agcagcagcagagcgagctgcagcccccggcgcccagcgaggatatctggaagaaattcgagctgctgcccaccccgcccc

SEQ ID NO: 164938 - DNA, 77 bp, Homo sapiens
agagcgagctgcagcccccggcgcccagcgaggatatctggaagaaattcgagctgctgcccaccccgcccctgtcc

SEQ ID NO: 164939 - DNA, 72 bp, Homo sapiens
ccccggcgcccagcgaggatatctggaagaaattcgagctgctgcccaccccgcccctgtcccctagccgcc

SEQ ID NO: 164940 - DNA, 76 bp, Homo sapiens
cagcgaggatatctggaagaaattcgagctgctgcccaccccgcccctgtcccctagccgccgctccgggctctgc

SEQ ID NO: 164941 - DNA, 75 bp, Homo sapiens
agcgaggatatctggaagaaattcgagctgctgcccaccccgcccctgtcccctagccgccgctccgggctctgc

SEQ ID NO: 164942 - DNA, 75 bp, Homo sapiens
aggatatctggaagaaattcgagctgctgcccaccccgcccctgtcccctagccgccgctccgggctctgctcgc

SEQ ID NO: 164943 - DNA, 74 bp, Homo sapiens
tggaagaaattcgagctgctgcccaccccgcccctgtcccctagccgccgctccgggctctgctcgccctccta

SEQ ID NO: 164944 - DNA, 72 bp, Homo sapiens
aagaaattcgagctgctgcccaccccgcccctgtcccctagccgccgctccgggctctgctcgccctcctac

SEQ ID NO: 164945 - DNA, 73 bp, Homo sapiens
aattcgagctgctgcccaccccgcccctgtcccctagccgccgctccgggctctgctcgccctcctacgttgc

SEQ ID NO: 164946 - DNA, 69 bp, Homo sapiens
ccaccccgcccctgtcccctagccgccgctccgggctctgctcgccctcctacgttgcggtcacaccct

SEQ ID NO: 164947 - DNA, 70 bp, Homo sapiens
cctgtcccctagccgccgctccgggctctgctcgccctcctacgttgcggtcacacccttctcccttcgg

SEQ ID NO: 164948 - DNA, 72 bp, Homo sapiens
tagccgccgctccgggctctgctcgccctcctacgttgcggtcacacccttctcccttcggggagacaacga

SEQ ID NO: 164949 - DNA, 70 bp, Homo sapiens
tccgggctctgctcgccctcctacgttgcggtcacacccttctcccttcggggagacaacgacggcggtg

SEQ ID NO: 164950 - DNA, 69 bp, Homo sapiens
cctcctacgttgcggtcacacccttctcccttcggggagacaacgacggcggtggcgggagcttctcca

SEQ ID NO: 164951 - DNA, 72 bp, Homo sapiens
tcacacccttctcccttcggggagacaacgacggcggtggcgggagcttctccacggccgaccagctggaga

SEQ ID NO: 164952 - DNA, 70 bp, Homo sapiens
cccttctcccttcggggagacaacgacggcggtggcgggagcttctccacggccgaccagctggagatgg

SEQ ID NO: 164953 - DNA, 76 bp, Homo sapiens
gggagacaacgacggcggtggcgggagcttctccacggccgaccagctggagatggtgaccgagctgctgggagga

SEQ ID NO: 164954 - DNA, 76 bp, Homo sapiens
aacgacggcggtggcgggagcttctccacggccgaccagctggagatggtgaccgagctgctgggaggagacatgg

SEQ ID NO: 164955 - DNA, 79 bp, Homo sapiens
cgggagcttctccacggccgaccagctggagatggtgaccgagctgctgggaggagacatggtgaaccagagtttcatc

SEQ ID NO: 164956 - DNA, 79 bp, Homo sapiens
accagctggagatggtgaccgagctgctgggaggagacatggtgaaccagagtttcatctgcgacccggacgacgagac

SEQ ID NO: 164957 - DNA, 79 bp, Homo sapiens
agatggtgaccgagctgctgggaggagacatggtgaaccagagtttcatctgcgacccggacgacgagaccttcatcaa

SEQ ID NO: 164958 - DNA, 76 bp, Homo sapiens
accgagctgctgggaggagacatggtgaaccagagtttcatctgcgacccggacgacgagaccttcatcaaaaaca

SEQ ID NO: 164959 - DNA, 79 bp, Homo sapiens
gaggagacatggtgaaccagagtttcatctgcgacccggacgacgagaccttcatcaaaaacatcatcatccaggactg

SEQ ID NO: 164960 - DNA, 79 bp, Homo sapiens
atggtgaaccagagtttcatctgcgacccggacgacgagaccttcatcaaaaacatcatcatccaggactgtatgtgga

SEQ ID NO: 164961 - DNA, 79 bp, Homo sapiens
agagtttcatctgcgacccggacgacgagaccttcatcaaaaacatcatcatccaggactgtatgtggagcggcttctc

SEQ ID NO: 164962 - DNA, 78 bp, Homo sapiens
atctgcgacccggacgacgagaccttcatcaaaaacatcatcatccaggactgtatgtggagcggcttctcggccgcc

SEQ ID NO: 164963 - DNA, 80 bp, Homo sapiens
acgacgagaccttcatcaaaaacatcatcatccaggactgtatgtggagcggcttctcggccgccgccaagctcgtctca

SEQ ID NO: 164964 - DNA, 81 bp, Homo sapiens
agaccttcatcaaaaacatcatcatccaggactgtatgtggagcggcttctcggccgccgccaagctcgtctcagagaagc

SEQ ID NO: 164965 - DNA, 82 bp, Homo sapiens
atcatccaggactgtatgtggagcggcttctcggccgccgccaagctcgtctcagagaagctggcctcctaccaggctgcgc

SEQ ID NO: 164966 - DNA, 81 bp, Homo sapiens
actgtatgtggagcggcttctcggccgccgccaagctcgtctcagagaagctggcctcctaccaggctgcgcgcaaagaca

SEQ ID NO: 164967 - DNA, 80 bp, Homo sapiens
gcttctcggccgccgccaagctcgtctcagagaagctggcctcctaccaggctgcgcgcaaagacagcggcagcccgaac

SEQ ID NO: 164968 - DNA, 78 bp, Homo sapiens
tcggccgccgccaagctcgtctcagagaagctggcctcctaccaggctgcgcgcaaagacagcggcagcccgaacccc

SEQ ID NO: 164969 - DNA, 77 bp, Homo sapiens
aagctcgtctcagagaagctggcctcctaccaggctgcgcgcaaagacagcggcagcccgaaccccgcccgcggcca

SEQ ID NO: 164970 - DNA, 78 bp, Homo sapiens
agaagctggcctcctaccaggctgcgcgcaaagacagcggcagcccgaaccccgcccgcggccacagcgtctgctcca

SEQ ID NO: 164971 - DNA, 77 bp, Homo sapiens
ctggcctcctaccaggctgcgcgcaaagacagcggcagcccgaaccccgcccgcggccacagcgtctgctccacctc

SEQ ID NO: 164972 - DNA, 79 bp, Homo sapiens
aggctgcgcgcaaagacagcggcagcccgaaccccgcccgcggccacagcgtctgctccacctccagcttgtacctgca

SEQ ID NO: 164973 - DNA, 79 bp, Homo sapiens
cagcccgaaccccgcccgcggccacagcgtctgctccacctccagcttgtacctgcaggatctgagcgccgccgcctca

SEQ ID NO: 164974 - DNA, 82 bp, Homo sapiens
cccgcccgcggccacagcgtctgctccacctccagcttgtacctgcaggatctgagcgccgccgcctcagagtgcatcgacc

SEQ ID NO: 164975 - DNA, 81 bp, Homo sapiens
agcgtctgctccacctccagcttgtacctgcaggatctgagcgccgccgcctcagagtgcatcgacccctcggtggtcttc

SEQ ID NO: 164976 - DNA, 76 bp, Homo sapiens
acctccagcttgtacctgcaggatctgagcgccgccgcctcagagtgcatcgacccctcggtggtcttcccctacc

SEQ ID NO: 164977 - DNA, 77 bp, Homo sapiens
ttgtacctgcaggatctgagcgccgccgcctcagagtgcatcgacccctcggtggtcttcccctaccctctcaacga

SEQ ID NO: 164978 - DNA, 78 bp, Homo sapiens
atctgagcgccgccgcctcagagtgcatcgacccctcggtggtcttcccctaccctctcaacgacagcagctcgccca

SEQ ID NO: 164979 - DNA, 74 bp, Homo sapiens
ccgccgcctcagagtgcatcgacccctcggtggtcttcccctaccctctcaacgacagcagctcgcccaagtcc

SEQ ID NO: 164980 - DNA, 76 bp, Homo sapiens
agagtgcatcgacccctcggtggtcttcccctaccctctcaacgacagcagctcgcccaagtcctgcgcctcgcaa

SEQ ID NO: 164981 - DNA, 74 bp, Homo sapiens
atcgacccctcggtggtcttcccctaccctctcaacgacagcagctcgcccaagtcctgcgcctcgcaagactc

SEQ ID NO: 164982 - DNA, 77 bp, Homo sapiens
gtcttcccctaccctctcaacgacagcagctcgcccaagtcctgcgcctcgcaagactccagcgccttctctccgtc

SEQ ID NO: 164983 - DNA, 81 bp, Homo sapiens
ctcaacgacagcagctcgcccaagtcctgcgcctcgcaagactccagcgccttctctccgtcctcggattctctgctctcc

SEQ ID NO: 164984 - DNA, 78 bp, Homo sapiens
tcgcccaagtcctgcgcctcgcaagactccagcgccttctctccgtcctcggattctctgctctcctcgacggagtcc

SEQ ID NO: 164985 - DNA, 76 bp, Homo sapiens
aagtcctgcgcctcgcaagactccagcgccttctctccgtcctcggattctctgctctcctcgacggagtcctccc

SEQ ID NO: 164986 - DNA, 77 bp, Homo sapiens
cctcgcaagactccagcgccttctctccgtcctcggattctctgctctcctcgacggagtcctccccgcagggcagc

SEQ ID NO: 164987 - DNA, 75 bp, Homo sapiens
actccagcgccttctctccgtcctcggattctctgctctcctcgacggagtcctccccgcagggcagccccgagc

SEQ ID NO: 164988 - DNA, 75 bp, Homo sapiens
ttctctccgtcctcggattctctgctctcctcgacggagtcctccccgcagggcagccccgagcccctggtgctc

SEQ ID NO: 164989 - DNA, 78 bp, Homo sapiens
tcctcggattctctgctctcctcgacggagtcctccccgcagggcagccccgagcccctggtgctccatgaggagaca

SEQ ID NO: 164990 - DNA, 77 bp, Homo sapiens
tctgctctcctcgacggagtcctccccgcagggcagccccgagcccctggtgctccatgaggagacaccgcccacca

SEQ ID NO: 164991 - DNA, 77 bp, Homo sapiens
tcgacggagtcctccccgcagggcagccccgagcccctggtgctccatgaggagacaccgcccaccaccagcagcga

SEQ ID NO: 164992 - DNA, 77 bp, Homo sapiens
cccgcagggcagccccgagcccctggtgctccatgaggagacaccgcccaccaccagcagcgactctggtaagcgaa

SEQ ID NO: 164993 - DNA, 76 bp, Homo sapiens
agccccgagcccctggtgctccatgaggagacaccgcccaccaccagcagcgactctggtaagcgaagcccgccca

SEQ ID NO: 164994 - DNA, 76 bp, Homo sapiens
tccatgaggagacaccgcccaccaccagcagcgactctggtaagcgaagcccgcccaggcctgtcaaaagtgggcg

SEQ ID NO: 164995 - DNA, 71 bp, Homo sapiens
taatgtaaccttgctaaaggagtgatttctatttcctttcttaaagaggaggaacaagaagatgaggaaga

SEQ ID NO: 164996 - DNA, 70 bp, Homo sapiens
taaccttgctaaaggagtgatttctatttcctttcttaaagaggaggaacaagaagatgaggaagaaatc

SEQ ID NO: 164997 - DNA, 70 bp, Homo sapiens
aaggagtgatttctatttcctttcttaaagaggaggaacaagaagatgaggaagaaatcgatgttgtttc

SEQ ID NO: 164998 - DNA, 71 bp, Homo sapiens
ttctatttcctttcttaaagaggaggaacaagaagatgaggaagaaatcgatgttgtttctgtggaaaaga

SEQ ID NO: 164999 - DNA, 73 bp, Homo sapiens
tttcttaaagaggaggaacaagaagatgaggaagaaatcgatgttgtttctgtggaaaagaggcaggctcctg

SEQ ID NO: 165000 - DNA, 77 bp, Homo sapiens
gatgaggaagaaatcgatgttgtttctgtggaaaagaggcaggctcctggcaaaaggtcagagtctggatcaccttc

SEQ ID NO: 165001 - DNA, 77 bp, Homo sapiens
aagaaatcgatgttgtttctgtggaaaagaggcaggctcctggcaaaaggtcagagtctggatcaccttctgctgga

SEQ ID NO: 165002 - DNA, 79 bp, Homo sapiens
atgttgtttctgtggaaaagaggcaggctcctggcaaaaggtcagagtctggatcaccttctgctggaggccacagcaa

SEQ ID NO: 165003 - DNA, 80 bp, Homo sapiens
tgtggaaaagaggcaggctcctggcaaaaggtcagagtctggatcaccttctgctggaggccacagcaaacctcctcaca

SEQ ID NO: 165004 - DNA, 78 bp, Homo sapiens
aggctcctggcaaaaggtcagagtctggatcaccttctgctggaggccacagcaaacctcctcacagcccactggtcc

SEQ ID NO: 165005 - DNA, 79 bp, Homo sapiens
caaaaggtcagagtctggatcaccttctgctggaggccacagcaaacctcctcacagcccactggtcctcaagaggtgc

SEQ ID NO: 165006 - DNA, 80 bp, Homo sapiens
agagtctggatcaccttctgctggaggccacagcaaacctcctcacagcccactggtcctcaagaggtgccacgtctcca

SEQ ID NO: 165007 - DNA, 83 bp, Homo sapiens
tcaccttctgctggaggccacagcaaacctcctcacagcccactggtcctcaagaggtgccacgtctccacacatcagcacaa

SEQ ID NO: 165008 - DNA, 82 bp, Homo sapiens
ctggaggccacagcaaacctcctcacagcccactggtcctcaagaggtgccacgtctccacacatcagcacaactacgcagc

SEQ ID NO: 165009 - DNA, 80 bp, Homo sapiens
agcaaacctcctcacagcccactggtcctcaagaggtgccacgtctccacacatcagcacaactacgcagcgcctccctc

SEQ ID NO: 165010 - DNA, 80 bp, Homo sapiens
ctcacagcccactggtcctcaagaggtgccacgtctccacacatcagcacaactacgcagcgcctccctccactcggaag

SEQ ID NO: 165011 - DNA, 78 bp, Homo sapiens
actggtcctcaagaggtgccacgtctccacacatcagcacaactacgcagcgcctccctccactcggaaggactatcc

SEQ ID NO: 165012 - DNA, 82 bp, Homo sapiens
tcctcaagaggtgccacgtctccacacatcagcacaactacgcagcgcctccctccactcggaaggactatcctgctgccaa

SEQ ID NO: 165013 - DNA, 78 bp, Homo sapiens
acgtctccacacatcagcacaactacgcagcgcctccctccactcggaaggactatcctgctgccaagagggtcaagt

SEQ ID NO: 165014 - DNA, 80 bp, Homo sapiens
acatcagcacaactacgcagcgcctccctccactcggaaggactatcctgctgccaagagggtcaagttggacagtgtca

SEQ ID NO: 165015 - DNA, 80 bp, Homo sapiens
agcgcctccctccactcggaaggactatcctgctgccaagagggtcaagttggacagtgtcagagtcctgagacagatca

SEQ ID NO: 165016 - DNA, 80 bp, Homo sapiens
cactcggaaggactatcctgctgccaagagggtcaagttggacagtgtcagagtcctgagacagatcagcaacaaccgaa

SEQ ID NO: 165017 - DNA, 80 bp, Homo sapiens
aaggactatcctgctgccaagagggtcaagttggacagtgtcagagtcctgagacagatcagcaacaaccgaaaatgcac

SEQ ID NO: 165018 - DNA, 81 bp, Homo sapiens
tcctgctgccaagagggtcaagttggacagtgtcagagtcctgagacagatcagcaacaaccgaaaatgcaccagccccag

SEQ ID NO: 165019 - DNA, 77 bp, Homo sapiens
aagagggtcaagttggacagtgtcagagtcctgagacagatcagcaacaaccgaaaatgcaccagccccaggtcctc

SEQ ID NO: 165020 - DNA, 79 bp, Homo sapiens
gacagtgtcagagtcctgagacagatcagcaacaaccgaaaatgcaccagccccaggtcctcggacaccgaggagaatg

SEQ ID NO: 165021 - DNA, 77 bp, Homo sapiens
agagtcctgagacagatcagcaacaaccgaaaatgcaccagccccaggtcctcggacaccgaggagaatgtcaagag

SEQ ID NO: 165022 - DNA, 77 bp, Homo sapiens
acagatcagcaacaaccgaaaatgcaccagccccaggtcctcggacaccgaggagaatgtcaagaggcgaacacaca

SEQ ID NO: 165023 - DNA, 72 bp, Homo sapiens
aacaaccgaaaatgcaccagccccaggtcctcggacaccgaggagaatgtcaagaggcgaacacacaacgtc

SEQ ID NO: 165024 - DNA, 74 bp, Homo sapiens
agccccaggtcctcggacaccgaggagaatgtcaagaggcgaacacacaacgtcttggagcgccagaggaggaa

SEQ ID NO: 165025 - DNA, 75 bp, Homo sapiens
tcctcggacaccgaggagaatgtcaagaggcgaacacacaacgtcttggagcgccagaggaggaacgagctaaaa

SEQ ID NO: 165026 - DNA, 72 bp, Homo sapiens
aggagaatgtcaagaggcgaacacacaacgtcttggagcgccagaggaggaacgagctaaaacggagctttt

SEQ ID NO: 165027 - DNA, 72 bp, Homo sapiens
aatgtcaagaggcgaacacacaacgtcttggagcgccagaggaggaacgagctaaaacggagcttttttgcc

SEQ ID NO: 165028 - DNA, 71 bp, Homo sapiens
aacgtcttggagcgccagaggaggaacgagctaaaacggagcttttttgccctgcgtgaccagatcccgga

SEQ ID NO: 165029 - DNA, 69 bp, Homo sapiens
ccagaggaggaacgagctaaaacggagcttttttgccctgcgtgaccagatcccggagttggaaaacaa

SEQ ID NO: 165030 - DNA, 68 bp, Homo sapiens
aggaacgagctaaaacggagcttttttgccctgcgtgaccagatcccggagttggaaaacaatgaaaa

SEQ ID NO: 165031 - DNA, 67 bp, Homo sapiens
taaaacggagcttttttgccctgcgtgaccagatcccggagttggaaaacaatgaaaaggcccccaa

SEQ ID NO: 165032 - DNA, 68 bp, Homo sapiens
ttttgccctgcgtgaccagatcccggagttggaaaacaatgaaaaggcccccaaggtagttatcctta

SEQ ID NO: 165033 - DNA, 66 bp, Homo sapiens
ccctgcgtgaccagatcccggagttggaaaacaatgaaaaggcccccaaggtagttatccttaaaa

SEQ ID NO: 165034 - DNA, 67 bp, Homo sapiens
agatcccggagttggaaaacaatgaaaaggcccccaaggtagttatccttaaaaaagccacagcata

SEQ ID NO: 165035 - DNA, 68 bp, Homo sapiens
agttggaaaacaatgaaaaggcccccaaggtagttatccttaaaaaagccacagcatacatcctgtcc

SEQ ID NO: 165036 - DNA, 76 bp, Homo sapiens
ccaaggtagttatccttaaaaaagccacagcatacatcctgtccgtccaagcagaggagcaaaagctcatttctga

SEQ ID NO: 165037 - DNA, 77 bp, Homo sapiens
tatccttaaaaaagccacagcatacatcctgtccgtccaagcagaggagcaaaagctcatttctgaagaggacttgt

SEQ ID NO: 165038 - DNA, 78 bp, Homo sapiens
agcatacatcctgtccgtccaagcagaggagcaaaagctcatttctgaagaggacttgttgcggaaacgacgagaaca

SEQ ID NO: 165039 - DNA, 76 bp, Homo sapiens
tgtccgtccaagcagaggagcaaaagctcatttctgaagaggacttgttgcggaaacgacgagaacagttgaaaca

SEQ ID NO: 165040 - DNA, 71 bp, Homo sapiens
aggacttgttgcggaaacgacgagaacagttgaaacacaaacttgaacagctacggaactcttgtgcgtaa

SEQ ID NO: 165041 - DNA, 69 bp, Homo sapiens
ggaaacgacgagaacagttgaaacacaaacttgaacagctacggaactcttgtgcgtaaggaaaagtaa

SEQ ID NO: 165042 - DNA, 68 bp, Homo sapiens
acgagaacagttgaaacacaaacttgaacagctacggaactcttgtgcgtaaggaaaagtaaggaaaa

SEQ ID NO: 165043 - DNA, 67 bp, Homo sapiens
aaacacaaacttgaacagctacggaactcttgtgcgtaaggaaaagtaaggaaaacgattccttcta

SEQ ID NO: 165044 - DNA, 67 bp, Homo sapiens
aaacttgaacagctacggaactcttgtgcgtaaggaaaagtaaggaaaacgattccttctaacagaa

SEQ ID NO: 165045 - DNA, 71 bp, Homo sapiens
ctacggaactcttgtgcgtaaggaaaagtaaggaaaacgattccttctaacagaaatgtcctgagcaatca

SEQ ID NO: 165046 - DNA, 72 bp, Homo sapiens
actcttgtgcgtaaggaaaagtaaggaaaacgattccttctaacagaaatgtcctgagcaatcacctatgaa

SEQ ID NO: 165047 - DNA, 70 bp, Homo sapiens
aggaaaagtaaggaaaacgattccttctaacagaaatgtcctgagcaatcacctatgaacttgtttcaaa

SEQ ID NO: 165048 - DNA, 79 bp, Homo sapiens
taaggaaaacgattccttctaacagaaatgtcctgagcaatcacctatgaacttgtttcaaatgcatgatcaaatgcaa

SEQ ID NO: 165049 - DNA, 79 bp, Homo sapiens
attccttctaacagaaatgtcctgagcaatcacctatgaacttgtttcaaatgcatgatcaaatgcaacctcacaacct

SEQ ID NO: 165050 - DNA, 82 bp, Homo sapiens
taacagaaatgtcctgagcaatcacctatgaacttgtttcaaatgcatgatcaaatgcaacctcacaaccttggctgagtct

SEQ ID NO: 165051 - DNA, 83 bp, Homo sapiens
tgagcaatcacctatgaacttgtttcaaatgcatgatcaaatgcaacctcacaaccttggctgagtcttgagactgaaagatt

SEQ ID NO: 165052 - DNA, 81 bp, Homo sapiens
ctatgaacttgtttcaaatgcatgatcaaatgcaacctcacaaccttggctgagtcttgagactgaaagatttagccataa

SEQ ID NO: 165053 - DNA, 80 bp, Homo sapiens
ttgtttcaaatgcatgatcaaatgcaacctcacaaccttggctgagtcttgagactgaaagatttagccataatgtaaac

SEQ ID NO: 165054 - DNA, 81 bp, Homo sapiens
aatgcatgatcaaatgcaacctcacaaccttggctgagtcttgagactgaaagatttagccataatgtaaactgcctcaaa

SEQ ID NO: 165055 - DNA, 75 bp, Homo sapiens
caaccttggctgagtcttgagactgaaagatttagccataatgtaaactgcctcaaattggactttgggcataaa

SEQ ID NO: 165056 - DNA, 73 bp, Homo sapiens
tgagtcttgagactgaaagatttagccataatgtaaactgcctcaaattggactttgggcataaaagaacttt

SEQ ID NO: 165057 - DNA, 70 bp, Homo sapiens
cttgagactgaaagatttagccataatgtaaactgcctcaaattggactttgggcataaaagaacttttt

SEQ ID NO: 165058 - DNA, 71 bp, Homo sapiens
gatttagccataatgtaaactgcctcaaattggactttgggcataaaagaacttttttatgcttaccatct

SEQ ID NO: 165059 - DNA, 68 bp, Homo sapiens
ccataatgtaaactgcctcaaattggactttgggcataaaagaacttttttatgcttaccatcttttt

SEQ ID NO: 165060 - DNA, 67 bp, Homo sapiens
aaaaaattttaagatttacacaatgtttctctgtaaatattgccattaaatgtaaataactttaata

SEQ ID NO: 165061 - DNA, 69 bp, Homo sapiens
taagatttacacaatgtttctctgtaaatattgccattaaatgtaaataactttaataaaacgtttata

SEQ ID NO: 165062 - DNA, 71 bp, Homo sapiens
caatgtttctctgtaaatattgccattaaatgtaaataactttaataaaacgtttatagcagttacacaga

SEQ ID NO: 165063 - DNA, 71 bp, Homo sapiens
tctctgtaaatattgccattaaatgtaaataactttaataaaacgtttatagcagttacacagaatttcaa

SEQ ID NO: 165064 - DNA, 71 bp, Homo sapiens
tgccattaaatgtaaataactttaataaaacgtttatagcagttacacagaatttcaatcctagtatatag

SEQ ID NO: 165065 - DNA, 70 bp, Homo sapiens
tgtaaataactttaataaaacgtttatagcagttacacagaatttcaatcctagtatatagtacctagta

SEQ ID NO: 165066 - DNA, 70 bp, Homo sapiens
ctttaataaaacgtttatagcagttacacagaatttcaatcctagtatatagtacctagtattataggta

SEQ ID NO: 165067 - DNA, 71 bp, Homo sapiens
cgtttatagcagttacacagaatttcaatcctagtatatagtacctagtattataggtactataaacccta

SEQ ID NO: 165068 - DNA, 69 bp, Homo sapiens
agcagttacacagaatttcaatcctagtatatagtacctagtattataggtactataaaccctaatttt

SEQ ID NO: 165069 - DNA, 67 bp, Homo sapiens
cacagaatttcaatcctagtatatagtacctagtattataggtactataaaccctaattttttttat

SEQ ID NO: 165070 - DNA, 69 bp, Homo sapiens
aaaaaataaaataactggcaaatatatcattgagccaaatcttaagttgtgaatgttttgtttcgtttc

SEQ ID NO: 165071 - DNA, 70 bp, Homo sapiens
ataaaataactggcaaatatatcattgagccaaatcttaagttgtgaatgttttgtttcgtttcttcccc

SEQ ID NO: 165072 - DNA, 75 bp, Homo sapiens
agttctgacatactgggaagggagaaaaattccacatgcaagacagacatccaaaatggctcaacataatttatt

SEQ ID NO: 165073 - DNA, 73 bp, Homo sapiens
atactgggaagggagaaaaattccacatgcaagacagacatccaaaatggctcaacataatttattttttatg

SEQ ID NO: 165074 - DNA, 73 bp, Homo sapiens
gggagaaaaattccacatgcaagacagacatccaaaatggctcaacataatttattttttatgttaaaatgta

SEQ ID NO: 165075 - DNA, 75 bp, Homo sapiens
ccacatgcaagacagacatccaaaatggctcaacataatttattttttatgttaaaatgtacagagttcttttga

SEQ ID NO: 165076 - DNA, 71 bp, Homo sapiens
gacagacatccaaaatggctcaacataatttattttttatgttaaaatgtacagagttcttttgaaagtac

SEQ ID NO: 165077 - DNA, 70 bp, Homo sapiens
ccaaaatggctcaacataatttattttttatgttaaaatgtacagagttcttttgaaagtacttgctaga

SEQ ID NO: 165078 - DNA, 68 bp, Homo sapiens
ctcaacataatttattttttatgttaaaatgtacagagttcttttgaaagtacttgctagaaagggga

SEQ ID NO: 165079 - DNA, 64 bp, Homo sapiens
tttttatgttaaaatgtacagagttcttttgaaagtacttgctagaaaggggaaaaaaaggtat

SEQ ID NO: 165080 - DNA, 66 bp, Homo sapiens
aaaatgtacagagttcttttgaaagtacttgctagaaaggggaaaaaaaggtattacatacaagga

SEQ ID NO: 165081 - DNA, 65 bp, Homo sapiens
ttttgaaagtacttgctagaaaggggaaaaaaaggtattacatacaaggagaggaagggaggccg

SEQ ID NO: 165082 - DNA, 68 bp, Homo sapiens
tacttgctagaaaggggaaaaaaaggtattacatacaaggagaggaagggaggccggctggcccagga

SEQ ID NO: 165083 - DNA, 73 bp, Homo sapiens
ggaaaaaaaggtattacatacaaggagaggaagggaggccggctggcccaggagcgcgtgacatggagagata

SEQ ID NO: 165084 - DNA, 73 bp, Homo sapiens
aaaaggtattacatacaaggagaggaagggaggccggctggcccaggagcgcgtgacatggagagatacaaag

SEQ ID NO: 165085 - DNA, 77 bp, Homo sapiens
acatacaaggagaggaagggaggccggctggcccaggagcgcgtgacatggagagatacaaaggcatctaggcaccc

SEQ ID NO: 165086 - DNA, 74 bp, Homo sapiens
ggaagggaggccggctggcccaggagcgcgtgacatggagagatacaaaggcatctaggcaccccttcccctta

SEQ ID NO: 165087 - DNA, 77 bp, Homo sapiens
ggctggcccaggagcgcgtgacatggagagatacaaaggcatctaggcaccccttccccttagcttacaagtcacca

SEQ ID NO: 165088 - DNA, 76 bp, Homo sapiens
aggagcgcgtgacatggagagatacaaaggcatctaggcaccccttccccttagcttacaagtcaccatgaacaaa

SEQ ID NO: 165089 - DNA, 74 bp, Homo sapiens
acatggagagatacaaaggcatctaggcaccccttccccttagcttacaagtcaccatgaacaaagtacaaaga

SEQ ID NO: 165090 - DNA, 71 bp, Homo sapiens
agatacaaaggcatctaggcaccccttccccttagcttacaagtcaccatgaacaaagtacaaagaggtta

SEQ ID NO: 165091 - DNA, 69 bp, Homo sapiens
aaggcatctaggcaccccttccccttagcttacaagtcaccatgaacaaagtacaaagaggttacaaaa

SEQ ID NO: 165092 - DNA, 67 bp, Homo sapiens
cccttccccttagcttacaagtcaccatgaacaaagtacaaagaggttacaaaacaggaaaagcaaa

SEQ ID NO: 165093 - DNA, 72 bp, Homo sapiens
tagcttacaagtcaccatgaacaaagtacaaagaggttacaaaacaggaaaagcaaatataaacagacagga

SEQ ID NO: 165094 - DNA, 70 bp, Homo sapiens
aagtcaccatgaacaaagtacaaagaggttacaaaacaggaaaagcaaatataaacagacaggatagacg

SEQ ID NO: 165095 - DNA, 68 bp, Homo sapiens
acaaagtacaaagaggttacaaaacaggaaaagcaaatataaacagacaggatagacgtggcttcctt

SEQ ID NO: 165096 - DNA, 72 bp, Homo sapiens
tacaaagaggttacaaaacaggaaaagcaaatataaacagacaggatagacgtggcttcctttgtacatgcg

SEQ ID NO: 165097 - DNA, 72 bp, Homo sapiens
ttacaaaacaggaaaagcaaatataaacagacaggatagacgtggcttcctttgtacatgcggcttttagag

SEQ ID NO: 165098 - DNA, 79 bp, Homo sapiens
aagcaaatataaacagacaggatagacgtggcttcctttgtacatgcggcttttagaggcatctggagctctattcaca

SEQ ID NO: 165099 - DNA, 80 bp, Homo sapiens
gatagacgtggcttcctttgtacatgcggcttttagaggcatctggagctctattcacacacgctagagatctctttaaa

SEQ ID NO: 165100 - DNA, 79 bp, Homo sapiens
gcttcctttgtacatgcggcttttagaggcatctggagctctattcacacacgctagagatctctttaaagagaattta

SEQ ID NO: 165101 - DNA, 78 bp, Homo sapiens
ctttgtacatgcggcttttagaggcatctggagctctattcacacacgctagagatctctttaaagagaatttatctt

SEQ ID NO: 165102 - DNA, 75 bp, Homo sapiens
gaggcatctggagctctattcacacacgctagagatctctttaaagagaatttatctttcttaaaatagttttta

SEQ ID NO: 165103 - DNA, 73 bp, Homo sapiens
gagctctattcacacacgctagagatctctttaaagagaatttatctttcttaaaatagtttttaatattcta

SEQ ID NO: 165104 - DNA, 64 bp, Homo sapiens
ttaaagagaatttatctttcttaaaatagtttttaatattctacaacaaagataaaaaatttta

SEQ ID NO: 165105 - DNA, 69 bp, Homo sapiens
gataaaaaattttaaagatggaatgaaatgaaaaagctcttattttaaaaggcatcaaagtcactaaca

SEQ ID NO: 165106 - DNA, 70 bp, Homo sapiens
tttaaagatggaatgaaatgaaaaagctcttattttaaaaggcatcaaagtcactaacagtgagttttta

SEQ ID NO: 165107 - DNA, 70 bp, Homo sapiens
gatggaatgaaatgaaaaagctcttattttaaaaggcatcaaagtcactaacagtgagtttttaaatttc

SEQ ID NO: 165108 - DNA, 65 bp, Homo sapiens
aaatgaaaaagctcttattttaaaaggcatcaaagtcactaacagtgagtttttaaatttctttt

SEQ ID NO: 165109 - DNA, 67 bp, Homo sapiens
aatacattttttttaaacagaagtgaaaaaatgacaggtaccaatattactgtgttggataatttct

SEQ ID NO: 165110 - DNA, 70 bp, Homo sapiens
ttttaaacagaagtgaaaaaatgacaggtaccaatattactgtgttggataatttcttttataatataga

SEQ ID NO: 165111 - DNA, 66 bp, Homo sapiens
aaaaatgacaggtaccaatattactgtgttggataatttcttttataatatagaaaagaacttttt

SEQ ID NO: 165112 - DNA, 66 bp, Homo sapiens
aggtaccaatattactgtgttggataatttcttttataatatagaaaagaactttttttttctaca

SEQ ID NO: 165113 - DNA, 69 bp, Homo sapiens
ctgtgttggataatttcttttataatatagaaaagaactttttttttctacaatagttctacagtcaca

SEQ ID NO: 165114 - DNA, 68 bp, Homo sapiens
gataatttcttttataatatagaaaagaactttttttttctacaatagttctacagtcacaaagaggc

SEQ ID NO: 165115 - DNA, 69 bp, Homo sapiens
tcttttataatatagaaaagaactttttttttctacaatagttctacagtcacaaagaggcttgtggaa

SEQ ID NO: 165116 - DNA, 67 bp, Homo sapiens
ataatatagaaaagaactttttttttctacaatagttctacagtcacaaagaggcttgtggaaaagg

SEQ ID NO: 165117 - DNA, 70 bp, Homo sapiens
tatagaaaagaactttttttttctacaatagttctacagtcacaaagaggcttgtggaaaagggagctgc

SEQ ID NO: 165118 - DNA, 69 bp, Homo sapiens
atagaaaagaactttttttttctacaatagttctacagtcacaaagaggcttgtggaaaagggagctgc

SEQ ID NO: 165119 - DNA, 69 bp, Homo sapiens
actttttttttctacaatagttctacagtcacaaagaggcttgtggaaaagggagctgcccgattgaat

SEQ ID NO: 165120 - DNA, 69 bp, Homo sapiens
tttttttctacaatagttctacagtcacaaagaggcttgtggaaaagggagctgcccgattgaattttt

SEQ ID NO: 165121 - DNA, 71 bp, Homo sapiens
tttttctacaatagttctacagtcacaaagaggcttgtggaaaagggagctgcccgattgaattttttata

SEQ ID NO: 165122 - DNA, 72 bp, Homo sapiens
tctacaatagttctacagtcacaaagaggcttgtggaaaagggagctgcccgattgaattttttataaagaa

SEQ ID NO: 165123 - DNA, 70 bp, Homo sapiens
aatagttctacagtcacaaagaggcttgtggaaaagggagctgcccgattgaattttttataaagaaaca

SEQ ID NO: 165124 - DNA, 70 bp, Homo sapiens
ttctacagtcacaaagaggcttgtggaaaagggagctgcccgattgaattttttataaagaaacaaacaa

SEQ ID NO: 165125 - DNA, 68 bp, Homo sapiens
aaacaaacaaaaccaaacacaaccgcaaaccaacagaaactgatttcacggccctcatttcaacagct

SEQ ID NO: 165126 - DNA, 72 bp, Homo sapiens
tcacggccctcatttcaacagcttctccttctgccttgacccaccctcctcccaatatacctccctcccgac

SEQ ID NO: 165127 - DNA, 68 bp, Homo sapiens
atttcaacagcttctccttctgccttgacccaccctcctcccaatatacctccctcccgacccacccc

SEQ ID NO: 165128 - DNA, 66 bp, Homo sapiens
ttctccttctgccttgacccaccctcctcccaatatacctccctcccgacccaccccgtccccacc

SEQ ID NO: 165129 - DNA, 64 bp, Homo sapiens
ttgacccaccctcctcccaatatacctccctcccgacccaccccgtccccaccccaaccaggaa

SEQ ID NO: 165130 - DNA, 66 bp, Homo sapiens
accctcctcccaatatacctccctcccgacccaccccgtccccaccccaaccaggaagcaatgaca

SEQ ID NO: 165131 - DNA, 70 bp, Homo sapiens
aatatacctccctcccgacccaccccgtccccaccccaaccaggaagcaatgacacagctgaagatgtag

SEQ ID NO: 165132 - DNA, 78 bp, Homo sapiens
tcccgacccaccccgtccccaccccaaccaggaagcaatgacacagctgaagatgtagggcgatggcagcacagtgca

SEQ ID NO: 165133 - DNA, 79 bp, Homo sapiens
ccccgtccccaccccaaccaggaagcaatgacacagctgaagatgtagggcgatggcagcacagtgcactttctacata

SEQ ID NO: 165134 - DNA, 82 bp, Homo sapiens
accccaaccaggaagcaatgacacagctgaagatgtagggcgatggcagcacagtgcactttctacatagatgactgggaac

SEQ ID NO: 165135 - DNA, 86 bp, Homo sapiens
ggaagcaatgacacagctgaagatgtagggcgatggcagcacagtgcactttctacatagatgactgggaactggaatagtatata

SEQ ID NO: 165136 - DNA, 84 bp, Homo sapiens
acacagctgaagatgtagggcgatggcagcacagtgcactttctacatagatgactgggaactggaatagtatatacagagaaa

SEQ ID NO: 165137 - DNA, 81 bp, Homo sapiens
tagggcgatggcagcacagtgcactttctacatagatgactgggaactggaatagtatatacagagaaactgggtcctaca

SEQ ID NO: 165138 - DNA, 81 bp, Homo sapiens
agcacagtgcactttctacatagatgactgggaactggaatagtatatacagagaaactgggtcctacacagccttgcaca

SEQ ID NO: 165139 - DNA, 81 bp, Homo sapiens
actttctacatagatgactgggaactggaatagtatatacagagaaactgggtcctacacagccttgcacatgctcagagc

SEQ ID NO: 165140 - DNA, 83 bp, Homo sapiens
tagatgactgggaactggaatagtatatacagagaaactgggtcctacacagccttgcacatgctcagagctgagagcgggaa

SEQ ID NO: 165141 - DNA, 83 bp, Homo sapiens
tatatacagagaaactgggtcctacacagccttgcacatgctcagagctgagagcgggaagatgtggaattctgcgtttctac

SEQ ID NO: 165142 - DNA, 85 bp, Homo sapiens
tcctacacagccttgcacatgctcagagctgagagcgggaagatgtggaattctgcgtttctacctagcacgcttgagaaagtca

SEQ ID NO: 165143 - DNA, 78 bp, Homo sapiens
ctcagagctgagagcgggaagatgtggaattctgcgtttctacctagcacgcttgagaaagtcaattaaagtgtatta

SEQ ID NO: 165144 - DNA, 71 bp, Homo sapiens
gaagatgtggaattctgcgtttctacctagcacgcttgagaaagtcaattaaagtgtattaaaaaaaccaa

SEQ ID NO: 165145 - DNA, 68 bp, Homo sapiens
ggaattctgcgtttctacctagcacgcttgagaaagtcaattaaagtgtattaaaaaaaccaacaaac

SEQ ID NO: 165146 - DNA, 70 bp, Homo sapiens
gtttctacctagcacgcttgagaaagtcaattaaagtgtattaaaaaaaccaacaaacctgtgcatttga

SEQ ID NO: 165147 - DNA, 67 bp, Homo sapiens
agcacgcttgagaaagtcaattaaagtgtattaaaaaaaccaacaaacctgtgcatttgaaaaaagt

SEQ ID NO: 165148 - DNA, 66 bp, Homo sapiens
gaaagtcaattaaagtgtattaaaaaaaccaacaaacctgtgcatttgaaaaaagttaatgcctaa

SEQ ID NO: 165149 - DNA, 65 bp, Homo sapiens
gtgtattaaaaaaaccaacaaacctgtgcatttgaaaaaagttaatgcctaattagtactttaaa

SEQ ID NO: 165150 - DNA, 64 bp, Homo sapiens
aaaaaccaacaaacctgtgcatttgaaaaaagttaatgcctaattagtactttaaaaatttatc

SEQ ID NO: 165151 - DNA, 67 bp, Homo sapiens
acaaacctgtgcatttgaaaaaagttaatgcctaattagtactttaaaaatttatctatataaaatg

SEQ ID NO: 165152 - DNA, 68 bp, Homo sapiens
gtgcatttgaaaaaagttaatgcctaattagtactttaaaaatttatctatataaaatgtacaaataa

SEQ ID NO: 165153 - DNA, 66 bp, Homo sapiens
aaaaagttaatgcctaattagtactttaaaaatttatctatataaaatgtacaaataaaggagaga

SEQ ID NO: 165154 - DNA, 70 bp, Homo sapiens
tgcctaattagtactttaaaaatttatctatataaaatgtacaaataaaggagagaatttaatgcttaca

SEQ ID NO: 165155 - DNA, 72 bp, Homo sapiens
ttaaaaatttatctatataaaatgtacaaataaaggagagaatttaatgcttacagatatttctctaagcag

SEQ ID NO: 165156 - DNA, 73 bp, Homo sapiens
tttatctatataaaatgtacaaataaaggagagaatttaatgcttacagatatttctctaagcagtacttccc

SEQ ID NO: 165157 - DNA, 71 bp, Homo sapiens
aatgtacaaataaaggagagaatttaatgcttacagatatttctctaagcagtacttcccccttttggata

SEQ ID NO: 165158 - DNA, 75 bp, Homo sapiens
taaaggagagaatttaatgcttacagatatttctctaagcagtacttcccccttttggatatttgactgcacata

SEQ ID NO: 165159 - DNA, 74 bp, Homo sapiens
agaatttaatgcttacagatatttctctaagcagtacttcccccttttggatatttgactgcacataccaagtg

SEQ ID NO: 165160 - DNA, 73 bp, Homo sapiens
agtacttcccccttttggatatttgactgcacataccaagtggtataatagtttccatcttctaatgatggaa

SEQ ID NO: 165161 - DNA, 76 bp, Homo sapiens
ttcccccttttggatatttgactgcacataccaagtggtataatagtttccatcttctaatgatggaatatatata

SEQ ID NO: 165162 - DNA, 69 bp, Homo sapiens
tttttttttttacctatccctggagcaagtaataggaagagaatgggcaaactggttgcacgagagaaa

SEQ ID NO: 165163 - DNA, 73 bp, Homo sapiens
tttttacctatccctggagcaagtaataggaagagaatgggcaaactggttgcacgagagaaaagagaatgga

SEQ ID NO: 165164 - DNA, 78 bp, Homo sapiens
tggagcaagtaataggaagagaatgggcaaactggttgcacgagagaaaagagaatggagttgggagcaacacatgaa

SEQ ID NO: 165165 - DNA, 74 bp, Homo sapiens
aagtaataggaagagaatgggcaaactggttgcacgagagaaaagagaatggagttgggagcaacacatgaact

SEQ ID NO: 165166 - DNA, 76 bp, Homo sapiens
agaatgggcaaactggttgcacgagagaaaagagaatggagttgggagcaacacatgaacttgcgttataacattc

SEQ ID NO: 165167 - DNA, 78 bp, Homo sapiens
aaactggttgcacgagagaaaagagaatggagttgggagcaacacatgaacttgcgttataacattctgctgtccaga

SEQ ID NO: 165168 - DNA, 79 bp, Homo sapiens
acgagagaaaagagaatggagttgggagcaacacatgaacttgcgttataacattctgctgtccagatctgccctactg

SEQ ID NO: 165169 - DNA, 80 bp, Homo sapiens
aaaagagaatggagttgggagcaacacatgaacttgcgttataacattctgctgtccagatctgccctactgtgctggtg

SEQ ID NO: 165170 - DNA, 80 bp, Homo sapiens
agttgggagcaacacatgaacttgcgttataacattctgctgtccagatctgccctactgtgctggtggtcggtctgtcc

SEQ ID NO: 165171 - DNA, 81 bp, Homo sapiens
acacatgaacttgcgttataacattctgctgtccagatctgccctactgtgctggtggtcggtctgtccctcttctcatta

SEQ ID NO: 165172 - DNA, 79 bp, Homo sapiens
aacttgcgttataacattctgctgtccagatctgccctactgtgctggtggtcggtctgtccctcttctcattagccac

SEQ ID NO: 165173 - DNA, 82 bp, Homo sapiens
tataacattctgctgtccagatctgccctactgtgctggtggtcggtctgtccctcttctcattagccactcacaggagagg

SEQ ID NO: 165174 - DNA, 84 bp, Homo sapiens
tccagatctgccctactgtgctggtggtcggtctgtccctcttctcattagccactcacaggagaggtgcttgtgcactctgat

SEQ ID NO: 165175 - DNA, 82 bp, Homo sapiens
ctggtggtcggtctgtccctcttctcattagccactcacaggagaggtgcttgtgcactctgattcacaggggatgaactca

SEQ ID NO: 165176 - DNA, 83 bp, Homo sapiens
gtctgtccctcttctcattagccactcacaggagaggtgcttgtgcactctgattcacaggggatgaactcaggatctcaaaa

SEQ ID NO: 165177 - DNA, 84 bp, Homo sapiens
tccctcttctcattagccactcacaggagaggtgcttgtgcactctgattcacaggggatgaactcaggatctcaaaagacata

SEQ ID NO: 165178 - DNA, 79 bp, Homo sapiens
aggagaggtgcttgtgcactctgattcacaggggatgaactcaggatctcaaaagacatacaaaaactagaggtatgta

SEQ ID NO: 165179 - DNA, 77 bp, Homo sapiens
tgattcacaggggatgaactcaggatctcaaaagacatacaaaaactagaggtatgtatcacttaaatagctacgaa

SEQ ID NO: 165180 - DNA, 75 bp, Homo sapiens
gggatgaactcaggatctcaaaagacatacaaaaactagaggtatgtatcacttaaatagctacgaaactcacac

SEQ ID NO: 165181 - DNA, 74 bp, Homo sapiens
aactcaggatctcaaaagacatacaaaaactagaggtatgtatcacttaaatagctacgaaactcacaccgtga

SEQ ID NO: 165182 - DNA, 74 bp, Homo sapiens
aaagacatacaaaaactagaggtatgtatcacttaaatagctacgaaactcacaccgtgatctcccttctgaca

SEQ ID NO: 165183 - DNA, 77 bp, Homo sapiens
atacaaaaactagaggtatgtatcacttaaatagctacgaaactcacaccgtgatctcccttctgacacacatctgc

SEQ ID NO: 165184 - DNA, 81 bp, Homo sapiens
tagaggtatgtatcacttaaatagctacgaaactcacaccgtgatctcccttctgacacacatctgcgccatctcttccaa

SEQ ID NO: 165185 - DNA, 77 bp, Homo sapiens
acttaaatagctacgaaactcacaccgtgatctcccttctgacacacatctgcgccatctcttccaacataaaataa

SEQ ID NO: 165186 - DNA, 77 bp, Homo sapiens
aatagctacgaaactcacaccgtgatctcccttctgacacacatctgcgccatctcttccaacataaaataaactgt

SEQ ID NO: 165187 - DNA, 75 bp, Homo sapiens
atctcccttctgacacacatctgcgccatctcttccaacataaaataaactgtttcaatggtttgtcagttattt

SEQ ID NO: 165188 - DNA, 75 bp, Homo sapiens
cttctgacacacatctgcgccatctcttccaacataaaataaactgtttcaatggtttgtcagttatttttcaaa

SEQ ID NO: 165189 - DNA, 73 bp, Homo sapiens
acatctgcgccatctcttccaacataaaataaactgtttcaatggtttgtcagttatttttcaaatcactaaa

SEQ ID NO: 165190 - DNA, 72 bp, Homo sapiens
cataaaataaactgtttcaatggtttgtcagttatttttcaaatcactaaaatgtacagtcatccaccaaca

SEQ ID NO: 165191 - DNA, 71 bp, Homo sapiens
aactgtttcaatggtttgtcagttatttttcaaatcactaaaatgtacagtcatccaccaacaatttaaga

SEQ ID NO: 165192 - DNA, 69 bp, Homo sapiens
aatggtttgtcagttatttttcaaatcactaaaatgtacagtcatccaccaacaatttaagaaagaacc

SEQ ID NO: 165193 - DNA, 73 bp, Homo sapiens
tcactaaaatgtacagtcatccaccaacaatttaagaaagaacctaagaggcaaatcactggggactgctatt

SEQ ID NO: 165194 - DNA, 72 bp, Homo sapiens
acaatttaagaaagaacctaagaggcaaatcactggggactgctatttgagttttatcagtcaaaggctcaa

SEQ ID NO: 165195 - DNA, 74 bp, Homo sapiens
aaagaacctaagaggcaaatcactggggactgctatttgagttttatcagtcaaaggctcaagcatcaagaccc

SEQ ID NO: 165196 - DNA, 78 bp, Homo sapiens
tggggactgctatttgagttttatcagtcaaaggctcaagcatcaagaccctcagttagcatttcaaagtacatacta

SEQ ID NO: 165197 - DNA, 77 bp, Homo sapiens
tatttgagttttatcagtcaaaggctcaagcatcaagaccctcagttagcatttcaaagtacatactagaaacaaga

SEQ ID NO: 165198 - DNA, 76 bp, Homo sapiens
aaaggctcaagcatcaagaccctcagttagcatttcaaagtacatactagaaacaagaggctgggtggcgtgtgtg

SEQ ID NO: 165199 - DNA, 77 bp, Homo sapiens
aagcatcaagaccctcagttagcatttcaaagtacatactagaaacaagaggctgggtggcgtgtgtgtgcgttatg

SEQ ID NO: 165200 - DNA, 77 bp, Homo sapiens
accctcagttagcatttcaaagtacatactagaaacaagaggctgggtggcgtgtgtgtgcgttatggctgattcac

SEQ ID NO: 165201 - DNA, 75 bp, Homo sapiens
tttcaaagtacatactagaaacaagaggctgggtggcgtgtgtgtgcgttatggctgattcaccaggtggtaaaa

SEQ ID NO: 165202 - DNA, 73 bp, Homo sapiens
aagtacatactagaaacaagaggctgggtggcgtgtgtgtgcgttatggctgattcaccaggtggtaaaaaaa

SEQ ID NO: 165203 - DNA, 71 bp, Homo sapiens
aaacaagaggctgggtggcgtgtgtgtgcgttatggctgattcaccaggtggtaaaaaaacaagaggttaa

SEQ ID NO: 165204 - DNA, 71 bp, Homo sapiens
tgggtggcgtgtgtgtgcgttatggctgattcaccaggtggtaaaaaaacaagaggttaatctcctctttt

SEQ ID NO: 165205 - DNA, 71 bp, Homo sapiens
tgtgtgcgttatggctgattcaccaggtggtaaaaaaacaagaggttaatctcctctttttgattgttaat

SEQ ID NO: 165206 - DNA, 70 bp, Homo sapiens
gttatggctgattcaccaggtggtaaaaaaacaagaggttaatctcctctttttgattgttaattgacca

SEQ ID NO: 165207 - DNA, 70 bp, Homo sapiens
tcaccaggtggtaaaaaaacaagaggttaatctcctctttttgattgttaattgaccatctctattcctc

SEQ ID NO: 165208 - DNA, 68 bp, Homo sapiens
ggtaaaaaaacaagaggttaatctcctctttttgattgttaattgaccatctctattcctccaaaggc

SEQ ID NO: 165209 - DNA, 71 bp, Homo sapiens
aaacaagaggttaatctcctctttttgattgttaattgaccatctctattcctccaaaggctggatttgga

SEQ ID NO: 165210 - DNA, 73 bp, Homo sapiens
aatctcctctttttgattgttaattgaccatctctattcctccaaaggctggatttggattgcaaacagcttt

SEQ ID NO: 165211 - DNA, 75 bp, Homo sapiens
ctttttgattgttaattgaccatctctattcctccaaaggctggatttggattgcaaacagcttttctctgagat

SEQ ID NO: 165212 - DNA, 79 bp, Homo sapiens
ttaattgaccatctctattcctccaaaggctggatttggattgcaaacagcttttctctgagattctgctgttaattga

SEQ ID NO: 165213 - DNA, 76 bp, Homo sapiens
aaaggctggatttggattgcaaacagcttttctctgagattctgctgttaattgagacttacagtatttttgtgtc

SEQ ID NO: 165214 - DNA, 80 bp, Homo sapiens
atttggattgcaaacagcttttctctgagattctgctgttaattgagacttacagtatttttgtgtctctgagtgctgag

SEQ ID NO: 165215 - DNA, 78 bp, Homo sapiens
aaacagcttttctctgagattctgctgttaattgagacttacagtatttttgtgtctctgagtgctgagtgggaatat

SEQ ID NO: 165216 - DNA, 77 bp, Homo sapiens
ttttctctgagattctgctgttaattgagacttacagtatttttgtgtctctgagtgctgagtgggaatattttaaa

SEQ ID NO: 165217 - DNA, 75 bp, Homo sapiens
gagattctgctgttaattgagacttacagtatttttgtgtctctgagtgctgagtgggaatattttaaaaaagaa

SEQ ID NO: 165218 - DNA, 70 bp, Homo sapiens
aagaagaaaaaaattatattacacttgattcaagaacaacaaagatttcaatgaagtccgtctataaaga

SEQ ID NO: 165219 - DNA, 71 bp, Homo sapiens
aaaattatattacacttgattcaagaacaacaaagatttcaatgaagtccgtctataaagaaacattcttg

SEQ ID NO: 165220 - DNA, 71 bp, Homo sapiens
aaattatattacacttgattcaagaacaacaaagatttcaatgaagtccgtctataaagaaacattcttgg

SEQ ID NO: 165221 - DNA, 70 bp, Homo sapiens
tacacttgattcaagaacaacaaagatttcaatgaagtccgtctataaagaaacattcttggggaagggt

SEQ ID NO: 165222 - DNA, 70 bp, Homo sapiens
gattcaagaacaacaaagatttcaatgaagtccgtctataaagaaacattcttggggaagggtttcaaga

SEQ ID NO: 165223 - DNA, 69 bp, Homo sapiens
acaacaaagatttcaatgaagtccgtctataaagaaacattcttggggaagggtttcaagaggtgtgtg

SEQ ID NO: 165224 - DNA, 72 bp, Homo sapiens
tgtgtgtgtgaggagtggaggggattttaaaaggagaagcattttcctgcctcactttattaataataataa

SEQ ID NO: 165225 - DNA, 70 bp, Homo sapiens
aataataatattaacaataataataagtttaaggagcttgggttgttctccatgtccccatccgagtctc

SEQ ID NO: 165226 - DNA, 69 bp, Homo sapiens
atattaacaataataataagtttaaggagcttgggttgttctccatgtccccatccgagtctcccctaa

SEQ ID NO: 165227 - DNA, 69 bp, Homo sapiens
aataataataagtttaaggagcttgggttgttctccatgtccccatccgagtctcccctaagtgcctcc

SEQ ID NO: 165228 - DNA, 73 bp, Homo sapiens
gtttaaggagcttgggttgttctccatgtccccatccgagtctcccctaagtgcctcctgctggaatgaagta

SEQ ID NO: 165229 - DNA, 73 bp, Homo sapiens
cttgggttgttctccatgtccccatccgagtctcccctaagtgcctcctgctggaatgaagtaggaaatgaaa

SEQ ID NO: 165230 - DNA, 72 bp, Homo sapiens
catgtccccatccgagtctcccctaagtgcctcctgctggaatgaagtaggaaatgaaaggttgggtttgga

SEQ ID NO: 165231 - DNA, 69 bp, Homo sapiens
atccgagtctcccctaagtgcctcctgctggaatgaagtaggaaatgaaaggttgggtttggaggaaag

SEQ ID NO: 165232 - DNA, 68 bp, Homo sapiens
ccctaagtgcctcctgctggaatgaagtaggaaatgaaaggttgggtttggaggaaagggtctggtta

SEQ ID NO: 165233 - DNA, 68 bp, Homo sapiens
ctcctgctggaatgaagtaggaaatgaaaggttgggtttggaggaaagggtctggttaacccttgaga

SEQ ID NO: 165234 - DNA, 67 bp, Homo sapiens
aatgaagtaggaaatgaaaggttgggtttggaggaaagggtctggttaacccttgagatgtatataa

SEQ ID NO: 165235 - DNA, 67 bp, Homo sapiens
taggaaatgaaaggttgggtttggaggaaagggtctggttaacccttgagatgtatataacatttaa

SEQ ID NO: 165236 - DNA, 72 bp, Homo sapiens
ttggaggaaagggtctggttaacccttgagatgtatataacatttaaaaatgacaacattgggagctgcaaa

SEQ ID NO: 165237 - DNA, 72 bp, Homo sapiens
aagggtctggttaacccttgagatgtatataacatttaaaaatgacaacattgggagctgcaaacagtgagg

SEQ ID NO: 165238 - DNA, 74 bp, Homo sapiens
ttaacccttgagatgtatataacatttaaaaatgacaacattgggagctgcaaacagtgaggggaaacatacat

SEQ ID NO: 165239 - DNA, 73 bp, Homo sapiens
agatgtatataacatttaaaaatgacaacattgggagctgcaaacagtgaggggaaacatacattttaaaata

SEQ ID NO: 165240 - DNA, 69 bp, Homo sapiens
acattttaaaataaagataattcacttttacacaaattctgtccatgtggtatgtaaagaaagtaaggc

SEQ ID NO: 165241 - DNA, 69 bp, Homo sapiens
ataaagataattcacttttacacaaattctgtccatgtggtatgtaaagaaagtaaggctctttttaat

SEQ ID NO: 165242 - DNA, 71 bp, Homo sapiens
gataattcacttttacacaaattctgtccatgtggtatgtaaagaaagtaaggctctttttaattatgaaa

SEQ ID NO: 165243 - DNA, 72 bp, Homo sapiens
acacaaattctgtccatgtggtatgtaaagaaagtaaggctctttttaattatgaaaagattttgtgcatgt

SEQ ID NO: 165244 - DNA, 71 bp, Homo sapiens
attctgtccatgtggtatgtaaagaaagtaaggctctttttaattatgaaaagattttgtgcatgtttccc

SEQ ID NO: 165245 - DNA, 69 bp, Homo sapiens
gtggtatgtaaagaaagtaaggctctttttaattatgaaaagattttgtgcatgtttccccatccccaa

SEQ ID NO: 165246 - DNA, 67 bp, Homo sapiens
aaagaaagtaaggctctttttaattatgaaaagattttgtgcatgtttccccatccccaaatccatt

SEQ ID NO: 165247 - DNA, 70 bp, Homo sapiens
aggctctttttaattatgaaaagattttgtgcatgtttccccatccccaaatccatttttagatgagttc

SEQ ID NO: 165248 - DNA, 74 bp, Homo sapiens
ttttgtgcatgtttccccatccccaaatccatttttagatgagttctactgtaaaatgttcaagattgtgaaga

SEQ ID NO: 165249 - DNA, 70 bp, Homo sapiens
gtttccccatccccaaatccatttttagatgagttctactgtaaaatgttcaagattgtgaagaaaacca

SEQ ID NO: 165250 - DNA, 70 bp, Homo sapiens
ccatttttagatgagttctactgtaaaatgttcaagattgtgaagaaaaccaaaacccagaacaaaatga

SEQ ID NO: 165251 - DNA, 66 bp, Homo sapiens
actgtaaaatgttcaagattgtgaagaaaaccaaaacccagaacaaaatgaacccaaaaaaagaga

SEQ ID NO: 165252 - DNA, 66 bp, Homo sapiens
gttcaagattgtgaagaaaaccaaaacccagaacaaaatgaacccaaaaaaagagaagatcaggtt

SEQ ID NO: 165253 - DNA, 64 bp, Homo sapiens
gtgaagaaaaccaaaacccagaacaaaatgaacccaaaaaaagagaagatcaggttttctaaaa

SEQ ID NO: 165254 - DNA, 62 bp, Homo sapiens
accaaaacccagaacaaaatgaacccaaaaaaagagaagatcaggttttctaaaaaataaaa

SEQ ID NO: 165255 - DNA, 65 bp, Homo sapiens
aataaaataaaccaaagaaaaattcctctaaatctacagcaatattttaactggaaaaaggtcca

SEQ ID NO: 165256 - DNA, 66 bp, Homo sapiens
accaaagaaaaattcctctaaatctacagcaatattttaactggaaaaaggtccatttttctctgg

SEQ ID NO: 165257 - DNA, 68 bp, Homo sapiens
gaaaaattcctctaaatctacagcaatattttaactggaaaaaggtccatttttctctggtttgtcag

SEQ ID NO: 165258 - DNA, 67 bp, Homo sapiens
aatctacagcaatattttaactggaaaaaggtccatttttctctggtttgtcagtataaaaggttcc

SEQ ID NO: 165259 - DNA, 66 bp, Homo sapiens
cagcaatattttaactggaaaaaggtccatttttctctggtttgtcagtataaaaggttcctttat

SEQ ID NO: 165260 - DNA, 66 bp, Homo sapiens
tttaactggaaaaaggtccatttttctctggtttgtcagtataaaaggttcctttatttatatata

SEQ ID NO: 165261 - DNA, 78 bp, Homo sapiens
atttatatatatttaagtttttgattgcaagttcatcttgctcatcttctcatgtaaggtccgttgagtgactgcttg

SEQ ID NO: 165262 - DNA, 79 bp, Homo sapiens
atatttaagtttttgattgcaagttcatcttgctcatcttctcatgtaaggtccgttgagtgactgcttgggcacgcca

SEQ ID NO: 165263 - DNA, 84 bp, Homo sapiens
tttttgattgcaagttcatcttgctcatcttctcatgtaaggtccgttgagtgactgcttgggcacgccagcagcgttcatgta

SEQ ID NO: 165264 - DNA, 84 bp, Homo sapiens
tcttgctcatcttctcatgtaaggtccgttgagtgactgcttgggcacgccagcagcgttcatgtagctgtgatgggaggggcc

SEQ ID NO: 165265 - DNA, 84 bp, Homo sapiens
ttctcatgtaaggtccgttgagtgactgcttgggcacgccagcagcgttcatgtagctgtgatgggaggggcctgtgtacatca

SEQ ID NO: 165266 - DNA, 81 bp, Homo sapiens
aaggtccgttgagtgactgcttgggcacgccagcagcgttcatgtagctgtgatgggaggggcctgtgtacatcatgttcc

SEQ ID NO: 165267 - DNA, 82 bp, Homo sapiens
agtgactgcttgggcacgccagcagcgttcatgtagctgtgatgggaggggcctgtgtacatcatgttcccatgagggttag

SEQ ID NO: 165268 - DNA, 84 bp, Homo sapiens
ttgggcacgccagcagcgttcatgtagctgtgatgggaggggcctgtgtacatcatgttcccatgagggttaggctgcataggc

SEQ ID NO: 165269 - DNA, 84 bp, Homo sapiens
agcagcgttcatgtagctgtgatgggaggggcctgtgtacatcatgttcccatgagggttaggctgcataggctgctgggtata

SEQ ID NO: 165270 - DNA, 82 bp, Homo sapiens
atgtagctgtgatgggaggggcctgtgtacatcatgttcccatgagggttaggctgcataggctgctgggtataggcctggc

SEQ ID NO: 165271 - DNA, 80 bp, Homo sapiens
ggaggggcctgtgtacatcatgttcccatgagggttaggctgcataggctgctgggtataggcctggctccccatcattc

SEQ ID NO: 165272 - DNA, 86 bp, Homo sapiens
atcatgttcccatgagggttaggctgcataggctgctgggtataggcctggctccccatcattcccatctgcatctgcataggata

SEQ ID NO: 165273 - DNA, 89 bp, Homo sapiens
taggctgcataggctgctgggtataggcctggctccccatcattcccatctgcatctgcataggatactgtgctgtctggttcatgtag

SEQ ID NO: 165274 - DNA, 85 bp, Homo sapiens
tgctgggtataggcctggctccccatcattcccatctgcatctgcataggatactgtgctgtctggttcatgtaggcagggttac

SEQ ID NO: 165275 - DNA, 85 bp, Homo sapiens
tataggcctggctccccatcattcccatctgcatctgcataggatactgtgctgtctggttcatgtaggcagggttactatggta

SEQ ID NO: 165276 - DNA, 88 bp, Homo sapiens
ccatctgcatctgcataggatactgtgctgtctggttcatgtaggcagggttactatggtaactgctgttcatcatgggctgtgtcat

SEQ ID NO: 165277 - DNA, 86 bp, Homo sapiens
atctgcataggatactgtgctgtctggttcatgtaggcagggttactatggtaactgctgttcatcatgggctgtgtcattcgata

SEQ ID NO: 165278 - DNA, 85 bp, Homo sapiens
atactgtgctgtctggttcatgtaggcagggttactatggtaactgctgttcatcatgggctgtgtcattcgatagctgttcatg

SEQ ID NO: 165279 - DNA, 85 bp, Homo sapiens
tgtctggttcatgtaggcagggttactatggtaactgctgttcatcatgggctgtgtcattcgatagctgttcatggcattcaag

SEQ ID NO: 165280 - DNA, 84 bp, Homo sapiens
atgtaggcagggttactatggtaactgctgttcatcatgggctgtgtcattcgatagctgttcatggcattcaaggtgttcata

SEQ ID NO: 165281 - DNA, 87 bp, Homo sapiens
ttactatggtaactgctgttcatcatgggctgtgtcattcgatagctgttcatggcattcaaggtgttcatattcatggaattgaca

SEQ ID NO: 165282 - DNA, 87 bp, Homo sapiens
atggtaactgctgttcatcatgggctgtgtcattcgatagctgttcatggcattcaaggtgttcatattcatggaattgacattata

SEQ ID NO: 165283 - DNA, 86 bp, Homo sapiens
tgttcatcatgggctgtgtcattcgatagctgttcatggcattcaaggtgttcatattcatggaattgacattataggcgggagta

SEQ ID NO: 165284 - DNA, 85 bp, Homo sapiens
tgtgtcattcgatagctgttcatggcattcaaggtgttcatattcatggaattgacattataggcgggagtaggcatcagattaa

SEQ ID NO: 165285 - DNA, 81 bp, Homo sapiens
tgttcatggcattcaaggtgttcatattcatggaattgacattataggcgggagtaggcatcagattaacccccatgttca

SEQ ID NO: 165286 - DNA, 79 bp, Homo sapiens
aaggtgttcatattcatggaattgacattataggcgggagtaggcatcagattaacccccatgttcatgccacgctgaa

SEQ ID NO: 165287 - DNA, 80 bp, Homo sapiens
atggaattgacattataggcgggagtaggcatcagattaacccccatgttcatgccacgctgaacagccagtgcgcgagg

SEQ ID NO: 165288 - DNA, 82 bp, Homo sapiens
attataggcgggagtaggcatcagattaacccccatgttcatgccacgctgaacagccagtgcgcgagggccagcctgcatg

SEQ ID NO: 165289 - DNA, 86 bp, Homo sapiens
taggcatcagattaacccccatgttcatgccacgctgaacagccagtgcgcgagggccagcctgcatggcaactgccgatgggcta

SEQ ID NO: 165290 - DNA, 90 bp, Homo sapiens
atgttcatgccacgctgaacagccagtgcgcgagggccagcctgcatggcaactgccgatgggctacggccatacagctgctgctggtga

SEQ ID NO: 165291 - DNA, 90 bp, Homo sapiens
atgccacgctgaacagccagtgcgcgagggccagcctgcatggcaactgccgatgggctacggccatacagctgctgctggtgagcagcc

SEQ ID NO: 165292 - DNA, 85 bp, Homo sapiens
aactgccgatgggctacggccatacagctgctgctggtgagcagccgcagagggcagtggcgcagacttggagcggatggaaatg

SEQ ID NO: 165293 - DNA, 85 bp, Homo sapiens
ccgatgggctacggccatacagctgctgctggtgagcagccgcagagggcagtggcgcagacttggagcggatggaaatgtgccc

SEQ ID NO: 165294 - DNA, 87 bp, Homo sapiens
ccatacagctgctgctggtgagcagccgcagagggcagtggcgcagacttggagcggatggaaatgtgccccttcactggcatttgc

SEQ ID NO: 165295 - DNA, 84 bp, Homo sapiens
ctgctggtgagcagccgcagagggcagtggcgcagacttggagcggatggaaatgtgccccttcactggcatttgcccttgcaa

SEQ ID NO: 165296 - DNA, 85 bp, Homo sapiens
tgagcagccgcagagggcagtggcgcagacttggagcggatggaaatgtgccccttcactggcatttgcccttgcaatctctgcg

SEQ ID NO: 165297 - DNA, 81 bp, Homo sapiens
agggcagtggcgcagacttggagcggatggaaatgtgccccttcactggcatttgcccttgcaatctctgcgtgtgaggaa

SEQ ID NO: 165298 - DNA, 82 bp, Homo sapiens
cgcagacttggagcggatggaaatgtgccccttcactggcatttgcccttgcaatctctgcgtgtgaggaatgccaatgttg

SEQ ID NO: 165299 - DNA, 80 bp, Homo sapiens
acttggagcggatggaaatgtgccccttcactggcatttgcccttgcaatctctgcgtgtgaggaatgccaatgttggtg

SEQ ID NO: 165300 - DNA, 89 bp, Homo sapiens
cttcactggcatttgcccttgcaatctctgcgtgtgaggaatgccaatgttggtggcagacatgttgcactgaagcagaggagatgtga

SEQ ID NO: 165301 - DNA, 87 bp, Homo sapiens
atttgcccttgcaatctctgcgtgtgaggaatgccaatgttggtggcagacatgttgcactgaagcagaggagatgtgaggttcatg

SEQ ID NO: 165302 - DNA, 88 bp, Homo sapiens
cttgcaatctctgcgtgtgaggaatgccaatgttggtggcagacatgttgcactgaagcagaggagatgtgaggttcatggtagtgga

SEQ ID NO: 165303 - DNA, 84 bp, Homo sapiens
cgtgtgaggaatgccaatgttggtggcagacatgttgcactgaagcagaggagatgtgaggttcatggtagtggatgccaagtt

SEQ ID NO: 165304 - DNA, 82 bp, Homo sapiens
aggaatgccaatgttggtggcagacatgttgcactgaagcagaggagatgtgaggttcatggtagtggatgccaagtttggg

SEQ ID NO: 165305 - DNA, 80 bp, Homo sapiens
aatgttggtggcagacatgttgcactgaagcagaggagatgtgaggttcatggtagtggatgccaagtttgggggtggcg

SEQ ID NO: 165306 - DNA, 81 bp, Homo sapiens
agacatgttgcactgaagcagaggagatgtgaggttcatggtagtggatgccaagtttgggggtggcgtcatggtggcttg

SEQ ID NO: 165307 - DNA, 80 bp, Homo sapiens
actgaagcagaggagatgtgaggttcatggtagtggatgccaagtttgggggtggcgtcatggtggcttgtgcttgagga

SEQ ID NO: 165308 - DNA, 78 bp, Homo sapiens
gttcatggtagtggatgccaagtttgggggtggcgtcatggtggcttgtgcttgaggagtcccagctaagggatgaga

SEQ ID NO: 165309 - DNA, 79 bp, Homo sapiens
aagtttgggggtggcgtcatggtggcttgtgcttgaggagtcccagctaagggatgagatggagccagctgagccagtc

SEQ ID NO: 165310 - DNA, 85 bp, Homo sapiens
tggcgtcatggtggcttgtgcttgaggagtcccagctaagggatgagatggagccagctgagccagtcctgtattggacagagaa

SEQ ID NO: 165311 - DNA, 82 bp, Homo sapiens
gtggcttgtgcttgaggagtcccagctaagggatgagatggagccagctgagccagtcctgtattggacagagaaacactgg

SEQ ID NO: 165312 - DNA, 84 bp, Homo sapiens
ttgtgcttgaggagtcccagctaagggatgagatggagccagctgagccagtcctgtattggacagagaaacactggttgcata

SEQ ID NO: 165313 - DNA, 82 bp, Homo sapiens
agtcccagctaagggatgagatggagccagctgagccagtcctgtattggacagagaaacactggttgcataggaagtcaca

SEQ ID NO: 165314 - DNA, 84 bp, Homo sapiens
taagggatgagatggagccagctgagccagtcctgtattggacagagaaacactggttgcataggaagtcacagcaggagaatg

SEQ ID NO: 165315 - DNA, 83 bp, Homo sapiens
agatggagccagctgagccagtcctgtattggacagagaaacactggttgcataggaagtcacagcaggagaatggctataag

SEQ ID NO: 165316 - DNA, 85 bp, Homo sapiens
agctgagccagtcctgtattggacagagaaacactggttgcataggaagtcacagcaggagaatggctataaggcatggcatgag

SEQ ID NO: 165317 - DNA, 82 bp, Homo sapiens
agagaaacactggttgcataggaagtcacagcaggagaatggctataaggcatggcatgagggtccataatggtgttggtca

SEQ ID NO: 165318 - DNA, 86 bp, Homo sapiens
actggttgcataggaagtcacagcaggagaatggctataaggcatggcatgagggtccataatggtgttggtcagctgctgcagct

SEQ ID NO: 165319 - DNA, 87 bp, Homo sapiens
caggagaatggctataaggcatggcatgagggtccataatggtgttggtcagctgctgcagcttggctaggctgaaggtggctgatg

SEQ ID NO: 165320 - DNA, 86 bp, Homo sapiens
aatggctataaggcatggcatgagggtccataatggtgttggtcagctgctgcagcttggctaggctgaaggtggctgatggttga

SEQ ID NO: 165321 - DNA, 82 bp, Homo sapiens
ataatggtgttggtcagctgctgcagcttggctaggctgaaggtggctgatggttgagagtagctgccggcaccaaaatccc

SEQ ID NO: 165322 - DNA, 83 bp, Homo sapiens
agctgctgcagcttggctaggctgaaggtggctgatggttgagagtagctgccggcaccaaaatcccctggaatcctctcata

SEQ ID NO: 165323 - DNA, 79 bp, Homo sapiens
gcttggctaggctgaaggtggctgatggttgagagtagctgccggcaccaaaatcccctggaatcctctcatagatact

SEQ ID NO: 165324 - DNA, 78 bp, Homo sapiens
tggttgagagtagctgccggcaccaaaatcccctggaatcctctcatagatacttatgttcccagtgcttccagattc

SEQ ID NO: 165325 - DNA, 81 bp, Homo sapiens
tgccggcaccaaaatcccctggaatcctctcatagatacttatgttcccagtgcttccagattctggtatctccatgatca

SEQ ID NO: 165326 - DNA, 79 bp, Homo sapiens
accaaaatcccctggaatcctctcatagatacttatgttcccagtgcttccagattctggtatctccatgatcatagga

SEQ ID NO: 165327 - DNA, 80 bp, Homo sapiens
atagatacttatgttcccagtgcttccagattctggtatctccatgatcataggagctggggtgaaactgttattcatac

SEQ ID NO: 165328 - DNA, 80 bp, Homo sapiens
tacttatgttcccagtgcttccagattctggtatctccatgatcataggagctggggtgaaactgttattcatactacac

SEQ ID NO: 165329 - DNA, 81 bp, Homo sapiens
ccagtgcttccagattctggtatctccatgatcataggagctggggtgaaactgttattcatactacactgtgacagcggg

SEQ ID NO: 165330 - DNA, 82 bp, Homo sapiens
agattctggtatctccatgatcataggagctggggtgaaactgttattcatactacactgtgacagcgggggctgctgctgg

SEQ ID NO: 165331 - DNA, 80 bp, Homo sapiens
gtatctccatgatcataggagctggggtgaaactgttattcatactacactgtgacagcgggggctgctgctggggaggg

SEQ ID NO: 165332 - DNA, 75 bp, Homo sapiens
atcataggagctggggtgaaactgttattcatactacactgtgacagcgggggctgctgctggggagggggtggg

SEQ ID NO: 165333 - DNA, 75 bp, Homo sapiens
ggtgaaactgttattcatactacactgtgacagcgggggctgctgctggggagggggtgggggtggaggctgctg

SEQ ID NO: 165334 - DNA, 74 bp, Homo sapiens
aactgttattcatactacactgtgacagcgggggctgctgctggggagggggtgggggtggaggctgctggggc

SEQ ID NO: 165335 - DNA, 81 bp, Homo sapiens
tgtgacagcgggggctgctgctggggagggggtgggggtggaggctgctggggctgaggctgcggctgctgttgcggctgc

SEQ ID NO: 165336 - DNA, 81 bp, Homo sapiens
tgctgctggggagggggtgggggtggaggctgctggggctgaggctgcggctgctgttgcggctgctgctggggtggtgga

SEQ ID NO: 165337 - DNA, 79 bp, Homo sapiens
gagggggtgggggtggaggctgctggggctgaggctgcggctgctgttgcggctgctgctggggtggtggaggctgtgg

SEQ ID NO: 165338 - DNA, 82 bp, Homo sapiens
gggtggaggctgctggggctgaggctgcggctgctgttgcggctgctgctggggtggtggaggctgtggtgctggttgtggt

SEQ ID NO: 165339 - DNA, 83 bp, Homo sapiens
aggctgctggggctgaggctgcggctgctgttgcggctgctgctggggtggtggaggctgtggtgctggttgtggttgtggcg

SEQ ID NO: 165340 - DNA, 83 bp, Homo sapiens
ctgaggctgcggctgctgttgcggctgctgctggggtggtggaggctgtggtgctggttgtggttgtggcggcggcggctgtg

SEQ ID NO: 165341 - DNA, 85 bp, Homo sapiens
tgcggctgctgttgcggctgctgctggggtggtggaggctgtggtgctggttgtggttgtggcggcggcggctgtggctgctgtg

SEQ ID NO: 165342 - DNA, 81 bp, Homo sapiens
ttgcggctgctgctggggtggtggaggctgtggtgctggttgtggttgtggcggcggcggctgtggctgctgtggaggcgg

SEQ ID NO: 165343 - DNA, 82 bp, Homo sapiens
aggctgtggtgctggttgtggttgtggcggcggcggctgtggctgctgtggaggcggtggtggcggctgctgctgctggtta

SEQ ID NO: 165344 - DNA, 82 bp, Homo sapiens
tggtgctggttgtggttgtggcggcggcggctgtggctgctgtggaggcggtggtggcggctgctgctgctggttactggga

SEQ ID NO: 165345 - DNA, 81 bp, Homo sapiens
ttgtggttgtggcggcggcggctgtggctgctgtggaggcggtggtggcggctgctgctgctggttactgggaggcctctc

SEQ ID NO: 165346 - DNA, 83 bp, Homo sapiens
cggcggctgtggctgctgtggaggcggtggtggcggctgctgctgctggttactgggaggcctctccaccacgcagctctgag

SEQ ID NO: 165347 - DNA, 86 bp, Homo sapiens
tggctgctgtggaggcggtggtggcggctgctgctgctggttactgggaggcctctccaccacgcagctctgaggtgacttgatgc

SEQ ID NO: 165348 - DNA, 85 bp, Homo sapiens
tgtggaggcggtggtggcggctgctgctgctggttactgggaggcctctccaccacgcagctctgaggtgacttgatgctgcagt

SEQ ID NO: 165349 - DNA, 89 bp, Homo sapiens
tggtggcggctgctgctgctggttactgggaggcctctccaccacgcagctctgaggtgacttgatgctgcagttggcagcaggctgga

SEQ ID NO: 165350 - DNA, 94 bp, Homo sapiens
tgctgctggttactgggaggcctctccaccacgcagctctgaggtgacttgatgctgcagttggcagcaggctggacgctgctctgctgcatca

SEQ ID NO: 165351 - DNA, 95 bp, Homo sapiens
tggttactgggaggcctctccaccacgcagctctgaggtgacttgatgctgcagttggcagcaggctggacgctgctctgctgcatcatgctgca

SEQ ID NO: 165352 - DNA, 100 bp, Homo sapiens
aggcctctccaccacgcagctctgaggtgacttgatgctgcagttggcagcaggctggacgctgctctgctgcatcatgctgcagctgctgcccatgctg

SEQ ID NO: 165353 - DNA, 104 bp, Homo sapiens
ctctgaggtgacttgatgctgcagttggcagcaggctggacgctgctctgctgcatcatgctgcagctgctgcccatgctggccatctgctgagtgaccacaca

SEQ ID NO: 165354 - DNA, 104 bp, Homo sapiens
acttgatgctgcagttggcagcaggctggacgctgctctgctgcatcatgctgcagctgctgcccatgctggccatctgctgagtgaccacacagctgctctgg

SEQ ID NO: 165355 - DNA, 102 bp, Homo sapiens
agttggcagcaggctggacgctgctctgctgcatcatgctgcagctgctgcccatgctggccatctgctgagtgaccacacagctgctctgggtgaggctgc

SEQ ID NO: 165356 - DNA, 100 bp, Homo sapiens
tgctctgctgcatcatgctgcagctgctgcccatgctggccatctgctgagtgaccacacagctgctctgggtgaggctgctggaggacgacagcccacc

SEQ ID NO: 165357 - DNA, 93 bp, Homo sapiens
atcatgctgcagctgctgcccatgctggccatctgctgagtgaccacacagctgctctgggtgaggctgctggaggacgacagcccaccgtag

SEQ ID NO: 165358 - DNA, 90 bp, Homo sapiens
agctgctgcccatgctggccatctgctgagtgaccacacagctgctctgggtgaggctgctggaggacgacagcccaccgtaggagcagc

SEQ ID NO: 165359 - DNA, 87 bp, Homo sapiens
atctgctgagtgaccacacagctgctctgggtgaggctgctggaggacgacagcccaccgtaggagcagctgctctgggaagagctg

SEQ ID NO: 165360 - DNA, 85 bp, Homo sapiens
ctgagtgaccacacagctgctctgggtgaggctgctggaggacgacagcccaccgtaggagcagctgctctgggaagagctgttc

SEQ ID NO: 165361 - DNA, 85 bp, Homo sapiens
acacagctgctctgggtgaggctgctggaggacgacagcccaccgtaggagcagctgctctgggaagagctgttcccacagatgc

SEQ ID NO: 165362 - DNA, 84 bp, Homo sapiens
gtgaggctgctggaggacgacagcccaccgtaggagcagctgctctgggaagagctgttcccacagatgctgccgcccatcgtg

SEQ ID NO: 165363 - DNA, 82 bp, Homo sapiens
tggaggacgacagcccaccgtaggagcagctgctctgggaagagctgttcccacagatgctgccgcccatcgtggagtcgta

SEQ ID NO: 165364 - DNA, 81 bp, Homo sapiens
acagcccaccgtaggagcagctgctctgggaagagctgttcccacagatgctgccgcccatcgtggagtcgtaactgcttg

SEQ ID NO: 165365 - DNA, 82 bp, Homo sapiens
taggagcagctgctctgggaagagctgttcccacagatgctgccgcccatcgtggagtcgtaactgcttgggttctcatagt

SEQ ID NO: 165366 - DNA, 80 bp, Homo sapiens
agctgctctgggaagagctgttcccacagatgctgccgcccatcgtggagtcgtaactgcttgggttctcatagttttca

SEQ ID NO: 165367 - DNA, 80 bp, Homo sapiens
agagctgttcccacagatgctgccgcccatcgtggagtcgtaactgcttgggttctcatagttttcagtggtgctctcaa

SEQ ID NO: 165368 - DNA, 82 bp, Homo sapiens
ttcccacagatgctgccgcccatcgtggagtcgtaactgcttgggttctcatagttttcagtggtgctctcaatgctgccca

SEQ ID NO: 165369 - DNA, 80 bp, Homo sapiens
ctgccgcccatcgtggagtcgtaactgcttgggttctcatagttttcagtggtgctctcaatgctgcccaggtcactgaa

SEQ ID NO: 165370 - DNA, 80 bp, Homo sapiens
atcgtggagtcgtaactgcttgggttctcatagttttcagtggtgctctcaatgctgcccaggtcactgaagccgctgtc

SEQ ID NO: 165371 - DNA, 84 bp, Homo sapiens
ggttctcatagttttcagtggtgctctcaatgctgcccaggtcactgaagccgctgtccaccacctgctgagagtggtctgata

SEQ ID NO: 165372 - DNA, 82 bp, Homo sapiens
atagttttcagtggtgctctcaatgctgcccaggtcactgaagccgctgtccaccacctgctgagagtggtctgatacggaa

SEQ ID NO: 165373 - DNA, 86 bp, Homo sapiens
agtggtgctctcaatgctgcccaggtcactgaagccgctgtccaccacctgctgagagtggtctgatacggaaggcacatccatca

SEQ ID NO: 165374 - DNA, 83 bp, Homo sapiens
aatgctgcccaggtcactgaagccgctgtccaccacctgctgagagtggtctgatacggaaggcacatccatcatggggctgg

SEQ ID NO: 165375 - DNA, 84 bp, Homo sapiens
aagccgctgtccaccacctgctgagagtggtctgatacggaaggcacatccatcatggggctggtctccatgttctgcatagag

SEQ ID NO: 165376 - DNA, 83 bp, Homo sapiens
accacctgctgagagtggtctgatacggaaggcacatccatcatggggctggtctccatgttctgcatagagggtgcggacag

SEQ ID NO: 165377 - DNA, 81 bp, Homo sapiens
agagtggtctgatacggaaggcacatccatcatggggctggtctccatgttctgcatagagggtgcggacagggatccttg

SEQ ID NO: 165378 - DNA, 81 bp, Homo sapiens
ggtctgatacggaaggcacatccatcatggggctggtctccatgttctgcatagagggtgcggacagggatccttgttctg

SEQ ID NO: 165379 - DNA, 81 bp, Homo sapiens
aaggcacatccatcatggggctggtctccatgttctgcatagagggtgcggacagggatccttgttctgggctgatctggg

SEQ ID NO: 165380 - DNA, 81 bp, Homo sapiens
ctggtctccatgttctgcatagagggtgcggacagggatccttgttctgggctgatctgggtgtagccactctcaagggca

SEQ ID NO: 165381 - DNA, 79 bp, Homo sapiens
atgttctgcatagagggtgcggacagggatccttgttctgggctgatctgggtgtagccactctcaagggcaggcacgt

SEQ ID NO: 165382 - DNA, 76 bp, Homo sapiens
atagagggtgcggacagggatccttgttctgggctgatctgggtgtagccactctcaagggcaggcacgttgggac

SEQ ID NO: 165383 - DNA, 76 bp, Homo sapiens
agggatccttgttctgggctgatctgggtgtagccactctcaagggcaggcacgttgggactgctgaccgaacgga

SEQ ID NO: 165384 - DNA, 78 bp, Homo sapiens
tccttgttctgggctgatctgggtgtagccactctcaagggcaggcacgttgggactgctgaccgaacggactgactg

SEQ ID NO: 165385 - DNA, 80 bp, Homo sapiens
tgatctgggtgtagccactctcaagggcaggcacgttgggactgctgaccgaacggactgactggctggggtgagactga

SEQ ID NO: 165386 - DNA, 77 bp, Homo sapiens
tagccactctcaagggcaggcacgttgggactgctgaccgaacggactgactggctggggtgagactgaacggagga

SEQ ID NO: 165387 - DNA, 75 bp, Homo sapiens
cacgttgggactgctgaccgaacggactgactggctggggtgagactgaacggaggagatagggctattatgttc

SEQ ID NO: 165388 - DNA, 82 bp, Homo sapiens
gtgagactgaacggaggagatagggctattatgttctgacgcatgacagtcttcaaccatggacatctgagggtcctcgtca

SEQ ID NO: 165389 - DNA, 81 bp, Homo sapiens
ctgaacggaggagatagggctattatgttctgacgcatgacagtcttcaaccatggacatctgagggtcctcgtcagcctg

SEQ ID NO: 165390 - DNA, 79 bp, Homo sapiens
ttcaaccatggacatctgagggtcctcgtcagcctgggtgtaactctgcagggtctgacacgccgcaagagtttcctca

SEQ ID NO: 165391 - DNA, 78 bp, Homo sapiens
atggacatctgagggtcctcgtcagcctgggtgtaactctgcagggtctgacacgccgcaagagtttcctcacagtcc

SEQ ID NO: 165392 - DNA, 76 bp, Homo sapiens
ctgagggtcctcgtcagcctgggtgtaactctgcagggtctgacacgccgcaagagtttcctcacagtcctggtag

SEQ ID NO: 165393 - DNA, 81 bp, Homo sapiens
tcgtcagcctgggtgtaactctgcagggtctgacacgccgcaagagtttcctcacagtcctggtaggcgccctcatgctca

SEQ ID NO: 165394 - DNA, 80 bp, Homo sapiens
tgtaactctgcagggtctgacacgccgcaagagtttcctcacagtcctggtaggcgccctcatgctcactgctttcttct

SEQ ID NO: 165395 - DNA, 78 bp, Homo sapiens
agggtctgacacgccgcaagagtttcctcacagtcctggtaggcgccctcatgctcactgctttcttcttgagtcaaa

SEQ ID NO: 165396 - DNA, 83 bp, Homo sapiens
tgacacgccgcaagagtttcctcacagtcctggtaggcgccctcatgctcactgctttcttcttgagtcaaagactgcactgc

SEQ ID NO: 165397 - DNA, 79 bp, Homo sapiens
agtttcctcacagtcctggtaggcgccctcatgctcactgctttcttcttgagtcaaagactgcactgcctgtacagtt

SEQ ID NO: 165398 - DNA, 83 bp, Homo sapiens
ctcacagtcctggtaggcgccctcatgctcactgctttcttcttgagtcaaagactgcactgcctgtacagtttccagatcca

SEQ ID NO: 165399 - DNA, 84 bp, Homo sapiens
atgctcactgctttcttcttgagtcaaagactgcactgcctgtacagtttccagatccagctcactatgaggaatctcttcctc

SEQ ID NO: 165400 - DNA, 77 bp, Homo sapiens
actgcactgcctgtacagtttccagatccagctcactatgaggaatctcttcctcctcttttaattcgattaactct

SEQ ID NO: 165401 - DNA, 75 bp, Homo sapiens
tgtacagtttccagatccagctcactatgaggaatctcttcctcctcttttaattcgattaactcttccttagtg

SEQ ID NO: 165402 - DNA, 74 bp, Homo sapiens
gtttccagatccagctcactatgaggaatctcttcctcctcttttaattcgattaactcttccttagtgtggga

SEQ ID NO: 165403 - DNA, 72 bp, Homo sapiens
tcactatgaggaatctcttcctcctcttttaattcgattaactcttccttagtgtgggagtcttcttcgtgg

SEQ ID NO: 165404 - DNA, 70 bp, Homo sapiens
ttcctcctcttttaattcgattaactcttccttagtgtgggagtcttcttcgtggtcgtcctcagaccca

SEQ ID NO: 165405 - DNA, 73 bp, Homo sapiens
cttttaattcgattaactcttccttagtgtgggagtcttcttcgtggtcgtcctcagacccagccatctgctc

SEQ ID NO: 165406 - DNA, 75 bp, Homo sapiens
attaactcttccttagtgtgggagtcttcttcgtggtcgtcctcagacccagccatctgctctgacaccacggac

SEQ ID NO: 165407 - DNA, 79 bp, Homo sapiens
agtcttcttcgtggtcgtcctcagacccagccatctgctctgacaccacggacgtgtcatgggaaggctgctcctcttc

SEQ ID NO: 165408 - DNA, 80 bp, Homo sapiens
ttcgtggtcgtcctcagacccagccatctgctctgacaccacggacgtgtcatgggaaggctgctcctcttcggaatcca

SEQ ID NO: 165409 - DNA, 78 bp, Homo sapiens
agacccagccatctgctctgacaccacggacgtgtcatgggaaggctgctcctcttcggaatccagctcggtttcctc

SEQ ID NO: 165410 - DNA, 76 bp, Homo sapiens
atctgctctgacaccacggacgtgtcatgggaaggctgctcctcttcggaatccagctcggtttcctctttatcct

SEQ ID NO: 165411 - DNA, 72 bp, Homo sapiens
acaccacggacgtgtcatgggaaggctgctcctcttcggaatccagctcggtttcctctttatcctttatct

SEQ ID NO: 165412 - DNA, 71 bp, Homo sapiens
acgtgtcatgggaaggctgctcctcttcggaatccagctcggtttcctctttatcctttatcttttcccta

SEQ ID NO: 165413 - DNA, 74 bp, Homo sapiens
tcctcttcggaatccagctcggtttcctctttatcctttatcttttccctactcttctgcatattagcatctaa

SEQ ID NO: 165414 - DNA, 71 bp, Homo sapiens
cggtttcctctttatcctttatcttttccctactcttctgcatattagcatctaaaaaagactcttgaaca

SEQ ID NO: 165415 - DNA, 75 bp, Homo sapiens
tttatcttttccctactcttctgcatattagcatctaaaaaagactcttgaacaccaggctcctccttgacatct

SEQ ID NO: 165416 - DNA, 71 bp, Homo sapiens
taaaaaagactcttgaacaccaggctcctccttgacatcttccctcgtgggctgttcctctagctcctttt

SEQ ID NO: 165417 - DNA, 72 bp, Homo sapiens
aagactcttgaacaccaggctcctccttgacatcttccctcgtgggctgttcctctagctcctttttctttg

SEQ ID NO: 165418 - DNA, 78 bp, Homo sapiens
tccttgacatcttccctcgtgggctgttcctctagctcctttttctttgtggactccaggtggccatcatcctcatca

SEQ ID NO: 165419 - DNA, 78 bp, Homo sapiens
atcttccctcgtgggctgttcctctagctcctttttctttgtggactccaggtggccatcatcctcatcatcagcgtc

SEQ ID NO: 165420 - DNA, 80 bp, Homo sapiens
gctgttcctctagctcctttttctttgtggactccaggtggccatcatcctcatcatcagcgtcgtggtcgtcattctgg

SEQ ID NO: 165421 - DNA, 84 bp, Homo sapiens
tctagctcctttttctttgtggactccaggtggccatcatcctcatcatcagcgtcgtggtcgtcattctgggcagtctctgca

SEQ ID NO: 165422 - DNA, 86 bp, Homo sapiens
tttttctttgtggactccaggtggccatcatcctcatcatcagcgtcgtggtcgtcattctgggcagtctctgcagctgcatcttc

SEQ ID NO: 165423 - DNA, 89 bp, Homo sapiens
tgtggactccaggtggccatcatcctcatcatcagcgtcgtggtcgtcattctgggcagtctctgcagctgcatcttcctcctcctctg

SEQ ID NO: 165424 - DNA, 90 bp, Homo sapiens
gccatcatcctcatcatcagcgtcgtggtcgtcattctgggcagtctctgcagctgcatcttcctcctcctctggctctggctcctctaa

SEQ ID NO: 165425 - DNA, 87 bp, Homo sapiens
atcctcatcatcagcgtcgtggtcgtcattctgggcagtctctgcagctgcatcttcctcctcctctggctctggctcctctaattc

SEQ ID NO: 165426 - DNA, 87 bp, Homo sapiens
atcagcgtcgtggtcgtcattctgggcagtctctgcagctgcatcttcctcctcctctggctctggctcctctaattcctgctgctc

SEQ ID NO: 165427 - DNA, 87 bp, Homo sapiens
tggtcgtcattctgggcagtctctgcagctgcatcttcctcctcctctggctctggctcctctaattcctgctgctcctcctctgac

SEQ ID NO: 165428 - DNA, 83 bp, Homo sapiens
tcctctggctctggctcctctaattcctgctgctcctcctctgactgcctctgctcctctgagacacggggcttctcttcttc

SEQ ID NO: 165429 - DNA, 81 bp, Homo sapiens
ctctggctcctctaattcctgctgctcctcctctgactgcctctgctcctctgagacacggggcttctcttcttcctcctc

SEQ ID NO: 165430 - DNA, 81 bp, Homo sapiens
tctaattcctgctgctcctcctctgactgcctctgctcctctgagacacggggcttctcttcttcctcctccacctcaggc

SEQ ID NO: 165431 - DNA, 78 bp, Homo sapiens
tctgactgcctctgctcctctgagacacggggcttctcttcttcctcctccacctcaggctccttggtttcggtctca

SEQ ID NO: 165432 - DNA, 75 bp, Homo sapiens
tctgctcctctgagacacggggcttctcttcttcctcctccacctcaggctccttggtttcggtctcaggactat

SEQ ID NO: 165433 - DNA, 76 bp, Homo sapiens
ctgagacacggggcttctcttcttcctcctccacctcaggctccttggtttcggtctcaggactattgctgctgtc

SEQ ID NO: 165434 - DNA, 80 bp, Homo sapiens
ttctcttcttcctcctccacctcaggctccttggtttcggtctcaggactattgctgctgtctgctggagaggctgctgg

SEQ ID NO: 165435 - DNA, 80 bp, Homo sapiens
ttcctcctccacctcaggctccttggtttcggtctcaggactattgctgctgtctgctggagaggctgctgggacttcac

SEQ ID NO: 165436 - DNA, 86 bp, Homo sapiens
tcaggctccttggtttcggtctcaggactattgctgctgtctgctggagaggctgctgggacttcactgctggctgcatcctcttc

SEQ ID NO: 165437 - DNA, 87 bp, Homo sapiens
tcggtctcaggactattgctgctgtctgctggagaggctgctgggacttcactgctggctgcatcctcttcctcaccctcttcagcc

SEQ ID NO: 165438 - DNA, 87 bp, Homo sapiens
actattgctgctgtctgctggagaggctgctgggacttcactgctggctgcatcctcttcctcaccctcttcagcctcttctgcctc

SEQ ID NO: 165439 - DNA, 89 bp, Homo sapiens
tctgctggagaggctgctgggacttcactgctggctgcatcctcttcctcaccctcttcagcctcttctgcctctgcttgcatctcctc

SEQ ID NO: 165440 - DNA, 85 bp, Homo sapiens
agaggctgctgggacttcactgctggctgcatcctcttcctcaccctcttcagcctcttctgcctctgcttgcatctcctcctcc

SEQ ID NO: 165441 - DNA, 73 bp, Homo sapiens
ctcctcctccttcctctcctcgggtaggggcatgtcttcttttggctcaacagtttcttcactctcctggatc

SEQ ID NO: 165442 - DNA, 72 bp, Homo sapiens
ttcctctcctcgggtaggggcatgtcttcttttggctcaacagtttcttcactctcctggatcttgggttta

SEQ ID NO: 165443 - DNA, 72 bp, Homo sapiens
tcctcgggtaggggcatgtcttcttttggctcaacagtttcttcactctcctggatcttgggtttacgtcca

SEQ ID NO: 165444 - DNA, 73 bp, Homo sapiens
catgtcttcttttggctcaacagtttcttcactctcctggatcttgggtttacgtccagctttaggaatggaa

SEQ ID NO: 165445 - DNA, 71 bp, Homo sapiens
ttcttttggctcaacagtttcttcactctcctggatcttgggtttacgtccagctttaggaatggaaacga

SEQ ID NO: 165446 - DNA, 77 bp, Homo sapiens
atcttgggtttacgtccagctttaggaatggaaacgatgggctcaatgacgcatgcttgagtagaaactggcatgat

SEQ ID NO: 165447 - DNA, 77 bp, Homo sapiens
gtttacgtccagctttaggaatggaaacgatgggctcaatgacgcatgcttgagtagaaactggcatgatttcccga

SEQ ID NO: 165448 - DNA, 77 bp, Homo sapiens
tttaggaatggaaacgatgggctcaatgacgcatgcttgagtagaaactggcatgatttcccgactcaacttaaatc

SEQ ID NO: 165449 - DNA, 75 bp, Homo sapiens
aaacgatgggctcaatgacgcatgcttgagtagaaactggcatgatttcccgactcaacttaaatcctggttttc

SEQ ID NO: 165450 - DNA, 76 bp, Homo sapiens
atgggctcaatgacgcatgcttgagtagaaactggcatgatttcccgactcaacttaaatcctggttttcgaccag

SEQ ID NO: 165451 - DNA, 73 bp, Homo sapiens
atgacgcatgcttgagtagaaactggcatgatttcccgactcaacttaaatcctggttttcgaccaggtcttt

SEQ ID NO: 165452 - DNA, 71 bp, Homo sapiens
atgcttgagtagaaactggcatgatttcccgactcaacttaaatcctggttttcgaccaggtcttttcttc

SEQ ID NO: 165453 - DNA, 70 bp, Homo sapiens
cttgagtagaaactggcatgatttcccgactcaacttaaatcctggttttcgaccaggtcttttcttcca

SEQ ID NO: 165454 - DNA, 69 bp, Homo sapiens
ctggcatgatttcccgactcaacttaaatcctggttttcgaccaggtcttttcttccagtggattggtt

SEQ ID NO: 165455 - DNA, 68 bp, Homo sapiens
actcaacttaaatcctggttttcgaccaggtcttttcttccagtggattggtttgcggctcttgcctt

SEQ ID NO: 165456 - DNA, 68 bp, Homo sapiens
ttttcgaccaggtcttttcttccagtggattggtttgcggctcttgcctttgggccatccctttttct

SEQ ID NO: 165457 - DNA, 67 bp, Homo sapiens
aggtcttttcttccagtggattggtttgcggctcttgcctttgggccatccctttttctttttcaaa

SEQ ID NO: 165458 - DNA, 71 bp, Homo sapiens
ttccagtggattggtttgcggctcttgcctttgggccatccctttttctttttcaaaggtgtggatgtatc

SEQ ID NO: 165459 - DNA, 73 bp, Homo sapiens
tttgcggctcttgcctttgggccatccctttttctttttcaaaggtgtggatgtatctggctcaagaggagaa

SEQ ID NO: 165460 - DNA, 75 bp, Homo sapiens
ttgcctttgggccatccctttttctttttcaaaggtgtggatgtatctggctcaagaggagaattcttcacatca

SEQ ID NO: 165461 - DNA, 74 bp, Homo sapiens
ccatccctttttctttttcaaaggtgtggatgtatctggctcaagaggagaattcttcacatcacgttttcgca

SEQ ID NO: 165462 - DNA, 77 bp, Homo sapiens
ttcaaaggtgtggatgtatctggctcaagaggagaattcttcacatcacgttttcgcaaaagagatactggctttaa

SEQ ID NO: 165463 - DNA, 79 bp, Homo sapiens
tgtatctggctcaagaggagaattcttcacatcacgttttcgcaaaagagatactggctttaagataggagtgtctata

SEQ ID NO: 165464 - DNA, 76 bp, Homo sapiens
tcaagaggagaattcttcacatcacgttttcgcaaaagagatactggctttaagataggagtgtctatacaggaag

SEQ ID NO: 165465 - DNA, 72 bp, Homo sapiens
aattcttcacatcacgttttcgcaaaagagatactggctttaagataggagtgtctatacaggaaggaaaaa

SEQ ID NO: 165466 - DNA, 72 bp, Homo sapiens
ttcacatcacgttttcgcaaaagagatactggctttaagataggagtgtctatacaggaaggaaaaaaaaca

SEQ ID NO: 165467 - DNA, 69 bp, Homo sapiens
gatactggctttaagataggagtgtctatacaggaaggaaaaaaaacaaagacaggttacaaggtctta

SEQ ID NO: 165468 - DNA, 67 bp, Homo sapiens
ggctttaagataggagtgtctatacaggaaggaaaaaaaacaaagacaggttacaaggtcttacatt

SEQ ID NO: 165469 - DNA, 66 bp, Homo sapiens
aggagtgtctatacaggaaggaaaaaaaacaaagacaggttacaaggtcttacattttctagttcc

SEQ ID NO: 165470 - DNA, 65 bp, Homo sapiens
caggaaggaaaaaaaacaaagacaggttacaaggtcttacattttctagttccttcttccaagac

SEQ ID NO: 165471 - DNA, 72 bp, Homo sapiens
caaagacaggttacaaggtcttacattttctagttccttcttccaagactagcatatacaatagaaatgact

SEQ ID NO: 165472 - DNA, 73 bp, Homo sapiens
caaggtcttacattttctagttccttcttccaagactagcatatacaatagaaatgactttattaatcattac

SEQ ID NO: 165473 - DNA, 71 bp, Homo sapiens
ttttctagttccttcttccaagactagcatatacaatagaaatgactttattaatcattacttttataaac

SEQ ID NO: 165474 - DNA, 73 bp, Homo sapiens
ccttcttccaagactagcatatacaatagaaatgactttattaatcattacttttataaactcctgattgtct

SEQ ID NO: 165475 - DNA, 74 bp, Homo sapiens
ttccaagactagcatatacaatagaaatgactttattaatcattacttttataaactcctgattgtcttcattt

SEQ ID NO: 165476 - DNA, 72 bp, Homo sapiens
agcatatacaatagaaatgactttattaatcattacttttataaactcctgattgtcttcattttaaagtta

SEQ ID NO: 165477 - DNA, 68 bp, Homo sapiens
aatgactttattaatcattacttttataaactcctgattgtcttcattttaaagttaagaacctagag

SEQ ID NO: 165478 - DNA, 68 bp, Homo sapiens
ttaatcattacttttataaactcctgattgtcttcattttaaagttaagaacctagaggataaaacta

SEQ ID NO: 165479 - DNA, 68 bp, Homo sapiens
cttttataaactcctgattgtcttcattttaaagttaagaacctagaggataaaactaattagtgaca

SEQ ID NO: 165480 - DNA, 72 bp, Homo sapiens
ctcctgattgtcttcattttaaagttaagaacctagaggataaaactaattagtgacatattctaagtcaca

SEQ ID NO: 165481 - DNA, 72 bp, Homo sapiens
tcttcattttaaagttaagaacctagaggataaaactaattagtgacatattctaagtcacacagtgaattg

SEQ ID NO: 165482 - DNA, 74 bp, Homo sapiens
aaagttaagaacctagaggataaaactaattagtgacatattctaagtcacacagtgaattggcagaactatga

SEQ ID NO: 165483 - DNA, 75 bp, Homo sapiens
agaacctagaggataaaactaattagtgacatattctaagtcacacagtgaattggcagaactatgaaagaatcc

SEQ ID NO: 165484 - DNA, 81 bp, Homo sapiens
attagtgacatattctaagtcacacagtgaattggcagaactatgaaagaatcctggtcaacattatgttatcagacacta

SEQ ID NO: 165485 - DNA, 81 bp, Homo sapiens
acatattctaagtcacacagtgaattggcagaactatgaaagaatcctggtcaacattatgttatcagacactagtcagaa

SEQ ID NO: 165486 - DNA, 80 bp, Homo sapiens
cacagtgaattggcagaactatgaaagaatcctggtcaacattatgttatcagacactagtcagaaccaattcaagacta

SEQ ID NO: 165487 - DNA, 79 bp, Homo sapiens
aattggcagaactatgaaagaatcctggtcaacattatgttatcagacactagtcagaaccaattcaagactaccatca

SEQ ID NO: 165488 - DNA, 83 bp, Homo sapiens
aactatgaaagaatcctggtcaacattatgttatcagacactagtcagaaccaattcaagactaccatcatcagctgcatgtc

SEQ ID NO: 165489 - DNA, 83 bp, Homo sapiens
atcctggtcaacattatgttatcagacactagtcagaaccaattcaagactaccatcatcagctgcatgtctgtgggaagtta

SEQ ID NO: 165490 - DNA, 83 bp, Homo sapiens
attatgttatcagacactagtcagaaccaattcaagactaccatcatcagctgcatgtctgtgggaagttactctacatttca

SEQ ID NO: 165491 - DNA, 81 bp, Homo sapiens
gttatcagacactagtcagaaccaattcaagactaccatcatcagctgcatgtctgtgggaagttactctacatttcagtt

SEQ ID NO: 165492 - DNA, 72 bp, Homo sapiens
gtaaaatggagatgaactttataaagaggcaaataagtagtaagcagtacttttatcaagttgtctctacta

SEQ ID NO: 165493 - DNA, 71 bp, Homo sapiens
ctctttttttttctgcttgtgatttactttatctctcggattttcttactttccacaaatcatcacttcag

SEQ ID NO: 165494 - DNA, 77 bp, Homo sapiens
ttttctgcttgtgatttactttatctctcggattttcttactttccacaaatcatcacttcaggtagtatgatgagc

SEQ ID NO: 165495 - DNA, 76 bp, Homo sapiens
gatttactttatctctcggattttcttactttccacaaatcatcacttcaggtagtatgatgagccaattactcta

SEQ ID NO: 165496 - DNA, 76 bp, Homo sapiens
actttatctctcggattttcttactttccacaaatcatcacttcaggtagtatgatgagccaattactctaggcca

SEQ ID NO: 165497 - DNA, 82 bp, Homo sapiens
ttttcttactttccacaaatcatcacttcaggtagtatgatgagccaattactctaggccatgactgagccatcgtatgtga

SEQ ID NO: 165498 - DNA, 82 bp, Homo sapiens
ttactttccacaaatcatcacttcaggtagtatgatgagccaattactctaggccatgactgagccatcgtatgtgaacagt

SEQ ID NO: 165499 - DNA, 82 bp, Homo sapiens
aaatcatcacttcaggtagtatgatgagccaattactctaggccatgactgagccatcgtatgtgaacagttgttcaattaa

SEQ ID NO: 165500 - DNA, 80 bp, Homo sapiens
aggtagtatgatgagccaattactctaggccatgactgagccatcgtatgtgaacagttgttcaattaatgttgtgtttg

SEQ ID NO: 165501 - DNA, 80 bp, Homo sapiens
atgagccaattactctaggccatgactgagccatcgtatgtgaacagttgttcaattaatgttgtgtttgtatgggaata

SEQ ID NO: 165502 - DNA, 80 bp, Homo sapiens
attactctaggccatgactgagccatcgtatgtgaacagttgttcaattaatgttgtgtttgtatgggaatagctgcaaa

SEQ ID NO: 165503 - DNA, 79 bp, Homo sapiens
atgactgagccatcgtatgtgaacagttgttcaattaatgttgtgtttgtatgggaatagctgcaaagcatttatttag

SEQ ID NO: 165504 - DNA, 78 bp, Homo sapiens
catcgtatgtgaacagttgttcaattaatgttgtgtttgtatgggaatagctgcaaagcatttatttagtcctagaca

SEQ ID NO: 165505 - DNA, 73 bp, Homo sapiens
gaacagttgttcaattaatgttgtgtttgtatgggaatagctgcaaagcatttatttagtcctagacaaaaac

SEQ ID NO: 165506 - DNA, 74 bp, Homo sapiens
gttgttcaattaatgttgtgtttgtatgggaatagctgcaaagcatttatttagtcctagacaaaaactgacat

SEQ ID NO: 165507 - DNA, 74 bp, Homo sapiens
tttgtatgggaatagctgcaaagcatttatttagtcctagacaaaaactgacatttagacttagacaaacaaga

SEQ ID NO: 165508 - DNA, 70 bp, Homo sapiens
aatagctgcaaagcatttatttagtcctagacaaaaactgacatttagacttagacaaacaagaaaaaat

SEQ ID NO: 165509 - DNA, 69 bp, Homo sapiens
gcatttatttagtcctagacaaaaactgacatttagacttagacaaacaagaaaaaattaaagcaccaa

SEQ ID NO: 165510 - DNA, 69 bp, Homo sapiens
agtcctagacaaaaactgacatttagacttagacaaacaagaaaaaattaaagcaccaattacattcat

SEQ ID NO: 165511 - DNA, 69 bp, Homo sapiens
acaaaaactgacatttagacttagacaaacaagaaaaaattaaagcaccaattacattcattagaaata

SEQ ID NO: 165512 - DNA, 68 bp, Homo sapiens
acatttagacttagacaaacaagaaaaaattaaagcaccaattacattcattagaaataaattttata

SEQ ID NO: 165513 - DNA, 69 bp, Homo sapiens
gcaccaattacattcattagaaataaattttatattattagcattttaaaaaaactatggtaaactata

SEQ ID NO: 165514 - DNA, 68 bp, Homo sapiens
cattcattagaaataaattttatattattagcattttaaaaaaactatggtaaactatacgtaacata

SEQ ID NO: 165515 - DNA, 63 bp, Homo sapiens
attttatattattagcattttaaaaaaactatggtaaactatacgtaacataaaacttaaaat

SEQ ID NO: 165516 - DNA, 63 bp, Homo sapiens
gcattttaaaaaaactatggtaaactatacgtaacataaaacttaaaattttaaccatttata

SEQ ID NO: 165517 - DNA, 62 bp, Homo sapiens
aaactatggtaaactatacgtaacataaaacttaaaattttaaccatttataagtgttaagt

SEQ ID NO: 165518 - DNA, 76 bp, Homo sapiens
gtggcattaagtacactcacattgcctattaatttttaaagaataagaataccaagacaagaacatgatgcagtgg

SEQ ID NO: 165519 - DNA, 76 bp, Homo sapiens
tggcattaagtacactcacattgcctattaatttttaaagaataagaataccaagacaagaacatgatgcagtggg

SEQ ID NO: 165520 - DNA, 73 bp, Homo sapiens
attaagtacactcacattgcctattaatttttaaagaataagaataccaagacaagaacatgatgcagtgggg

SEQ ID NO: 165521 - DNA, 71 bp, Homo sapiens
attgcctattaatttttaaagaataagaataccaagacaagaacatgatgcagtgggggcacggctaaaaa

SEQ ID NO: 165522 - DNA, 71 bp, Homo sapiens
aatttttaaagaataagaataccaagacaagaacatgatgcagtgggggcacggctaaaaaggcacagtta

SEQ ID NO: 165523 - DNA, 73 bp, Homo sapiens
tttaaagaataagaataccaagacaagaacatgatgcagtgggggcacggctaaaaaggcacagttagtagta

SEQ ID NO: 165524 - DNA, 73 bp, Homo sapiens
aagaataagaataccaagacaagaacatgatgcagtgggggcacggctaaaaaggcacagttagtagtagtaa

SEQ ID NO: 165525 - DNA, 72 bp, Homo sapiens
aataagaataccaagacaagaacatgatgcagtgggggcacggctaaaaaggcacagttagtagtagtaact

SEQ ID NO: 165526 - DNA, 72 bp, Homo sapiens
aataccaagacaagaacatgatgcagtgggggcacggctaaaaaggcacagttagtagtagtaacttgaaag

SEQ ID NO: 165527 - DNA, 73 bp, Homo sapiens
aagacaagaacatgatgcagtgggggcacggctaaaaaggcacagttagtagtagtaacttgaaagtcaacaa

SEQ ID NO: 165528 - DNA, 71 bp, Homo sapiens
aacatgatgcagtgggggcacggctaaaaaggcacagttagtagtagtaacttgaaagtcaacaaaggaaa

SEQ ID NO: 165529 - DNA, 73 bp, Homo sapiens
ggggcacggctaaaaaggcacagttagtagtagtaacttgaaagtcaacaaaggaaatggctgcatcagcaaa

SEQ ID NO: 165530 - DNA, 73 bp, Homo sapiens
taaaaaggcacagttagtagtagtaacttgaaagtcaacaaaggaaatggctgcatcagcaaaaatctaagtc

SEQ ID NO: 165531 - DNA, 73 bp, Homo sapiens
acagttagtagtagtaacttgaaagtcaacaaaggaaatggctgcatcagcaaaaatctaagtccatgggaac

SEQ ID NO: 165532 - DNA, 71 bp, Homo sapiens
aaagtcaacaaaggaaatggctgcatcagcaaaaatctaagtccatgggaacttaatcaggggtactattt

SEQ ID NO: 165533 - DNA, 72 bp, Homo sapiens
aaaggaaatggctgcatcagcaaaaatctaagtccatgggaacttaatcaggggtactattttagtgtacaa

SEQ ID NO: 165534 - DNA, 76 bp, Homo sapiens
ctgcatcagcaaaaatctaagtccatgggaacttaatcaggggtactattttagtgtacaatgatctaagacagaa

SEQ ID NO: 165535 - DNA, 73 bp, Homo sapiens
ctaagtccatgggaacttaatcaggggtactattttagtgtacaatgatctaagacagaatataaagtgctaa

SEQ ID NO: 165536 - DNA, 71 bp, Homo sapiens
gggaacttaatcaggggtactattttagtgtacaatgatctaagacagaatataaagtgctaaatttacaa

SEQ ID NO: 165537 - DNA, 69 bp, Homo sapiens
gggtactattttagtgtacaatgatctaagacagaatataaagtgctaaatttacaaaataaattttta

SEQ ID NO: 165538 - DNA, 69 bp, Homo sapiens
tttagtgtacaatgatctaagacagaatataaagtgctaaatttacaaaataaatttttagtttcctag

SEQ ID NO: 165539 - DNA, 69 bp, Homo sapiens
gtacaatgatctaagacagaatataaagtgctaaatttacaaaataaatttttagtttcctagttatgt

SEQ ID NO: 165540 - DNA, 67 bp, Homo sapiens
ctaagacagaatataaagtgctaaatttacaaaataaatttttagtttcctagttatgttatttcaa

SEQ ID NO: 165541 - DNA, 67 bp, Homo sapiens
tataaagtgctaaatttacaaaataaatttttagtttcctagttatgttatttcaaaacatagcaag

SEQ ID NO: 165542 - DNA, 67 bp, Homo sapiens
tttacaaaataaatttttagtttcctagttatgttatttcaaaacatagcaagttaaactctgtaga

SEQ ID NO: 165543 - DNA, 72 bp, Homo sapiens
aaatttttagtttcctagttatgttatttcaaaacatagcaagttaaactctgtagaatcattcatgataga

SEQ ID NO: 165544 - DNA, 76 bp, Homo sapiens
agtttcctagttatgttatttcaaaacatagcaagttaaactctgtagaatcattcatgatagagcaaagaacaca

SEQ ID NO: 165545 - DNA, 80 bp, Homo sapiens
gttatgttatttcaaaacatagcaagttaaactctgtagaatcattcatgatagagcaaagaacacattcatcttatcac

SEQ ID NO: 165546 - DNA, 80 bp, Homo sapiens
tcaaaacatagcaagttaaactctgtagaatcattcatgatagagcaaagaacacattcatcttatcactatattaaaag

SEQ ID NO: 165547 - DNA, 79 bp, Homo sapiens
gcaagttaaactctgtagaatcattcatgatagagcaaagaacacattcatcttatcactatattaaaagtatttgttg

SEQ ID NO: 165548 - DNA, 80 bp, Homo sapiens
aactctgtagaatcattcatgatagagcaaagaacacattcatcttatcactatattaaaagtatttgttggccaggcag

SEQ ID NO: 165549 - DNA, 68 bp, Homo sapiens
aaaataaaaaagtatttgttatatagaaaatatgagaatggagaaaatgtaagtttatcttctagact

SEQ ID NO: 165550 - DNA, 70 bp, Homo sapiens
aaataaaaaagtatttgttatatagaaaatatgagaatggagaaaatgtaagtttatcttctagacttga

SEQ ID NO: 165551 - DNA, 73 bp, Homo sapiens
gtatttgttatatagaaaatatgagaatggagaaaatgtaagtttatcttctagacttgaaactgactgaatt

SEQ ID NO: 165552 - DNA, 72 bp, Homo sapiens
gttatatagaaaatatgagaatggagaaaatgtaagtttatcttctagacttgaaactgactgaatttttaa

SEQ ID NO: 165553 - DNA, 69 bp, Homo sapiens
aaaatatgagaatggagaaaatgtaagtttatcttctagacttgaaactgactgaatttttaaaagaat

SEQ ID NO: 165554 - DNA, 68 bp, Homo sapiens
tggagaaaatgtaagtttatcttctagacttgaaactgactgaatttttaaaagaattaaaaagttca

SEQ ID NO: 165555 - DNA, 68 bp, Homo sapiens
agtttatcttctagacttgaaactgactgaatttttaaaagaattaaaaagttcaaccagttaatgca

SEQ ID NO: 165556 - DNA, 69 bp, Homo sapiens
tcttctagacttgaaactgactgaatttttaaaagaattaaaaagttcaaccagttaatgcataaaagc

SEQ ID NO: 165557 - DNA, 66 bp, Homo sapiens
cttgaaactgactgaatttttaaaagaattaaaaagttcaaccagttaatgcataaaagctaaagg

SEQ ID NO: 165558 - DNA, 65 bp, Homo sapiens
atttttaaaagaattaaaaagttcaaccagttaatgcataaaagctaaaggtttatgtaccaaga

SEQ ID NO: 165559 - DNA, 71 bp, Homo sapiens
accagttaatgcataaaagctaaaggtttatgtaccaagactggacaagtagatttcttcaaatttgccca

SEQ ID NO: 165560 - DNA, 70 bp, Homo sapiens
gcataaaagctaaaggtttatgtaccaagactggacaagtagatttcttcaaatttgcccaacaaagtaa

SEQ ID NO: 165561 - DNA, 72 bp, Homo sapiens
aggtttatgtaccaagactggacaagtagatttcttcaaatttgcccaacaaagtaaaaatgctcattctga

SEQ ID NO: 165562 - DNA, 76 bp, Homo sapiens
caagactggacaagtagatttcttcaaatttgcccaacaaagtaaaaatgctcattctgagcccatgcgagataaa

SEQ ID NO: 165563 - DNA, 78 bp, Homo sapiens
acaagtagatttcttcaaatttgcccaacaaagtaaaaatgctcattctgagcccatgcgagataaacacactgcaga

SEQ ID NO: 165564 - DNA, 80 bp, Homo sapiens
aagtagatttcttcaaatttgcccaacaaagtaaaaatgctcattctgagcccatgcgagataaacacactgcagatgca

SEQ ID NO: 165565 - DNA, 84 bp, Homo sapiens
atttcttcaaatttgcccaacaaagtaaaaatgctcattctgagcccatgcgagataaacacactgcagatgcaggcagcatga

SEQ ID NO: 165566 - DNA, 86 bp, Homo sapiens
ttcaaatttgcccaacaaagtaaaaatgctcattctgagcccatgcgagataaacacactgcagatgcaggcagcatgagacactg

SEQ ID NO: 165567 - DNA, 84 bp, Homo sapiens
aacaaagtaaaaatgctcattctgagcccatgcgagataaacacactgcagatgcaggcagcatgagacactggcaaaacttta

SEQ ID NO: 165568 - DNA, 85 bp, Homo sapiens
agtaaaaatgctcattctgagcccatgcgagataaacacactgcagatgcaggcagcatgagacactggcaaaactttaggctag

SEQ ID NO: 165569 - DNA, 84 bp, Homo sapiens
ctcattctgagcccatgcgagataaacacactgcagatgcaggcagcatgagacactggcaaaactttaggctagggtgaaaaa

SEQ ID NO: 165570 - DNA, 83 bp, Homo sapiens
attctgagcccatgcgagataaacacactgcagatgcaggcagcatgagacactggcaaaactttaggctagggtgaaaaaga

SEQ ID NO: 165571 - DNA, 81 bp, Homo sapiens
agcccatgcgagataaacacactgcagatgcaggcagcatgagacactggcaaaactttaggctagggtgaaaaagacttg

SEQ ID NO: 165572 - DNA, 80 bp, Homo sapiens
atgcgagataaacacactgcagatgcaggcagcatgagacactggcaaaactttaggctagggtgaaaaagacttgtttc

SEQ ID NO: 165573 - DNA, 78 bp, Homo sapiens
ataaacacactgcagatgcaggcagcatgagacactggcaaaactttaggctagggtgaaaaagacttgtttctgacc

SEQ ID NO: 165574 - DNA, 81 bp, Homo sapiens
agatgcaggcagcatgagacactggcaaaactttaggctagggtgaaaaagacttgtttctgacctggctcatatatatga

SEQ ID NO: 165575 - DNA, 77 bp, Homo sapiens
agcatgagacactggcaaaactttaggctagggtgaaaaagacttgtttctgacctggctcatatatatgagaccta

SEQ ID NO: 165576 - DNA, 77 bp, Homo sapiens
ctagggtgaaaaagacttgtttctgacctggctcatatatatgagacctagtttcagtgtctctagagaagaaatga

SEQ ID NO: 165577 - DNA, 77 bp, Homo sapiens
aaaagacttgtttctgacctggctcatatatatgagacctagtttcagtgtctctagagaagaaatgacaactaggc

SEQ ID NO: 165578 - DNA, 78 bp, Homo sapiens
tgacctggctcatatatatgagacctagtttcagtgtctctagagaagaaatgacaactaggctgctttaaaagtaaa

SEQ ID NO: 165579 - DNA, 76 bp, Homo sapiens
catatatatgagacctagtttcagtgtctctagagaagaaatgacaactaggctgctttaaaagtaaatagttgga

SEQ ID NO: 165580 - DNA, 73 bp, Homo sapiens
agtttcagtgtctctagagaagaaatgacaactaggctgctttaaaagtaaatagttggatttgtatctatac

SEQ ID NO: 165581 - DNA, 71 bp, Homo sapiens
ctctagagaagaaatgacaactaggctgctttaaaagtaaatagttggatttgtatctatactataaaatt

SEQ ID NO: 165582 - DNA, 70 bp, Homo sapiens
gaaatgacaactaggctgctttaaaagtaaatagttggatttgtatctatactataaaatttattttgag

SEQ ID NO: 165583 - DNA, 69 bp, Homo sapiens
aaagtaaatagttggatttgtatctatactataaaatttattttgagttattgttaccatttgtgagaa

SEQ ID NO: 165584 - DNA, 70 bp, Homo sapiens
ttggatttgtatctatactataaaatttattttgagttattgttaccatttgtgagaaatttactactag

SEQ ID NO: 165585 - DNA, 70 bp, Homo sapiens
tgtatctatactataaaatttattttgagttattgttaccatttgtgagaaatttactactagttgggta

SEQ ID NO: 165586 - DNA, 69 bp, Homo sapiens
taaaatttattttgagttattgttaccatttgtgagaaatttactactagttgggtaagacacattaga

SEQ ID NO: 165587 - DNA, 73 bp, Homo sapiens
tttgagttattgttaccatttgtgagaaatttactactagttgggtaagacacattagagatacaattcagga

SEQ ID NO: 165588 - DNA, 72 bp, Homo sapiens
ttgttaccatttgtgagaaatttactactagttgggtaagacacattagagatacaattcaggaaagactcc

SEQ ID NO: 165589 - DNA, 74 bp, Homo sapiens
atttgtgagaaatttactactagttgggtaagacacattagagatacaattcaggaaagactcctgaacagatg

SEQ ID NO: 165590 - DNA, 74 bp, Homo sapiens
aaatttactactagttgggtaagacacattagagatacaattcaggaaagactcctgaacagatgtgacacaag

SEQ ID NO: 165591 - DNA, 75 bp, Homo sapiens
actagttgggtaagacacattagagatacaattcaggaaagactcctgaacagatgtgacacaagttccaattta

SEQ ID NO: 165592 - DNA, 80 bp, Homo sapiens
taagacacattagagatacaattcaggaaagactcctgaacagatgtgacacaagttccaatttacatgaatctgctctt

SEQ ID NO: 165593 - DNA, 80 bp, Homo sapiens
tagagatacaattcaggaaagactcctgaacagatgtgacacaagttccaatttacatgaatctgctctttctggagaat

SEQ ID NO: 165594 - DNA, 79 bp, Homo sapiens
ttcaggaaagactcctgaacagatgtgacacaagttccaatttacatgaatctgctctttctggagaattgtcttctta

SEQ ID NO: 165595 - DNA, 80 bp, Homo sapiens
agatgtgacacaagttccaatttacatgaatctgctctttctggagaattgtcttcttagcattcactcatttaacacta

SEQ ID NO: 165596 - DNA, 79 bp, Homo sapiens
tacatgaatctgctctttctggagaattgtcttcttagcattcactcatttaacactacttactgagcgccgggcttaa

SEQ ID NO: 165597 - DNA, 79 bp, Homo sapiens
ctctttctggagaattgtcttcttagcattcactcatttaacactacttactgagcgccgggcttaagcactcagcata

SEQ ID NO: 165598 - DNA, 82 bp, Homo sapiens
agaattgtcttcttagcattcactcatttaacactacttactgagcgccgggcttaagcactcagcatacagcaatgagcaa

SEQ ID NO: 165599 - DNA, 82 bp, Homo sapiens
ttcttagcattcactcatttaacactacttactgagcgccgggcttaagcactcagcatacagcaatgagcaaaacagacta

SEQ ID NO: 165600 - DNA, 80 bp, Homo sapiens
attcactcatttaacactacttactgagcgccgggcttaagcactcagcatacagcaatgagcaaaacagactaagtcta

SEQ ID NO: 165601 - DNA, 81 bp, Homo sapiens
atttaacactacttactgagcgccgggcttaagcactcagcatacagcaatgagcaaaacagactaagtctagagaatgca

SEQ ID NO: 165602 - DNA, 83 bp, Homo sapiens
acttactgagcgccgggcttaagcactcagcatacagcaatgagcaaaacagactaagtctagagaatgcacattctagtgaa

SEQ ID NO: 165603 - DNA, 82 bp, Homo sapiens
ggcttaagcactcagcatacagcaatgagcaaaacagactaagtctagagaatgcacattctagtgaagggttattacatct

SEQ ID NO: 165604 - DNA, 84 bp, Homo sapiens
actcagcatacagcaatgagcaaaacagactaagtctagagaatgcacattctagtgaagggttattacatcttcctgatgcta

SEQ ID NO: 165605 - DNA, 80 bp, Homo sapiens
agcaatgagcaaaacagactaagtctagagaatgcacattctagtgaagggttattacatcttcctgatgctaagtccaa

SEQ ID NO: 165606 - DNA, 76 bp, Homo sapiens
aaaacagactaagtctagagaatgcacattctagtgaagggttattacatcttcctgatgctaagtccaactctcc

SEQ ID NO: 165607 - DNA, 77 bp, Homo sapiens
aatgcacattctagtgaagggttattacatcttcctgatgctaagtccaactctcccattaactaaagattctgata

SEQ ID NO: 165608 - DNA, 73 bp, Homo sapiens
tcttcctgatgctaagtccaactctcccattaactaaagattctgataaaggcttagaaaggattgggcaaaa

SEQ ID NO: 165609 - DNA, 70 bp, Homo sapiens
atgctaagtccaactctcccattaactaaagattctgataaaggcttagaaaggattgggcaaaaaagaa

SEQ ID NO: 165610 - DNA, 70 bp, Homo sapiens
ctctcccattaactaaagattctgataaaggcttagaaaggattgggcaaaaaagaacagttgcctaata

SEQ ID NO: 165611 - DNA, 69 bp, Homo sapiens
ccattaactaaagattctgataaaggcttagaaaggattgggcaaaaaagaacagttgcctaatagtaa

SEQ ID NO: 165612 - DNA, 73 bp, Homo sapiens
agattctgataaaggcttagaaaggattgggcaaaaaagaacagttgcctaatagtaagatattttctgcaga

SEQ ID NO: 165613 - DNA, 71 bp, Homo sapiens
aggcttagaaaggattgggcaaaaaagaacagttgcctaatagtaagatattttctgcagaggcaaattaa

SEQ ID NO: 165614 - DNA, 71 bp, Homo sapiens
gaaaggattgggcaaaaaagaacagttgcctaatagtaagatattttctgcagaggcaaattaatagaggt

SEQ ID NO: 165615 - DNA, 72 bp, Homo sapiens
aaaaagaacagttgcctaatagtaagatattttctgcagaggcaaattaatagaggttctgagttgaaggga

SEQ ID NO: 165616 - DNA, 73 bp, Homo sapiens
aacagttgcctaatagtaagatattttctgcagaggcaaattaatagaggttctgagttgaagggaaaacaca

SEQ ID NO: 165617 - DNA, 71 bp, Homo sapiens
taatagtaagatattttctgcagaggcaaattaatagaggttctgagttgaagggaaaacacatttaaaaa

SEQ ID NO: 165618 - DNA, 75 bp, Homo sapiens
ttctgcagaggcaaattaatagaggttctgagttgaagggaaaacacatttaaaaatcaagatggatatacttga

SEQ ID NO: 165619 - DNA, 71 bp, Homo sapiens
agaggttctgagttgaagggaaaacacatttaaaaatcaagatggatatacttgatacaactttttagaga

SEQ ID NO: 165620 - DNA, 71 bp, Homo sapiens
gagttgaagggaaaacacatttaaaaatcaagatggatatacttgatacaactttttagagattgccaaac

SEQ ID NO: 165621 - DNA, 69 bp, Homo sapiens
gggaaaacacatttaaaaatcaagatggatatacttgatacaactttttagagattgccaaacgttcct

SEQ ID NO: 165622 - DNA, 71 bp, Homo sapiens
taaaaatcaagatggatatacttgatacaactttttagagattgccaaacgttccttttcttgcttagtgg

SEQ ID NO: 165623 - DNA, 70 bp, Homo sapiens
aagatggatatacttgatacaactttttagagattgccaaacgttccttttcttgcttagtgggttgtgt

SEQ ID NO: 165624 - DNA, 68 bp, Homo sapiens
tacaactttttagagattgccaaacgttccttttcttgcttagtgggttgtgttcatttttcagcctt

SEQ ID NO: 165625 - DNA, 67 bp, Homo sapiens
aaacgttccttttcttgcttagtgggttgtgttcatttttcagcctttttactgaagggtctgtcac

SEQ ID NO: 165626 - DNA, 75 bp, Homo sapiens
ttttcttgcttagtgggttgtgttcatttttcagcctttttactgaagggtctgtcactgctactgctatatatc

SEQ ID NO: 165627 - DNA, 76 bp, Homo sapiens
atttttcagcctttttactgaagggtctgtcactgctactgctatatatctgaagacaataaaccacagtaagtga

SEQ ID NO: 165628 - DNA, 76 bp, Homo sapiens
ctttttactgaagggtctgtcactgctactgctatatatctgaagacaataaaccacagtaagtgagttctgtaaa

SEQ ID NO: 165629 - DNA, 79 bp, Homo sapiens
tactgaagggtctgtcactgctactgctatatatctgaagacaataaaccacagtaagtgagttctgtaaaacatacca

SEQ ID NO: 165630 - DNA, 86 bp, Homo sapiens
tcactgctactgctatatatctgaagacaataaaccacagtaagtgagttctgtaaaacataccatcagcatcatctgactcttca

SEQ ID NO: 165631 - DNA, 84 bp, Homo sapiens
tactgctatatatctgaagacaataaaccacagtaagtgagttctgtaaaacataccatcagcatcatctgactcttcatcttc

SEQ ID NO: 165632 - DNA, 82 bp, Homo sapiens
atatctgaagacaataaaccacagtaagtgagttctgtaaaacataccatcagcatcatctgactcttcatcttcttcttca

SEQ ID NO: 165633 - DNA, 80 bp, Homo sapiens
acaataaaccacagtaagtgagttctgtaaaacataccatcagcatcatctgactcttcatcttcttcttcatctttaga

SEQ ID NO: 165634 - DNA, 81 bp, Homo sapiens
taagtgagttctgtaaaacataccatcagcatcatctgactcttcatcttcttcttcatctttagacttcctcttagaaga

SEQ ID NO: 165635 - DNA, 79 bp, Homo sapiens
agttctgtaaaacataccatcagcatcatctgactcttcatcttcttcttcatctttagacttcctcttagaagaggac

SEQ ID NO: 165636 - DNA, 82 bp, Homo sapiens
aacataccatcagcatcatctgactcttcatcttcttcttcatctttagacttcctcttagaagaggactgacacctgagta

SEQ ID NO: 165637 - DNA, 81 bp, Homo sapiens
atcatctgactcttcatcttcttcttcatctttagacttcctcttagaagaggactgacacctgagtacatcctgcgaaga

SEQ ID NO: 165638 - DNA, 77 bp, Homo sapiens
cttcatcttcttcttcatctttagacttcctcttagaagaggactgacacctgagtacatcctgcgaagacaaacga

SEQ ID NO: 165639 - DNA, 75 bp, Homo sapiens
ttcttcatctttagacttcctcttagaagaggactgacacctgagtacatcctgcgaagacaaacgacggaagta

SEQ ID NO: 165640 - DNA, 75 bp, Homo sapiens
tctttagacttcctcttagaagaggactgacacctgagtacatcctgcgaagacaaacgacggaagtattctcta

SEQ ID NO: 165641 - DNA, 74 bp, Homo sapiens
tcttagaagaggactgacacctgagtacatcctgcgaagacaaacgacggaagtattctctagggaaaagttca

SEQ ID NO: 165642 - DNA, 71 bp, Homo sapiens
aagaggactgacacctgagtacatcctgcgaagacaaacgacggaagtattctctagggaaaagttcattt

SEQ ID NO: 165643 - DNA, 72 bp, Homo sapiens
acacctgagtacatcctgcgaagacaaacgacggaagtattctctagggaaaagttcattttcatcctcttc

SEQ ID NO: 165644 - DNA, 72 bp, Homo sapiens
tacatcctgcgaagacaaacgacggaagtattctctagggaaaagttcattttcatcctcttcctcctcttc

SEQ ID NO: 165645 - DNA, 72 bp, Homo sapiens
ttctctagggaaaagttcattttcatcctcttcctcctcttcttcatcgatctcaaacgtgggttctaatct

SEQ ID NO: 165646 - DNA, 78 bp, Homo sapiens
tcctcttcctcctcttcttcatcgatctcaaacgtgggttctaatcttggcattggcctctcggagtcagaatcttca

SEQ ID NO: 165647 - DNA, 75 bp, Homo sapiens
tcctcttcttcatcgatctcaaacgtgggttctaatcttggcattggcctctcggagtcagaatcttcaaaaggt

SEQ ID NO: 165648 - DNA, 77 bp, Homo sapiens
tcttcatcgatctcaaacgtgggttctaatcttggcattggcctctcggagtcagaatcttcaaaaggttcatctaa

SEQ ID NO: 165649 - DNA, 73 bp, Homo sapiens
aaacgtgggttctaatcttggcattggcctctcggagtcagaatcttcaaaaggttcatctaacacttcagtg

SEQ ID NO: 165650 - DNA, 78 bp, Homo sapiens
tctcggagtcagaatcttcaaaaggttcatctaacacttcagtggtctcagaaatagtttctgtgactacactgctat

SEQ ID NO: 165651 - DNA, 75 bp, Homo sapiens
aatcttcaaaaggttcatctaacacttcagtggtctcagaaatagtttctgtgactacactgctattgtggtgtt

SEQ ID NO: 165652 - DNA, 75 bp, Homo sapiens
aaaaggttcatctaacacttcagtggtctcagaaatagtttctgtgactacactgctattgtggtgtttgcgctt

SEQ ID NO: 165653 - DNA, 77 bp, Homo sapiens
atctaacacttcagtggtctcagaaatagtttctgtgactacactgctattgtggtgtttgcgctttcggactctcc

SEQ ID NO: 165654 - DNA, 76 bp, Homo sapiens
ttcagtggtctcagaaatagtttctgtgactacactgctattgtggtgtttgcgctttcggactctcctccttcgg

SEQ ID NO: 165655 - DNA, 73 bp, Homo sapiens
aatagtttctgtgactacactgctattgtggtgtttgcgctttcggactctcctccttcggtggagaaatggt

SEQ ID NO: 165656 - DNA, 74 bp, Homo sapiens
tttctgtgactacactgctattgtggtgtttgcgctttcggactctcctccttcggtggagaaatggtttctgt

SEQ ID NO: 165657 - DNA, 72 bp, Homo sapiens
actgctattgtggtgtttgcgctttcggactctcctccttcggtggagaaatggtttctgtttaatagagaa

SEQ ID NO: 165658 - DNA, 70 bp, Homo sapiens
gtgtttgcgctttcggactctcctccttcggtggagaaatggtttctgtttaatagagaaagcaagtatt

SEQ ID NO: 165659 - DNA, 71 bp, Homo sapiens
taagataaactggaattggaggaagagaagacctggaaagaaatgcgttacctttcgcttcagcgtgggct

SEQ ID NO: 165660 - DNA, 71 bp, Homo sapiens
aattggaggaagagaagacctggaaagaaatgcgttacctttcgcttcagcgtgggctttgtgagaattgg

SEQ ID NO: 165661 - DNA, 74 bp, Homo sapiens
aagagaagacctggaaagaaatgcgttacctttcgcttcagcgtgggctttgtgagaattggtggcgagcttga

SEQ ID NO: 165662 - DNA, 73 bp, Homo sapiens
gaaagaaatgcgttacctttcgcttcagcgtgggctttgtgagaattggtggcgagcttgaccgagggctttc

SEQ ID NO: 165663 - DNA, 72 bp, Homo sapiens
aaatgcgttacctttcgcttcagcgtgggctttgtgagaattggtggcgagcttgaccgagggctttccggc

SEQ ID NO: 165664 - DNA, 73 bp, Homo sapiens
cctttcgcttcagcgtgggctttgtgagaattggtggcgagcttgaccgagggctttccggctcctcctcctc

SEQ ID NO: 165665 - DNA, 80 bp, Homo sapiens
tcctcctcctcgctgctctcactgaagcccctgaggacagccctgtcaccctcactgtagcgacggggcagcctctcact

SEQ ID NO: 165666 - DNA, 80 bp, Homo sapiens
tcgctgctctcactgaagcccctgaggacagccctgtcaccctcactgtagcgacggggcagcctctcacttccttctgt

SEQ ID NO: 165667 - DNA, 78 bp, Homo sapiens
tctcactgaagcccctgaggacagccctgtcaccctcactgtagcgacggggcagcctctcacttccttctgttaatc

SEQ ID NO: 165668 - DNA, 81 bp, Homo sapiens
ctgaggacagccctgtcaccctcactgtagcgacggggcagcctctcacttccttctgttaatctgcacttcagagcctca

SEQ ID NO: 165669 - DNA, 77 bp, Homo sapiens
ccctgtcaccctcactgtagcgacggggcagcctctcacttccttctgttaatctgcacttcagagcctcagggctt

SEQ ID NO: 165670 - DNA, 77 bp, Homo sapiens
accctcactgtagcgacggggcagcctctcacttccttctgttaatctgcacttcagagcctcagggcttttcttga

SEQ ID NO: 165671 - DNA, 80 bp, Homo sapiens
tgtagcgacggggcagcctctcacttccttctgttaatctgcacttcagagcctcagggcttttcttgagctgtcctcgc

SEQ ID NO: 165672 - DNA, 78 bp, Homo sapiens
agcctctcacttccttctgttaatctgcacttcagagcctcagggcttttcttgagctgtcctcgccagggctcaacc

SEQ ID NO: 165673 - DNA, 76 bp, Homo sapiens
acttccttctgttaatctgcacttcagagcctcagggcttttcttgagctgtcctcgccagggctcaaccccctca

SEQ ID NO: 165674 - DNA, 78 bp, Homo sapiens
ttaatctgcacttcagagcctcagggcttttcttgagctgtcctcgccagggctcaaccccctcactgagtcttctct

SEQ ID NO: 165675 - DNA, 75 bp, Homo sapiens
acttcagagcctcagggcttttcttgagctgtcctcgccagggctcaaccccctcactgagtcttctcttgggaa

SEQ ID NO: 165676 - DNA, 71 bp, Homo sapiens
agggcttttcttgagctgtcctcgccagggctcaaccccctcactgagtcttctcttgggaaggtcaggtt

SEQ ID NO: 165677 - DNA, 71 bp, Homo sapiens
ttttcttgagctgtcctcgccagggctcaaccccctcactgagtcttctcttgggaaggtcaggtttcccg

SEQ ID NO: 165678 - DNA, 71 bp, Homo sapiens
ctgtcctcgccagggctcaaccccctcactgagtcttctcttgggaaggtcaggtttcccgtcctggcttg

SEQ ID NO: 165679 - DNA, 73 bp, Homo sapiens
agggctcaaccccctcactgagtcttctcttgggaaggtcaggtttcccgtcctggcttggctgctcctcaga

SEQ ID NO: 165680 - DNA, 78 bp, Homo sapiens
tcactgagtcttctcttgggaaggtcaggtttcccgtcctggcttggctgctcctcagaagccaccagctgttcttca

SEQ ID NO: 165681 - DNA, 76 bp, Homo sapiens
tcttctcttgggaaggtcaggtttcccgtcctggcttggctgctcctcagaagccaccagctgttcttcactttca

SEQ ID NO: 165682 - DNA, 75 bp, Homo sapiens
aaggtcaggtttcccgtcctggcttggctgctcctcagaagccaccagctgttcttcactttcagtgtattgttc

SEQ ID NO: 165683 - DNA, 74 bp, Homo sapiens
aggtttcccgtcctggcttggctgctcctcagaagccaccagctgttcttcactttcagtgtattgttcctggg

SEQ ID NO: 165684 - DNA, 77 bp, Homo sapiens
ctcctcagaagccaccagctgttcttcactttcagtgtattgttcctgggtggcttctgatttctccccacattctc

SEQ ID NO: 165685 - DNA, 76 bp, Homo sapiens
aagccaccagctgttcttcactttcagtgtattgttcctgggtggcttctgatttctccccacattctccatattg

SEQ ID NO: 165686 - DNA, 76 bp, Homo sapiens
actttcagtgtattgttcctgggtggcttctgatttctccccacattctccatattgttcctgaggagctgaagac

SEQ ID NO: 165687 - DNA, 76 bp, Homo sapiens
attgttcctgggtggcttctgatttctccccacattctccatattgttcctgaggagctgaagacgtctcttccaa

SEQ ID NO: 165688 - DNA, 79 bp, Homo sapiens
tggcttctgatttctccccacattctccatattgttcctgaggagctgaagacgtctcttccaagagcagtttagaatc

SEQ ID NO: 165689 - DNA, 77 bp, Homo sapiens
atttctccccacattctccatattgttcctgaggagctgaagacgtctcttccaagagcagtttagaatctttatca

SEQ ID NO: 165690 - DNA, 75 bp, Homo sapiens
cattctccatattgttcctgaggagctgaagacgtctcttccaagagcagtttagaatctttatcaccaaaacgt

SEQ ID NO: 165691 - DNA, 73 bp, Homo sapiens
atattgttcctgaggagctgaagacgtctcttccaagagcagtttagaatctttatcaccaaaacgttcctgg

SEQ ID NO: 165692 - DNA, 70 bp, Homo sapiens
aggagctgaagacgtctcttccaagagcagtttagaatctttatcaccaaaacgttcctgggtttttctg

SEQ ID NO: 165693 - DNA, 69 bp, Homo sapiens
ctgaagacgtctcttccaagagcagtttagaatctttatcaccaaaacgttcctgggtttttctgttct

SEQ ID NO: 165694 - DNA, 67 bp, Homo sapiens
ctcttccaagagcagtttagaatctttatcaccaaaacgttcctgggtttttctgttcttcctcccc

SEQ ID NO: 165695 - DNA, 66 bp, Homo sapiens
agcagtttagaatctttatcaccaaaacgttcctgggtttttctgttcttcctcccccagcggccc

SEQ ID NO: 165696 - DNA, 66 bp, Homo sapiens
aatctttatcaccaaaacgttcctgggtttttctgttcttcctcccccagcggcccctccgagatg

SEQ ID NO: 165697 - DNA, 66 bp, Homo sapiens
accaaaacgttcctgggtttttctgttcttcctcccccagcggcccctccgagatggctggctatt

SEQ ID NO: 165698 - DNA, 74 bp, Homo sapiens
ggtttttctgttcttcctcccccagcggcccctccgagatggctggctatttgcaggaagactatcatgaggaa

SEQ ID NO: 165699 - DNA, 75 bp, Homo sapiens
tgttcttcctcccccagcggcccctccgagatggctggctatttgcaggaagactatcatgaggaaggacttgtt

SEQ ID NO: 165700 - DNA, 77 bp, Homo sapiens
cccagcggcccctccgagatggctggctatttgcaggaagactatcatgaggaaggacttgtttgctcaaacgtgta

SEQ ID NO: 165701 - DNA, 79 bp, Homo sapiens
cctccgagatggctggctatttgcaggaagactatcatgaggaaggacttgtttgctcaaacgtgtagaactgactgga

SEQ ID NO: 165702 - DNA, 80 bp, Homo sapiens
agatggctggctatttgcaggaagactatcatgaggaaggacttgtttgctcaaacgtgtagaactgactggagccataa

SEQ ID NO: 165703 - DNA, 77 bp, Homo sapiens
tatttgcaggaagactatcatgaggaaggacttgtttgctcaaacgtgtagaactgactggagccataacttctggt

SEQ ID NO: 165704 - DNA, 73 bp, Homo sapiens
aagactatcatgaggaaggacttgtttgctcaaacgtgtagaactgactggagccataacttctggtttcttt

SEQ ID NO: 165705 - DNA, 73 bp, Homo sapiens
ttgtttgctcaaacgtgtagaactgactggagccataacttctggtttcttttcactttctactgaataagaa

SEQ ID NO: 165706 - DNA, 71 bp, Homo sapiens
aaacgtgtagaactgactggagccataacttctggtttcttttcactttctactgaataagaatcttgttc

SEQ ID NO: 165707 - DNA, 74 bp, Homo sapiens
agccataacttctggtttcttttcactttctactgaataagaatcttgttctttgttctcatgagacacagact

SEQ ID NO: 165708 - DNA, 74 bp, Homo sapiens
tggtttcttttcactttctactgaataagaatcttgttctttgttctcatgagacacagactttcccacctgat

SEQ ID NO: 165709 - DNA, 75 bp, Homo sapiens
tcttttcactttctactgaataagaatcttgttctttgttctcatgagacacagactttcccacctgattttaga

SEQ ID NO: 165710 - DNA, 73 bp, Homo sapiens
ctactgaataagaatcttgttctttgttctcatgagacacagactttcccacctgattttagaaaataaaaca

SEQ ID NO: 165711 - DNA, 73 bp, Homo sapiens
gaatcttgttctttgttctcatgagacacagactttcccacctgattttagaaaataaaacaatgctggttaa

SEQ ID NO: 165712 - DNA, 70 bp, Homo sapiens
ttattctgaataatttcattttgaaaaattaaactgcactaaagagaggcatgggattttttatgtttat

SEQ ID NO: 165713 - DNA, 69 bp, Homo sapiens
tcattttgaaaaattaaactgcactaaagagaggcatgggattttttatgtttattaaaggaggatacc

SEQ ID NO: 165714 - DNA, 68 bp, Homo sapiens
aaattaaactgcactaaagagaggcatgggattttttatgtttattaaaggaggataccggtgttgaa

SEQ ID NO: 165715 - DNA, 70 bp, Homo sapiens
aaactgcactaaagagaggcatgggattttttatgtttattaaaggaggataccggtgttgaaaggatga

SEQ ID NO: 165716 - DNA, 70 bp, Homo sapiens
gaggcatgggattttttatgtttattaaaggaggataccggtgttgaaaggatgaagcactgcttaaaaa

SEQ ID NO: 165717 - DNA, 67 bp, Homo sapiens
atgggattttttatgtttattaaaggaggataccggtgttgaaaggatgaagcactgcttaaaaaaa

SEQ ID NO: 165718 - DNA, 71 bp, Homo sapiens
tttattaaaggaggataccggtgttgaaaggatgaagcactgcttaaaaaaaagagctataaaagtatgca

SEQ ID NO: 165719 - DNA, 75 bp, Homo sapiens
taaaggaggataccggtgttgaaaggatgaagcactgcttaaaaaaaagagctataaaagtatgcatcacatgaa

SEQ ID NO: 165720 - DNA, 73 bp, Homo sapiens
accggtgttgaaaggatgaagcactgcttaaaaaaaagagctataaaagtatgcatcacatgaagaaaaatac

SEQ ID NO: 165721 - DNA, 81 bp, Homo sapiens
gaaaggatgaagcactgcttaaaaaaaagagctataaaagtatgcatcacatgaagaaaaatactgacaatgacacatgca

SEQ ID NO: 165722 - DNA, 80 bp, Homo sapiens
ctgcttaaaaaaaagagctataaaagtatgcatcacatgaagaaaaatactgacaatgacacatgcactacagttcacca

SEQ ID NO: 165723 - DNA, 80 bp, Homo sapiens
aaagagctataaaagtatgcatcacatgaagaaaaatactgacaatgacacatgcactacagttcaccagcaacccttta

SEQ ID NO: 165724 - DNA, 79 bp, Homo sapiens
taaaagtatgcatcacatgaagaaaaatactgacaatgacacatgcactacagttcaccagcaaccctttaacggctaa

SEQ ID NO: 165725 - DNA, 79 bp, Homo sapiens
atcacatgaagaaaaatactgacaatgacacatgcactacagttcaccagcaaccctttaacggctaaagagatctgtg

SEQ ID NO: 165726 - DNA, 77 bp, Homo sapiens
aagaaaaatactgacaatgacacatgcactacagttcaccagcaaccctttaacggctaaagagatctgtgtgtcca

SEQ ID NO: 165727 - DNA, 79 bp, Homo sapiens
tactgacaatgacacatgcactacagttcaccagcaaccctttaacggctaaagagatctgtgtgtccacaggatgttt

SEQ ID NO: 165728 - DNA, 76 bp, Homo sapiens
acacatgcactacagttcaccagcaaccctttaacggctaaagagatctgtgtgtccacaggatgttttggtgccc

SEQ ID NO: 165729 - DNA, 73 bp, Homo sapiens
agttcaccagcaaccctttaacggctaaagagatctgtgtgtccacaggatgttttggtgccccatcagaaaa

SEQ ID NO: 165730 - DNA, 74 bp, Homo sapiens
accagcaaccctttaacggctaaagagatctgtgtgtccacaggatgttttggtgccccatcagaaaacataca

SEQ ID NO: 165731 - DNA, 75 bp, Homo sapiens
ttaacggctaaagagatctgtgtgtccacaggatgttttggtgccccatcagaaaacatacacaagtttacaata

SEQ ID NO: 165732 - DNA, 74 bp, Homo sapiens
agatctgtgtgtccacaggatgttttggtgccccatcagaaaacatacacaagtttacaatagttacttaatat

SEQ ID NO: 165733 - DNA, 74 bp, Homo sapiens
tgtgtgtccacaggatgttttggtgccccatcagaaaacatacacaagtttacaatagttacttaatattctat

SEQ ID NO: 165734 - DNA, 71 bp, Homo sapiens
caggatgttttggtgccccatcagaaaacatacacaagtttacaatagttacttaatattctatttaagga

SEQ ID NO: 165735 - DNA, 71 bp, Homo sapiens
ggtgccccatcagaaaacatacacaagtttacaatagttacttaatattctatttaaggaaaatgtatctc

SEQ ID NO: 165736 - DNA, 70 bp, Homo sapiens
cagaaaacatacacaagtttacaatagttacttaatattctatttaaggaaaatgtatctccatttcatt

SEQ ID NO: 165737 - DNA, 69 bp, Homo sapiens
cacaagtttacaatagttacttaatattctatttaaggaaaatgtatctccatttcattttgttgttgg

SEQ ID NO: 165738 - DNA, 67 bp, Homo sapiens
tacaatagttacttaatattctatttaaggaaaatgtatctccatttcattttgttgttgggttttt

SEQ ID NO: 165739 - DNA, 74 bp, Homo sapiens
gcatgaaacaccacacccaacctccatttcatttttaaaaactgtcagatttggattcaattcagatttctcaa

SEQ ID NO: 165740 - DNA, 72 bp, Homo sapiens
acccaacctccatttcatttttaaaaactgtcagatttggattcaattcagatttctcaactactatccagc

SEQ ID NO: 165741 - DNA, 73 bp, Homo sapiens
ccatttcatttttaaaaactgtcagatttggattcaattcagatttctcaactactatccagcttaaaactga

SEQ ID NO: 165742 - DNA, 74 bp, Homo sapiens
catttcatttttaaaaactgtcagatttggattcaattcagatttctcaactactatccagcttaaaactgagc

SEQ ID NO: 165743 - DNA, 77 bp, Homo sapiens
tttaaaaactgtcagatttggattcaattcagatttctcaactactatccagcttaaaactgagctgcttcttggca

SEQ ID NO: 165744 - DNA, 78 bp, Homo sapiens
tcagatttggattcaattcagatttctcaactactatccagcttaaaactgagctgcttcttggcaccctggtaacaa

SEQ ID NO: 165745 - DNA, 74 bp, Homo sapiens
attcaattcagatttctcaactactatccagcttaaaactgagctgcttcttggcaccctggtaacaaatattt

SEQ ID NO: 165746 - DNA, 75 bp, Homo sapiens
attcagatttctcaactactatccagcttaaaactgagctgcttcttggcaccctggtaacaaatatttttctca

SEQ ID NO: 165747 - DNA, 74 bp, Homo sapiens
ctactatccagcttaaaactgagctgcttcttggcaccctggtaacaaatatttttctcacaagtaacacatta

SEQ ID NO: 165748 - DNA, 72 bp, Homo sapiens
agcttaaaactgagctgcttcttggcaccctggtaacaaatatttttctcacaagtaacacattataagaaa

SEQ ID NO: 165749 - DNA, 71 bp, Homo sapiens
ggtaacaaatatttttctcacaagtaacacattataagaaatttgatggtctcctcctaattgtccaaggc

SEQ ID NO: 165750 - DNA, 70 bp, Homo sapiens
atttttctcacaagtaacacattataagaaatttgatggtctcctcctaattgtccaaggcttaaaaata

SEQ ID NO: 165751 - DNA, 70 bp, Homo sapiens
ctcacaagtaacacattataagaaatttgatggtctcctcctaattgtccaaggcttaaaaatacttaag

SEQ ID NO: 165752 - DNA, 68 bp, Homo sapiens
cattataagaaatttgatggtctcctcctaattgtccaaggcttaaaaatacttaagtaaaccaggtc

SEQ ID NO: 165753 - DNA, 67 bp, Homo sapiens
aatttgatggtctcctcctaattgtccaaggcttaaaaatacttaagtaaaccaggtccagtcttct

SEQ ID NO: 165754 - DNA, 68 bp, Homo sapiens
atggtctcctcctaattgtccaaggcttaaaaatacttaagtaaaccaggtccagtcttcttgaaatc

SEQ ID NO: 165755 - DNA, 69 bp, Homo sapiens
ctaattgtccaaggcttaaaaatacttaagtaaaccaggtccagtcttcttgaaatctctaccactgaa

SEQ ID NO: 165756 - DNA, 69 bp, Homo sapiens
ttgtccaaggcttaaaaatacttaagtaaaccaggtccagtcttcttgaaatctctaccactgaaataa

SEQ ID NO: 165757 - DNA, 67 bp, Homo sapiens
caaggcttaaaaatacttaagtaaaccaggtccagtcttcttgaaatctctaccactgaaataaaac

SEQ ID NO: 165758 - DNA, 70 bp, Homo sapiens
aaatacttaagtaaaccaggtccagtcttcttgaaatctctaccactgaaataaaactcttgacattcta

SEQ ID NO: 165759 - DNA, 72 bp, Homo sapiens
acttaagtaaaccaggtccagtcttcttgaaatctctaccactgaaataaaactcttgacattctaatgtga

SEQ ID NO: 165760 - DNA, 72 bp, Homo sapiens
cttaagtaaaccaggtccagtcttcttgaaatctctaccactgaaataaaactcttgacattctaatgtgaa

SEQ ID NO: 165761 - DNA, 72 bp, Homo sapiens
ccaggtccagtcttcttgaaatctctaccactgaaataaaactcttgacattctaatgtgaatttacttttc

SEQ ID NO: 165762 - DNA, 73 bp, Homo sapiens
ccagtcttcttgaaatctctaccactgaaataaaactcttgacattctaatgtgaatttacttttctgtgaaa

SEQ ID NO: 165763 - DNA, 77 bp, Homo sapiens
tcttcttgaaatctctaccactgaaataaaactcttgacattctaatgtgaatttacttttctgtgaaagatgatca

SEQ ID NO: 165764 - DNA, 78 bp, Homo sapiens
tgaaatctctaccactgaaataaaactcttgacattctaatgtgaatttacttttctgtgaaagatgatcataataca

SEQ ID NO: 165765 - DNA, 77 bp, Homo sapiens
atctctaccactgaaataaaactcttgacattctaatgtgaatttacttttctgtgaaagatgatcataatacatta

SEQ ID NO: 165766 - DNA, 78 bp, Homo sapiens
ataaaactcttgacattctaatgtgaatttacttttctgtgaaagatgatcataatacattattataaatactcatga

SEQ ID NO: 165767 - DNA, 78 bp, Homo sapiens
atgtgaatttacttttctgtgaaagatgatcataatacattattataaatactcatgaaatcaaaaatatatcttctg

SEQ ID NO: 165768 - DNA, 79 bp, Homo sapiens
tacttttctgtgaaagatgatcataatacattattataaatactcatgaaatcaaaaatatatcttctgtcatcaaaaa

SEQ ID NO: 165769 - DNA, 82 bp, Homo sapiens
tctgtgaaagatgatcataatacattattataaatactcatgaaatcaaaaatatatcttctgtcatcaaaaatagagacta

SEQ ID NO: 165770 - DNA, 81 bp, Homo sapiens
tgatcataatacattattataaatactcatgaaatcaaaaatatatcttctgtcatcaaaaatagagactattcatgccct

SEQ ID NO: 165771 - DNA, 80 bp, Homo sapiens
ttattataaatactcatgaaatcaaaaatatatcttctgtcatcaaaaatagagactattcatgcccttacactgatctc

SEQ ID NO: 165772 - DNA, 79 bp, Homo sapiens
actcatgaaatcaaaaatatatcttctgtcatcaaaaatagagactattcatgcccttacactgatctctaattctctt

SEQ ID NO: 165773 - DNA, 79 bp, Homo sapiens
aatcaaaaatatatcttctgtcatcaaaaatagagactattcatgcccttacactgatctctaattctctttcctggca

SEQ ID NO: 165774 - DNA, 81 bp, Homo sapiens
aatatatcttctgtcatcaaaaatagagactattcatgcccttacactgatctctaattctctttcctggcactgtggctc

SEQ ID NO: 165775 - DNA, 77 bp, Homo sapiens
atcaaaaatagagactattcatgcccttacactgatctctaattctctttcctggcactgtggctcttcgttttctc

SEQ ID NO: 165776 - DNA, 76 bp, Homo sapiens
aaatagagactattcatgcccttacactgatctctaattctctttcctggcactgtggctcttcgttttctccttc

SEQ ID NO: 165777 - DNA, 82 bp, Homo sapiens
tcctcagcctcctcttcttcctcctctgagaccacagagttggacactatgactggagtccagcgcaaacattctggatcta

SEQ ID NO: 165778 - DNA, 83 bp, Homo sapiens
ctcctctgagaccacagagttggacactatgactggagtccagcgcaaacattctggatctacatctacaggtcgcaaattca

SEQ ID NO: 165779 - DNA, 82 bp, Homo sapiens
accacagagttggacactatgactggagtccagcgcaaacattctggatctacatctacaggtcgcaaattcagctgaagct

SEQ ID NO: 165780 - DNA, 83 bp, Homo sapiens
agttggacactatgactggagtccagcgcaaacattctggatctacatctacaggtcgcaaattcagctgaagctttgccatg

SEQ ID NO: 165781 - DNA, 86 bp, Homo sapiens
tatgactggagtccagcgcaaacattctggatctacatctacaggtcgcaaattcagctgaagctttgccatgtgatcctggataa

SEQ ID NO: 165782 - DNA, 81 bp, Homo sapiens
agtccagcgcaaacattctggatctacatctacaggtcgcaaattcagctgaagctttgccatgtgatcctggataagttt

SEQ ID NO: 165783 - DNA, 78 bp, Homo sapiens
tacatctacaggtcgcaaattcagctgaagctttgccatgtgatcctggataagtttttcccggcggataatcacaaa

SEQ ID NO: 165784 - DNA, 76 bp, Homo sapiens
aaattcagctgaagctttgccatgtgatcctggataagtttttcccggcggataatcacaaatctggaaccagaga

SEQ ID NO: 165785 - DNA, 73 bp, Homo sapiens
tgatcctggataagtttttcccggcggataatcacaaatctggaaccagagaaaagtttatagcaatcaacaa

SEQ ID NO: 165786 - DNA, 73 bp, Homo sapiens
acttcaacctaattatctttcaaaggtatacaaaaagatgtgatactcactggtcactacggaagtccagcat

SEQ ID NO: 165787 - DNA, 74 bp, Homo sapiens
attatctttcaaaggtatacaaaaagatgtgatactcactggtcactacggaagtccagcattcgtaggtggtg

SEQ ID NO: 165788 - DNA, 74 bp, Homo sapiens
aaaggtatacaaaaagatgtgatactcactggtcactacggaagtccagcattcgtaggtggtggagtgtggaa

SEQ ID NO: 165789 - DNA, 77 bp, Homo sapiens
aaaaagatgtgatactcactggtcactacggaagtccagcattcgtaggtggtggagtgtggaagtgatgtcttgag

SEQ ID NO: 165790 - DNA, 78 bp, Homo sapiens
atactcactggtcactacggaagtccagcattcgtaggtggtggagtgtggaagtgatgtcttgagggcagattccag

SEQ ID NO: 165791 - DNA, 79 bp, Homo sapiens
tcactacggaagtccagcattcgtaggtggtggagtgtggaagtgatgtcttgagggcagattccagtcaacttgctta

SEQ ID NO: 165792 - DNA, 76 bp, Homo sapiens
aagtccagcattcgtaggtggtggagtgtggaagtgatgtcttgagggcagattccagtcaacttgcttaacttct

SEQ ID NO: 165793 - DNA, 78 bp, Homo sapiens
attcgtaggtggtggagtgtggaagtgatgtcttgagggcagattccagtcaacttgcttaacttcttaatgctgatc

SEQ ID NO: 165794 - DNA, 81 bp, Homo sapiens
tggtggagtgtggaagtgatgtcttgagggcagattccagtcaacttgcttaacttcttaatgctgatctgcttgtcattt

SEQ ID NO: 165795 - DNA, 79 bp, Homo sapiens
aagtgatgtcttgagggcagattccagtcaacttgcttaacttcttaatgctgatctgcttgtcattttggtgataaag

SEQ ID NO: 165796 - DNA, 80 bp, Homo sapiens
tgagggcagattccagtcaacttgcttaacttcttaatgctgatctgcttgtcattttggtgataaaggcactccaatat

SEQ ID NO: 165797 - DNA, 77 bp, Homo sapiens
attccagtcaacttgcttaacttcttaatgctgatctgcttgtcattttggtgataaaggcactccaatattacact

SEQ ID NO: 165798 - DNA, 76 bp, Homo sapiens
acttgcttaacttcttaatgctgatctgcttgtcattttggtgataaaggcactccaatattacacttttccaata

SEQ ID NO: 165799 - DNA, 79 bp, Homo sapiens
ttaacttcttaatgctgatctgcttgtcattttggtgataaaggcactccaatattacacttttccaatatgccatgta

SEQ ID NO: 165800 - DNA, 79 bp, Homo sapiens
aatgctgatctgcttgtcattttggtgataaaggcactccaatattacacttttccaatatgccatgtaggaaagacga

SEQ ID NO: 165801 - DNA, 78 bp, Homo sapiens
tgtcattttggtgataaaggcactccaatattacacttttccaatatgccatgtaggaaagacgacccagatcagata

SEQ ID NO: 165802 - DNA, 75 bp, Homo sapiens
tgataaaggcactccaatattacacttttccaatatgccatgtaggaaagacgacccagatcagataacggtttc

SEQ ID NO: 165803 - DNA, 74 bp, Homo sapiens
aaggcactccaatattacacttttccaatatgccatgtaggaaagacgacccagatcagataacggtttctctg

SEQ ID NO: 165804 - DNA, 74 bp, Homo sapiens
atattacacttttccaatatgccatgtaggaaagacgacccagatcagataacggtttctctggagaccctgct

SEQ ID NO: 165805 - DNA, 75 bp, Homo sapiens
ttttccaatatgccatgtaggaaagacgacccagatcagataacggtttctctggagaccctgcttggccttcac

SEQ ID NO: 165806 - DNA, 74 bp, Homo sapiens
atgtaggaaagacgacccagatcagataacggtttctctggagaccctgcttggccttcacgctttgataacaa

SEQ ID NO: 165807 - DNA, 72 bp, Homo sapiens
aaagacgacccagatcagataacggtttctctggagaccctgcttggccttcacgctttgataacaaataac

SEQ ID NO: 165808 - DNA, 73 bp, Homo sapiens
atcagataacggtttctctggagaccctgcttggccttcacgctttgataacaaataacctaaagaatcacaa

SEQ ID NO: 165809 - DNA, 71 bp, Homo sapiens
taacggtttctctggagaccctgcttggccttcacgctttgataacaaataacctaaagaatcacaaataa

SEQ ID NO: 165810 - DNA, 72 bp, Homo sapiens
agaccctgcttggccttcacgctttgataacaaataacctaaagaatcacaaataactcaaatcagaactag

SEQ ID NO: 165811 - DNA, 74 bp, Homo sapiens
agagaaggtccactggaaaagaccaatgagaaattaatataatccttactgaaatcgatgagaaacctgccata

SEQ ID NO: 165812 - DNA, 74 bp, Homo sapiens
tccactggaaaagaccaatgagaaattaatataatccttactgaaatcgatgagaaacctgccatagcccttac

SEQ ID NO: 165813 - DNA, 73 bp, Homo sapiens
aaagaccaatgagaaattaatataatccttactgaaatcgatgagaaacctgccatagcccttacgctggtat

SEQ ID NO: 165814 - DNA, 74 bp, Homo sapiens
aaattaatataatccttactgaaatcgatgagaaacctgccatagcccttacgctggtattgaggaagaatcat

SEQ ID NO: 165815 - DNA, 76 bp, Homo sapiens
aatataatccttactgaaatcgatgagaaacctgccatagcccttacgctggtattgaggaagaatcattatacag

SEQ ID NO: 165816 - DNA, 77 bp, Homo sapiens
ttactgaaatcgatgagaaacctgccatagcccttacgctggtattgaggaagaatcattatacaggaaacattgta

SEQ ID NO: 165817 - DNA, 77 bp, Homo sapiens
atgagaaacctgccatagcccttacgctggtattgaggaagaatcattatacaggaaacattgtacttctgttggca

SEQ ID NO: 165818 - DNA, 76 bp, Homo sapiens
catagcccttacgctggtattgaggaagaatcattatacaggaaacattgtacttctgttggcagtgcttttcctg

SEQ ID NO: 165819 - DNA, 76 bp, Homo sapiens
ttacgctggtattgaggaagaatcattatacaggaaacattgtacttctgttggcagtgcttttcctggtggagaa

SEQ ID NO: 165820 - DNA, 75 bp, Homo sapiens
gtattgaggaagaatcattatacaggaaacattgtacttctgttggcagtgcttttcctggtggagaaaacacaa

SEQ ID NO: 165821 - DNA, 74 bp, Homo sapiens
aatcattatacaggaaacattgtacttctgttggcagtgcttttcctggtggagaaaacacaagtcaagtttga

SEQ ID NO: 165822 - DNA, 72 bp, Homo sapiens
atacaggaaacattgtacttctgttggcagtgcttttcctggtggagaaaacacaagtcaagtttgaaaaca

SEQ ID NO: 165823 - DNA, 74 bp, Homo sapiens
tcagatttctatatgagttcaaacaaactttaagctgacatacttaccttagaaaagtagccaacaaggtggca

SEQ ID NO: 165824 - DNA, 73 bp, Homo sapiens
tatatgagttcaaacaaactttaagctgacatacttaccttagaaaagtagccaacaaggtggcagcccttga

SEQ ID NO: 165825 - DNA, 72 bp, Homo sapiens
aaacaaactttaagctgacatacttaccttagaaaagtagccaacaaggtggcagcccttgacatcattctg

SEQ ID NO: 165826 - DNA, 76 bp, Homo sapiens
ttaagctgacatacttaccttagaaaagtagccaacaaggtggcagcccttgacatcattctgtgttagtacataa

SEQ ID NO: 165827 - DNA, 72 bp, Homo sapiens
acatacttaccttagaaaagtagccaacaaggtggcagcccttgacatcattctgtgttagtacataaaaaa

SEQ ID NO: 165828 - DNA, 75 bp, Homo sapiens
ttagaaaagtagccaacaaggtggcagcccttgacatcattctgtgttagtacataaaaaagaaatggctccaca

SEQ ID NO: 165829 - DNA, 77 bp, Homo sapiens
tagccaacaaggtggcagcccttgacatcattctgtgttagtacataaaaaagaaatggctccacatcgtaatagag

SEQ ID NO: 165830 - DNA, 73 bp, Homo sapiens
aggtggcagcccttgacatcattctgtgttagtacataaaaaagaaatggctccacatcgtaatagagggttt

SEQ ID NO: 165831 - DNA, 74 bp, Homo sapiens
ttgacatcattctgtgttagtacataaaaaagaaatggctccacatcgtaatagagggttttgtggtcaagaaa

SEQ ID NO: 165832 - DNA, 70 bp, Homo sapiens
attctgtgttagtacataaaaaagaaatggctccacatcgtaatagagggttttgtggtcaagaaacaac

SEQ ID NO: 165833 - DNA, 69 bp, Homo sapiens
ataaaaaagaaatggctccacatcgtaatagagggttttgtggtcaagaaacaactttgccaaaagaca

SEQ ID NO: 165834 - DNA, 69 bp, Homo sapiens
aagaaatggctccacatcgtaatagagggttttgtggtcaagaaacaactttgccaaaagacacaggtt

SEQ ID NO: 165835 - DNA, 69 bp, Homo sapiens
acatcgtaatagagggttttgtggtcaagaaacaactttgccaaaagacacaggttttgacaataaatg

SEQ ID NO: 165836 - DNA, 70 bp, Homo sapiens
taatagagggttttgtggtcaagaaacaactttgccaaaagacacaggttttgacaataaatggtactca

SEQ ID NO: 165837 - DNA, 72 bp, Homo sapiens
ttttgtggtcaagaaacaactttgccaaaagacacaggttttgacaataaatggtactcacattcccatcaa

SEQ ID NO: 165838 - DNA, 71 bp, Homo sapiens
aaacaactttgccaaaagacacaggttttgacaataaatggtactcacattcccatcaacctagagaaata

SEQ ID NO: 165839 - DNA, 73 bp, Homo sapiens
tttgccaaaagacacaggttttgacaataaatggtactcacattcccatcaacctagagaaataaacagaaca

SEQ ID NO: 165840 - DNA, 72 bp, Homo sapiens
acaggttttgacaataaatggtactcacattcccatcaacctagagaaataaacagaacaaaacagtcagta

SEQ ID NO: 165841 - DNA, 73 bp, Homo sapiens
ggccctacttatgaaatggatgagaggacaattactaagtatctaccttacctcaaagacagaaatattattc

SEQ ID NO: 165842 - DNA, 73 bp, Homo sapiens
gaaatggatgagaggacaattactaagtatctaccttacctcaaagacagaaatattattctttctgtaaatc

SEQ ID NO: 165843 - DNA, 75 bp, Homo sapiens
tgagaggacaattactaagtatctaccttacctcaaagacagaaatattattctttctgtaaatctcattggcag

SEQ ID NO: 165844 - DNA, 74 bp, Homo sapiens
tactaagtatctaccttacctcaaagacagaaatattattctttctgtaaatctcattggcaggaggatggaac

SEQ ID NO: 165845 - DNA, 73 bp, Homo sapiens
taccttacctcaaagacagaaatattattctttctgtaaatctcattggcaggaggatggaaccaaccacatt

SEQ ID NO: 165846 - DNA, 77 bp, Homo sapiens
cctcaaagacagaaatattattctttctgtaaatctcattggcaggaggatggaaccaaccacatttcttcatgtgc

SEQ ID NO: 165847 - DNA, 81 bp, Homo sapiens
atattattctttctgtaaatctcattggcaggaggatggaaccaaccacatttcttcatgtgctgctgcagaatagttcta

SEQ ID NO: 165848 - DNA, 81 bp, Homo sapiens
tttctgtaaatctcattggcaggaggatggaaccaaccacatttcttcatgtgctgctgcagaatagttctacttttcata

SEQ ID NO: 165849 - DNA, 79 bp, Homo sapiens
aaatctcattggcaggaggatggaaccaaccacatttcttcatgtgctgctgcagaatagttctacttttcatatattt

SEQ ID NO: 165850 - DNA, 76 bp, Homo sapiens
aggaggatggaaccaaccacatttcttcatgtgctgctgcagaatagttctacttttcatatattttagacaaaat

SEQ ID NO: 165851 - DNA, 78 bp, Homo sapiens
tggaaccaaccacatttcttcatgtgctgctgcagaatagttctacttttcatatattttagacaaaattcacaaaga

SEQ ID NO: 165852 - DNA, 79 bp, Homo sapiens
tttcttcatgtgctgctgcagaatagttctacttttcatatattttagacaaaattcacaaagatacaatttgggcagc

SEQ ID NO: 165853 - DNA, 76 bp, Homo sapiens
gctgctgcagaatagttctacttttcatatattttagacaaaattcacaaagatacaatttgggcagcctgtaaac

SEQ ID NO: 165854 - DNA, 75 bp, Homo sapiens
tgcagaatagttctacttttcatatattttagacaaaattcacaaagatacaatttgggcagcctgtaaacgata

SEQ ID NO: 165855 - DNA, 71 bp, Homo sapiens
ctacttttcatatattttagacaaaattcacaaagatacaatttgggcagcctgtaaacgataattaaaca

SEQ ID NO: 165856 - DNA, 68 bp, Homo sapiens
attttagacaaaattcacaaagatacaatttgggcagcctgtaaacgataattaaacaaaaaagacag

SEQ ID NO: 165857 - DNA, 74 bp, Homo sapiens
agacttctatggatctcaaaacagaaggtcaagggtctctcaaaacataccttgagtattcttgaggatatggg

SEQ ID NO: 165858 - DNA, 73 bp, Homo sapiens
atctcaaaacagaaggtcaagggtctctcaaaacataccttgagtattcttgaggatatggggaggagtacca

SEQ ID NO: 165859 - DNA, 71 bp, Homo sapiens
aaggtcaagggtctctcaaaacataccttgagtattcttgaggatatggggaggagtaccaggtgtgaatt

SEQ ID NO: 165860 - DNA, 72 bp, Homo sapiens
aagggtctctcaaaacataccttgagtattcttgaggatatggggaggagtaccaggtgtgaatttcatact

SEQ ID NO: 165861 - DNA, 72 bp, Homo sapiens
aaaacataccttgagtattcttgaggatatggggaggagtaccaggtgtgaatttcatacttcccaaactca

SEQ ID NO: 165862 - DNA, 76 bp, Homo sapiens
ttgagtattcttgaggatatggggaggagtaccaggtgtgaatttcatacttcccaaactcaatgacagagggaca

SEQ ID NO: 165863 - DNA, 74 bp, Homo sapiens
aggatatggggaggagtaccaggtgtgaatttcatacttcccaaactcaatgacagagggacagcggacttgtg

SEQ ID NO: 165864 - DNA, 74 bp, Homo sapiens
gggaggagtaccaggtgtgaatttcatacttcccaaactcaatgacagagggacagcggacttgtggatcaggg

SEQ ID NO: 165865 - DNA, 76 bp, Homo sapiens
taccaggtgtgaatttcatacttcccaaactcaatgacagagggacagcggacttgtggatcagggggaccagtca

SEQ ID NO: 165866 - DNA, 73 bp, Homo sapiens
atttcatacttcccaaactcaatgacagagggacagcggacttgtggatcagggggaccagtcactccaactt

SEQ ID NO: 165867 - DNA, 77 bp, Homo sapiens
ttcccaaactcaatgacagagggacagcggacttgtggatcagggggaccagtcactccaactttctgtgcagtcaa

SEQ ID NO: 165868 - DNA, 78 bp, Homo sapiens
aatgacagagggacagcggacttgtggatcagggggaccagtcactccaactttctgtgcagtcaagaaatacattca

SEQ ID NO: 165869 - DNA, 75 bp, Homo sapiens
ggacagcggacttgtggatcagggggaccagtcactccaactttctgtgcagtcaagaaatacattcaaaagtta

SEQ ID NO: 165870 - DNA, 78 bp, Homo sapiens
ccatgaacaagttgcttgattgtctaacctgaatatccaactttacctgcagtgcttgttcttggatatcacgaaata

SEQ ID NO: 165871 - DNA, 75 bp, Homo sapiens
aacaagttgcttgattgtctaacctgaatatccaactttacctgcagtgcttgttcttggatatcacgaaataat

SEQ ID NO: 165872 - DNA, 77 bp, Homo sapiens
ttgattgtctaacctgaatatccaactttacctgcagtgcttgttcttggatatcacgaaataattccatatctttc

SEQ ID NO: 165873 - DNA, 78 bp, Homo sapiens
acctgaatatccaactttacctgcagtgcttgttcttggatatcacgaaataattccatatctttctcagtcatgatt

SEQ ID NO: 165874 - DNA, 78 bp, Homo sapiens
aactttacctgcagtgcttgttcttggatatcacgaaataattccatatctttctcagtcatgatttcctggctccca

SEQ ID NO: 165875 - DNA, 77 bp, Homo sapiens
agtgcttgttcttggatatcacgaaataattccatatctttctcagtcatgatttcctggctcccaaaaagtcgctc

SEQ ID NO: 165876 - DNA, 76 bp, Homo sapiens
ttcttggatatcacgaaataattccatatctttctcagtcatgatttcctggctcccaaaaagtcgctcctcattt

SEQ ID NO: 165877 - DNA, 75 bp, Homo sapiens
atatcacgaaataattccatatctttctcagtcatgatttcctggctcccaaaaagtcgctcctcattttcttgt

SEQ ID NO: 165878 - DNA, 76 bp, Homo sapiens
ataattccatatctttctcagtcatgatttcctggctcccaaaaagtcgctcctcattttcttgtttgccatccca

SEQ ID NO: 165879 - DNA, 77 bp, Homo sapiens
atctttctcagtcatgatttcctggctcccaaaaagtcgctcctcattttcttgtttgccatcccagccatcctgat

SEQ ID NO: 165880 - DNA, 77 bp, Homo sapiens
atgatttcctggctcccaaaaagtcgctcctcattttcttgtttgccatcccagccatcctgattgtctacatataa

SEQ ID NO: 165881 - DNA, 74 bp, Homo sapiens
cctggctcccaaaaagtcgctcctcattttcttgtttgccatcccagccatcctgattgtctacatataaaaaa

SEQ ID NO: 165882 - DNA, 77 bp, Homo sapiens
aaagtcgctcctcattttcttgtttgccatcccagccatcctgattgtctacatataaaaaaagagctcacatgtta

SEQ ID NO: 165883 - DNA, 77 bp, Homo sapiens
tcctcattttcttgtttgccatcccagccatcctgattgtctacatataaaaaaagagctcacatgttaactgtccc

SEQ ID NO: 165884 - DNA, 74 bp, Homo sapiens
acatgtacagaatactatttgtttctaagtctgttctaaactcttacctgtgggccaatctgaagtgcttgatt

SEQ ID NO: 165885 - DNA, 72 bp, Homo sapiens
agaatactatttgtttctaagtctgttctaaactcttacctgtgggccaatctgaagtgcttgatttcctgt

SEQ ID NO: 165886 - DNA, 72 bp, Homo sapiens
ttgtttctaagtctgttctaaactcttacctgtgggccaatctgaagtgcttgatttcctgttgcccctctt

SEQ ID NO: 165887 - DNA, 78 bp, Homo sapiens
tgttctaaactcttacctgtgggccaatctgaagtgcttgatttcctgttgcccctctttctgattcgatattgctca

SEQ ID NO: 165888 - DNA, 78 bp, Homo sapiens
taaactcttacctgtgggccaatctgaagtgcttgatttcctgttgcccctctttctgattcgatattgctcagagta

SEQ ID NO: 165889 - DNA, 79 bp, Homo sapiens
ctgtgggccaatctgaagtgcttgatttcctgttgcccctctttctgattcgatattgctcagagtagtccaccacttc

SEQ ID NO: 165890 - DNA, 75 bp, Homo sapiens
aatctgaagtgcttgatttcctgttgcccctctttctgattcgatattgctcagagtagtccaccacttcccccc

SEQ ID NO: 165891 - DNA, 73 bp, Homo sapiens
cttgatttcctgttgcccctctttctgattcgatattgctcagagtagtccaccacttccccccgagctttcc

SEQ ID NO: 165892 - DNA, 72 bp, Homo sapiens
tttctgattcgatattgctcagagtagtccaccacttccccccgagctttccgcccatcaggggaaggggta

SEQ ID NO: 165893 - DNA, 67 bp, Homo sapiens
atattgctcagagtagtccaccacttccccccgagctttccgcccatcaggggaaggggtaaaaaat

SEQ ID NO: 165894 - DNA, 63 bp, Homo sapiens
agtagtccaccacttccccccgagctttccgcccatcaggggaaggggtaaaaaatttggtaa

SEQ ID NO: 165895 - DNA, 64 bp, Homo sapiens
accacttccccccgagctttccgcccatcaggggaaggggtaaaaaatttggtaaggccatcaa

SEQ ID NO: 165896 - DNA, 66 bp, Homo sapiens
gagctttccgcccatcaggggaaggggtaaaaaatttggtaaggccatcaatgagccctttggttt

SEQ ID NO: 165897 - DNA, 66 bp, Homo sapiens
cccatcaggggaaggggtaaaaaatttggtaaggccatcaatgagccctttggttttcttgttgaa

SEQ ID NO: 165898 - DNA, 67 bp, Homo sapiens
gaaggggtaaaaaatttggtaaggccatcaatgagccctttggttttcttgttgaacttcaaggaga

SEQ ID NO: 165899 - DNA, 74 bp, Homo sapiens
aaaaatttggtaaggccatcaatgagccctttggttttcttgttgaacttcaaggagacattgctatctctgca

SEQ ID NO: 165900 - DNA, 77 bp, Homo sapiens
ttggtaaggccatcaatgagccctttggttttcttgttgaacttcaaggagacattgctatctctgcagaagtccaa

SEQ ID NO: 165901 - DNA, 79 bp, Homo sapiens
atgagccctttggttttcttgttgaacttcaaggagacattgctatctctgcagaagtccaagccatctatccgctcta

SEQ ID NO: 165902 - DNA, 78 bp, Homo sapiens
ttggttttcttgttgaacttcaaggagacattgctatctctgcagaagtccaagccatctatccgctctaaatatcct

SEQ ID NO: 165903 - DNA, 83 bp, Homo sapiens
ttcttgttgaacttcaaggagacattgctatctctgcagaagtccaagccatctatccgctctaaatatccttcttctgatga

SEQ ID NO: 165904 - DNA, 88 bp, Homo sapiens
acttcaaggagacattgctatctctgcagaagtccaagccatctatccgctctaaatatccttcttctgatgatgatgatgctgattg

SEQ ID NO: 165905 - DNA, 89 bp, Homo sapiens
tgctatctctgcagaagtccaagccatctatccgctctaaatatccttcttctgatgatgatgatgctgattggctggaaagagtgatt

SEQ ID NO: 165906 - DNA, 86 bp, Homo sapiens
tctctgcagaagtccaagccatctatccgctctaaatatccttcttctgatgatgatgatgctgattggctggaaagagtgatttt

SEQ ID NO: 165907 - DNA, 81 bp, Homo sapiens
aagccatctatccgctctaaatatccttcttctgatgatgatgatgctgattggctggaaagagtgatttttcgtttccta

SEQ ID NO: 165908 - DNA, 79 bp, Homo sapiens
atctatccgctctaaatatccttcttctgatgatgatgatgctgattggctggaaagagtgatttttcgtttcctaccc

SEQ ID NO: 165909 - DNA, 77 bp, Homo sapiens
tctaaatatccttcttctgatgatgatgatgctgattggctggaaagagtgatttttcgtttcctaccccttccagg

SEQ ID NO: 165910 - DNA, 77 bp, Homo sapiens
ttcttctgatgatgatgatgctgattggctggaaagagtgatttttcgtttcctaccccttccagggccagttcgaa

SEQ ID NO: 165911 - DNA, 73 bp, Homo sapiens
atgatgctgattggctggaaagagtgatttttcgtttcctaccccttccagggccagttcgaactttgctgaa

SEQ ID NO: 165912 - DNA, 68 bp, Homo sapiens
attggctggaaagagtgatttttcgtttcctaccccttccagggccagttcgaactttgctgaaggga

SEQ ID NO: 165913 - DNA, 64 bp, Homo sapiens
aaagagtgatttttcgtttcctaccccttccagggccagttcgaactttgctgaagggaccttt

SEQ ID NO: 165914 - DNA, 65 bp, Homo sapiens
atttttcgtttcctaccccttccagggccagttcgaactttgctgaagggaccttttgatctaaa

SEQ ID NO: 165915 - DNA, 67 bp, Homo sapiens
ttcctaccccttccagggccagttcgaactttgctgaagggaccttttgatctaaacaattaaacag

SEQ ID NO: 165916 - DNA, 65 bp, Homo sapiens
agggccagttcgaactttgctgaagggaccttttgatctaaacaattaaacaggggaaagggtaa

SEQ ID NO: 165917 - DNA, 66 bp, Homo sapiens
agaagaccctatccttttctcccctcaccttgccacaagtacaacttacaccgtgttttgtttctt

SEQ ID NO: 165918 - DNA, 64 bp, Homo sapiens
cttttctcccctcaccttgccacaagtacaacttacaccgtgttttgtttctttaacctgtttt

SEQ ID NO: 165919 - DNA, 66 bp, Homo sapiens
ctcaccttgccacaagtacaacttacaccgtgttttgtttctttaacctgttttttggacgtccta

SEQ ID NO: 165920 - DNA, 67 bp, Homo sapiens
tgccacaagtacaacttacaccgtgttttgtttctttaacctgttttttggacgtcctattggatta

SEQ ID NO: 165921 - DNA, 67 bp, Homo sapiens
tacaacttacaccgtgttttgtttctttaacctgttttttggacgtcctattggattagtatagcgc

SEQ ID NO: 165922 - DNA, 64 bp, Homo sapiens
accgtgttttgtttctttaacctgttttttggacgtcctattggattagtatagcgccgtttta

SEQ ID NO: 165923 - DNA, 69 bp, Homo sapiens
ttctttaacctgttttttggacgtcctattggattagtatagcgccgttttatctgtgctgccttcttt

SEQ ID NO: 165924 - DNA, 70 bp, Homo sapiens
tgttttttggacgtcctattggattagtatagcgccgttttatctgtgctgccttcttttgtagaagttt

SEQ ID NO: 165925 - DNA, 69 bp, Homo sapiens
gtcctattggattagtatagcgccgttttatctgtgctgccttcttttgtagaagttttcgtccttttt

SEQ ID NO: 165926 - DNA, 69 bp, Homo sapiens
attggattagtatagcgccgttttatctgtgctgccttcttttgtagaagttttcgtccttttttccta

SEQ ID NO: 165927 - DNA, 70 bp, Homo sapiens
tatagcgccgttttatctgtgctgccttcttttgtagaagttttcgtccttttttcctaggtcgacatat

SEQ ID NO: 165928 - DNA, 72 bp, Homo sapiens
ttttatctgtgctgccttcttttgtagaagttttcgtccttttttcctaggtcgacatatttgacatatcca

SEQ ID NO: 165929 - DNA, 70 bp, Homo sapiens
ccttcttttgtagaagttttcgtccttttttcctaggtcgacatatttgacatatccacatgcctataaa

SEQ ID NO: 165930 - DNA, 70 bp, Homo sapiens
tttgtagaagttttcgtccttttttcctaggtcgacatatttgacatatccacatgcctataaaaaaata

SEQ ID NO: 165931 - DNA, 72 bp, Homo sapiens
ttcgtccttttttcctaggtcgacatatttgacatatccacatgcctataaaaaaataaaattccacataga

SEQ ID NO: 165932 - DNA, 70 bp, Homo sapiens
gctttcactaacatcctcctttatattcccagttttatttcagaaagtatttctcaccttttggcatacg

SEQ ID NO: 165933 - DNA, 70 bp, Homo sapiens
taacatcctcctttatattcccagttttatttcagaaagtatttctcaccttttggcatacgggtgagtg

SEQ ID NO: 165934 - DNA, 72 bp, Homo sapiens
tttatattcccagttttatttcagaaagtatttctcaccttttggcatacgggtgagtggcggatcacaaca

SEQ ID NO: 165935 - DNA, 73 bp, Homo sapiens
ttttatttcagaaagtatttctcaccttttggcatacgggtgagtggcggatcacaacactccatgtgaaaac

SEQ ID NO: 165936 - DNA, 76 bp, Homo sapiens
gaaagtatttctcaccttttggcatacgggtgagtggcggatcacaacactccatgtgaaaacctcggtcacatga

SEQ ID NO: 165937 - DNA, 77 bp, Homo sapiens
ttctcaccttttggcatacgggtgagtggcggatcacaacactccatgtgaaaacctcggtcacatgaatcacaaaa

SEQ ID NO: 165938 - DNA, 79 bp, Homo sapiens
ttttggcatacgggtgagtggcggatcacaacactccatgtgaaaacctcggtcacatgaatcacaaaagagcatgtta

SEQ ID NO: 165939 - DNA, 79 bp, Homo sapiens
tgagtggcggatcacaacactccatgtgaaaacctcggtcacatgaatcacaaaagagcatgttatcctattagaaaaa

SEQ ID NO: 165940 - DNA, 76 bp, Homo sapiens
cggatcacaacactccatgtgaaaacctcggtcacatgaatcacaaaagagcatgttatcctattagaaaaaagaa

SEQ ID NO: 165941 - DNA, 73 bp, Homo sapiens
tccatgtgaaaacctcggtcacatgaatcacaaaagagcatgttatcctattagaaaaaagaaaggacagttt

SEQ ID NO: 165942 - DNA, 72 bp, Homo sapiens
gaaaacctcggtcacatgaatcacaaaagagcatgttatcctattagaaaaaagaaaggacagttttgctta

SEQ ID NO: 165943 - DNA, 73 bp, Homo sapiens
cggtcacatgaatcacaaaagagcatgttatcctattagaaaaaagaaaggacagttttgcttaaccttatga

SEQ ID NO: 165944 - DNA, 78 bp, Homo sapiens
tacattctactactaaatgaaacacccatattagaaggcagagatactcaccgcatttttgccttgatctcgacagga

SEQ ID NO: 165945 - DNA, 79 bp, Homo sapiens
tactaaatgaaacacccatattagaaggcagagatactcaccgcatttttgccttgatctcgacaggagctgcatgttt

SEQ ID NO: 165946 - DNA, 82 bp, Homo sapiens
aacacccatattagaaggcagagatactcaccgcatttttgccttgatctcgacaggagctgcatgttttacactcgatgca

SEQ ID NO: 165947 - DNA, 83 bp, Homo sapiens
tagaaggcagagatactcaccgcatttttgccttgatctcgacaggagctgcatgttttacactcgatgcactgccaccgtaa

SEQ ID NO: 165948 - DNA, 81 bp, Homo sapiens
agatactcaccgcatttttgccttgatctcgacaggagctgcatgttttacactcgatgcactgccaccgtaaggccttca

SEQ ID NO: 165949 - DNA, 77 bp, Homo sapiens
tttttgccttgatctcgacaggagctgcatgttttacactcgatgcactgccaccgtaaggccttcactcgaaccgt

SEQ ID NO: 165950 - DNA, 78 bp, Homo sapiens
cttgatctcgacaggagctgcatgttttacactcgatgcactgccaccgtaaggccttcactcgaaccgttagttcag

SEQ ID NO: 165951 - DNA, 73 bp, Homo sapiens
aggagctgcatgttttacactcgatgcactgccaccgtaaggccttcactcgaaccgttagttcaggggaaaa

SEQ ID NO: 165952 - DNA, 69 bp, Homo sapiens
atgttttacactcgatgcactgccaccgtaaggccttcactcgaaccgttagttcaggggaaaacttta

SEQ ID NO: 165953 - DNA, 69 bp, Homo sapiens
acactcgatgcactgccaccgtaaggccttcactcgaaccgttagttcaggggaaaactttaaacagga

SEQ ID NO: 165954 - DNA, 66 bp, Homo sapiens
ccaccgtaaggccttcactcgaaccgttagttcaggggaaaactttaaacaggatggatggcctaa

SEQ ID NO: 165955 - DNA, 67 bp, Homo sapiens
gtaaggccttcactcgaaccgttagttcaggggaaaactttaaacaggatggatggcctaatacgag

SEQ ID NO: 165956 - DNA, 70 bp, Homo sapiens
tcgaaccgttagttcaggggaaaactttaaacaggatggatggcctaatacgagggagaacattcatgaa

SEQ ID NO: 165957 - DNA, 71 bp, Homo sapiens
gttagttcaggggaaaactttaaacaggatggatggcctaatacgagggagaacattcatgaatgaaacaa

SEQ ID NO: 165958 - DNA, 75 bp, Homo sapiens
ttgccttcgtaacacattttagaagaaaaacagaaggaaatcacataccactgttgccacagtcggcacaggaga

SEQ ID NO: 165959 - DNA, 76 bp, Homo sapiens
taacacattttagaagaaaaacagaaggaaatcacataccactgttgccacagtcggcacaggagatgagttcctc

SEQ ID NO: 165960 - DNA, 75 bp, Homo sapiens
aagaaaaacagaaggaaatcacataccactgttgccacagtcggcacaggagatgagttcctctggcttcttttc

SEQ ID NO: 165961 - DNA, 75 bp, Homo sapiens
gaaggaaatcacataccactgttgccacagtcggcacaggagatgagttcctctggcttcttttctcggttttgt

SEQ ID NO: 165962 - DNA, 74 bp, Homo sapiens
aaatcacataccactgttgccacagtcggcacaggagatgagttcctctggcttcttttctcggttttgttctt

SEQ ID NO: 165963 - DNA, 73 bp, Homo sapiens
actgttgccacagtcggcacaggagatgagttcctctggcttcttttctcggttttgttcttttgtaccaaga

SEQ ID NO: 165964 - DNA, 71 bp, Homo sapiens
agtcggcacaggagatgagttcctctggcttcttttctcggttttgttcttttgtaccaagacagaaacta

SEQ ID NO: 165965 - DNA, 71 bp, Homo sapiens
acaggagatgagttcctctggcttcttttctcggttttgttcttttgtaccaagacagaaactacagatgg

SEQ ID NO: 165966 - DNA, 71 bp, Homo sapiens
ctctggcttcttttctcggttttgttcttttgtaccaagacagaaactacagatggggattggttcagcaa

SEQ ID NO: 165967 - DNA, 68 bp, Homo sapiens
cttcttttctcggttttgttcttttgtaccaagacagaaactacagatggggattggttcagcaaccg

SEQ ID NO: 165968 - DNA, 71 bp, Homo sapiens
ttttgttcttttgtaccaagacagaaactacagatggggattggttcagcaaccggctgtgaagaaaaaca

SEQ ID NO: 165969 - DNA, 73 bp, Homo sapiens
tcttttgtaccaagacagaaactacagatggggattggttcagcaaccggctgtgaagaaaaacacaattcat

SEQ ID NO: 165970 - DNA, 74 bp, Homo sapiens
agacagaaactacagatggggattggttcagcaaccggctgtgaagaaaaacacaattcattccagtactaata

SEQ ID NO: 165971 - DNA, 77 bp, Homo sapiens
atcctatatcatcagctctataaaccccgaagcatatgccattcttaccttatccttttcatgtggaagaagggaca

SEQ ID NO: 165972 - DNA, 76 bp, Homo sapiens
atcatcagctctataaaccccgaagcatatgccattcttaccttatccttttcatgtggaagaagggacactggag

SEQ ID NO: 165973 - DNA, 72 bp, Homo sapiens
tataaaccccgaagcatatgccattcttaccttatccttttcatgtggaagaagggacactggaggtaaaca

SEQ ID NO: 165974 - DNA, 74 bp, Homo sapiens
aagcatatgccattcttaccttatccttttcatgtggaagaagggacactggaggtaaacaggaaagagactca

SEQ ID NO: 165975 - DNA, 71 bp, Homo sapiens
ttcttaccttatccttttcatgtggaagaagggacactggaggtaaacaggaaagagactcacaactctct

SEQ ID NO: 165976 - DNA, 72 bp, Homo sapiens
cttatccttttcatgtggaagaagggacactggaggtaaacaggaaagagactcacaactctctttcccatc

SEQ ID NO: 165977 - DNA, 72 bp, Homo sapiens
ttcatgtggaagaagggacactggaggtaaacaggaaagagactcacaactctctttcccatccacgttggt

SEQ ID NO: 165978 - DNA, 70 bp, Homo sapiens
agggacactggaggtaaacaggaaagagactcacaactctctttcccatccacgttggttgctttagtgt

SEQ ID NO: 165979 - DNA, 71 bp, Homo sapiens
aggtaaacaggaaagagactcacaactctctttcccatccacgttggttgctttagtgttgagccgataaa

SEQ ID NO: 165980 - DNA, 72 bp, Homo sapiens
aaagagactcacaactctctttcccatccacgttggttgctttagtgttgagccgataaagaggtccatctt

SEQ ID NO: 165981 - DNA, 72 bp, Homo sapiens
actcacaactctctttcccatccacgttggttgctttagtgttgagccgataaagaggtccatctttaagga

SEQ ID NO: 165982 - DNA, 72 bp, Homo sapiens
ctctttcccatccacgttggttgctttagtgttgagccgataaagaggtccatctttaaggagtctgccgtg

SEQ ID NO: 165983 - DNA, 72 bp, Homo sapiens
acgttggttgctttagtgttgagccgataaagaggtccatctttaaggagtctgccgtggccaatggcacgt

SEQ ID NO: 165984 - DNA, 75 bp, Homo sapiens
tttagtgttgagccgataaagaggtccatctttaaggagtctgccgtggccaatggcacgtttgatagccaatcg

SEQ ID NO: 165985 - DNA, 77 bp, Homo sapiens
tgttgagccgataaagaggtccatctttaaggagtctgccgtggccaatggcacgtttgatagccaatcgtaactgc

SEQ ID NO: 165986 - DNA, 75 bp, Homo sapiens
ataaagaggtccatctttaaggagtctgccgtggccaatggcacgtttgatagccaatcgtaactgctggtgaaa

SEQ ID NO: 165987 - DNA, 79 bp, Homo sapiens
ccatctttaaggagtctgccgtggccaatggcacgtttgatagccaatcgtaactgctggtgaaagccagaggcagcac

SEQ ID NO: 165988 - DNA, 80 bp, Homo sapiens
agtctgccgtggccaatggcacgtttgatagccaatcgtaactgctggtgaaagccagaggcagcactgcctccgaataa

SEQ ID NO: 165989 - DNA, 83 bp, Homo sapiens
caatggcacgtttgatagccaatcgtaactgctggtgaaagccagaggcagcactgcctccgaataatgcagacacatccttc

SEQ ID NO: 165990 - DNA, 81 bp, Homo sapiens
gtttgatagccaatcgtaactgctggtgaaagccagaggcagcactgcctccgaataatgcagacacatccttctgacctt

SEQ ID NO: 165991 - DNA, 79 bp, Homo sapiens
ccaatcgtaactgctggtgaaagccagaggcagcactgcctccgaataatgcagacacatccttctgacctttcaaaaa

SEQ ID NO: 165992 - DNA, 79 bp, Homo sapiens
taactgctggtgaaagccagaggcagcactgcctccgaataatgcagacacatccttctgacctttcaaaaaacgttca

SEQ ID NO: 165993 - DNA, 77 bp, Homo sapiens
aaagccagaggcagcactgcctccgaataatgcagacacatccttctgacctttcaaaaaacgttcaatgcttttca

SEQ ID NO: 165994 - DNA, 76 bp, Homo sapiens
aggcagcactgcctccgaataatgcagacacatccttctgacctttcaaaaaacgttcaatgcttttcaaagttga

SEQ ID NO: 165995 - DNA, 75 bp, Homo sapiens
tccgaataatgcagacacatccttctgacctttcaaaaaacgttcaatgcttttcaaagttgagccaccagactc

SEQ ID NO: 165996 - DNA, 76 bp, Homo sapiens
aatgcagacacatccttctgacctttcaaaaaacgttcaatgcttttcaaagttgagccaccagactctgccaagc

SEQ ID NO: 165997 - DNA, 74 bp, Homo sapiens
tttcaaaaaacgttcaatgcttttcaaagttgagccaccagactctgccaagccctcaactgcccgctttatca

SEQ ID NO: 165998 - DNA, 73 bp, Homo sapiens
aaacgttcaatgcttttcaaagttgagccaccagactctgccaagccctcaactgcccgctttatcagtttat

SEQ ID NO: 165999 - DNA, 74 bp, Homo sapiens
agttgagccaccagactctgccaagccctcaactgcccgctttatcagtttattccaatccacattttgtttat

SEQ ID NO: 166000 - DNA, 72 bp, Homo sapiens
agactctgccaagccctcaactgcccgctttatcagtttattccaatccacattttgtttattatccaattt

SEQ ID NO: 166001 - DNA, 70 bp, Homo sapiens
aagccctcaactgcccgctttatcagtttattccaatccacattttgtttattatccaattttccatggt

SEQ ID NO: 166002 - DNA, 69 bp, Homo sapiens
cccgctttatcagtttattccaatccacattttgtttattatccaattttccatggttccgaggcttag

SEQ ID NO: 166003 - DNA, 71 bp, Homo sapiens
atcagtttattccaatccacattttgtttattatccaattttccatggttccgaggcttaggaagtgctat

SEQ ID NO: 166004 - DNA, 72 bp, Homo sapiens
tttgtttattatccaattttccatggttccgaggcttaggaagtgctattcgcccaggattatcaggatctt

SEQ ID NO: 166005 - DNA, 74 bp, Homo sapiens
atccaattttccatggttccgaggcttaggaagtgctattcgcccaggattatcaggatctttataggaattga

SEQ ID NO: 166006 - DNA, 73 bp, Homo sapiens
ttttccatggttccgaggcttaggaagtgctattcgcccaggattatcaggatctttataggaattgagtcct

SEQ ID NO: 166007 - DNA, 72 bp, Homo sapiens
ttaggaagtgctattcgcccaggattatcaggatctttataggaattgagtcctttatttgagacttttaaa

SEQ ID NO: 166008 - DNA, 71 bp, Homo sapiens
ctattcgcccaggattatcaggatctttataggaattgagtcctttatttgagacttttaaaattgttcca

SEQ ID NO: 166009 - DNA, 70 bp, Homo sapiens
ggattatcaggatctttataggaattgagtcctttatttgagacttttaaaattgttccatctttaacac

SEQ ID NO: 166010 - DNA, 70 bp, Homo sapiens
ggatctttataggaattgagtcctttatttgagacttttaaaattgttccatctttaacactcaactcca

SEQ ID NO: 166011 - DNA, 69 bp, Homo sapiens
ggaattgagtcctttatttgagacttttaaaattgttccatctttaacactcaactccaattgttctaa

SEQ ID NO: 166012 - DNA, 68 bp, Homo sapiens
tatttgagacttttaaaattgttccatctttaacactcaactccaattgttctaaaacagttttacga

SEQ ID NO: 166013 - DNA, 69 bp, Homo sapiens
ttttaaaattgttccatctttaacactcaactccaattgttctaaaacagttttacgatccaagccatg

SEQ ID NO: 166014 - DNA, 71 bp, Homo sapiens
aaattgttccatctttaacactcaactccaattgttctaaaacagttttacgatccaagccatgggatgaa

SEQ ID NO: 166015 - DNA, 77 bp, Homo sapiens
atctttaacactcaactccaattgttctaaaacagttttacgatccaagccatgggatgaagacacagcattgcata

SEQ ID NO: 166016 - DNA, 77 bp, Homo sapiens
ctcaactccaattgttctaaaacagttttacgatccaagccatgggatgaagacacagcattgcatatcctttcttc

SEQ ID NO: 166017 - DNA, 77 bp, Homo sapiens
ttctaaaacagttttacgatccaagccatgggatgaagacacagcattgcatatcctttcttctgaaggacgctgtt

SEQ ID NO: 166018 - DNA, 77 bp, Homo sapiens
agttttacgatccaagccatgggatgaagacacagcattgcatatcctttcttctgaaggacgctgtttctgctttt

SEQ ID NO: 166019 - DNA, 78 bp, Homo sapiens
gatgaagacacagcattgcatatcctttcttctgaaggacgctgtttctgctttttcacttttttgatggcctccaaa

SEQ ID NO: 166020 - DNA, 76 bp, Homo sapiens
agacacagcattgcatatcctttcttctgaaggacgctgtttctgctttttcacttttttgatggcctccaaaatc

SEQ ID NO: 166021 - DNA, 73 bp, Homo sapiens
tatcctttcttctgaaggacgctgtttctgctttttcacttttttgatggcctccaaaatccactcagtataa

SEQ ID NO: 166022 - DNA, 72 bp, Homo sapiens
tttcttctgaaggacgctgtttctgctttttcacttttttgatggcctccaaaatccactcagtataaagcg

SEQ ID NO: 166023 - DNA, 68 bp, Homo sapiens
ctttttcacttttttgatggcctccaaaatccactcagtataaagcgggtttgcgagttttaccatgg

SEQ ID NO: 166024 - DNA, 72 bp, Homo sapiens
tttttgatggcctccaaaatccactcagtataaagcgggtttgcgagttttaccatggtgaaggattctgta

SEQ ID NO: 166025 - DNA, 73 bp, Homo sapiens
cctccaaaatccactcagtataaagcgggtttgcgagttttaccatggtgaaggattctgtatatccatagag

SEQ ID NO: 166026 - DNA, 73 bp, Homo sapiens
aaatccactcagtataaagcgggtttgcgagttttaccatggtgaaggattctgtatatccatagagtcgtta

SEQ ID NO: 166027 - DNA, 72 bp, Homo sapiens
agtataaagcgggtttgcgagttttaccatggtgaaggattctgtatatccatagagtcgttatcccttatc

SEQ ID NO: 166028 - DNA, 76 bp, Homo sapiens
ttgcgagttttaccatggtgaaggattctgtatatccatagagtcgttatcccttatcctgatgctgagtaagttt

SEQ ID NO: 166029 - DNA, 75 bp, Homo sapiens
agttttaccatggtgaaggattctgtatatccatagagtcgttatcccttatcctgatgctgagtaagttttaca

SEQ ID NO: 166030 - DNA, 75 bp, Homo sapiens
aaggattctgtatatccatagagtcgttatcccttatcctgatgctgagtaagttttacaccatggaaaacaaga

SEQ ID NO: 166031 - DNA, 76 bp, Homo sapiens
ttctgtatatccatagagtcgttatcccttatcctgatgctgagtaagttttacaccatggaaaacaagattctcg

SEQ ID NO: 166032 - DNA, 74 bp, Homo sapiens
atagagtcgttatcccttatcctgatgctgagtaagttttacaccatggaaaacaagattctcggaggctggga

SEQ ID NO: 166033 - DNA, 73 bp, Homo sapiens
ttatcccttatcctgatgctgagtaagttttacaccatggaaaacaagattctcggaggctgggaaccagtta

SEQ ID NO: 166034 - DNA, 70 bp, Homo sapiens
agtaagttttacaccatggaaaacaagattctcggaggctgggaaccagttaaccatagcatatgagttt

SEQ ID NO: 166035 - DNA, 71 bp, Homo sapiens
aaaacaagattctcggaggctgggaaccagttaaccatagcatatgagttttctggcctaagtccttcctc

SEQ ID NO: 166036 - DNA, 73 bp, Homo sapiens
ttaaccatagcatatgagttttctggcctaagtccttcctcctttcacaaaacagaatgccaccccaattgta

SEQ ID NO: 166037 - DNA, 71 bp, Homo sapiens
atatgagttttctggcctaagtccttcctcctttcacaaaacagaatgccaccccaattgtactatagaaa

SEQ ID NO: 166038 - DNA, 69 bp, Homo sapiens
tttctggcctaagtccttcctcctttcacaaaacagaatgccaccccaattgtactatagaaaccaaaa

SEQ ID NO: 166039 - DNA, 72 bp, Homo sapiens
ttcacaaaacagaatgccaccccaattgtactatagaaaccaaaacaacctgttgattgaaatgtcttccaa

SEQ ID NO: 166040 - DNA, 70 bp, Homo sapiens
aaacagaatgccaccccaattgtactatagaaaccaaaacaacctgttgattgaaatgtcttccaacttc

SEQ ID NO: 166041 - DNA, 71 bp, Homo sapiens
cccaattgtactatagaaaccaaaacaacctgttgattgaaatgtcttccaacttcccaatgaatttctca

SEQ ID NO: 166042 - DNA, 74 bp, Homo sapiens
tgtactatagaaaccaaaacaacctgttgattgaaatgtcttccaacttcccaatgaatttctcaatagcacca

SEQ ID NO: 166043 - DNA, 72 bp, Homo sapiens
aaaccaaaacaacctgttgattgaaatgtcttccaacttcccaatgaatttctcaatagcaccacacatggg

SEQ ID NO: 166044 - DNA, 76 bp, Homo sapiens
gttgattgaaatgtcttccaacttcccaatgaatttctcaatagcaccacacatgggtctcgtcataaagttgtaa

SEQ ID NO: 166045 - DNA, 75 bp, Homo sapiens
aatgtcttccaacttcccaatgaatttctcaatagcaccacacatgggtctcgtcataaagttgtaagaactcaa

SEQ ID NO: 166046 - DNA, 75 bp, Homo sapiens
aacttcccaatgaatttctcaatagcaccacacatgggtctcgtcataaagttgtaagaactcaagaatatttca

SEQ ID NO: 166047 - DNA, 75 bp, Homo sapiens
aatgaatttctcaatagcaccacacatgggtctcgtcataaagttgtaagaactcaagaatatttcattcccggc

SEQ ID NO: 166048 - DNA, 76 bp, Homo sapiens
atagcaccacacatgggtctcgtcataaagttgtaagaactcaagaatatttcattcccggctccagagcagaaaa

SEQ ID NO: 166049 - DNA, 74 bp, Homo sapiens
accacacatgggtctcgtcataaagttgtaagaactcaagaatatttcattcccggctccagagcagaaaaatg

SEQ ID NO: 166050 - DNA, 77 bp, Homo sapiens
taaagttgtaagaactcaagaatatttcattcccggctccagagcagaaaaatgtgcatcttatgcctgaaaagcaa

SEQ ID NO: 166051 - DNA, 77 bp, Homo sapiens
agaactcaagaatatttcattcccggctccagagcagaaaaatgtgcatcttatgcctgaaaagcaatgaaaataag

SEQ ID NO: 166052 - DNA, 75 bp, Homo sapiens
aatatttcattcccggctccagagcagaaaaatgtgcatcttatgcctgaaaagcaatgaaaataaggtcagttt

SEQ ID NO: 166053 - DNA, 75 bp, Homo sapiens
aggaaacacgatgacatgttctaagaatgacctttaagctaccactaaccagagtgggtgatggctattctgtac

SEQ ID NO: 166054 - DNA, 79 bp, Homo sapiens
atgacatgttctaagaatgacctttaagctaccactaaccagagtgggtgatggctattctgtactccgcaatctctgc

SEQ ID NO: 166055 - DNA, 79 bp, Homo sapiens
taagaatgacctttaagctaccactaaccagagtgggtgatggctattctgtactccgcaatctctgctcaccagtcta

SEQ ID NO: 166056 - DNA, 78 bp, Homo sapiens
tttaagctaccactaaccagagtgggtgatggctattctgtactccgcaatctctgctcaccagtctaggaatttcaa

SEQ ID NO: 166057 - DNA, 78 bp, Homo sapiens
actaaccagagtgggtgatggctattctgtactccgcaatctctgctcaccagtctaggaatttcaactcttccttga

SEQ ID NO: 166058 - DNA, 79 bp, Homo sapiens
agagtgggtgatggctattctgtactccgcaatctctgctcaccagtctaggaatttcaactcttccttgacatctttc

SEQ ID NO: 166059 - DNA, 77 bp, Homo sapiens
atggctattctgtactccgcaatctctgctcaccagtctaggaatttcaactcttccttgacatctttccccaagaa

SEQ ID NO: 166060 - DNA, 77 bp, Homo sapiens
tctgtactccgcaatctctgctcaccagtctaggaatttcaactcttccttgacatctttccccaagaaactagtca

SEQ ID NO: 166061 - DNA, 76 bp, Homo sapiens
atctctgctcaccagtctaggaatttcaactcttccttgacatctttccccaagaaactagtcagcacttcaacaa

SEQ ID NO: 166062 - DNA, 74 bp, Homo sapiens
cagtctaggaatttcaactcttccttgacatctttccccaagaaactagtcagcacttcaacaagtatctggat

SEQ ID NO: 166063 - DNA, 73 bp, Homo sapiens
atttcaactcttccttgacatctttccccaagaaactagtcagcacttcaacaagtatctggattagtagaaa

SEQ ID NO: 166064 - DNA, 73 bp, Homo sapiens
aactcttccttgacatctttccccaagaaactagtcagcacttcaacaagtatctggattagtagaaagaatc

SEQ ID NO: 166065 - DNA, 74 bp, Homo sapiens
atctttccccaagaaactagtcagcacttcaacaagtatctggattagtagaaagaatcctgcaatgaaagtaa

SEQ ID NO: 166066 - DNA, 75 bp, Homo sapiens
caagaaactagtcagcacttcaacaagtatctggattagtagaaagaatcctgcaatgaaagtaaaagtgaatct

SEQ ID NO: 166067 - DNA, 76 bp, Homo sapiens
ctagtcagcacttcaacaagtatctggattagtagaaagaatcctgcaatgaaagtaaaagtgaatctttcatctt

SEQ ID NO: 166068 - DNA, 64 bp, Homo sapiens
tcggcctcgggctgggcggccgggggcggccgggaacggcccctcggctacttaccgggaggaa

SEQ ID NO: 166069 - DNA, 66 bp, Homo sapiens
tgggcggccgggggcggccgggaacggcccctcggctacttaccgggaggaaggacagccgagatc

SEQ ID NO: 166070 - DNA, 63 bp, Homo sapiens
cgggggcggccgggaacggcccctcggctacttaccgggaggaaggacagccgagatcccggg

SEQ ID NO: 166071 - DNA, 63 bp, Homo sapiens
ggccgggaacggcccctcggctacttaccgggaggaaggacagccgagatcccggggccccgg

SEQ ID NO: 166072 - DNA, 67 bp, Homo sapiens
cctcggctacttaccgggaggaaggacagccgagatcccggggccccgggccggaccgcggagatgc

SEQ ID NO: 166073 - DNA, 66 bp, Homo sapiens
tacttaccgggaggaaggacagccgagatcccggggccccgggccggaccgcggagatgccccaaa

SEQ ID NO: 166074 - DNA, 69 bp, Homo sapiens
aaggacagccgagatcccggggccccgggccggaccgcggagatgccccaaactgacacggccgccatc

SEQ ID NO: 166075 - DNA, 70 bp, Homo sapiens
agccgagatcccggggccccgggccggaccgcggagatgccccaaactgacacggccgccatcttggaga

SEQ ID NO: 166076 - DNA, 73 bp, Homo sapiens
ggccccgggccggaccgcggagatgccccaaactgacacggccgccatcttggagacagtgagctccagccgg

SEQ ID NO: 166077 - DNA, 72 bp, Homo sapiens
ccggaccgcggagatgccccaaactgacacggccgccatcttggagacagtgagctccagccggggggaggg

SEQ ID NO: 166078 - DNA, 74 bp, Homo sapiens
cgcggagatgccccaaactgacacggccgccatcttggagacagtgagctccagccggggggaggggaggcaag

SEQ ID NO: 166079 - DNA, 73 bp, Homo sapiens
ccaaactgacacggccgccatcttggagacagtgagctccagccggggggaggggaggcaaggcggcggaaca

SEQ ID NO: 166080 - DNA, 70 bp, Homo sapiens
ggcgggcgcgcactggacccgccccatccccgccccctccccgcccccttgctctgccagtccagcccta

SEQ ID NO: 166081 - DNA, 67 bp, Homo sapiens
actggacccgccccatccccgccccctccccgcccccttgctctgccagtccagccctaggttctcc

SEQ ID NO: 166082 - DNA, 68 bp, Homo sapiens
acccgccccatccccgccccctccccgcccccttgctctgccagtccagccctaggttctcctgaatc

SEQ ID NO: 166083 - DNA, 73 bp, Homo sapiens
gccccctccccgcccccttgctctgccagtccagccctaggttctcctgaatcctgcggtcccagcgtcgctc

SEQ ID NO: 166084 - DNA, 76 bp, Homo sapiens
cgcccccttgctctgccagtccagccctaggttctcctgaatcctgcggtcccagcgtcgctccggacgctgccaa

SEQ ID NO: 166085 - DNA, 78 bp, Homo sapiens
ttgctctgccagtccagccctaggttctcctgaatcctgcggtcccagcgtcgctccggacgctgccaacctgttctc

SEQ ID NO: 166086 - DNA, 73 bp, Homo sapiens
agtccagccctaggttctcctgaatcctgcggtcccagcgtcgctccggacgctgccaacctgttctccaccg

SEQ ID NO: 166087 - DNA, 75 bp, Homo sapiens
taggttctcctgaatcctgcggtcccagcgtcgctccggacgctgccaacctgttctccaccgtcgctcgacttc

SEQ ID NO: 166088 - DNA, 74 bp, Homo sapiens
aatcctgcggtcccagcgtcgctccggacgctgccaacctgttctccaccgtcgctcgacttccacctctaaga

SEQ ID NO: 166089 - DNA, 75 bp, Homo sapiens
tcccagcgtcgctccggacgctgccaacctgttctccaccgtcgctcgacttccacctctaagactcccacgtga

SEQ ID NO: 166090 - DNA, 74 bp, Homo sapiens
cgtcgctccggacgctgccaacctgttctccaccgtcgctcgacttccacctctaagactcccacgtgagtgcg

SEQ ID NO: 166091 - DNA, 74 bp, Homo sapiens
tgccaacctgttctccaccgtcgctcgacttccacctctaagactcccacgtgagtgcgggcgtctcccagttc

SEQ ID NO: 166092 - DNA, 72 bp, Homo sapiens
acctgttctccaccgtcgctcgacttccacctctaagactcccacgtgagtgcgggcgtctcccagttcctg

SEQ ID NO: 166093 - DNA, 71 bp, Homo sapiens
gtgctagacagtttttatatgttaggttatttaacgctcccaagcacttattaaagtgatgttactctgtt

SEQ ID NO: 166094 - DNA, 72 bp, Homo sapiens
tatatgttaggttatttaacgctcccaagcacttattaaagtgatgttactctgtttcattctccaggaaac

SEQ ID NO: 166095 - DNA, 71 bp, Homo sapiens
gttaggttatttaacgctcccaagcacttattaaagtgatgttactctgtttcattctccaggaaactcag

SEQ ID NO: 166096 - DNA, 74 bp, Homo sapiens
ttaacgctcccaagcacttattaaagtgatgttactctgtttcattctccaggaaactcaggttgaataattca

SEQ ID NO: 166097 - DNA, 75 bp, Homo sapiens
gcacttattaaagtgatgttactctgtttcattctccaggaaactcaggttgaataattcatcaaattacacaac

SEQ ID NO: 166098 - DNA, 73 bp, Homo sapiens
aaagtgatgttactctgtttcattctccaggaaactcaggttgaataattcatcaaattacacaactggtaag

SEQ ID NO: 166099 - DNA, 75 bp, Homo sapiens
ttactctgtttcattctccaggaaactcaggttgaataattcatcaaattacacaactggtaagtggtggcatta

SEQ ID NO: 166100 - DNA, 72 bp, Homo sapiens
tctccaggaaactcaggttgaataattcatcaaattacacaactggtaagtggtggcattagggtttggaat

SEQ ID NO: 166101 - DNA, 71 bp, Homo sapiens
aggaaactcaggttgaataattcatcaaattacacaactggtaagtggtggcattagggtttggaattcaa

SEQ ID NO: 166102 - DNA, 69 bp, Homo sapiens
aataattcatcaaattacacaactggtaagtggtggcattagggtttggaattcaagtccgtatggttt

SEQ ID NO: 166103 - DNA, 70 bp, Homo sapiens
atcaaattacacaactggtaagtggtggcattagggtttggaattcaagtccgtatggttttagggcaca

SEQ ID NO: 166104 - DNA, 68 bp, Homo sapiens
acaactggtaagtggtggcattagggtttggaattcaagtccgtatggttttagggcacaggctttat

SEQ ID NO: 166105 - DNA, 72 bp, Homo sapiens
ttcttaaaggcactgttttacttgctttctctttttattggttttctcagaactcaagacatggctgcccag

SEQ ID NO: 166106 - DNA, 73 bp, Homo sapiens
actgttttacttgctttctctttttattggttttctcagaactcaagacatggctgcccagtgtgtcacaaag

SEQ ID NO: 166107 - DNA, 75 bp, Homo sapiens
ctttctctttttattggttttctcagaactcaagacatggctgcccagtgtgtcacaaaggtggcgctgaatgtt

SEQ ID NO: 166108 - DNA, 79 bp, Homo sapiens
ttattggttttctcagaactcaagacatggctgcccagtgtgtcacaaaggtggcgctgaatgtttcctgtgccaatct

SEQ ID NO: 166109 - DNA, 80 bp, Homo sapiens
tttctcagaactcaagacatggctgcccagtgtgtcacaaaggtggcgctgaatgtttcctgtgccaatcttttggataa

SEQ ID NO: 166110 - DNA, 79 bp, Homo sapiens
aactcaagacatggctgcccagtgtgtcacaaaggtggcgctgaatgtttcctgtgccaatcttttggataaagatata

SEQ ID NO: 166111 - DNA, 77 bp, Homo sapiens
ctgcccagtgtgtcacaaaggtggcgctgaatgtttcctgtgccaatcttttggataaagatatagggtcaaagtca

SEQ ID NO: 166112 - DNA, 74 bp, Homo sapiens
tgtcacaaaggtggcgctgaatgtttcctgtgccaatcttttggataaagatatagggtcaaagtcagaccctt

SEQ ID NO: 166113 - DNA, 72 bp, Homo sapiens
aaaggtggcgctgaatgtttcctgtgccaatcttttggataaagatatagggtcaaagtcagaccctttatg

SEQ ID NO: 166114 - DNA, 70 bp, Homo sapiens
aatgtttcctgtgccaatcttttggataaagatatagggtcaaagtcagaccctttatgtgtgttgtttt

SEQ ID NO: 166115 - DNA, 73 bp, Homo sapiens
tcctgtgccaatcttttggataaagatatagggtcaaagtcagaccctttatgtgtgttgtttttgaatacaa

SEQ ID NO: 166116 - DNA, 71 bp, Homo sapiens
ttttggataaagatatagggtcaaagtcagaccctttatgtgtgttgtttttgaatacaagtggtcaacag

SEQ ID NO: 166117 - DNA, 73 bp, Homo sapiens
taaagatatagggtcaaagtcagaccctttatgtgtgttgtttttgaatacaagtggtcaacagtggtatgag

SEQ ID NO: 166118 - DNA, 72 bp, Homo sapiens
aaagtcagaccctttatgtgtgttgtttttgaatacaagtggtcaacagtggtatgaggtaatgtcaaatac

SEQ ID NO: 166119 - DNA, 70 bp, Homo sapiens
accctttatgtgtgttgtttttgaatacaagtggtcaacagtggtatgaggtaatgtcaaatactttacc

SEQ ID NO: 166120 - DNA, 70 bp, Homo sapiens
gtgtgttgtttttgaatacaagtggtcaacagtggtatgaggtaatgtcaaatactttacctaaaaagta

SEQ ID NO: 166121 - DNA, 71 bp, Homo sapiens
cacctttgatctgaagaaacttttttgtttttgcggatgggtgtaggttgagcgcacagaaaggattaaga

SEQ ID NO: 166122 - DNA, 72 bp, Homo sapiens
ttgatctgaagaaacttttttgtttttgcggatgggtgtaggttgagcgcacagaaaggattaagaattgct

SEQ ID NO: 166123 - DNA, 71 bp, Homo sapiens
aattgcttgaatccccaattttccaagacatttattattgattactactttgaagtggttcagaaattgaa

SEQ ID NO: 166124 - DNA, 69 bp, Homo sapiens
gaatccccaattttccaagacatttattattgattactactttgaagtggttcagaaattgaaatttgg

SEQ ID NO: 166125 - DNA, 72 bp, Homo sapiens
ttccaagacatttattattgattactactttgaagtggttcagaaattgaaatttggggtttatgacatcga

SEQ ID NO: 166126 - DNA, 72 bp, Homo sapiens
gacatttattattgattactactttgaagtggttcagaaattgaaatttggggtttatgacatcgacaacaa

SEQ ID NO: 166127 - DNA, 73 bp, Homo sapiens
gattactactttgaagtggttcagaaattgaaatttggggtttatgacatcgacaacaaaactattgagctga

SEQ ID NO: 166128 - DNA, 77 bp, Homo sapiens
tactttgaagtggttcagaaattgaaatttggggtttatgacatcgacaacaaaactattgagctgagtgatgatga

SEQ ID NO: 166129 - DNA, 76 bp, Homo sapiens
tggttcagaaattgaaatttggggtttatgacatcgacaacaaaactattgagctgagtgatgatgacttcttagg

SEQ ID NO: 166130 - DNA, 76 bp, Homo sapiens
aaatttggggtttatgacatcgacaacaaaactattgagctgagtgatgatgacttcttaggggaatgtgaatgta

SEQ ID NO: 166131 - DNA, 79 bp, Homo sapiens
ttatgacatcgacaacaaaactattgagctgagtgatgatgacttcttaggggaatgtgaatgtacccttggacaagta

SEQ ID NO: 166132 - DNA, 76 bp, Homo sapiens
gacaacaaaactattgagctgagtgatgatgacttcttaggggaatgtgaatgtacccttggacaagtaagtataa

SEQ ID NO: 166133 - DNA, 75 bp, Homo sapiens
aaaactattgagctgagtgatgatgacttcttaggggaatgtgaatgtacccttggacaagtaagtataaatagc

SEQ ID NO: 166134 - DNA, 76 bp, Homo sapiens
tgagtgatgatgacttcttaggggaatgtgaatgtacccttggacaagtaagtataaatagccactgtactctatt

SEQ ID NO: 166135 - DNA, 73 bp, Homo sapiens
atgatgacttcttaggggaatgtgaatgtacccttggacaagtaagtataaatagccactgtactctattttg

SEQ ID NO: 166136 - DNA, 72 bp, Homo sapiens
catttaaaaattcttaggttgaagggaaatgactctgtatcactttctaattctaacagattgtttccagca

SEQ ID NO: 166137 - DNA, 73 bp, Homo sapiens
attcttaggttgaagggaaatgactctgtatcactttctaattctaacagattgtttccagcaagaagctaac

SEQ ID NO: 166138 - DNA, 74 bp, Homo sapiens
aggttgaagggaaatgactctgtatcactttctaattctaacagattgtttccagcaagaagctaactcgacca

SEQ ID NO: 166139 - DNA, 76 bp, Homo sapiens
aaatgactctgtatcactttctaattctaacagattgtttccagcaagaagctaactcgaccactggtgatgaaaa

SEQ ID NO: 166140 - DNA, 77 bp, Homo sapiens
tgtatcactttctaattctaacagattgtttccagcaagaagctaactcgaccactggtgatgaaaactggcagacc

SEQ ID NO: 166141 - DNA, 77 bp, Homo sapiens
tctaattctaacagattgtttccagcaagaagctaactcgaccactggtgatgaaaactggcagacctgcaggaaaa

SEQ ID NO: 166142 - DNA, 77 bp, Homo sapiens
acagattgtttccagcaagaagctaactcgaccactggtgatgaaaactggcagacctgcaggaaaagggagcatta

SEQ ID NO: 166143 - DNA, 73 bp, Homo sapiens
caagaagctaactcgaccactggtgatgaaaactggcagacctgcaggaaaagggagcattacggtaaaaata

SEQ ID NO: 166144 - DNA, 72 bp, Homo sapiens
ctaactcgaccactggtgatgaaaactggcagacctgcaggaaaagggagcattacggtaaaaataagatat

SEQ ID NO: 166145 - DNA, 71 bp, Homo sapiens
actggtgatgaaaactggcagacctgcaggaaaagggagcattacggtaaaaataagatatttgtcttttg

SEQ ID NO: 166146 - DNA, 69 bp, Homo sapiens
aaaactggcagacctgcaggaaaagggagcattacggtaaaaataagatatttgtcttttgtctcaaaa

SEQ ID NO: 166147 - DNA, 72 bp, Homo sapiens
cagacctgcaggaaaagggagcattacggtaaaaataagatatttgtcttttgtctcaaaagatttagcata

SEQ ID NO: 166148 - DNA, 78 bp, Homo sapiens
gtgcttaagtgtctatcagaattcctaaaacatattttctttcacttacctgatctactcatagatttcagctgaaga

SEQ ID NO: 166149 - DNA, 76 bp, Homo sapiens
tgtctatcagaattcctaaaacatattttctttcacttacctgatctactcatagatttcagctgaagaaataaaa

SEQ ID NO: 166150 - DNA, 74 bp, Homo sapiens
ctaaaacatattttctttcacttacctgatctactcatagatttcagctgaagaaataaaagataatagagtgg

SEQ ID NO: 166151 - DNA, 75 bp, Homo sapiens
ttttctttcacttacctgatctactcatagatttcagctgaagaaataaaagataatagagtggtcttgtttgaa

SEQ ID NO: 166152 - DNA, 76 bp, Homo sapiens
acttacctgatctactcatagatttcagctgaagaaataaaagataatagagtggtcttgtttgaaatggaagcca

SEQ ID NO: 166153 - DNA, 76 bp, Homo sapiens
ctgatctactcatagatttcagctgaagaaataaaagataatagagtggtcttgtttgaaatggaagccagaaaac

SEQ ID NO: 166154 - DNA, 73 bp, Homo sapiens
gatttcagctgaagaaataaaagataatagagtggtcttgtttgaaatggaagccagaaaactggataataag

SEQ ID NO: 166155 - DNA, 70 bp, Homo sapiens
ctgaagaaataaaagataatagagtggtcttgtttgaaatggaagccagaaaactggataataaggtggg

SEQ ID NO: 166156 - DNA, 73 bp, Homo sapiens
ataaaagataatagagtggtcttgtttgaaatggaagccagaaaactggataataaggtgggtagactatgca

SEQ ID NO: 166157 - DNA, 73 bp, Homo sapiens
atagagtggtcttgtttgaaatggaagccagaaaactggataataaggtgggtagactatgcagatttcaaaa

SEQ ID NO: 166158 - DNA, 72 bp, Homo sapiens
ttgaaatggaagccagaaaactggataataaggtgggtagactatgcagatttcaaaaaggttgtcatgttt

SEQ ID NO: 166159 - DNA, 71 bp, Homo sapiens
agccagaaaactggataataaggtgggtagactatgcagatttcaaaaaggttgtcatgttttgcctcttt

SEQ ID NO: 166160 - DNA, 72 bp, Homo sapiens
ttttgttgtttgttttaaatgtaggatctatttggaaagtcagacccatacctggaattccacaagcagaca

SEQ ID NO: 166161 - DNA, 75 bp, Homo sapiens
ttgttttaaatgtaggatctatttggaaagtcagacccatacctggaattccacaagcagacatctgatggaaac

SEQ ID NO: 166162 - DNA, 78 bp, Homo sapiens
taaatgtaggatctatttggaaagtcagacccatacctggaattccacaagcagacatctgatggaaactggctaatg

SEQ ID NO: 166163 - DNA, 78 bp, Homo sapiens
atctatttggaaagtcagacccatacctggaattccacaagcagacatctgatggaaactggctaatggttcatcgga

SEQ ID NO: 166164 - DNA, 79 bp, Homo sapiens
aagtcagacccatacctggaattccacaagcagacatctgatggaaactggctaatggttcatcggacagaggtgaata

SEQ ID NO: 166165 - DNA, 78 bp, Homo sapiens
ccatacctggaattccacaagcagacatctgatggaaactggctaatggttcatcggacagaggtgaatatttgaatt

SEQ ID NO: 166166 - DNA, 79 bp, Homo sapiens
aattccacaagcagacatctgatggaaactggctaatggttcatcggacagaggtgaatatttgaatttgaaaagcaga

SEQ ID NO: 166167 - DNA, 77 bp, Homo sapiens
acatctgatggaaactggctaatggttcatcggacagaggtgaatatttgaatttgaaaagcagagtggaggtgttc

SEQ ID NO: 166168 - DNA, 66 bp, Homo sapiens
tgttaatgaactggaagtttttctaacagctttttgaaaccacatttttataggttgttaaaaaca

SEQ ID NO: 166169 - DNA, 65 bp, Homo sapiens
gaactggaagtttttctaacagctttttgaaaccacatttttataggttgttaaaaacaacttga

SEQ ID NO: 166170 - DNA, 66 bp, Homo sapiens
ctaacagctttttgaaaccacatttttataggttgttaaaaacaacttgaatcctgtttggaggcc

SEQ ID NO: 166171 - DNA, 68 bp, Homo sapiens
tttgaaaccacatttttataggttgttaaaaacaacttgaatcctgtttggaggcctttcaagatctc

SEQ ID NO: 166172 - DNA, 69 bp, Homo sapiens
catttttataggttgttaaaaacaacttgaatcctgtttggaggcctttcaagatctctcttaactcac

SEQ ID NO: 166173 - DNA, 71 bp, Homo sapiens
ttataggttgttaaaaacaacttgaatcctgtttggaggcctttcaagatctctcttaactcactgtgtta

SEQ ID NO: 166174 - DNA, 73 bp, Homo sapiens
aaacaacttgaatcctgtttggaggcctttcaagatctctcttaactcactgtgttacggagatatggacaaa

SEQ ID NO: 166175 - DNA, 74 bp, Homo sapiens
ttgaatcctgtttggaggcctttcaagatctctcttaactcactgtgttacggagatatggacaaaaccattaa

SEQ ID NO: 166176 - DNA, 72 bp, Homo sapiens
gaggcctttcaagatctctcttaactcactgtgttacggagatatggacaaaaccattaaggtaagttgaaa

SEQ ID NO: 166177 - DNA, 72 bp, Homo sapiens
ctttcaagatctctcttaactcactgtgttacggagatatggacaaaaccattaaggtaagttgaaattata

SEQ ID NO: 166178 - DNA, 79 bp, Homo sapiens
tatatttttattatatttaatttcaggtggagtgttatgattatgacaatgatgggtcacatgatctcattggaacatt

SEQ ID NO: 166179 - DNA, 81 bp, Homo sapiens
attatatttaatttcaggtggagtgttatgattatgacaatgatgggtcacatgatctcattggaacatttcagaccacca

SEQ ID NO: 166180 - DNA, 82 bp, Homo sapiens
ttaatttcaggtggagtgttatgattatgacaatgatgggtcacatgatctcattggaacatttcagaccaccatgacaaaa

SEQ ID NO: 166181 - DNA, 82 bp, Homo sapiens
ggtggagtgttatgattatgacaatgatgggtcacatgatctcattggaacatttcagaccaccatgacaaaactgaaagaa

SEQ ID NO: 166182 - DNA, 84 bp, Homo sapiens
tatgattatgacaatgatgggtcacatgatctcattggaacatttcagaccaccatgacaaaactgaaagaagcctccagaagc

SEQ ID NO: 166183 - DNA, 81 bp, Homo sapiens
aatgatgggtcacatgatctcattggaacatttcagaccaccatgacaaaactgaaagaagcctccagaagctcacctgta

SEQ ID NO: 166184 - DNA, 79 bp, Homo sapiens
acatgatctcattggaacatttcagaccaccatgacaaaactgaaagaagcctccagaagctcacctgtaagttacatc

SEQ ID NO: 166185 - DNA, 76 bp, Homo sapiens
ttggaacatttcagaccaccatgacaaaactgaaagaagcctccagaagctcacctgtaagttacatccttgcatt

SEQ ID NO: 166186 - DNA, 78 bp, Homo sapiens
atttcagaccaccatgacaaaactgaaagaagcctccagaagctcacctgtaagttacatccttgcatttgcatatac

SEQ ID NO: 166187 - DNA, 74 bp, Homo sapiens
cattggcatttctaatattgctaataaaaagtaacatttttgtcttctcttcctacaggttgaatttgaatgca

SEQ ID NO: 166188 - DNA, 74 bp, Homo sapiens
tctaatattgctaataaaaagtaacatttttgtcttctcttcctacaggttgaatttgaatgcataaatgagaa

SEQ ID NO: 166189 - DNA, 69 bp, Homo sapiens
aaaaagtaacatttttgtcttctcttcctacaggttgaatttgaatgcataaatgagaaaaaaaggcaa

SEQ ID NO: 166190 - DNA, 70 bp, Homo sapiens
gtaacatttttgtcttctcttcctacaggttgaatttgaatgcataaatgagaaaaaaaggcaaaagaaa

SEQ ID NO: 166191 - DNA, 74 bp, Homo sapiens
tgaatttgaatgcataaatgagaaaaaaaggcaaaagaaaaaaagctacaagaattcaggtgttatcagtgtga

SEQ ID NO: 166192 - DNA, 74 bp, Homo sapiens
tgcataaatgagaaaaaaaggcaaaagaaaaaaagctacaagaattcaggtgttatcagtgtgaaacagtgtga

SEQ ID NO: 166193 - DNA, 69 bp, Homo sapiens
agaaaaaaaggcaaaagaaaaaaagctacaagaattcaggtgttatcagtgtgaaacagtgtgaggtcc

SEQ ID NO: 166194 - DNA, 73 bp, Homo sapiens
gcaaaagaaaaaaagctacaagaattcaggtgttatcagtgtgaaacagtgtgaggtccgttggccttggcta

SEQ ID NO: 166195 - DNA, 71 bp, Homo sapiens
aaaagctacaagaattcaggtgttatcagtgtgaaacagtgtgaggtccgttggccttggctacttatttt

SEQ ID NO: 166196 - DNA, 72 bp, Homo sapiens
ctacaagaattcaggtgttatcagtgtgaaacagtgtgaggtccgttggccttggctacttatttttattta

SEQ ID NO: 166197 - DNA, 76 bp, Homo sapiens
ttctcagctctttagtggaaatgaccttacccaatgcatttatcctcttcatactttcaatataaaatgttatgag

SEQ ID NO: 166198 - DNA, 72 bp, Homo sapiens
ttagtggaaatgaccttacccaatgcatttatcctcttcatactttcaatataaaatgttatgagtaaaggg

SEQ ID NO: 166199 - DNA, 72 bp, Homo sapiens
atgaccttacccaatgcatttatcctcttcatactttcaatataaaatgttatgagtaaaggggaaaagcca

SEQ ID NO: 166200 - DNA, 71 bp, Homo sapiens
tacccaatgcatttatcctcttcatactttcaatataaaatgttatgagtaaaggggaaaagccaagattt

SEQ ID NO: 166201 - DNA, 69 bp, Homo sapiens
tcctcttcatactttcaatataaaatgttatgagtaaaggggaaaagccaagattttttagggtgaaca

SEQ ID NO: 166202 - DNA, 69 bp, Homo sapiens
tcatactttcaatataaaatgttatgagtaaaggggaaaagccaagattttttagggtgaacaagtgga

SEQ ID NO: 166203 - DNA, 65 bp, Homo sapiens
taaaatgttatgagtaaaggggaaaagccaagattttttagggtgaacaagtggaatggagtttt

SEQ ID NO: 166204 - DNA, 64 bp, Homo sapiens
gttatgagtaaaggggaaaagccaagattttttagggtgaacaagtggaatggagtttttgttt

SEQ ID NO: 166205 - DNA, 61 bp, Homo sapiens
aaaggggaaaagccaagattttttagggtgaacaagtggaatggagtttttgttttttaaa

SEQ ID NO: 166206 - DNA, 72 bp, Homo sapiens
tgttttttaaaatgttgactgctatgctttttaaagccctcaacatattggattcattactaatatcttaaa

SEQ ID NO: 166207 - DNA, 72 bp, Homo sapiens
ttaaaatgttgactgctatgctttttaaagccctcaacatattggattcattactaatatcttaaaacttaa

SEQ ID NO: 166208 - DNA, 73 bp, Homo sapiens
gactgctatgctttttaaagccctcaacatattggattcattactaatatcttaaaacttaaaatgagtgtat

SEQ ID NO: 166209 - DNA, 73 bp, Homo sapiens
ttaaagccctcaacatattggattcattactaatatcttaaaacttaaaatgagtgtatttcatctttcgcca

SEQ ID NO: 166210 - DNA, 74 bp, Homo sapiens
gccctcaacatattggattcattactaatatcttaaaacttaaaatgagtgtatttcatctttcgccattagta

SEQ ID NO: 166211 - DNA, 73 bp, Homo sapiens
tggattcattactaatatcttaaaacttaaaatgagtgtatttcatctttcgccattagtattctaatcttaa

SEQ ID NO: 166212 - DNA, 73 bp, Homo sapiens
ctaatatcttaaaacttaaaatgagtgtatttcatctttcgccattagtattctaatcttaacattgctacaa

SEQ ID NO: 166213 - DNA, 75 bp, Homo sapiens
aaacttaaaatgagtgtatttcatctttcgccattagtattctaatcttaacattgctacaattatcttgaagca

SEQ ID NO: 166214 - DNA, 76 bp, Homo sapiens
aacttaaaatgagtgtatttcatctttcgccattagtattctaatcttaacattgctacaattatcttgaagcaga

SEQ ID NO: 166215 - DNA, 78 bp, Homo sapiens
tgagtgtatttcatctttcgccattagtattctaatcttaacattgctacaattatcttgaagcagaattttacagat

SEQ ID NO: 166216 - DNA, 77 bp, Homo sapiens
gagtgtatttcatctttcgccattagtattctaatcttaacattgctacaattatcttgaagcagaattttacagat

SEQ ID NO: 166217 - DNA, 81 bp, Homo sapiens
tcatctttcgccattagtattctaatcttaacattgctacaattatcttgaagcagaattttacagattcatggcacatag

SEQ ID NO: 166218 - DNA, 78 bp, Homo sapiens
ctttcgccattagtattctaatcttaacattgctacaattatcttgaagcagaattttacagattcatggcacatagg

SEQ ID NO: 166219 - DNA, 78 bp, Homo sapiens
tttcgccattagtattctaatcttaacattgctacaattatcttgaagcagaattttacagattcatggcacataggg

SEQ ID NO: 166220 - DNA, 77 bp, Homo sapiens
tctaatcttaacattgctacaattatcttgaagcagaattttacagattcatggcacataggggaaggggtatctta

SEQ ID NO: 166221 - DNA, 76 bp, Homo sapiens
taatcttaacattgctacaattatcttgaagcagaattttacagattcatggcacataggggaaggggtatcttaa

SEQ ID NO: 166222 - DNA, 75 bp, Homo sapiens
tcttaacattgctacaattatcttgaagcagaattttacagattcatggcacataggggaaggggtatcttaaac

SEQ ID NO: 166223 - DNA, 75 bp, Homo sapiens
acattgctacaattatcttgaagcagaattttacagattcatggcacataggggaaggggtatcttaaacctgaa

SEQ ID NO: 166224 - DNA, 74 bp, Homo sapiens
tatcttgaagcagaattttacagattcatggcacataggggaaggggtatcttaaacctgaatgcaggggtaat

SEQ ID NO: 166225 - DNA, 71 bp, Homo sapiens
gaattttacagattcatggcacataggggaaggggtatcttaaacctgaatgcaggggtaatttccatgtt

SEQ ID NO: 166226 - DNA, 75 bp, Homo sapiens
ttacagattcatggcacataggggaaggggtatcttaaacctgaatgcaggggtaatttccatgtttatatcatg

SEQ ID NO: 166227 - DNA, 71 bp, Homo sapiens
acataggggaaggggtatcttaaacctgaatgcaggggtaatttccatgtttatatcatgtcctgttcaat

SEQ ID NO: 166228 - DNA, 71 bp, Homo sapiens
aaggggtatcttaaacctgaatgcaggggtaatttccatgtttatatcatgtcctgttcaatttacagact

SEQ ID NO: 166229 - DNA, 71 bp, Homo sapiens
atcttaaacctgaatgcaggggtaatttccatgtttatatcatgtcctgttcaatttacagacttttaaaa

SEQ ID NO: 166230 - DNA, 74 bp, Homo sapiens
ctgaatgcaggggtaatttccatgtttatatcatgtcctgttcaatttacagacttttaaaaatatatgccaaa

SEQ ID NO: 166231 - DNA, 73 bp, Homo sapiens
catgtttatatcatgtcctgttcaatttacagacttttaaaaatatatgccaaagagttttttgcttctcttg

SEQ ID NO: 166232 - DNA, 71 bp, Homo sapiens
tcctgttcaatttacagacttttaaaaatatatgccaaagagttttttgcttctcttgtatagtaggagag

SEQ ID NO: 166233 - DNA, 71 bp, Homo sapiens
tcaatttacagacttttaaaaatatatgccaaagagttttttgcttctcttgtatagtaggagagttgtaa

SEQ ID NO: 166234 - DNA, 69 bp, Homo sapiens
aatatatgccaaagagttttttgcttctcttgtatagtaggagagttgtaattttaagttttctcttat

SEQ ID NO: 166235 - DNA, 67 bp, Homo sapiens
caaagagttttttgcttctcttgtatagtaggagagttgtaattttaagttttctcttatttttaga

SEQ ID NO: 166236 - DNA, 71 bp, Homo sapiens
gtatagtaggagagttgtaattttaagttttctcttatttttagattacagtagaatgcacattccttgac

SEQ ID NO: 166237 - DNA, 76 bp, Homo sapiens
taagttttctcttatttttagattacagtagaatgcacattccttgactatataatgggaggatgtcagctgaatt

SEQ ID NO: 166238 - DNA, 76 bp, Homo sapiens
cttatttttagattacagtagaatgcacattccttgactatataatgggaggatgtcagctgaattttactgtaag

SEQ ID NO: 166239 - DNA, 78 bp, Homo sapiens
ttttagattacagtagaatgcacattccttgactatataatgggaggatgtcagctgaattttactgtaagtaacaca

SEQ ID NO: 166240 - DNA, 76 bp, Homo sapiens
agtagaatgcacattccttgactatataatgggaggatgtcagctgaattttactgtaagtaacacactgaatttt

SEQ ID NO: 166241 - DNA, 75 bp, Homo sapiens
tgtccctgccttctccttactaagggctgcaattgttatttggcaggtgggagtggacttcactggctccaatgg

SEQ ID NO: 166242 - DNA, 74 bp, Homo sapiens
ttctccttactaagggctgcaattgttatttggcaggtgggagtggacttcactggctccaatggtgacccaag

SEQ ID NO: 166243 - DNA, 75 bp, Homo sapiens
ttactaagggctgcaattgttatttggcaggtgggagtggacttcactggctccaatggtgacccaaggtctcca

SEQ ID NO: 166244 - DNA, 73 bp, Homo sapiens
aattgttatttggcaggtgggagtggacttcactggctccaatggtgacccaaggtctccagactcccttcat

SEQ ID NO: 166245 - DNA, 77 bp, Homo sapiens
ttatttggcaggtgggagtggacttcactggctccaatggtgacccaaggtctccagactcccttcattacatcagc

SEQ ID NO: 166246 - DNA, 76 bp, Homo sapiens
gagtggacttcactggctccaatggtgacccaaggtctccagactcccttcattacatcagccccaatggcgttaa

SEQ ID NO: 166247 - DNA, 76 bp, Homo sapiens
ttcactggctccaatggtgacccaaggtctccagactcccttcattacatcagccccaatggcgttaatgagtatt

SEQ ID NO: 166248 - DNA, 77 bp, Homo sapiens
aatggtgacccaaggtctccagactcccttcattacatcagccccaatggcgttaatgagtatttgactgctctctg

SEQ ID NO: 166249 - DNA, 77 bp, Homo sapiens
acccaaggtctccagactcccttcattacatcagccccaatggcgttaatgagtatttgactgctctctggtctgtg

SEQ ID NO: 166250 - DNA, 79 bp, Homo sapiens
agactcccttcattacatcagccccaatggcgttaatgagtatttgactgctctctggtctgtgggactggtcattcaa

SEQ ID NO: 166251 - DNA, 81 bp, Homo sapiens
ccttcattacatcagccccaatggcgttaatgagtatttgactgctctctggtctgtgggactggtcattcaagattatga

SEQ ID NO: 166252 - DNA, 84 bp, Homo sapiens
atcagccccaatggcgttaatgagtatttgactgctctctggtctgtgggactggtcattcaagattatgatgcgtgagtatga

SEQ ID NO: 166253 - DNA, 80 bp, Homo sapiens
cgttaatgagtatttgactgctctctggtctgtgggactggtcattcaagattatgatgcgtgagtatgactttggaaaa

SEQ ID NO: 166254 - DNA, 79 bp, Homo sapiens
tatttgactgctctctggtctgtgggactggtcattcaagattatgatgcgtgagtatgactttggaaaaactaaaata

SEQ ID NO: 166255 - DNA, 76 bp, Homo sapiens
ctctctggtctgtgggactggtcattcaagattatgatgcgtgagtatgactttggaaaaactaaaatacatgttt

SEQ ID NO: 166256 - DNA, 72 bp, Homo sapiens
ttttttctttttagtgataagatgtttccagcttttggttttggcgctcagatacctcctcagtggcaggta

SEQ ID NO: 166257 - DNA, 73 bp, Homo sapiens
tttttagtgataagatgtttccagcttttggttttggcgctcagatacctcctcagtggcaggtaagaggaaa

SEQ ID NO: 166258 - DNA, 73 bp, Homo sapiens
ataagatgtttccagcttttggttttggcgctcagatacctcctcagtggcaggtaagaggaaatctctattt

SEQ ID NO: 166259 - DNA, 72 bp, Homo sapiens
agcttttggttttggcgctcagatacctcctcagtggcaggtaagaggaaatctctattttaaagctttgcc

SEQ ID NO: 166260 - DNA, 73 bp, Homo sapiens
ttttggcgctcagatacctcctcagtggcaggtaagaggaaatctctattttaaagctttgcctcctagaaaa

SEQ ID NO: 166261 - DNA, 73 bp, Homo sapiens
agatacctcctcagtggcaggtaagaggaaatctctattttaaagctttgcctcctagaaaagcagcccagcc

SEQ ID NO: 166262 - DNA, 75 bp, Homo sapiens
tcagtggcaggtaagaggaaatctctattttaaagctttgcctcctagaaaagcagcccagccctcatcagtcct

SEQ ID NO: 166263 - DNA, 74 bp, Homo sapiens
taagaggaaatctctattttaaagctttgcctcctagaaaagcagcccagccctcatcagtcctttgtccatct

SEQ ID NO: 166264 - DNA, 77 bp, Homo sapiens
tctctattttaaagctttgcctcctagaaaagcagcccagccctcatcagtcctttgtccatctttgacaggtatca

SEQ ID NO: 166265 - DNA, 77 bp, Homo sapiens
ttaaagctttgcctcctagaaaagcagcccagccctcatcagtcctttgtccatctttgacaggtatcacatgaatt

SEQ ID NO: 166266 - DNA, 79 bp, Homo sapiens
tcctagaaaagcagcccagccctcatcagtcctttgtccatctttgacaggtatcacatgaatttccaatgaacttcaa

SEQ ID NO: 166267 - DNA, 77 bp, Homo sapiens
aaaagcagcccagccctcatcagtcctttgtccatctttgacaggtatcacatgaatttccaatgaacttcaaccca

SEQ ID NO: 166268 - DNA, 77 bp, Homo sapiens
agccctcatcagtcctttgtccatctttgacaggtatcacatgaatttccaatgaacttcaacccatccaatcccta

SEQ ID NO: 166269 - DNA, 76 bp, Homo sapiens
cctttgtccatctttgacaggtatcacatgaatttccaatgaacttcaacccatccaatccctactgcaatggtaa

SEQ ID NO: 166270 - DNA, 74 bp, Homo sapiens
atctttgacaggtatcacatgaatttccaatgaacttcaacccatccaatccctactgcaatggtaagttaaaa

SEQ ID NO: 166271 - DNA, 72 bp, Homo sapiens
acaggtatcacatgaatttccaatgaacttcaacccatccaatccctactgcaatggtaagttaaaaaataa

SEQ ID NO: 166272 - DNA, 72 bp, Homo sapiens
catgaatttccaatgaacttcaacccatccaatccctactgcaatggtaagttaaaaaataaacatgaagac

SEQ ID NO: 166273 - DNA, 71 bp, Homo sapiens
ccaatgaacttcaacccatccaatccctactgcaatggtaagttaaaaaataaacatgaagacttcaaatg

SEQ ID NO: 166274 - DNA, 71 bp, Homo sapiens
acccatccaatccctactgcaatggtaagttaaaaaataaacatgaagacttcaaatggaaaggctcacta

SEQ ID NO: 166275 - DNA, 71 bp, Homo sapiens
caatccctactgcaatggtaagttaaaaaataaacatgaagacttcaaatggaaaggctcactagtctttg

SEQ ID NO: 166276 - DNA, 75 bp, Homo sapiens
tgtttgtttgttctaggaatccaaggcattgtagaggcgtatcggtcttgtcttcctcagataaaactctatgga

SEQ ID NO: 166277 - DNA, 74 bp, Homo sapiens
ttctaggaatccaaggcattgtagaggcgtatcggtcttgtcttcctcagataaaactctatggaccaactaat

SEQ ID NO: 166278 - DNA, 72 bp, Homo sapiens
ggaatccaaggcattgtagaggcgtatcggtcttgtcttcctcagataaaactctatggaccaactaatttt

SEQ ID NO: 166279 - DNA, 73 bp, Homo sapiens
attgtagaggcgtatcggtcttgtcttcctcagataaaactctatggaccaactaatttttctccaatcataa

SEQ ID NO: 166280 - DNA, 74 bp, Homo sapiens
gtatcggtcttgtcttcctcagataaaactctatggaccaactaatttttctccaatcataaatcacgtggcca

SEQ ID NO: 166281 - DNA, 74 bp, Homo sapiens
tcttgtcttcctcagataaaactctatggaccaactaatttttctccaatcataaatcacgtggccaggtttgc

SEQ ID NO: 166282 - DNA, 77 bp, Homo sapiens
ataaaactctatggaccaactaatttttctccaatcataaatcacgtggccaggtttgctgctgcagccacgcaaca

SEQ ID NO: 166283 - DNA, 82 bp, Homo sapiens
tctatggaccaactaatttttctccaatcataaatcacgtggccaggtttgctgctgcagccacgcaacagcagacagcttc

SEQ ID NO: 166284 - DNA, 84 bp, Homo sapiens
taatttttctccaatcataaatcacgtggccaggtttgctgctgcagccacgcaacagcagacagcttctgtaagtgctctatg

SEQ ID NO: 166285 - DNA, 85 bp, Homo sapiens
tttctccaatcataaatcacgtggccaggtttgctgctgcagccacgcaacagcagacagcttctgtaagtgctctatggccagg

SEQ ID NO: 166286 - DNA, 83 bp, Homo sapiens
ataaatcacgtggccaggtttgctgctgcagccacgcaacagcagacagcttctgtaagtgctctatggccagggaatgggaa

SEQ ID NO: 166287 - DNA, 76 bp, Homo sapiens
attagccattgcttgacttgctcaggggacatgttttctttttctggcagcaatattttgtgcttttgattattac

SEQ ID NO: 166288 - DNA, 80 bp, Homo sapiens
ttgacttgctcaggggacatgttttctttttctggcagcaatattttgtgcttttgattattactgatggtgtgatcaca

SEQ ID NO: 166289 - DNA, 77 bp, Homo sapiens
aggggacatgttttctttttctggcagcaatattttgtgcttttgattattactgatggtgtgatcacagaccttga

SEQ ID NO: 166290 - DNA, 79 bp, Homo sapiens
tttctttttctggcagcaatattttgtgcttttgattattactgatggtgtgatcacagaccttgatgaaaccagacaa

SEQ ID NO: 166291 - DNA, 82 bp, Homo sapiens
tctggcagcaatattttgtgcttttgattattactgatggtgtgatcacagaccttgatgaaaccagacaagctatagttaa

SEQ ID NO: 166292 - DNA, 79 bp, Homo sapiens
aatattttgtgcttttgattattactgatggtgtgatcacagaccttgatgaaaccagacaagctatagttaatgcctc

SEQ ID NO: 166293 - DNA, 82 bp, Homo sapiens
ttttgattattactgatggtgtgatcacagaccttgatgaaaccagacaagctatagttaatgcctccaggctgcctatgtc

SEQ ID NO: 166294 - DNA, 84 bp, Homo sapiens
tattactgatggtgtgatcacagaccttgatgaaaccagacaagctatagttaatgcctccaggctgcctatgtccatcataat

SEQ ID NO: 166295 - DNA, 82 bp, Homo sapiens
gtgtgatcacagaccttgatgaaaccagacaagctatagttaatgcctccaggctgcctatgtccatcataattgttggagt

SEQ ID NO: 166296 - DNA, 79 bp, Homo sapiens
acagaccttgatgaaaccagacaagctatagttaatgcctccaggctgcctatgtccatcataattgttggagttggag

SEQ ID NO: 166297 - DNA, 81 bp, Homo sapiens
atgaaaccagacaagctatagttaatgcctccaggctgcctatgtccatcataattgttggagttggaggtgctgacttca

SEQ ID NO: 166298 - DNA, 81 bp, Homo sapiens
ctatagttaatgcctccaggctgcctatgtccatcataattgttggagttggaggtgctgacttcagcgccatggagtttc

SEQ ID NO: 166299 - DNA, 82 bp, Homo sapiens
gttaatgcctccaggctgcctatgtccatcataattgttggagttggaggtgctgacttcagcgccatggagtttctggatg

SEQ ID NO: 166300 - DNA, 82 bp, Homo sapiens
aggctgcctatgtccatcataattgttggagttggaggtgctgacttcagcgccatggagtttctggatggtgatggtggaa

SEQ ID NO: 166301 - DNA, 82 bp, Homo sapiens
tatgtccatcataattgttggagttggaggtgctgacttcagcgccatggagtttctggatggtgatggtggaagtctccgc

SEQ ID NO: 166302 - DNA, 78 bp, Homo sapiens
taattgttggagttggaggtgctgacttcagcgccatggagtttctggatggtgatggtggaagtctccgctccccat

SEQ ID NO: 166303 - DNA, 77 bp, Homo sapiens
agttggaggtgctgacttcagcgccatggagtttctggatggtgatggtggaagtctccgctccccattgggcgaag

SEQ ID NO: 166304 - DNA, 79 bp, Homo sapiens
acttcagcgccatggagtttctggatggtgatggtggaagtctccgctccccattgggcgaagtggccatcagagatat

SEQ ID NO: 166305 - DNA, 78 bp, Homo sapiens
catggagtttctggatggtgatggtggaagtctccgctccccattgggcgaagtggccatcagagatattgtccagtt

SEQ ID NO: 166306 - DNA, 78 bp, Homo sapiens
tttctggatggtgatggtggaagtctccgctccccattgggcgaagtggccatcagagatattgtccagtttgtgcct

SEQ ID NO: 166307 - DNA, 77 bp, Homo sapiens
atggtggaagtctccgctccccattgggcgaagtggccatcagagatattgtccagtttgtgcctttcagacagttc

SEQ ID NO: 166308 - DNA, 77 bp, Homo sapiens
aagtctccgctccccattgggcgaagtggccatcagagatattgtccagtttgtgcctttcagacagttccagaatg

SEQ ID NO: 166309 - DNA, 79 bp, Homo sapiens
ccattgggcgaagtggccatcagagatattgtccagtttgtgcctttcagacagttccagaatgtgagtaccactcctc

SEQ ID NO: 166310 - DNA, 78 bp, Homo sapiens
aagtggccatcagagatattgtccagtttgtgcctttcagacagttccagaatgtgagtaccactcctccctactcaa

SEQ ID NO: 166311 - DNA, 75 bp, Homo sapiens
atattgtccagtttgtgcctttcagacagttccagaatgtgagtaccactcctccctactcaaacactaaagtga

SEQ ID NO: 166312 - DNA, 71 bp, Homo sapiens
gaaaattcagttgctaataaagtcacttttattttgtttttcacaaggctccaaaagaagcacttgctcag

SEQ ID NO: 166313 - DNA, 72 bp, Homo sapiens
agttgctaataaagtcacttttattttgtttttcacaaggctccaaaagaagcacttgctcagtgtgtcttg

SEQ ID NO: 166314 - DNA, 74 bp, Homo sapiens
ataaagtcacttttattttgtttttcacaaggctccaaaagaagcacttgctcagtgtgtcttggcagagattc

SEQ ID NO: 166315 - DNA, 75 bp, Homo sapiens
attttgtttttcacaaggctccaaaagaagcacttgctcagtgtgtcttggcagagattccccagcaggtggtgg

SEQ ID NO: 166316 - DNA, 79 bp, Homo sapiens
tttcacaaggctccaaaagaagcacttgctcagtgtgtcttggcagagattccccagcaggtggtgggctacttcaata

SEQ ID NO: 166317 - DNA, 79 bp, Homo sapiens
tccaaaagaagcacttgctcagtgtgtcttggcagagattccccagcaggtggtgggctacttcaatacatacaaactc

SEQ ID NO: 166318 - DNA, 78 bp, Homo sapiens
aagcacttgctcagtgtgtcttggcagagattccccagcaggtggtgggctacttcaatacatacaaactccttcctc

SEQ ID NO: 166319 - DNA, 74 bp, Homo sapiens
agtgtgtcttggcagagattccccagcaggtggtgggctacttcaatacatacaaactccttcctcccaagaac

SEQ ID NO: 166320 - DNA, 73 bp, Homo sapiens
cagagattccccagcaggtggtgggctacttcaatacatacaaactccttcctcccaagaacccagccacgaa

SEQ ID NO: 166321 - DNA, 72 bp, Homo sapiens
ccagcaggtggtgggctacttcaatacatacaaactccttcctcccaagaacccagccacgaaacaacagaa

SEQ ID NO: 166322 - DNA, 71 bp, Homo sapiens
aggtggtgggctacttcaatacatacaaactccttcctcccaagaacccagccacgaaacaacagaagcag

SEQ ID NO: 166323 - DNA, 74 bp, Homo sapiens
tcaatacatacaaactccttcctcccaagaacccagccacgaaacaacagaagcagtgaccacttcaacagaat

SEQ ID NO: 166324 - DNA, 71 bp, Homo sapiens
atacaaactccttcctcccaagaacccagccacgaaacaacagaagcagtgaccacttcaacagaattctt

SEQ ID NO: 166325 - DNA, 74 bp, Homo sapiens
ttcctcccaagaacccagccacgaaacaacagaagcagtgaccacttcaacagaattcttttgtgttatgtgga

SEQ ID NO: 166326 - DNA, 77 bp, Homo sapiens
aagaacccagccacgaaacaacagaagcagtgaccacttcaacagaattcttttgtgttatgtggagcaatgccatc

SEQ ID NO: 166327 - DNA, 80 bp, Homo sapiens
aagcagtgaccacttcaacagaattcttttgtgttatgtggagcaatgccatctctcaccccaaatcgtgtatctgtcat

SEQ ID NO: 166328 - DNA, 79 bp, Homo sapiens
cacttcaacagaattcttttgtgttatgtggagcaatgccatctctcaccccaaatcgtgtatctgtcattctacgtac

SEQ ID NO: 166329 - DNA, 76 bp, Homo sapiens
agaattcttttgtgttatgtggagcaatgccatctctcaccccaaatcgtgtatctgtcattctacgtacttttta

SEQ ID NO: 166330 - DNA, 74 bp, Homo sapiens
cttttgtgttatgtggagcaatgccatctctcaccccaaatcgtgtatctgtcattctacgtactttttacccc

SEQ ID NO: 166331 - DNA, 77 bp, Homo sapiens
gagcaatgccatctctcaccccaaatcgtgtatctgtcattctacgtactttttacccccagcatttatgatgtaaa

SEQ ID NO: 166332 - DNA, 73 bp, Homo sapiens
atctctcaccccaaatcgtgtatctgtcattctacgtactttttacccccagcatttatgatgtaaatctctt

SEQ ID NO: 166333 - DNA, 76 bp, Homo sapiens
gtgtatctgtcattctacgtactttttacccccagcatttatgatgtaaatctctttctctatggattatatctgt

SEQ ID NO: 166334 - DNA, 74 bp, Homo sapiens
cattctacgtactttttacccccagcatttatgatgtaaatctctttctctatggattatatctgtttaaagca

SEQ ID NO: 166335 - DNA, 74 bp, Homo sapiens
ccagcatttatgatgtaaatctctttctctatggattatatctgtttaaagcattctttctaggttattttggg

SEQ ID NO: 166336 - DNA, 74 bp, Homo sapiens
tgatgtaaatctctttctctatggattatatctgtttaaagcattctttctaggttattttggggggacagtgc

SEQ ID NO: 166337 - DNA, 73 bp, Homo sapiens
tctatggattatatctgtttaaagcattctttctaggttattttggggggacagtgccaagtccatctttgcc

SEQ ID NO: 166338 - DNA, 71 bp, Homo sapiens
atatctgtttaaagcattctttctaggttattttggggggacagtgccaagtccatctttgcccagtcaat

SEQ ID NO: 166339 - DNA, 74 bp, Homo sapiens
attctttctaggttattttggggggacagtgccaagtccatctttgcccagtcaattcagtgattgatagcaat

SEQ ID NO: 166340 - DNA, 75 bp, Homo sapiens
taggttattttggggggacagtgccaagtccatctttgcccagtcaattcagtgattgatagcaatttacattaa

SEQ ID NO: 166341 - DNA, 78 bp, Homo sapiens
gggggacagtgccaagtccatctttgcccagtcaattcagtgattgatagcaatttacattaattgcagtaaagctct

SEQ ID NO: 166342 - DNA, 80 bp, Homo sapiens
tgccaagtccatctttgcccagtcaattcagtgattgatagcaatttacattaattgcagtaaagctctttggattagaa

SEQ ID NO: 166343 - DNA, 78 bp, Homo sapiens
catctttgcccagtcaattcagtgattgatagcaatttacattaattgcagtaaagctctttggattagaaattagtg

SEQ ID NO: 166344 - DNA, 76 bp, Homo sapiens
gtcaattcagtgattgatagcaatttacattaattgcagtaaagctctttggattagaaattagtgtggggaaagc

SEQ ID NO: 166345 - DNA, 75 bp, Homo sapiens
cagtgattgatagcaatttacattaattgcagtaaagctctttggattagaaattagtgtggggaaagcttattc

SEQ ID NO: 166346 - DNA, 72 bp, Homo sapiens
agcaatttacattaattgcagtaaagctctttggattagaaattagtgtggggaaagcttattctgttgttg

SEQ ID NO: 166347 - DNA, 70 bp, Homo sapiens
acattaattgcagtaaagctctttggattagaaattagtgtggggaaagcttattctgttgttgtttttg

SEQ ID NO: 166348 - DNA, 72 bp, Homo sapiens
tgttgtttttgtttactttcatatgatgaaaatgctgtgtttaagtgtttgtcaataggaagaatggaaaac

SEQ ID NO: 166349 - DNA, 75 bp, Homo sapiens
gtttactttcatatgatgaaaatgctgtgtttaagtgtttgtcaataggaagaatggaaaactgttgggatgatg

SEQ ID NO: 166350 - DNA, 75 bp, Homo sapiens
ctttcatatgatgaaaatgctgtgtttaagtgtttgtcaataggaagaatggaaaactgttgggatgatgtggtt

SEQ ID NO: 166351 - DNA, 74 bp, Homo sapiens
aaaatgctgtgtttaagtgtttgtcaataggaagaatggaaaactgttgggatgatgtggtttgcaggttgctg

SEQ ID NO: 166352 - DNA, 78 bp, Homo sapiens
tgtttaagtgtttgtcaataggaagaatggaaaactgttgggatgatgtggtttgcaggttgctgtgcctgattcaca

SEQ ID NO: 166353 - DNA, 81 bp, Homo sapiens
ttgtcaataggaagaatggaaaactgttgggatgatgtggtttgcaggttgctgtgcctgattcacagtgtatgttgtata

SEQ ID NO: 166354 - DNA, 80 bp, Homo sapiens
aagaatggaaaactgttgggatgatgtggtttgcaggttgctgtgcctgattcacagtgtatgttgtataagccaatgtc

SEQ ID NO: 166355 - DNA, 82 bp, Homo sapiens
aactgttgggatgatgtggtttgcaggttgctgtgcctgattcacagtgtatgttgtataagccaatgtccatacctgatta

SEQ ID NO: 166356 - DNA, 83 bp, Homo sapiens
tttgcaggttgctgtgcctgattcacagtgtatgttgtataagccaatgtccatacctgattatgagagcttcttaaattata

SEQ ID NO: 166357 - DNA, 83 bp, Homo sapiens
tgtgcctgattcacagtgtatgttgtataagccaatgtccatacctgattatgagagcttcttaaattatatgatatcaaatt

SEQ ID NO: 166358 - DNA, 81 bp, Homo sapiens
tcacagtgtatgttgtataagccaatgtccatacctgattatgagagcttcttaaattatatgatatcaaatttgttcctg

SEQ ID NO: 166359 - DNA, 79 bp, Homo sapiens
tgttgtataagccaatgtccatacctgattatgagagcttcttaaattatatgatatcaaatttgttcctgtaactctg

SEQ ID NO: 166360 - DNA, 80 bp, Homo sapiens
agccaatgtccatacctgattatgagagcttcttaaattatatgatatcaaatttgttcctgtaactctgtatacagtgc

SEQ ID NO: 166361 - DNA, 81 bp, Homo sapiens
tccatacctgattatgagagcttcttaaattatatgatatcaaatttgttcctgtaactctgtatacagtgcttttctgca

SEQ ID NO: 166362 - DNA, 79 bp, Homo sapiens
tgattatgagagcttcttaaattatatgatatcaaatttgttcctgtaactctgtatacagtgcttttctgcaaggtaa

SEQ ID NO: 166363 - DNA, 75 bp, Homo sapiens
gagagcttcttaaattatatgatatcaaatttgttcctgtaactctgtatacagtgcttttctgcaaggtaaaaa

SEQ ID NO: 166364 - DNA, 72 bp, Homo sapiens
cttaaattatatgatatcaaatttgttcctgtaactctgtatacagtgcttttctgcaaggtaaaaataacc

SEQ ID NO: 166365 - DNA, 77 bp, Homo sapiens
attatatgatatcaaatttgttcctgtaactctgtatacagtgcttttctgcaaggtaaaaataacctgtctatgca

SEQ ID NO: 166366 - DNA, 78 bp, Homo sapiens
atgatatcaaatttgttcctgtaactctgtatacagtgcttttctgcaaggtaaaaataacctgtctatgcatctgat

SEQ ID NO: 166367 - DNA, 76 bp, Homo sapiens
atttgttcctgtaactctgtatacagtgcttttctgcaaggtaaaaataacctgtctatgcatctgatttttgcta

SEQ ID NO: 166368 - DNA, 77 bp, Homo sapiens
gtaactctgtatacagtgcttttctgcaaggtaaaaataacctgtctatgcatctgatttttgctacagtttagaca

SEQ ID NO: 166369 - DNA, 76 bp, Homo sapiens
tatacagtgcttttctgcaaggtaaaaataacctgtctatgcatctgatttttgctacagtttagacactgtggtt

SEQ ID NO: 166370 - DNA, 76 bp, Homo sapiens
tacagtgcttttctgcaaggtaaaaataacctgtctatgcatctgatttttgctacagtttagacactgtggttta

SEQ ID NO: 166371 - DNA, 77 bp, Homo sapiens
taaaaataacctgtctatgcatctgatttttgctacagtttagacactgtggtttacaaaacagcatgcactcaact

SEQ ID NO: 166372 - DNA, 79 bp, Homo sapiens
tctatgcatctgatttttgctacagtttagacactgtggtttacaaaacagcatgcactcaacttgggactttatgaaa

SEQ ID NO: 166373 - DNA, 74 bp, Homo sapiens
atctgatttttgctacagtttagacactgtggtttacaaaacagcatgcactcaacttgggactttatgaaaag

SEQ ID NO: 166374 - DNA, 78 bp, Homo sapiens
ttgctacagtttagacactgtggtttacaaaacagcatgcactcaacttgggactttatgaaaagtactgaatgagca

SEQ ID NO: 166375 - DNA, 75 bp, Homo sapiens
ttagacactgtggtttacaaaacagcatgcactcaacttgggactttatgaaaagtactgaatgagcaggaaaag

SEQ ID NO: 166376 - DNA, 76 bp, Homo sapiens
tacaaaacagcatgcactcaacttgggactttatgaaaagtactgaatgagcaggaaaaggcacatactcagtttt

SEQ ID NO: 166377 - DNA, 75 bp, Homo sapiens
aacagcatgcactcaacttgggactttatgaaaagtactgaatgagcaggaaaaggcacatactcagttttttaa

SEQ ID NO: 166378 - DNA, 72 bp, Homo sapiens
actcaacttgggactttatgaaaagtactgaatgagcaggaaaaggcacatactcagttttttaaatgtaca

SEQ ID NO: 166379 - DNA, 71 bp, Homo sapiens
gcaggaaaaggcacatactcagttttttaaatgtacaatcaacaagtaaaaataacctcatgtaagtaagc

SEQ ID NO: 166380 - DNA, 69 bp, Homo sapiens
aaaggcacatactcagttttttaaatgtacaatcaacaagtaaaaataacctcatgtaagtaagccatt

SEQ ID NO: 166381 - DNA, 68 bp, Homo sapiens
ctcagttttttaaatgtacaatcaacaagtaaaaataacctcatgtaagtaagccatttttatttgcc

SEQ ID NO: 166382 - DNA, 70 bp, Homo sapiens
taaatgtacaatcaacaagtaaaaataacctcatgtaagtaagccatttttatttgcctttctagatatt

SEQ ID NO: 166383 - DNA, 68 bp, Homo sapiens
caatcaacaagtaaaaataacctcatgtaagtaagccatttttatttgcctttctagatattttattt

SEQ ID NO: 166384 - DNA, 69 bp, Homo sapiens
ttttattttattgtggaaaactgtaaacatggtcagatttggctttttttttcattaactgagcaagac

SEQ ID NO: 166385 - DNA, 76 bp, Homo sapiens
aactgtaaacatggtcagatttggctttttttttcattaactgagcaagactttcaggatattgtagatgcacaga

SEQ ID NO: 166386 - DNA, 76 bp, Homo sapiens
atggtcagatttggctttttttttcattaactgagcaagactttcaggatattgtagatgcacagatggtaggttg

SEQ ID NO: 166387 - DNA, 76 bp, Homo sapiens
ggctttttttttcattaactgagcaagactttcaggatattgtagatgcacagatggtaggttgtcctgaattcta

SEQ ID NO: 166388 - DNA, 80 bp, Homo sapiens
tgagcaagactttcaggatattgtagatgcacagatggtaggttgtcctgaattctacattattagattactttaattga

SEQ ID NO: 166389 - DNA, 77 bp, Homo sapiens
agactttcaggatattgtagatgcacagatggtaggttgtcctgaattctacattattagattactttaattgagat

SEQ ID NO: 166390 - DNA, 74 bp, Homo sapiens
tgtagatgcacagatggtaggttgtcctgaattctacattattagattactttaattgagatttgttaaaacgg

SEQ ID NO: 166391 - DNA, 72 bp, Homo sapiens
tgcacagatggtaggttgtcctgaattctacattattagattactttaattgagatttgttaaaacggttag

SEQ ID NO: 166392 - DNA, 68 bp, Homo sapiens
ggtaggttgtcctgaattctacattattagattactttaattgagatttgttaaaacggttaggactg

SEQ ID NO: 166393 - DNA, 69 bp, Homo sapiens
ctgaattctacattattagattactttaattgagatttgttaaaacggttaggactgttttgtccagga

SEQ ID NO: 166394 - DNA, 67 bp, Homo sapiens
attagattactttaattgagatttgttaaaacggttaggactgttttgtccaggaaagataagagga

SEQ ID NO: 166395 - DNA, 66 bp, Homo sapiens
actttaattgagatttgttaaaacggttaggactgttttgtccaggaaagataagaggaccaaaca

SEQ ID NO: 166396 - DNA, 68 bp, Homo sapiens
gagatttgttaaaacggttaggactgttttgtccaggaaagataagaggaccaaacatataaggtgaa

SEQ ID NO: 166397 - DNA, 69 bp, Homo sapiens
tgttaaaacggttaggactgttttgtccaggaaagataagaggaccaaacatataaggtgaaattcaga

SEQ ID NO: 166398 - DNA, 68 bp, Homo sapiens
ttaaaacggttaggactgttttgtccaggaaagataagaggaccaaacatataaggtgaaattcagaa

SEQ ID NO: 166399 - DNA, 69 bp, Homo sapiens
taggactgttttgtccaggaaagataagaggaccaaacatataaggtgaaattcagaattccgtttcct

SEQ ID NO: 166400 - DNA, 69 bp, Homo sapiens
ctgttttgtccaggaaagataagaggaccaaacatataaggtgaaattcagaattccgtttccttctaa

SEQ ID NO: 166401 - DNA, 71 bp, Homo sapiens
ttgtccaggaaagataagaggaccaaacatataaggtgaaattcagaattccgtttccttctaactaatga

SEQ ID NO: 166402 - DNA, 69 bp, Homo sapiens
caggaaagataagaggaccaaacatataaggtgaaattcagaattccgtttccttctaactaatgaaaa

SEQ ID NO: 166403 - DNA, 68 bp, Homo sapiens
aagaggaccaaacatataaggtgaaattcagaattccgtttccttctaactaatgaaaaactgcttac

SEQ ID NO: 166404 - DNA, 66 bp, Homo sapiens
aacatataaggtgaaattcagaattccgtttccttctaactaatgaaaaactgcttactaaaaaaa

SEQ ID NO: 166405 - DNA, 65 bp, Homo sapiens
gtgaaattcagaattccgtttccttctaactaatgaaaaactgcttactaaaaaaaaattttata

SEQ ID NO: 166406 - DNA, 64 bp, Homo sapiens
ttccgtttccttctaactaatgaaaaactgcttactaaaaaaaaattttatactttccttgcta

SEQ ID NO: 166407 - DNA, 67 bp, Homo sapiens
gaaaaactgcttactaaaaaaaaattttatactttccttgctaaggtcccatatattgatttgtaca

SEQ ID NO: 166408 - DNA, 69 bp, Homo sapiens
ctgcttactaaaaaaaaattttatactttccttgctaaggtcccatatattgatttgtacagatccact

SEQ ID NO: 166409 - DNA, 70 bp, Homo sapiens
actttccttgctaaggtcccatatattgatttgtacagatccacttagtcattttctcctttttttaaga

SEQ ID NO: 166410 - DNA, 70 bp, Homo sapiens
cttgctaaggtcccatatattgatttgtacagatccacttagtcattttctcctttttttaagaaccatt

SEQ ID NO: 166411 - DNA, 71 bp, Homo sapiens
cccatatattgatttgtacagatccacttagtcattttctcctttttttaagaaccattttcatctgattt

SEQ ID NO: 166412 - DNA, 71 bp, Homo sapiens
tgtacagatccacttagtcattttctcctttttttaagaaccattttcatctgatttttaaactcacgata

SEQ ID NO: 166413 - DNA, 69 bp, Homo sapiens
gatccacttagtcattttctcctttttttaagaaccattttcatctgatttttaaactcacgataccag

SEQ ID NO: 166414 - DNA, 69 bp, Homo sapiens
ttttctcctttttttaagaaccattttcatctgatttttaaactcacgataccagttatctgttaatca

SEQ ID NO: 166415 - DNA, 71 bp, Homo sapiens
aagaaccattttcatctgatttttaaactcacgataccagttatctgttaatcaaaattgcattttacaat

SEQ ID NO: 166416 - DNA, 74 bp, Homo sapiens
catctgatttttaaactcacgataccagttatctgttaatcaaaattgcattttacaatttaataatgtgatat

SEQ ID NO: 166417 - DNA, 75 bp, Homo sapiens
aactcacgataccagttatctgttaatcaaaattgcattttacaatttaataatgtgatatttcctatgtctaca

SEQ ID NO: 166418 - DNA, 76 bp, Homo sapiens
cgataccagttatctgttaatcaaaattgcattttacaatttaataatgtgatatttcctatgtctacagcatacc

SEQ ID NO: 166419 - DNA, 75 bp, Homo sapiens
ctgttaatcaaaattgcattttacaatttaataatgtgatatttcctatgtctacagcataccttattaggtata

SEQ ID NO: 166420 - DNA, 72 bp, Homo sapiens
aattgcattttacaatttaataatgtgatatttcctatgtctacagcataccttattaggtataaaacctac

SEQ ID NO: 166421 - DNA, 72 bp, Homo sapiens
ataatgtgatatttcctatgtctacagcataccttattaggtataaaacctactgcaacttagaaaaaggaa

SEQ ID NO: 166422 - DNA, 65 bp, Homo sapiens
aagaaaaaagaaaacttttccaactgctgcattaagatagggtggattttatgtgcttttttttt

SEQ ID NO: 166423 - DNA, 65 bp, Homo sapiens
tttttttaagagttgaatttcttttcctgacttttaccttttacagcgtattacttagtgaacat

SEQ ID NO: 166424 - DNA, 69 bp, Homo sapiens
agagttgaatttcttttcctgacttttaccttttacagcgtattacttagtgaacattacattttcaga

SEQ ID NO: 166425 - DNA, 70 bp, Homo sapiens
cttttcctgacttttaccttttacagcgtattacttagtgaacattacattttcagaatagatcctaata

SEQ ID NO: 166426 - DNA, 70 bp, Homo sapiens
cctgacttttaccttttacagcgtattacttagtgaacattacattttcagaatagatcctaatatttta

SEQ ID NO: 166427 - DNA, 74 bp, Homo sapiens
cttttacagcgtattacttagtgaacattacattttcagaatagatcctaatattttattgagggcctatgtgc

SEQ ID NO: 166428 - DNA, 78 bp, Homo sapiens
agtgaacattacattttcagaatagatcctaatattttattgagggcctatgtgctaaaaactatgcatatctatata

SEQ ID NO: 166429 - DNA, 78 bp, Homo sapiens
tttcagaatagatcctaatattttattgagggcctatgtgctaaaaactatgcatatctatatattggccaattatct

SEQ ID NO: 166430 - DNA, 77 bp, Homo sapiens
gaatagatcctaatattttattgagggcctatgtgctaaaaactatgcatatctatatattggccaattatctttaa

SEQ ID NO: 166431 - DNA, 75 bp, Homo sapiens
gggcctatgtgctaaaaactatgcatatctatatattggccaattatctttaataatttaccttttgaaattgca

SEQ ID NO: 166432 - DNA, 76 bp, Homo sapiens
gtgctaaaaactatgcatatctatatattggccaattatctttaataatttaccttttgaaattgcatgtttatca

SEQ ID NO: 166433 - DNA, 77 bp, Homo sapiens
tgcatatctatatattggccaattatctttaataatttaccttttgaaattgcatgtttatcatatatccttaagtg

SEQ ID NO: 166434 - DNA, 80 bp, Homo sapiens
aataatttaccttttgaaattgcatgtttatcatatatccttaagtggacacatacagtgccatgttgatgtgcctctca

SEQ ID NO: 166435 - DNA, 80 bp, Homo sapiens
taccttttgaaattgcatgtttatcatatatccttaagtggacacatacagtgccatgttgatgtgcctctcagttttat

SEQ ID NO: 166436 - DNA, 82 bp, Homo sapiens
aaattgcatgtttatcatatatccttaagtggacacatacagtgccatgttgatgtgcctctcagttttattgaaaagctgc

SEQ ID NO: 166437 - DNA, 81 bp, Homo sapiens
gtttatcatatatccttaagtggacacatacagtgccatgttgatgtgcctctcagttttattgaaaagctgccccacagc

SEQ ID NO: 166438 - DNA, 81 bp, Homo sapiens
tatccttaagtggacacatacagtgccatgttgatgtgcctctcagttttattgaaaagctgccccacagcccatgtctct

SEQ ID NO: 166439 - DNA, 85 bp, Homo sapiens
acatacagtgccatgttgatgtgcctctcagttttattgaaaagctgccccacagcccatgtctcttgttctctgcaatgcctca

SEQ ID NO: 166440 - DNA, 81 bp, Homo sapiens
ccatgttgatgtgcctctcagttttattgaaaagctgccccacagcccatgtctcttgttctctgcaatgcctcaagggag

SEQ ID NO: 166441 - DNA, 83 bp, Homo sapiens
ttgatgtgcctctcagttttattgaaaagctgccccacagcccatgtctcttgttctctgcaatgcctcaagggagtgagctc

SEQ ID NO: 166442 - DNA, 81 bp, Homo sapiens
gttttattgaaaagctgccccacagcccatgtctcttgttctctgcaatgcctcaagggagtgagctctcaaccacagata

SEQ ID NO: 166443 - DNA, 84 bp, Homo sapiens
attgaaaagctgccccacagcccatgtctcttgttctctgcaatgcctcaagggagtgagctctcaaccacagatagctgtggc

SEQ ID NO: 166444 - DNA, 89 bp, Homo sapiens
ttgttctctgcaatgcctcaagggagtgagctctcaaccacagatagctgtggcttctcagaagcagctcattgccaaggccaggctga

SEQ ID NO: 166445 - DNA, 85 bp, Homo sapiens
aatgcctcaagggagtgagctctcaaccacagatagctgtggcttctcagaagcagctcattgccaaggccaggctgagagggga

SEQ ID NO: 166446 - DNA, 86 bp, Homo sapiens
agtgagctctcaaccacagatagctgtggcttctcagaagcagctcattgccaaggccaggctgagaggggacctgcttgctgtgg

SEQ ID NO: 166447 - DNA, 84 bp, Homo sapiens
ctctcaaccacagatagctgtggcttctcagaagcagctcattgccaaggccaggctgagaggggacctgcttgctgtggtggt

SEQ ID NO: 166448 - DNA, 84 bp, Homo sapiens
atagctgtggcttctcagaagcagctcattgccaaggccaggctgagaggggacctgcttgctgtggtggttgcctagcccaga

SEQ ID NO: 166449 - DNA, 84 bp, Homo sapiens
ttctcagaagcagctcattgccaaggccaggctgagaggggacctgcttgctgtggtggttgcctagcccagatgagcatttac

SEQ ID NO: 166450 - DNA, 81 bp, Homo sapiens
aagcagctcattgccaaggccaggctgagaggggacctgcttgctgtggtggttgcctagcccagatgagcatttacctac

SEQ ID NO: 166451 - DNA, 77 bp, Homo sapiens
ctgagaggggacctgcttgctgtggtggttgcctagcccagatgagcatttacctaccaccttcccacttggctagc

SEQ ID NO: 166452 - DNA, 76 bp, Homo sapiens
acctgcttgctgtggtggttgcctagcccagatgagcatttacctaccaccttcccacttggctagctgtcctttg

SEQ ID NO: 166453 - DNA, 78 bp, Homo sapiens
tgtggtggttgcctagcccagatgagcatttacctaccaccttcccacttggctagctgtcctttggatatgtgctgt

SEQ ID NO: 166454 - DNA, 77 bp, Homo sapiens
tggttgcctagcccagatgagcatttacctaccaccttcccacttggctagctgtcctttggatatgtgctgttaac

SEQ ID NO: 166455 - DNA, 77 bp, Homo sapiens
gatgagcatttacctaccaccttcccacttggctagctgtcctttggatatgtgctgttaactggggaaggcatcta

SEQ ID NO: 166456 - DNA, 73 bp, Homo sapiens
tttacctaccaccttcccacttggctagctgtcctttggatatgtgctgttaactggggaaggcatctaacta

SEQ ID NO: 166457 - DNA, 77 bp, Homo sapiens
cttcccacttggctagctgtcctttggatatgtgctgttaactggggaaggcatctaactagtagcctgctactcca

SEQ ID NO: 166458 - DNA, 78 bp, Homo sapiens
acttggctagctgtcctttggatatgtgctgttaactggggaaggcatctaactagtagcctgctactccatagtatg

SEQ ID NO: 166459 - DNA, 83 bp, Homo sapiens
atatgtgctgttaactggggaaggcatctaactagtagcctgctactccatagtatggctcaatagatgacacatcattttga

SEQ ID NO: 166460 - DNA, 82 bp, Homo sapiens
aaggcatctaactagtagcctgctactccatagtatggctcaatagatgacacatcattttgacattatcaataggagaaaa

SEQ ID NO: 166461 - DNA, 80 bp, Homo sapiens
taactagtagcctgctactccatagtatggctcaatagatgacacatcattttgacattatcaataggagaaaagaaaac

SEQ ID NO: 166462 - DNA, 76 bp, Homo sapiens
ctactccatagtatggctcaatagatgacacatcattttgacattatcaataggagaaaagaaaactaacccttct

SEQ ID NO: 166463 - DNA, 78 bp, Homo sapiens
catagtatggctcaatagatgacacatcattttgacattatcaataggagaaaagaaaactaacccttcttctgattg

SEQ ID NO: 166464 - DNA, 71 bp, Homo sapiens
aggagaaaagaaaactaacccttcttctgattgtttggagccatagttgtctcagatgttctaattctctt

SEQ ID NO: 166465 - DNA, 73 bp, Homo sapiens
aaagaaaactaacccttcttctgattgtttggagccatagttgtctcagatgttctaattctctttgtatgct

SEQ ID NO: 166466 - DNA, 80 bp, Homo sapiens
attgtttggagccatagttgtctcagatgttctaattctctttgtatgcttggaaacagcatagatatgttgctgtggtt

SEQ ID NO: 166467 - DNA, 79 bp, Homo sapiens
ttgtctcagatgttctaattctctttgtatgcttggaaacagcatagatatgttgctgtggttttcagaattttctctt

SEQ ID NO: 166468 - DNA, 77 bp, Homo sapiens
ctaattctctttgtatgcttggaaacagcatagatatgttgctgtggttttcagaattttctcttttaatcacaaga

SEQ ID NO: 166469 - DNA, 76 bp, Homo sapiens
tctttgtatgcttggaaacagcatagatatgttgctgtggttttcagaattttctcttttaatcacaagaagcctt

SEQ ID NO: 166470 - DNA, 73 bp, Homo sapiens
gcttggaaacagcatagatatgttgctgtggttttcagaattttctcttttaatcacaagaagccttttaaaa

SEQ ID NO: 166471 - DNA, 73 bp, Homo sapiens
cagcatagatatgttgctgtggttttcagaattttctcttttaatcacaagaagccttttaaaaaatgactta

SEQ ID NO: 166472 - DNA, 71 bp, Homo sapiens
gctgtggttttcagaattttctcttttaatcacaagaagccttttaaaaaatgacttacacatattctcaa

SEQ ID NO: 166473 - DNA, 73 bp, Homo sapiens
tctcttttaatcacaagaagccttttaaaaaatgacttacacatattctcaatgtacagtaaaacagacagaa

SEQ ID NO: 166474 - DNA, 75 bp, Homo sapiens
cacaagaagccttttaaaaaatgacttacacatattctcaatgtacagtaaaacagacagaagtgagcttatctg

SEQ ID NO: 166475 - DNA, 77 bp, Homo sapiens
gccttttaaaaaatgacttacacatattctcaatgtacagtaaaacagacagaagtgagcttatctgtttgatgctg

SEQ ID NO: 166476 - DNA, 79 bp, Homo sapiens
aaaaatgacttacacatattctcaatgtacagtaaaacagacagaagtgagcttatctgtttgatgctgtggcagggtc

SEQ ID NO: 166477 - DNA, 81 bp, Homo sapiens
ttacacatattctcaatgtacagtaaaacagacagaagtgagcttatctgtttgatgctgtggcagggtcccagtcactgg

SEQ ID NO: 166478 - DNA, 79 bp, Homo sapiens
aatgtacagtaaaacagacagaagtgagcttatctgtttgatgctgtggcagggtcccagtcactgggcatatcctcct

SEQ ID NO: 166479 - DNA, 80 bp, Homo sapiens
acagaagtgagcttatctgtttgatgctgtggcagggtcccagtcactgggcatatcctccttctccttaaccagctcca

SEQ ID NO: 166480 - DNA, 80 bp, Homo sapiens
agcttatctgtttgatgctgtggcagggtcccagtcactgggcatatcctccttctccttaaccagctccacagcagccc

SEQ ID NO: 166481 - DNA, 78 bp, Homo sapiens
gggtcccagtcactgggcatatcctccttctccttaaccagctccacagcagcccctgagtcacctgcacaaggtgct

SEQ ID NO: 166482 - DNA, 78 bp, Homo sapiens
agtcactgggcatatcctccttctccttaaccagctccacagcagcccctgagtcacctgcacaaggtgcttgggaac

SEQ ID NO: 166483 - DNA, 79 bp, Homo sapiens
atatcctccttctccttaaccagctccacagcagcccctgagtcacctgcacaaggtgcttgggaactgctggttatga

SEQ ID NO: 166484 - DNA, 79 bp, Homo sapiens
tccttaaccagctccacagcagcccctgagtcacctgcacaaggtgcttgggaactgctggttatgagcattcctggtt

SEQ ID NO: 166485 - DNA, 78 bp, Homo sapiens
aaccagctccacagcagcccctgagtcacctgcacaaggtgcttgggaactgctggttatgagcattcctggttttct

SEQ ID NO: 166486 - DNA, 77 bp, Homo sapiens
agcccctgagtcacctgcacaaggtgcttgggaactgctggttatgagcattcctggttttcttcagccaaataaca

SEQ ID NO: 166487 - DNA, 77 bp, Homo sapiens
agtcacctgcacaaggtgcttgggaactgctggttatgagcattcctggttttcttcagccaaataacaggtaatca

SEQ ID NO: 166488 - DNA, 75 bp, Homo sapiens
aaggtgcttgggaactgctggttatgagcattcctggttttcttcagccaaataacaggtaatcactgtcaattg

SEQ ID NO: 166489 - DNA, 75 bp, Homo sapiens
ggaactgctggttatgagcattcctggttttcttcagccaaataacaggtaatcactgtcaattggatttggtct

SEQ ID NO: 166490 - DNA, 74 bp, Homo sapiens
gttatgagcattcctggttttcttcagccaaataacaggtaatcactgtcaattggatttggtcttcattattt

SEQ ID NO: 166491 - DNA, 74 bp, Homo sapiens
gagcattcctggttttcttcagccaaataacaggtaatcactgtcaattggatttggtcttcattattttatat

SEQ ID NO: 166492 - DNA, 72 bp, Homo sapiens
ggttttcttcagccaaataacaggtaatcactgtcaattggatttggtcttcattattttatattctgattt

SEQ ID NO: 166493 - DNA, 75 bp, Homo sapiens
gccaaataacaggtaatcactgtcaattggatttggtcttcattattttatattctgattttatcagaattattc

SEQ ID NO: 166494 - DNA, 71 bp, Homo sapiens
ctgtcaattggatttggtcttcattattttatattctgattttatcagaattattctattttaaaattgtt

SEQ ID NO: 166495 - DNA, 77 bp, Homo sapiens
attgttttaaaatttaaaacatttaattcatgatcatgttcatcagtagatgctattattcataagaactgtgattc

SEQ ID NO: 166496 - DNA, 79 bp, Homo sapiens
aatttaaaacatttaattcatgatcatgttcatcagtagatgctattattcataagaactgtgattccagcaaactagg

SEQ ID NO: 166497 - DNA, 80 bp, Homo sapiens
aacatttaattcatgatcatgttcatcagtagatgctattattcataagaactgtgattccagcaaactagggtaattgg

SEQ ID NO: 166498 - DNA, 80 bp, Homo sapiens
attcatgatcatgttcatcagtagatgctattattcataagaactgtgattccagcaaactagggtaattggtgcctttt

SEQ ID NO: 166499 - DNA, 75 bp, Homo sapiens
ttcatcagtagatgctattattcataagaactgtgattccagcaaactagggtaattggtgcctttttacagttt

SEQ ID NO: 166500 - DNA, 74 bp, Homo sapiens
gtagatgctattattcataagaactgtgattccagcaaactagggtaattggtgcctttttacagttttgaata

SEQ ID NO: 166501 - DNA, 69 bp, Homo sapiens
gaactgtgattccagcaaactagggtaattggtgcctttttacagttttgaataaaagcatttacaatt

SEQ ID NO: 166502 - DNA, 67 bp, Homo sapiens
ccagcaaactagggtaattggtgcctttttacagttttgaataaaagcatttacaatttctaaatta

SEQ ID NO: 166503 - DNA, 68 bp, Homo sapiens
gggtaattggtgcctttttacagttttgaataaaagcatttacaatttctaaattatcagttttcaca

SEQ ID NO: 166504 - DNA, 72 bp, Homo sapiens
gtgcctttttacagttttgaataaaagcatttacaatttctaaattatcagttttcacagtttcagcactca

SEQ ID NO: 166505 - DNA, 76 bp, Homo sapiens
aagcatttacaatttctaaattatcagttttcacagtttcagcactcaacctcatcatacgctgatttaatattgt

SEQ ID NO: 166506 - DNA, 75 bp, Homo sapiens
acaatttctaaattatcagttttcacagtttcagcactcaacctcatcatacgctgatttaatattgttttacat

SEQ ID NO: 166507 - DNA, 75 bp, Homo sapiens
attatcagttttcacagtttcagcactcaacctcatcatacgctgatttaatattgttttacattaaaatagtcc

SEQ ID NO: 166508 - DNA, 74 bp, Homo sapiens
tcacagtttcagcactcaacctcatcatacgctgatttaatattgttttacattaaaatagtccttttccctgt

SEQ ID NO: 166509 - DNA, 75 bp, Homo sapiens
tttcagcactcaacctcatcatacgctgatttaatattgttttacattaaaatagtccttttccctgttgtgcca

SEQ ID NO: 166510 - DNA, 73 bp, Homo sapiens
caacctcatcatacgctgatttaatattgttttacattaaaatagtccttttccctgttgtgccaccattcat

SEQ ID NO: 166511 - DNA, 70 bp, Homo sapiens
tattgttttacattaaaatagtccttttccctgttgtgccaccattcatttaagtgctgtttgttcttaa

SEQ ID NO: 166512 - DNA, 71 bp, Homo sapiens
tttacattaaaatagtccttttccctgttgtgccaccattcatttaagtgctgtttgttcttaaaatgcat

SEQ ID NO: 166513 - DNA, 70 bp, Homo sapiens
aaatagtccttttccctgttgtgccaccattcatttaagtgctgtttgttcttaaaatgcatttaaagaa

SEQ ID NO: 166514 - DNA, 70 bp, Homo sapiens
tttccctgttgtgccaccattcatttaagtgctgtttgttcttaaaatgcatttaaagaaaaattaccca

SEQ ID NO: 166515 - DNA, 74 bp, Homo sapiens
taagtgctgtttgttcttaaaatgcatttaaagaaaaattacccatattgactttcacacctcatataatcaga

SEQ ID NO: 166516 - DNA, 74 bp, Homo sapiens
gctgtttgttcttaaaatgcatttaaagaaaaattacccatattgactttcacacctcatataatcagatctat

SEQ ID NO: 166517 - DNA, 76 bp, Homo sapiens
aatgcatttaaagaaaaattacccatattgactttcacacctcatataatcagatctattacaaatatatatcgga

SEQ ID NO: 166518 - DNA, 76 bp, Homo sapiens
aagaaaaattacccatattgactttcacacctcatataatcagatctattacaaatatatatcggagtgacggtgc

SEQ ID NO: 166519 - DNA, 80 bp, Homo sapiens
tattgactttcacacctcatataatcagatctattacaaatatatatcggagtgacggtgcccaggatagatgtaatatt

SEQ ID NO: 166520 - DNA, 82 bp, Homo sapiens
ataatcagatctattacaaatatatatcggagtgacggtgcccaggatagatgtaatatttcttacagatgctggcacagag

SEQ ID NO: 166521 - DNA, 81 bp, Homo sapiens
tatatatcggagtgacggtgcccaggatagatgtaatatttcttacagatgctggcacagaggaaataatataccagctaa

SEQ ID NO: 166522 - DNA, 79 bp, Homo sapiens
acggtgcccaggatagatgtaatatttcttacagatgctggcacagaggaaataatataccagctaatctagtcaccta

SEQ ID NO: 166523 - DNA, 77 bp, Homo sapiens
ttacagatgctggcacagaggaaataatataccagctaatctagtcacctaaccttgtggttagaattgcaatttta

SEQ ID NO: 166524 - DNA, 73 bp, Homo sapiens
cacagaggaaataatataccagctaatctagtcacctaaccttgtggttagaattgcaattttaagaccagaa

SEQ ID NO: 166525 - DNA, 70 bp, Homo sapiens
aggaaataatataccagctaatctagtcacctaaccttgtggttagaattgcaattttaagaccagaaaa

SEQ ID NO: 166526 - DNA, 71 bp, Homo sapiens
accagctaatctagtcacctaaccttgtggttagaattgcaattttaagaccagaaaaatttgaagtctga

SEQ ID NO: 166527 - DNA, 72 bp, Homo sapiens
atctagtcacctaaccttgtggttagaattgcaattttaagaccagaaaaatttgaagtctgatcagagatt

SEQ ID NO: 166528 - DNA, 72 bp, Homo sapiens
aaccttgtggttagaattgcaattttaagaccagaaaaatttgaagtctgatcagagatttacaactgttca

SEQ ID NO: 166529 - DNA, 75 bp, Homo sapiens
gaattgcaattttaagaccagaaaaatttgaagtctgatcagagatttacaactgttcattatagtggtgcctta

SEQ ID NO: 166530 - DNA, 75 bp, Homo sapiens
gcaattttaagaccagaaaaatttgaagtctgatcagagatttacaactgttcattatagtggtgccttaggcaa

SEQ ID NO: 166531 - DNA, 74 bp, Homo sapiens
gaaaaatttgaagtctgatcagagatttacaactgttcattatagtggtgccttaggcaatctttccaaagtaa

SEQ ID NO: 166532 - DNA, 75 bp, Homo sapiens
atttgaagtctgatcagagatttacaactgttcattatagtggtgccttaggcaatctttccaaagtaaattcag

SEQ ID NO: 166533 - DNA, 73 bp, Homo sapiens
agagatttacaactgttcattatagtggtgccttaggcaatctttccaaagtaaattcagggccccattgcta

SEQ ID NO: 166534 - DNA, 72 bp, Homo sapiens
tttacaactgttcattatagtggtgccttaggcaatctttccaaagtaaattcagggccccattgctactta

SEQ ID NO: 166535 - DNA, 75 bp, Homo sapiens
ttcattatagtggtgccttaggcaatctttccaaagtaaattcagggccccattgctacttatgccatatttgga

SEQ ID NO: 166536 - DNA, 70 bp, Homo sapiens
ccttaggcaatctttccaaagtaaattcagggccccattgctacttatgccatatttggacatacttttt

SEQ ID NO: 166537 - DNA, 70 bp, Homo sapiens
ggcaatctttccaaagtaaattcagggccccattgctacttatgccatatttggacatactttttttttc

SEQ ID NO: 166538 - DNA, 67 bp, Homo sapiens
catactttttttttcttcaattttgtaaacttcctggaaagctgtcttcactaagtatcccctagtc

SEQ ID NO: 166539 - DNA, 71 bp, Homo sapiens
ttttcttcaattttgtaaacttcctggaaagctgtcttcactaagtatcccctagtctctatatatgtggt

SEQ ID NO: 166540 - DNA, 72 bp, Homo sapiens
aattttgtaaacttcctggaaagctgtcttcactaagtatcccctagtctctatatatgtggttagtagtca

SEQ ID NO: 166541 - DNA, 77 bp, Homo sapiens
ttcctggaaagctgtcttcactaagtatcccctagtctctatatatgtggttagtagtcatggaaatgacacataaa

SEQ ID NO: 166542 - DNA, 76 bp, Homo sapiens
aaagctgtcttcactaagtatcccctagtctctatatatgtggttagtagtcatggaaatgacacataaagtacgc

SEQ ID NO: 166543 - DNA, 76 bp, Homo sapiens
cctagtctctatatatgtggttagtagtcatggaaatgacacataaagtacgccagaagtttgatggaacgtgtta

SEQ ID NO: 166544 - DNA, 74 bp, Homo sapiens
atatatgtggttagtagtcatggaaatgacacataaagtacgccagaagtttgatggaacgtgttagaaactgt

SEQ ID NO: 166545 - DNA, 73 bp, Homo sapiens
tgtggttagtagtcatggaaatgacacataaagtacgccagaagtttgatggaacgtgttagaaactgttttg

SEQ ID NO: 166546 - DNA, 73 bp, Homo sapiens
agtcatggaaatgacacataaagtacgccagaagtttgatggaacgtgttagaaactgttttgtgcttttatg

SEQ ID NO: 166547 - DNA, 74 bp, Homo sapiens
atgacacataaagtacgccagaagtttgatggaacgtgttagaaactgttttgtgcttttatggatgtcatact

SEQ ID NO: 166548 - DNA, 74 bp, Homo sapiens
aagtacgccagaagtttgatggaacgtgttagaaactgttttgtgcttttatggatgtcatacttgacaataca

SEQ ID NO: 166549 - DNA, 75 bp, Homo sapiens
gaagtttgatggaacgtgttagaaactgttttgtgcttttatggatgtcatacttgacaatacatgtgtaagtta

SEQ ID NO: 166550 - DNA, 76 bp, Homo sapiens
ggaacgtgttagaaactgttttgtgcttttatggatgtcatacttgacaatacatgtgtaagttactaatatatga

SEQ ID NO: 166551 - DNA, 80 bp, Homo sapiens
ctgttttgtgcttttatggatgtcatacttgacaatacatgtgtaagttactaatatatgaattgatgctaaatatatct

SEQ ID NO: 166552 - DNA, 82 bp, Homo sapiens
gtgcttttatggatgtcatacttgacaatacatgtgtaagttactaatatatgaattgatgctaaatatatcttacatttga

SEQ ID NO: 166553 - DNA, 80 bp, Homo sapiens
atggatgtcatacttgacaatacatgtgtaagttactaatatatgaattgatgctaaatatatcttacatttgaattcct

SEQ ID NO: 166554 - DNA, 78 bp, Homo sapiens
tacttgacaatacatgtgtaagttactaatatatgaattgatgctaaatatatcttacatttgaattccttttggata

SEQ ID NO: 166555 - DNA, 75 bp, Homo sapiens
tacatgtgtaagttactaatatatgaattgatgctaaatatatcttacatttgaattccttttggataaagttat

SEQ ID NO: 166556 - DNA, 77 bp, Homo sapiens
ctaatatatgaattgatgctaaatatatcttacatttgaattccttttggataaagttatttcttgatgtgacagag

SEQ ID NO: 166557 - DNA, 76 bp, Homo sapiens
gaattgatgctaaatatatcttacatttgaattccttttggataaagttatttcttgatgtgacagagtagtgtgt

SEQ ID NO: 166558 - DNA, 72 bp, Homo sapiens
aaatatatcttacatttgaattccttttggataaagttatttcttgatgtgacagagtagtgtgttttcatt

SEQ ID NO: 166559 - DNA, 72 bp, Homo sapiens
tatcttacatttgaattccttttggataaagttatttcttgatgtgacagagtagtgtgttttcatttttat

SEQ ID NO: 166560 - DNA, 73 bp, Homo sapiens
ttccttttggataaagttatttcttgatgtgacagagtagtgtgttttcatttttattctttacatgtgacca

SEQ ID NO: 166561 - DNA, 73 bp, Homo sapiens
ggataaagttatttcttgatgtgacagagtagtgtgttttcatttttattctttacatgtgaccaaaacaata

SEQ ID NO: 166562 - DNA, 72 bp, Homo sapiens
gttatttcttgatgtgacagagtagtgtgttttcatttttattctttacatgtgaccaaaacaatagaaaag

SEQ ID NO: 166563 - DNA, 75 bp, Homo sapiens
cattcctctgtttccccagtgtgactgagaatagactgaccaaggacatgattaggcaaacacaactttatttat

SEQ ID NO: 166564 - DNA, 75 bp, Homo sapiens
tttccccagtgtgactgagaatagactgaccaaggacatgattaggcaaacacaactttatttattcaccttgga

SEQ ID NO: 166565 - DNA, 75 bp, Homo sapiens
tgtgactgagaatagactgaccaaggacatgattaggcaaacacaactttatttattcaccttggaataagggta

SEQ ID NO: 166566 - DNA, 73 bp, Homo sapiens
agaatagactgaccaaggacatgattaggcaaacacaactttatttattcaccttggaataagggtatagaca

SEQ ID NO: 166567 - DNA, 73 bp, Homo sapiens
caaggacatgattaggcaaacacaactttatttattcaccttggaataagggtatagacacccatacagaaca

SEQ ID NO: 166568 - DNA, 71 bp, Homo sapiens
attaggcaaacacaactttatttattcaccttggaataagggtatagacacccatacagaacagcactcct

SEQ ID NO: 166569 - DNA, 72 bp, Homo sapiens
aacacaactttatttattcaccttggaataagggtatagacacccatacagaacagcactcctttgctcatt

SEQ ID NO: 166570 - DNA, 72 bp, Homo sapiens
ctttatttattcaccttggaataagggtatagacacccatacagaacagcactcctttgctcatttcttccc

SEQ ID NO: 166571 - DNA, 74 bp, Homo sapiens
ttggaataagggtatagacacccatacagaacagcactcctttgctcatttcttccccatccattccagggaaa

SEQ ID NO: 166572 - DNA, 76 bp, Homo sapiens
ataagggtatagacacccatacagaacagcactcctttgctcatttcttccccatccattccagggaaatagctca

SEQ ID NO: 166573 - DNA, 76 bp, Homo sapiens
aacagcactcctttgctcatttcttccccatccattccagggaaatagctcaatgttctttcacgggagacacata

SEQ ID NO: 166574 - DNA, 74 bp, Homo sapiens
tttgctcatttcttccccatccattccagggaaatagctcaatgttctttcacgggagacacatacttttataa

SEQ ID NO: 166575 - DNA, 72 bp, Homo sapiens
atttcttccccatccattccagggaaatagctcaatgttctttcacgggagacacatacttttataatgtta

SEQ ID NO: 166576 - DNA, 77 bp, Homo sapiens
cagggaaatagctcaatgttctttcacgggagacacatacttttataatgttatcaaatacatcatcaacacttcta

SEQ ID NO: 166577 - DNA, 75 bp, Homo sapiens
gctcaatgttctttcacgggagacacatacttttataatgttatcaaatacatcatcaacacttctaaaaaaatg

SEQ ID NO: 166578 - DNA, 74 bp, Homo sapiens
ttcacgggagacacatacttttataatgttatcaaatacatcatcaacacttctaaaaaaatggcgtccaccac

SEQ ID NO: 166579 - DNA, 75 bp, Homo sapiens
cacatacttttataatgttatcaaatacatcatcaacacttctaaaaaaatggcgtccaccacctggaagtctca

SEQ ID NO: 166580 - DNA, 75 bp, Homo sapiens
tttataatgttatcaaatacatcatcaacacttctaaaaaaatggcgtccaccacctggaagtctcatactgttc

SEQ ID NO: 166581 - DNA, 74 bp, Homo sapiens
tcaaatacatcatcaacacttctaaaaaaatggcgtccaccacctggaagtctcatactgttcgcgtaaactaa

SEQ ID NO: 166582 - DNA, 69 bp, Homo sapiens
atcaacacttctaaaaaaatggcgtccaccacctggaagtctcatactgttcgcgtaaactaaaactgt

SEQ ID NO: 166583 - DNA, 68 bp, Homo sapiens
ttctaaaaaaatggcgtccaccacctggaagtctcatactgttcgcgtaaactaaaactgtttcctat

SEQ ID NO: 166584 - DNA, 69 bp, Homo sapiens
aaaatggcgtccaccacctggaagtctcatactgttcgcgtaaactaaaactgtttcctatttgtccaa

SEQ ID NO: 166585 - DNA, 70 bp, Homo sapiens
aagtctcatactgttcgcgtaaactaaaactgtttcctatttgtccaacatatccacttgaatgaaaacg

SEQ ID NO: 166586 - DNA, 70 bp, Homo sapiens
ttcgcgtaaactaaaactgtttcctatttgtccaacatatccacttgaatgaaaacgtcacagaggtgtt

SEQ ID NO: 166587 - DNA, 72 bp, Homo sapiens
taaaactgtttcctatttgtccaacatatccacttgaatgaaaacgtcacagaggtgtttgcaagaacttct

SEQ ID NO: 166588 - DNA, 73 bp, Homo sapiens
tttcctatttgtccaacatatccacttgaatgaaaacgtcacagaggtgtttgcaagaacttcttataaggga

SEQ ID NO: 166589 - DNA, 70 bp, Homo sapiens
tatccacttgaatgaaaacgtcacagaggtgtttgcaagaacttcttataagggaactaagtcaacgggt

SEQ ID NO: 166590 - DNA, 69 bp, Homo sapiens
atgaaaacgtcacagaggtgtttgcaagaacttcttataagggaactaagtcaacgggttccatttcta

SEQ ID NO: 166591 - DNA, 70 bp, Homo sapiens
acagaggtgtttgcaagaacttcttataagggaactaagtcaacgggttccatttctatctgctagtttc

SEQ ID NO: 166592 - DNA, 68 bp, Homo sapiens
aagggaactaagtcaacgggttccatttctatctgctagtttctggcctttttcactttgaagagaaa

SEQ ID NO: 166593 - DNA, 72 bp, Homo sapiens
agtcaacgggttccatttctatctgctagtttctggcctttttcactttgaagagaaaataagatgcagtaa

SEQ ID NO: 166594 - DNA, 73 bp, Homo sapiens
ttccatttctatctgctagtttctggcctttttcactttgaagagaaaataagatgcagtaacacattaaaaa

SEQ ID NO: 166595 - DNA, 72 bp, Homo sapiens
ttctggcctttttcactttgaagagaaaataagatgcagtaacacattaaaaataggcaacttgggtcaggc

SEQ ID NO: 166596 - DNA, 72 bp, Homo sapiens
tttcactttgaagagaaaataagatgcagtaacacattaaaaataggcaacttgggtcaggctggcctttct

SEQ ID NO: 166597 - DNA, 71 bp, Homo sapiens
agaaaataagatgcagtaacacattaaaaataggcaacttgggtcaggctggcctttcttctgtggaaaaa

SEQ ID NO: 166598 - DNA, 71 bp, Homo sapiens
aagatgcagtaacacattaaaaataggcaacttgggtcaggctggcctttcttctgtggaaaaaaagagta

SEQ ID NO: 166599 - DNA, 69 bp, Homo sapiens
cattaaaaataggcaacttgggtcaggctggcctttcttctgtggaaaaaaagagtaactatgaaatta

SEQ ID NO: 166600 - DNA, 69 bp, Homo sapiens
aaataggcaacttgggtcaggctggcctttcttctgtggaaaaaaagagtaactatgaaattaaatatc

SEQ ID NO: 166601 - DNA, 70 bp, Homo sapiens
gtcaggctggcctttcttctgtggaaaaaaagagtaactatgaaattaaatatccaaccctaactgtcca

SEQ ID NO: 166602 - DNA, 68 bp, Homo sapiens
gctggcctttcttctgtggaaaaaaagagtaactatgaaattaaatatccaaccctaactgtccaaag

SEQ ID NO: 166603 - DNA, 69 bp, Homo sapiens
ttctgtggaaaaaaagagtaactatgaaattaaatatccaaccctaactgtccaaagtgtgggagtgag

SEQ ID NO: 166604 - DNA, 67 bp, Homo sapiens
aaaaagagtaactatgaaattaaatatccaaccctaactgtccaaagtgtgggagtgagggtgtttc

SEQ ID NO: 166605 - DNA, 68 bp, Homo sapiens
aactatgaaattaaatatccaaccctaactgtccaaagtgtgggagtgagggtgtttccactatttaa

SEQ ID NO: 166606 - DNA, 65 bp, Homo sapiens
ttaaatatccaaccctaactgtccaaagtgtgggagtgagggtgtttccactatttaaaaaaaaa

SEQ ID NO: 166607 - DNA, 69 bp, Homo sapiens
taaaaaaaaatctgttctgatacctagtttttcctggtgtgcactaccaaattcttggaaaagctacat

SEQ ID NO: 166608 - DNA, 70 bp, Homo sapiens
aaaaatctgttctgatacctagtttttcctggtgtgcactaccaaattcttggaaaagctacatttccca

SEQ ID NO: 166609 - DNA, 69 bp, Homo sapiens
atacctagtttttcctggtgtgcactaccaaattcttggaaaagctacatttcccaggaagacaagtta

SEQ ID NO: 166610 - DNA, 70 bp, Homo sapiens
agtttttcctggtgtgcactaccaaattcttggaaaagctacatttcccaggaagacaagttagagaagc

SEQ ID NO: 166611 - DNA, 73 bp, Homo sapiens
gtgtgcactaccaaattcttggaaaagctacatttcccaggaagacaagttagagaagcctggccttgaaaca

SEQ ID NO: 166612 - DNA, 69 bp, Homo sapiens
aaattcttggaaaagctacatttcccaggaagacaagttagagaagcctggccttgaaacaggaaccca

SEQ ID NO: 166613 - DNA, 72 bp, Homo sapiens
aaaagctacatttcccaggaagacaagttagagaagcctggccttgaaacaggaacccagctggcacaagaa

SEQ ID NO: 166614 - DNA, 71 bp, Homo sapiens
atttcccaggaagacaagttagagaagcctggccttgaaacaggaacccagctggcacaagaaggaaacta

SEQ ID NO: 166615 - DNA, 72 bp, Homo sapiens
aagacaagttagagaagcctggccttgaaacaggaacccagctggcacaagaaggaaactagagggctccaa

SEQ ID NO: 166616 - DNA, 73 bp, Homo sapiens
ttagagaagcctggccttgaaacaggaacccagctggcacaagaaggaaactagagggctccaagtcaccctc

SEQ ID NO: 166617 - DNA, 73 bp, Homo sapiens
cttgaaacaggaacccagctggcacaagaaggaaactagagggctccaagtcaccctcccatgtaaccagcat

SEQ ID NO: 166618 - DNA, 74 bp, Homo sapiens
tggcacaagaaggaaactagagggctccaagtcaccctcccatgtaaccagcattcaccttcataacctttctc

SEQ ID NO: 166619 - DNA, 72 bp, Homo sapiens
aagaaggaaactagagggctccaagtcaccctcccatgtaaccagcattcaccttcataacctttctccaga

SEQ ID NO: 166620 - DNA, 77 bp, Homo sapiens
tagagggctccaagtcaccctcccatgtaaccagcattcaccttcataacctttctccagacacgggctcatgcacc

SEQ ID NO: 166621 - DNA, 81 bp, Homo sapiens
tcaccctcccatgtaaccagcattcaccttcataacctttctccagacacgggctcatgcacctgctgtgccatccttgat

SEQ ID NO: 166622 - DNA, 79 bp, Homo sapiens
tcccatgtaaccagcattcaccttcataacctttctccagacacgggctcatgcacctgctgtgccatccttgattttt

SEQ ID NO: 166623 - DNA, 79 bp, Homo sapiens
tcataacctttctccagacacgggctcatgcacctgctgtgccatccttgattttttgcaacgattattttggtctata

SEQ ID NO: 166624 - DNA, 79 bp, Homo sapiens
tttctccagacacgggctcatgcacctgctgtgccatccttgattttttgcaacgattattttggtctataaagtcaga

SEQ ID NO: 166625 - DNA, 79 bp, Homo sapiens
acacgggctcatgcacctgctgtgccatccttgattttttgcaacgattattttggtctataaagtcagaacattcaga

SEQ ID NO: 166626 - DNA, 75 bp, Homo sapiens
acctgctgtgccatccttgattttttgcaacgattattttggtctataaagtcagaacattcagaggaaacagga

SEQ ID NO: 166627 - DNA, 73 bp, Homo sapiens
ctgtgccatccttgattttttgcaacgattattttggtctataaagtcagaacattcagaggaaacaggaatt

SEQ ID NO: 166628 - DNA, 75 bp, Homo sapiens
tgattttttgcaacgattattttggtctataaagtcagaacattcagaggaaacaggaatttctgctacaacaca

SEQ ID NO: 166629 - DNA, 76 bp, Homo sapiens
gcaacgattattttggtctataaagtcagaacattcagaggaaacaggaatttctgctacaacacagtatataaga

SEQ ID NO: 166630 - DNA, 78 bp, Homo sapiens
tggtctataaagtcagaacattcagaggaaacaggaatttctgctacaacacagtatataagataatctgtgttttga

SEQ ID NO: 166631 - DNA, 77 bp, Homo sapiens
gtcagaacattcagaggaaacaggaatttctgctacaacacagtatataagataatctgtgttttgaaaactacaca

SEQ ID NO: 166632 - DNA, 75 bp, Homo sapiens
aacattcagaggaaacaggaatttctgctacaacacagtatataagataatctgtgttttgaaaactacacataa

SEQ ID NO: 166633 - DNA, 76 bp, Homo sapiens
caggaatttctgctacaacacagtatataagataatctgtgttttgaaaactacacataaaaactaacagcattca

SEQ ID NO: 166634 - DNA, 75 bp, Homo sapiens
tgctacaacacagtatataagataatctgtgttttgaaaactacacataaaaactaacagcattcacagggtagg

SEQ ID NO: 166635 - DNA, 68 bp, Homo sapiens
tgtgttttgaaaactacacataaaaactaacagcattcacagggtaggggagaagggtttgtttttca

SEQ ID NO: 166636 - DNA, 67 bp, Homo sapiens
actacacataaaaactaacagcattcacagggtaggggagaagggtttgtttttcaaactctaacaa

SEQ ID NO: 166637 - DNA, 64 bp, Homo sapiens
aaaaactaacagcattcacagggtaggggagaagggtttgtttttcaaactctaacaaactttg

SEQ ID NO: 166638 - DNA, 64 bp, Homo sapiens
acagggtaggggagaagggtttgtttttcaaactctaacaaactttgtaactagagaatgaaaa

SEQ ID NO: 166639 - DNA, 69 bp, Homo sapiens
gaagggtttgtttttcaaactctaacaaactttgtaactagagaatgaaaaaatatgtgtcagaggaga

SEQ ID NO: 166640 - DNA, 80 bp, Homo sapiens
gaatgaaaaaatatgtgtcagaggagataactggatgtcccagcaagttggagatagccacagtggatattaactacata

SEQ ID NO: 166641 - DNA, 78 bp, Homo sapiens
aaaatatgtgtcagaggagataactggatgtcccagcaagttggagatagccacagtggatattaactacataaccaa

SEQ ID NO: 166642 - DNA, 79 bp, Homo sapiens
gaggagataactggatgtcccagcaagttggagatagccacagtggatattaactacataaccaagagtgacaatggta

SEQ ID NO: 166643 - DNA, 78 bp, Homo sapiens
ataactggatgtcccagcaagttggagatagccacagtggatattaactacataaccaagagtgacaatggtagcgac

SEQ ID NO: 166644 - DNA, 76 bp, Homo sapiens
ccagcaagttggagatagccacagtggatattaactacataaccaagagtgacaatggtagcgacttttaattaga

SEQ ID NO: 166645 - DNA, 75 bp, Homo sapiens
agttggagatagccacagtggatattaactacataaccaagagtgacaatggtagcgacttttaattagaggaga

SEQ ID NO: 166646 - DNA, 73 bp, Homo sapiens
agccacagtggatattaactacataaccaagagtgacaatggtagcgacttttaattagaggagaggggacaa

SEQ ID NO: 166647 - DNA, 75 bp, Homo sapiens
atattaactacataaccaagagtgacaatggtagcgacttttaattagaggagaggggacaaggcagatagagca

SEQ ID NO: 166648 - DNA, 77 bp, Homo sapiens
acataaccaagagtgacaatggtagcgacttttaattagaggagaggggacaaggcagatagagcagttccatgtca

SEQ ID NO: 166649 - DNA, 84 bp, Homo sapiens
tagcgacttttaattagaggagaggggacaaggcagatagagcagttccatgtcatgtcagctgatctgccattcgggtatgca

SEQ ID NO: 166650 - DNA, 85 bp, Homo sapiens
tttaattagaggagaggggacaaggcagatagagcagttccatgtcatgtcagctgatctgccattcgggtatgcacaaggcagc

SEQ ID NO: 166651 - DNA, 92 bp, Homo sapiens
cagatagagcagttccatgtcatgtcagctgatctgccattcgggtatgcacaaggcagccaagcaacctgacaagagtcagagcctcatga

SEQ ID NO: 166652 - DNA, 87 bp, Homo sapiens
agttccatgtcatgtcagctgatctgccattcgggtatgcacaaggcagccaagcaacctgacaagagtcagagcctcatgaggttg

SEQ ID NO: 166653 - DNA, 88 bp, Homo sapiens
atgtcatgtcagctgatctgccattcgggtatgcacaaggcagccaagcaacctgacaagagtcagagcctcatgaggttggcacgaa

SEQ ID NO: 166654 - DNA, 85 bp, Homo sapiens
ctgatctgccattcgggtatgcacaaggcagccaagcaacctgacaagagtcagagcctcatgaggttggcacgaacctctctga

SEQ ID NO: 166655 - DNA, 84 bp, Homo sapiens
attcgggtatgcacaaggcagccaagcaacctgacaagagtcagagcctcatgaggttggcacgaacctctctgagcagagtga

SEQ ID NO: 166656 - DNA, 83 bp, Homo sapiens
acaaggcagccaagcaacctgacaagagtcagagcctcatgaggttggcacgaacctctctgagcagagtgatccagatttag

SEQ ID NO: 166657 - DNA, 82 bp, Homo sapiens
caagcaacctgacaagagtcagagcctcatgaggttggcacgaacctctctgagcagagtgatccagatttaggtactcatt

SEQ ID NO: 166658 - DNA, 81 bp, Homo sapiens
tgacaagagtcagagcctcatgaggttggcacgaacctctctgagcagagtgatccagatttaggtactcatttctaattt

SEQ ID NO: 166659 - DNA, 78 bp, Homo sapiens
atgaggttggcacgaacctctctgagcagagtgatccagatttaggtactcatttctaattttatcaaaacacagcca

SEQ ID NO: 166660 - DNA, 74 bp, Homo sapiens
acgaacctctctgagcagagtgatccagatttaggtactcatttctaattttatcaaaacacagccaaaagggc

SEQ ID NO: 166661 - DNA, 79 bp, Homo sapiens
tctctgagcagagtgatccagatttaggtactcatttctaattttatcaaaacacagccaaaagggcctctgctatcta

SEQ ID NO: 166662 - DNA, 80 bp, Homo sapiens
tgatccagatttaggtactcatttctaattttatcaaaacacagccaaaagggcctctgctatctatgcagcagctaatc

SEQ ID NO: 166663 - DNA, 77 bp, Homo sapiens
agatttaggtactcatttctaattttatcaaaacacagccaaaagggcctctgctatctatgcagcagctaatctag

SEQ ID NO: 166664 - DNA, 79 bp, Homo sapiens
tttctaattttatcaaaacacagccaaaagggcctctgctatctatgcagcagctaatctaggcaagccaagctctcct

SEQ ID NO: 166665 - DNA, 79 bp, Homo sapiens
attttatcaaaacacagccaaaagggcctctgctatctatgcagcagctaatctaggcaagccaagctctcctttccta

SEQ ID NO: 166666 - DNA, 79 bp, Homo sapiens
acagccaaaagggcctctgctatctatgcagcagctaatctaggcaagccaagctctcctttcctatggaaggtagtaa

SEQ ID NO: 166667 - DNA, 80 bp, Homo sapiens
ctgctatctatgcagcagctaatctaggcaagccaagctctcctttcctatggaaggtagtaattctcctcccactcttc

SEQ ID NO: 166668 - DNA, 74 bp, Homo sapiens
agcagctaatctaggcaagccaagctctcctttcctatggaaggtagtaattctcctcccactcttcctactcc

SEQ ID NO: 166669 - DNA, 73 bp, Homo sapiens
aatctaggcaagccaagctctcctttcctatggaaggtagtaattctcctcccactcttcctactcctcctgc

SEQ ID NO: 166670 - DNA, 72 bp, Homo sapiens
tttcctatggaaggtagtaattctcctcccactcttcctactcctcctgcctgagaaacatccccttatgaa

SEQ ID NO: 166671 - DNA, 73 bp, Homo sapiens
ggtagtaattctcctcccactcttcctactcctcctgcctgagaaacatccccttatgaatgagctcgacttt

SEQ ID NO: 166672 - DNA, 75 bp, Homo sapiens
taattctcctcccactcttcctactcctcctgcctgagaaacatccccttatgaatgagctcgacttttgcaaag

SEQ ID NO: 166673 - DNA, 78 bp, Homo sapiens
tcttcctactcctcctgcctgagaaacatccccttatgaatgagctcgacttttgcaaagttctgacatcattcccta

SEQ ID NO: 166674 - DNA, 79 bp, Homo sapiens
tactcctcctgcctgagaaacatccccttatgaatgagctcgacttttgcaaagttctgacatcattccctactcaaca

SEQ ID NO: 166675 - DNA, 81 bp, Homo sapiens
tgagaaacatccccttatgaatgagctcgacttttgcaaagttctgacatcattccctactcaacacgcatggataagcca

SEQ ID NO: 166676 - DNA, 78 bp, Homo sapiens
cccttatgaatgagctcgacttttgcaaagttctgacatcattccctactcaacacgcatggataagccaactcctgt

SEQ ID NO: 166677 - DNA, 81 bp, Homo sapiens
atgaatgagctcgacttttgcaaagttctgacatcattccctactcaacacgcatggataagccaactcctgttacagagc

SEQ ID NO: 166678 - DNA, 78 bp, Homo sapiens
cttttgcaaagttctgacatcattccctactcaacacgcatggataagccaactcctgttacagagccacgctttgta

SEQ ID NO: 166679 - DNA, 79 bp, Homo sapiens
aaagttctgacatcattccctactcaacacgcatggataagccaactcctgttacagagccacgctttgtagctgaata

SEQ ID NO: 166680 - DNA, 80 bp, Homo sapiens
ctactcaacacgcatggataagccaactcctgttacagagccacgctttgtagctgaataaactctacagatttgattca

SEQ ID NO: 166681 - DNA, 80 bp, Homo sapiens
atggataagccaactcctgttacagagccacgctttgtagctgaataaactctacagatttgattcagcaccatggagga

SEQ ID NO: 166682 - DNA, 80 bp, Homo sapiens
aactcctgttacagagccacgctttgtagctgaataaactctacagatttgattcagcaccatggaggatggactcctca

SEQ ID NO: 166683 - DNA, 81 bp, Homo sapiens
tgttacagagccacgctttgtagctgaataaactctacagatttgattcagcaccatggaggatggactcctcaggctggg

SEQ ID NO: 166684 - DNA, 79 bp, Homo sapiens
acgctttgtagctgaataaactctacagatttgattcagcaccatggaggatggactcctcaggctggggtcactggtg

SEQ ID NO: 166685 - DNA, 81 bp, Homo sapiens
tagctgaataaactctacagatttgattcagcaccatggaggatggactcctcaggctggggtcactggtgggcaaccatg

SEQ ID NO: 166686 - DNA, 77 bp, Homo sapiens
atttgattcagcaccatggaggatggactcctcaggctggggtcactggtgggcaaccatggcacaccggggacgag

SEQ ID NO: 166687 - DNA, 75 bp, Homo sapiens
accatggaggatggactcctcaggctggggtcactggtgggcaaccatggcacaccggggacgagggagacagag

SEQ ID NO: 166688 - DNA, 72 bp, Homo sapiens
aggctggggtcactggtgggcaaccatggcacaccggggacgagggagacagaggatccagatttttttcaa

SEQ ID NO: 166689 - DNA, 70 bp, Homo sapiens
gtcactggtgggcaaccatggcacaccggggacgagggagacagaggatccagatttttttcaacttttt

SEQ ID NO: 166690 - DNA, 67 bp, Homo sapiens
acaccggggacgagggagacagaggatccagatttttttcaacttttttattacacagtaaagaata

SEQ ID NO: 166691 - DNA, 69 bp, Homo sapiens
ggacgagggagacagaggatccagatttttttcaacttttttattacacagtaaagaatacaacaatac

SEQ ID NO: 166692 - DNA, 71 bp, Homo sapiens
gacagaggatccagatttttttcaacttttttattacacagtaaagaatacaacaatacctgaatcatact

SEQ ID NO: 166693 - DNA, 69 bp, Homo sapiens
tttttttcaacttttttattacacagtaaagaatacaacaatacctgaatcatactttaaagattcaca

SEQ ID NO: 166694 - DNA, 76 bp, Homo sapiens
acacagtaaagaatacaacaatacctgaatcatactttaaagattcacaggttgacagaccatacattacagtcca

SEQ ID NO: 166695 - DNA, 75 bp, Homo sapiens
agaatacaacaatacctgaatcatactttaaagattcacaggttgacagaccatacattacagtccaactaagga

SEQ ID NO: 166696 - DNA, 73 bp, Homo sapiens
caacaatacctgaatcatactttaaagattcacaggttgacagaccatacattacagtccaactaaggaaaaa

SEQ ID NO: 166697 - DNA, 72 bp, Homo sapiens
gaatcatactttaaagattcacaggttgacagaccatacattacagtccaactaaggaaaaaaggataaaca

SEQ ID NO: 166698 - DNA, 70 bp, Homo sapiens
aaagattcacaggttgacagaccatacattacagtccaactaaggaaaaaaggataaacaagaaaccaca

SEQ ID NO: 166699 - DNA, 72 bp, Homo sapiens
gttgacagaccatacattacagtccaactaaggaaaaaaggataaacaagaaaccacagttcagacatagta

SEQ ID NO: 166700 - DNA, 70 bp, Homo sapiens
agaccatacattacagtccaactaaggaaaaaaggataaacaagaaaccacagttcagacatagtagact

SEQ ID NO: 166701 - DNA, 70 bp, Homo sapiens
cagtccaactaaggaaaaaaggataaacaagaaaccacagttcagacatagtagacttaaaagctcaaga

SEQ ID NO: 166702 - DNA, 78 bp, Homo sapiens
aaggataaacaagaaaccacagttcagacatagtagacttaaaagctcaagagtatgctgacaaaagcatgatgccta

SEQ ID NO: 166703 - DNA, 78 bp, Homo sapiens
acaagaaaccacagttcagacatagtagacttaaaagctcaagagtatgctgacaaaagcatgatgcctagaccccac

SEQ ID NO: 166704 - DNA, 74 bp, Homo sapiens
ttaaaagctcaagagtatgctgacaaaagcatgatgcctagaccccaccccccagtgttagtctaccattaact

SEQ ID NO: 166705 - DNA, 77 bp, Homo sapiens
tatgctgacaaaagcatgatgcctagaccccaccccccagtgttagtctaccattaacttgtggtacatgtctgaat

SEQ ID NO: 166706 - DNA, 73 bp, Homo sapiens
atgcctagaccccaccccccagtgttagtctaccattaacttgtggtacatgtctgaattaagtattgcacaa

SEQ ID NO: 166707 - DNA, 71 bp, Homo sapiens
caccccccagtgttagtctaccattaacttgtggtacatgtctgaattaagtattgcacaacaactttaat

SEQ ID NO: 166708 - DNA, 72 bp, Homo sapiens
cccagtgttagtctaccattaacttgtggtacatgtctgaattaagtattgcacaacaactttaatttttca

SEQ ID NO: 166709 - DNA, 74 bp, Homo sapiens
ccattaacttgtggtacatgtctgaattaagtattgcacaacaactttaatttttcacaatgtcgcagaaccca

SEQ ID NO: 166710 - DNA, 73 bp, Homo sapiens
acttgtggtacatgtctgaattaagtattgcacaacaactttaatttttcacaatgtcgcagaacccaaaata

SEQ ID NO: 166711 - DNA, 72 bp, Homo sapiens
acatgtctgaattaagtattgcacaacaactttaatttttcacaatgtcgcagaacccaaaataatatttta

SEQ ID NO: 166712 - DNA, 68 bp, Homo sapiens
tattttaaaaaaattacttcaaatctgcatttcaacagtctccaattttttttctgtcccttgaggaa

SEQ ID NO: 166713 - DNA, 69 bp, Homo sapiens
atttcaacagtctccaattttttttctgtcccttgaggaattcggacaacatggagtcgctttctttcc

SEQ ID NO: 166714 - DNA, 71 bp, Homo sapiens
tttttctgtcccttgaggaattcggacaacatggagtcgctttctttccctaagtattccagacgtaggca

SEQ ID NO: 166715 - DNA, 75 bp, Homo sapiens
ttgaggaattcggacaacatggagtcgctttctttccctaagtattccagacgtaggcatgctttgcataagtaa

SEQ ID NO: 166716 - DNA, 73 bp, Homo sapiens
aattcggacaacatggagtcgctttctttccctaagtattccagacgtaggcatgctttgcataagtaaacca

SEQ ID NO: 166717 - DNA, 69 bp, Homo sapiens
ctttctttccctaagtattccagacgtaggcatgctttgcataagtaaaccagccttgaaatttttaaa

SEQ ID NO: 166718 - DNA, 71 bp, Homo sapiens
cctaagtattccagacgtaggcatgctttgcataagtaaaccagccttgaaatttttaaatccccaagaca

SEQ ID NO: 166719 - DNA, 73 bp, Homo sapiens
acgtaggcatgctttgcataagtaaaccagccttgaaatttttaaatccccaagacatgcacctacacataaa

SEQ ID NO: 166720 - DNA, 72 bp, Homo sapiens
ggcatgctttgcataagtaaaccagccttgaaatttttaaatccccaagacatgcacctacacataaaaaaa

SEQ ID NO: 166721 - DNA, 67 bp, Homo sapiens
gcataagtaaaccagccttgaaatttttaaatccccaagacatgcacctacacataaaaaaaaaaaa

SEQ ID NO: 166722 - DNA, 76 bp, Homo sapiens
aagagaaagagaaaagagtaagagacagagataagagctagaggacgccctattcctatcagcgaccaccattcaa

SEQ ID NO: 166723 - DNA, 79 bp, Homo sapiens
gaaaagagtaagagacagagataagagctagaggacgccctattcctatcagcgaccaccattcaattctatccaatga

SEQ ID NO: 166724 - DNA, 78 bp, Homo sapiens
agagacagagataagagctagaggacgccctattcctatcagcgaccaccattcaattctatccaatgaagataactt

SEQ ID NO: 166725 - DNA, 75 bp, Homo sapiens
ataagagctagaggacgccctattcctatcagcgaccaccattcaattctatccaatgaagataactttttctta

SEQ ID NO: 166726 - DNA, 75 bp, Homo sapiens
tagaggacgccctattcctatcagcgaccaccattcaattctatccaatgaagataactttttcttaatgtgtta

SEQ ID NO: 166727 - DNA, 74 bp, Homo sapiens
ccctattcctatcagcgaccaccattcaattctatccaatgaagataactttttcttaatgtgttatacctaca

SEQ ID NO: 166728 - DNA, 75 bp, Homo sapiens
cagcgaccaccattcaattctatccaatgaagataactttttcttaatgtgttatacctacaaattatattctca

SEQ ID NO: 166729 - DNA, 75 bp, Homo sapiens
ccattcaattctatccaatgaagataactttttcttaatgtgttatacctacaaattatattctcacatagcctg

SEQ ID NO: 166730 - DNA, 77 bp, Homo sapiens
tctatccaatgaagataactttttcttaatgtgttatacctacaaattatattctcacatagcctgtatataagtga

SEQ ID NO: 166731 - DNA, 75 bp, Homo sapiens
gaagataactttttcttaatgtgttatacctacaaattatattctcacatagcctgtatataagtgacaagcaaa

SEQ ID NO: 166732 - DNA, 73 bp, Homo sapiens
ctttttcttaatgtgttatacctacaaattatattctcacatagcctgtatataagtgacaagcaaaaaagga

SEQ ID NO: 166733 - DNA, 73 bp, Homo sapiens
atgtgttatacctacaaattatattctcacatagcctgtatataagtgacaagcaaaaaaggaaagtaacaaa

SEQ ID NO: 166734 - DNA, 70 bp, Homo sapiens
cctacaaattatattctcacatagcctgtatataagtgacaagcaaaaaaggaaagtaacaaaagttttc

SEQ ID NO: 166735 - DNA, 69 bp, Homo sapiens
atattctcacatagcctgtatataagtgacaagcaaaaaaggaaagtaacaaaagttttcttttctttc

SEQ ID NO: 166736 - DNA, 77 bp, Homo sapiens
ttttctttctcttctttaggtttatgaggtctgcattgttaccaagaagtgatatggtttgcagctgtatgagctta

SEQ ID NO: 166737 - DNA, 75 bp, Homo sapiens
aggtctgcattgttaccaagaagtgatatggtttgcagctgtatgagcttaacttttggtatcctggttcttttg

SEQ ID NO: 166738 - DNA, 76 bp, Homo sapiens
tgatatggtttgcagctgtatgagcttaacttttggtatcctggttcttttgtgcccatttggtttgactagacca

SEQ ID NO: 166739 - DNA, 72 bp, Homo sapiens
ttgcagctgtatgagcttaacttttggtatcctggttcttttgtgcccatttggtttgactagaccagtttt

SEQ ID NO: 166740 - DNA, 70 bp, Homo sapiens
tgtatgagcttaacttttggtatcctggttcttttgtgcccatttggtttgactagaccagtttttgtta

SEQ ID NO: 166741 - DNA, 72 bp, Homo sapiens
tttggtatcctggttcttttgtgcccatttggtttgactagaccagtttttgttagctactggtgcaatata

SEQ ID NO: 166742 - DNA, 77 bp, Homo sapiens
tatcctggttcttttgtgcccatttggtttgactagaccagtttttgttagctactggtgcaatatacatgctgtca

SEQ ID NO: 166743 - DNA, 77 bp, Homo sapiens
ttcttttgtgcccatttggtttgactagaccagtttttgttagctactggtgcaatatacatgctgtcagaggtaga

SEQ ID NO: 166744 - DNA, 78 bp, Homo sapiens
tttgtgcccatttggtttgactagaccagtttttgttagctactggtgcaatatacatgctgtcagaggtagagtgaa

SEQ ID NO: 166745 - DNA, 74 bp, Homo sapiens
atttggtttgactagaccagtttttgttagctactggtgcaatatacatgctgtcagaggtagagtgaaacttt

SEQ ID NO: 166746 - DNA, 77 bp, Homo sapiens
actagaccagtttttgttagctactggtgcaatatacatgctgtcagaggtagagtgaaactttttgccactgagga

SEQ ID NO: 166747 - DNA, 79 bp, Homo sapiens
gtttttgttagctactggtgcaatatacatgctgtcagaggtagagtgaaactttttgccactgaggagaatgtagcaa

SEQ ID NO: 166748 - DNA, 79 bp, Homo sapiens
tttttgttagctactggtgcaatatacatgctgtcagaggtagagtgaaactttttgccactgaggagaatgtagcaaa

SEQ ID NO: 166749 - DNA, 81 bp, Homo sapiens
tgttagctactggtgcaatatacatgctgtcagaggtagagtgaaactttttgccactgaggagaatgtagcaaaacagga

SEQ ID NO: 166750 - DNA, 80 bp, Homo sapiens
ctactggtgcaatatacatgctgtcagaggtagagtgaaactttttgccactgaggagaatgtagcaaaacaggaggaga

SEQ ID NO: 166751 - DNA, 80 bp, Homo sapiens
tggtgcaatatacatgctgtcagaggtagagtgaaactttttgccactgaggagaatgtagcaaaacaggaggagaggaa

SEQ ID NO: 166752 - DNA, 78 bp, Homo sapiens
tacatgctgtcagaggtagagtgaaactttttgccactgaggagaatgtagcaaaacaggaggagaggaagaggagga

SEQ ID NO: 166753 - DNA, 70 bp, Homo sapiens
agaggaggaagaggggaaggaggaagaggaatcagagatagagctcagagttagggatttttttttgtat

SEQ ID NO: 166754 - DNA, 69 bp, Homo sapiens
tttttgtatttgttttcactcagggtgccctgaattaaaaagtaatgagacgtactgtactaatcctta

SEQ ID NO: 166755 - DNA, 70 bp, Homo sapiens
ttgttttcactcagggtgccctgaattaaaaagtaatgagacgtactgtactaatccttattttacacac

SEQ ID NO: 166756 - DNA, 70 bp, Homo sapiens
cagggtgccctgaattaaaaagtaatgagacgtactgtactaatccttattttacacactagtgttaaga

SEQ ID NO: 166757 - DNA, 71 bp, Homo sapiens
tgccctgaattaaaaagtaatgagacgtactgtactaatccttattttacacactagtgttaagaataaca

SEQ ID NO: 166758 - DNA, 72 bp, Homo sapiens
taaaaagtaatgagacgtactgtactaatccttattttacacactagtgttaagaataacagtgctgtttca

SEQ ID NO: 166759 - DNA, 77 bp, Homo sapiens
gtaatgagacgtactgtactaatccttattttacacactagtgttaagaataacagtgctgtttcacatacatcaca

SEQ ID NO: 166760 - DNA, 76 bp, Homo sapiens
acgtactgtactaatccttattttacacactagtgttaagaataacagtgctgtttcacatacatcacagcttcta

SEQ ID NO: 166761 - DNA, 77 bp, Homo sapiens
ctaatccttattttacacactagtgttaagaataacagtgctgtttcacatacatcacagcttctagagataaagac

SEQ ID NO: 166762 - DNA, 76 bp, Homo sapiens
aatccttattttacacactagtgttaagaataacagtgctgtttcacatacatcacagcttctagagataaagacg

SEQ ID NO: 166763 - DNA, 81 bp, Homo sapiens
ttacacactagtgttaagaataacagtgctgtttcacatacatcacagcttctagagataaagacgtgtgggtatgacata

SEQ ID NO: 166764 - DNA, 78 bp, Homo sapiens
gttaagaataacagtgctgtttcacatacatcacagcttctagagataaagacgtgtgggtatgacatacctcatttt

SEQ ID NO: 166765 - DNA, 78 bp, Homo sapiens
agtgctgtttcacatacatcacagcttctagagataaagacgtgtgggtatgacatacctcatttttgggattattta

SEQ ID NO: 166766 - DNA, 75 bp, Homo sapiens
tttcacatacatcacagcttctagagataaagacgtgtgggtatgacatacctcatttttgggattatttaaccc

SEQ ID NO: 166767 - DNA, 72 bp, Homo sapiens
tagagataaagacgtgtgggtatgacatacctcatttttgggattatttaacccttcgtagcctagaacata

SEQ ID NO: 166768 - DNA, 70 bp, Homo sapiens
aaagacgtgtgggtatgacatacctcatttttgggattatttaacccttcgtagcctagaacatataata

SEQ ID NO: 166769 - DNA, 72 bp, Homo sapiens
ggtatgacatacctcatttttgggattatttaacccttcgtagcctagaacatataatagctctgtaagaaa

SEQ ID NO: 166770 - DNA, 71 bp, Homo sapiens
tacctcatttttgggattatttaacccttcgtagcctagaacatataatagctctgtaagaaaggactgtc

SEQ ID NO: 166771 - DNA, 75 bp, Homo sapiens
attatttaacccttcgtagcctagaacatataatagctctgtaagaaaggactgtccagtgtcacaagcagacta

SEQ ID NO: 166772 - DNA, 77 bp, Homo sapiens
ttaacccttcgtagcctagaacatataatagctctgtaagaaaggactgtccagtgtcacaagcagactagaaagca

SEQ ID NO: 166773 - DNA, 79 bp, Homo sapiens
acatataatagctctgtaagaaaggactgtccagtgtcacaagcagactagaaagcagagtgaggtcaaaggattctgg

SEQ ID NO: 166774 - DNA, 80 bp, Homo sapiens
tgtaagaaaggactgtccagtgtcacaagcagactagaaagcagagtgaggtcaaaggattctgggagcaccatgataaa

SEQ ID NO: 166775 - DNA, 79 bp, Homo sapiens
aaaggactgtccagtgtcacaagcagactagaaagcagagtgaggtcaaaggattctgggagcaccatgataaaatata

SEQ ID NO: 166776 - DNA, 77 bp, Homo sapiens
agactagaaagcagagtgaggtcaaaggattctgggagcaccatgataaaatataacccattcagagcctggttatg

SEQ ID NO: 166777 - DNA, 78 bp, Homo sapiens
aagcagagtgaggtcaaaggattctgggagcaccatgataaaatataacccattcagagcctggttatgtgctttcat

SEQ ID NO: 166778 - DNA, 76 bp, Homo sapiens
gtcaaaggattctgggagcaccatgataaaatataacccattcagagcctggttatgtgctttcatttcactttaa

SEQ ID NO: 166779 - DNA, 78 bp, Homo sapiens
attctgggagcaccatgataaaatataacccattcagagcctggttatgtgctttcatttcactttaagcaggtgtgc

SEQ ID NO: 166780 - DNA, 80 bp, Homo sapiens
catgataaaatataacccattcagagcctggttatgtgctttcatttcactttaagcaggtgtgctggcagatggacttc

SEQ ID NO: 166781 - DNA, 78 bp, Homo sapiens
taaaatataacccattcagagcctggttatgtgctttcatttcactttaagcaggtgtgctggcagatggacttccaa

SEQ ID NO: 166782 - DNA, 83 bp, Homo sapiens
tcagagcctggttatgtgctttcatttcactttaagcaggtgtgctggcagatggacttccaacatgtagatagatgtattta

SEQ ID NO: 166783 - DNA, 79 bp, Homo sapiens
cctggttatgtgctttcatttcactttaagcaggtgtgctggcagatggacttccaacatgtagatagatgtatttatt

SEQ ID NO: 166784 - DNA, 81 bp, Homo sapiens
tttcatttcactttaagcaggtgtgctggcagatggacttccaacatgtagatagatgtatttatttgctcatcagaactt

SEQ ID NO: 166785 - DNA, 80 bp, Homo sapiens
tttaagcaggtgtgctggcagatggacttccaacatgtagatagatgtatttatttgctcatcagaactttctaaactaa

SEQ ID NO: 166786 - DNA, 77 bp, Homo sapiens
tggcagatggacttccaacatgtagatagatgtatttatttgctcatcagaactttctaaactaaaaagtcatttaa

SEQ ID NO: 166787 - DNA, 71 bp, Homo sapiens
acttccaacatgtagatagatgtatttatttgctcatcagaactttctaaactaaaaagtcatttaaaaaa

SEQ ID NO: 166788 - DNA, 66 bp, Homo sapiens
tgctcatcagaactttctaaactaaaaagtcatttaaaaaaaataacaccacccaaacaaaattaa

SEQ ID NO: 166789 - DNA, 63 bp, Homo sapiens
aaagtcatttaaaaaaaataacaccacccaaacaaaattaaaaccaacttgtatatgaaaata

SEQ ID NO: 166790 - DNA, 63 bp, Homo sapiens
aaaaaaaataacaccacccaaacaaaattaaaaccaacttgtatatgaaaatacagggaagaa

SEQ ID NO: 166791 - DNA, 65 bp, Homo sapiens
aaataacaccacccaaacaaaattaaaaccaacttgtatatgaaaatacagggaagaaatgcttt

SEQ ID NO: 166792 - DNA, 64 bp, Homo sapiens
acccaaacaaaattaaaaccaacttgtatatgaaaatacagggaagaaatgcttttaaaaatgt

SEQ ID NO: 166793 - DNA, 68 bp, Homo sapiens
taaaaccaacttgtatatgaaaatacagggaagaaatgcttttaaaaatgttagatttaagagactta

SEQ ID NO: 166794 - DNA, 68 bp, Homo sapiens
cttgtatatgaaaatacagggaagaaatgcttttaaaaatgttagatttaagagacttaaagcaaacc

SEQ ID NO: 166795 - DNA, 68 bp, Homo sapiens
atacagggaagaaatgcttttaaaaatgttagatttaagagacttaaagcaaaccttaggattgcctc

SEQ ID NO: 166796 - DNA, 71 bp, Homo sapiens
gggaagaaatgcttttaaaaatgttagatttaagagacttaaagcaaaccttaggattgcctctatgcaga

SEQ ID NO: 166797 - DNA, 71 bp, Homo sapiens
taaaaatgttagatttaagagacttaaagcaaaccttaggattgcctctatgcagatacttaaaagccact

SEQ ID NO: 166798 - DNA, 70 bp, Homo sapiens
agatttaagagacttaaagcaaaccttaggattgcctctatgcagatacttaaaagccacttaaaactgt

SEQ ID NO: 166799 - DNA, 70 bp, Homo sapiens
aagagacttaaagcaaaccttaggattgcctctatgcagatacttaaaagccacttaaaactgtttccaa

SEQ ID NO: 166800 - DNA, 69 bp, Homo sapiens
aaaccttaggattgcctctatgcagatacttaaaagccacttaaaactgtttccaaggcctacatttaa

SEQ ID NO: 166801 - DNA, 65 bp, Homo sapiens
cctccccccaccccccgccccaaagctaatggattgtttttgattttaaagaaatgcctggtgta

SEQ ID NO: 166802 - DNA, 68 bp, Homo sapiens
accccccgccccaaagctaatggattgtttttgattttaaagaaatgcctggtgtatatgtatttgga

SEQ ID NO: 166803 - DNA, 71 bp, Homo sapiens
ggattgtttttgattttaaagaaatgcctggtgtatatgtatttggagaagtgtcttcccagccttgtaaa

SEQ ID NO: 166804 - DNA, 70 bp, Homo sapiens
tttgattttaaagaaatgcctggtgtatatgtatttggagaagtgtcttcccagccttgtaaactttggt

SEQ ID NO: 166805 - DNA, 73 bp, Homo sapiens
ttaaagaaatgcctggtgtatatgtatttggagaagtgtcttcccagccttgtaaactttggttgtctacaca

SEQ ID NO: 166806 - DNA, 78 bp, Homo sapiens
gtgtatatgtatttggagaagtgtcttcccagccttgtaaactttggttgtctacacagcctgcagcactgctgactt

SEQ ID NO: 166807 - DNA, 76 bp, Homo sapiens
tatttggagaagtgtcttcccagccttgtaaactttggttgtctacacagcctgcagcactgctgactttcctaaa

SEQ ID NO: 166808 - DNA, 77 bp, Homo sapiens
taaactttggttgtctacacagcctgcagcactgctgactttcctaaagcacacaaccacatcctgggctactgttt

SEQ ID NO: 166809 - DNA, 78 bp, Homo sapiens
gttgtctacacagcctgcagcactgctgactttcctaaagcacacaaccacatcctgggctactgttttcaaaactaa

SEQ ID NO: 166810 - DNA, 76 bp, Homo sapiens
ctgcagcactgctgactttcctaaagcacacaaccacatcctgggctactgttttcaaaactaacaagtagttctg

SEQ ID NO: 166811 - DNA, 72 bp, Homo sapiens
actgctgactttcctaaagcacacaaccacatcctgggctactgttttcaaaactaacaagtagttctggtc

SEQ ID NO: 166812 - DNA, 70 bp, Homo sapiens
tttcctaaagcacacaaccacatcctgggctactgttttcaaaactaacaagtagttctggtctggaccc

SEQ ID NO: 166813 - DNA, 67 bp, Homo sapiens
atcctgggctactgttttcaaaactaacaagtagttctggtctggaccctggacaacgaagggttaa

SEQ ID NO: 166814 - DNA, 69 bp, Homo sapiens
gttttcaaaactaacaagtagttctggtctggaccctggacaacgaagggttaatggattcatactata

SEQ ID NO: 166815 - DNA, 69 bp, Homo sapiens
aaaactaacaagtagttctggtctggaccctggacaacgaagggttaatggattcatactataccttgc

SEQ ID NO: 166816 - DNA, 72 bp, Homo sapiens
aagtagttctggtctggaccctggacaacgaagggttaatggattcatactataccttgctgaacatgttta

SEQ ID NO: 166817 - DNA, 76 bp, Homo sapiens
tggaccctggacaacgaagggttaatggattcatactataccttgctgaacatgtttaacctgctgatcatttgga

SEQ ID NO: 166818 - DNA, 77 bp, Homo sapiens
ttaatggattcatactataccttgctgaacatgtttaacctgctgatcatttggaaagtagtactggtgcttttcaa

SEQ ID NO: 166819 - DNA, 75 bp, Homo sapiens
attcatactataccttgctgaacatgtttaacctgctgatcatttggaaagtagtactggtgcttttcaaaattc

SEQ ID NO: 166820 - DNA, 73 bp, Homo sapiens
tataccttgctgaacatgtttaacctgctgatcatttggaaagtagtactggtgcttttcaaaattccgattt

SEQ ID NO: 166821 - DNA, 73 bp, Homo sapiens
aacatgtttaacctgctgatcatttggaaagtagtactggtgcttttcaaaattccgattttggtccatcaga

SEQ ID NO: 166822 - DNA, 72 bp, Homo sapiens
atttggaaagtagtactggtgcttttcaaaattccgattttggtccatcagatcagtctttggctgacttcc

SEQ ID NO: 166823 - DNA, 70 bp, Homo sapiens
aagtagtactggtgcttttcaaaattccgattttggtccatcagatcagtctttggctgacttccctttt

SEQ ID NO: 166824 - DNA, 72 bp, Homo sapiens
ttttcaaaattccgattttggtccatcagatcagtctttggctgacttccctttttgtaagaatactgtata

SEQ ID NO: 166825 - DNA, 70 bp, Homo sapiens
aaaattccgattttggtccatcagatcagtctttggctgacttccctttttgtaagaatactgtataacc

SEQ ID NO: 166826 - DNA, 77 bp, Homo sapiens
tcagtctttggctgacttccctttttgtaagaatactgtataacctggcattcagcagtgttaaagctgtcaatcta

SEQ ID NO: 166827 - DNA, 75 bp, Homo sapiens
tttggctgacttccctttttgtaagaatactgtataacctggcattcagcagtgttaaagctgtcaatctacacc

SEQ ID NO: 166828 - DNA, 79 bp, Homo sapiens
aagaatactgtataacctggcattcagcagtgttaaagctgtcaatctacacctcagcatttggagctctaatgatttt

SEQ ID NO: 166829 - DNA, 78 bp, Homo sapiens
ctgtataacctggcattcagcagtgttaaagctgtcaatctacacctcagcatttggagctctaatgatttttacttt

SEQ ID NO: 166830 - DNA, 74 bp, Homo sapiens
cagtgttaaagctgtcaatctacacctcagcatttggagctctaatgatttttacttttgtaaaattagaaata

SEQ ID NO: 166831 - DNA, 73 bp, Homo sapiens
gctgtcaatctacacctcagcatttggagctctaatgatttttacttttgtaaaattagaaatacttaaacga

SEQ ID NO: 166832 - DNA, 71 bp, Homo sapiens
cacctcagcatttggagctctaatgatttttacttttgtaaaattagaaatacttaaacgaccttacagca

SEQ ID NO: 166833 - DNA, 74 bp, Homo sapiens
ggagctctaatgatttttacttttgtaaaattagaaatacttaaacgaccttacagcaatatgcatgcactgtc

SEQ ID NO: 166834 - DNA, 71 bp, Homo sapiens
ctaatgatttttacttttgtaaaattagaaatacttaaacgaccttacagcaatatgcatgcactgtcctt

SEQ ID NO: 166835 - DNA, 68 bp, Homo sapiens
tttacttttgtaaaattagaaatacttaaacgaccttacagcaatatgcatgcactgtcctttttttt

SEQ ID NO: 166836 - DNA, 71 bp, Homo sapiens
ttagaaatacttaaacgaccttacagcaatatgcatgcactgtcctttttttttaaagtaggatatcttgt

SEQ ID NO: 166837 - DNA, 70 bp, Homo sapiens
aatacttaaacgaccttacagcaatatgcatgcactgtcctttttttttaaagtaggatatcttgttatt

SEQ ID NO: 166838 - DNA, 72 bp, Homo sapiens
aaaaaaagaaaaattccacgactactctatgctacagctaaacttgatgaaatggctctagcatatttaaaa

SEQ ID NO: 166839 - DNA, 77 bp, Homo sapiens
gaaaaattccacgactactctatgctacagctaaacttgatgaaatggctctagcatatttaaaaagaatttgctca

SEQ ID NO: 166840 - DNA, 75 bp, Homo sapiens
ccacgactactctatgctacagctaaacttgatgaaatggctctagcatatttaaaaagaatttgctcaaaaaaa

SEQ ID NO: 166841 - DNA, 73 bp, Homo sapiens
aaaaaaacaaaaagcatgcctagggagtcattgtgacagtgcaaaatacatttatgtacatccctcttacaaa

SEQ ID NO: 166842 - DNA, 75 bp, Homo sapiens
aaaaagcatgcctagggagtcattgtgacagtgcaaaatacatttatgtacatccctcttacaaaaacaccaata

SEQ ID NO: 166843 - DNA, 77 bp, Homo sapiens
atgcctagggagtcattgtgacagtgcaaaatacatttatgtacatccctcttacaaaaacaccaatatgttagcat

SEQ ID NO: 166844 - DNA, 78 bp, Homo sapiens
agtcattgtgacagtgcaaaatacatttatgtacatccctcttacaaaaacaccaatatgttagcattccgtgaagca

SEQ ID NO: 166845 - DNA, 76 bp, Homo sapiens
gcaaaatacatttatgtacatccctcttacaaaaacaccaatatgttagcattccgtgaagcatgctggttttcag

SEQ ID NO: 166846 - DNA, 73 bp, Homo sapiens
atttatgtacatccctcttacaaaaacaccaatatgttagcattccgtgaagcatgctggttttcaggaaaaa

SEQ ID NO: 166847 - DNA, 71 bp, Homo sapiens
gtacatccctcttacaaaaacaccaatatgttagcattccgtgaagcatgctggttttcaggaaaaaaaaa

SEQ ID NO: 166848 - DNA, 75 bp, Homo sapiens
ttttttttaactactagagaaatatcactaatacatacagatataaaagcagcatagaaagatacaggtttctca

SEQ ID NO: 166849 - DNA, 77 bp, Homo sapiens
actactagagaaatatcactaatacatacagatataaaagcagcatagaaagatacaggtttctcaccaactaggaa

SEQ ID NO: 166850 - DNA, 77 bp, Homo sapiens
gaaatatcactaatacatacagatataaaagcagcatagaaagatacaggtttctcaccaactaggaataaagagac

SEQ ID NO: 166851 - DNA, 77 bp, Homo sapiens
atacatacagatataaaagcagcatagaaagatacaggtttctcaccaactaggaataaagagactaaatgtgggca

SEQ ID NO: 166852 - DNA, 75 bp, Homo sapiens
atataaaagcagcatagaaagatacaggtttctcaccaactaggaataaagagactaaatgtgggcatatggtta

SEQ ID NO: 166853 - DNA, 73 bp, Homo sapiens
agcatagaaagatacaggtttctcaccaactaggaataaagagactaaatgtgggcatatggttaaactacaa

SEQ ID NO: 166854 - DNA, 73 bp, Homo sapiens
aaagatacaggtttctcaccaactaggaataaagagactaaatgtgggcatatggttaaactacaatgcatct

SEQ ID NO: 166855 - DNA, 74 bp, Homo sapiens
aggtttctcaccaactaggaataaagagactaaatgtgggcatatggttaaactacaatgcatcttcacatttg

SEQ ID NO: 166856 - DNA, 76 bp, Homo sapiens
actaggaataaagagactaaatgtgggcatatggttaaactacaatgcatcttcacatttgtccaacacatttaca

SEQ ID NO: 166857 - DNA, 75 bp, Homo sapiens
ataaagagactaaatgtgggcatatggttaaactacaatgcatcttcacatttgtccaacacatttacaagaaaa

SEQ ID NO: 166858 - DNA, 75 bp, Homo sapiens
taaatgtgggcatatggttaaactacaatgcatcttcacatttgtccaacacatttacaagaaaaacaccattgg

SEQ ID NO: 166859 - DNA, 74 bp, Homo sapiens
catatggttaaactacaatgcatcttcacatttgtccaacacatttacaagaaaaacaccattgggaaacctca

SEQ ID NO: 166860 - DNA, 74 bp, Homo sapiens
aactacaatgcatcttcacatttgtccaacacatttacaagaaaaacaccattgggaaacctcacaggacagaa

SEQ ID NO: 166861 - DNA, 71 bp, Homo sapiens
atcttcacatttgtccaacacatttacaagaaaaacaccattgggaaacctcacaggacagaagtgtttta

SEQ ID NO: 166862 - DNA, 69 bp, Homo sapiens
tttgtccaacacatttacaagaaaaacaccattgggaaacctcacaggacagaagtgttttaacaccaa

SEQ ID NO: 166863 - DNA, 68 bp, Homo sapiens
tacaagaaaaacaccattgggaaacctcacaggacagaagtgttttaacaccaagagaactactagtt

SEQ ID NO: 166864 - DNA, 67 bp, Homo sapiens
gaaaaacaccattgggaaacctcacaggacagaagtgttttaacaccaagagaactactagttttta

SEQ ID NO: 166865 - DNA, 65 bp, Homo sapiens
attgggaaacctcacaggacagaagtgttttaacaccaagagaactactagtttttaattaaaaa

SEQ ID NO: 166866 - DNA, 65 bp, Homo sapiens
caggacagaagtgttttaacaccaagagaactactagtttttaattaaaaatccaaacagggtgg

SEQ ID NO: 166867 - DNA, 64 bp, Homo sapiens
gaagtgttttaacaccaagagaactactagtttttaattaaaaatccaaacagggtggggttga

SEQ ID NO: 166868 - DNA, 63 bp, Homo sapiens
caccaagagaactactagtttttaattaaaaatccaaacagggtggggttgaaaaattttgga

SEQ ID NO: 166869 - DNA, 60 bp, Homo sapiens
gaactactagtttttaattaaaaatccaaacagggtggggttgaaaaattttggaaaggg

SEQ ID NO: 166870 - DNA, 65 bp, Homo sapiens
ttttaattaaaaatccaaacagggtggggttgaaaaattttggaaaggggctggagctgaagcca

SEQ ID NO: 166871 - DNA, 65 bp, Homo sapiens
aaaatccaaacagggtggggttgaaaaattttggaaaggggctggagctgaagccaccattttta

SEQ ID NO: 166872 - DNA, 72 bp, Homo sapiens
aaaattatttttttcaatataaaatgaatgagctggaatagacccaatgtcttactctgtggaaccttgcaa

SEQ ID NO: 166873 - DNA, 74 bp, Homo sapiens
atataaaatgaatgagctggaatagacccaatgtcttactctgtggaaccttgcaaaagtgaagaaacgttgaa

SEQ ID NO: 166874 - DNA, 69 bp, Homo sapiens
aatagacccaatgtcttactctgtggaaccttgcaaaagtgaagaaacgttgaagggttatttagggca

SEQ ID NO: 166875 - DNA, 73 bp, Homo sapiens
tcttactctgtggaaccttgcaaaagtgaagaaacgttgaagggttatttagggcagctggctgatgtcaaaa

SEQ ID NO: 166876 - DNA, 74 bp, Homo sapiens
tgtggaaccttgcaaaagtgaagaaacgttgaagggttatttagggcagctggctgatgtcaaaactgccagaa

SEQ ID NO: 166877 - DNA, 72 bp, Homo sapiens
aaaagtgaagaaacgttgaagggttatttagggcagctggctgatgtcaaaactgccagaatgctaattaac

SEQ ID NO: 166878 - DNA, 76 bp, Homo sapiens
aagaaacgttgaagggttatttagggcagctggctgatgtcaaaactgccagaatgctaattaactgcaggctgag

SEQ ID NO: 166879 - DNA, 79 bp, Homo sapiens
ttgaagggttatttagggcagctggctgatgtcaaaactgccagaatgctaattaactgcaggctgagtctcttacttg

SEQ ID NO: 166880 - DNA, 79 bp, Homo sapiens
atatatatatggagccttttgtattatggcatttttttttcttgctgctgtattcatacatcccattgcaaatcatctt

SEQ ID NO: 166881 - DNA, 79 bp, Homo sapiens
tatatggagccttttgtattatggcatttttttttcttgctgctgtattcatacatcccattgcaaatcatctttcatt

SEQ ID NO: 166882 - DNA, 76 bp, Homo sapiens
ggagccttttgtattatggcatttttttttcttgctgctgtattcatacatcccattgcaaatcatctttcatttt

SEQ ID NO: 166883 - DNA, 77 bp, Homo sapiens
cttttgtattatggcatttttttttcttgctgctgtattcatacatcccattgcaaatcatctttcatttttcattc

SEQ ID NO: 166884 - DNA, 80 bp, Homo sapiens
tatggcatttttttttcttgctgctgtattcatacatcccattgcaaatcatctttcatttttcattctgttgacctgga

SEQ ID NO: 166885 - DNA, 79 bp, Homo sapiens
gcatttttttttcttgctgctgtattcatacatcccattgcaaatcatctttcatttttcattctgttgacctggatat

SEQ ID NO: 166886 - DNA, 80 bp, Homo sapiens
ttttcttgctgctgtattcatacatcccattgcaaatcatctttcatttttcattctgttgacctggatattattatttc

SEQ ID NO: 166887 - DNA, 79 bp, Homo sapiens
cttgctgctgtattcatacatcccattgcaaatcatctttcatttttcattctgttgacctggatattattatttcttt

SEQ ID NO: 166888 - DNA, 77 bp, Homo sapiens
catacatcccattgcaaatcatctttcatttttcattctgttgacctggatattattatttcttttcagaaacagga

SEQ ID NO: 166889 - DNA, 76 bp, Homo sapiens
atacatcccattgcaaatcatctttcatttttcattctgttgacctggatattattatttcttttcagaaacagga

SEQ ID NO: 166890 - DNA, 69 bp, Homo sapiens
tctttcatttttcattctgttgacctggatattattatttcttttcagaaacaggaaaaaaaccgaaca

SEQ ID NO: 166891 - DNA, 71 bp, Homo sapiens
ttcattctgttgacctggatattattatttcttttcagaaacaggaaaaaaaccgaacatctgtgtctcct

SEQ ID NO: 166892 - DNA, 70 bp, Homo sapiens
ctgttgacctggatattattatttcttttcagaaacaggaaaaaaaccgaacatctgtgtctccttccaa

SEQ ID NO: 166893 - DNA, 77 bp, Homo sapiens
tggatattattatttcttttcagaaacaggaaaaaaaccgaacatctgtgtctccttccaatctgctgcacatctgc

SEQ ID NO: 166894 - DNA, 75 bp, Homo sapiens
tttcttttcagaaacaggaaaaaaaccgaacatctgtgtctccttccaatctgctgcacatctgcgcgttttgta

SEQ ID NO: 166895 - DNA, 75 bp, Homo sapiens
acaggaaaaaaaccgaacatctgtgtctccttccaatctgctgcacatctgcgcgttttgtagcgggtcttcaaa

SEQ ID NO: 166896 - DNA, 78 bp, Homo sapiens
aacatctgtgtctccttccaatctgctgcacatctgcgcgttttgtagcgggtcttcaaagttcagttagcaacccac

SEQ ID NO: 166897 - DNA, 78 bp, Homo sapiens
ttccaatctgctgcacatctgcgcgttttgtagcgggtcttcaaagttcagttagcaacccacggacgccattcatct

SEQ ID NO: 166898 - DNA, 72 bp, Homo sapiens
atctgcgcgttttgtagcgggtcttcaaagttcagttagcaacccacggacgccattcatcttcttgttaaa

SEQ ID NO: 166899 - DNA, 71 bp, Homo sapiens
ttttgtagcgggtcttcaaagttcagttagcaacccacggacgccattcatcttcttgttaaaatgtctac

SEQ ID NO: 166900 - DNA, 78 bp, Homo sapiens
gtcttcaaagttcagttagcaacccacggacgccattcatcttcttgttaaaatgtctactgctgtatccaatgctca

SEQ ID NO: 166901 - DNA, 79 bp, Homo sapiens
gttcagttagcaacccacggacgccattcatcttcttgttaaaatgtctactgctgtatccaatgctcatgcccttgag

SEQ ID NO: 166902 - DNA, 76 bp, Homo sapiens
cacggacgccattcatcttcttgttaaaatgtctactgctgtatccaatgctcatgcccttgagggttttcctctt

SEQ ID NO: 166903 - DNA, 74 bp, Homo sapiens
acgccattcatcttcttgttaaaatgtctactgctgtatccaatgctcatgcccttgagggttttcctcttttt

SEQ ID NO: 166904 - DNA, 74 bp, Homo sapiens
ttttttccattattgtatataaagaacattgtgacttttaatattagcatttttgctttcaacagcaattagca

SEQ ID NO: 166905 - DNA, 76 bp, Homo sapiens
cattattgtatataaagaacattgtgacttttaatattagcatttttgctttcaacagcaattagcaatctcttgg

SEQ ID NO: 166906 - DNA, 75 bp, Homo sapiens
taaagaacattgtgacttttaatattagcatttttgctttcaacagcaattagcaatctcttggtttgctgtttg

SEQ ID NO: 166907 - DNA, 76 bp, Homo sapiens
tgtgacttttaatattagcatttttgctttcaacagcaattagcaatctcttggtttgctgtttggtaaagcatcg

SEQ ID NO: 166908 - DNA, 75 bp, Homo sapiens
aatattagcatttttgctttcaacagcaattagcaatctcttggtttgctgtttggtaaagcatcggttaatgag

SEQ ID NO: 166909 - DNA, 75 bp, Homo sapiens
ttttgctttcaacagcaattagcaatctcttggtttgctgtttggtaaagcatcggttaatgaggtcatctagtt

SEQ ID NO: 166910 - DNA, 74 bp, Homo sapiens
tttcaacagcaattagcaatctcttggtttgctgtttggtaaagcatcggttaatgaggtcatctagtttaaaa

SEQ ID NO: 166911 - DNA, 73 bp, Homo sapiens
aattagcaatctcttggtttgctgtttggtaaagcatcggttaatgaggtcatctagtttaaaatcccagcta

SEQ ID NO: 166912 - DNA, 77 bp, Homo sapiens
tcccagctacttgaaaataacagggaggaggtcaaatctatcatttcatgttatattctctgctctcttttcagttc

SEQ ID NO: 166913 - DNA, 76 bp, Homo sapiens
cttgaaaataacagggaggaggtcaaatctatcatttcatgttatattctctgctctcttttcagttctctaaaga

SEQ ID NO: 166914 - DNA, 76 bp, Homo sapiens
aacagggaggaggtcaaatctatcatttcatgttatattctctgctctcttttcagttctctaaagaaaagatatc

SEQ ID NO: 166915 - DNA, 77 bp, Homo sapiens
ggaggtcaaatctatcatttcatgttatattctctgctctcttttcagttctctaaagaaaagatatctttgttatc

SEQ ID NO: 166916 - DNA, 78 bp, Homo sapiens
ctatcatttcatgttatattctctgctctcttttcagttctctaaagaaaagatatctttgttatccacaataagtca

SEQ ID NO: 166917 - DNA, 74 bp, Homo sapiens
ttatattctctgctctcttttcagttctctaaagaaaagatatctttgttatccacaataagtcattacgaccc

SEQ ID NO: 166918 - DNA, 73 bp, Homo sapiens
tctgctctcttttcagttctctaaagaaaagatatctttgttatccacaataagtcattacgacccgttactg

SEQ ID NO: 166919 - DNA, 70 bp, Homo sapiens
ttttcagttctctaaagaaaagatatctttgttatccacaataagtcattacgacccgttactggccctc

SEQ ID NO: 166920 - DNA, 70 bp, Homo sapiens
taaagaaaagatatctttgttatccacaataagtcattacgacccgttactggccctctgtgttttacta

SEQ ID NO: 166921 - DNA, 72 bp, Homo sapiens
tatctttgttatccacaataagtcattacgacccgttactggccctctgtgttttactaccacctcaagata

SEQ ID NO: 166922 - DNA, 72 bp, Homo sapiens
tgttatccacaataagtcattacgacccgttactggccctctgtgttttactaccacctcaagatacagtta

SEQ ID NO: 166923 - DNA, 69 bp, Homo sapiens
aataagtcattacgacccgttactggccctctgtgttttactaccacctcaagatacagttaggttctc

SEQ ID NO: 166924 - DNA, 74 bp, Homo sapiens
tggccctctgtgttttactaccacctcaagatacagttaggttctctcttgctgaagtactgaaataggataat

SEQ ID NO: 166925 - DNA, 76 bp, Homo sapiens
tgtgttttactaccacctcaagatacagttaggttctctcttgctgaagtactgaaataggataattcatctaata

SEQ ID NO: 166926 - DNA, 75 bp, Homo sapiens
ctaccacctcaagatacagttaggttctctcttgctgaagtactgaaataggataattcatctaataaacaaaca

SEQ ID NO: 166927 - DNA, 69 bp, Homo sapiens
aaacaaaaaaaacaactttgagcatctgaggatgaggaattggtttcgcgttggttgtgttgtctttcc

SEQ ID NO: 166928 - DNA, 71 bp, Homo sapiens
aaaaacaactttgagcatctgaggatgaggaattggtttcgcgttggttgtgttgtctttcctccgacagt

SEQ ID NO: 166929 - DNA, 76 bp, Homo sapiens
agcatctgaggatgaggaattggtttcgcgttggttgtgttgtctttcctccgacagttctgagttcacgtctagc

SEQ ID NO: 166930 - DNA, 70 bp, Homo sapiens
aattggtttcgcgttggttgtgttgtctttcctccgacagttctgagttcacgtctagcgaggggttgtc

SEQ ID NO: 166931 - DNA, 72 bp, Homo sapiens
cgttggttgtgttgtctttcctccgacagttctgagttcacgtctagcgaggggttgtctctatggtggaag

SEQ ID NO: 166932 - DNA, 68 bp, Homo sapiens
agttctgagttcacgtctagcgaggggttgtctctatggtggaaggggttcccggggtggttgacctc

SEQ ID NO: 166933 - DNA, 71 bp, Homo sapiens
tcacgtctagcgaggggttgtctctatggtggaaggggttcccggggtggttgacctcggagtggctgctg

SEQ ID NO: 166934 - DNA, 71 bp, Homo sapiens
gggttgtctctatggtggaaggggttcccggggtggttgacctcggagtggctgctggtggtgtgtccatc

SEQ ID NO: 166935 - DNA, 72 bp, Homo sapiens
tctatggtggaaggggttcccggggtggttgacctcggagtggctgctggtggtgtgtccatcgggctccca

SEQ ID NO: 166936 - DNA, 71 bp, Homo sapiens
gggttcccggggtggttgacctcggagtggctgctggtggtgtgtccatcgggctcccagccccgctgttg

SEQ ID NO: 166937 - DNA, 76 bp, Homo sapiens
gggtggttgacctcggagtggctgctggtggtgtgtccatcgggctcccagccccgctgttgggcgtgacagagga

SEQ ID NO: 166938 - DNA, 81 bp, Homo sapiens
ttgacctcggagtggctgctggtggtgtgtccatcgggctcccagccccgctgttgggcgtgacagaggagctgactgcag

SEQ ID NO: 166939 - DNA, 81 bp, Homo sapiens
agtggctgctggtggtgtgtccatcgggctcccagccccgctgttgggcgtgacagaggagctgactgcaggtgtgtctcc

SEQ ID NO: 166940 - DNA, 81 bp, Homo sapiens
ggtggtgtgtccatcgggctcccagccccgctgttgggcgtgacagaggagctgactgcaggtgtgtctccctgctgctgg

SEQ ID NO: 166941 - DNA, 81 bp, Homo sapiens
atcgggctcccagccccgctgttgggcgtgacagaggagctgactgcaggtgtgtctccctgctgctgggcctgcagggtc

SEQ ID NO: 166942 - DNA, 85 bp, Homo sapiens
agccccgctgttgggcgtgacagaggagctgactgcaggtgtgtctccctgctgctgggcctgcagggtctgtccacagatgtga

SEQ ID NO: 166943 - DNA, 88 bp, Homo sapiens
tgttgggcgtgacagaggagctgactgcaggtgtgtctccctgctgctgggcctgcagggtctgtccacagatgtgatggtgcttctc

SEQ ID NO: 166944 - DNA, 87 bp, Homo sapiens
tgacagaggagctgactgcaggtgtgtctccctgctgctgggcctgcagggtctgtccacagatgtgatggtgcttctcccagtctt

SEQ ID NO: 166945 - DNA, 85 bp, Homo sapiens
ctgcaggtgtgtctccctgctgctgggcctgcagggtctgtccacagatgtgatggtgcttctcccagtctttgtgctggcaaaa

SEQ ID NO: 166946 - DNA, 87 bp, Homo sapiens
tgtgtctccctgctgctgggcctgcagggtctgtccacagatgtgatggtgcttctcccagtctttgtgctggcaaaatgagccaca

SEQ ID NO: 166947 - DNA, 85 bp, Homo sapiens
tgctgggcctgcagggtctgtccacagatgtgatggtgcttctcccagtctttgtgctggcaaaatgagccacagtatcgggctg

SEQ ID NO: 166948 - DNA, 84 bp, Homo sapiens
tccacagatgtgatggtgcttctcccagtctttgtgctggcaaaatgagccacagtatcgggctgtgttacagccactgcaggt

SEQ ID NO: 166949 - DNA, 83 bp, Homo sapiens
agatgtgatggtgcttctcccagtctttgtgctggcaaaatgagccacagtatcgggctgtgttacagccactgcaggtttca

SEQ ID NO: 166950 - DNA, 79 bp, Homo sapiens
ttctcccagtctttgtgctggcaaaatgagccacagtatcgggctgtgttacagccactgcaggtttcactcgctttac

SEQ ID NO: 166951 - DNA, 79 bp, Homo sapiens
tttgtgctggcaaaatgagccacagtatcgggctgtgttacagccactgcaggtttcactcgctttacggccacaattc

SEQ ID NO: 166952 - DNA, 78 bp, Homo sapiens
caaaatgagccacagtatcgggctgtgttacagccactgcaggtttcactcgctttacggccacaattccagcaactc

SEQ ID NO: 166953 - DNA, 76 bp, Homo sapiens
agccacagtatcgggctgtgttacagccactgcaggtttcactcgctttacggccacaattccagcaactctaaag

SEQ ID NO: 166954 - DNA, 77 bp, Homo sapiens
tatcgggctgtgttacagccactgcaggtttcactcgctttacggccacaattccagcaactctaaaggagaaggca

SEQ ID NO: 166955 - DNA, 72 bp, Homo sapiens
aggtttcactcgctttacggccacaattccagcaactctaaaggagaaggcagaagaaagcaagatcccaag

SEQ ID NO: 166956 - DNA, 78 bp, Homo sapiens
aatgaatgaaaactatcttgtttatttggagcttcccaagatgcctcacctcgcttgaatcctcctgctgattgataa

SEQ ID NO: 166957 - DNA, 77 bp, Homo sapiens
aaaactatcttgtttatttggagcttcccaagatgcctcacctcgcttgaatcctcctgctgattgataactgccag

SEQ ID NO: 166958 - DNA, 80 bp, Homo sapiens
tgtttatttggagcttcccaagatgcctcacctcgcttgaatcctcctgctgattgataactgccagtgcgtcctccgcc

SEQ ID NO: 166959 - DNA, 79 bp, Homo sapiens
cttcccaagatgcctcacctcgcttgaatcctcctgctgattgataactgccagtgcgtcctccgccgcctgccgtttg

SEQ ID NO: 166960 - DNA, 80 bp, Homo sapiens
agatgcctcacctcgcttgaatcctcctgctgattgataactgccagtgcgtcctccgccgcctgccgtttggcctcggc

SEQ ID NO: 166961 - DNA, 79 bp, Homo sapiens
cttgaatcctcctgctgattgataactgccagtgcgtcctccgccgcctgccgtttggcctcggcgaccgtgcgctcca

SEQ ID NO: 166962 - DNA, 79 bp, Homo sapiens
atcctcctgctgattgataactgccagtgcgtcctccgccgcctgccgtttggcctcggcgaccgtgcgctccatcttg

SEQ ID NO: 166963 - DNA, 77 bp, Homo sapiens
attgataactgccagtgcgtcctccgccgcctgccgtttggcctcggcgaccgtgcgctccatcttggccctctctg

SEQ ID NO: 166964 - DNA, 78 bp, Homo sapiens
agtgcgtcctccgccgcctgccgtttggcctcggcgaccgtgcgctccatcttggccctctctgttgtgatcatgtcg

SEQ ID NO: 166965 - DNA, 78 bp, Homo sapiens
tccgccgcctgccgtttggcctcggcgaccgtgcgctccatcttggccctctctgttgtgatcatgtcgtgggctttc

SEQ ID NO: 166966 - DNA, 77 bp, Homo sapiens
cctgccgtttggcctcggcgaccgtgcgctccatcttggccctctctgttgtgatcatgtcgtgggctttccgctcc

SEQ ID NO: 166967 - DNA, 79 bp, Homo sapiens
tcggcgaccgtgcgctccatcttggccctctctgttgtgatcatgtcgtgggctttccgctccgcctcagacacggcct

SEQ ID NO: 166968 - DNA, 81 bp, Homo sapiens
accgtgcgctccatcttggccctctctgttgtgatcatgtcgtgggctttccgctccgcctcagacacggccttctgcagc

SEQ ID NO: 166969 - DNA, 81 bp, Homo sapiens
atcttggccctctctgttgtgatcatgtcgtgggctttccgctccgcctcagacacggccttctgcagctccgtcatcgcc

SEQ ID NO: 166970 - DNA, 84 bp, Homo sapiens
tctgttgtgatcatgtcgtgggctttccgctccgcctcagacacggccttctgcagctccgtcatcgcctggcgcttcacctca

SEQ ID NO: 166971 - DNA, 84 bp, Homo sapiens
tgtgatcatgtcgtgggctttccgctccgcctcagacacggccttctgcagctccgtcatcgcctggcgcttcacctcattgac

SEQ ID NO: 166972 - DNA, 80 bp, Homo sapiens
tgggctttccgctccgcctcagacacggccttctgcagctccgtcatcgcctggcgcttcacctcattgacggcctcctc

SEQ ID NO: 166973 - DNA, 83 bp, Homo sapiens
tccgctccgcctcagacacggccttctgcagctccgtcatcgcctggcgcttcacctcattgacggcctcctctgtgtgccag

SEQ ID NO: 166974 - DNA, 81 bp, Homo sapiens
agacacggccttctgcagctccgtcatcgcctggcgcttcacctcattgacggcctcctctgtgtgccagtcaggccaaac

SEQ ID NO: 166975 - DNA, 82 bp, Homo sapiens
ttctgcagctccgtcatcgcctggcgcttcacctcattgacggcctcctctgtgtgccagtcaggccaaaccagacaagaaa

SEQ ID NO: 166976 - DNA, 75 bp, Homo sapiens
atcactacattaacaactgcacacagctgccagaacacgaaactcatgtttttaaacaattcttaccagctttct

SEQ ID NO: 166977 - DNA, 76 bp, Homo sapiens
ttaacaactgcacacagctgccagaacacgaaactcatgtttttaaacaattcttaccagctttcttccagatctc

SEQ ID NO: 166978 - DNA, 75 bp, Homo sapiens
agctgccagaacacgaaactcatgtttttaaacaattcttaccagctttcttccagatctcctctggcacgtatc

SEQ ID NO: 166979 - DNA, 73 bp, Homo sapiens
agaacacgaaactcatgtttttaaacaattcttaccagctttcttccagatctcctctggcacgtatccagac

SEQ ID NO: 166980 - DNA, 76 bp, Homo sapiens
actcatgtttttaaacaattcttaccagctttcttccagatctcctctggcacgtatccagacgcaggcctgtgaa

SEQ ID NO: 166981 - DNA, 75 bp, Homo sapiens
ttttaaacaattcttaccagctttcttccagatctcctctggcacgtatccagacgcaggcctgtgaaggaattc

SEQ ID NO: 166982 - DNA, 80 bp, Homo sapiens
taccagctttcttccagatctcctctggcacgtatccagacgcaggcctgtgaaggaattcccgatgcgcgtctatgaaa

SEQ ID NO: 166983 - DNA, 79 bp, Homo sapiens
tttcttccagatctcctctggcacgtatccagacgcaggcctgtgaaggaattcccgatgcgcgtctatgaaaaggatg

SEQ ID NO: 166984 - DNA, 76 bp, Homo sapiens
atctcctctggcacgtatccagacgcaggcctgtgaaggaattcccgatgcgcgtctatgaaaaggatgggaaggg

SEQ ID NO: 166985 - DNA, 74 bp, Homo sapiens
acgtatccagacgcaggcctgtgaaggaattcccgatgcgcgtctatgaaaaggatgggaagggggtggagaga

SEQ ID NO: 166986 - DNA, 74 bp, Homo sapiens
agacgcaggcctgtgaaggaattcccgatgcgcgtctatgaaaaggatgggaagggggtggagagaggaggaga

SEQ ID NO: 166987 - DNA, 73 bp, Homo sapiens
ctgtgaaggaattcccgatgcgcgtctatgaaaaggatgggaagggggtggagagaggaggagagtactgtaa

SEQ ID NO: 166988 - DNA, 85 bp, Homo sapiens
aagagcaatctatgatgtatgaaagagatggaagatgcactacacttacgacaggatggagaccattggatactagatactgcaa

SEQ ID NO: 166989 - DNA, 84 bp, Homo sapiens
tatgatgtatgaaagagatggaagatgcactacacttacgacaggatggagaccattggatactagatactgcaagggccgcca

SEQ ID NO: 166990 - DNA, 84 bp, Homo sapiens
agagatggaagatgcactacacttacgacaggatggagaccattggatactagatactgcaagggccgccatcaatatacatga

SEQ ID NO: 166991 - DNA, 81 bp, Homo sapiens
aagatgcactacacttacgacaggatggagaccattggatactagatactgcaagggccgccatcaatatacatgaaggga

SEQ ID NO: 166992 - DNA, 83 bp, Homo sapiens
ctacacttacgacaggatggagaccattggatactagatactgcaagggccgccatcaatatacatgaagggatgagctgata

SEQ ID NO: 166993 - DNA, 82 bp, Homo sapiens
aggatggagaccattggatactagatactgcaagggccgccatcaatatacatgaagggatgagctgatagcctttggagaa

SEQ ID NO: 166994 - DNA, 84 bp, Homo sapiens
agaccattggatactagatactgcaagggccgccatcaatatacatgaagggatgagctgatagcctttggagaagcaatgtga

SEQ ID NO: 166995 - DNA, 85 bp, Homo sapiens
atactagatactgcaagggccgccatcaatatacatgaagggatgagctgatagcctttggagaagcaatgtgacctcatatgac

SEQ ID NO: 166996 - DNA, 83 bp, Homo sapiens
aagggccgccatcaatatacatgaagggatgagctgatagcctttggagaagcaatgtgacctcatatgacccaggacagcaa

SEQ ID NO: 166997 - DNA, 86 bp, Homo sapiens
atcaatatacatgaagggatgagctgatagcctttggagaagcaatgtgacctcatatgacccaggacagcaatgctcaaagctgg

SEQ ID NO: 166998 - DNA, 88 bp, Homo sapiens
tatacatgaagggatgagctgatagcctttggagaagcaatgtgacctcatatgacccaggacagcaatgctcaaagctgggcagcac

SEQ ID NO: 166999 - DNA, 86 bp, Homo sapiens
atgagctgatagcctttggagaagcaatgtgacctcatatgacccaggacagcaatgctcaaagctgggcagcacctaggtatggc

SEQ ID NO: 167000 - DNA, 83 bp, Homo sapiens
atagcctttggagaagcaatgtgacctcatatgacccaggacagcaatgctcaaagctgggcagcacctaggtatggccttca

SEQ ID NO: 167001 - DNA, 83 bp, Homo sapiens
agaagcaatgtgacctcatatgacccaggacagcaatgctcaaagctgggcagcacctaggtatggccttcatcctgtagtgg

SEQ ID NO: 167002 - DNA, 85 bp, Homo sapiens
tgtgacctcatatgacccaggacagcaatgctcaaagctgggcagcacctaggtatggccttcatcctgtagtgggcagaatgag

SEQ ID NO: 167003 - DNA, 86 bp, Homo sapiens
cccaggacagcaatgctcaaagctgggcagcacctaggtatggccttcatcctgtagtgggcagaatgaggctgtgatcatgataa

SEQ ID NO: 167004 - DNA, 75 bp, Homo sapiens
aacagcataagaaatatgtgttttcgagatactcatctgaagaaaagttacctagtgcaactgggtctgggttga

SEQ ID NO: 167005 - DNA, 72 bp, Homo sapiens
aaatatgtgttttcgagatactcatctgaagaaaagttacctagtgcaactgggtctgggttgacgggactc

SEQ ID NO: 167006 - DNA, 75 bp, Homo sapiens
ttttcgagatactcatctgaagaaaagttacctagtgcaactgggtctgggttgacgggactctgctgcctagag

SEQ ID NO: 167007 - DNA, 78 bp, Homo sapiens
actcatctgaagaaaagttacctagtgcaactgggtctgggttgacgggactctgctgcctagagtggctgctgctac

SEQ ID NO: 167008 - DNA, 77 bp, Homo sapiens
agaaaagttacctagtgcaactgggtctgggttgacgggactctgctgcctagagtggctgctgctactgccgccac

SEQ ID NO: 167009 - DNA, 76 bp, Homo sapiens
ctagtgcaactgggtctgggttgacgggactctgctgcctagagtggctgctgctactgccgccacctttttttaa

SEQ ID NO: 167010 - DNA, 76 bp, Homo sapiens
gtctgggttgacgggactctgctgcctagagtggctgctgctactgccgccacctttttttaagtcctcggcgtca

SEQ ID NO: 167011 - DNA, 76 bp, Homo sapiens
gttgacgggactctgctgcctagagtggctgctgctactgccgccacctttttttaagtcctcggcgtcactgtac

SEQ ID NO: 167012 - DNA, 75 bp, Homo sapiens
ctgcctagagtggctgctgctactgccgccacctttttttaagtcctcggcgtcactgtaccgccggatccagta

SEQ ID NO: 167013 - DNA, 74 bp, Homo sapiens
tggctgctgctactgccgccacctttttttaagtcctcggcgtcactgtaccgccggatccagtaattcaattc

SEQ ID NO: 167014 - DNA, 69 bp, Homo sapiens
ctactgccgccacctttttttaagtcctcggcgtcactgtaccgccggatccagtaattcaattcttcc

SEQ ID NO: 167015 - DNA, 67 bp, Homo sapiens
acctttttttaagtcctcggcgtcactgtaccgccggatccagtaattcaattcttcccggtctgct

SEQ ID NO: 167016 - DNA, 71 bp, Homo sapiens
tttttaagtcctcggcgtcactgtaccgccggatccagtaattcaattcttcccggtctgcttcttgacac

SEQ ID NO: 167017 - DNA, 72 bp, Homo sapiens
cgtcactgtaccgccggatccagtaattcaattcttcccggtctgcttcttgacaccgccttagtacggtga

SEQ ID NO: 167018 - DNA, 73 bp, Homo sapiens
ctgtaccgccggatccagtaattcaattcttcccggtctgcttcttgacaccgccttagtacggtgagagatc

SEQ ID NO: 167019 - DNA, 70 bp, Homo sapiens
ccagtaattcaattcttcccggtctgcttcttgacaccgccttagtacggtgagagatcgccttgttttt

SEQ ID NO: 167020 - DNA, 71 bp, Homo sapiens
attcaattcttcccggtctgcttcttgacaccgccttagtacggtgagagatcgccttgttttttctacca

SEQ ID NO: 167021 - DNA, 75 bp, Homo sapiens
gtctgcttcttgacaccgccttagtacggtgagagatcgccttgttttttctaccatgtccattatgcagtttaa

SEQ ID NO: 167022 - DNA, 74 bp, Homo sapiens
ttgacaccgccttagtacggtgagagatcgccttgttttttctaccatgtccattatgcagtttaacagctatt

SEQ ID NO: 167023 - DNA, 73 bp, Homo sapiens
ggtgagagatcgccttgttttttctaccatgtccattatgcagtttaacagctatttgggaaaggggagaata

SEQ ID NO: 167024 - DNA, 72 bp, Homo sapiens
cttgttttttctaccatgtccattatgcagtttaacagctatttgggaaaggggagaatagggaagagcata

SEQ ID NO: 167025 - DNA, 72 bp, Homo sapiens
ctccagttgttttccaaacattttttaatcccaaatgattactgatgtcttacatggtcaagatgtttccac

SEQ ID NO: 167026 - DNA, 74 bp, Homo sapiens
tttccaaacattttttaatcccaaatgattactgatgtcttacatggtcaagatgtttccactcttctgcccat

SEQ ID NO: 167027 - DNA, 77 bp, Homo sapiens
ttttttaatcccaaatgattactgatgtcttacatggtcaagatgtttccactcttctgcccattctctgtctgtta

SEQ ID NO: 167028 - DNA, 83 bp, Homo sapiens
ccaaatgattactgatgtcttacatggtcaagatgtttccactcttctgcccattctctgtctgttagtctgtgatcaatcat

SEQ ID NO: 167029 - DNA, 82 bp, Homo sapiens
attactgatgtcttacatggtcaagatgtttccactcttctgcccattctctgtctgttagtctgtgatcaatcatttcttc

SEQ ID NO: 167030 - DNA, 82 bp, Homo sapiens
tgtcttacatggtcaagatgtttccactcttctgcccattctctgtctgttagtctgtgatcaatcatttcttcttgacgtg

SEQ ID NO: 167031 - DNA, 82 bp, Homo sapiens
agatgtttccactcttctgcccattctctgtctgttagtctgtgatcaatcatttcttcttgacgtgtgccatgcaacccta

SEQ ID NO: 167032 - DNA, 80 bp, Homo sapiens
actcttctgcccattctctgtctgttagtctgtgatcaatcatttcttcttgacgtgtgccatgcaaccctacaaaaata

SEQ ID NO: 167033 - DNA, 81 bp, Homo sapiens
tctgcccattctctgtctgttagtctgtgatcaatcatttcttcttgacgtgtgccatgcaaccctacaaaaatagagaag

SEQ ID NO: 167034 - DNA, 80 bp, Homo sapiens
ctctgtctgttagtctgtgatcaatcatttcttcttgacgtgtgccatgcaaccctacaaaaatagagaaggctgaataa

SEQ ID NO: 167035 - DNA, 77 bp, Homo sapiens
tagtctgtgatcaatcatttcttcttgacgtgtgccatgcaaccctacaaaaatagagaaggctgaataaccctaaa

SEQ ID NO: 167036 - DNA, 75 bp, Homo sapiens
aatcatttcttcttgacgtgtgccatgcaaccctacaaaaatagagaaggctgaataaccctaaagcattcagta

SEQ ID NO: 167037 - DNA, 71 bp, Homo sapiens
agtcttcaagcacccaatcccgtaagaagtgaacaggtccttcagtcttacccataggtctgtttctgtcc

SEQ ID NO: 167038 - DNA, 69 bp, Homo sapiens
acccaatcccgtaagaagtgaacaggtccttcagtcttacccataggtctgtttctgtccctgaggtcc

SEQ ID NO: 167039 - DNA, 71 bp, Homo sapiens
cgtaagaagtgaacaggtccttcagtcttacccataggtctgtttctgtccctgaggtccctgtggctggg

SEQ ID NO: 167040 - DNA, 72 bp, Homo sapiens
aacaggtccttcagtcttacccataggtctgtttctgtccctgaggtccctgtggctggggtgtcgatagga

SEQ ID NO: 167041 - DNA, 73 bp, Homo sapiens
ttcagtcttacccataggtctgtttctgtccctgaggtccctgtggctggggtgtcgataggagtccctgtag

SEQ ID NO: 167042 - DNA, 74 bp, Homo sapiens
ataggtctgtttctgtccctgaggtccctgtggctggggtgtcgataggagtccctgtagtggtgggcaatggc

SEQ ID NO: 167043 - DNA, 77 bp, Homo sapiens
ttctgtccctgaggtccctgtggctggggtgtcgataggagtccctgtagtggtgggcaatggccatatcatccaaa

SEQ ID NO: 167044 - DNA, 77 bp, Homo sapiens
ggtccctgtggctggggtgtcgataggagtccctgtagtggtgggcaatggccatatcatccaaacggtaatgctga

SEQ ID NO: 167045 - DNA, 78 bp, Homo sapiens
ctgtggctggggtgtcgataggagtccctgtagtggtgggcaatggccatatcatccaaacggtaatgctgaggtgga

SEQ ID NO: 167046 - DNA, 76 bp, Homo sapiens
gtgtcgataggagtccctgtagtggtgggcaatggccatatcatccaaacggtaatgctgaggtggaggtggggta

SEQ ID NO: 167047 - DNA, 75 bp, Homo sapiens
agtccctgtagtggtgggcaatggccatatcatccaaacggtaatgctgaggtggaggtggggtagggtgaggca

SEQ ID NO: 167048 - DNA, 76 bp, Homo sapiens
tagtggtgggcaatggccatatcatccaaacggtaatgctgaggtggaggtggggtagggtgaggcaggccattgg

SEQ ID NO: 167049 - DNA, 76 bp, Homo sapiens
tggccatatcatccaaacggtaatgctgaggtggaggtggggtagggtgaggcaggccattgggctggtaggataa

SEQ ID NO: 167050 - DNA, 72 bp, Homo sapiens
tccaaacggtaatgctgaggtggaggtggggtagggtgaggcaggccattgggctggtaggataagccgtta

SEQ ID NO: 167051 - DNA, 74 bp, Homo sapiens
taatgctgaggtggaggtggggtagggtgaggcaggccattgggctggtaggataagccgttatttggactgta

SEQ ID NO: 167052 - DNA, 72 bp, Homo sapiens
tggaggtggggtagggtgaggcaggccattgggctggtaggataagccgttatttggactgtaccgctggcc

SEQ ID NO: 167053 - DNA, 76 bp, Homo sapiens
tagggtgaggcaggccattgggctggtaggataagccgttatttggactgtaccgctggcctgggctaatagtgca

SEQ ID NO: 167054 - DNA, 77 bp, Homo sapiens
caggccattgggctggtaggataagccgttatttggactgtaccgctggcctgggctaatagtgcatggtcgcttgc

SEQ ID NO: 167055 - DNA, 76 bp, Homo sapiens
attgggctggtaggataagccgttatttggactgtaccgctggcctgggctaatagtgcatggtcgcttgcttgga

SEQ ID NO: 167056 - DNA, 80 bp, Homo sapiens
taggataagccgttatttggactgtaccgctggcctgggctaatagtgcatggtcgcttgcttggatgttctgagtgcaa

SEQ ID NO: 167057 - DNA, 82 bp, Homo sapiens
tatttggactgtaccgctggcctgggctaatagtgcatggtcgcttgcttggatgttctgagtgcaaaggctctctgtcaaa

SEQ ID NO: 167058 - DNA, 81 bp, Homo sapiens
actgtaccgctggcctgggctaatagtgcatggtcgcttgcttggatgttctgagtgcaaaggctctctgtcaaagccatt

SEQ ID NO: 167059 - DNA, 80 bp, Homo sapiens
ctgggctaatagtgcatggtcgcttgcttggatgttctgagtgcaaaggctctctgtcaaagccattttctttggttcta

SEQ ID NO: 167060 - DNA, 78 bp, Homo sapiens
ctaatagtgcatggtcgcttgcttggatgttctgagtgcaaaggctctctgtcaaagccattttctttggttctaaag

SEQ ID NO: 167061 - DNA, 73 bp, Homo sapiens
tcgcttgcttggatgttctgagtgcaaaggctctctgtcaaagccattttctttggttctaaagggggaaaaa

SEQ ID NO: 167062 - DNA, 70 bp, Homo sapiens
cttggatgttctgagtgcaaaggctctctgtcaaagccattttctttggttctaaagggggaaaaaacaa

SEQ ID NO: 167063 - DNA, 66 bp, Homo sapiens
agtgcaaaggctctctgtcaaagccattttctttggttctaaagggggaaaaaacaagagtttgtt

SEQ ID NO: 167064 - DNA, 74 bp, Homo sapiens
tagatgaggatgaggtattcataaaaattattttactacggtaaatgggaaatttcatgtgtatgctttattca

SEQ ID NO: 167065 - DNA, 72 bp, Homo sapiens
gaggatgaggtattcataaaaattattttactacggtaaatgggaaatttcatgtgtatgctttattcaaca

SEQ ID NO: 167066 - DNA, 70 bp, Homo sapiens
cataaaaattattttactacggtaaatgggaaatttcatgtgtatgctttattcaacaattactctgtag

SEQ ID NO: 167067 - DNA, 70 bp, Homo sapiens
ttttactacggtaaatgggaaatttcatgtgtatgctttattcaacaattactctgtagggtttaatgga

SEQ ID NO: 167068 - DNA, 71 bp, Homo sapiens
ctacggtaaatgggaaatttcatgtgtatgctttattcaacaattactctgtagggtttaatggagaagtg

SEQ ID NO: 167069 - DNA, 69 bp, Homo sapiens
gggaaatttcatgtgtatgctttattcaacaattactctgtagggtttaatggagaagtggttttattt

SEQ ID NO: 167070 - DNA, 71 bp, Homo sapiens
catgtgtatgctttattcaacaattactctgtagggtttaatggagaagtggttttattttacatttctta

SEQ ID NO: 167071 - DNA, 67 bp, Homo sapiens
ttcaacaattactctgtagggtttaatggagaagtggttttattttacatttcttagaattcttagt

SEQ ID NO: 167072 - DNA, 70 bp, Homo sapiens
actctgtagggtttaatggagaagtggttttattttacatttcttagaattcttagttatgagagcacag

SEQ ID NO: 167073 - DNA, 72 bp, Homo sapiens
gtagggtttaatggagaagtggttttattttacatttcttagaattcttagttatgagagcacagtatctga

SEQ ID NO: 167074 - DNA, 75 bp, Homo sapiens
ggagaagtggttttattttacatttcttagaattcttagttatgagagcacagtatctgatagaacagtatctaa

SEQ ID NO: 167075 - DNA, 74 bp, Homo sapiens
tattttacatttcttagaattcttagttatgagagcacagtatctgatagaacagtatctaacaagtaaaattt

SEQ ID NO: 167076 - DNA, 76 bp, Homo sapiens
acatttcttagaattcttagttatgagagcacagtatctgatagaacagtatctaacaagtaaaattttcagcaaa

SEQ ID NO: 167077 - DNA, 78 bp, Homo sapiens
tcttagttatgagagcacagtatctgatagaacagtatctaacaagtaaaattttcagcaaaaataccatctattgtc

SEQ ID NO: 167078 - DNA, 79 bp, Homo sapiens
ttatgagagcacagtatctgatagaacagtatctaacaagtaaaattttcagcaaaaataccatctattgtctctactg

SEQ ID NO: 167079 - DNA, 76 bp, Homo sapiens
cagtatctgatagaacagtatctaacaagtaaaattttcagcaaaaataccatctattgtctctactgtataactc

SEQ ID NO: 167080 - DNA, 74 bp, Homo sapiens
gaacagtatctaacaagtaaaattttcagcaaaaataccatctattgtctctactgtataactcttatcttcac

SEQ ID NO: 167081 - DNA, 75 bp, Homo sapiens
ctaacaagtaaaattttcagcaaaaataccatctattgtctctactgtataactcttatcttcactcagttcatc

SEQ ID NO: 167082 - DNA, 77 bp, Homo sapiens
aattttcagcaaaaataccatctattgtctctactgtataactcttatcttcactcagttcatctagtgtcccagaa

SEQ ID NO: 167083 - DNA, 75 bp, Homo sapiens
aaaataccatctattgtctctactgtataactcttatcttcactcagttcatctagtgtcccagaagttttctct

SEQ ID NO: 167084 - DNA, 78 bp, Homo sapiens
atctattgtctctactgtataactcttatcttcactcagttcatctagtgtcccagaagttttctcttagttcatata

SEQ ID NO: 167085 - DNA, 76 bp, Homo sapiens
tctactgtataactcttatcttcactcagttcatctagtgtcccagaagttttctcttagttcatatacaaaccaa

SEQ ID NO: 167086 - DNA, 73 bp, Homo sapiens
ataactcttatcttcactcagttcatctagtgtcccagaagttttctcttagttcatatacaaaccaaaacaa

SEQ ID NO: 167087 - DNA, 72 bp, Homo sapiens
cttcactcagttcatctagtgtcccagaagttttctcttagttcatatacaaaccaaaacaaataactactg

SEQ ID NO: 167088 - DNA, 71 bp, Homo sapiens
agttcatctagtgtcccagaagttttctcttagttcatatacaaaccaaaacaaataactactgtactgtg

SEQ ID NO: 167089 - DNA, 69 bp, Homo sapiens
gtgtcccagaagttttctcttagttcatatacaaaccaaaacaaataactactgtactgtgttaagaaa

SEQ ID NO: 167090 - DNA, 74 bp, Homo sapiens
tctcttagttcatatacaaaccaaaacaaataactactgtactgtgttaagaaatacatacagacaagcttcca

SEQ ID NO: 167091 - DNA, 74 bp, Homo sapiens
catatacaaaccaaaacaaataactactgtactgtgttaagaaatacatacagacaagcttccaaaccatcaca

SEQ ID NO: 167092 - DNA, 71 bp, Homo sapiens
ccaaaacaaataactactgtactgtgttaagaaatacatacagacaagcttccaaaccatcacattttaag

SEQ ID NO: 167093 - DNA, 72 bp, Homo sapiens
ataactactgtactgtgttaagaaatacatacagacaagcttccaaaccatcacattttaaggaaactagga

SEQ ID NO: 167094 - DNA, 71 bp, Homo sapiens
actgtgttaagaaatacatacagacaagcttccaaaccatcacattttaaggaaactaggaacagccaatt

SEQ ID NO: 167095 - DNA, 72 bp, Homo sapiens
gttaagaaatacatacagacaagcttccaaaccatcacattttaaggaaactaggaacagccaatttcagaa

SEQ ID NO: 167096 - DNA, 73 bp, Homo sapiens
acatacagacaagcttccaaaccatcacattttaaggaaactaggaacagccaatttcagaatattgaagtaa

SEQ ID NO: 167097 - DNA, 71 bp, Homo sapiens
agcttccaaaccatcacattttaaggaaactaggaacagccaatttcagaatattgaagtaaaatatgtgg

SEQ ID NO: 167098 - DNA, 70 bp, Homo sapiens
ccatcacattttaaggaaactaggaacagccaatttcagaatattgaagtaaaatatgtggttgggttaa

SEQ ID NO: 167099 - DNA, 72 bp, Homo sapiens
ctaggaacagccaatttcagaatattgaagtaaaatatgtggttgggttaaattacataatgaatgagaatt

SEQ ID NO: 167100 - DNA, 76 bp, Homo sapiens
tttcagaatattgaagtaaaatatgtggttgggttaaattacataatgaatgagaattttaatattgatgtgcatc

SEQ ID NO: 167101 - DNA, 78 bp, Homo sapiens
tgaagtaaaatatgtggttgggttaaattacataatgaatgagaattttaatattgatgtgcatctaagagccatcag

SEQ ID NO: 167102 - DNA, 80 bp, Homo sapiens
tatgtggttgggttaaattacataatgaatgagaattttaatattgatgtgcatctaagagccatcagtggtacttggca

SEQ ID NO: 167103 - DNA, 77 bp, Homo sapiens
ggttgggttaaattacataatgaatgagaattttaatattgatgtgcatctaagagccatcagtggtacttggcaaa

SEQ ID NO: 167104 - DNA, 82 bp, Homo sapiens
tacataatgaatgagaattttaatattgatgtgcatctaagagccatcagtggtacttggcaaatcagaaaaatcattcgtc

SEQ ID NO: 167105 - DNA, 79 bp, Homo sapiens
gagaattttaatattgatgtgcatctaagagccatcagtggtacttggcaaatcagaaaaatcattcgtcttcaccatt

SEQ ID NO: 167106 - DNA, 80 bp, Homo sapiens
atattgatgtgcatctaagagccatcagtggtacttggcaaatcagaaaaatcattcgtcttcaccatttcgctttaata

SEQ ID NO: 167107 - DNA, 79 bp, Homo sapiens
atgtgcatctaagagccatcagtggtacttggcaaatcagaaaaatcattcgtcttcaccatttcgctttaatactaca

SEQ ID NO: 167108 - DNA, 75 bp, Homo sapiens
agccatcagtggtacttggcaaatcagaaaaatcattcgtcttcaccatttcgctttaatactacaagcagaaaa

SEQ ID NO: 167109 - DNA, 74 bp, Homo sapiens
cagtggtacttggcaaatcagaaaaatcattcgtcttcaccatttcgctttaatactacaagcagaaaagatta

SEQ ID NO: 167110 - DNA, 71 bp, Homo sapiens
aatcattcgtcttcaccatttcgctttaatactacaagcagaaaagattaacctacacaaaagccaaactg

SEQ ID NO: 167111 - DNA, 71 bp, Homo sapiens
tcgtcttcaccatttcgctttaatactacaagcagaaaagattaacctacacaaaagccaaactgtcccag

SEQ ID NO: 167112 - DNA, 72 bp, Homo sapiens
atttcgctttaatactacaagcagaaaagattaacctacacaaaagccaaactgtcccaggccagagattca

SEQ ID NO: 167113 - DNA, 73 bp, Homo sapiens
taatactacaagcagaaaagattaacctacacaaaagccaaactgtcccaggccagagattcaaaactctgta

SEQ ID NO: 167114 - DNA, 69 bp, Homo sapiens
agaaaagattaacctacacaaaagccaaactgtcccaggccagagattcaaaactctgtaaaatcccag

SEQ ID NO: 167115 - DNA, 75 bp, Homo sapiens
acaaaagccaaactgtcccaggccagagattcaaaactctgtaaaatcccaggccagagccagattctcaagatg

SEQ ID NO: 167116 - DNA, 80 bp, Homo sapiens
tcccaggccagagattcaaaactctgtaaaatcccaggccagagccagattctcaagatggccacaatggcttattgcta

SEQ ID NO: 167117 - DNA, 81 bp, Homo sapiens
gagattcaaaactctgtaaaatcccaggccagagccagattctcaagatggccacaatggcttattgctattgtgcaagaa

SEQ ID NO: 167118 - DNA, 81 bp, Homo sapiens
aaaactctgtaaaatcccaggccagagccagattctcaagatggccacaatggcttattgctattgtgcaagaatgacata

SEQ ID NO: 167119 - DNA, 82 bp, Homo sapiens
atcccaggccagagccagattctcaagatggccacaatggcttattgctattgtgcaagaatgacataggccagcggtttaa

SEQ ID NO: 167120 - DNA, 84 bp, Homo sapiens
agagccagattctcaagatggccacaatggcttattgctattgtgcaagaatgacataggccagcggtttaattgtgacatgaa

SEQ ID NO: 167121 - DNA, 81 bp, Homo sapiens
attctcaagatggccacaatggcttattgctattgtgcaagaatgacataggccagcggtttaattgtgacatgaaatgtt

SEQ ID NO: 167122 - DNA, 83 bp, Homo sapiens
agatggccacaatggcttattgctattgtgcaagaatgacataggccagcggtttaattgtgacatgaaatgtttcctcatgc

SEQ ID NO: 167123 - DNA, 81 bp, Homo sapiens
aatggcttattgctattgtgcaagaatgacataggccagcggtttaattgtgacatgaaatgtttcctcatgccacaggta

SEQ ID NO: 167124 - DNA, 78 bp, Homo sapiens
ctattgtgcaagaatgacataggccagcggtttaattgtgacatgaaatgtttcctcatgccacaggtatgggaaaaa

SEQ ID NO: 167125 - DNA, 76 bp, Homo sapiens
aagaatgacataggccagcggtttaattgtgacatgaaatgtttcctcatgccacaggtatgggaaaaaggtcatg

SEQ ID NO: 167126 - DNA, 76 bp, Homo sapiens
gtttaattgtgacatgaaatgtttcctcatgccacaggtatgggaaaaaggtcatggttcatccaggctcctcctc

SEQ ID NO: 167127 - DNA, 76 bp, Homo sapiens
acatgaaatgtttcctcatgccacaggtatgggaaaaaggtcatggttcatccaggctcctcctccctctcacctg

SEQ ID NO: 167128 - DNA, 73 bp, Homo sapiens
acaggtatgggaaaaaggtcatggttcatccaggctcctcctccctctcacctgtctggagttcgcctcttcc

SEQ ID NO: 167129 - DNA, 74 bp, Homo sapiens
atggttcatccaggctcctcctccctctcacctgtctggagttcgcctcttcccgttttcgttcacatcgagaa

SEQ ID NO: 167130 - DNA, 76 bp, Homo sapiens
aggctcctcctccctctcacctgtctggagttcgcctcttcccgttttcgttcacatcgagaagcagctctgagga

SEQ ID NO: 167131 - DNA, 78 bp, Homo sapiens
tccctctcacctgtctggagttcgcctcttcccgttttcgttcacatcgagaagcagctctgaggagtcaacaggtga

SEQ ID NO: 167132 - DNA, 75 bp, Homo sapiens
acctgtctggagttcgcctcttcccgttttcgttcacatcgagaagcagctctgaggagtcaacaggtgaggtgg

SEQ ID NO: 167133 - DNA, 79 bp, Homo sapiens
agttcgcctcttcccgttttcgttcacatcgagaagcagctctgaggagtcaacaggtgaggtggtgctggcatccaga

SEQ ID NO: 167134 - DNA, 83 bp, Homo sapiens
tcttcccgttttcgttcacatcgagaagcagctctgaggagtcaacaggtgaggtggtgctggcatccagaagcagctgttca

SEQ ID NO: 167135 - DNA, 87 bp, Homo sapiens
ttcgttcacatcgagaagcagctctgaggagtcaacaggtgaggtggtgctggcatccagaagcagctgttcatgctgggcgaggta

SEQ ID NO: 167136 - DNA, 86 bp, Homo sapiens
atcgagaagcagctctgaggagtcaacaggtgaggtggtgctggcatccagaagcagctgttcatgctgggcgaggtactgggcag

SEQ ID NO: 167137 - DNA, 82 bp, Homo sapiens
tgaggagtcaacaggtgaggtggtgctggcatccagaagcagctgttcatgctgggcgaggtactgggcagggttctgtttg

SEQ ID NO: 167138 - DNA, 81 bp, Homo sapiens
agtcaacaggtgaggtggtgctggcatccagaagcagctgttcatgctgggcgaggtactgggcagggttctgtttggcca

SEQ ID NO: 167139 - DNA, 84 bp, Homo sapiens
tggtgctggcatccagaagcagctgttcatgctgggcgaggtactgggcagggttctgtttggccagtcttgcgcagtggagga

SEQ ID NO: 167140 - DNA, 82 bp, Homo sapiens
atccagaagcagctgttcatgctgggcgaggtactgggcagggttctgtttggccagtcttgcgcagtggaggagctcacgc

SEQ ID NO: 167141 - DNA, 84 bp, Homo sapiens
aagcagctgttcatgctgggcgaggtactgggcagggttctgtttggccagtcttgcgcagtggaggagctcacgctgcagcag

SEQ ID NO: 167142 - DNA, 82 bp, Homo sapiens
ttcatgctgggcgaggtactgggcagggttctgtttggccagtcttgcgcagtggaggagctcacgctgcagcaggggcaag

SEQ ID NO: 167143 - DNA, 80 bp, Homo sapiens
aggtactgggcagggttctgtttggccagtcttgcgcagtggaggagctcacgctgcagcaggggcaagttggcctgcaa

SEQ ID NO: 167144 - DNA, 80 bp, Homo sapiens
agggttctgtttggccagtcttgcgcagtggaggagctcacgctgcagcaggggcaagttggcctgcaagggaatgacag

SEQ ID NO: 167145 - DNA, 83 bp, Homo sapiens
ctgtttggccagtcttgcgcagtggaggagctcacgctgcagcaggggcaagttggcctgcaagggaatgacaggaatgagag

SEQ ID NO: 167146 - DNA, 70 bp, Homo sapiens
acatatctcatatgaccaaaaaaatgaacaaaacctttattcaaagagacttctaaactcttcttcaaac

SEQ ID NO: 167147 - DNA, 67 bp, Homo sapiens
catatgaccaaaaaaatgaacaaaacctttattcaaagagacttctaaactcttcttcaaactttac

SEQ ID NO: 167148 - DNA, 65 bp, Homo sapiens
aaatgaacaaaacctttattcaaagagacttctaaactcttcttcaaactttacttcttttcagg

SEQ ID NO: 167149 - DNA, 64 bp, Homo sapiens
aacaaaacctttattcaaagagacttctaaactcttcttcaaactttacttcttttcaggtaat

SEQ ID NO: 167150 - DNA, 65 bp, Homo sapiens
caaagagacttctaaactcttcttcaaactttacttcttttcaggtaattatttaaaacactcct

SEQ ID NO: 167151 - DNA, 66 bp, Homo sapiens
ctcttcttcaaactttacttcttttcaggtaattatttaaaacactccttgtaattttcagactac

SEQ ID NO: 167152 - DNA, 67 bp, Homo sapiens
tttacttcttttcaggtaattatttaaaacactccttgtaattttcagactacttaggaaatggtca

SEQ ID NO: 167153 - DNA, 70 bp, Homo sapiens
tcaggtaattatttaaaacactccttgtaattttcagactacttaggaaatggtcataaatacaatcgat

SEQ ID NO: 167154 - DNA, 70 bp, Homo sapiens
atttaaaacactccttgtaattttcagactacttaggaaatggtcataaatacaatcgattcagatagtt

SEQ ID NO: 167155 - DNA, 73 bp, Homo sapiens
aaacactccttgtaattttcagactacttaggaaatggtcataaatacaatcgattcagatagttttcatcca

SEQ ID NO: 167156 - DNA, 72 bp, Homo sapiens
gtaattttcagactacttaggaaatggtcataaatacaatcgattcagatagttttcatccattaaattaaa

SEQ ID NO: 167157 - DNA, 73 bp, Homo sapiens
gactacttaggaaatggtcataaatacaatcgattcagatagttttcatccattaaattaaatcaaagagccc

SEQ ID NO: 167158 - DNA, 73 bp, Homo sapiens
gaaatggtcataaatacaatcgattcagatagttttcatccattaaattaaatcaaagagcccctaaatgtac

SEQ ID NO: 167159 - DNA, 70 bp, Homo sapiens
ataaatacaatcgattcagatagttttcatccattaaattaaatcaaagagcccctaaatgtactaaaaa

SEQ ID NO: 167160 - DNA, 72 bp, Homo sapiens
tcagatagttttcatccattaaattaaatcaaagagcccctaaatgtactaaaaaagcacacagttatgacc

SEQ ID NO: 167161 - DNA, 73 bp, Homo sapiens
ttcatccattaaattaaatcaaagagcccctaaatgtactaaaaaagcacacagttatgacctagcaacaata

SEQ ID NO: 167162 - DNA, 71 bp, Homo sapiens
ccattaaattaaatcaaagagcccctaaatgtactaaaaaagcacacagttatgacctagcaacaatatgg

SEQ ID NO: 167163 - DNA, 70 bp, Homo sapiens
aatcaaagagcccctaaatgtactaaaaaagcacacagttatgacctagcaacaatatggtttaaaatac

SEQ ID NO: 167164 - DNA, 71 bp, Homo sapiens
aaatactttacagaccagtgaactgtgcaataccttcaaaaatgggatgacaaaaggtctcagtgggaagt

SEQ ID NO: 167165 - DNA, 73 bp, Homo sapiens
tttacagaccagtgaactgtgcaataccttcaaaaatgggatgacaaaaggtctcagtgggaagttagtagct

SEQ ID NO: 167166 - DNA, 73 bp, Homo sapiens
agtgaactgtgcaataccttcaaaaatgggatgacaaaaggtctcagtgggaagttagtagcttcttgcagtt

SEQ ID NO: 167167 - DNA, 71 bp, Homo sapiens
ataccttcaaaaatgggatgacaaaaggtctcagtgggaagttagtagcttcttgcagtttggaatgaaat

SEQ ID NO: 167168 - DNA, 71 bp, Homo sapiens
aaaaatgggatgacaaaaggtctcagtgggaagttagtagcttcttgcagtttggaatgaaattcttcaat

SEQ ID NO: 167169 - DNA, 74 bp, Homo sapiens
atgacaaaaggtctcagtgggaagttagtagcttcttgcagtttggaatgaaattcttcaattgtcaaagtgga

SEQ ID NO: 167170 - DNA, 75 bp, Homo sapiens
tcagtgggaagttagtagcttcttgcagtttggaatgaaattcttcaattgtcaaagtggagttctatggaagaa

SEQ ID NO: 167171 - DNA, 73 bp, Homo sapiens
ggaagttagtagcttcttgcagtttggaatgaaattcttcaattgtcaaagtggagttctatggaagaaaata

SEQ ID NO: 167172 - DNA, 74 bp, Homo sapiens
agcttcttgcagtttggaatgaaattcttcaattgtcaaagtggagttctatggaagaaaatatgtagtataaa

SEQ ID NO: 167173 - DNA, 67 bp, Homo sapiens
acactatcccttacaccaagaaaactgggttggtttccatttgcttaccactagtcccagaacgagg

SEQ ID NO: 167174 - DNA, 68 bp, Homo sapiens
tacaccaagaaaactgggttggtttccatttgcttaccactagtcccagaacgagggtgcgaactctt

SEQ ID NO: 167175 - DNA, 68 bp, Homo sapiens
agaaaactgggttggtttccatttgcttaccactagtcccagaacgagggtgcgaactctttctccta

SEQ ID NO: 167176 - DNA, 72 bp, Homo sapiens
gtttccatttgcttaccactagtcccagaacgagggtgcgaactctttctcctatctcgggtgaaatgtcat

SEQ ID NO: 167177 - DNA, 73 bp, Homo sapiens
atttgcttaccactagtcccagaacgagggtgcgaactctttctcctatctcgggtgaaatgtcattgccaaa

SEQ ID NO: 167178 - DNA, 76 bp, Homo sapiens
tagtcccagaacgagggtgcgaactctttctcctatctcgggtgaaatgtcattgccaaactgctgcagggtagta

SEQ ID NO: 167179 - DNA, 74 bp, Homo sapiens
agaacgagggtgcgaactctttctcctatctcgggtgaaatgtcattgccaaactgctgcagggtagtaaggaa

SEQ ID NO: 167180 - DNA, 74 bp, Homo sapiens
aactctttctcctatctcgggtgaaatgtcattgccaaactgctgcagggtagtaaggaaccttttcagcttgc

SEQ ID NO: 167181 - DNA, 77 bp, Homo sapiens
ttctcctatctcgggtgaaatgtcattgccaaactgctgcagggtagtaaggaaccttttcagcttgctgagttgcc

SEQ ID NO: 167182 - DNA, 78 bp, Homo sapiens
tcgggtgaaatgtcattgccaaactgctgcagggtagtaaggaaccttttcagcttgctgagttgcctggcaccacag

SEQ ID NO: 167183 - DNA, 80 bp, Homo sapiens
tgtcattgccaaactgctgcagggtagtaaggaaccttttcagcttgctgagttgcctggcaccacaggctgggggcagc

SEQ ID NO: 167184 - DNA, 78 bp, Homo sapiens
aactgctgcagggtagtaaggaaccttttcagcttgctgagttgcctggcaccacaggctgggggcagctgttgatta

SEQ ID NO: 167185 - DNA, 77 bp, Homo sapiens
agggtagtaaggaaccttttcagcttgctgagttgcctggcaccacaggctgggggcagctgttgattagccagaga

SEQ ID NO: 167186 - DNA, 79 bp, Homo sapiens
ggaaccttttcagcttgctgagttgcctggcaccacaggctgggggcagctgttgattagccagagaggaggaggaaga

SEQ ID NO: 167187 - DNA, 75 bp, Homo sapiens
ggaggaagaagaggaaggcccattgctgaagccattgggtggtgagggggcgccattcaaggctgtaggagaatg

SEQ ID NO: 167188 - DNA, 75 bp, Homo sapiens
aagaagaggaaggcccattgctgaagccattgggtggtgagggggcgccattcaaggctgtaggagaatggctcg

SEQ ID NO: 167189 - DNA, 78 bp, Homo sapiens
gaggaaggcccattgctgaagccattgggtggtgagggggcgccattcaaggctgtaggagaatggctcgtgccatta

SEQ ID NO: 167190 - DNA, 77 bp, Homo sapiens
aggcccattgctgaagccattgggtggtgagggggcgccattcaaggctgtaggagaatggctcgtgccattagtta

SEQ ID NO: 167191 - DNA, 79 bp, Homo sapiens
cattgctgaagccattgggtggtgagggggcgccattcaaggctgtaggagaatggctcgtgccattagttactgtcaa

SEQ ID NO: 167192 - DNA, 78 bp, Homo sapiens
attgctgaagccattgggtggtgagggggcgccattcaaggctgtaggagaatggctcgtgccattagttactgtcaa

SEQ ID NO: 167193 - DNA, 76 bp, Homo sapiens
attgggtggtgagggggcgccattcaaggctgtaggagaatggctcgtgccattagttactgtcaagagcacaaaa

SEQ ID NO: 167194 - DNA, 78 bp, Homo sapiens
ggtggtgagggggcgccattcaaggctgtaggagaatggctcgtgccattagttactgtcaagagcacaaaatcagaa

SEQ ID NO: 167195 - DNA, 78 bp, Homo sapiens
gtgagggggcgccattcaaggctgtaggagaatggctcgtgccattagttactgtcaagagcacaaaatcagaaggaa

SEQ ID NO: 167196 - DNA, 79 bp, Homo sapiens
ggcgccattcaaggctgtaggagaatggctcgtgccattagttactgtcaagagcacaaaatcagaaggaagtcataaa

SEQ ID NO: 167197 - DNA, 78 bp, Homo sapiens
ctgtaggagaatggctcgtgccattagttactgtcaagagcacaaaatcagaaggaagtcataaacttacagagaaca

SEQ ID NO: 167198 - DNA, 78 bp, Homo sapiens
attagttactgtcaagagcacaaaatcagaaggaagtcataaacttacagagaacatgcatgaggaaattgccaccaa

SEQ ID NO: 167199 - DNA, 78 bp, Homo sapiens
tactgtcaagagcacaaaatcagaaggaagtcataaacttacagagaacatgcatgaggaaattgccaccaagtttcc

SEQ ID NO: 167200 - DNA, 72 bp, Homo sapiens
aaaatcagaaggaagtcataaacttacagagaacatgcatgaggaaattgccaccaagtttcctacctttta

SEQ ID NO: 167201 - DNA, 71 bp, Homo sapiens
aacttacagagaacatgcatgaggaaattgccaccaagtttcctaccttttacatctactagttttataag

SEQ ID NO: 167202 - DNA, 70 bp, Homo sapiens
acagagaacatgcatgaggaaattgccaccaagtttcctaccttttacatctactagttttataagtttt

SEQ ID NO: 167203 - DNA, 69 bp, Homo sapiens
tgcatgaggaaattgccaccaagtttcctaccttttacatctactagttttataagtttttaaatgttg

SEQ ID NO: 167204 - DNA, 63 bp, Homo sapiens
gccaccaagtttcctaccttttacatctactagttttataagtttttaaatgttgggactttt

SEQ ID NO: 167205 - DNA, 61 bp, Homo sapiens
aagtttcctaccttttacatctactagttttataagtttttaaatgttgggactttttaaa

SEQ ID NO: 167206 - DNA, 65 bp, Homo sapiens
tagttttataagtttttaaatgttgggactttttaaaaatgcttggacttcacagggttactaca

SEQ ID NO: 167207 - DNA, 67 bp, Homo sapiens
gtttttaaatgttgggactttttaaaaatgcttggacttcacagggttactacattctcaggtactc

SEQ ID NO: 167208 - DNA, 70 bp, Homo sapiens
tgttgggactttttaaaaatgcttggacttcacagggttactacattctcaggtactctataactaaatg

SEQ ID NO: 167209 - DNA, 72 bp, Homo sapiens
tttaaaaatgcttggacttcacagggttactacattctcaggtactctataactaaatgggtctactcctca

SEQ ID NO: 167210 - DNA, 74 bp, Homo sapiens
aaatgcttggacttcacagggttactacattctcaggtactctataactaaatgggtctactcctcatactgag

SEQ ID NO: 167211 - DNA, 75 bp, Homo sapiens
acttcacagggttactacattctcaggtactctataactaaatgggtctactcctcatactgagtgatggtatcc

SEQ ID NO: 167212 - DNA, 81 bp, Homo sapiens
tacattctcaggtactctataactaaatgggtctactcctcatactgagtgatggtatcctgcacagaggctgacaataaa

SEQ ID NO: 167213 - DNA, 83 bp, Homo sapiens
aatgggtctactcctcatactgagtgatggtatcctgcacagaggctgacaataaatggagtctgctgcaacccagggccagc

SEQ ID NO: 167214 - DNA, 85 bp, Homo sapiens
tcctcatactgagtgatggtatcctgcacagaggctgacaataaatggagtctgctgcaacccagggccagccctgcctcccatg

SEQ ID NO: 167215 - DNA, 87 bp, Homo sapiens
agtgatggtatcctgcacagaggctgacaataaatggagtctgctgcaacccagggccagccctgcctcccatgtgcacatatgcca

SEQ ID NO: 167216 - DNA, 85 bp, Homo sapiens
tgcacagaggctgacaataaatggagtctgctgcaacccagggccagccctgcctcccatgtgcacatatgccaaccacctgaaa

SEQ ID NO: 167217 - DNA, 79 bp, Homo sapiens
aataaatggagtctgctgcaacccagggccagccctgcctcccatgtgcacatatgccaaccacctgaaatgtttcaaa

SEQ ID NO: 167218 - DNA, 81 bp, Homo sapiens
tctgctgcaacccagggccagccctgcctcccatgtgcacatatgccaaccacctgaaatgtttcaaaaatagaacagaca

SEQ ID NO: 167219 - DNA, 80 bp, Homo sapiens
gggccagccctgcctcccatgtgcacatatgccaaccacctgaaatgtttcaaaaatagaacagacagcttcggatgtca

SEQ ID NO: 167220 - DNA, 80 bp, Homo sapiens
tgcctcccatgtgcacatatgccaaccacctgaaatgtttcaaaaatagaacagacagcttcggatgtcagctttttgtc

SEQ ID NO: 167221 - DNA, 80 bp, Homo sapiens
tgtgcacatatgccaaccacctgaaatgtttcaaaaatagaacagacagcttcggatgtcagctttttgtcgcaggctta

SEQ ID NO: 167222 - DNA, 78 bp, Homo sapiens
tgccaaccacctgaaatgtttcaaaaatagaacagacagcttcggatgtcagctttttgtcgcaggcttacatcaata

SEQ ID NO: 167223 - DNA, 78 bp, Homo sapiens
tgaaatgtttcaaaaatagaacagacagcttcggatgtcagctttttgtcgcaggcttacatcaatataacaggacta

SEQ ID NO: 167224 - DNA, 76 bp, Homo sapiens
atagaacagacagcttcggatgtcagctttttgtcgcaggcttacatcaatataacaggactattcctttccaaac

SEQ ID NO: 167225 - DNA, 76 bp, Homo sapiens
ttcggatgtcagctttttgtcgcaggcttacatcaatataacaggactattcctttccaaactgctcccctagaga

SEQ ID NO: 167226 - DNA, 73 bp, Homo sapiens
agctttttgtcgcaggcttacatcaatataacaggactattcctttccaaactgctcccctagagaaagtgta

SEQ ID NO: 167227 - DNA, 74 bp, Homo sapiens
ttgtcgcaggcttacatcaatataacaggactattcctttccaaactgctcccctagagaaagtgtacatttgg

SEQ ID NO: 167228 - DNA, 71 bp, Homo sapiens
atcaatataacaggactattcctttccaaactgctcccctagagaaagtgtacatttggtggagactaaat

SEQ ID NO: 167229 - DNA, 72 bp, Homo sapiens
tataacaggactattcctttccaaactgctcccctagagaaagtgtacatttggtggagactaaatttatca

SEQ ID NO: 167230 - DNA, 70 bp, Homo sapiens
attcctttccaaactgctcccctagagaaagtgtacatttggtggagactaaatttatcattgaacattt

SEQ ID NO: 167231 - DNA, 73 bp, Homo sapiens
ccctagagaaagtgtacatttggtggagactaaatttatcattgaacatttttaatcatgttttgtacacaca

SEQ ID NO: 167232 - DNA, 76 bp, Homo sapiens
agtgtacatttggtggagactaaatttatcattgaacatttttaatcatgttttgtacacacaactgacagctgtg

SEQ ID NO: 167233 - DNA, 73 bp, Homo sapiens
cattgaacatttttaatcatgttttgtacacacaactgacagctgtgtttataggaataggactttcaagttt

SEQ ID NO: 167234 - DNA, 72 bp, Homo sapiens
ttaatcatgttttgtacacacaactgacagctgtgtttataggaataggactttcaagttttaaccttccac

SEQ ID NO: 167235 - DNA, 71 bp, Homo sapiens
ttgtacacacaactgacagctgtgtttataggaataggactttcaagttttaaccttccaccacccaatta

SEQ ID NO: 167236 - DNA, 65 bp, Homo sapiens
aataggactttcaagttttaaccttccaccacccaattagaaggctattttctccccctcatact

SEQ ID NO: 167237 - DNA, 65 bp, Homo sapiens
actttcaagttttaaccttccaccacccaattagaaggctattttctccccctcatacttcttaa

SEQ ID NO: 167238 - DNA, 65 bp, Homo sapiens
ttttaaccttccaccacccaattagaaggctattttctccccctcatacttcttaaccacttctt

SEQ ID NO: 167239 - DNA, 68 bp, Homo sapiens
cacccaattagaaggctattttctccccctcatacttcttaaccacttctttaggaaaaatgcatatt

SEQ ID NO: 167240 - DNA, 70 bp, Homo sapiens
ttagaaggctattttctccccctcatacttcttaaccacttctttaggaaaaatgcatattttatgtaca

SEQ ID NO: 167241 - DNA, 70 bp, Homo sapiens
ttctccccctcatacttcttaaccacttctttaggaaaaatgcatattttatgtacaaagccaaaatgga

SEQ ID NO: 167242 - DNA, 69 bp, Homo sapiens
accacttctttaggaaaaatgcatattttatgtacaaagccaaaatggatatggtgtttaacaaggagt

SEQ ID NO: 167243 - DNA, 70 bp, Homo sapiens
gcatattttatgtacaaagccaaaatggatatggtgtttaacaaggagttacttcaagaaatcaaaaagg

SEQ ID NO: 167244 - DNA, 69 bp, Homo sapiens
caaaatggatatggtgtttaacaaggagttacttcaagaaatcaaaaagggacacctaaatccagccaa

SEQ ID NO: 167245 - DNA, 71 bp, Homo sapiens
atatggtgtttaacaaggagttacttcaagaaatcaaaaagggacacctaaatccagccaagagcatggag

SEQ ID NO: 167246 - DNA, 72 bp, Homo sapiens
ttaacaaggagttacttcaagaaatcaaaaagggacacctaaatccagccaagagcatggagtggtgataat

SEQ ID NO: 167247 - DNA, 72 bp, Homo sapiens
agttacttcaagaaatcaaaaagggacacctaaatccagccaagagcatggagtggtgataattcagtaaat

SEQ ID NO: 167248 - DNA, 74 bp, Homo sapiens
aaatcaaaaagggacacctaaatccagccaagagcatggagtggtgataattcagtaaattcatttctgataaa

SEQ ID NO: 167249 - DNA, 78 bp, Homo sapiens
agagcatggagtggtgataattcagtaaattcatttctgataaaatttgtttgaacatcaagacgataatccctgtca

SEQ ID NO: 167250 - DNA, 76 bp, Homo sapiens
ggagtggtgataattcagtaaattcatttctgataaaatttgtttgaacatcaagacgataatccctgtcactctg

SEQ ID NO: 167251 - DNA, 74 bp, Homo sapiens
aaatttgtttgaacatcaagacgataatccctgtcactctgtaacccattaatatgtacattaataagtacata

SEQ ID NO: 167252 - DNA, 75 bp, Homo sapiens
tgtttgaacatcaagacgataatccctgtcactctgtaacccattaatatgtacattaataagtacataaaaaga

SEQ ID NO: 167253 - DNA, 72 bp, Homo sapiens
caagacgataatccctgtcactctgtaacccattaatatgtacattaataagtacataaaaagaaagcaaaa

SEQ ID NO: 167254 - DNA, 71 bp, Homo sapiens
ccctgtcactctgtaacccattaatatgtacattaataagtacataaaaagaaagcaaaaagttgataatc

SEQ ID NO: 167255 - DNA, 70 bp, Homo sapiens
ctgtaacccattaatatgtacattaataagtacataaaaagaaagcaaaaagttgataatccataagaac

SEQ ID NO: 167256 - DNA, 71 bp, Homo sapiens
ccattaatatgtacattaataagtacataaaaagaaagcaaaaagttgataatccataagaactagaatta

SEQ ID NO: 167257 - DNA, 72 bp, Homo sapiens
cataaaaagaaagcaaaaagttgataatccataagaactagaattaaaaatctgcatcgtttgcattaaaga

SEQ ID NO: 167258 - DNA, 73 bp, Homo sapiens
gaaagcaaaaagttgataatccataagaactagaattaaaaatctgcatcgtttgcattaaagaaaatgttga

SEQ ID NO: 167259 - DNA, 74 bp, Homo sapiens
aagttgataatccataagaactagaattaaaaatctgcatcgtttgcattaaagaaaatgttgattttatcatg

SEQ ID NO: 167260 - DNA, 74 bp, Homo sapiens
aatccataagaactagaattaaaaatctgcatcgtttgcattaaagaaaatgttgattttatcatgttaagtca

SEQ ID NO: 167261 - DNA, 71 bp, Homo sapiens
gaaaatgttgattttatcatgttaagtcaattaatttgataagcagacctttatcaaacccatctttttaa

SEQ ID NO: 167262 - DNA, 71 bp, Homo sapiens
gttgattttatcatgttaagtcaattaatttgataagcagacctttatcaaacccatctttttaatataat

SEQ ID NO: 167263 - DNA, 71 bp, Homo sapiens
catgttaagtcaattaatttgataagcagacctttatcaaacccatctttttaatataattttgatatagt

SEQ ID NO: 167264 - DNA, 70 bp, Homo sapiens
gtcaattaatttgataagcagacctttatcaaacccatctttttaatataattttgatatagtttgaaaa

SEQ ID NO: 167265 - DNA, 70 bp, Homo sapiens
tgataagcagacctttatcaaacccatctttttaatataattttgatatagtttgaaaatgttttaaaga

SEQ ID NO: 167266 - DNA, 69 bp, Homo sapiens
ctttatcaaacccatctttttaatataattttgatatagtttgaaaatgttttaaagaccatgttatgc

SEQ ID NO: 167267 - DNA, 69 bp, Homo sapiens
ccatctttttaatataattttgatatagtttgaaaatgttttaaagaccatgttatgcttaaaagttca

SEQ ID NO: 167268 - DNA, 70 bp, Homo sapiens
atataattttgatatagtttgaaaatgttttaaagaccatgttatgcttaaaagttcaattttgacataa

SEQ ID NO: 167269 - DNA, 70 bp, Homo sapiens
tgatatagtttgaaaatgttttaaagaccatgttatgcttaaaagttcaattttgacataataaaatggt

SEQ ID NO: 167270 - DNA, 71 bp, Homo sapiens
gaaaatgttttaaagaccatgttatgcttaaaagttcaattttgacataataaaatggttctcttgtcaca

SEQ ID NO: 167271 - DNA, 75 bp, Homo sapiens
taaagaccatgttatgcttaaaagttcaattttgacataataaaatggttctcttgtcacaactgagtatcataa

SEQ ID NO: 167272 - DNA, 75 bp, Homo sapiens
aaagttcaattttgacataataaaatggttctcttgtcacaactgagtatcataataacctgtcaagaaatgcca

SEQ ID NO: 167273 - DNA, 81 bp, Homo sapiens
aactgagtatcataataacctgtcaagaaatgccagctcaccaggacatctcacaggagacatatgcttacccctgtggct

SEQ ID NO: 167274 - DNA, 81 bp, Homo sapiens
tatcataataacctgtcaagaaatgccagctcaccaggacatctcacaggagacatatgcttacccctgtggctttgggta

SEQ ID NO: 167275 - DNA, 79 bp, Homo sapiens
taacctgtcaagaaatgccagctcaccaggacatctcacaggagacatatgcttacccctgtggctttgggtaacaaca

SEQ ID NO: 167276 - DNA, 77 bp, Homo sapiens
aatgccagctcaccaggacatctcacaggagacatatgcttacccctgtggctttgggtaacaacaaaccaaatata

SEQ ID NO: 167277 - DNA, 75 bp, Homo sapiens
accaggacatctcacaggagacatatgcttacccctgtggctttgggtaacaacaaaccaaatataagatgacac

SEQ ID NO: 167278 - DNA, 74 bp, Homo sapiens
tctcacaggagacatatgcttacccctgtggctttgggtaacaacaaaccaaatataagatgacacggttacaa

SEQ ID NO: 167279 - DNA, 71 bp, Homo sapiens
acatatgcttacccctgtggctttgggtaacaacaaaccaaatataagatgacacggttacaacttggcat

SEQ ID NO: 167280 - DNA, 72 bp, Homo sapiens
cccctgtggctttgggtaacaacaaaccaaatataagatgacacggttacaacttggcattgcacagtcacc

SEQ ID NO: 167281 - DNA, 75 bp, Homo sapiens
tttgggtaacaacaaaccaaatataagatgacacggttacaacttggcattgcacagtcacctgctccttacaca

SEQ ID NO: 167282 - DNA, 74 bp, Homo sapiens
aacaaaccaaatataagatgacacggttacaacttggcattgcacagtcacctgctccttacacatttggaaag

SEQ ID NO: 167283 - DNA, 74 bp, Homo sapiens
aatataagatgacacggttacaacttggcattgcacagtcacctgctccttacacatttggaaaggtcttttaa

SEQ ID NO: 167284 - DNA, 75 bp, Homo sapiens
agatgacacggttacaacttggcattgcacagtcacctgctccttacacatttggaaaggtcttttaaatggcag

SEQ ID NO: 167285 - DNA, 79 bp, Homo sapiens
tacaacttggcattgcacagtcacctgctccttacacatttggaaaggtcttttaaatggcagtgcaacactgcataaa

SEQ ID NO: 167286 - DNA, 81 bp, Homo sapiens
attgcacagtcacctgctccttacacatttggaaaggtcttttaaatggcagtgcaacactgcataaacagcctgagatgc

SEQ ID NO: 167287 - DNA, 76 bp, Homo sapiens
acctgctccttacacatttggaaaggtcttttaaatggcagtgcaacactgcataaacagcctgagatgcgtactt

SEQ ID NO: 167288 - DNA, 77 bp, Homo sapiens
tacacatttggaaaggtcttttaaatggcagtgcaacactgcataaacagcctgagatgcgtactttgctaatccct

SEQ ID NO: 167289 - DNA, 76 bp, Homo sapiens
aaaggtcttttaaatggcagtgcaacactgcataaacagcctgagatgcgtactttgctaatcccttatagtccca

SEQ ID NO: 167290 - DNA, 76 bp, Homo sapiens
agtgcaacactgcataaacagcctgagatgcgtactttgctaatcccttatagtcccaaagatctacttttgcctt

SEQ ID NO: 167291 - DNA, 72 bp, Homo sapiens
cataaacagcctgagatgcgtactttgctaatcccttatagtcccaaagatctacttttgccttttagttat

SEQ ID NO: 167292 - DNA, 71 bp, Homo sapiens
gcgtactttgctaatcccttatagtcccaaagatctacttttgccttttagttatttttcattcatatgga

SEQ ID NO: 167293 - DNA, 75 bp, Homo sapiens
tgctaatcccttatagtcccaaagatctacttttgccttttagttatttttcattcatatggatttcatggcaca

SEQ ID NO: 167294 - DNA, 75 bp, Homo sapiens
atagtcccaaagatctacttttgccttttagttatttttcattcatatggatttcatggcacatggtgtgcaaaa

SEQ ID NO: 167295 - DNA, 77 bp, Homo sapiens
aaagatctacttttgccttttagttatttttcattcatatggatttcatggcacatggtgtgcaaaatagctgcaac

SEQ ID NO: 167296 - DNA, 79 bp, Homo sapiens
atttttcattcatatggatttcatggcacatggtgtgcaaaatagctgcaaccgataacatttattagtttcacaattc

SEQ ID NO: 167297 - DNA, 82 bp, Homo sapiens
tcatatggatttcatggcacatggtgtgcaaaatagctgcaaccgataacatttattagtttcacaattccttgatgacaat

SEQ ID NO: 167298 - DNA, 75 bp, Homo sapiens
tggtgtgcaaaatagctgcaaccgataacatttattagtttcacaattccttgatgacaatttcaaccaggactt

SEQ ID NO: 167299 - DNA, 76 bp, Homo sapiens
tgcaaaatagctgcaaccgataacatttattagtttcacaattccttgatgacaatttcaaccaggactttgagat

SEQ ID NO: 167300 - DNA, 73 bp, Homo sapiens
ctgcaaccgataacatttattagtttcacaattccttgatgacaatttcaaccaggactttgagatttattaa

SEQ ID NO: 167301 - DNA, 71 bp, Homo sapiens
tttattagtttcacaattccttgatgacaatttcaaccaggactttgagatttattaaaacagttactcac

SEQ ID NO: 167302 - DNA, 74 bp, Homo sapiens
ttcacaattccttgatgacaatttcaaccaggactttgagatttattaaaacagttactcactatccctaatga

SEQ ID NO: 167303 - DNA, 73 bp, Homo sapiens
ccttgatgacaatttcaaccaggactttgagatttattaaaacagttactcactatccctaatgaaatacaca

SEQ ID NO: 167304 - DNA, 71 bp, Homo sapiens
gacaatttcaaccaggactttgagatttattaaaacagttactcactatccctaatgaaatacacaggaaa

SEQ ID NO: 167305 - DNA, 70 bp, Homo sapiens
ccaggactttgagatttattaaaacagttactcactatccctaatgaaatacacaggaaagaatgggaag

SEQ ID NO: 167306 - DNA, 74 bp, Homo sapiens
gatttattaaaacagttactcactatccctaatgaaatacacaggaaagaatgggaagttgcaattctgtcaga

SEQ ID NO: 167307 - DNA, 75 bp, Homo sapiens
taaaacagttactcactatccctaatgaaatacacaggaaagaatgggaagttgcaattctgtcagaattctcta

SEQ ID NO: 167308 - DNA, 73 bp, Homo sapiens
actatccctaatgaaatacacaggaaagaatgggaagttgcaattctgtcagaattctctatcctttcctttg

SEQ ID NO: 167309 - DNA, 74 bp, Homo sapiens
aggaaagaatgggaagttgcaattctgtcagaattctctatcctttcctttggactgtactgaaagcaatacac

SEQ ID NO: 167310 - DNA, 77 bp, Homo sapiens
aatgggaagttgcaattctgtcagaattctctatcctttcctttggactgtactgaaagcaatacactctattgaga

SEQ ID NO: 167311 - DNA, 76 bp, Homo sapiens
aattctgtcagaattctctatcctttcctttggactgtactgaaagcaatacactctattgagagaactcagaact

SEQ ID NO: 167312 - DNA, 78 bp, Homo sapiens
agaattctctatcctttcctttggactgtactgaaagcaatacactctattgagagaactcagaacttgagccaagca

SEQ ID NO: 167313 - DNA, 75 bp, Homo sapiens
atacactctattgagagaactcagaacttgagccaagcaggaatggagtaaagttttaataagagtctgacaggt

SEQ ID NO: 167314 - DNA, 76 bp, Homo sapiens
tattgagagaactcagaacttgagccaagcaggaatggagtaaagttttaataagagtctgacaggttcaagacaa

SEQ ID NO: 167315 - DNA, 73 bp, Homo sapiens
aactcagaacttgagccaagcaggaatggagtaaagttttaataagagtctgacaggttcaagacaagaaaga

SEQ ID NO: 167316 - DNA, 72 bp, Homo sapiens
ttgagccaagcaggaatggagtaaagttttaataagagtctgacaggttcaagacaagaaagacacgaccgg

SEQ ID NO: 167317 - DNA, 69 bp, Homo sapiens
aggaatggagtaaagttttaataagagtctgacaggttcaagacaagaaagacacgaccgggtgcggtg

SEQ ID NO: 167318 - DNA, 68 bp, Homo sapiens
agcgagattctgtcctccccctccacccaaaaaaaagggcaagaaaggcacttctcacttcagaaagt

SEQ ID NO: 167319 - DNA, 66 bp, Homo sapiens
attctgtcctccccctccacccaaaaaaaagggcaagaaaggcacttctcacttcagaaagttttc

SEQ ID NO: 167320 - DNA, 74 bp, Homo sapiens
ctccacccaaaaaaaagggcaagaaaggcacttctcacttcagaaagttttctgtatgatattgttgcatatca

SEQ ID NO: 167321 - DNA, 72 bp, Homo sapiens
aaaaaagggcaagaaaggcacttctcacttcagaaagttttctgtatgatattgttgcatatcaataccctt

SEQ ID NO: 167322 - DNA, 75 bp, Homo sapiens
ggcaagaaaggcacttctcacttcagaaagttttctgtatgatattgttgcatatcaataccctttttaacacaa

SEQ ID NO: 167323 - DNA, 75 bp, Homo sapiens
aggcacttctcacttcagaaagttttctgtatgatattgttgcatatcaataccctttttaacacaaggatatta

SEQ ID NO: 167324 - DNA, 73 bp, Homo sapiens
cacttcagaaagttttctgtatgatattgttgcatatcaataccctttttaacacaaggatattatattttaa

SEQ ID NO: 167325 - DNA, 74 bp, Homo sapiens
tctgtatgatattgttgcatatcaataccctttttaacacaaggatattatattttaacattatttgtaaccac

SEQ ID NO: 167326 - DNA, 73 bp, Homo sapiens
ctgtatgatattgttgcatatcaataccctttttaacacaaggatattatattttaacattatttgtaaccac

SEQ ID NO: 167327 - DNA, 73 bp, Homo sapiens
atgatattgttgcatatcaataccctttttaacacaaggatattatattttaacattatttgtaaccacttga

SEQ ID NO: 167328 - DNA, 73 bp, Homo sapiens
ttgcatatcaataccctttttaacacaaggatattatattttaacattatttgtaaccacttgaaatagatga

SEQ ID NO: 167329 - DNA, 73 bp, Homo sapiens
tgcatatcaataccctttttaacacaaggatattatattttaacattatttgtaaccacttgaaatagatgaa

SEQ ID NO: 167330 - DNA, 68 bp, Homo sapiens
ccctttttaacacaaggatattatattttaacattatttgtaaccacttgaaatagatgaaaatggtg

SEQ ID NO: 167331 - DNA, 70 bp, Homo sapiens
caaggatattatattttaacattatttgtaaccacttgaaatagatgaaaatggtgttagaagaagtaac

SEQ ID NO: 167332 - DNA, 71 bp, Homo sapiens
gatattatattttaacattatttgtaaccacttgaaatagatgaaaatggtgttagaagaagtaacctaga

SEQ ID NO: 167333 - DNA, 69 bp, Homo sapiens
atattttaacattatttgtaaccacttgaaatagatgaaaatggtgttagaagaagtaacctagaaata

SEQ ID NO: 167334 - DNA, 72 bp, Homo sapiens
taacattatttgtaaccacttgaaatagatgaaaatggtgttagaagaagtaacctagaaataataatagca

SEQ ID NO: 167335 - DNA, 73 bp, Homo sapiens
ttgtaaccacttgaaatagatgaaaatggtgttagaagaagtaacctagaaataataatagcacatttccatg

SEQ ID NO: 167336 - DNA, 78 bp, Homo sapiens
tgaaatagatgaaaatggtgttagaagaagtaacctagaaataataatagcacatttccatgttccaagtcatgctga

SEQ ID NO: 167337 - DNA, 75 bp, Homo sapiens
tgaaaatggtgttagaagaagtaacctagaaataataatagcacatttccatgttccaagtcatgctgaacaaac

SEQ ID NO: 167338 - DNA, 73 bp, Homo sapiens
ggtgttagaagaagtaacctagaaataataatagcacatttccatgttccaagtcatgctgaacaaactaaaa

SEQ ID NO: 167339 - DNA, 75 bp, Homo sapiens
agtaacctagaaataataatagcacatttccatgttccaagtcatgctgaacaaactaaaataaagagctccaca

SEQ ID NO: 167340 - DNA, 76 bp, Homo sapiens
cacatttccatgttccaagtcatgctgaacaaactaaaataaagagctccacattaagatgaattagaagttacag

SEQ ID NO: 167341 - DNA, 76 bp, Homo sapiens
catgttccaagtcatgctgaacaaactaaaataaagagctccacattaagatgaattagaagttacagtggtaaca

SEQ ID NO: 167342 - DNA, 75 bp, Homo sapiens
caagtcatgctgaacaaactaaaataaagagctccacattaagatgaattagaagttacagtggtaacaactgga

SEQ ID NO: 167343 - DNA, 72 bp, Homo sapiens
caaactaaaataaagagctccacattaagatgaattagaagttacagtggtaacaactggaattacagacca

SEQ ID NO: 167344 - DNA, 74 bp, Homo sapiens
aaataaagagctccacattaagatgaattagaagttacagtggtaacaactggaattacagaccaaatgctgct

SEQ ID NO: 167345 - DNA, 76 bp, Homo sapiens
tccacattaagatgaattagaagttacagtggtaacaactggaattacagaccaaatgctgcttcatttgctaaaa

SEQ ID NO: 167346 - DNA, 78 bp, Homo sapiens
aagatgaattagaagttacagtggtaacaactggaattacagaccaaatgctgcttcatttgctaaaatcatagcaga

SEQ ID NO: 167347 - DNA, 78 bp, Homo sapiens
agttacagtggtaacaactggaattacagaccaaatgctgcttcatttgctaaaatcatagcagactgcaacttcgaa

SEQ ID NO: 167348 - DNA, 80 bp, Homo sapiens
taacaactggaattacagaccaaatgctgcttcatttgctaaaatcatagcagactgcaacttcgaagcaataatgaaaa

SEQ ID NO: 167349 - DNA, 79 bp, Homo sapiens
aattacagaccaaatgctgcttcatttgctaaaatcatagcagactgcaacttcgaagcaataatgaaaaggaaggcaa

SEQ ID NO: 167350 - DNA, 79 bp, Homo sapiens
agaccaaatgctgcttcatttgctaaaatcatagcagactgcaacttcgaagcaataatgaaaaggaaggcaaatattg

SEQ ID NO: 167351 - DNA, 80 bp, Homo sapiens
tcatttgctaaaatcatagcagactgcaacttcgaagcaataatgaaaaggaaggcaaatattggcagtcacacaaatta

SEQ ID NO: 167352 - DNA, 77 bp, Homo sapiens
aaaatcatagcagactgcaacttcgaagcaataatgaaaaggaaggcaaatattggcagtcacacaaattagaccta

SEQ ID NO: 167353 - DNA, 77 bp, Homo sapiens
agactgcaacttcgaagcaataatgaaaaggaaggcaaatattggcagtcacacaaattagacctaagctatgatac

SEQ ID NO: 167354 - DNA, 75 bp, Homo sapiens
aacttcgaagcaataatgaaaaggaaggcaaatattggcagtcacacaaattagacctaagctatgatacttctg

SEQ ID NO: 167355 - DNA, 77 bp, Homo sapiens
taatgaaaaggaaggcaaatattggcagtcacacaaattagacctaagctatgatacttctgtgctcagtacctact

SEQ ID NO: 167356 - DNA, 75 bp, Homo sapiens
aaaaggaaggcaaatattggcagtcacacaaattagacctaagctatgatacttctgtgctcagtacctacttac

SEQ ID NO: 167357 - DNA, 78 bp, Homo sapiens
aatattggcagtcacacaaattagacctaagctatgatacttctgtgctcagtacctacttactggcaaacaaatgat

SEQ ID NO: 167358 - DNA, 74 bp, Homo sapiens
agtcacacaaattagacctaagctatgatacttctgtgctcagtacctacttactggcaaacaaatgatttttt

SEQ ID NO: 167359 - DNA, 73 bp, Homo sapiens
aattagacctaagctatgatacttctgtgctcagtacctacttactggcaaacaaatgattttttttggttca

SEQ ID NO: 167360 - DNA, 77 bp, Homo sapiens
agctatgatacttctgtgctcagtacctacttactggcaaacaaatgattttttttggttcatttctgcataataca

SEQ ID NO: 167361 - DNA, 78 bp, Homo sapiens
ttctgtgctcagtacctacttactggcaaacaaatgattttttttggttcatttctgcataatacattgatgctgaat

SEQ ID NO: 167362 - DNA, 74 bp, Homo sapiens
cagtacctacttactggcaaacaaatgattttttttggttcatttctgcataatacattgatgctgaattttat

SEQ ID NO: 167363 - DNA, 75 bp, Homo sapiens
atgattttttttggttcatttctgcataatacattgatgctgaattttattttcccttgatttttcatttgcaga

SEQ ID NO: 167364 - DNA, 73 bp, Homo sapiens
tttttggttcatttctgcataatacattgatgctgaattttattttcccttgatttttcatttgcagaaaaaa

SEQ ID NO: 167365 - DNA, 73 bp, Homo sapiens
tcatttctgcataatacattgatgctgaattttattttcccttgatttttcatttgcagaaaaaaatttaatt

SEQ ID NO: 167366 - DNA, 67 bp, Homo sapiens
tcatttgcagaaaaaaatttaatttaaactttaaaactgaaactcaaaagcctgaaatgactactta

SEQ ID NO: 167367 - DNA, 63 bp, Homo sapiens
aaaaaatttaatttaaactttaaaactgaaactcaaaagcctgaaatgactacttacacgttg

SEQ ID NO: 167368 - DNA, 67 bp, Homo sapiens
aatttaaactttaaaactgaaactcaaaagcctgaaatgactacttacacgttgtcggtgtaaatga

SEQ ID NO: 167369 - DNA, 72 bp, Homo sapiens
aactcaaaagcctgaaatgactacttacacgttgtcggtgtaaatgaactggttcttggagctccttgagta

SEQ ID NO: 167370 - DNA, 71 bp, Homo sapiens
aaagcctgaaatgactacttacacgttgtcggtgtaaatgaactggttcttggagctccttgagtagttgg

SEQ ID NO: 167371 - DNA, 72 bp, Homo sapiens
atgactacttacacgttgtcggtgtaaatgaactggttcttggagctccttgagtagttgggggaggtggca

SEQ ID NO: 167372 - DNA, 71 bp, Homo sapiens
acacgttgtcggtgtaaatgaactggttcttggagctccttgagtagttgggggaggtggcattgttggag

SEQ ID NO: 167373 - DNA, 74 bp, Homo sapiens
gtgtaaatgaactggttcttggagctccttgagtagttgggggaggtggcattgttggaggagtcagcctagat

SEQ ID NO: 167374 - DNA, 78 bp, Homo sapiens
agctccttgagtagttgggggaggtggcattgttggaggagtcagcctagattgcgtcttcacatccacaggtgagtc

SEQ ID NO: 167375 - DNA, 79 bp, Homo sapiens
agtagttgggggaggtggcattgttggaggagtcagcctagattgcgtcttcacatccacaggtgagtctggcattgtg

SEQ ID NO: 167376 - DNA, 83 bp, Homo sapiens
aggtggcattgttggaggagtcagcctagattgcgtcttcacatccacaggtgagtctggcattgtggagtgcttctcagtac

SEQ ID NO: 167377 - DNA, 84 bp, Homo sapiens
attgttggaggagtcagcctagattgcgtcttcacatccacaggtgagtctggcattgtggagtgcttctcagtacgatctgga

SEQ ID NO: 167378 - DNA, 86 bp, Homo sapiens
tcagcctagattgcgtcttcacatccacaggtgagtctggcattgtggagtgcttctcagtacgatctggaggatgccaccaggaa

SEQ ID NO: 167379 - DNA, 84 bp, Homo sapiens
attgcgtcttcacatccacaggtgagtctggcattgtggagtgcttctcagtacgatctggaggatgccaccaggaacatatta

SEQ ID NO: 167380 - DNA, 82 bp, Homo sapiens
cttcacatccacaggtgagtctggcattgtggagtgcttctcagtacgatctggaggatgccaccaggaacatattatttta

SEQ ID NO: 167381 - DNA, 78 bp, Homo sapiens
agtctggcattgtggagtgcttctcagtacgatctggaggatgccaccaggaacatattattttactccttaagcacc

SEQ ID NO: 167382 - DNA, 76 bp, Homo sapiens
attgtggagtgcttctcagtacgatctggaggatgccaccaggaacatattattttactccttaagcacctcagtt

SEQ ID NO: 167383 - DNA, 75 bp, Homo sapiens
agtgcttctcagtacgatctggaggatgccaccaggaacatattattttactccttaagcacctcagtttttcaa

SEQ ID NO: 167384 - DNA, 74 bp, Homo sapiens
cttctcagtacgatctggaggatgccaccaggaacatattattttactccttaagcacctcagtttttcaagtg

SEQ ID NO: 167385 - DNA, 71 bp, Homo sapiens
tacgatctggaggatgccaccaggaacatattattttactccttaagcacctcagtttttcaagtggggtt

SEQ ID NO: 167386 - DNA, 71 bp, Homo sapiens
cgatctggaggatgccaccaggaacatattattttactccttaagcacctcagtttttcaagtggggttta

SEQ ID NO: 167387 - DNA, 68 bp, Homo sapiens
aggatgccaccaggaacatattattttactccttaagcacctcagtttttcaagtggggtttatcttt

SEQ ID NO: 167388 - DNA, 68 bp, Homo sapiens
gatgccaccaggaacatattattttactccttaagcacctcagtttttcaagtggggtttatcttttt

SEQ ID NO: 167389 - DNA, 66 bp, Homo sapiens
ggaacatattattttactccttaagcacctcagtttttcaagtggggtttatcttttttaaaagca

SEQ ID NO: 167390 - DNA, 69 bp, Homo sapiens
gcacctcagtttttcaagtggggtttatcttttttaaaagcaagtgaacagaagaaattcaacatcttc

SEQ ID NO: 167391 - DNA, 72 bp, Homo sapiens
tttttaaaagcaagtgaacagaagaaattcaacatcttctatcaataaaatacacttatctactgacgttta

SEQ ID NO: 167392 - DNA, 74 bp, Homo sapiens
agcaagtgaacagaagaaattcaacatcttctatcaataaaatacacttatctactgacgtttaaatcaggatt

SEQ ID NO: 167393 - DNA, 75 bp, Homo sapiens
cagaagaaattcaacatcttctatcaataaaatacacttatctactgacgtttaaatcaggattttatcatccaa

SEQ ID NO: 167394 - DNA, 69 bp, Homo sapiens
atcaataaaatacacttatctactgacgtttaaatcaggattttatcatccaaaccccacttaagaagg

SEQ ID NO: 167395 - DNA, 74 bp, Homo sapiens
ttaaatcaggattttatcatccaaaccccacttaagaaggtatagcacagatggcaggacctcatttgtaacta

SEQ ID NO: 167396 - DNA, 73 bp, Homo sapiens
ttttatcatccaaaccccacttaagaaggtatagcacagatggcaggacctcatttgtaactaggttatatta

SEQ ID NO: 167397 - DNA, 73 bp, Homo sapiens
atccaaaccccacttaagaaggtatagcacagatggcaggacctcatttgtaactaggttatattatatccta

SEQ ID NO: 167398 - DNA, 73 bp, Homo sapiens
cccacttaagaaggtatagcacagatggcaggacctcatttgtaactaggttatattatatcctattgttatt

SEQ ID NO: 167399 - DNA, 76 bp, Homo sapiens
aaggtatagcacagatggcaggacctcatttgtaactaggttatattatatcctattgttatttctggcttaggca

SEQ ID NO: 167400 - DNA, 76 bp, Homo sapiens
acagatggcaggacctcatttgtaactaggttatattatatcctattgttatttctggcttaggcagatgctacct

SEQ ID NO: 167401 - DNA, 78 bp, Homo sapiens
tcatttgtaactaggttatattatatcctattgttatttctggcttaggcagatgctaccttggtagtgttatatgca

SEQ ID NO: 167402 - DNA, 80 bp, Homo sapiens
taactaggttatattatatcctattgttatttctggcttaggcagatgctaccttggtagtgttatatgcagcagcacaa

SEQ ID NO: 167403 - DNA, 83 bp, Homo sapiens
ttatattatatcctattgttatttctggcttaggcagatgctaccttggtagtgttatatgcagcagcacaactgcactggaa

SEQ ID NO: 167404 - DNA, 84 bp, Homo sapiens
ttgttatttctggcttaggcagatgctaccttggtagtgttatatgcagcagcacaactgcactggaagctgaagccaatgtta

SEQ ID NO: 167405 - DNA, 85 bp, Homo sapiens
atttctggcttaggcagatgctaccttggtagtgttatatgcagcagcacaactgcactggaagctgaagccaatgttagcaaga

SEQ ID NO: 167406 - DNA, 84 bp, Homo sapiens
taggcagatgctaccttggtagtgttatatgcagcagcacaactgcactggaagctgaagccaatgttagcaagaggtagaaaa

SEQ ID NO: 167407 - DNA, 82 bp, Homo sapiens
ctaccttggtagtgttatatgcagcagcacaactgcactggaagctgaagccaatgttagcaagaggtagaaaatagatgag

SEQ ID NO: 167408 - DNA, 86 bp, Homo sapiens
tatatgcagcagcacaactgcactggaagctgaagccaatgttagcaagaggtagaaaatagatgaggaagtgggatgataatgaa

SEQ ID NO: 167409 - DNA, 79 bp, Homo sapiens
agcacaactgcactggaagctgaagccaatgttagcaagaggtagaaaatagatgaggaagtgggatgataatgaaccc

SEQ ID NO: 167410 - DNA, 78 bp, Homo sapiens
aactgcactggaagctgaagccaatgttagcaagaggtagaaaatagatgaggaagtgggatgataatgaacccctca

SEQ ID NO: 167411 - DNA, 80 bp, Homo sapiens
tgaagccaatgttagcaagaggtagaaaatagatgaggaagtgggatgataatgaacccctcatgacagctcagaaataa

SEQ ID NO: 167412 - DNA, 77 bp, Homo sapiens
aatgttagcaagaggtagaaaatagatgaggaagtgggatgataatgaacccctcatgacagctcagaaataacaaa

SEQ ID NO: 167413 - DNA, 75 bp, Homo sapiens
aaaatagatgaggaagtgggatgataatgaacccctcatgacagctcagaaataacaaaaacctgaagtctgtta

SEQ ID NO: 167414 - DNA, 79 bp, Homo sapiens
atgataatgaacccctcatgacagctcagaaataacaaaaacctgaagtctgttatgcaggtgagatactggtaggagc

SEQ ID NO: 167415 - DNA, 81 bp, Homo sapiens
tcatgacagctcagaaataacaaaaacctgaagtctgttatgcaggtgagatactggtaggagccagctctttgtaatgat

SEQ ID NO: 167416 - DNA, 75 bp, Homo sapiens
aataacaaaaacctgaagtctgttatgcaggtgagatactggtaggagccagctctttgtaatgattttctctta

SEQ ID NO: 167417 - DNA, 78 bp, Homo sapiens
acctgaagtctgttatgcaggtgagatactggtaggagccagctctttgtaatgattttctcttacacctgccatccc

SEQ ID NO: 167418 - DNA, 81 bp, Homo sapiens
tgttatgcaggtgagatactggtaggagccagctctttgtaatgattttctcttacacctgccatccctgtgctgtcctta

SEQ ID NO: 167419 - DNA, 76 bp, Homo sapiens
agatactggtaggagccagctctttgtaatgattttctcttacacctgccatccctgtgctgtccttagttttctg

SEQ ID NO: 167420 - DNA, 78 bp, Homo sapiens
gagccagctctttgtaatgattttctcttacacctgccatccctgtgctgtccttagttttctggcctattagatgaa

SEQ ID NO: 167421 - DNA, 74 bp, Homo sapiens
tttgtaatgattttctcttacacctgccatccctgtgctgtccttagttttctggcctattagatgaaataggt

SEQ ID NO: 167422 - DNA, 73 bp, Homo sapiens
attttctcttacacctgccatccctgtgctgtccttagttttctggcctattagatgaaataggttatcgtct

SEQ ID NO: 167423 - DNA, 76 bp, Homo sapiens
ttacacctgccatccctgtgctgtccttagttttctggcctattagatgaaataggttatcgtcttccaggcatat

SEQ ID NO: 167424 - DNA, 76 bp, Homo sapiens
tccctgtgctgtccttagttttctggcctattagatgaaataggttatcgtcttccaggcatatttcgcatttcaa

SEQ ID NO: 167425 - DNA, 72 bp, Homo sapiens
agttttctggcctattagatgaaataggttatcgtcttccaggcatatttcgcatttcaatttttcctgccc

SEQ ID NO: 167426 - DNA, 71 bp, Homo sapiens
cctattagatgaaataggttatcgtcttccaggcatatttcgcatttcaatttttcctgccctgttttaaa

SEQ ID NO: 167427 - DNA, 71 bp, Homo sapiens
aaataggttatcgtcttccaggcatatttcgcatttcaatttttcctgccctgttttaaaaatcactgcta

SEQ ID NO: 167428 - DNA, 73 bp, Homo sapiens
atcgtcttccaggcatatttcgcatttcaatttttcctgccctgttttaaaaatcactgctacataggtgaaa

SEQ ID NO: 167429 - DNA, 74 bp, Homo sapiens
aggcatatttcgcatttcaatttttcctgccctgttttaaaaatcactgctacataggtgaaatgtgttataca

SEQ ID NO: 167430 - DNA, 72 bp, Homo sapiens
cctgccctgttttaaaaatcactgctacataggtgaaatgtgttatacaatgaagtgaaactattatttact

SEQ ID NO: 167431 - DNA, 71 bp, Homo sapiens
tttaaaaatcactgctacataggtgaaatgtgttatacaatgaagtgaaactattatttacttaaaaggtg

SEQ ID NO: 167432 - DNA, 74 bp, Homo sapiens
tcactgctacataggtgaaatgtgttatacaatgaagtgaaactattatttacttaaaaggtgtaaatttatga

SEQ ID NO: 167433 - DNA, 72 bp, Homo sapiens
cataggtgaaatgtgttatacaatgaagtgaaactattatttacttaaaaggtgtaaatttatgacctgcca

SEQ ID NO: 167434 - DNA, 70 bp, Homo sapiens
tgttatacaatgaagtgaaactattatttacttaaaaggtgtaaatttatgacctgccattttaaaagca

SEQ ID NO: 167435 - DNA, 69 bp, Homo sapiens
atgaagtgaaactattatttacttaaaaggtgtaaatttatgacctgccattttaaaagcatgaaacca

SEQ ID NO: 167436 - DNA, 68 bp, Homo sapiens
ctattatttacttaaaaggtgtaaatttatgacctgccattttaaaagcatgaaaccaatactccaat

SEQ ID NO: 167437 - DNA, 71 bp, Homo sapiens
aggtgtaaatttatgacctgccattttaaaagcatgaaaccaatactccaattaataatctcaaacagagt

SEQ ID NO: 167438 - DNA, 72 bp, Homo sapiens
agcatgaaaccaatactccaattaataatctcaaacagagttaagaatgtaaaagtcccaaacagagaacta

SEQ ID NO: 167439 - DNA, 71 bp, Homo sapiens
ataatctcaaacagagttaagaatgtaaaagtcccaaacagagaactaaaaagaactagacactgctaata

SEQ ID NO: 167440 - DNA, 69 bp, Homo sapiens
ctcaaacagagttaagaatgtaaaagtcccaaacagagaactaaaaagaactagacactgctaatattt

SEQ ID NO: 167441 - DNA, 75 bp, Homo sapiens
aagtcccaaacagagaactaaaaagaactagacactgctaatatttttttcatgagtatgtggcagatatgaaga

SEQ ID NO: 167442 - DNA, 76 bp, Homo sapiens
cagagaactaaaaagaactagacactgctaatatttttttcatgagtatgtggcagatatgaagaaatttcctgat

SEQ ID NO: 167443 - DNA, 76 bp, Homo sapiens
aagaactagacactgctaatatttttttcatgagtatgtggcagatatgaagaaatttcctgattacccaataatg

SEQ ID NO: 167444 - DNA, 79 bp, Homo sapiens
ctagacactgctaatatttttttcatgagtatgtggcagatatgaagaaatttcctgattacccaataatggacattca

SEQ ID NO: 167445 - DNA, 78 bp, Homo sapiens
atttttttcatgagtatgtggcagatatgaagaaatttcctgattacccaataatggacattcatacttcagaactgc

SEQ ID NO: 167446 - DNA, 82 bp, Homo sapiens
ttcatgagtatgtggcagatatgaagaaatttcctgattacccaataatggacattcatacttcagaactgctgtaagtata

SEQ ID NO: 167447 - DNA, 77 bp, Homo sapiens
atgtggcagatatgaagaaatttcctgattacccaataatggacattcatacttcagaactgctgtaagtatacttt

SEQ ID NO: 167448 - DNA, 75 bp, Homo sapiens
tgaagaaatttcctgattacccaataatggacattcatacttcagaactgctgtaagtatacttttcccttgaca

SEQ ID NO: 167449 - DNA, 75 bp, Homo sapiens
tgattacccaataatggacattcatacttcagaactgctgtaagtatacttttcccttgacattctgaactgttt

SEQ ID NO: 167450 - DNA, 73 bp, Homo sapiens
acccaataatggacattcatacttcagaactgctgtaagtatacttttcccttgacattctgaactgtttttc

SEQ ID NO: 167451 - DNA, 76 bp, Homo sapiens
ggacattcatacttcagaactgctgtaagtatacttttcccttgacattctgaactgtttttctcaatctaatcta

SEQ ID NO: 167452 - DNA, 75 bp, Homo sapiens
cagaactgctgtaagtatacttttcccttgacattctgaactgtttttctcaatctaatctacttatcaaagcaa

SEQ ID NO: 167453 - DNA, 75 bp, Homo sapiens
tttcccttgacattctgaactgtttttctcaatctaatctacttatcaaagcaacagaccttttgatctgttcaa

SEQ ID NO: 167454 - DNA, 75 bp, Homo sapiens
tctcaatctaatctacttatcaaagcaacagaccttttgatctgttcaaagcaatttcttaacactttggttata

SEQ ID NO: 167455 - DNA, 71 bp, Homo sapiens
ctacttatcaaagcaacagaccttttgatctgttcaaagcaatttcttaacactttggttataataaacat

SEQ ID NO: 167456 - DNA, 66 bp, Homo sapiens
agcaatttcttaacactttggttataataaacatttaaaagttgaaataattttggtatcatttta

SEQ ID NO: 167457 - DNA, 68 bp, Homo sapiens
cactttggttataataaacatttaaaagttgaaataattttggtatcattttaaggaagctgcaataa

SEQ ID NO: 167458 - DNA, 68 bp, Homo sapiens
gttataataaacatttaaaagttgaaataattttggtatcattttaaggaagctgcaataaaagaata

SEQ ID NO: 167459 - DNA, 72 bp, Homo sapiens
gttgaaataattttggtatcattttaaggaagctgcaataaaagaataaaaataatcatcattcaaataaga

SEQ ID NO: 167460 - DNA, 77 bp, Homo sapiens
ttttggtatcattttaaggaagctgcaataaaagaataaaaataatcatcattcaaataagagcatttgcacgatga

SEQ ID NO: 167461 - DNA, 79 bp, Homo sapiens
cattttaaggaagctgcaataaaagaataaaaataatcatcattcaaataagagcatttgcacgatgagctagtcaaca

SEQ ID NO: 167462 - DNA, 83 bp, Homo sapiens
taaggaagctgcaataaaagaataaaaataatcatcattcaaataagagcatttgcacgatgagctagtcaacagcagtatca

SEQ ID NO: 167463 - DNA, 82 bp, Homo sapiens
aaggaagctgcaataaaagaataaaaataatcatcattcaaataagagcatttgcacgatgagctagtcaacagcagtatca

SEQ ID NO: 167464 - DNA, 83 bp, Homo sapiens
gcaataaaagaataaaaataatcatcattcaaataagagcatttgcacgatgagctagtcaacagcagtatcagagtctctat

SEQ ID NO: 167465 - DNA, 81 bp, Homo sapiens
ataaaaataatcatcattcaaataagagcatttgcacgatgagctagtcaacagcagtatcagagtctctatttttggttc

SEQ ID NO: 167466 - DNA, 80 bp, Homo sapiens
aaaataatcatcattcaaataagagcatttgcacgatgagctagtcaacagcagtatcagagtctctatttttggttctt

SEQ ID NO: 167467 - DNA, 82 bp, Homo sapiens
aataatcatcattcaaataagagcatttgcacgatgagctagtcaacagcagtatcagagtctctatttttggttctttaga

SEQ ID NO: 167468 - DNA, 80 bp, Homo sapiens
attcaaataagagcatttgcacgatgagctagtcaacagcagtatcagagtctctatttttggttctttagatctaattc

SEQ ID NO: 167469 - DNA, 80 bp, Homo sapiens
aataagagcatttgcacgatgagctagtcaacagcagtatcagagtctctatttttggttctttagatctaattctttca

SEQ ID NO: 167470 - DNA, 79 bp, Homo sapiens
acgatgagctagtcaacagcagtatcagagtctctatttttggttctttagatctaattctttcacaaatgtgtaggca

SEQ ID NO: 167471 - DNA, 79 bp, Homo sapiens
agtcaacagcagtatcagagtctctatttttggttctttagatctaattctttcacaaatgtgtaggcacgcacatgaa

SEQ ID NO: 167472 - DNA, 79 bp, Homo sapiens
agtatcagagtctctatttttggttctttagatctaattctttcacaaatgtgtaggcacgcacatgaacacacacaca

SEQ ID NO: 167473 - DNA, 80 bp, Homo sapiens
tttcacaaatgtgtaggcacgcacatgaacacacacacacccaacgtattttgaggcacctcttgcagttatagacacaa

SEQ ID NO: 167474 - DNA, 81 bp, Homo sapiens
aatgtgtaggcacgcacatgaacacacacacacccaacgtattttgaggcacctcttgcagttatagacacaaatatctca

SEQ ID NO: 167475 - DNA, 77 bp, Homo sapiens
tgaacacacacacacccaacgtattttgaggcacctcttgcagttatagacacaaatatctcacacttgggctttta

SEQ ID NO: 167476 - DNA, 73 bp, Homo sapiens
acacacccaacgtattttgaggcacctcttgcagttatagacacaaatatctcacacttgggcttttagaaaa

SEQ ID NO: 167477 - DNA, 73 bp, Homo sapiens
aggcacctcttgcagttatagacacaaatatctcacacttgggcttttagaaaagtgaagtaactattaagaa

SEQ ID NO: 167478 - DNA, 72 bp, Homo sapiens
gcagttatagacacaaatatctcacacttgggcttttagaaaagtgaagtaactattaagaaagaacaagcc

SEQ ID NO: 167479 - DNA, 69 bp, Homo sapiens
gacacaaatatctcacacttgggcttttagaaaagtgaagtaactattaagaaagaacaagcctttaaa

SEQ ID NO: 167480 - DNA, 67 bp, Homo sapiens
atatctcacacttgggcttttagaaaagtgaagtaactattaagaaagaacaagcctttaaaaatgt

SEQ ID NO: 167481 - DNA, 66 bp, Homo sapiens
ggcttttagaaaagtgaagtaactattaagaaagaacaagcctttaaaaatgttataataaccaca

SEQ ID NO: 167482 - DNA, 69 bp, Homo sapiens
aagtgaagtaactattaagaaagaacaagcctttaaaaatgttataataaccacagtgagaaaatctca

SEQ ID NO: 167483 - DNA, 69 bp, Homo sapiens
gtaactattaagaaagaacaagcctttaaaaatgttataataaccacagtgagaaaatctcaaaatcac

SEQ ID NO: 167484 - DNA, 69 bp, Homo sapiens
gaaagaacaagcctttaaaaatgttataataaccacagtgagaaaatctcaaaatcacttaaaggtcaa

SEQ ID NO: 167485 - DNA, 70 bp, Homo sapiens
gcctttaaaaatgttataataaccacagtgagaaaatctcaaaatcacttaaaggtcaattattgaaaga

SEQ ID NO: 167486 - DNA, 66 bp, Homo sapiens
agaaaaagaaaaacccaaattactactataacaattccaaatctacctcacttttgttcaaagcaa

SEQ ID NO: 167487 - DNA, 68 bp, Homo sapiens
aaacccaaattactactataacaattccaaatctacctcacttttgttcaaagcaattgcttaacact

SEQ ID NO: 167488 - DNA, 71 bp, Homo sapiens
aacaattccaaatctacctcacttttgttcaaagcaattgcttaacacttgggttgcaataaaacacaaca

SEQ ID NO: 167489 - DNA, 69 bp, Homo sapiens
cctcacttttgttcaaagcaattgcttaacacttgggttgcaataaaacacaacatttaaaagttgaaa

SEQ ID NO: 167490 - DNA, 73 bp, Homo sapiens
tcaaagcaattgcttaacacttgggttgcaataaaacacaacatttaaaagttgaaataatgttgatatcact

SEQ ID NO: 167491 - DNA, 71 bp, Homo sapiens
ttgcttaacacttgggttgcaataaaacacaacatttaaaagttgaaataatgttgatatcactttaggga

SEQ ID NO: 167492 - DNA, 74 bp, Homo sapiens
tgggttgcaataaaacacaacatttaaaagttgaaataatgttgatatcactttagggaagatgcaataagaga

SEQ ID NO: 167493 - DNA, 73 bp, Homo sapiens
ggttgcaataaaacacaacatttaaaagttgaaataatgttgatatcactttagggaagatgcaataagagaa

SEQ ID NO: 167494 - DNA, 73 bp, Homo sapiens
caataaaacacaacatttaaaagttgaaataatgttgatatcactttagggaagatgcaataagagaatgaaa

SEQ ID NO: 167495 - DNA, 76 bp, Homo sapiens
cacaacatttaaaagttgaaataatgttgatatcactttagggaagatgcaataagagaatgaaaataatcatcat

SEQ ID NO: 167496 - DNA, 76 bp, Homo sapiens
caacatttaaaagttgaaataatgttgatatcactttagggaagatgcaataagagaatgaaaataatcatcattc

SEQ ID NO: 167497 - DNA, 77 bp, Homo sapiens
aagttgaaataatgttgatatcactttagggaagatgcaataagagaatgaaaataatcatcattctaataagagta

SEQ ID NO: 167498 - DNA, 80 bp, Homo sapiens
gaaataatgttgatatcactttagggaagatgcaataagagaatgaaaataatcatcattctaataagagtatttgcaca

SEQ ID NO: 167499 - DNA, 80 bp, Homo sapiens
gatatcactttagggaagatgcaataagagaatgaaaataatcatcattctaataagagtatttgcacaataagctgtta

SEQ ID NO: 167500 - DNA, 78 bp, Homo sapiens
cactttagggaagatgcaataagagaatgaaaataatcatcattctaataagagtatttgcacaataagctgttatta

SEQ ID NO: 167501 - DNA, 78 bp, Homo sapiens
ttagggaagatgcaataagagaatgaaaataatcatcattctaataagagtatttgcacaataagctgttattattat

SEQ ID NO: 167502 - DNA, 78 bp, Homo sapiens
attattattattgatgagttaacagcaatatcagggtctccatttctgaatctatacttctggctgaataacaacgga

SEQ ID NO: 167503 - DNA, 80 bp, Homo sapiens
tattgatgagttaacagcaatatcagggtctccatttctgaatctatacttctggctgaataacaacggatgtccctata

SEQ ID NO: 167504 - DNA, 75 bp, Homo sapiens
aatctatacttctggctgaataacaacggatgtccctatagtgaataaaagtgttctgagtgaaaggatggtaga

SEQ ID NO: 167505 - DNA, 78 bp, Homo sapiens
ttctggctgaataacaacggatgtccctatagtgaataaaagtgttctgagtgaaaggatggtagagacacacatgaa

SEQ ID NO: 167506 - DNA, 76 bp, Homo sapiens
aataacaacggatgtccctatagtgaataaaagtgttctgagtgaaaggatggtagagacacacatgaagagcatt

SEQ ID NO: 167507 - DNA, 77 bp, Homo sapiens
tccctatagtgaataaaagtgttctgagtgaaaggatggtagagacacacatgaagagcattttcacctttatctat

SEQ ID NO: 167508 - DNA, 78 bp, Homo sapiens
tatagtgaataaaagtgttctgagtgaaaggatggtagagacacacatgaagagcattttcacctttatctattgtta

SEQ ID NO: 167509 - DNA, 76 bp, Homo sapiens
agtgaataaaagtgttctgagtgaaaggatggtagagacacacatgaagagcattttcacctttatctattgttaa

SEQ ID NO: 167510 - DNA, 73 bp, Homo sapiens
aaaagtgttctgagtgaaaggatggtagagacacacatgaagagcattttcacctttatctattgttaaaaac

SEQ ID NO: 167511 - DNA, 77 bp, Homo sapiens
tctgagtgaaaggatggtagagacacacatgaagagcattttcacctttatctattgttaaaaacttgtcttcagat

SEQ ID NO: 167512 - DNA, 76 bp, Homo sapiens
aaaggatggtagagacacacatgaagagcattttcacctttatctattgttaaaaacttgtcttcagattgctaca

SEQ ID NO: 167513 - DNA, 76 bp, Homo sapiens
tagagacacacatgaagagcattttcacctttatctattgttaaaaacttgtcttcagattgctacaaccagtaag

SEQ ID NO: 167514 - DNA, 76 bp, Homo sapiens
agacacacatgaagagcattttcacctttatctattgttaaaaacttgtcttcagattgctacaaccagtaagtca

SEQ ID NO: 167515 - DNA, 71 bp, Homo sapiens
tttcacctttatctattgttaaaaacttgtcttcagattgctacaaccagtaagtcacttattctagaaaa

SEQ ID NO: 167516 - DNA, 72 bp, Homo sapiens
aacttgtcttcagattgctacaaccagtaagtcacttattctagaaaaatacagaagttaggcaggcttaaa

SEQ ID NO: 167517 - DNA, 70 bp, Homo sapiens
agattgctacaaccagtaagtcacttattctagaaaaatacagaagttaggcaggcttaaaaccgcttct

SEQ ID NO: 167518 - DNA, 68 bp, Homo sapiens
aaccagtaagtcacttattctagaaaaatacagaagttaggcaggcttaaaaccgcttcttcaacagt

SEQ ID NO: 167519 - DNA, 72 bp, Homo sapiens
tcacttattctagaaaaatacagaagttaggcaggcttaaaaccgcttcttcaacagttaaattcatttgca

SEQ ID NO: 167520 - DNA, 71 bp, Homo sapiens
ctagaaaaatacagaagttaggcaggcttaaaaccgcttcttcaacagttaaattcatttgcacattctac

SEQ ID NO: 167521 - DNA, 73 bp, Homo sapiens
gttaggcaggcttaaaaccgcttcttcaacagttaaattcatttgcacattctactcacctcaaccaacctca

SEQ ID NO: 167522 - DNA, 72 bp, Homo sapiens
cttaaaaccgcttcttcaacagttaaattcatttgcacattctactcacctcaaccaacctcagcaacaagg

SEQ ID NO: 167523 - DNA, 74 bp, Homo sapiens
ttaaattcatttgcacattctactcacctcaaccaacctcagcaacaagggaataaatagcttcccacttatgt

SEQ ID NO: 167524 - DNA, 77 bp, Homo sapiens
atttgcacattctactcacctcaaccaacctcagcaacaagggaataaatagcttcccacttatgttgcagctgagg

SEQ ID NO: 167525 - DNA, 76 bp, Homo sapiens
aaccaacctcagcaacaagggaataaatagcttcccacttatgttgcagctgagggaagaggtacagcagcaaata

SEQ ID NO: 167526 - DNA, 75 bp, Homo sapiens
aacaagggaataaatagcttcccacttatgttgcagctgagggaagaggtacagcagcaaatacaagtctcccta

SEQ ID NO: 167527 - DNA, 74 bp, Homo sapiens
aataaatagcttcccacttatgttgcagctgagggaagaggtacagcagcaaatacaagtctccctaaataaag

SEQ ID NO: 167528 - DNA, 74 bp, Homo sapiens
cttcccacttatgttgcagctgagggaagaggtacagcagcaaatacaagtctccctaaataaaggcaaatatt

SEQ ID NO: 167529 - DNA, 79 bp, Homo sapiens
ttatgttgcagctgagggaagaggtacagcagcaaatacaagtctccctaaataaaggcaaatatttctgtcatgccaa

SEQ ID NO: 167530 - DNA, 73 bp, Homo sapiens
agggaagaggtacagcagcaaatacaagtctccctaaataaaggcaaatatttctgtcatgccaaggagggag

SEQ ID NO: 167531 - DNA, 72 bp, Homo sapiens
aggtacagcagcaaatacaagtctccctaaataaaggcaaatatttctgtcatgccaaggagggagggaaaa

SEQ ID NO: 167532 - DNA, 69 bp, Homo sapiens
agcaaatacaagtctccctaaataaaggcaaatatttctgtcatgccaaggagggagggaaaaagggag

SEQ ID NO: 167533 - DNA, 70 bp, Homo sapiens
agtctccctaaataaaggcaaatatttctgtcatgccaaggagggagggaaaaagggaggcttgccagag

SEQ ID NO: 167534 - DNA, 73 bp, Homo sapiens
taaaggcaaatatttctgtcatgccaaggagggagggaaaaagggaggcttgccagagtcggctgggagataa

SEQ ID NO: 167535 - DNA, 73 bp, Homo sapiens
atatttctgtcatgccaaggagggagggaaaaagggaggcttgccagagtcggctgggagataacagtgggaa

SEQ ID NO: 167536 - DNA, 73 bp, Homo sapiens
atgccaaggagggagggaaaaagggaggcttgccagagtcggctgggagataacagtgggaactgctggtcca

SEQ ID NO: 167537 - DNA, 72 bp, Homo sapiens
agggaaaaagggaggcttgccagagtcggctgggagataacagtgggaactgctggtccatctggttttcat

SEQ ID NO: 167538 - DNA, 75 bp, Homo sapiens
aaaagggaggcttgccagagtcggctgggagataacagtgggaactgctggtccatctggttttcattctgctaa

SEQ ID NO: 167539 - DNA, 77 bp, Homo sapiens
cagagtcggctgggagataacagtgggaactgctggtccatctggttttcattctgctaacactcacacggaactgt

SEQ ID NO: 167540 - DNA, 78 bp, Homo sapiens
acagtgggaactgctggtccatctggttttcattctgctaacactcacacggaactgttagagaaggcagtccagata

SEQ ID NO: 167541 - DNA, 78 bp, Homo sapiens
aactgctggtccatctggttttcattctgctaacactcacacggaactgttagagaaggcagtccagatacacagatt

SEQ ID NO: 167542 - DNA, 78 bp, Homo sapiens
tctggttttcattctgctaacactcacacggaactgttagagaaggcagtccagatacacagatttgaagcacgtggt

SEQ ID NO: 167543 - DNA, 81 bp, Homo sapiens
ttttcattctgctaacactcacacggaactgttagagaaggcagtccagatacacagatttgaagcacgtggttgcacaga

SEQ ID NO: 167544 - DNA, 79 bp, Homo sapiens
ctaacactcacacggaactgttagagaaggcagtccagatacacagatttgaagcacgtggttgcacagacagagaaag

SEQ ID NO: 167545 - DNA, 79 bp, Homo sapiens
acacggaactgttagagaaggcagtccagatacacagatttgaagcacgtggttgcacagacagagaaaggaagagcag

SEQ ID NO: 167546 - DNA, 78 bp, Homo sapiens
gttagagaaggcagtccagatacacagatttgaagcacgtggttgcacagacagagaaaggaagagcaggagggggag

SEQ ID NO: 167547 - DNA, 72 bp, Homo sapiens
agatttgaagcacgtggttgcacagacagagaaaggaagagcaggagggggaggggaagtgggagtaacaaa

SEQ ID NO: 167548 - DNA, 69 bp, Homo sapiens
cacgtggttgcacagacagagaaaggaagagcaggagggggaggggaagtgggagtaacaaaaaaataa

SEQ ID NO: 167549 - DNA, 68 bp, Homo sapiens
aaaaagaagaggaggaaaaagaacaaaatagagagacaagagcctgatgggggagtaagttaccctca

SEQ ID NO: 167550 - DNA, 69 bp, Homo sapiens
ggaggaaaaagaacaaaatagagagacaagagcctgatgggggagtaagttaccctcaacagcttcctt

SEQ ID NO: 167551 - DNA, 70 bp, Homo sapiens
aaagaacaaaatagagagacaagagcctgatgggggagtaagttaccctcaacagcttcctttaccctca

SEQ ID NO: 167552 - DNA, 72 bp, Homo sapiens
aaatagagagacaagagcctgatgggggagtaagttaccctcaacagcttcctttaccctcagtgtctacaa

SEQ ID NO: 167553 - DNA, 71 bp, Homo sapiens
agcctgatgggggagtaagttaccctcaacagcttcctttaccctcagtgtctacaagctggaccttaatg

SEQ ID NO: 167554 - DNA, 72 bp, Homo sapiens
ggggagtaagttaccctcaacagcttcctttaccctcagtgtctacaagctggaccttaatgtgcacagccc

SEQ ID NO: 167555 - DNA, 72 bp, Homo sapiens
taagttaccctcaacagcttcctttaccctcagtgtctacaagctggaccttaatgtgcacagccccctacc

SEQ ID NO: 167556 - DNA, 75 bp, Homo sapiens
tcaacagcttcctttaccctcagtgtctacaagctggaccttaatgtgcacagccccctacctgactcaagttta

SEQ ID NO: 167557 - DNA, 74 bp, Homo sapiens
acagcttcctttaccctcagtgtctacaagctggaccttaatgtgcacagccccctacctgactcaagtttata

SEQ ID NO: 167558 - DNA, 74 bp, Homo sapiens
tcctttaccctcagtgtctacaagctggaccttaatgtgcacagccccctacctgactcaagtttatagagtta

SEQ ID NO: 167559 - DNA, 73 bp, Homo sapiens
tttaccctcagtgtctacaagctggaccttaatgtgcacagccccctacctgactcaagtttatagagttaag

SEQ ID NO: 167560 - DNA, 78 bp, Homo sapiens
tcagtgtctacaagctggaccttaatgtgcacagccccctacctgactcaagtttatagagttaaggagcaatatcta

SEQ ID NO: 167561 - DNA, 75 bp, Homo sapiens
tctacaagctggaccttaatgtgcacagccccctacctgactcaagtttatagagttaaggagcaatatctaaac

SEQ ID NO: 167562 - DNA, 73 bp, Homo sapiens
aagctggaccttaatgtgcacagccccctacctgactcaagtttatagagttaaggagcaatatctaaactta

SEQ ID NO: 167563 - DNA, 72 bp, Homo sapiens
ctggaccttaatgtgcacagccccctacctgactcaagtttatagagttaaggagcaatatctaaacttaaa

SEQ ID NO: 167564 - DNA, 74 bp, Homo sapiens
ttaatgtgcacagccccctacctgactcaagtttatagagttaaggagcaatatctaaacttaaacatatttga

SEQ ID NO: 167565 - DNA, 71 bp, Homo sapiens
acagccccctacctgactcaagtttatagagttaaggagcaatatctaaacttaaacatatttgaaggcta

SEQ ID NO: 167566 - DNA, 69 bp, Homo sapiens
ccctacctgactcaagtttatagagttaaggagcaatatctaaacttaaacatatttgaaggctatttt

SEQ ID NO: 167567 - DNA, 69 bp, Homo sapiens
ctcaagtttatagagttaaggagcaatatctaaacttaaacatatttgaaggctatttttctttcctaa

SEQ ID NO: 167568 - DNA, 62 bp, Homo sapiens
acttaaacatatttgaaggctatttttctttcctaaaatagaccaccctaaaaaaaataaac

SEQ ID NO: 167569 - DNA, 64 bp, Homo sapiens
ttgaaggctatttttctttcctaaaatagaccaccctaaaaaaaataaactataaatttgacaa

SEQ ID NO: 167570 - DNA, 63 bp, Homo sapiens
gaccaccctaaaaaaaataaactataaatttgacaataagtttcctcctcaattttaagtttg

SEQ ID NO: 167571 - DNA, 65 bp, Homo sapiens
aaaaataaactataaatttgacaataagtttcctcctcaattttaagtttgtatttaagataatc

SEQ ID NO: 167572 - DNA, 69 bp, Homo sapiens
gacaataagtttcctcctcaattttaagtttgtatttaagataatctttgtattcctatcttcttccca

SEQ ID NO: 167573 - DNA, 68 bp, Homo sapiens
tcctcctcaattttaagtttgtatttaagataatctttgtattcctatcttcttcccaattttagaaa

SEQ ID NO: 167574 - DNA, 66 bp, Homo sapiens
ctcaattttaagtttgtatttaagataatctttgtattcctatcttcttcccaattttagaaagtt

SEQ ID NO: 167575 - DNA, 68 bp, Homo sapiens
gtttgtatttaagataatctttgtattcctatcttcttcccaattttagaaagtttttggtatattca

SEQ ID NO: 167576 - DNA, 70 bp, Homo sapiens
gataatctttgtattcctatcttcttcccaattttagaaagtttttggtatattcataattttgatttga

SEQ ID NO: 167577 - DNA, 70 bp, Homo sapiens
gtattcctatcttcttcccaattttagaaagtttttggtatattcataattttgatttgaaaacatctga

SEQ ID NO: 167578 - DNA, 70 bp, Homo sapiens
tcttcccaattttagaaagtttttggtatattcataattttgatttgaaaacatctgaatattgtcttgg

SEQ ID NO: 167579 - DNA, 72 bp, Homo sapiens
tttagaaagtttttggtatattcataattttgatttgaaaacatctgaatattgtcttggtccacacttgta

SEQ ID NO: 167580 - DNA, 74 bp, Homo sapiens
ttttggtatattcataattttgatttgaaaacatctgaatattgtcttggtccacacttgtaacgactcctatc

SEQ ID NO: 167581 - DNA, 76 bp, Homo sapiens
attcataattttgatttgaaaacatctgaatattgtcttggtccacacttgtaacgactcctatccagaacagcaa

SEQ ID NO: 167582 - DNA, 79 bp, Homo sapiens
aaacatctgaatattgtcttggtccacacttgtaacgactcctatccagaacagcaacatcatcatccatagattattt

SEQ ID NO: 167583 - DNA, 76 bp, Homo sapiens
aatattgtcttggtccacacttgtaacgactcctatccagaacagcaacatcatcatccatagattatttttttaa

SEQ ID NO: 167584 - DNA, 76 bp, Homo sapiens
ttggtccacacttgtaacgactcctatccagaacagcaacatcatcatccatagattatttttttaattcttgaaa

SEQ ID NO: 167585 - DNA, 77 bp, Homo sapiens
cttgtaacgactcctatccagaacagcaacatcatcatccatagattatttttttaattcttgaaatgtcaacaata

SEQ ID NO: 167586 - DNA, 79 bp, Homo sapiens
gaacagcaacatcatcatccatagattatttttttaattcttgaaatgtcaacaataactacagagacaatgtatagga

SEQ ID NO: 167587 - DNA, 76 bp, Homo sapiens
tcatcatccatagattatttttttaattcttgaaatgtcaacaataactacagagacaatgtataggaaacaccac

SEQ ID NO: 167588 - DNA, 72 bp, Homo sapiens
gattatttttttaattcttgaaatgtcaacaataactacagagacaatgtataggaaacaccactacttcta

SEQ ID NO: 167589 - DNA, 77 bp, Homo sapiens
aatgtcaacaataactacagagacaatgtataggaaacaccactacttctaataggaatatgaacattctagccaga

SEQ ID NO: 167590 - DNA, 77 bp, Homo sapiens
acaataactacagagacaatgtataggaaacaccactacttctaataggaatatgaacattctagccagaatatatg

SEQ ID NO: 167591 - DNA, 82 bp, Homo sapiens
acagagacaatgtataggaaacaccactacttctaataggaatatgaacattctagccagaatatatgtatatgtgcatata

SEQ ID NO: 167592 - DNA, 79 bp, Homo sapiens
gtataggaaacaccactacttctaataggaatatgaacattctagccagaatatatgtatatgtgcatatattcagggt

SEQ ID NO: 167593 - DNA, 83 bp, Homo sapiens
tagccagaatatatgtatatgtgcatatattcagggtttttacattagccaaatttctgcaatggttagcttcactctgatca

SEQ ID NO: 167594 - DNA, 80 bp, Homo sapiens
tatgtatatgtgcatatattcagggtttttacattagccaaatttctgcaatggttagcttcactctgatcaaatggagt

SEQ ID NO: 167595 - DNA, 79 bp, Homo sapiens
atatgtgcatatattcagggtttttacattagccaaatttctgcaatggttagcttcactctgatcaaatggagttcca

SEQ ID NO: 167596 - DNA, 76 bp, Homo sapiens
atattcagggtttttacattagccaaatttctgcaatggttagcttcactctgatcaaatggagttccagcccaga

SEQ ID NO: 167597 - DNA, 76 bp, Homo sapiens
ttttacattagccaaatttctgcaatggttagcttcactctgatcaaatggagttccagcccagaggtcctacaaa

SEQ ID NO: 167598 - DNA, 76 bp, Homo sapiens
aaatttctgcaatggttagcttcactctgatcaaatggagttccagcccagaggtcctacaaactgagacaaagtg

SEQ ID NO: 167599 - DNA, 77 bp, Homo sapiens
atggttagcttcactctgatcaaatggagttccagcccagaggtcctacaaactgagacaaagtgggaccatatgta

SEQ ID NO: 167600 - DNA, 79 bp, Homo sapiens
agttccagcccagaggtcctacaaactgagacaaagtgggaccatatgtaactcattctgtgctgttcagtgcaatcaa

SEQ ID NO: 167601 - DNA, 83 bp, Homo sapiens
aactgagacaaagtgggaccatatgtaactcattctgtgctgttcagtgcaatcaatccaggatggagatagatggtgaaata

SEQ ID NO: 167602 - DNA, 82 bp, Homo sapiens
agacaaagtgggaccatatgtaactcattctgtgctgttcagtgcaatcaatccaggatggagatagatggtgaaataacca

SEQ ID NO: 167603 - DNA, 84 bp, Homo sapiens
atatgtaactcattctgtgctgttcagtgcaatcaatccaggatggagatagatggtgaaataaccagccaggcctaatccaca

SEQ ID NO: 167604 - DNA, 85 bp, Homo sapiens
taactcattctgtgctgttcagtgcaatcaatccaggatggagatagatggtgaaataaccagccaggcctaatccacatacaca

SEQ ID NO: 167605 - DNA, 85 bp, Homo sapiens
tgttcagtgcaatcaatccaggatggagatagatggtgaaataaccagccaggcctaatccacatacacatgaacactctctgga

SEQ ID NO: 167606 - DNA, 84 bp, Homo sapiens
aatcaatccaggatggagatagatggtgaaataaccagccaggcctaatccacatacacatgaacactctctggagcacagaga

SEQ ID NO: 167607 - DNA, 83 bp, Homo sapiens
ggatggagatagatggtgaaataaccagccaggcctaatccacatacacatgaacactctctggagcacagagatttaagata

SEQ ID NO: 167608 - DNA, 82 bp, Homo sapiens
agatagatggtgaaataaccagccaggcctaatccacatacacatgaacactctctggagcacagagatttaagataaatgc

SEQ ID NO: 167609 - DNA, 78 bp, Homo sapiens
aaataaccagccaggcctaatccacatacacatgaacactctctggagcacagagatttaagataaatgcggaaaatg

SEQ ID NO: 167610 - DNA, 80 bp, Homo sapiens
aggcctaatccacatacacatgaacactctctggagcacagagatttaagataaatgcggaaaatgtgtttcaagtatgc

SEQ ID NO: 167611 - DNA, 80 bp, Homo sapiens
atgaacactctctggagcacagagatttaagataaatgcggaaaatgtgtttcaagtatgctgagccctgttgcatttgt

SEQ ID NO: 167612 - DNA, 79 bp, Homo sapiens
tctggagcacagagatttaagataaatgcggaaaatgtgtttcaagtatgctgagccctgttgcatttgttttggatta

SEQ ID NO: 167613 - DNA, 72 bp, Homo sapiens
ttaagataaatgcggaaaatgtgtttcaagtatgctgagccctgttgcatttgttttggattatttaaaaac

SEQ ID NO: 167614 - DNA, 70 bp, Homo sapiens
gtgtttcaagtatgctgagccctgttgcatttgttttggattatttaaaaactttttttgaaatatatat

SEQ ID NO: 167615 - DNA, 70 bp, Homo sapiens
ttatttaaaaactttttttgaaatatatattcttgaaacttttatagcaaacagcacaagcaagctgatt

SEQ ID NO: 167616 - DNA, 74 bp, Homo sapiens
actttttttgaaatatatattcttgaaacttttatagcaaacagcacaagcaagctgatttaaccacagaagca

SEQ ID NO: 167617 - DNA, 77 bp, Homo sapiens
gaaatatatattcttgaaacttttatagcaaacagcacaagcaagctgatttaaccacagaagcatttcactccatt

SEQ ID NO: 167618 - DNA, 77 bp, Homo sapiens
ttcttgaaacttttatagcaaacagcacaagcaagctgatttaaccacagaagcatttcactccatttcaaattaga

SEQ ID NO: 167619 - DNA, 78 bp, Homo sapiens
tttatagcaaacagcacaagcaagctgatttaaccacagaagcatttcactccatttcaaattagaggacatggtaaa

SEQ ID NO: 167620 - DNA, 75 bp, Homo sapiens
cacaagcaagctgatttaaccacagaagcatttcactccatttcaaattagaggacatggtaaaaccaatattaa

SEQ ID NO: 167621 - DNA, 74 bp, Homo sapiens
caagcaagctgatttaaccacagaagcatttcactccatttcaaattagaggacatggtaaaaccaatattaag

SEQ ID NO: 167622 - DNA, 73 bp, Homo sapiens
caagctgatttaaccacagaagcatttcactccatttcaaattagaggacatggtaaaaccaatattaagtta

SEQ ID NO: 167623 - DNA, 71 bp, Homo sapiens
aaccacagaagcatttcactccatttcaaattagaggacatggtaaaaccaatattaagttataatatttc

SEQ ID NO: 167624 - DNA, 71 bp, Homo sapiens
agcatttcactccatttcaaattagaggacatggtaaaaccaatattaagttataatatttcttatataat

SEQ ID NO: 167625 - DNA, 69 bp, Homo sapiens
ttcactccatttcaaattagaggacatggtaaaaccaatattaagttataatatttcttatataatttt

SEQ ID NO: 167626 - DNA, 68 bp, Homo sapiens
tccatttcaaattagaggacatggtaaaaccaatattaagttataatatttcttatataattttttaa

SEQ ID NO: 167627 - DNA, 69 bp, Homo sapiens
ttaagttataatatttcttatataattttttaagttcatggaaattatagtgtcctggtatgtaatttc

SEQ ID NO: 167628 - DNA, 67 bp, Homo sapiens
aatatttcttatataattttttaagttcatggaaattatagtgtcctggtatgtaatttccattttt

SEQ ID NO: 167629 - DNA, 69 bp, Homo sapiens
tataattttttaagttcatggaaattatagtgtcctggtatgtaatttccattttttagttgcaatagg

SEQ ID NO: 167630 - DNA, 73 bp, Homo sapiens
taagttcatggaaattatagtgtcctggtatgtaatttccattttttagttgcaataggggagttctgacata

SEQ ID NO: 167631 - DNA, 75 bp, Homo sapiens
tcatggaaattatagtgtcctggtatgtaatttccattttttagttgcaataggggagttctgacatatactcaa

SEQ ID NO: 167632 - DNA, 74 bp, Homo sapiens
tgtcctggtatgtaatttccattttttagttgcaataggggagttctgacatatactcaaagactgacacaaaa

SEQ ID NO: 167633 - DNA, 74 bp, Homo sapiens
ggtatgtaatttccattttttagttgcaataggggagttctgacatatactcaaagactgacacaaaatgatta

SEQ ID NO: 167634 - DNA, 72 bp, Homo sapiens
ccattttttagttgcaataggggagttctgacatatactcaaagactgacacaaaatgattaaaagtcaaaa

SEQ ID NO: 167635 - DNA, 73 bp, Homo sapiens
agttgcaataggggagttctgacatatactcaaagactgacacaaaatgattaaaagtcaaaagaaaaaagca

SEQ ID NO: 167636 - DNA, 70 bp, Homo sapiens
gggagttctgacatatactcaaagactgacacaaaatgattaaaagtcaaaagaaaaaagcaaaagaaaa

SEQ ID NO: 167637 - DNA, 68 bp, Homo sapiens
aagcaaaagaaaaaacctccatcagatcatgtagcaaaggtaagtaaaataaaaaagggctgacttta

SEQ ID NO: 167638 - DNA, 67 bp, Homo sapiens
aaaaacctccatcagatcatgtagcaaaggtaagtaaaataaaaaagggctgactttacttctacct

SEQ ID NO: 167639 - DNA, 73 bp, Homo sapiens
catcagatcatgtagcaaaggtaagtaaaataaaaaagggctgactttacttctaccttagcgattcatacta

SEQ ID NO: 167640 - DNA, 69 bp, Homo sapiens
catgtagcaaaggtaagtaaaataaaaaagggctgactttacttctaccttagcgattcatactacttc

SEQ ID NO: 167641 - DNA, 68 bp, Homo sapiens
taagtaaaataaaaaagggctgactttacttctaccttagcgattcatactacttctaaacaagacga

SEQ ID NO: 167642 - DNA, 68 bp, Homo sapiens
aataaaaaagggctgactttacttctaccttagcgattcatactacttctaaacaagacgatcttccc

SEQ ID NO: 167643 - DNA, 72 bp, Homo sapiens
tgactttacttctaccttagcgattcatactacttctaaacaagacgatcttccctctgtgtaacgtttctc

SEQ ID NO: 167644 - DNA, 74 bp, Homo sapiens
ttacttctaccttagcgattcatactacttctaaacaagacgatcttccctctgtgtaacgtttctctcacatg

SEQ ID NO: 167645 - DNA, 77 bp, Homo sapiens
ttagcgattcatactacttctaaacaagacgatcttccctctgtgtaacgtttctctcacatggcaaatatccaaca

SEQ ID NO: 167646 - DNA, 76 bp, Homo sapiens
atactacttctaaacaagacgatcttccctctgtgtaacgtttctctcacatggcaaatatccaacacatatgtac

SEQ ID NO: 167647 - DNA, 76 bp, Homo sapiens
taaacaagacgatcttccctctgtgtaacgtttctctcacatggcaaatatccaacacatatgtaccaaagatggt

SEQ ID NO: 167648 - DNA, 79 bp, Homo sapiens
ttccctctgtgtaacgtttctctcacatggcaaatatccaacacatatgtaccaaagatggttgatgcatggaaaacaa

SEQ ID NO: 167649 - DNA, 82 bp, Homo sapiens
tgtaacgtttctctcacatggcaaatatccaacacatatgtaccaaagatggttgatgcatggaaaacaaatgtggcatata

SEQ ID NO: 167650 - DNA, 81 bp, Homo sapiens
catggcaaatatccaacacatatgtaccaaagatggttgatgcatggaaaacaaatgtggcatatattaatacattaccta

SEQ ID NO: 167651 - DNA, 80 bp, Homo sapiens
ccaacacatatgtaccaaagatggttgatgcatggaaaacaaatgtggcatatattaatacattacctatatgatttcaa

SEQ ID NO: 167652 - DNA, 79 bp, Homo sapiens
accaaagatggttgatgcatggaaaacaaatgtggcatatattaatacattacctatatgatttcaatatccagttcag

SEQ ID NO: 167653 - DNA, 81 bp, Homo sapiens
agatggttgatgcatggaaaacaaatgtggcatatattaatacattacctatatgatttcaatatccagttcagtgtcagg

SEQ ID NO: 167654 - DNA, 78 bp, Homo sapiens
tggaaaacaaatgtggcatatattaatacattacctatatgatttcaatatccagttcagtgtcagggccttctagaa

SEQ ID NO: 167655 - DNA, 77 bp, Homo sapiens
aaacaaatgtggcatatattaatacattacctatatgatttcaatatccagttcagtgtcagggccttctagaagtg

SEQ ID NO: 167656 - DNA, 78 bp, Homo sapiens
atgtggcatatattaatacattacctatatgatttcaatatccagttcagtgtcagggccttctagaagtggtatgtt

SEQ ID NO: 167657 - DNA, 75 bp, Homo sapiens
tattaatacattacctatatgatttcaatatccagttcagtgtcagggccttctagaagtggtatgtttcccatt

SEQ ID NO: 167658 - DNA, 74 bp, Homo sapiens
attaatacattacctatatgatttcaatatccagttcagtgtcagggccttctagaagtggtatgtttcccatt

SEQ ID NO: 167659 - DNA, 74 bp, Homo sapiens
tacattacctatatgatttcaatatccagttcagtgtcagggccttctagaagtggtatgtttcccatttcctt

SEQ ID NO: 167660 - DNA, 72 bp, Homo sapiens
tacctatatgatttcaatatccagttcagtgtcagggccttctagaagtggtatgtttcccatttccttttt

SEQ ID NO: 167661 - DNA, 70 bp, Homo sapiens
atatgatttcaatatccagttcagtgtcagggccttctagaagtggtatgtttcccatttcctttttttt

SEQ ID NO: 167662 - DNA, 72 bp, Homo sapiens
caataaaaagaaaaggtatggcataatctgccatggcacttactttacttttagttagttcaaatagcacca

SEQ ID NO: 167663 - DNA, 74 bp, Homo sapiens
aaaaggtatggcataatctgccatggcacttactttacttttagttagttcaaatagcaccagatgtgtttcta

SEQ ID NO: 167664 - DNA, 74 bp, Homo sapiens
gcataatctgccatggcacttactttacttttagttagttcaaatagcaccagatgtgtttctaaggtacaaaa

SEQ ID NO: 167665 - DNA, 69 bp, Homo sapiens
actttacttttagttagttcaaatagcaccagatgtgtttctaaggtacaaaaagtaggtattctgcat

SEQ ID NO: 167666 - DNA, 69 bp, Homo sapiens
acttttagttagttcaaatagcaccagatgtgtttctaaggtacaaaaagtaggtattctgcattttcc

SEQ ID NO: 167667 - DNA, 73 bp, Homo sapiens
agttcaaatagcaccagatgtgtttctaaggtacaaaaagtaggtattctgcattttccttgtttacatagca

SEQ ID NO: 167668 - DNA, 73 bp, Homo sapiens
agatgtgtttctaaggtacaaaaagtaggtattctgcattttccttgtttacatagcattctagagaggacca

SEQ ID NO: 167669 - DNA, 72 bp, Homo sapiens
gtttctaaggtacaaaaagtaggtattctgcattttccttgtttacatagcattctagagaggaccagtata

SEQ ID NO: 167670 - DNA, 72 bp, Homo sapiens
gtacaaaaagtaggtattctgcattttccttgtttacatagcattctagagaggaccagtataaaacaacaa

SEQ ID NO: 167671 - DNA, 70 bp, Homo sapiens
caacaacaaaaagggagttcaagtattggtaggtggtacatctttttctatcagtttatcaggtcaatta

SEQ ID NO: 167672 - DNA, 75 bp, Homo sapiens
agttcaagtattggtaggtggtacatctttttctatcagtttatcaggtcaattatcgaagtctcagagatgtta

SEQ ID NO: 167673 - DNA, 76 bp, Homo sapiens
ttggtaggtggtacatctttttctatcagtttatcaggtcaattatcgaagtctcagagatgttatggattaggag

SEQ ID NO: 167674 - DNA, 76 bp, Homo sapiens
tctttttctatcagtttatcaggtcaattatcgaagtctcagagatgttatggattaggaggaacttcttggacaa

SEQ ID NO: 167675 - DNA, 76 bp, Homo sapiens
tcagtttatcaggtcaattatcgaagtctcagagatgttatggattaggaggaacttcttggacaactagtagtta

SEQ ID NO: 167676 - DNA, 77 bp, Homo sapiens
ttatcaggtcaattatcgaagtctcagagatgttatggattaggaggaacttcttggacaactagtagttagtctga

SEQ ID NO: 167677 - DNA, 76 bp, Homo sapiens
attatcgaagtctcagagatgttatggattaggaggaacttcttggacaactagtagttagtctgagttagtcata

SEQ ID NO: 167678 - DNA, 74 bp, Homo sapiens
agagatgttatggattaggaggaacttcttggacaactagtagttagtctgagttagtcatatttgaataagtg

SEQ ID NO: 167679 - DNA, 74 bp, Homo sapiens
ttatggattaggaggaacttcttggacaactagtagttagtctgagttagtcatatttgaataagtgttggcta

SEQ ID NO: 167680 - DNA, 73 bp, Homo sapiens
ggaacttcttggacaactagtagttagtctgagttagtcatatttgaataagtgttggctaagctagaaggta

SEQ ID NO: 167681 - DNA, 75 bp, Homo sapiens
ttcttggacaactagtagttagtctgagttagtcatatttgaataagtgttggctaagctagaaggtatgtacta

SEQ ID NO: 167682 - DNA, 75 bp, Homo sapiens
actagtagttagtctgagttagtcatatttgaataagtgttggctaagctagaaggtatgtactagagaggataa

SEQ ID NO: 167683 - DNA, 76 bp, Homo sapiens
agtctgagttagtcatatttgaataagtgttggctaagctagaaggtatgtactagagaggataagccaaagtgaa

SEQ ID NO: 167684 - DNA, 75 bp, Homo sapiens
ataagtgttggctaagctagaaggtatgtactagagaggataagccaaagtgaaatgcaagtcctgtaacaggaa

SEQ ID NO: 167685 - DNA, 74 bp, Homo sapiens
taagctagaaggtatgtactagagaggataagccaaagtgaaatgcaagtcctgtaacaggaaacaggaaagaa

SEQ ID NO: 167686 - DNA, 72 bp, Homo sapiens
agaaggtatgtactagagaggataagccaaagtgaaatgcaagtcctgtaacaggaaacaggaaagaagaag

SEQ ID NO: 167687 - DNA, 74 bp, Homo sapiens
tactagagaggataagccaaagtgaaatgcaagtcctgtaacaggaaacaggaaagaagaaggaagctagagag

SEQ ID NO: 167688 - DNA, 74 bp, Homo sapiens
ataagccaaagtgaaatgcaagtcctgtaacaggaaacaggaaagaagaaggaagctagagaggcatcaaggtg

SEQ ID NO: 167689 - DNA, 72 bp, Homo sapiens
aatgcaagtcctgtaacaggaaacaggaaagaagaaggaagctagagaggcatcaaggtgggtatagaactt

SEQ ID NO: 167690 - DNA, 69 bp, Homo sapiens
ctgtaacaggaaacaggaaagaagaaggaagctagagaggcatcaaggtgggtatagaactttaatttt

SEQ ID NO: 167691 - DNA, 70 bp, Homo sapiens
aagaagaaggaagctagagaggcatcaaggtgggtatagaactttaatttttatttcactggaaaagatg

SEQ ID NO: 167692 - DNA, 71 bp, Homo sapiens
aagctagagaggcatcaaggtgggtatagaactttaatttttatttcactggaaaagatggcaaatacagt

SEQ ID NO: 167693 - DNA, 74 bp, Homo sapiens
gcatcaaggtgggtatagaactttaatttttatttcactggaaaagatggcaaatacagttctgaaaatgatgc

SEQ ID NO: 167694 - DNA, 72 bp, Homo sapiens
aggtgggtatagaactttaatttttatttcactggaaaagatggcaaatacagttctgaaaatgatgctatg

SEQ ID NO: 167695 - DNA, 76 bp, Homo sapiens
tttaatttttatttcactggaaaagatggcaaatacagttctgaaaatgatgctatgtagtgactccaatgtctgg

SEQ ID NO: 167696 - DNA, 81 bp, Homo sapiens
aaaagatggcaaatacagttctgaaaatgatgctatgtagtgactccaatgtctgggtgtcagatgttacaggagactatc

SEQ ID NO: 167697 - DNA, 82 bp, Homo sapiens
aaatacagttctgaaaatgatgctatgtagtgactccaatgtctgggtgtcagatgttacaggagactatccatggaccaga

SEQ ID NO: 167698 - DNA, 82 bp, Homo sapiens
agttctgaaaatgatgctatgtagtgactccaatgtctgggtgtcagatgttacaggagactatccatggaccagaacaatg

SEQ ID NO: 167699 - DNA, 84 bp, Homo sapiens
atgatgctatgtagtgactccaatgtctgggtgtcagatgttacaggagactatccatggaccagaacaatggtgctggtcgct

SEQ ID NO: 167700 - DNA, 82 bp, Homo sapiens
tagtgactccaatgtctgggtgtcagatgttacaggagactatccatggaccagaacaatggtgctggtcgcttctgccctc

SEQ ID NO: 167701 - DNA, 81 bp, Homo sapiens
aatgtctgggtgtcagatgttacaggagactatccatggaccagaacaatggtgctggtcgcttctgccctccatccagcc

SEQ ID NO: 167702 - DNA, 80 bp, Homo sapiens
gtgtcagatgttacaggagactatccatggaccagaacaatggtgctggtcgcttctgccctccatccagcctccaccct

SEQ ID NO: 167703 - DNA, 80 bp, Homo sapiens
ttacaggagactatccatggaccagaacaatggtgctggtcgcttctgccctccatccagcctccacccttccctgatga

SEQ ID NO: 167704 - DNA, 81 bp, Homo sapiens
tatccatggaccagaacaatggtgctggtcgcttctgccctccatccagcctccacccttccctgatgagcactgtggtaa

SEQ ID NO: 167705 - DNA, 82 bp, Homo sapiens
atggtgctggtcgcttctgccctccatccagcctccacccttccctgatgagcactgtggtaatgcccattcctgctcagaa

SEQ ID NO: 167706 - DNA, 80 bp, Homo sapiens
cttctgccctccatccagcctccacccttccctgatgagcactgtggtaatgcccattcctgctcagaacccttctgcaa

SEQ ID NO: 167707 - DNA, 81 bp, Homo sapiens
atccagcctccacccttccctgatgagcactgtggtaatgcccattcctgctcagaacccttctgcaatgcccgagaatga

SEQ ID NO: 167708 - DNA, 79 bp, Homo sapiens
cacccttccctgatgagcactgtggtaatgcccattcctgctcagaacccttctgcaatgcccgagaatgaaagtcaaa

SEQ ID NO: 167709 - DNA, 83 bp, Homo sapiens
tgatgagcactgtggtaatgcccattcctgctcagaacccttctgcaatgcccgagaatgaaagtcaaacactaagatgctaa

SEQ ID NO: 167710 - DNA, 78 bp, Homo sapiens
actgtggtaatgcccattcctgctcagaacccttctgcaatgcccgagaatgaaagtcaaacactaagatgctaagaa

SEQ ID NO: 167711 - DNA, 82 bp, Homo sapiens
taatgcccattcctgctcagaacccttctgcaatgcccgagaatgaaagtcaaacactaagatgctaagaatcatgaaatga

SEQ ID NO: 167712 - DNA, 80 bp, Homo sapiens
ctcagaacccttctgcaatgcccgagaatgaaagtcaaacactaagatgctaagaatcatgaaatgacacagtgggatac

SEQ ID NO: 167713 - DNA, 83 bp, Homo sapiens
ttctgcaatgcccgagaatgaaagtcaaacactaagatgctaagaatcatgaaatgacacagtgggatacttggcataacaga

SEQ ID NO: 167714 - DNA, 78 bp, Homo sapiens
atgaaagtcaaacactaagatgctaagaatcatgaaatgacacagtgggatacttggcataacagaataacttcctaa

SEQ ID NO: 167715 - DNA, 78 bp, Homo sapiens
aaacactaagatgctaagaatcatgaaatgacacagtgggatacttggcataacagaataacttcctaaggcagactg

SEQ ID NO: 167716 - DNA, 79 bp, Homo sapiens
taagaatcatgaaatgacacagtgggatacttggcataacagaataacttcctaaggcagactggcttcaaatgttgac

SEQ ID NO: 167717 - DNA, 79 bp, Homo sapiens
atgaaatgacacagtgggatacttggcataacagaataacttcctaaggcagactggcttcaaatgttgactctctcca

SEQ ID NO: 167718 - DNA, 76 bp, Homo sapiens
agtgggatacttggcataacagaataacttcctaaggcagactggcttcaaatgttgactctctccaccattagta

SEQ ID NO: 167719 - DNA, 76 bp, Homo sapiens
atacttggcataacagaataacttcctaaggcagactggcttcaaatgttgactctctccaccattagtagtgagt

SEQ ID NO: 167720 - DNA, 76 bp, Homo sapiens
agaataacttcctaaggcagactggcttcaaatgttgactctctccaccattagtagtgagttctcaagcaagtta

SEQ ID NO: 167721 - DNA, 74 bp, Homo sapiens
acttcctaaggcagactggcttcaaatgttgactctctccaccattagtagtgagttctcaagcaagttagttt

SEQ ID NO: 167722 - DNA, 75 bp, Homo sapiens
actggcttcaaatgttgactctctccaccattagtagtgagttctcaagcaagttagttttcccgagcctcagtc

SEQ ID NO: 167723 - DNA, 76 bp, Homo sapiens
aatgttgactctctccaccattagtagtgagttctcaagcaagttagttttcccgagcctcagtccctcatcagaa

SEQ ID NO: 167724 - DNA, 73 bp, Homo sapiens
actctctccaccattagtagtgagttctcaagcaagttagttttcccgagcctcagtccctcatcagaaaaaa

SEQ ID NO: 167725 - DNA, 72 bp, Homo sapiens
accattagtagtgagttctcaagcaagttagttttcccgagcctcagtccctcatcagaaaaaaatgcaaaa

SEQ ID NO: 167726 - DNA, 74 bp, Homo sapiens
agtgagttctcaagcaagttagttttcccgagcctcagtccctcatcagaaaaaaatgcaaaaatgatcctctg

SEQ ID NO: 167727 - DNA, 72 bp, Homo sapiens
aagttagttttcccgagcctcagtccctcatcagaaaaaaatgcaaaaatgatcctctgtccctcataggaa

SEQ ID NO: 167728 - DNA, 78 bp, Homo sapiens
agcctcagtccctcatcagaaaaaaatgcaaaaatgatcctctgtccctcataggaatgtggtgaaattgaatgagat

SEQ ID NO: 167729 - DNA, 76 bp, Homo sapiens
tcagaaaaaaatgcaaaaatgatcctctgtccctcataggaatgtggtgaaattgaatgagattgcacgttttaaa

SEQ ID NO: 167730 - DNA, 74 bp, Homo sapiens
aaaatgcaaaaatgatcctctgtccctcataggaatgtggtgaaattgaatgagattgcacgttttaaacccta

SEQ ID NO: 167731 - DNA, 76 bp, Homo sapiens
aaaatgatcctctgtccctcataggaatgtggtgaaattgaatgagattgcacgttttaaaccctagcactgtgcc

SEQ ID NO: 167732 - DNA, 77 bp, Homo sapiens
tctgtccctcataggaatgtggtgaaattgaatgagattgcacgttttaaaccctagcactgtgcctacttatatta

SEQ ID NO: 167733 - DNA, 76 bp, Homo sapiens
aatgagattgcacgttttaaaccctagcactgtgcctacttatattaggtaccagcaggtgtgagcttcattctct

SEQ ID NO: 167734 - DNA, 76 bp, Homo sapiens
ttttaaaccctagcactgtgcctacttatattaggtaccagcaggtgtgagcttcattctcttgtgtcttcaactc

SEQ ID NO: 167735 - DNA, 83 bp, Homo sapiens
tagcactgtgcctacttatattaggtaccagcaggtgtgagcttcattctcttgtgtcttcaactccatgatccattcctgac

SEQ ID NO: 167736 - DNA, 79 bp, Homo sapiens
ctacttatattaggtaccagcaggtgtgagcttcattctcttgtgtcttcaactccatgatccattcctgacttttctc

SEQ ID NO: 167737 - DNA, 81 bp, Homo sapiens
tatattaggtaccagcaggtgtgagcttcattctcttgtgtcttcaactccatgatccattcctgacttttctctcaatcc

SEQ ID NO: 167738 - DNA, 82 bp, Homo sapiens
caggtgtgagcttcattctcttgtgtcttcaactccatgatccattcctgacttttctctcaatcctaggctctatcaaata

SEQ ID NO: 167739 - DNA, 81 bp, Homo sapiens
agcttcattctcttgtgtcttcaactccatgatccattcctgacttttctctcaatcctaggctctatcaaataccagcca

SEQ ID NO: 167740 - DNA, 79 bp, Homo sapiens
tcttgtgtcttcaactccatgatccattcctgacttttctctcaatcctaggctctatcaaataccagccaccttggta

SEQ ID NO: 167741 - DNA, 77 bp, Homo sapiens
ttcaactccatgatccattcctgacttttctctcaatcctaggctctatcaaataccagccaccttggtactccctg

SEQ ID NO: 167742 - DNA, 75 bp, Homo sapiens
atgatccattcctgacttttctctcaatcctaggctctatcaaataccagccaccttggtactccctggcttttc

SEQ ID NO: 167743 - DNA, 71 bp, Homo sapiens
acttttctctcaatcctaggctctatcaaataccagccaccttggtactccctggcttttctgcctttctt

SEQ ID NO: 167744 - DNA, 71 bp, Homo sapiens
ctaggctctatcaaataccagccaccttggtactccctggcttttctgcctttcttttacttgctgtttcc

SEQ ID NO: 167745 - DNA, 70 bp, Homo sapiens
aaataccagccaccttggtactccctggcttttctgcctttcttttacttgctgtttccctcatctagaa

SEQ ID NO: 167746 - DNA, 69 bp, Homo sapiens
accttggtactccctggcttttctgcctttcttttacttgctgtttccctcatctagaatgacccgtcc

SEQ ID NO: 167747 - DNA, 74 bp, Homo sapiens
cctggcttttctgcctttcttttacttgctgtttccctcatctagaatgacccgtcccacttgcacattcttca

SEQ ID NO: 167748 - DNA, 78 bp, Homo sapiens
ttctgcctttcttttacttgctgtttccctcatctagaatgacccgtcccacttgcacattcttcactgctcactgta

SEQ ID NO: 167749 - DNA, 83 bp, Homo sapiens
ttgctgtttccctcatctagaatgacccgtcccacttgcacattcttcactgctcactgtagatcacacatcctctttcagct

SEQ ID NO: 167750 - DNA, 82 bp, Homo sapiens
cctcatctagaatgacccgtcccacttgcacattcttcactgctcactgtagatcacacatcctctttcagcttccctcaac

SEQ ID NO: 167751 - DNA, 80 bp, Homo sapiens
aatgacccgtcccacttgcacattcttcactgctcactgtagatcacacatcctctttcagcttccctcaactgccccga

SEQ ID NO: 167752 - DNA, 86 bp, Homo sapiens
ttgcacattcttcactgctcactgtagatcacacatcctctttcagcttccctcaactgccccgagcaacagccatatcacattac

SEQ ID NO: 167753 - DNA, 83 bp, Homo sapiens
attcttcactgctcactgtagatcacacatcctctttcagcttccctcaactgccccgagcaacagccatatcacattacctc

SEQ ID NO: 167754 - DNA, 76 bp, Homo sapiens
acacatcctctttcagcttccctcaactgccccgagcaacagccatatcacattacctctgcctttcttttaacat

SEQ ID NO: 167755 - DNA, 77 bp, Homo sapiens
ctctttcagcttccctcaactgccccgagcaacagccatatcacattacctctgcctttcttttaacatttatcaca

SEQ ID NO: 167756 - DNA, 78 bp, Homo sapiens
cctcaactgccccgagcaacagccatatcacattacctctgcctttcttttaacatttatcacagcccttctgtatga

SEQ ID NO: 167757 - DNA, 80 bp, Homo sapiens
cccgagcaacagccatatcacattacctctgcctttcttttaacatttatcacagcccttctgtatgatggacacatgta

SEQ ID NO: 167758 - DNA, 80 bp, Homo sapiens
aacagccatatcacattacctctgcctttcttttaacatttatcacagcccttctgtatgatggacacatgtatatatta

SEQ ID NO: 167759 - DNA, 78 bp, Homo sapiens
tctgcctttcttttaacatttatcacagcccttctgtatgatggacacatgtatatattatacacccaaacattccaa

SEQ ID NO: 167760 - DNA, 80 bp, Homo sapiens
tttatcacagcccttctgtatgatggacacatgtatatattatacacccaaacattccaaccaatgcaaatggtaagcac

SEQ ID NO: 167761 - DNA, 81 bp, Homo sapiens
tctgtatgatggacacatgtatatattatacacccaaacattccaaccaatgcaaatggtaagcacttgatggcgatattt

SEQ ID NO: 167762 - DNA, 76 bp, Homo sapiens
ggacacatgtatatattatacacccaaacattccaaccaatgcaaatggtaagcacttgatggcgatattttttaa

SEQ ID NO: 167763 - DNA, 73 bp, Homo sapiens
tatacacccaaacattccaaccaatgcaaatggtaagcacttgatggcgatattttttaaaattcctcctgag

SEQ ID NO: 167764 - DNA, 73 bp, Homo sapiens
tccaaccaatgcaaatggtaagcacttgatggcgatattttttaaaattcctcctgaggaggattcttaataa

SEQ ID NO: 167765 - DNA, 72 bp, Homo sapiens
ggtaagcacttgatggcgatattttttaaaattcctcctgaggaggattcttaataaatatgtagtaatata

SEQ ID NO: 167766 - DNA, 73 bp, Homo sapiens
tgatggcgatattttttaaaattcctcctgaggaggattcttaataaatatgtagtaatataattgtggatag

SEQ ID NO: 167767 - DNA, 71 bp, Homo sapiens
tttaaaattcctcctgaggaggattcttaataaatatgtagtaatataattgtggatagttacatttctaa

SEQ ID NO: 167768 - DNA, 72 bp, Homo sapiens
cctcctgaggaggattcttaataaatatgtagtaatataattgtggatagttacatttctaactattagaaa

SEQ ID NO: 167769 - DNA, 72 bp, Homo sapiens
ggaggattcttaataaatatgtagtaatataattgtggatagttacatttctaactattagaaatccattcc

SEQ ID NO: 167770 - DNA, 73 bp, Homo sapiens
taaatatgtagtaatataattgtggatagttacatttctaactattagaaatccattccctatattattatcc

SEQ ID NO: 167771 - DNA, 74 bp, Homo sapiens
tgtggatagttacatttctaactattagaaatccattccctatattattatccgttcaaagatatcaaatttca

SEQ ID NO: 167772 - DNA, 72 bp, Homo sapiens
agttacatttctaactattagaaatccattccctatattattatccgttcaaagatatcaaatttcatggta

SEQ ID NO: 167773 - DNA, 72 bp, Homo sapiens
actattagaaatccattccctatattattatccgttcaaagatatcaaatttcatggtaaaagacaaacaca

SEQ ID NO: 167774 - DNA, 74 bp, Homo sapiens
atccattccctatattattatccgttcaaagatatcaaatttcatggtaaaagacaaacacacaccatcaacag

SEQ ID NO: 167775 - DNA, 75 bp, Homo sapiens
ccctatattattatccgttcaaagatatcaaatttcatggtaaaagacaaacacacaccatcaacagtatacaca

SEQ ID NO: 167776 - DNA, 78 bp, Homo sapiens
tattatccgttcaaagatatcaaatttcatggtaaaagacaaacacacaccatcaacagtatacacagagagaggata

SEQ ID NO: 167777 - DNA, 80 bp, Homo sapiens
gatatcaaatttcatggtaaaagacaaacacacaccatcaacagtatacacagagagaggatagaatgtagataacaatg

SEQ ID NO: 167778 - DNA, 77 bp, Homo sapiens
aatttcatggtaaaagacaaacacacaccatcaacagtatacacagagagaggatagaatgtagataacaatgggaa

SEQ ID NO: 167779 - DNA, 81 bp, Homo sapiens
aagacaaacacacaccatcaacagtatacacagagagaggatagaatgtagataacaatgggaagatgctggagacctgaa

SEQ ID NO: 167780 - DNA, 76 bp, Homo sapiens
aacagtatacacagagagaggatagaatgtagataacaatgggaagatgctggagacctgaaatttagttcaactt

SEQ ID NO: 167781 - DNA, 78 bp, Homo sapiens
tacacagagagaggatagaatgtagataacaatgggaagatgctggagacctgaaatttagttcaactttgcaactaa

SEQ ID NO: 167782 - DNA, 75 bp, Homo sapiens
atgtagataacaatgggaagatgctggagacctgaaatttagttcaactttgcaactaacttatatagaatgacg

SEQ ID NO: 167783 - DNA, 77 bp, Homo sapiens
ggaagatgctggagacctgaaatttagttcaactttgcaactaacttatatagaatgacgtctcacctcatgtctta

SEQ ID NO: 167784 - DNA, 78 bp, Homo sapiens
atgctggagacctgaaatttagttcaactttgcaactaacttatatagaatgacgtctcacctcatgtcttatcacag

SEQ ID NO: 167785 - DNA, 78 bp, Homo sapiens
aatttagttcaactttgcaactaacttatatagaatgacgtctcacctcatgtcttatcacaggtgccgtgatctgaa

SEQ ID NO: 167786 - DNA, 79 bp, Homo sapiens
agttcaactttgcaactaacttatatagaatgacgtctcacctcatgtcttatcacaggtgccgtgatctgaatgtttc

SEQ ID NO: 167787 - DNA, 78 bp, Homo sapiens
aactaacttatatagaatgacgtctcacctcatgtcttatcacaggtgccgtgatctgaatgtttcccaaaattcatg

SEQ ID NO: 167788 - DNA, 80 bp, Homo sapiens
ttatatagaatgacgtctcacctcatgtcttatcacaggtgccgtgatctgaatgtttcccaaaattcatgtgttgaaac

SEQ ID NO: 167789 - DNA, 78 bp, Homo sapiens
acgtctcacctcatgtcttatcacaggtgccgtgatctgaatgtttcccaaaattcatgtgttgaaacttaatcacca

SEQ ID NO: 167790 - DNA, 74 bp, Homo sapiens
ttgaaacttaatcaccaatgtgataatattaagaactggggcctttgggaggcactcagcccataagggctcta

SEQ ID NO: 167791 - DNA, 77 bp, Homo sapiens
ttaatcaccaatgtgataatattaagaactggggcctttgggaggcactcagcccataagggctctaccatcatgga

SEQ ID NO: 167792 - DNA, 75 bp, Homo sapiens
ataatattaagaactggggcctttgggaggcactcagcccataagggctctaccatcatggatgggatcggtctc

SEQ ID NO: 167793 - DNA, 75 bp, Homo sapiens
taagaactggggcctttgggaggcactcagcccataagggctctaccatcatggatgggatcggtctcttacaaa

SEQ ID NO: 167794 - DNA, 75 bp, Homo sapiens
ataagggctctaccatcatggatgggatcggtctcttacaaatgggttggagagagctaaggaggccacttttgc

SEQ ID NO: 167795 - DNA, 75 bp, Homo sapiens
ctctaccatcatggatgggatcggtctcttacaaatgggttggagagagctaaggaggccacttttgcccttcca

SEQ ID NO: 167796 - DNA, 75 bp, Homo sapiens
atggatgggatcggtctcttacaaatgggttggagagagctaaggaggccacttttgcccttccatctcttctgc

SEQ ID NO: 167797 - DNA, 73 bp, Homo sapiens
ggtctcttacaaatgggttggagagagctaaggaggccacttttgcccttccatctcttctgccatgtaaaaa

SEQ ID NO: 167798 - DNA, 74 bp, Homo sapiens
tacaaatgggttggagagagctaaggaggccacttttgcccttccatctcttctgccatgtaaaaaggcactat

SEQ ID NO: 167799 - DNA, 76 bp, Homo sapiens
gttggagagagctaaggaggccacttttgcccttccatctcttctgccatgtaaaaaggcactattctagcaacaa

SEQ ID NO: 167800 - DNA, 80 bp, Homo sapiens
acttttgcccttccatctcttctgccatgtaaaaaggcactattctagcaacaagctgccatcttgagagcagagaccag

SEQ ID NO: 167801 - DNA, 80 bp, Homo sapiens
catctcttctgccatgtaaaaaggcactattctagcaacaagctgccatcttgagagcagagaccaggcccttacccaac

SEQ ID NO: 167802 - DNA, 80 bp, Homo sapiens
tgccatgtaaaaaggcactattctagcaacaagctgccatcttgagagcagagaccaggcccttacccaacctgtcagta

SEQ ID NO: 167803 - DNA, 76 bp, Homo sapiens
taaaaaggcactattctagcaacaagctgccatcttgagagcagagaccaggcccttacccaacctgtcagtacct

SEQ ID NO: 167804 - DNA, 76 bp, Homo sapiens
aacaagctgccatcttgagagcagagaccaggcccttacccaacctgtcagtaccttgattttgcatttcccagcc

SEQ ID NO: 167805 - DNA, 75 bp, Homo sapiens
aaactacccagtctaaggtactgatatagcagcacaaatggactaagaccatagatgttttatgaatagcatttt

SEQ ID NO: 167806 - DNA, 78 bp, Homo sapiens
aaggtactgatatagcagcacaaatggactaagaccatagatgttttatgaatagcatttttgctgaaacacaaatag

SEQ ID NO: 167807 - DNA, 80 bp, Homo sapiens
gtactgatatagcagcacaaatggactaagaccatagatgttttatgaatagcatttttgctgaaacacaaataggatct

SEQ ID NO: 167808 - DNA, 78 bp, Homo sapiens
atagcagcacaaatggactaagaccatagatgttttatgaatagcatttttgctgaaacacaaataggatcttaccta

SEQ ID NO: 167809 - DNA, 76 bp, Homo sapiens
aaatggactaagaccatagatgttttatgaatagcatttttgctgaaacacaaataggatcttacctattctctga

SEQ ID NO: 167810 - DNA, 75 bp, Homo sapiens
agaccatagatgttttatgaatagcatttttgctgaaacacaaataggatcttacctattctctgatctaaaacc

SEQ ID NO: 167811 - DNA, 75 bp, Homo sapiens
tttatgaatagcatttttgctgaaacacaaataggatcttacctattctctgatctaaaaccttcaggagagtcc

SEQ ID NO: 167812 - DNA, 76 bp, Homo sapiens
tgctgaaacacaaataggatcttacctattctctgatctaaaaccttcaggagagtcccattgtccatggaataaa

SEQ ID NO: 167813 - DNA, 72 bp, Homo sapiens
aaacacaaataggatcttacctattctctgatctaaaaccttcaggagagtcccattgtccatggaataaaa

SEQ ID NO: 167814 - DNA, 73 bp, Homo sapiens
aggatcttacctattctctgatctaaaaccttcaggagagtcccattgtccatggaataaaatataagctctt

SEQ ID NO: 167815 - DNA, 76 bp, Homo sapiens
tattctctgatctaaaaccttcaggagagtcccattgtccatggaataaaatataagctctttagcttagtccatg

SEQ ID NO: 167816 - DNA, 76 bp, Homo sapiens
atctaaaaccttcaggagagtcccattgtccatggaataaaatataagctctttagcttagtccatgttgcagaca

SEQ ID NO: 167817 - DNA, 77 bp, Homo sapiens
aggagagtcccattgtccatggaataaaatataagctctttagcttagtccatgttgcagacactgttgagttctta

SEQ ID NO: 167818 - DNA, 80 bp, Homo sapiens
ttgtccatggaataaaatataagctctttagcttagtccatgttgcagacactgttgagttcttagcaatgcttgttgct

SEQ ID NO: 167819 - DNA, 77 bp, Homo sapiens
aataaaatataagctctttagcttagtccatgttgcagacactgttgagttcttagcaatgcttgttgctttcttcc

SEQ ID NO: 167820 - DNA, 80 bp, Homo sapiens
tttagcttagtccatgttgcagacactgttgagttcttagcaatgcttgttgctttcttccttgctggagagccctgact

SEQ ID NO: 167821 - DNA, 79 bp, Homo sapiens
atgttgcagacactgttgagttcttagcaatgcttgttgctttcttccttgctggagagccctgactttgttcaggtac

SEQ ID NO: 167822 - DNA, 75 bp, Homo sapiens
agttcttagcaatgcttgttgctttcttccttgctggagagccctgactttgttcaggtactcttcctcttccca

SEQ ID NO: 167823 - DNA, 74 bp, Homo sapiens
aatgcttgttgctttcttccttgctggagagccctgactttgttcaggtactcttcctcttcccacaatctttg

SEQ ID NO: 167824 - DNA, 71 bp, Homo sapiens
tttcttccttgctggagagccctgactttgttcaggtactcttcctcttcccacaatctttgggggcaaat

SEQ ID NO: 167825 - DNA, 72 bp, Homo sapiens
ttgctggagagccctgactttgttcaggtactcttcctcttcccacaatctttgggggcaaattctccttgt

SEQ ID NO: 167826 - DNA, 74 bp, Homo sapiens
ctgactttgttcaggtactcttcctcttcccacaatctttgggggcaaattctccttgttgcacattagtcaga

SEQ ID NO: 167827 - DNA, 75 bp, Homo sapiens
tttgttcaggtactcttcctcttcccacaatctttgggggcaaattctccttgttgcacattagtcagattatca

SEQ ID NO: 167828 - DNA, 73 bp, Homo sapiens
actcttcctcttcccacaatctttgggggcaaattctccttgttgcacattagtcagattatcacagtttctt

SEQ ID NO: 167829 - DNA, 76 bp, Homo sapiens
cttcccacaatctttgggggcaaattctccttgttgcacattagtcagattatcacagtttctttctcaatagcag

SEQ ID NO: 167830 - DNA, 78 bp, Homo sapiens
tctttgggggcaaattctccttgttgcacattagtcagattatcacagtttctttctcaatagcaggcttcagaggtg

SEQ ID NO: 167831 - DNA, 83 bp, Homo sapiens
ttgttgcacattagtcagattatcacagtttctttctcaatagcaggcttcagaggtgggtgatgtgattcgattctggacaa

SEQ ID NO: 167832 - DNA, 83 bp, Homo sapiens
tagtcagattatcacagtttctttctcaatagcaggcttcagaggtgggtgatgtgattcgattctggacaatgggccatgaa

SEQ ID NO: 167833 - DNA, 81 bp, Homo sapiens
tctttctcaatagcaggcttcagaggtgggtgatgtgattcgattctggacaatgggccatgaaaggaggtctactgaaga

SEQ ID NO: 167834 - DNA, 78 bp, Homo sapiens
aggcttcagaggtgggtgatgtgattcgattctggacaatgggccatgaaaggaggtctactgaagaggttgtgagaa

SEQ ID NO: 167835 - DNA, 78 bp, Homo sapiens
agaggtgggtgatgtgattcgattctggacaatgggccatgaaaggaggtctactgaagaggttgtgagaaagacatc

SEQ ID NO: 167836 - DNA, 74 bp, Homo sapiens
attctggacaatgggccatgaaaggaggtctactgaagaggttgtgagaaagacatcctcactttctaaacagg

SEQ ID NO: 167837 - DNA, 72 bp, Homo sapiens
aatgggccatgaaaggaggtctactgaagaggttgtgagaaagacatcctcactttctaaacagggacccag

SEQ ID NO: 167838 - DNA, 71 bp, Homo sapiens
aaaggaggtctactgaagaggttgtgagaaagacatcctcactttctaaacagggacccagggagcaaata

SEQ ID NO: 167839 - DNA, 71 bp, Homo sapiens
aggttgtgagaaagacatcctcactttctaaacagggacccagggagcaaatagtcccttctcttctaata

SEQ ID NO: 167840 - DNA, 71 bp, Homo sapiens
agacatcctcactttctaaacagggacccagggagcaaatagtcccttctcttctaataggcactatttta

SEQ ID NO: 167841 - DNA, 70 bp, Homo sapiens
tttctaaacagggacccagggagcaaatagtcccttctcttctaataggcactattttatctgtaagtaa

SEQ ID NO: 167842 - DNA, 69 bp, Homo sapiens
aacagggacccagggagcaaatagtcccttctcttctaataggcactattttatctgtaagtaattact

SEQ ID NO: 167843 - DNA, 69 bp, Homo sapiens
agggagcaaatagtcccttctcttctaataggcactattttatctgtaagtaattacttcccttcactt

SEQ ID NO: 167844 - DNA, 68 bp, Homo sapiens
ctcttctaataggcactattttatctgtaagtaattacttcccttcacttttttgaattctacttttc

SEQ ID NO: 167845 - DNA, 69 bp, Homo sapiens
aggcactattttatctgtaagtaattacttcccttcacttttttgaattctacttttcttatctatgaa

SEQ ID NO: 167846 - DNA, 70 bp, Homo sapiens
tacttcccttcacttttttgaattctacttttcttatctatgaattaagcatattaggttgtattctttc

SEQ ID NO: 167847 - DNA, 69 bp, Homo sapiens
cccttcacttttttgaattctacttttcttatctatgaattaagcatattaggttgtattctttctaaa

SEQ ID NO: 167848 - DNA, 73 bp, Homo sapiens
gaattctacttttcttatctatgaattaagcatattaggttgtattctttctaaagatcttttgcaaatacta

SEQ ID NO: 167849 - DNA, 75 bp, Homo sapiens
gcatattaggttgtattctttctaaagatcttttgcaaatactaatattctctggtttctttctatagatatggc

SEQ ID NO: 167850 - DNA, 76 bp, Homo sapiens
ggttgtattctttctaaagatcttttgcaaatactaatattctctggtttctttctatagatatggcttatgatca

SEQ ID NO: 167851 - DNA, 77 bp, Homo sapiens
tctaaagatcttttgcaaatactaatattctctggtttctttctatagatatggcttatgatcattacaaacacaaa

SEQ ID NO: 167852 - DNA, 76 bp, Homo sapiens
actaatattctctggtttctttctatagatatggcttatgatcattacaaacacaaagatgaccaccctgaaaaca

SEQ ID NO: 167853 - DNA, 78 bp, Homo sapiens
ctctggtttctttctatagatatggcttatgatcattacaaacacaaagatgaccaccctgaaaacatatatttgata

SEQ ID NO: 167854 - DNA, 81 bp, Homo sapiens
ttctatagatatggcttatgatcattacaaacacaaagatgaccaccctgaaaacatatatttgataatgaagtgaccaca

SEQ ID NO: 167855 - DNA, 80 bp, Homo sapiens
gatatggcttatgatcattacaaacacaaagatgaccaccctgaaaacatatatttgataatgaagtgaccacaaataca

SEQ ID NO: 167856 - DNA, 79 bp, Homo sapiens
tgatcattacaaacacaaagatgaccaccctgaaaacatatatttgataatgaagtgaccacaaatacaatcactttga

SEQ ID NO: 167857 - DNA, 79 bp, Homo sapiens
acacaaagatgaccaccctgaaaacatatatttgataatgaagtgaccacaaatacaatcactttgaaagtgatgatca

SEQ ID NO: 167858 - DNA, 77 bp, Homo sapiens
ccaccctgaaaacatatatttgataatgaagtgaccacaaatacaatcactttgaaagtgatgatcataactagcct

SEQ ID NO: 167859 - DNA, 80 bp, Homo sapiens
aacatatatttgataatgaagtgaccacaaatacaatcactttgaaagtgatgatcataactagccttcttctgttcaca

SEQ ID NO: 167860 - DNA, 80 bp, Homo sapiens
tgataatgaagtgaccacaaatacaatcactttgaaagtgatgatcataactagccttcttctgttcacataaatttcca

SEQ ID NO: 167861 - DNA, 79 bp, Homo sapiens
atgaagtgaccacaaatacaatcactttgaaagtgatgatcataactagccttcttctgttcacataaatttccatgtc

SEQ ID NO: 167862 - DNA, 80 bp, Homo sapiens
tttgaaagtgatgatcataactagccttcttctgttcacataaatttccatgtccacaagaatgtctgcatgtccatttt

SEQ ID NO: 167863 - DNA, 80 bp, Homo sapiens
aagtgatgatcataactagccttcttctgttcacataaatttccatgtccacaagaatgtctgcatgtccatttttctcc

SEQ ID NO: 167864 - DNA, 77 bp, Homo sapiens
ataactagccttcttctgttcacataaatttccatgtccacaagaatgtctgcatgtccatttttctcccataaaca

SEQ ID NO: 167865 - DNA, 75 bp, Homo sapiens
cttcttctgttcacataaatttccatgtccacaagaatgtctgcatgtccatttttctcccataaacattaaaat

SEQ ID NO: 167866 - DNA, 75 bp, Homo sapiens
cataaatttccatgtccacaagaatgtctgcatgtccatttttctcccataaacattaaaattaatgtctacctc

SEQ ID NO: 167867 - DNA, 76 bp, Homo sapiens
tgtccacaagaatgtctgcatgtccatttttctcccataaacattaaaattaatgtctacctcctcttttcagata

SEQ ID NO: 167868 - DNA, 74 bp, Homo sapiens
acaagaatgtctgcatgtccatttttctcccataaacattaaaattaatgtctacctcctcttttcagatacat

SEQ ID NO: 167869 - DNA, 74 bp, Homo sapiens
tctcccataaacattaaaattaatgtctacctcctcttttcagatacattttcactcctcatcaatgatttagt

SEQ ID NO: 167870 - DNA, 72 bp, Homo sapiens
aacattaaaattaatgtctacctcctcttttcagatacattttcactcctcatcaatgatttagttataaaa

SEQ ID NO: 167871 - DNA, 75 bp, Homo sapiens
taatgtctacctcctcttttcagatacattttcactcctcatcaatgatttagttataaaataagcattctaaag

SEQ ID NO: 167872 - DNA, 75 bp, Homo sapiens
ctcctcttttcagatacattttcactcctcatcaatgatttagttataaaataagcattctaaagtccaattctc

SEQ ID NO: 167873 - DNA, 74 bp, Homo sapiens
cagatacattttcactcctcatcaatgatttagttataaaataagcattctaaagtccaattctccctctttag

SEQ ID NO: 167874 - DNA, 74 bp, Homo sapiens
ttcactcctcatcaatgatttagttataaaataagcattctaaagtccaattctccctctttagttgtcaccaa

SEQ ID NO: 167875 - DNA, 72 bp, Homo sapiens
cctcatcaatgatttagttataaaataagcattctaaagtccaattctccctctttagttgtcaccaaaaca

SEQ ID NO: 167876 - DNA, 70 bp, Homo sapiens
tagttataaaataagcattctaaagtccaattctccctctttagttgtcaccaaaacaatcactaggatt

SEQ ID NO: 167877 - DNA, 72 bp, Homo sapiens
ataagcattctaaagtccaattctccctctttagttgtcaccaaaacaatcactaggattttctttcatagc

SEQ ID NO: 167878 - DNA, 70 bp, Homo sapiens
attctaaagtccaattctccctctttagttgtcaccaaaacaatcactaggattttctttcatagcccag

SEQ ID NO: 167879 - DNA, 70 bp, Homo sapiens
aattctccctctttagttgtcaccaaaacaatcactaggattttctttcatagcccaggctcttaaaaga

SEQ ID NO: 167880 - DNA, 72 bp, Homo sapiens
ccaaaacaatcactaggattttctttcatagcccaggctcttaaaagagaatctatagtcactttctctggt

SEQ ID NO: 167881 - DNA, 73 bp, Homo sapiens
attttctttcatagcccaggctcttaaaagagaatctatagtcactttctctggttcttcatttcccactcca

SEQ ID NO: 167882 - DNA, 77 bp, Homo sapiens
atagcccaggctcttaaaagagaatctatagtcactttctctggttcttcatttcccactccatcttccatgcacta

SEQ ID NO: 167883 - DNA, 77 bp, Homo sapiens
tcttaaaagagaatctatagtcactttctctggttcttcatttcccactccatcttccatgcactaggagcagaaac

SEQ ID NO: 167884 - DNA, 78 bp, Homo sapiens
agagaatctatagtcactttctctggttcttcatttcccactccatcttccatgcactaggagcagaaacctataaga

SEQ ID NO: 167885 - DNA, 76 bp, Homo sapiens
actttctctggttcttcatttcccactccatcttccatgcactaggagcagaaacctataagactgtctgtctaaa

SEQ ID NO: 167886 - DNA, 78 bp, Homo sapiens
atttcccactccatcttccatgcactaggagcagaaacctataagactgtctgtctaaacatttctcttcccatgctg

SEQ ID NO: 167887 - DNA, 79 bp, Homo sapiens
atcttccatgcactaggagcagaaacctataagactgtctgtctaaacatttctcttcccatgctggaaactgccattc

SEQ ID NO: 167888 - DNA, 75 bp, Homo sapiens
actaggagcagaaacctataagactgtctgtctaaacatttctcttcccatgctggaaactgccattccctctaa

SEQ ID NO: 167889 - DNA, 76 bp, Homo sapiens
gaaacctataagactgtctgtctaaacatttctcttcccatgctggaaactgccattccctctaatctcataacta

SEQ ID NO: 167890 - DNA, 76 bp, Homo sapiens
ctataagactgtctgtctaaacatttctcttcccatgctggaaactgccattccctctaatctcataactaccttg

SEQ ID NO: 167891 - DNA, 74 bp, Homo sapiens
tctaaacatttctcttcccatgctggaaactgccattccctctaatctcataactaccttgggaactaccatgt

SEQ ID NO: 167892 - DNA, 74 bp, Homo sapiens
atttctcttcccatgctggaaactgccattccctctaatctcataactaccttgggaactaccatgttctttca

SEQ ID NO: 167893 - DNA, 74 bp, Homo sapiens
atgctggaaactgccattccctctaatctcataactaccttgggaactaccatgttctttcatgaacttgtacc

SEQ ID NO: 167894 - DNA, 72 bp, Homo sapiens
aaactgccattccctctaatctcataactaccttgggaactaccatgttctttcatgaacttgtacccaaga

SEQ ID NO: 167895 - DNA, 72 bp, Homo sapiens
ttccctctaatctcataactaccttgggaactaccatgttctttcatgaacttgtacccaagacaccaacag

SEQ ID NO: 167896 - DNA, 73 bp, Homo sapiens
ataactaccttgggaactaccatgttctttcatgaacttgtacccaagacaccaacaggcccagacatagcac

SEQ ID NO: 167897 - DNA, 76 bp, Homo sapiens
tgggaactaccatgttctttcatgaacttgtacccaagacaccaacaggcccagacatagcacctagtccaagata

SEQ ID NO: 167898 - DNA, 78 bp, Homo sapiens
atgttctttcatgaacttgtacccaagacaccaacaggcccagacatagcacctagtccaagataggcagtatcagtc

SEQ ID NO: 167899 - DNA, 78 bp, Homo sapiens
tttcatgaacttgtacccaagacaccaacaggcccagacatagcacctagtccaagataggcagtatcagtccttctc

SEQ ID NO: 167900 - DNA, 78 bp, Homo sapiens
tacccaagacaccaacaggcccagacatagcacctagtccaagataggcagtatcagtccttctccaagatctttata

SEQ ID NO: 167901 - DNA, 76 bp, Homo sapiens
accaacaggcccagacatagcacctagtccaagataggcagtatcagtccttctccaagatctttatatttagagt

SEQ ID NO: 167902 - DNA, 77 bp, Homo sapiens
cagacatagcacctagtccaagataggcagtatcagtccttctccaagatctttatatttagagttgagggtagaaa

SEQ ID NO: 167903 - DNA, 75 bp, Homo sapiens
aagataggcagtatcagtccttctccaagatctttatatttagagttgagggtagaaaactgcaccatctactac

SEQ ID NO: 167904 - DNA, 76 bp, Homo sapiens
tatttagagttgagggtagaaaactgcaccatctactaccctccacatctagaaagcaggtctacagcacaaaagc

SEQ ID NO: 167905 - DNA, 76 bp, Homo sapiens
agggtagaaaactgcaccatctactaccctccacatctagaaagcaggtctacagcacaaaagccagcaactaaca

SEQ ID NO: 167906 - DNA, 77 bp, Homo sapiens
aaactgcaccatctactaccctccacatctagaaagcaggtctacagcacaaaagccagcaactaacaggcagaaaa

SEQ ID NO: 167907 - DNA, 76 bp, Homo sapiens
atctactaccctccacatctagaaagcaggtctacagcacaaaagccagcaactaacaggcagaaaaaagcaaaga

SEQ ID NO: 167908 - DNA, 78 bp, Homo sapiens
catctagaaagcaggtctacagcacaaaagccagcaactaacaggcagaaaaaagcaaagagaagtaatgagagatta

SEQ ID NO: 167909 - DNA, 76 bp, Homo sapiens
agcacaaaagccagcaactaacaggcagaaaaaagcaaagagaagtaatgagagattatcatggtagtagtaaata

SEQ ID NO: 167910 - DNA, 74 bp, Homo sapiens
aagccagcaactaacaggcagaaaaaagcaaagagaagtaatgagagattatcatggtagtagtaaataaagtc

SEQ ID NO: 167911 - DNA, 73 bp, Homo sapiens
aaaagcaaagagaagtaatgagagattatcatggtagtagtaaataaagtccctcattctagtgaatacgagg

SEQ ID NO: 167912 - DNA, 76 bp, Homo sapiens
agaagtaatgagagattatcatggtagtagtaaataaagtccctcattctagtgaatacgagggacttgtcatatc

SEQ ID NO: 167913 - DNA, 73 bp, Homo sapiens
agagattatcatggtagtagtaaataaagtccctcattctagtgaatacgagggacttgtcatatccgtaaaa

SEQ ID NO: 167914 - DNA, 71 bp, Homo sapiens
atggtagtagtaaataaagtccctcattctagtgaatacgagggacttgtcatatccgtaaaattcctaca

SEQ ID NO: 167915 - DNA, 70 bp, Homo sapiens
gtagtaaataaagtccctcattctagtgaatacgagggacttgtcatatccgtaaaattcctacaatttg

SEQ ID NO: 167916 - DNA, 70 bp, Homo sapiens
aaagtccctcattctagtgaatacgagggacttgtcatatccgtaaaattcctacaatttgggtcttcca

SEQ ID NO: 167917 - DNA, 69 bp, Homo sapiens
attctagtgaatacgagggacttgtcatatccgtaaaattcctacaatttgggtcttccaaaccttcta

SEQ ID NO: 167918 - DNA, 69 bp, Homo sapiens
atacgagggacttgtcatatccgtaaaattcctacaatttgggtcttccaaaccttctacagattccta

SEQ ID NO: 167919 - DNA, 70 bp, Homo sapiens
ttgtcatatccgtaaaattcctacaatttgggtcttccaaaccttctacagattcctagtcaaacaatcc

SEQ ID NO: 167920 - DNA, 68 bp, Homo sapiens
tacaatttgggtcttccaaaccttctacagattcctagtcaaacaatccctactttgcctaaaaccga

SEQ ID NO: 167921 - DNA, 72 bp, Homo sapiens
ttccaaaccttctacagattcctagtcaaacaatccctactttgcctaaaaccgagattgagctgattttca

SEQ ID NO: 167922 - DNA, 71 bp, Homo sapiens
aaccttctacagattcctagtcaaacaatccctactttgcctaaaaccgagattgagctgattttcaccaa

SEQ ID NO: 167923 - DNA, 70 bp, Homo sapiens
agattcctagtcaaacaatccctactttgcctaaaaccgagattgagctgattttcaccaaaaccaagaa

SEQ ID NO: 167924 - DNA, 70 bp, Homo sapiens
aaacaatccctactttgcctaaaaccgagattgagctgattttcaccaaaaccaagaaatgctgataaaa

SEQ ID NO: 167925 - DNA, 70 bp, Homo sapiens
cctactttgcctaaaaccgagattgagctgattttcaccaaaaccaagaaatgctgataaaataaccctg

SEQ ID NO: 167926 - DNA, 74 bp, Homo sapiens
ctaaaaccgagattgagctgattttcaccaaaaccaagaaatgctgataaaataaccctggcatgcaaggtgga

SEQ ID NO: 167927 - DNA, 77 bp, Homo sapiens
attgagctgattttcaccaaaaccaagaaatgctgataaaataaccctggcatgcaaggtggagtgcggtagctcac

SEQ ID NO: 167928 - DNA, 73 bp, Homo sapiens
aaaaaaaaaagcaaccctggcatgtagcatcaagatatcctcctaaactccactgaaattcttctcaattgtc

SEQ ID NO: 167929 - DNA, 75 bp, Homo sapiens
aaaaagcaaccctggcatgtagcatcaagatatcctcctaaactccactgaaattcttctcaattgtctctttat

SEQ ID NO: 167930 - DNA, 77 bp, Homo sapiens
catgtagcatcaagatatcctcctaaactccactgaaattcttctcaattgtctctttattcttaatccaagaaaca

SEQ ID NO: 167931 - DNA, 77 bp, Homo sapiens
gcatcaagatatcctcctaaactccactgaaattcttctcaattgtctctttattcttaatccaagaaacatgtaca

SEQ ID NO: 167932 - DNA, 71 bp, Homo sapiens
cctcctaaactccactgaaattcttctcaattgtctctttattcttaatccaagaaacatgtacactactt

SEQ ID NO: 167933 - DNA, 79 bp, Homo sapiens
cactgaaattcttctcaattgtctctttattcttaatccaagaaacatgtacactactttatctgacatctctgtagca

SEQ ID NO: 167934 - DNA, 80 bp, Homo sapiens
ttcttctcaattgtctctttattcttaatccaagaaacatgtacactactttatctgacatctctgtagcatctgacact

SEQ ID NO: 167935 - DNA, 78 bp, Homo sapiens
aattgtctctttattcttaatccaagaaacatgtacactactttatctgacatctctgtagcatctgacacttcccta

SEQ ID NO: 167936 - DNA, 77 bp, Homo sapiens
atccaagaaacatgtacactactttatctgacatctctgtagcatctgacacttccctacttcctccttgaaccatt

SEQ ID NO: 167937 - DNA, 79 bp, Homo sapiens
atgtacactactttatctgacatctctgtagcatctgacacttccctacttcctccttgaaccatttgcatccccagaa

SEQ ID NO: 167938 - DNA, 82 bp, Homo sapiens
tatctgacatctctgtagcatctgacacttccctacttcctccttgaaccatttgcatccccagaattccatgagtctaata

SEQ ID NO: 167939 - DNA, 76 bp, Homo sapiens
atctgacacttccctacttcctccttgaaccatttgcatccccagaattccatgagtctaatactctctttctctg

SEQ ID NO: 167940 - DNA, 75 bp, Homo sapiens
tccttgaaccatttgcatccccagaattccatgagtctaatactctctttctctggctttcctcgcttctccttt

SEQ ID NO: 167941 - DNA, 76 bp, Homo sapiens
atttgcatccccagaattccatgagtctaatactctctttctctggctttcctcgcttctccttttcagtctctta

SEQ ID NO: 167942 - DNA, 75 bp, Homo sapiens
cagaattccatgagtctaatactctctttctctggctttcctcgcttctccttttcagtctcttaagggctcctc

SEQ ID NO: 167943 - DNA, 73 bp, Homo sapiens
taatactctctttctctggctttcctcgcttctccttttcagtctcttaagggctcctctttttcctgctctg

SEQ ID NO: 167944 - DNA, 75 bp, Homo sapiens
tctggctttcctcgcttctccttttcagtctcttaagggctcctctttttcctgctctgtgataactactgacat

SEQ ID NO: 167945 - DNA, 70 bp, Homo sapiens
cttttcagtctcttaagggctcctctttttcctgctctgtgataactactgacattttcccctaagttcc

SEQ ID NO: 167946 - DNA, 70 bp, Homo sapiens
agtctcttaagggctcctctttttcctgctctgtgataactactgacattttcccctaagttccttctta

SEQ ID NO: 167947 - DNA, 69 bp, Homo sapiens
tcctctttttcctgctctgtgataactactgacattttcccctaagttccttcttagacccttttcaaa

SEQ ID NO: 167948 - DNA, 69 bp, Homo sapiens
ttttcctgctctgtgataactactgacattttcccctaagttccttcttagacccttttcaaattttca

SEQ ID NO: 167949 - DNA, 67 bp, Homo sapiens
ctgtgataactactgacattttcccctaagttccttcttagacccttttcaaattttcactttatac

SEQ ID NO: 167950 - DNA, 66 bp, Homo sapiens
gacattttcccctaagttccttcttagacccttttcaaattttcactttatactcttccttagtga

SEQ ID NO: 167951 - DNA, 66 bp, Homo sapiens
ccctaagttccttcttagacccttttcaaattttcactttatactcttccttagtgatttcatttg

SEQ ID NO: 167952 - DNA, 70 bp, Homo sapiens
cttcttagacccttttcaaattttcactttatactcttccttagtgatttcatttgtgttatcattgggc

SEQ ID NO: 167953 - DNA, 73 bp, Homo sapiens
cttttcaaattttcactttatactcttccttagtgatttcatttgtgttatcattgggcttcagagacaggac

SEQ ID NO: 167954 - DNA, 77 bp, Homo sapiens
ttccttagtgatttcatttgtgttatcattgggcttcagagacaggactggaatttgccatcctctatgtaaaactg

SEQ ID NO: 167955 - DNA, 76 bp, Homo sapiens
tcagagacaggactggaatttgccatcctctatgtaaaactggccatgttttgcaacccctgtattgtgggaataa

SEQ ID NO: 167956 - DNA, 73 bp, Homo sapiens
gactggaatttgccatcctctatgtaaaactggccatgttttgcaacccctgtattgtgggaataaactcaaa

SEQ ID NO: 167957 - DNA, 72 bp, Homo sapiens
aatttgccatcctctatgtaaaactggccatgttttgcaacccctgtattgtgggaataaactcaaataatg

SEQ ID NO: 167958 - DNA, 75 bp, Homo sapiens
tctatgtaaaactggccatgttttgcaacccctgtattgtgggaataaactcaaataatgtgtattgcattcttg

SEQ ID NO: 167959 - DNA, 73 bp, Homo sapiens
aaactggccatgttttgcaacccctgtattgtgggaataaactcaaataatgtgtattgcattcttggtcaaa

SEQ ID NO: 167960 - DNA, 77 bp, Homo sapiens
atgttttgcaacccctgtattgtgggaataaactcaaataatgtgtattgcattcttggtcaaatgcctgatacatg

SEQ ID NO: 167961 - DNA, 78 bp, Homo sapiens
tgtattgtgggaataaactcaaataatgtgtattgcattcttggtcaaatgcctgatacatggtaagcactccggaaa

SEQ ID NO: 167962 - DNA, 76 bp, Homo sapiens
gaataaactcaaataatgtgtattgcattcttggtcaaatgcctgatacatggtaagcactccggaaagggtgact

SEQ ID NO: 167963 - DNA, 75 bp, Homo sapiens
aactcaaataatgtgtattgcattcttggtcaaatgcctgatacatggtaagcactccggaaagggtgactttat

SEQ ID NO: 167964 - DNA, 77 bp, Homo sapiens
tattgcattcttggtcaaatgcctgatacatggtaagcactccggaaagggtgactttattcactccgtggccagta

SEQ ID NO: 167965 - DNA, 76 bp, Homo sapiens
ttggtcaaatgcctgatacatggtaagcactccggaaagggtgactttattcactccgtggccagtatgagaataa

SEQ ID NO: 167966 - DNA, 75 bp, Homo sapiens
aaatgcctgatacatggtaagcactccggaaagggtgactttattcactccgtggccagtatgagaataactcta

SEQ ID NO: 167967 - DNA, 72 bp, Homo sapiens
aaagggtgactttattcactccgtggccagtatgagaataactctagtcaatatccctcccaaattctagac

SEQ ID NO: 167968 - DNA, 73 bp, Homo sapiens
tttattcactccgtggccagtatgagaataactctagtcaatatccctcccaaattctagacccaaacttcca

SEQ ID NO: 167969 - DNA, 74 bp, Homo sapiens
tggccagtatgagaataactctagtcaatatccctcccaaattctagacccaaacttccagagggctactcatt

SEQ ID NO: 167970 - DNA, 74 bp, Homo sapiens
atatccctcccaaattctagacccaaacttccagagggctactcatttctacaacctgaatcatctaccatctc

SEQ ID NO: 167971 - DNA, 78 bp, Homo sapiens
aacttccagagggctactcatttctacaacctgaatcatctaccatctcttgcctgacctattcaacaagtcattgaa

SEQ ID NO: 167972 - DNA, 77 bp, Homo sapiens
atttctacaacctgaatcatctaccatctcttgcctgacctattcaacaagtcattgaatggactcccacccgtctc

SEQ ID NO: 167973 - DNA, 79 bp, Homo sapiens
acaacctgaatcatctaccatctcttgcctgacctattcaacaagtcattgaatggactcccacccgtctctgatacat

SEQ ID NO: 167974 - DNA, 77 bp, Homo sapiens
ttgcctgacctattcaacaagtcattgaatggactcccacccgtctctgatacattctccaaaccacatccagttat

SEQ ID NO: 167975 - DNA, 73 bp, Homo sapiens
acctattcaacaagtcattgaatggactcccacccgtctctgatacattctccaaaccacatccagttatttt

SEQ ID NO: 167976 - DNA, 76 bp, Homo sapiens
aagtcattgaatggactcccacccgtctctgatacattctccaaaccacatccagttatttttctatgtatgccaa

SEQ ID NO: 167977 - DNA, 76 bp, Homo sapiens
aatggactcccacccgtctctgatacattctccaaaccacatccagttatttttctatgtatgccaatggtgtgac

SEQ ID NO: 167978 - DNA, 78 bp, Homo sapiens
acccgtctctgatacattctccaaaccacatccagttatttttctatgtatgccaatggtgtgaccagagatcctgcc

SEQ ID NO: 167979 - DNA, 80 bp, Homo sapiens
tacattctccaaaccacatccagttatttttctatgtatgccaatggtgtgaccagagatcctgcctctctcctcttgta

SEQ ID NO: 167980 - DNA, 77 bp, Homo sapiens
aaaccacatccagttatttttctatgtatgccaatggtgtgaccagagatcctgcctctctcctcttgtaatcttta

SEQ ID NO: 167981 - DNA, 78 bp, Homo sapiens
ttctatgtatgccaatggtgtgaccagagatcctgcctctctcctcttgtaatctttaaacatctcttataaccttaa

SEQ ID NO: 167982 - DNA, 74 bp, Homo sapiens
ctgcctctctcctcttgtaatctttaaacatctcttataaccttaaagtctgtgctccttaacaggacatagaa

SEQ ID NO: 167983 - DNA, 70 bp, Homo sapiens
cctcttgtaatctttaaacatctcttataaccttaaagtctgtgctccttaacaggacatagaaagacct

SEQ ID NO: 167984 - DNA, 71 bp, Homo sapiens
aaacatctcttataaccttaaagtctgtgctccttaacaggacatagaaagacctttgtgacccatctggt

SEQ ID NO: 167985 - DNA, 80 bp, Homo sapiens
agtctgtgctccttaacaggacatagaaagacctttgtgacccatctggttcctgcagctgctccagacacatcttcatt

SEQ ID NO: 167986 - DNA, 80 bp, Homo sapiens
acatagaaagacctttgtgacccatctggttcctgcagctgctccagacacatcttcatttctgccatccaccccatccc

SEQ ID NO: 167987 - DNA, 83 bp, Homo sapiens
atctggttcctgcagctgctccagacacatcttcatttctgccatccaccccatccccacctctgacctccatactagacagc

SEQ ID NO: 167988 - DNA, 86 bp, Homo sapiens
tgcagctgctccagacacatcttcatttctgccatccaccccatccccacctctgacctccatactagacagctgcagttctccaa

SEQ ID NO: 167989 - DNA, 82 bp, Homo sapiens
tccagacacatcttcatttctgccatccaccccatccccacctctgacctccatactagacagctgcagttctccaaatgcc

SEQ ID NO: 167990 - DNA, 81 bp, Homo sapiens
atcttcatttctgccatccaccccatccccacctctgacctccatactagacagctgcagttctccaaatgcccatggtca

SEQ ID NO: 167991 - DNA, 80 bp, Homo sapiens
ccatccaccccatccccacctctgacctccatactagacagctgcagttctccaaatgcccatggtcactctggctttca

SEQ ID NO: 167992 - DNA, 84 bp, Homo sapiens
catccccacctctgacctccatactagacagctgcagttctccaaatgcccatggtcactctggctttcatactcactgcatcc

SEQ ID NO: 167993 - DNA, 84 bp, Homo sapiens
tctgacctccatactagacagctgcagttctccaaatgcccatggtcactctggctttcatactcactgcatccctttccttga

SEQ ID NO: 167994 - DNA, 81 bp, Homo sapiens
atactagacagctgcagttctccaaatgcccatggtcactctggctttcatactcactgcatccctttccttgaatactct

SEQ ID NO: 167995 - DNA, 81 bp, Homo sapiens
agacagctgcagttctccaaatgcccatggtcactctggctttcatactcactgcatccctttccttgaatactcttcacc

SEQ ID NO: 167996 - DNA, 78 bp, Homo sapiens
agttctccaaatgcccatggtcactctggctttcatactcactgcatccctttccttgaatactcttcaccccatcac

SEQ ID NO: 167997 - DNA, 77 bp, Homo sapiens
catggtcactctggctttcatactcactgcatccctttccttgaatactcttcaccccatcaccgcctaattaagtc

SEQ ID NO: 167998 - DNA, 76 bp, Homo sapiens
actctggctttcatactcactgcatccctttccttgaatactcttcaccccatcaccgcctaattaagtccatcat

SEQ ID NO: 167999 - DNA, 73 bp, Homo sapiens
atactcactgcatccctttccttgaatactcttcaccccatcaccgcctaattaagtccatcattcctttaaa

SEQ ID NO: 168000 - DNA, 68 bp, Homo sapiens
atccctttccttgaatactcttcaccccatcaccgcctaattaagtccatcattcctttaaaacttcc

SEQ ID NO: 168001 - DNA, 69 bp, Homo sapiens
tttccttgaatactcttcaccccatcaccgcctaattaagtccatcattcctttaaaacttccttcagg

SEQ ID NO: 168002 - DNA, 69 bp, Homo sapiens
atcaccgcctaattaagtccatcattcctttaaaacttccttcaggtgtcacttcagccagaaaccttt

SEQ ID NO: 168003 - DNA, 71 bp, Homo sapiens
ctaattaagtccatcattcctttaaaacttccttcaggtgtcacttcagccagaaaccttttgctgacaac

SEQ ID NO: 168004 - DNA, 70 bp, Homo sapiens
atcattcctttaaaacttccttcaggtgtcacttcagccagaaaccttttgctgacaacctttctatccc

SEQ ID NO: 168005 - DNA, 71 bp, Homo sapiens
tttaaaacttccttcaggtgtcacttcagccagaaaccttttgctgacaacctttctatccccagctggcc

SEQ ID NO: 168006 - DNA, 72 bp, Homo sapiens
ttcaggtgtcacttcagccagaaaccttttgctgacaacctttctatccccagctggccgggtttgtcccaa

SEQ ID NO: 168007 - DNA, 72 bp, Homo sapiens
ttcagccagaaaccttttgctgacaacctttctatccccagctggccgggtttgtcccaagttctcatatta

SEQ ID NO: 168008 - DNA, 71 bp, Homo sapiens
aaccttttgctgacaacctttctatccccagctggccgggtttgtcccaagttctcatattagactgtcta

SEQ ID NO: 168009 - DNA, 74 bp, Homo sapiens
tttgctgacaacctttctatccccagctggccgggtttgtcccaagttctcatattagactgtctagatccctc

SEQ ID NO: 168010 - DNA, 76 bp, Homo sapiens
acctttctatccccagctggccgggtttgtcccaagttctcatattagactgtctagatccctcctgcagcactga

SEQ ID NO: 168011 - DNA, 79 bp, Homo sapiens
agctggccgggtttgtcccaagttctcatattagactgtctagatccctcctgcagcactgatcacacagtatttagac

SEQ ID NO: 168012 - DNA, 80 bp, Homo sapiens
aagttctcatattagactgtctagatccctcctgcagcactgatcacacagtatttagaccacaatttacttaagagcaa

SEQ ID NO: 168013 - DNA, 79 bp, Homo sapiens
tagatccctcctgcagcactgatcacacagtatttagaccacaatttacttaagagcaatgatgacattttatttgttt

SEQ ID NO: 168014 - DNA, 78 bp, Homo sapiens
cctcctgcagcactgatcacacagtatttagaccacaatttacttaagagcaatgatgacattttatttgtttttata

SEQ ID NO: 168015 - DNA, 76 bp, Homo sapiens
ctgatcacacagtatttagaccacaatttacttaagagcaatgatgacattttatttgtttttatagtcccagcac

SEQ ID NO: 168016 - DNA, 74 bp, Homo sapiens
cagtatttagaccacaatttacttaagagcaatgatgacattttatttgtttttatagtcccagcacttagcag

SEQ ID NO: 168017 - DNA, 77 bp, Homo sapiens
caatttacttaagagcaatgatgacattttatttgtttttatagtcccagcacttagcagtatctgacacacagctt

SEQ ID NO: 168018 - DNA, 79 bp, Homo sapiens
ttaagagcaatgatgacattttatttgtttttatagtcccagcacttagcagtatctgacacacagctttaactcaaga

SEQ ID NO: 168019 - DNA, 80 bp, Homo sapiens
tatttgtttttatagtcccagcacttagcagtatctgacacacagctttaactcaagatgaaatcatctatgtatctctt

SEQ ID NO: 168020 - DNA, 79 bp, Homo sapiens
tttttatagtcccagcacttagcagtatctgacacacagctttaactcaagatgaaatcatctatgtatctcttttttc

SEQ ID NO: 168021 - DNA, 81 bp, Homo sapiens
cacttagcagtatctgacacacagctttaactcaagatgaaatcatctatgtatctcttttttcctctcatcatccaaaaa

SEQ ID NO: 168022 - DNA, 80 bp, Homo sapiens
gtatctgacacacagctttaactcaagatgaaatcatctatgtatctcttttttcctctcatcatccaaaaagaattcca

SEQ ID NO: 168023 - DNA, 77 bp, Homo sapiens
gacacacagctttaactcaagatgaaatcatctatgtatctcttttttcctctcatcatccaaaaagaattccaaaa

SEQ ID NO: 168024 - DNA, 74 bp, Homo sapiens
taactcaagatgaaatcatctatgtatctcttttttcctctcatcatccaaaaagaattccaaaagaattttta

SEQ ID NO: 168025 - DNA, 75 bp, Homo sapiens
gatgaaatcatctatgtatctcttttttcctctcatcatccaaaaagaattccaaaagaatttttatattctgga

SEQ ID NO: 168026 - DNA, 70 bp, Homo sapiens
tctatgtatctcttttttcctctcatcatccaaaaagaattccaaaagaatttttatattctggaaaaat

SEQ ID NO: 168027 - DNA, 70 bp, Homo sapiens
tttcctctcatcatccaaaaagaattccaaaagaatttttatattctggaaaaattaatcactaaagata

SEQ ID NO: 168028 - DNA, 67 bp, Homo sapiens
agaattccaaaagaatttttatattctggaaaaattaatcactaaagataaatctagaaaaatacta

SEQ ID NO: 168029 - DNA, 67 bp, Homo sapiens
ccaaaagaatttttatattctggaaaaattaatcactaaagataaatctagaaaaatactactggat

SEQ ID NO: 168030 - DNA, 70 bp, Homo sapiens
atattctggaaaaattaatcactaaagataaatctagaaaaatactactggattattcaattcaccagtt

SEQ ID NO: 168031 - DNA, 70 bp, Homo sapiens
ctggaaaaattaatcactaaagataaatctagaaaaatactactggattattcaattcaccagttttcta

SEQ ID NO: 168032 - DNA, 71 bp, Homo sapiens
cactaaagataaatctagaaaaatactactggattattcaattcaccagttttctaacaactctcagtaac

SEQ ID NO: 168033 - DNA, 71 bp, Homo sapiens
aatctagaaaaatactactggattattcaattcaccagttttctaacaactctcagtaaccacatatttcc

SEQ ID NO: 168034 - DNA, 72 bp, Homo sapiens
gaaaaatactactggattattcaattcaccagttttctaacaactctcagtaaccacatatttcctgagact

SEQ ID NO: 168035 - DNA, 74 bp, Homo sapiens
ttcaattcaccagttttctaacaactctcagtaaccacatatttcctgagactttttagtatatgatattagaa

SEQ ID NO: 168036 - DNA, 70 bp, Homo sapiens
cagttttctaacaactctcagtaaccacatatttcctgagactttttagtatatgatattagaaaaaaag

SEQ ID NO: 168037 - DNA, 71 bp, Homo sapiens
acaactctcagtaaccacatatttcctgagactttttagtatatgatattagaaaaaaagtttgtaaggca

SEQ ID NO: 168038 - DNA, 74 bp, Homo sapiens
cctgagactttttagtatatgatattagaaaaaaagtttgtaaggcaatttatacacatatgatctatggcctc

SEQ ID NO: 168039 - DNA, 73 bp, Homo sapiens
ttagtatatgatattagaaaaaaagtttgtaaggcaatttatacacatatgatctatggcctctaaaaactgt

SEQ ID NO: 168040 - DNA, 71 bp, Homo sapiens
gatattagaaaaaaagtttgtaaggcaatttatacacatatgatctatggcctctaaaaactgttttacaa

SEQ ID NO: 168041 - DNA, 72 bp, Homo sapiens
aaaagtttgtaaggcaatttatacacatatgatctatggcctctaaaaactgttttacaatagtagtgtcag

SEQ ID NO: 168042 - DNA, 78 bp, Homo sapiens
gtaaggcaatttatacacatatgatctatggcctctaaaaactgttttacaatagtagtgtcagtgtagtcatacatg

SEQ ID NO: 168043 - DNA, 79 bp, Homo sapiens
atacacatatgatctatggcctctaaaaactgttttacaatagtagtgtcagtgtagtcatacatgtacacattcaaaa

SEQ ID NO: 168044 - DNA, 78 bp, Homo sapiens
tgatctatggcctctaaaaactgttttacaatagtagtgtcagtgtagtcatacatgtacacattcaaaacaaagaga

SEQ ID NO: 168045 - DNA, 74 bp, Homo sapiens
atggcctctaaaaactgttttacaatagtagtgtcagtgtagtcatacatgtacacattcaaaacaaagagaaa

SEQ ID NO: 168046 - DNA, 77 bp, Homo sapiens
actgttttacaatagtagtgtcagtgtagtcatacatgtacacattcaaaacaaagagaaaagcatattgtgaacca

SEQ ID NO: 168047 - DNA, 78 bp, Homo sapiens
acaatagtagtgtcagtgtagtcatacatgtacacattcaaaacaaagagaaaagcatattgtgaaccaaagacatac

SEQ ID NO: 168048 - DNA, 76 bp, Homo sapiens
gtcatacatgtacacattcaaaacaaagagaaaagcatattgtgaaccaaagacatacttttttctacattctaca

SEQ ID NO: 168049 - DNA, 71 bp, Homo sapiens
cattcaaaacaaagagaaaagcatattgtgaaccaaagacatacttttttctacattctacaagttttctg

SEQ ID NO: 168050 - DNA, 69 bp, Homo sapiens
aacaaagagaaaagcatattgtgaaccaaagacatacttttttctacattctacaagttttctgttgtt

SEQ ID NO: 168051 - DNA, 73 bp, Homo sapiens
agcatattgtgaaccaaagacatacttttttctacattctacaagttttctgttgttttgtctgtggatggtg

SEQ ID NO: 168052 - DNA, 72 bp, Homo sapiens
ttgtgaaccaaagacatacttttttctacattctacaagttttctgttgttttgtctgtggatggtggtaca

SEQ ID NO: 168053 - DNA, 71 bp, Homo sapiens
gacatacttttttctacattctacaagttttctgttgttttgtctgtggatggtggtacaggttatgttta

SEQ ID NO: 168054 - DNA, 69 bp, Homo sapiens
tttttctacattctacaagttttctgttgttttgtctgtggatggtggtacaggttatgtttattttct

SEQ ID NO: 168055 - DNA, 73 bp, Homo sapiens
ttgtctgtggatggtggtacaggttatgtttattttcttatttttctctgttctataatgggcatattttaca

SEQ ID NO: 168056 - DNA, 70 bp, Homo sapiens
ttattttcttatttttctctgttctataatgggcatattttacattttacaagccaaagaaatgccccaa

SEQ ID NO: 168057 - DNA, 70 bp, Homo sapiens
atttttctctgttctataatgggcatattttacattttacaagccaaagaaatgccccaataaacaacaa

SEQ ID NO: 168058 - DNA, 75 bp, Homo sapiens
caacaacaaaaccctattaggataaatcagctacaatcaggcttaggcattgtgccaaatgttgggcatggttta

SEQ ID NO: 168059 - DNA, 75 bp, Homo sapiens
aaaaccctattaggataaatcagctacaatcaggcttaggcattgtgccaaatgttgggcatggtttatctcact

SEQ ID NO: 168060 - DNA, 76 bp, Homo sapiens
attaggataaatcagctacaatcaggcttaggcattgtgccaaatgttgggcatggtttatctcactttaaacctc

SEQ ID NO: 168061 - DNA, 77 bp, Homo sapiens
atcagctacaatcaggcttaggcattgtgccaaatgttgggcatggtttatctcactttaaacctctctatgaaaag

SEQ ID NO: 168062 - DNA, 73 bp, Homo sapiens
gcttaggcattgtgccaaatgttgggcatggtttatctcactttaaacctctctatgaaaaggtactataaat

SEQ ID NO: 168063 - DNA, 72 bp, Homo sapiens
attgtgccaaatgttgggcatggtttatctcactttaaacctctctatgaaaaggtactataaatttgccca

SEQ ID NO: 168064 - DNA, 70 bp, Homo sapiens
caaatgttgggcatggtttatctcactttaaacctctctatgaaaaggtactataaatttgcccacttta

SEQ ID NO: 168065 - DNA, 68 bp, Homo sapiens
gcatggtttatctcactttaaacctctctatgaaaaggtactataaatttgcccactttataaaaaag

SEQ ID NO: 168066 - DNA, 71 bp, Homo sapiens
actgaggctcagagggattgaaaaatttgcccaaggttttaagtcaggtcttaatccatgccttctcaaag

SEQ ID NO: 168067 - DNA, 70 bp, Homo sapiens
agagggattgaaaaatttgcccaaggttttaagtcaggtcttaatccatgccttctcaaagttcattatc

SEQ ID NO: 168068 - DNA, 71 bp, Homo sapiens
gattgaaaaatttgcccaaggttttaagtcaggtcttaatccatgccttctcaaagttcattatcctctaa
